United States Patent Application Publication US 2005/0255487 A1 - sequence listing, part 63

SEQ ID NO: 1727976 - RNA, 19 nt, Homo sapiens
  misc_RNA (1)...(19): siRNA sense strand
gcacuggaagagauggaaa

SEQ ID NO: 1727977 - RNA, 19 nt, Homo sapiens
  misc_RNA (1)...(19): siRNA sense strand
gauggcagaugugguguac

SEQ ID NO: 1727978 - RNA, 19 nt, Homo sapiens
  misc_RNA (1)...(19): siRNA sense strand
caacugcccagaaccaaag

SEQ ID NO: 1727979 - RNA, 19 nt, Homo sapiens
  misc_RNA (1)...(19): siRNA sense strand
cuggcuguaugcaauauuu

SEQ ID NO: 1727980 - RNA, 19 nt, Homo sapiens
  misc_RNA (1)...(19): siRNA sense strand
uguacuggcuguaugcaau

SEQ ID NO: 1727981 - RNA, 19 nt, Homo sapiens
  misc_RNA (1)...(19): siRNA sense strand
ggcuagagaagaacucaaa

SEQ ID NO: 1727982 - RNA, 19 nt, Homo sapiens
  misc_RNA (1)...(19): siRNA sense strand
aguaaggaguggcuagaga

SEQ ID NO: 1727983 - RNA, 19 nt, Homo sapiens
  misc_RNA (1)...(19): siRNA sense strand
ccaacacagagcuagauuu

SEQ ID NO: 1727984 - RNA, 19 nt, Homo sapiens
  misc_RNA (1)...(19): siRNA sense strand
acacagagcuagauuuugg

SEQ ID NO: 1727985 - RNA, 19 nt, Homo sapiens
  misc_RNA (1)...(19): siRNA sense strand
cugcaaagccugucugaag

SEQ ID NO: 1727986 - RNA, 19 nt, Homo sapiens
  misc_RNA (1)...(19): siRNA sense strand
uagagcaaacccuuacaaa

SEQ ID NO: 1727987 - RNA, 19 nt, Homo sapiens
  misc_RNA (1)...(19): siRNA sense strand
ggauguggaaucacuguca

SEQ ID NO: 1727988 - RNA, 19 nt, Homo sapiens
  misc_RNA (1)...(19): siRNA sense strand
ccaggaaaucuuggacuuu

SEQ ID NO: 1727989 - RNA, 19 nt, Homo sapiens
  misc_RNA (1)...(19): siRNA sense strand
caaagagcugcccauguug

SEQ ID NO: 1727990 - RNA, 19 nt, Homo sapiens
  misc_RNA (1)...(19): siRNA sense strand
gaaggcacuggaagagaug

SEQ ID NO: 1727991 - RNA, 19 nt, Homo sapiens
  misc_RNA (1)...(19): siRNA sense strand
guagugaaugcauguacuu

SEQ ID NO: 1727992 - RNA, 19 nt, Homo sapiens
  misc_RNA (1)...(19): siRNA sense strand
cauggguucucucucuaga

SEQ ID NO: 1727993 - RNA, 19 nt, Homo sapiens
  misc_RNA (1)...(19): siRNA sense strand
ucaagcuucucccaacaca

SEQ ID NO: 1727994 - RNA, 19 nt, Homo sapiens
  misc_RNA (1)...(19): siRNA sense strand
ugacauguacuggcuguau

SEQ ID NO: 1727995 - RNA, 19 nt, Homo sapiens
  misc_RNA (1)...(19): siRNA sense strand
uguaacaagaugacaugua

SEQ ID NO: 1727996 - RNA, 19 nt, Homo sapiens
  misc_RNA (1)...(19): siRNA sense strand
cuagagaagaacucaaaga

SEQ ID NO: 1727997 - RNA, 19 nt, Homo sapiens
  misc_RNA (1)...(19): siRNA sense strand
gaggagcugcuggaucuga

SEQ ID NO: 1727998 - RNA, 19 nt, Homo sapiens
  misc_RNA (1)...(19): siRNA sense strand
aguggaagcagaguuauuu

SEQ ID NO: 1727999 - RNA, 19 nt, Homo sapiens
  misc_RNA (1)...(19): siRNA sense strand
ucaaagagcugcccauguu

SEQ ID NO: 1728000 - RNA, 19 nt, Homo sapiens
  misc_RNA (1)...(19): siRNA sense strand
gaucagagauggccagguu

SEQ ID NO: 1728001 - RNA, 19 nt, Homo sapiens
  misc_RNA (1)...(19): siRNA sense strand
uggaagagauggaaaguaa

SEQ ID NO: 1728002 - RNA, 19 nt, Homo sapiens
  misc_RNA (1)...(19): siRNA sense strand
ccacagaauuucaagauau

SEQ ID NO: 1728003 - RNA, 19 nt, Homo sapiens
  misc_RNA (1)...(19): siRNA sense strand
gaacucccauagagaaauu

SEQ ID NO: 1728004 - RNA, 19 nt, Homo sapiens
  misc_RNA (1)...(19): siRNA sense strand
gaucaaagguaugguaaga

SEQ ID NO: 1728005 - RNA, 19 nt, Homo sapiens
  misc_RNA (1)...(19): siRNA sense strand
gagcaaacccuuacaaaca

SEQ ID NO: 1728006 - RNA, 19 nt, Homo sapiens
  misc_RNA (1)...(19): siRNA sense strand
uaaggugacugcagagaaa

SEQ ID NO: 1728007 - RNA, 19 nt, Homo sapiens
  misc_RNA (1)...(19): siRNA sense strand
gagaaaccaggaucuauuu

SEQ ID NO: 1728008 - RNA, 19 nt, Homo sapiens
  misc_RNA (1)...(19): siRNA sense strand
guaagagagugauucagaa

SEQ ID NO: 1728009 - RNA, 19 nt, Homo sapiens
  misc_RNA (1)...(19): siRNA sense strand
ggagaaaccaggaucuauu

SEQ ID NO: 1728010 - RNA, 19 nt, Homo sapiens
  misc_RNA (1)...(19): siRNA sense strand
gaucugauguagaccaaga

SEQ ID NO: 1728011 - RNA, 19 nt, Homo sapiens
  misc_RNA (1)...(19): siRNA sense strand
guaacaagaugacauguac

SEQ ID NO: 1728012 - RNA, 19 nt, Homo sapiens
  misc_RNA (1)...(19): siRNA sense strand
gaaucacugucaaaucuga

SEQ ID NO: 1728013 - RNA, 19 nt, Homo sapiens
  misc_RNA (1)...(19): siRNA sense strand
uuaauggacuuacgaaaug

SEQ ID NO: 1728014 - RNA, 19 nt, Homo sapiens
  misc_RNA (1)...(19): siRNA sense strand
ucaaagguaugguaagaga

SEQ ID NO: 1728015 - RNA, 19 nt, Homo sapiens
  misc_RNA (1)...(19): siRNA sense strand
cgauggagaugaauuuaga

SEQ ID NO: 1728016 - RNA, 19 nt, Homo sapiens
  misc_RNA (1)...(19): siRNA sense strand
gugagaagcuggguaguga

SEQ ID NO: 1728017 - RNA, 19 nt, Homo sapiens
  misc_RNA (1)...(19): siRNA sense strand
gcaaacccuuacaaacauu

SEQ ID NO: 1728018 - RNA, 19 nt, Homo sapiens
  misc_RNA (1)...(19): siRNA sense strand
gaaauuagacggauguaac

SEQ ID NO: 1728019 - RNA, 19 nt, Homo sapiens
  misc_RNA (1)...(19): siRNA sense strand
gcacuuagacaaccuaugg

SEQ ID NO: 1728020 - RNA, 19 nt, Homo sapiens
  misc_RNA (1)...(19): siRNA sense strand
aagaggaaauuguggauga

SEQ ID NO: 1728021 - RNA, 19 nt, Homo sapiens
  misc_RNA (1)...(19): siRNA sense strand
gguaagagagugauucaga

SEQ ID NO: 1728022 - RNA, 19 nt, Homo sapiens
  misc_RNA (1)...(19): siRNA sense strand
gagaagcucaggaggauga

SEQ ID NO: 1728023 - RNA, 19 nt, Homo sapiens
  misc_RNA (1)...(19): siRNA sense strand
ggucaaagaguuaguggaa

SEQ ID NO: 1728024 - RNA, 19 nt, Homo sapiens
  misc_RNA (1)...(19): siRNA sense strand
gaaggacuacuuugaaauc

SEQ ID NO: 1728025 - RNA, 19 nt, Homo sapiens
  misc_RNA (1)...(19): siRNA sense strand
ugaucaagcucagcagaua

SEQ ID NO: 1728026 - RNA, 19 nt, Homo sapiens
  misc_RNA (1)...(19): siRNA sense strand
gccacagaauuucaagaua

SEQ ID NO: 1728027 - RNA, 19 nt, Homo sapiens
  misc_RNA (1)...(19): siRNA sense strand
gaaauuaauggacuuacga

SEQ ID NO: 1728028 - RNA, 19 nt, Homo sapiens
  misc_RNA (1)...(19): siRNA sense strand
caggaaaucuuggacuuug

SEQ ID NO: 1728029 - RNA, 19 nt, Homo sapiens
  misc_RNA (1)...(19): siRNA sense strand
gaugcaauuucuuaaggaa

SEQ ID NO: 1728030 - RNA, 19 nt, Homo sapiens
  misc_RNA (1)...(19): siRNA sense strand
ugaauauugucucuccuuu

SEQ ID NO: 1728031 - RNA, 19 nt, Homo sapiens
  misc_RNA (1)...(19): siRNA sense strand
caaaucugauccaggaaau

SEQ ID NO: 1728032 - RNA, 19 nt, Homo sapiens
  misc_RNA (1)...(19): siRNA sense strand
aagaugagguagaagacua

SEQ ID NO: 1728033 - RNA, 19 nt, Homo sapiens
  misc_RNA (1)...(19): siRNA sense strand
ggaugcaauuucuuaagga

SEQ ID NO: 1728034 - RNA, 19 nt, Homo sapiens
  misc_RNA (1)...(19): siRNA sense strand
aaaccaggaucuauuugga

SEQ ID NO: 1728035 - RNA, 19 nt, Homo sapiens
  misc_RNA (1)...(19): siRNA sense strand
guuaguggaagcagaguua

SEQ ID NO: 1728036 - RNA, 19 nt, Homo sapiens
  misc_RNA (1)...(19): siRNA sense strand
uggaaucacugucaaaucu

SEQ ID NO: 1728037 - RNA, 19 nt, Homo sapiens
  misc_RNA (1)...(19): siRNA sense strand
ggaagagacccuagcauac

SEQ ID NO: 1728038 - RNA, 19 nt, Homo sapiens
  misc_RNA (1)...(19): siRNA sense strand
cugaaggacuacuuugaaa

SEQ ID NO: 1728039 - RNA, 19 nt, Homo sapiens
  misc_RNA (1)...(19): siRNA sense strand
cuagcauacuugaauauug

SEQ ID NO: 1728040 - RNA, 19 nt, Homo sapiens
  misc_RNA (1)...(19): siRNA sense strand
gugaaugcauguacuucuu

SEQ ID NO: 1728041 - RNA, 19 nt, Homo sapiens
  misc_RNA (1)...(19): siRNA sense strand
gaucaagcucagcagauaa

SEQ ID NO: 1728042 - RNA, 19 nt, Homo sapiens
  misc_RNA (1)...(19): siRNA sense strand
gaagagacccuagcauacu

SEQ ID NO: 1728043 - RNA, 19 nt, Homo sapiens
  misc_RNA (1)...(19): siRNA sense strand
gaagcuggguagugaaugc

SEQ ID NO: 1728044 - RNA, 19 nt, Homo sapiens
  misc_RNA (1)...(19): siRNA sense strand
ggagaugaauuuagaaaag

SEQ ID NO: 1728045 - RNA, 19 nt, Homo sapiens
  misc_RNA (1)...(19): siRNA sense strand
agacggauguaacaagaug

SEQ ID NO: 1728046 - RNA, 19 nt, Homo sapiens
  misc_RNA (1)...(19): siRNA sense strand
ggaugaggcuaauaaaaga

SEQ ID NO: 1728047 - RNA, 19 nt, Homo sapiens
  misc_RNA (1)...(19): siRNA sense strand
cagaguuauuugcccguua

SEQ ID NO: 1728048 - RNA, 19 nt, Homo sapiens
  misc_RNA (1)...(19): siRNA sense strand
ggacuuacgaaaugaauac

SEQ ID NO: 1728049 - RNA, 19 nt, Homo sapiens
  misc_RNA (1)...(19): siRNA sense strand
gaagagauggaaaguaagg

SEQ ID NO: 1728050 - RNA, 19 nt, Homo sapiens
  misc_RNA (1)...(19): siRNA sense strand
aggaagagacccuagcaua

SEQ ID NO: 1728051 - RNA, 19 nt, Homo sapiens
  misc_RNA (1)...(19): siRNA sense strand
gggaagaugagguagaaga

SEQ ID NO: 1728052 - RNA, 19 nt, Homo sapiens
  misc_RNA (1)...(19): siRNA sense strand
guacuggcuguaugcaaua

SEQ ID NO: 1728053 - RNA, 19 nt, Homo sapiens
  misc_RNA (1)...(19): siRNA sense strand
uuagacggauguaacaaga

SEQ ID NO: 1728054 - RNA, 19 nt, Homo sapiens
  misc_RNA (1)...(19): siRNA sense strand
guaaggaguggcuagagaa

SEQ ID NO: 1728055 - RNA, 19 nt, Homo sapiens
  misc_RNA (1)...(19): siRNA sense strand
agaaggcacuggaagagau

SEQ ID NO: 1728056 - RNA, 19 nt, Homo sapiens
  misc_RNA (1)...(19): siRNA sense strand
caggaucuauuuggauuug

SEQ ID NO: 1728057 - RNA, 19 nt, Homo sapiens
  misc_RNA (1)...(19): siRNA sense strand
gaaauccagaucagagaug

SEQ ID NO: 1728058 - RNA, 19 nt, Homo sapiens
  misc_RNA (1)...(19): siRNA sense strand
ggaaauuguggaugagaga

SEQ ID NO: 1728059 - RNA, 19 nt, Homo sapiens
  misc_RNA (1)...(19): siRNA sense strand
gaaaccaggaucuauuugg

SEQ ID NO: 1728060 - RNA, 19 nt, Homo sapiens
  misc_RNA (1)...(19): siRNA sense strand
gacauguacuggcuguaug

SEQ ID NO: 1728061 - RNA, 19 nt, Homo sapiens
  misc_RNA (1)...(19): siRNA sense strand
gauguggaaucacugucaa

SEQ ID NO: 1728062 - RNA, 19 nt, Homo sapiens
  misc_RNA (1)...(19): siRNA sense strand
uggaggagcugcuggaucu

SEQ ID NO: 1728063 - RNA, 19 nt, Homo sapiens
  misc_RNA (1)...(19): siRNA sense strand
gacccuagcauacuugaau

SEQ ID NO: 1728064 - RNA, 19 nt, Homo sapiens
  misc_RNA (1)...(19): siRNA sense strand
aggaguggcuagagaagaa

SEQ ID NO: 1728065 - RNA, 19 nt, Homo sapiens
  misc_RNA (1)...(19): siRNA sense strand
gcaagcggaugaggcuaau

SEQ ID NO: 1728066 - RNA, 19 nt, Homo sapiens
  misc_RNA (1)...(19): siRNA sense strand
ggugacugcagagaaauua

SEQ ID NO: 1728067 - RNA, 19 nt, Homo sapiens
  misc_RNA (1)...(19): siRNA sense strand
caacacagagcuagauuuu

SEQ ID NO: 1728068 - RNA, 19 nt, Homo sapiens
  misc_RNA (1)...(19): siRNA sense strand
gcucaagcuucucccaaca

SEQ ID NO: 1728069 - RNA, 19 nt, Homo sapiens
  misc_RNA (1)...(19): siRNA sense strand
gacgauauuugggaagaug

SEQ ID NO: 1728070 - RNA, 19 nt, Homo sapiens
  misc_RNA (1)...(19): siRNA sense strand
gagauggccagguucaaug

SEQ ID NO: 1728071 - RNA, 19 nt, Homo sapiens
  misc_RNA (1)...(19): siRNA sense strand
gcaaagccugucugaagga

SEQ ID NO: 1728072 - RNA, 19 nt, Homo sapiens
  misc_RNA (1)...(19): siRNA sense strand
gcaauauuucuguuggauu

SEQ ID NO: 1728073 - RNA, 19 nt, Homo sapiens
  misc_RNA (1)...(19): siRNA sense strand
uauuuacgauggagaugaa

SEQ ID NO: 1728074 - RNA, 19 nt, Homo sapiens
  misc_RNA (1)...(19): siRNA sense strand
ggauguugacgacgauauu

SEQ ID NO: 1728075 - RNA, 19 nt, Homo sapiens
  misc_RNA (1)...(19): siRNA sense strand
uaauggacuuacgaaauga

SEQ ID NO: 1728076 - RNA, 19 nt, Homo sapiens
  misc_RNA (1)...(19): siRNA sense strand
cagagaaauuaauggacuu

SEQ ID NO: 1728077 - RNA, 19 nt, Homo sapiens
  misc_RNA (1)...(19): siRNA sense strand
guaaggugacugcagagaa

SEQ ID NO: 1728078 - RNA, 19 nt, Homo sapiens
  misc_RNA (1)...(19): siRNA sense strand
uggcagaugugguguacug

SEQ ID NO: 1728079 - RNA, 19 nt, Homo sapiens
  misc_RNA (1)...(19): siRNA sense strand
ggaaaucuuggacuuugau

SEQ ID NO: 1728080 - RNA, 19 nt, Homo sapiens
  misc_RNA (1)...(19): siRNA sense strand
gauguugacgacgauauuu

SEQ ID NO: 1728081 - RNA, 19 nt, Homo sapiens
  misc_RNA (1)...(19): siRNA sense strand
aagcggaugaggcuaauaa

SEQ ID NO: 1728082 - RNA, 19 nt, Homo sapiens
  misc_RNA (1)...(19): siRNA sense strand
agaguuauuugcccguuau

SEQ ID NO: 1728083 - RNA, 19 nt, Homo sapiens
  misc_RNA (1)...(19): siRNA sense strand
aagccugucugaaggacua

SEQ ID NO: 1728084 - RNA, 19 nt, Homo sapiens
  misc_RNA (1)...(19): siRNA sense strand
gagaagcuggguagugaau

SEQ ID NO: 1728085 - RNA, 19 nt, Homo sapiens
  misc_RNA (1)...(19): siRNA sense strand
agagagcagugcaggaugu

SEQ ID NO: 1728086 - RNA, 19 nt, Homo sapiens
  misc_RNA (1)...(19): siRNA sense strand
aagagacccuagcauacuu

SEQ ID NO: 1728087 - RNA, 19 nt, Homo sapiens
  misc_RNA (1)...(19): siRNA sense strand
ucaaaucugauccaggaaa

SEQ ID NO: 1728088 - RNA, 19 nt, Homo sapiens
  misc_RNA (1)...(19): siRNA sense strand
ugauguagaccaagaggaa

SEQ ID NO: 1728089 - RNA, 19 nt, Homo sapiens
  misc_RNA (1)...(19): siRNA sense strand
uggauuugccacagaauuu

SEQ ID NO: 1728090 - RNA, 19 nt, Homo sapiens
  misc_RNA (1)...(19): siRNA sense strand
guggaacucccauagagaa

SEQ ID NO: 1728091 - RNA, 19 nt, Homo sapiens
  misc_RNA (1)...(19): siRNA sense strand
gcacuggaagagauggaaa

SEQ ID NO: 1728092 - RNA, 19 nt, Homo sapiens
  misc_RNA (1)...(19): siRNA sense strand
gauggcagaugugguguac

SEQ ID NO: 1728093 - RNA, 19 nt, Homo sapiens
  misc_RNA (1)...(19): siRNA sense strand
uuacgauggagaugaauuu

SEQ ID NO: 1728094 - RNA, 19 nt, Homo sapiens
  misc_RNA (1)...(19): siRNA sense strand
aguaaggaguggcuagaga

SEQ ID NO: 1728095 - RNA, 19 nt, Homo sapiens
  misc_RNA (1)...(19): siRNA sense strand
cuggcuguaugcaauauuu

SEQ ID NO: 1728096 - RNA, 19 nt, Homo sapiens
  misc_RNA (1)...(19): siRNA sense strand
uguacuggcuguaugcaau

SEQ ID NO: 1728097 - RNA, 19 nt, Homo sapiens
  misc_RNA (1)...(19): siRNA sense strand
ucgagaagcucaggaggau

SEQ ID NO: 1728098 - RNA, 19 nt, Homo sapiens
  misc_RNA (1)...(19): siRNA sense strand
ggcuagagaagaacucaaa

SEQ ID NO: 1728099 - RNA, 19 nt, Homo sapiens
  misc_RNA (1)...(19): siRNA sense strand
ucaaagagcugcccauguu

SEQ ID NO: 1728100 - RNA, 19 nt, Homo sapiens
  misc_RNA (1)...(19): siRNA sense strand
gaucagagauggccagguu

SEQ ID NO: 1728101 - RNA, 19 nt, Homo sapiens
  misc_RNA (1)...(19): siRNA sense strand
uggaagagauggaaaguaa

SEQ ID NO: 1728102 - RNA, 19 nt, Homo sapiens
  misc_RNA (1)...(19): siRNA sense strand
ccacagaauuucaagauau

SEQ ID NO: 1728103 - RNA, 19 nt, Homo sapiens
  misc_RNA (1)...(19): siRNA sense strand
gaacucccauagagaaauu

SEQ ID NO: 1728104 - RNA, 19 nt, Homo sapiens
  misc_RNA (1)...(19): siRNA sense strand
gaucaaagguaugguaaga

SEQ ID NO: 1728105 - RNA, 19 nt, Homo sapiens
  misc_RNA (1)...(19): siRNA sense strand
gagcaaacccuuacaaaca

SEQ ID NO: 1728106 - RNA, 19 nt, Homo sapiens
  misc_RNA (1)...(19): siRNA sense strand
uaaggugacugcagagaaa

SEQ ID NO: 1728107 - RNA, 19 nt, Homo sapiens
  misc_RNA (1)...(19): siRNA sense strand
gagaaaccaggaucuauuu

SEQ ID NO: 1728108 - RNA, 19 nt, Homo sapiens
  misc_RNA (1)...(19): siRNA sense strand
guaagagagugauucagaa

SEQ ID NO: 1728109 - RNA, 19 nt, Homo sapiens
  misc_RNA (1)...(19): siRNA sense strand
ggagaaaccaggaucuauu

SEQ ID NO: 1728110 - RNA, 19 nt, Homo sapiens
  misc_RNA (1)...(19): siRNA sense strand
gaucugauguagaccaaga

SEQ ID NO: 1728111 - RNA, 19 nt, Homo sapiens
  misc_RNA (1)...(19): siRNA sense strand
guaacaagaugacauguac

SEQ ID NO: 1728112 - RNA, 19 nt, Homo sapiens
  misc_RNA (1)...(19): siRNA sense strand
gaaucacugucaaaucuga

SEQ ID NO: 1728113 - RNA, 19 nt, Homo sapiens
  misc_RNA (1)...(19): siRNA sense strand
uuaauggacuuacgaaaug

SEQ ID NO: 1728114 - RNA, 19 nt, Homo sapiens
  misc_RNA (1)...(19): siRNA sense strand
ucaaagguaugguaagaga

SEQ ID NO: 1728115 - RNA, 19 nt, Homo sapiens
  misc_RNA (1)...(19): siRNA sense strand
cgauggagaugaauuuaga

SEQ ID NO: 1728116 - RNA, 19 nt, Homo sapiens
  misc_RNA (1)...(19): siRNA sense strand
gugagaagcuggguaguga

SEQ ID NO: 1728117 - RNA, 19 nt, Homo sapiens
  misc_RNA (1)...(19): siRNA sense strand
gcaaacccuuacaaacauu

SEQ ID NO: 1728118 - RNA, 19 nt, Homo sapiens
  misc_RNA (1)...(19): siRNA sense strand
gaaauuagacggauguaac

SEQ ID NO: 1728119 - RNA, 19 nt, Homo sapiens
  misc_RNA (1)...(19): siRNA sense strand
gcacuuagacaaccuaugg

SEQ ID NO: 1728120 - RNA, 19 nt, Homo sapiens
  misc_RNA (1)...(19): siRNA sense strand
aagaggaaauuguggauga

SEQ ID NO: 1728121 - RNA, 19 nt, Homo sapiens
  misc_RNA (1)...(19): siRNA sense strand
gguaagagagugauucaga

SEQ ID NO: 1728122 - RNA, 19 nt, Homo sapiens
  misc_RNA (1)...(19): siRNA sense strand
gagaagcucaggaggauga

SEQ ID NO: 1728123 - RNA, 19 nt, Homo sapiens
  misc_RNA (1)...(19): siRNA sense strand
ggucaaagaguuaguggaa

SEQ ID NO: 1728124 - RNA, 19 nt, Homo sapiens
  misc_RNA (1)...(19): siRNA sense strand
gaaggacuacuuugaaauc

SEQ ID NO: 1728125 - RNA, 19 nt, Homo sapiens
  misc_RNA (1)...(19): siRNA sense strand
ugaucaagcucagcagaua

SEQ ID NO: 1728126 - RNA, 19 nt, Homo sapiens
  misc_RNA (1)...(19): siRNA sense strand
gccacagaauuucaagaua

SEQ ID NO: 1728127 - RNA, 19 nt, Homo sapiens
  misc_RNA (1)...(19): siRNA sense strand
gaaauuaauggacuuacga

SEQ ID NO: 1728128 - RNA, 19 nt, Homo sapiens
  misc_RNA (1)...(19): siRNA sense strand
caggaaaucuuggacuuug

SEQ ID NO: 1728129 - RNA, 19 nt, Homo sapiens
  misc_RNA (1)...(19): siRNA sense strand
gaugcaauuucuuaaggaa

SEQ ID NO: 1728130 - RNA, 19 nt, Homo sapiens
  misc_RNA (1)...(19): siRNA sense strand
ugaauauugucucuccuuu

SEQ ID NO: 1728131 - RNA, 19 nt, Homo sapiens
  misc_RNA (1)...(19): siRNA sense strand
caaaucugauccaggaaau

SEQ ID NO: 1728132 - RNA, 19 nt, Homo sapiens
  misc_RNA (1)...(19): siRNA sense strand
aagaugagguagaagacua

SEQ ID NO: 1728133 - RNA, 19 nt, Homo sapiens
  misc_RNA (1)...(19): siRNA sense strand
ggaugcaauuucuuaagga

SEQ ID NO: 1728134 - RNA, 19 nt, Homo sapiens
  misc_RNA (1)...(19): siRNA sense strand
aaaccaggaucuauuugga

SEQ ID NO: 1728135 - RNA, 19 nt, Homo sapiens
  misc_RNA (1)...(19): siRNA sense strand
guuaguggaagcagaguua

SEQ ID NO: 1728136 - RNA, 19 nt, Homo sapiens
  misc_RNA (1)...(19): siRNA sense strand
uggaaucacugucaaaucu

SEQ ID NO: 1728137 - RNA, 19 nt, Homo sapiens
  misc_RNA (1)...(19): siRNA sense strand
ggaagagacccuagcauac

SEQ ID NO: 1728138 - RNA, 19 nt, Homo sapiens
  misc_RNA (1)...(19): siRNA sense strand
cugaaggacuacuuugaaa

SEQ ID NO: 1728139 - RNA, 19 nt, Homo sapiens
  misc_RNA (1)...(19): siRNA sense strand
cuagcauacuugaauauug

SEQ ID NO: 1728140 - RNA, 19 nt, Homo sapiens
  misc_RNA (1)...(19): siRNA sense strand
gugaaugcauguacuucuu

SEQ ID NO: 1728141 - RNA, 19 nt, Homo sapiens
  misc_RNA (1)...(19): siRNA sense strand
gaucaagcucagcagauaa

SEQ ID NO: 1728142 - RNA, 19 nt, Homo sapiens
  misc_RNA (1)...(19): siRNA sense strand
gaagagacccuagcauacu

SEQ ID NO: 1728143 - RNA, 19 nt, Homo sapiens
  misc_RNA (1)...(19): siRNA sense strand
gaagcuggguagugaaugc

SEQ ID NO: 1728144 - RNA, 19 nt, Homo sapiens
  misc_RNA (1)...(19): siRNA sense strand
ggagaugaauuuagaaaag

SEQ ID NO: 1728145 - RNA, 19 nt, Homo sapiens
  misc_RNA (1)...(19): siRNA sense strand
agacggauguaacaagaug

SEQ ID NO: 1728146 - RNA, 19 nt, Homo sapiens
  misc_RNA (1)...(19): siRNA sense strand
ggaugaggcuaauaaaaga

SEQ ID NO: 1728147 - RNA, 19 nt, Homo sapiens
  misc_RNA (1)...(19): siRNA sense strand
cagaguuauuugcccguua

SEQ ID NO: 1728148 - RNA, 19 nt, Homo sapiens
  misc_RNA (1)...(19): siRNA sense strand
ggacuuacgaaaugaauac

SEQ ID NO: 1728149 - RNA, 19 nt, Homo sapiens
  misc_RNA (1)...(19): siRNA sense strand
gaagagauggaaaguaagg

SEQ ID NO: 1728150 - RNA, 19 nt, Homo sapiens
  misc_RNA (1)...(19): siRNA sense strand
aggaagagacccuagcaua

SEQ ID NO: 1728151 - RNA, 19 nt, Homo sapiens
  misc_RNA (1)...(19): siRNA sense strand
gggaagaugagguagaaga

SEQ ID NO: 1728152 - RNA, 19 nt, Homo sapiens
  misc_RNA (1)...(19): siRNA sense strand
guacuggcuguaugcaaua

SEQ ID NO: 1728153 - RNA, 19 nt, Homo sapiens
  misc_RNA (1)...(19): siRNA sense strand
uuagacggauguaacaaga

SEQ ID NO: 1728154 - RNA, 19 nt, Homo sapiens
  misc_RNA (1)...(19): siRNA sense strand
guaaggaguggcuagagaa

SEQ ID NO: 1728155 - RNA, 19 nt, Homo sapiens
  misc_RNA (1)...(19): siRNA sense strand
agaaggcacuggaagagau

SEQ ID NO: 1728156 - RNA, 19 nt, Homo sapiens
  misc_RNA (1)...(19): siRNA sense strand
caggaucuauuuggauuug

SEQ ID NO: 1728157 - RNA, 19 nt, Homo sapiens
  misc_RNA (1)...(19): siRNA sense strand
gaaauccagaucagagaug

SEQ ID NO: 1728158 - RNA, 19 nt, Homo sapiens
  misc_RNA (1)...(19): siRNA sense strand
ggaaauuguggaugagaga

SEQ ID NO: 1728159 - RNA, 19 nt, Homo sapiens
  misc_RNA (1)...(19): siRNA sense strand
gaaaccaggaucuauuugg

SEQ ID NO: 1728160 - RNA, 19 nt, Homo sapiens
  misc_RNA (1)...(19): siRNA sense strand
gacauguacuggcuguaug

SEQ ID NO: 1728161 - RNA, 19 nt, Homo sapiens
  misc_RNA (1)...(19): siRNA sense strand
gauguggaaucacugucaa

SEQ ID NO: 1728162 - RNA, 19 nt, Homo sapiens
  misc_RNA (1)...(19): siRNA sense strand
uggaggagcugcuggaucu

SEQ ID NO: 1728163 - RNA, 19 nt, Homo sapiens
  misc_RNA (1)...(19): siRNA sense strand
gacccuagcauacuugaau

SEQ ID NO: 1728164 - RNA, 19 nt, Homo sapiens
  misc_RNA (1)...(19): siRNA sense strand
aggaguggcuagagaagaa

SEQ ID NO: 1728165 - RNA, 19 nt, Homo sapiens
  misc_RNA (1)...(19): siRNA sense strand
gcaagcggaugaggcuaau

SEQ ID NO: 1728166 - RNA, 19 nt, Homo sapiens
  misc_RNA (1)...(19): siRNA sense strand
ggugacugcagagaaauua

SEQ ID NO: 1728167 - RNA, 19 nt, Homo sapiens
  misc_RNA (1)...(19): siRNA sense strand
caacacagagcuagauuuu

SEQ ID NO: 1728168 - RNA, 19 nt, Homo sapiens
  misc_RNA (1)...(19): siRNA sense strand
gcucaagcuucucccaaca

SEQ ID NO: 1728169 - RNA, 19 nt, Homo sapiens
  misc_RNA (1)...(19): siRNA sense strand
gacgauauuugggaagaug

SEQ ID NO: 1728170 - RNA, 19 nt, Homo sapiens
  misc_RNA (1)...(19): siRNA sense strand
gagauggccagguucaaug

SEQ ID NO: 1728171 - RNA, 19 nt, Homo sapiens
  misc_RNA (1)...(19): siRNA sense strand
gcaaagccugucugaagga

SEQ ID NO: 1728172 - RNA, 19 nt, Homo sapiens
  misc_RNA (1)...(19): siRNA sense strand
gcaauauuucuguuggauu

SEQ ID NO: 1728173 - RNA, 19 nt, Homo sapiens
  misc_RNA (1)...(19): siRNA sense strand
uauuuacgauggagaugaa

SEQ ID NO: 1728174 - RNA, 19 nt, Homo sapiens
  misc_RNA (1)...(19): siRNA sense strand
ggauguugacgacgauauu

SEQ ID NO: 1728175 - RNA, 19 nt, Homo sapiens
  misc_RNA (1)...(19): siRNA sense strand
uaauggacuuacgaaauga

SEQ ID NO: 1728176 - RNA, 19 nt, Homo sapiens
  misc_RNA (1)...(19): siRNA sense strand
cagagaaauuaauggacuu

SEQ ID NO: 1728177 - RNA, 19 nt, Homo sapiens
  misc_RNA (1)...(19): siRNA sense strand
guaaggugacugcagagaa

SEQ ID NO: 1728178 - RNA, 19 nt, Homo sapiens
  misc_RNA (1)...(19): siRNA sense strand
uggcagaugugguguacug

SEQ ID NO: 1728179 - RNA, 19 nt, Homo sapiens
  misc_RNA (1)...(19): siRNA sense strand
ggaaaucuuggacuuugau

SEQ ID NO: 1728180 - RNA, 19 nt, Homo sapiens
  misc_RNA (1)...(19): siRNA sense strand
gauguugacgacgauauuu

SEQ ID NO: 1728181 - RNA, 19 nt, Homo sapiens
  misc_RNA (1)...(19): siRNA sense strand
aagcggaugaggcuaauaa

SEQ ID NO: 1728182 - RNA, 19 nt, Homo sapiens
  misc_RNA (1)...(19): siRNA sense strand
agaguuauuugcccguuau

SEQ ID NO: 1728183 - RNA, 19 nt, Homo sapiens
  misc_RNA (1)...(19): siRNA sense strand
aagccugucugaaggacua

SEQ ID NO: 1728184 - RNA, 19 nt, Homo sapiens
  misc_RNA (1)...(19): siRNA sense strand
gagaagcuggguagugaau

SEQ ID NO: 1728185 - RNA, 19 nt, Homo sapiens
  misc_RNA (1)...(19): siRNA sense strand
agagagcagugcaggaugu

SEQ ID NO: 1728186 - RNA, 19 nt, Homo sapiens
  misc_RNA (1)...(19): siRNA sense strand
aagagacccuagcauacuu

SEQ ID NO: 1728187 - RNA, 19 nt, Homo sapiens
  misc_RNA (1)...(19): siRNA sense strand
ucaaaucugauccaggaaa

SEQ ID NO: 1728188 - RNA, 19 nt, Homo sapiens
  misc_RNA (1)...(19): siRNA sense strand
ugauguagaccaagaggaa

SEQ ID NO: 1728189 - RNA, 19 nt, Homo sapiens
  misc_RNA (1)...(19): siRNA sense strand
uggauuugccacagaauuu

SEQ ID NO: 1728190 - RNA, 19 nt, Homo sapiens
  misc_RNA (1)...(19): siRNA sense strand
guggaacucccauagagaa

SEQ ID NO: 1728191 - RNA, 19 nt, Homo sapiens
  misc_RNA (1)...(19): siRNA sense strand
gcacuggaagagauggaaa

SEQ ID NO: 1728192 - RNA, 19 nt, Homo sapiens
  misc_RNA (1)...(19): siRNA sense strand
gauggcagaugugguguac

SEQ ID NO: 1728193 - RNA, 19 nt, Homo sapiens
  misc_RNA (1)...(19): siRNA sense strand
uuacgauggagaugaauuu

SEQ ID NO: 1728194 - RNA, 19 nt, Homo sapiens
  misc_RNA (1)...(19): siRNA sense strand
aguaaggaguggcuagaga

SEQ ID NO: 1728195 - RNA, 19 nt, Homo sapiens
  misc_RNA (1)...(19): siRNA sense strand
cuggcuguaugcaauauuu

SEQ ID NO: 1728196 - RNA, 19 nt, Homo sapiens
  misc_RNA (1)...(19): siRNA sense strand
uguacuggcuguaugcaau

SEQ ID NO: 1728197 - RNA, 19 nt, Homo sapiens
  misc_RNA (1)...(19): siRNA sense strand
ucgagaagcucaggaggau

SEQ ID NO: 1728198 - RNA, 19 nt, Homo sapiens
  misc_RNA (1)...(19): siRNA sense strand
ggcuagagaagaacucaaa

SEQ ID NO: 1728199 - RNA, 19 nt, Homo sapiens
  misc_RNA (1)...(19): siRNA sense strand
ucaaagagcugcccauguu

SEQ ID NO: 1728200 - RNA, 19 nt, Homo sapiens
  misc_RNA (1)...(19): siRNA sense strand
gaucagagauggccagguu

SEQ ID NO: 1728201 - RNA, 19 nt, Homo sapiens
  misc_RNA (1)...(19): siRNA sense strand
uggaagagauggaaaguaa

SEQ ID NO: 1728202 - RNA, 19 nt, Homo sapiens
  misc_RNA (1)...(19): siRNA sense strand
ccacagaauuucaagauau

SEQ ID NO: 1728203 - RNA, 19 nt, Homo sapiens
  misc_RNA (1)...(19): siRNA sense strand
gaacucccauagagaaauu

SEQ ID NO: 1728204 - RNA, 19 nt, Homo sapiens
  misc_RNA (1)...(19): siRNA sense strand
gaucaaagguaugguaaga

SEQ ID NO: 1728205 - RNA, 19 nt, Homo sapiens
  misc_RNA (1)...(19): siRNA sense strand
gagcaaacccuuacaaaca

SEQ ID NO: 1728206 - RNA, 19 nt, Homo sapiens
  misc_RNA (1)...(19): siRNA sense strand
uaaggugacugcagagaaa

SEQ ID NO: 1728207 - RNA, 19 nt, Homo sapiens
  misc_RNA (1)...(19): siRNA sense strand
gagaaaccaggaucuauuu

SEQ ID NO: 1728208 - RNA, 19 nt, Homo sapiens
  misc_RNA (1)...(19): siRNA sense strand
guaagagagugauucagaa

SEQ ID NO: 1728209 - RNA, 19 nt, Homo sapiens
  misc_RNA (1)...(19): siRNA sense strand
ggagaaaccaggaucuauu

SEQ ID NO: 1728210 - RNA, 19 nt, Homo sapiens
  misc_RNA (1)...(19): siRNA sense strand
gaucugauguagaccaaga

SEQ ID NO: 1728211 - RNA, 19 nt, Homo sapiens
  misc_RNA (1)...(19): siRNA sense strand
guaacaagaugacauguac

SEQ ID NO: 1728212 - RNA, 19 nt, Homo sapiens
  misc_RNA (1)...(19): siRNA sense strand
gaaucacugucaaaucuga

SEQ ID NO: 1728213 - RNA, 19 nt, Homo sapiens
  misc_RNA (1)...(19): siRNA sense strand
uuaauggacuuacgaaaug

SEQ ID NO: 1728214 - RNA, 19 nt, Homo sapiens
  misc_RNA (1)...(19): siRNA sense strand
ucaaagguaugguaagaga

SEQ ID NO: 1728215 - RNA, 19 nt, Homo sapiens
  misc_RNA (1)...(19): siRNA sense strand
cgauggagaugaauuuaga

SEQ ID NO: 1728216 - RNA, 19 nt, Homo sapiens
  misc_RNA (1)...(19): siRNA sense strand
gugagaagcuggguaguga

SEQ ID NO: 1728217 - RNA, 19 nt, Homo sapiens
  misc_RNA (1)...(19): siRNA sense strand
gcaaacccuuacaaacauu

SEQ ID NO: 1728218 - RNA, 19 nt, Homo sapiens
  misc_RNA (1)...(19): siRNA sense strand
gaaauuagacggauguaac

SEQ ID NO: 1728219 - RNA, 19 nt, Homo sapiens
  misc_RNA (1)...(19): siRNA sense strand
gcacuuagacaaccuaugg

SEQ ID NO: 1728220 - RNA, 19 nt, Homo sapiens
  misc_RNA (1)...(19): siRNA sense strand
aagaggaaauuguggauga

SEQ ID NO: 1728221 - RNA, 19 nt, Homo sapiens
  misc_RNA (1)...(19): siRNA sense strand
gguaagagagugauucaga

SEQ ID NO: 1728222 - RNA, 19 nt, Homo sapiens
  misc_RNA (1)...(19): siRNA sense strand
gagaagcucaggaggauga

SEQ ID NO: 1728223 - RNA, 19 nt, Homo sapiens
  misc_RNA (1)...(19): siRNA sense strand
ggucaaagaguuaguggaa

SEQ ID NO: 1728224 - RNA, 19 nt, Homo sapiens
  misc_RNA (1)...(19): siRNA sense strand
gaaggacuacuuugaaauc

SEQ ID NO: 1728225 - RNA, 19 nt, Homo sapiens
  misc_RNA (1)...(19): siRNA sense strand
ugaucaagcucagcagaua

SEQ ID NO: 1728226 - RNA, 19 nt, Homo sapiens
  misc_RNA (1)...(19): siRNA sense strand
gccacagaauuucaagaua

SEQ ID NO: 1728227 - RNA, 19 nt, Homo sapiens
  misc_RNA (1)...(19): siRNA sense strand
gaaauuaauggacuuacga

SEQ ID NO: 1728228 - RNA, 19 nt, Homo sapiens
  misc_RNA (1)...(19): siRNA sense strand
caggaaaucuuggacuuug

SEQ ID NO: 1728229 - RNA, 19 nt, Homo sapiens
  misc_RNA (1)...(19): siRNA sense strand
gaugcaauuucuuaaggaa

SEQ ID NO: 1728230 - RNA, 19 nt, Homo sapiens
  misc_RNA (1)...(19): siRNA sense strand
ugaauauugucucuccuuu

SEQ ID NO: 1728231 - RNA, 19 nt, Homo sapiens
  misc_RNA (1)...(19): siRNA sense strand
caaaucugauccaggaaau

SEQ ID NO: 1728232 - RNA, 19 nt, Homo sapiens
  misc_RNA (1)...(19): siRNA sense strand
aagaugagguagaagacua

SEQ ID NO: 1728233 - RNA, 19 nt, Homo sapiens
  misc_RNA (1)...(19): siRNA sense strand
ggaugcaauuucuuaagga

SEQ ID NO: 1728234 - RNA, 19 nt, Homo sapiens
  misc_RNA (1)...(19): siRNA sense strand
aaaccaggaucuauuugga

SEQ ID NO: 1728235 - RNA, 19 nt, Homo sapiens
  misc_RNA (1)...(19): siRNA sense strand
guuaguggaagcagaguua

SEQ ID NO: 1728236 - RNA, 19 nt, Homo sapiens
  misc_RNA (1)...(19): siRNA sense strand
uggaaucacugucaaaucu

SEQ ID NO: 1728237 - RNA, 19 nt, Homo sapiens
  misc_RNA (1)...(19): siRNA sense strand
ggaagagacccuagcauac

SEQ ID NO: 1728238 - RNA, 19 nt, Homo sapiens
  misc_RNA (1)...(19): siRNA sense strand
cugaaggacuacuuugaaa

SEQ ID NO: 1728239 - RNA, 19 nt, Homo sapiens
  misc_RNA (1)...(19): siRNA sense strand
cuagcauacuugaauauug

SEQ ID NO: 1728240 - RNA, 19 nt, Homo sapiens
  misc_RNA (1)...(19): siRNA sense strand
gugaaugcauguacuucuu

SEQ ID NO: 1728241 - RNA, 19 nt, Homo sapiens
  misc_RNA (1)...(19): siRNA sense strand
gaucaagcucagcagauaa

SEQ ID NO: 1728242 - RNA, 19 nt, Homo sapiens
  misc_RNA (1)...(19): siRNA sense strand
gaagagacccuagcauacu

SEQ ID NO: 1728243 - RNA, 19 nt, Homo sapiens
  misc_RNA (1)...(19): siRNA sense strand
gaagcuggguagugaaugc

SEQ ID NO: 1728244 - RNA, 19 nt, Homo sapiens
  misc_RNA (1)...(19): siRNA sense strand
ggagaugaauuuagaaaag

SEQ ID NO: 1728245 - RNA, 19 nt, Homo sapiens
  misc_RNA (1)...(19): siRNA sense strand
agacggauguaacaagaug

SEQ ID NO: 1728246 - RNA, 19 nt, Homo sapiens
  misc_RNA (1)...(19): siRNA sense strand
ggaugaggcuaauaaaaga

SEQ ID NO: 1728247 - RNA, 19 nt, Homo sapiens
  misc_RNA (1)...(19): siRNA sense strand
cagaguuauuugcccguua

SEQ ID NO: 1728248 - RNA, 19 nt, Homo sapiens
  misc_RNA (1)...(19): siRNA sense strand
ggacuuacgaaaugaauac

SEQ ID NO: 1728249 - RNA, 19 nt, Homo sapiens
  misc_RNA (1)...(19): siRNA sense strand
gaagagauggaaaguaagg

SEQ ID NO: 1728250 - RNA, 19 nt, Homo sapiens
  misc_RNA (1)...(19): siRNA sense strand
aggaagagacccuagcaua

SEQ ID NO: 1728251 - RNA, 19 nt, Homo sapiens
  misc_RNA (1)...(19): siRNA sense strand
gggaagaugagguagaaga

SEQ ID NO: 1728252 - RNA, 19 nt, Homo sapiens
  misc_RNA (1)...(19): siRNA sense strand
guacuggcuguaugcaaua

SEQ ID NO: 1728253 - RNA, 19 nt, Homo sapiens
  misc_RNA (1)...(19): siRNA sense strand
uuagacggauguaacaaga

SEQ ID NO: 1728254 - RNA, 19 nt, Homo sapiens
  misc_RNA (1)...(19): siRNA sense strand
guaaggaguggcuagagaa

SEQ ID NO: 1728255 - RNA, 19 nt, Homo sapiens
  misc_RNA (1)...(19): siRNA sense strand
agaaggcacuggaagagau

SEQ ID NO: 1728256 - RNA, 19 nt, Homo sapiens
  misc_RNA (1)...(19): siRNA sense strand
caggaucuauuuggauuug

SEQ ID NO: 1728257 - RNA, 19 nt, Homo sapiens
  misc_RNA (1)...(19): siRNA sense strand
gaaauccagaucagagaug

SEQ ID NO: 1728258 - RNA, 19 nt, Homo sapiens
  misc_RNA (1)...(19): siRNA sense strand
ggaaauuguggaugagaga

SEQ ID NO: 1728259 - RNA, 19 nt, Homo sapiens
  misc_RNA (1)...(19): siRNA sense strand
gaaaccaggaucuauuugg

SEQ ID NO: 1728260 - RNA, 19 nt, Homo sapiens
  misc_RNA (1)...(19): siRNA sense strand
gacauguacuggcuguaug

SEQ ID NO: 1728261 - RNA, 19 nt, Homo sapiens
  misc_RNA (1)...(19): siRNA sense strand
gauguggaaucacugucaa

SEQ ID NO: 1728262 - RNA, 19 nt, Homo sapiens
  misc_RNA (1)...(19): siRNA sense strand
uggaggagcugcuggaucu

SEQ ID NO: 1728263 - RNA, 19 nt, Homo sapiens
  misc_RNA (1)...(19): siRNA sense strand
gacccuagcauacuugaau

SEQ ID NO: 1728264 - RNA, 19 nt, Homo sapiens
  misc_RNA (1)...(19): siRNA sense strand
aggaguggcuagagaagaa

SEQ ID NO: 1728265 - RNA, 19 nt, Homo sapiens
  misc_RNA (1)...(19): siRNA sense strand
gcaagcggaugaggcuaau

SEQ ID NO: 1728266 - RNA, 19 nt, Homo sapiens
  misc_RNA (1)...(19): siRNA sense strand
ggugacugcagagaaauua

SEQ ID NO: 1728267 - RNA, 19 nt, Homo sapiens
  misc_RNA (1)...(19): siRNA sense strand
caacacagagcuagauuuu

SEQ ID NO: 1728268 - RNA, 19 nt, Homo sapiens
  misc_RNA (1)...(19): siRNA sense strand
gcucaagcuucucccaaca

SEQ ID NO: 1728269 - RNA, 19 nt, Homo sapiens
  misc_RNA (1)...(19): siRNA sense strand
gacgauauuugggaagaug

SEQ ID NO: 1728270 - RNA, 19 nt, Homo sapiens
  misc_RNA (1)...(19): siRNA sense strand
gagauggccagguucaaug

SEQ ID NO: 1728271 - RNA, 19 nt, Homo sapiens
  misc_RNA (1)...(19): siRNA sense strand
gcaaagccugucugaagga

SEQ ID NO: 1728272 - RNA, 19 nt, Homo sapiens
  misc_RNA (1)...(19): siRNA sense strand
gcaauauuucuguuggauu

SEQ ID NO: 1728273 - RNA, 19 nt, Homo sapiens
  misc_RNA (1)...(19): siRNA sense strand
uauuuacgauggagaugaa

SEQ ID NO: 1728274 - RNA, 19 nt, Homo sapiens
  misc_RNA (1)...(19): siRNA sense strand
ggauguugacgacgauauu

SEQ ID NO: 1728275 - RNA, 19 nt, Homo sapiens
  misc_RNA (1)...(19): siRNA sense strand
uaauggacuuacgaaauga

SEQ ID NO: 1728276 - RNA, 19 nt, Homo sapiens
  misc_RNA (1)...(19): siRNA sense strand
cagagaaauuaauggacuu

SEQ ID NO: 1728277 - RNA, 19 nt, Homo sapiens
  misc_RNA (1)...(19): siRNA sense strand
guaaggugacugcagagaa

SEQ ID NO: 1728278 - RNA, 19 nt, Homo sapiens
  misc_RNA (1)...(19): siRNA sense strand
uggcagaugugguguacug

SEQ ID NO: 1728279 - RNA, 19 nt, Homo sapiens
  misc_RNA (1)...(19): siRNA sense strand
ggaaaucuuggacuuugau

SEQ ID NO: 1728280 - RNA, 19 nt, Homo sapiens
  misc_RNA (1)...(19): siRNA sense strand
gauguugacgacgauauuu

SEQ ID NO: 1728281 - RNA, 19 nt, Homo sapiens
  misc_RNA (1)...(19): siRNA sense strand
aagcggaugaggcuaauaa

SEQ ID NO: 1728282 - RNA, 19 nt, Homo sapiens
  misc_RNA (1)...(19): siRNA sense strand
agaguuauuugcccguuau

SEQ ID NO: 1728283 - RNA, 19 nt, Homo sapiens
  misc_RNA (1)...(19): siRNA sense strand
aagccugucugaaggacua

SEQ ID NO: 1728284 - RNA, 19 nt, Homo sapiens
  misc_RNA (1)...(19): siRNA sense strand
gagaagcuggguagugaau

SEQ ID NO: 1728285 - RNA, 19 nt, Homo sapiens
  misc_RNA (1)...(19): siRNA sense strand
agagagcagugcaggaugu

SEQ ID NO: 1728286 - RNA, 19 nt, Homo sapiens
  misc_RNA (1)...(19): siRNA sense strand
aagagacccuagcauacuu

SEQ ID NO: 1728287 - RNA, 19 nt, Homo sapiens
  misc_RNA (1)...(19): siRNA sense strand
ucaaaucugauccaggaaa

SEQ ID NO: 1728288 - RNA, 19 nt, Homo sapiens
  misc_RNA (1)...(19): siRNA sense strand
ugauguagaccaagaggaa

SEQ ID NO: 1728289 - RNA, 19 nt, Homo sapiens
  misc_RNA (1)...(19): siRNA sense strand
uggauuugccacagaauuu

SEQ ID NO: 1728290 - RNA, 19 nt, Homo sapiens
  misc_RNA (1)...(19): siRNA sense strand
guggaacucccauagagaa

SEQ ID NO: 1728291 - RNA, 19 nt, Homo sapiens
  misc_RNA (1)...(19): siRNA sense strand
gcacuggaagagauggaaa

SEQ ID NO: 1728292 - RNA, 19 nt, Homo sapiens
  misc_RNA (1)...(19): siRNA sense strand
gauggcagaugugguguac

SEQ ID NO: 1728293 - RNA, 19 nt, Homo sapiens
  misc_RNA (1)...(19): siRNA sense strand
uuacgauggagaugaauuu

SEQ ID NO: 1728294 - RNA, 19 nt, Homo sapiens
  misc_RNA (1)...(19): siRNA sense strand
aguaaggaguggcuagaga

SEQ ID NO: 1728295 - RNA, 19 nt, Homo sapiens
  misc_RNA (1)...(19): siRNA sense strand
cuggcuguaugcaauauuu

SEQ ID NO: 1728296 - RNA, 19 nt, Homo sapiens
  misc_RNA (1)...(19): siRNA sense strand
uguacuggcuguaugcaau

SEQ ID NO: 1728297 - RNA, 19 nt, Homo sapiens
  misc_RNA (1)...(19): siRNA sense strand
ucgagaagcucaggaggau

SEQ ID NO: 1728298 - RNA, 19 nt, Homo sapiens
  misc_RNA (1)...(19): siRNA sense strand
ggcuagagaagaacucaaa

SEQ ID NO: 1728299 - RNA, 19 nt, Homo sapiens
  misc_RNA (1)...(19): siRNA sense strand
ugaaugagcugguggauua

SEQ ID NO: 1728300 - RNA, 19 nt, Homo sapiens
  misc_RNA (1)...(19): siRNA sense strand
aggcagagcuuaauggaaa

SEQ ID NO: 1728301 - RNA, 19 nt, Homo sapiens
  misc_RNA (1)...(19): siRNA sense strand
cccaagaacuacauagaaa

SEQ ID NO: 1728302 - RNA, 19 nt, Homo sapiens
  misc_RNA (1)...(19): siRNA sense strand
cgccaaauaugacuucaaa

SEQ ID NO: 1728303 - RNA, 19 nt, Homo sapiens
  misc_RNA (1)...(19): siRNA sense strand
ccagaaaccagcagauauu

SEQ ID NO: 1728304 - RNA, 19 nt, Homo sapiens
  misc_RNA (1)...(19): siRNA sense strand
gcugguggauuaucacaga

SEQ ID NO: 1728305 - RNA, 19 nt, Homo sapiens
  misc_RNA (1)...(19): siRNA sense strand
cgaagaaugugaucagaac

SEQ ID NO: 1728306 - RNA, 19 nt, Homo sapiens
  misc_RNA (1)...(19): siRNA sense strand
caagaacuacauagaaaug

SEQ ID NO: 1728307 - RNA, 19 nt, Homo sapiens
  misc_RNA (1)...(19): siRNA sense strand
gaacgaagaaugugaucag

SEQ ID NO: 1728308 - RNA, 19 nt, Homo sapiens
  misc_RNA (1)...(19): siRNA sense strand
guacaaggcagagcuuaau

SEQ ID NO: 1728309 - RNA, 19 nt, Homo sapiens
  misc_RNA (1)...(19): siRNA sense strand
gaagccaucgccaaauaug

SEQ ID NO: 1728310 - RNA, 19 nt, Homo sapiens
  misc_RNA (1)...(19): siRNA sense strand
ggaagccaucgccaaauau

SEQ ID NO: 1728311 - RNA, 19 nt, Homo sapiens
  misc_RNA (1)...(19): siRNA sense strand
gguacaaggcagagcuuaa

SEQ ID NO: 1728312 - RNA, 19 nt, Homo sapiens
  misc_RNA (1)...(19): siRNA sense strand
gagauggagccgggaagua

SEQ ID NO: 1728313 - RNA, 19 nt, Homo sapiens
  misc_RNA (1)...(19): siRNA sense strand
gggcagaccggcauguuuc

SEQ ID NO: 1728314 - RNA, 19 nt, Homo sapiens
  misc_RNA (1)...(19): siRNA sense strand
gagccaaggcagaagaaau

SEQ ID NO: 1728315 - RNA, 19 nt, Homo sapiens
  misc_RNA (1)...(19): siRNA sense strand
aaugugaucagaacuggua

SEQ ID NO: 1728316 - RNA, 19 nt, Homo sapiens
  misc_RNA (1)...(19): siRNA sense strand
ccaaauaugacuucaaagc

SEQ ID NO: 1728317 - RNA, 19 nt, Homo sapiens
  misc_RNA (1)...(19): siRNA sense strand
ccaagaacuacauagaaau

SEQ ID NO: 1728318 - RNA, 19 nt, Homo sapiens
  misc_RNA (1)...(19): siRNA sense strand
ggaaaagacggcuucauuc

SEQ ID NO: 1728319 - RNA, 19 nt, Homo sapiens
  misc_RNA (1)...(19): siRNA sense strand
caaggcagaagaaaugcuu

SEQ ID NO: 1728320 - RNA, 19 nt, Homo sapiens
  misc_RNA (1)...(19): siRNA sense strand
caaauaugacuucaaagcu

SEQ ID NO: 1728321 - RNA, 19 nt, Homo sapiens
  misc_RNA (1)...(19): siRNA sense strand
ugccacagcagccgacaua

SEQ ID NO: 1728322 - RNA, 19 nt, Homo sapiens
  misc_RNA (1)...(19): siRNA sense strand
gauuaucacagaucuacau

SEQ ID NO: 1728323 - RNA, 19 nt, Homo sapiens
  misc_RNA (1)...(19): siRNA sense strand
caaggcagagcuuaaugga

SEQ ID NO: 1728324 - RNA, 19 nt, Homo sapiens
  misc_RNA (1)...(19): siRNA sense strand
cucccucucugucaaguuu

SEQ ID NO: 1728325 - RNA, 19 nt, Homo sapiens
  misc_RNA (1)...(19): siRNA sense strand
gaaaccagcagauauuccu

SEQ ID NO: 1728326 - RNA, 19 nt, Homo sapiens
  misc_RNA (1)...(19): siRNA sense strand
gauauuccugcgggacaua

SEQ ID NO: 1728327 - RNA, 19 nt, Homo sapiens
  misc_RNA (1)...(19): siRNA sense strand
gguggauuaucacagaucu

SEQ ID NO: 1728328 - RNA, 19 nt, Homo sapiens
  misc_RNA (1)...(19): siRNA sense strand
ggggagauuuuauccaugu

SEQ ID NO: 1728329 - RNA, 19 nt, Homo sapiens
  misc_RNA (1)...(19): siRNA sense strand
ucccaagaacuacauagaa

SEQ ID NO: 1728330 - RNA, 19 nt, Homo sapiens
  misc_RNA (1)...(19): siRNA sense strand
ccagagccaaggcagaaga

SEQ ID NO: 1728331 - RNA, 19 nt, Homo sapiens
  misc_RNA (1)...(19): siRNA sense strand
cagaaaccagcagauauuc

SEQ ID NO: 1728332 - RNA, 19 nt, Homo sapiens
  misc_RNA (1)...(19): siRNA sense strand
uccaggcccucuuugacuu

SEQ ID NO: 1728333 - RNA, 19 nt, Homo sapiens
  misc_RNA (1)...(19): siRNA sense strand
agccaaggcagaagaaaug

SEQ ID NO: 1728334 - RNA, 19 nt, Homo sapiens
  misc_RNA (1)...(19): siRNA sense strand
ccaggcccucuuugacuuu

SEQ ID NO: 1728335 - RNA, 19 nt, Homo sapiens
  misc_RNA (1)...(19): siRNA sense strand
gaauaaugcugaccaagaa

SEQ ID NO: 1728336 - RNA, 19 nt, Homo sapiens
  misc_RNA (1)...(19): siRNA sense strand
gcacaucucugccuguuug

SEQ ID NO: 1728337 - RNA, 19 nt, Homo sapiens
  misc_RNA (1)...(19): siRNA sense strand
gagaagaggugucgugucu

SEQ ID NO: 1728338 - RNA, 19 nt, Homo sapiens
  misc_RNA (1)...(19): siRNA sense strand
gcaagaggguacuccauau

SEQ ID NO: 1728339 - RNA, 19 nt, Homo sapiens
  misc_RNA (1)...(19): siRNA sense strand
gaagaggugucgugucugu

SEQ ID NO: 1728340 - RNA, 19 nt, Homo sapiens
  misc_RNA (1)...(19): siRNA sense strand
guaauccucccacuucuua

SEQ ID NO: 1728341 - RNA, 19 nt, Homo sapiens
  misc_RNA (1)...(19): siRNA sense strand
ggaauaaugcugaccaaga

SEQ ID NO: 1728342 - RNA, 19 nt, Homo sapiens
  misc_RNA (1)...(19): siRNA sense strand
gauccagagugccaaguaa

SEQ ID NO: 1728343 - RNA, 19 nt, Homo sapiens
  misc_RNA (1)...(19): siRNA sense strand
gcucaauucugcaaagaga

SEQ ID NO: 1728344 - RNA, 19 nt, Homo sapiens
  misc_RNA (1)...(19): siRNA sense strand
gcaaagcuguacaagagau

SEQ ID NO: 1728345 - RNA, 19 nt, Homo sapiens
  misc_RNA (1)...(19): siRNA sense strand
acacugcccuugcucaauu

SEQ ID NO: 1728346 - RNA, 19 nt, Homo sapiens
  misc_RNA (1)...(19): siRNA sense strand
caaagaagaggccugcaaa

SEQ ID NO: 1728347 - RNA, 19 nt, Homo sapiens
  misc_RNA (1)...(19): siRNA sense strand
gcaaagagaagaaaauuga

SEQ ID NO: 1728348 - RNA, 19 nt, Homo sapiens
  misc_RNA (1)...(19): siRNA sense strand
cugcaaagcuguacaagag

SEQ ID NO: 1728349 - RNA, 19 nt, Homo sapiens
  misc_RNA (1)...(19): siRNA sense strand
ggacugcucugcacaucuc

SEQ ID NO: 1728350 - RNA, 19 nt, Homo sapiens
  misc_RNA (1)...(19): siRNA sense strand
caagaggguacuccauaua

SEQ ID NO: 1728351 - RNA, 19 nt, Homo sapiens
  misc_RNA (1)...(19): siRNA sense strand
agacuucccugcuuugguu

SEQ ID NO: 1728352 - RNA, 19 nt, Homo sapiens
  misc_RNA (1)...(19): siRNA sense strand
gcaaagaagaggccugcaa

SEQ ID NO: 1728353 - RNA, 19 nt, Homo sapiens
  misc_RNA (1)...(19): siRNA sense strand
ucucuaugcuggaauaaug

SEQ ID NO: 1728354 - RNA, 19 nt, Homo sapiens
  misc_RNA (1)...(19): siRNA sense strand
gggagcaauuuauaggaaa

SEQ ID NO: 1728355 - RNA, 19 nt, Homo sapiens
  misc_RNA (1)...(19): siRNA sense strand
cauaucagcccuugaggaa

SEQ ID NO: 1728356 - RNA, 19 nt, Homo sapiens
  misc_RNA (1)...(19): siRNA sense strand
gguacuccauauacaggua

SEQ ID NO: 1728357 - RNA, 19 nt, Homo sapiens
  misc_RNA (1)...(19): siRNA sense strand
gcagcccgaguacuuauaa

SEQ ID NO: 1728358 - RNA, 19 nt, Homo sapiens
  misc_RNA (1)...(19): siRNA sense strand
caaauaccgccaucucaau

SEQ ID NO: 1728359 - RNA, 19 nt, Homo sapiens
  misc_RNA (1)...(19): siRNA sense strand
gguauucucuaugcuggaa

SEQ ID NO: 1728360 - RNA, 19 nt, Homo sapiens
  misc_RNA (1)...(19): siRNA sense strand
ucagguuucuaaugaucua

SEQ ID NO: 1728361 - RNA, 19 nt, Homo sapiens
  misc_RNA (1)...(19): siRNA sense strand
ccacaccgcccuaacuguu

SEQ ID NO: 1728362 - RNA, 19 nt, Homo sapiens
  misc_RNA (1)...(19): siRNA sense strand
ucaaauaccgccaucucaa

SEQ ID NO: 1728363 - RNA, 19 nt, Homo sapiens
  misc_RNA (1)...(19): siRNA sense strand
cagaagcggcucaguuaga

SEQ ID NO: 1728364 - RNA, 19 nt, Homo sapiens
  misc_RNA (1)...(19): siRNA sense strand
aacauacgcuggccuggaa

SEQ ID NO: 1728365 - RNA, 19 nt, Homo sapiens
  misc_RNA (1)...(19): siRNA sense strand
gaaggccaguggucuugca

SEQ ID NO: 1728366 - RNA, 19 nt, Homo sapiens
  misc_RNA (1)...(19): siRNA sense strand
ggagcaauuuauaggaaag

SEQ ID NO: 1728367 - RNA, 19 nt, Homo sapiens
  misc_RNA (1)...(19): siRNA sense strand
gcccgaguacuuauaauug

SEQ ID NO: 1728368 - RNA, 19 nt, Homo sapiens
  misc_RNA (1)...(19): siRNA sense strand
cagcagaagcggcucaguu

SEQ ID NO: 1728369 - RNA, 19 nt, Homo sapiens
  misc_RNA (1)...(19): siRNA sense strand
agcagaagcggcucaguua

SEQ ID NO: 1728370 - RNA, 19 nt, Homo sapiens
  misc_RNA (1)...(19): siRNA sense strand
caaagaguuuauggacaga

SEQ ID NO: 1728371 - RNA, 19 nt, Homo sapiens
  misc_RNA (1)...(19): siRNA sense strand
acaggaccauaagcgauua

SEQ ID NO: 1728372 - RNA, 19 nt, Homo sapiens
  misc_RNA (1)...(19): siRNA sense strand
gcagcuggagaaacaauug

SEQ ID NO: 1728373 - RNA, 19 nt, Homo sapiens
  misc_RNA (1)...(19): siRNA sense strand
ggaaaaggggugauuguug

SEQ ID NO: 1728374 - RNA, 19 nt, Homo sapiens
  misc_RNA (1)...(19): siRNA sense strand
auggaaggcuuucaccaaa

SEQ ID NO: 1728375 - RNA, 19 nt, Homo sapiens
  misc_RNA (1)...(19): siRNA sense strand
ucaguuagaguccagcaaa

SEQ ID NO: 1728376 - RNA, 19 nt, Homo sapiens
  misc_RNA (1)...(19): siRNA sense strand
ggagaugguggcccuaaca

SEQ ID NO: 1728377 - RNA, 19 nt, Homo sapiens
  misc_RNA (1)...(19): siRNA sense strand
cgcccuaacuguugucaug

SEQ ID NO: 1728378 - RNA, 19 nt, Homo sapiens
  misc_RNA (1)...(19): siRNA sense strand
gaccaagaauggcccaaaa

SEQ ID NO: 1728379 - RNA, 19 nt, Homo sapiens
  misc_RNA (1)...(19): siRNA sense strand
ggaaugggagccuauuguc

SEQ ID NO: 1728380 - RNA, 19 nt, Homo sapiens
  misc_RNA (1)...(19): siRNA sense strand
gggaaugggagccuauugu

SEQ ID NO: 1728381 - RNA, 19 nt, Homo sapiens
  misc_RNA (1)...(19): siRNA sense strand
cccaaaaguucuagaguuu

SEQ ID NO: 1728382 - RNA, 19 nt, Homo sapiens
  misc_RNA (1)...(19): siRNA sense strand
gcccaaaaguucuagaguu

SEQ ID NO: 1728383 - RNA, 19 nt, Homo sapiens
  misc_RNA (1)...(19): siRNA sense strand
ggaaggcuuucaccaaacc

SEQ ID NO: 1728384 - RNA, 19 nt, Homo sapiens
  misc_RNA (1)...(19): siRNA sense strand
ccucagguuucuaaugauc

SEQ ID NO: 1728385 - RNA, 19 nt, Homo sapiens
  misc_RNA (1)...(19): siRNA sense strand
gugauucaguccaccuuag

SEQ ID NO: 1728386 - RNA, 19 nt, Homo sapiens
  misc_RNA (1)...(19): siRNA sense strand
agggagcaauuuauaggaa

SEQ ID NO: 1728387 - RNA, 19 nt, Homo sapiens
  misc_RNA (1)...(19): siRNA sense strand
gcaggagugcaaugcuuug

SEQ ID NO: 1728388 - RNA, 19 nt, Homo sapiens
  misc_RNA (1)...(19): siRNA sense strand
gaggugucgugucuguguu

SEQ ID NO: 1728389 - RNA, 19 nt, Homo sapiens
  misc_RNA (1)...(19): siRNA sense strand
caucaugucaaacaagugu

SEQ ID NO: 1728390 - RNA, 19 nt, Homo sapiens
  misc_RNA (1)...(19): siRNA sense strand
cauggcaaguaaagguuau

SEQ ID NO: 1728391 - RNA, 19 nt, Homo sapiens
  misc_RNA (1)...(19): siRNA sense strand
uggagaaacaauugucauu

SEQ ID NO: 1728392 - RNA, 19 nt, Homo sapiens
  misc_RNA (1)...(19): siRNA sense strand
gagggagcaauuuauagga

SEQ ID NO: 1728393 - RNA, 19 nt, Homo sapiens
  misc_RNA (1)...(19): siRNA sense strand
ugaggaagccaagaaagga

SEQ ID NO: 1728394 - RNA, 19 nt, Homo sapiens
  misc_RNA (1)...(19): siRNA sense strand
uggauggcaugcagcaaga

SEQ ID NO: 1728395 - RNA, 19 nt, Homo sapiens
  misc_RNA (1)...(19): siRNA sense strand
cacaggaccauaagcgauu

SEQ ID NO: 1728396 - RNA, 19 nt, Homo sapiens
  misc_RNA (1)...(19): siRNA sense strand
ucacugauggcaagacugu

SEQ ID NO: 1728397 - RNA, 19 nt, Homo sapiens
  misc_RNA (1)...(19): siRNA sense strand
gcagaagcggcucaguuag

SEQ ID NO: 1728398 - RNA, 19 nt, Homo sapiens
  misc_RNA (1)...(19): siRNA sense strand
ggaagccaagaaaggacua

SEQ ID NO: 1728399 - RNA, 19 nt, Homo sapiens
  misc_RNA (1)...(19): siRNA sense strand
ccaaggguguagagauaac

SEQ ID NO: 1728400 - RNA, 19 nt, Homo sapiens
  misc_RNA (1)...(19): siRNA sense strand
ucauggcaaguaaagguua

SEQ ID NO: 1728401 - RNA, 19 nt, Homo sapiens
  misc_RNA (1)...(19): siRNA sense strand
agaggguacuccauauaca

SEQ ID NO: 1728402 - RNA, 19 nt, Homo sapiens
  misc_RNA (1)...(19): siRNA sense strand
gcacagucucaucauguca

SEQ ID NO: 1728403 - RNA, 19 nt, Homo sapiens
  misc_RNA (1)...(19): siRNA sense strand
ggcaaaguaguaacucaug

SEQ ID NO: 1728404 - RNA, 19 nt, Homo sapiens
  misc_RNA (1)...(19): siRNA sense strand
uuugagggagcaauuuaua

SEQ ID NO: 1728405 - RNA, 19 nt, Homo sapiens
  misc_RNA (1)...(19): siRNA sense strand
agaagcggcucaguuagag

SEQ ID NO: 1728406 - RNA, 19 nt, Homo sapiens
  misc_RNA (1)...(19): siRNA sense strand
acagucucaucaugucaaa

SEQ ID NO: 1728407 - RNA, 19 nt, Homo sapiens
  misc_RNA (1)...(19): siRNA sense strand
gaguuuaauugccguuuug

SEQ ID NO: 1728408 - RNA, 19 nt, Homo sapiens
  misc_RNA (1)...(19): siRNA sense strand
agcaagaggguacuccaua

SEQ ID NO: 1728409 - RNA, 19 nt, Homo sapiens
  misc_RNA (1)...(19): siRNA sense strand
aagagaucaugcaggagaa

SEQ ID NO: 1728410 - RNA, 19 nt, Homo sapiens
  misc_RNA (1)...(19): siRNA sense strand
aaaguuugagggagcaauu

SEQ ID NO: 1728411 - RNA, 19 nt, Homo sapiens
  misc_RNA (1)...(19): siRNA sense strand
ccacacugcccuugcucaa

SEQ ID NO: 1728412 - RNA, 19 nt, Homo sapiens
  misc_RNA (1)...(19): siRNA sense strand
guagagauaacaggguuuc

SEQ ID NO: 1728413 - RNA, 19 nt, Homo sapiens
  misc_RNA (1)...(19): siRNA sense strand
uguaguuguuggaccagaa

SEQ ID NO: 1728414 - RNA, 19 nt, Homo sapiens
  misc_RNA (1)...(19): siRNA sense strand
gcacaauggaaggcuuuca

SEQ ID NO: 1728415 - RNA, 19 nt, Homo sapiens
  misc_RNA (1)...(19): siRNA sense strand
gagcaauuuauaggaaaga

SEQ ID NO: 1728416 - RNA, 19 nt, Homo sapiens
  misc_RNA (1)...(19): siRNA sense strand
cugcacaucucugccuguu

SEQ ID NO: 1728417 - RNA, 19 nt, Homo sapiens
  misc_RNA (1)...(19): siRNA sense strand
ugucuguguuucacugaug

SEQ ID NO: 1728418 - RNA, 19 nt, Homo sapiens
  misc_RNA (1)...(19): siRNA sense strand
agaagaggccugcaaagcu

SEQ ID NO: 1728419 - RNA, 19 nt, Homo sapiens
  misc_RNA (1)...(19): siRNA sense strand
gccugcagcuucauuuuga

SEQ ID NO: 1728420 - RNA, 19 nt, Homo sapiens
  misc_RNA (1)...(19): siRNA sense strand
aauggaaggcuuucaccaa

SEQ ID NO: 1728421 - RNA, 19 nt, Homo sapiens
  misc_RNA (1)...(19): siRNA sense strand
ccccucagguuucuaauga

SEQ ID NO: 1728422 - RNA, 19 nt, Homo sapiens
  misc_RNA (1)...(19): siRNA sense strand
acaccgcccuaacuguugu

SEQ ID NO: 1728423 - RNA, 19 nt, Homo sapiens
  misc_RNA (1)...(19): siRNA sense strand
gaaaaccacaccgcccuaa

SEQ ID NO: 1728424 - RNA, 19 nt, Homo sapiens
  misc_RNA (1)...(19): siRNA sense strand
caagaauggcccaaaaguu

SEQ ID NO: 1728425 - RNA, 19 nt, Homo sapiens
  misc_RNA (1)...(19): siRNA sense strand
gugaaggccaguggucuug

SEQ ID NO: 1728426 - RNA, 19 nt, Homo sapiens
  misc_RNA (1)...(19): siRNA sense strand
aagguuauccuggagacua

SEQ ID NO: 1728427 - RNA, 19 nt, Homo sapiens
  misc_RNA (1)...(19): siRNA sense strand
cccgaguacuuauaauugg

SEQ ID NO: 1728428 - RNA, 19 nt, Homo sapiens
  misc_RNA (1)...(19): siRNA sense strand
ugauccagagugccaagua

SEQ ID NO: 1728429 - RNA, 19 nt, Homo sapiens
  misc_RNA (1)...(19): siRNA sense strand
gaauaaugcugaccaagaa

SEQ ID NO: 1728430 - RNA, 19 nt, Homo sapiens
  misc_RNA (1)...(19): siRNA sense strand
gcacaucucugccuguuug

SEQ ID NO: 1728431 - RNA, 19 nt, Homo sapiens
  misc_RNA (1)...(19): siRNA sense strand
gagaagaggugucgugucu

SEQ ID NO: 1728432 - RNA, 19 nt, Homo sapiens
  misc_RNA (1)...(19): siRNA sense strand
gcaagaggguacuccauau

SEQ ID NO: 1728433 - RNA, 19 nt, Homo sapiens
  misc_RNA (1)...(19): siRNA sense strand
gaagaggugucgugucugu

SEQ ID NO: 1728434 - RNA, 19 nt, Homo sapiens
  misc_RNA (1)...(19): siRNA sense strand
guaauccucccacuucuua

SEQ ID NO: 1728435 - RNA, 19 nt, Homo sapiens
  misc_RNA (1)...(19): siRNA sense strand
ggaauaaugcugaccaaga

SEQ ID NO: 1728436 - RNA, 19 nt, Homo sapiens
  misc_RNA (1)...(19): siRNA sense strand
gauccagagugccaaguaa

SEQ ID NO: 1728437 - RNA, 19 nt, Homo sapiens
  misc_RNA (1)...(19): siRNA sense strand
gcucaauucugcaaagaga

SEQ ID NO: 1728438 - RNA, 19 nt, Homo sapiens
  misc_RNA (1)...(19): siRNA sense strand
gcaaagcuguacaagagau

SEQ ID NO: 1728439 - RNA, 19 nt, Homo sapiens
  misc_RNA (1)...(19): siRNA sense strand
acacugcccuugcucaauu

SEQ ID NO: 1728440 - RNA, 19 nt, Homo sapiens
  misc_RNA (1)...(19): siRNA sense strand
caaagaagaggccugcaaa

SEQ ID NO: 1728441 - RNA, 19 nt, Homo sapiens
  misc_RNA (1)...(19): siRNA sense strand
gcaaagagaagaaaauuga

SEQ ID NO: 1728442 - RNA, 19 nt, Homo sapiens
  misc_RNA (1)...(19): siRNA sense strand
cugcaaagcuguacaagag

SEQ ID NO: 1728443 - RNA, 19 nt, Homo sapiens
  misc_RNA (1)...(19): siRNA sense strand
ggacugcucugcacaucuc

SEQ ID NO: 1728444 - RNA, 19 nt, Homo sapiens
  misc_RNA (1)...(19): siRNA sense strand
caagaggguacuccauaua

SEQ ID NO: 1728445 - RNA, 19 nt, Homo sapiens
  misc_RNA (1)...(19): siRNA sense strand
agacuucccugcuuugguu

SEQ ID NO: 1728446 - RNA, 19 nt, Homo sapiens
  misc_RNA (1)...(19): siRNA sense strand
gcaaagaagaggccugcaa

SEQ ID NO: 1728447 - RNA, 19 nt, Homo sapiens
  misc_RNA (1)...(19): siRNA sense strand
ucucuaugcuggaauaaug

SEQ ID NO: 1728448 - RNA, 19 nt, Homo sapiens
  misc_RNA (1)...(19): siRNA sense strand
gggagcaauuuauaggaaa

SEQ ID NO: 1728449 - RNA, 19 nt, Homo sapiens
  misc_RNA (1)...(19): siRNA sense strand
cauaucagcccuugaggaa

SEQ ID NO: 1728450 - RNA, 19 nt, Homo sapiens
  misc_RNA (1)...(19): siRNA sense strand
gguacuccauauacaggua

SEQ ID NO: 1728451 - RNA, 19 nt, Homo sapiens
  misc_RNA (1)...(19): siRNA sense strand
gcagcccgaguacuuauaa

SEQ ID NO: 1728452 - RNA, 19 nt, Homo sapiens
  misc_RNA (1)...(19): siRNA sense strand
caaauaccgccaucucaau

SEQ ID NO: 1728453 - RNA, 19 nt, Homo sapiens
  misc_RNA (1)...(19): siRNA sense strand
gguauucucuaugcuggaa

SEQ ID NO: 1728454 - RNA, 19 nt, Homo sapiens
  misc_RNA (1)...(19): siRNA sense strand
ucagguuucuaaugaucua

SEQ ID NO: 1728455 - RNA, 19 nt, Homo sapiens
  misc_RNA (1)...(19): siRNA sense strand
ccacaccgcccuaacuguu

SEQ ID NO: 1728456 - RNA, 19 nt, Homo sapiens
  misc_RNA (1)...(19): siRNA sense strand
ucaaauaccgccaucucaa

SEQ ID NO: 1728457 - RNA, 19 nt, Homo sapiens
  misc_RNA (1)...(19): siRNA sense strand
cagaagcggcucaguuaga

SEQ ID NO: 1728458 - RNA, 19 nt, Homo sapiens
  misc_RNA (1)...(19): siRNA sense strand
aacauacgcuggccuggaa

SEQ ID NO: 1728459 - RNA, 19 nt, Homo sapiens
  misc_RNA (1)...(19): siRNA sense strand
gaaggccaguggucuugca

SEQ ID NO: 1728460 - RNA, 19 nt, Homo sapiens
  misc_RNA (1)...(19): siRNA sense strand
ggagcaauuuauaggaaag

SEQ ID NO: 1728461 - RNA, 19 nt, Homo sapiens
  misc_RNA (1)...(19): siRNA sense strand
gcccgaguacuuauaauug

SEQ ID NO: 1728462 - RNA, 19 nt, Homo sapiens
  misc_RNA (1)...(19): siRNA sense strand
cagcagaagcggcucaguu

SEQ ID NO: 1728463 - RNA, 19 nt, Homo sapiens
  misc_RNA (1)...(19): siRNA sense strand
agcagaagcggcucaguua

SEQ ID NO: 1728464 - RNA, 19 nt, Homo sapiens
  misc_RNA (1)...(19): siRNA sense strand
caaagaguuuauggacaga

SEQ ID NO: 1728465 - RNA, 19 nt, Homo sapiens
  misc_RNA (1)...(19): siRNA sense strand
acaggaccauaagcgauua

SEQ ID NO: 1728466 - RNA, 19 nt, Homo sapiens
  misc_RNA (1)...(19): siRNA sense strand
gcagcuggagaaacaauug

SEQ ID NO: 1728467 - RNA, 19 nt, Homo sapiens
  misc_RNA (1)...(19): siRNA sense strand
ggaaaaggggugauuguug

SEQ ID NO: 1728468 - RNA, 19 nt, Homo sapiens
  misc_RNA (1)...(19): siRNA sense strand
auggaaggcuuucaccaaa

SEQ ID NO: 1728469 - RNA, 19 nt, Homo sapiens
  misc_RNA (1)...(19): siRNA sense strand
ucaguuagaguccagcaaa

SEQ ID NO: 1728470 - RNA, 19 nt, Homo sapiens
  misc_RNA (1)...(19): siRNA sense strand
ggagaugguggcccuaaca

SEQ ID NO: 1728471 - RNA, 19 nt, Homo sapiens
  misc_RNA (1)...(19): siRNA sense strand
cgcccuaacuguugucaug

SEQ ID NO: 1728472 - RNA, 19 nt, Homo sapiens
  misc_RNA (1)...(19): siRNA sense strand
gaccaagaauggcccaaaa

SEQ ID NO: 1728473 - RNA, 19 nt, Homo sapiens
  misc_RNA (1)...(19): siRNA sense strand
ggaaugggagccuauuguc

SEQ ID NO: 1728474 - RNA, 19 nt, Homo sapiens
  misc_RNA (1)...(19): siRNA sense strand
gggaaugggagccuauugu

SEQ ID NO: 1728475 - RNA, 19 nt, Homo sapiens
  misc_RNA (1)...(19): siRNA sense strand
cccaaaaguucuagaguuu

SEQ ID NO: 1728476 - RNA, 19 nt, Homo sapiens
  misc_RNA (1)...(19): siRNA sense strand
gcccaaaaguucuagaguu

SEQ ID NO: 1728477 - RNA, 19 nt, Homo sapiens
  misc_RNA (1)...(19): siRNA sense strand
cgucggcuuucgugccaua

SEQ ID NO: 1728478 - RNA, 19 nt, Homo sapiens
  misc_RNA (1)...(19): siRNA sense strand
ggaaggcuuucaccaaacc

SEQ ID NO: 1728479 - RNA, 19 nt, Homo sapiens
  misc_RNA (1)...(19): siRNA sense strand
ccucagguuucuaaugauc

SEQ ID NO: 1728480 - RNA, 19 nt, Homo sapiens
  misc_RNA (1)...(19): siRNA sense strand
gugauucaguccaccuuag

SEQ ID NO: 1728481 - RNA, 19 nt, Homo sapiens
  misc_RNA (1)...(19): siRNA sense strand
agggagcaauuuauaggaa

SEQ ID NO: 1728482 - RNA, 19 nt, Homo sapiens
  misc_RNA (1)...(19): siRNA sense strand
gcaggagugcaaugcuuug

SEQ ID NO: 1728483 - RNA, 19 nt, Homo sapiens
  misc_RNA (1)...(19): siRNA sense strand
gaggugucgugucuguguu

SEQ ID NO: 1728484 - RNA, 19 nt, Homo sapiens
  misc_RNA (1)...(19): siRNA sense strand
caucaugucaaacaagugu

SEQ ID NO: 1728485 - RNA, 19 nt, Homo sapiens
  misc_RNA (1)...(19): siRNA sense strand
cauggcaaguaaagguuau

SEQ ID NO: 1728486 - RNA, 19 nt, Homo sapiens
  misc_RNA (1)...(19): siRNA sense strand
uggagaaacaauugucauu

SEQ ID NO: 1728487 - RNA, 19 nt, Homo sapiens
  misc_RNA (1)...(19): siRNA sense strand
gagggagcaauuuauagga

SEQ ID NO: 1728488 - RNA, 19 nt, Homo sapiens
  misc_RNA (1)...(19): siRNA sense strand
ugaggaagccaagaaagga

SEQ ID NO: 1728489 - RNA, 19 nt, Homo sapiens
  misc_RNA (1)...(19): siRNA sense strand
uggauggcaugcagcaaga

SEQ ID NO: 1728490 - RNA, 19 nt, Homo sapiens
  misc_RNA (1)...(19): siRNA sense strand
cacaggaccauaagcgauu

SEQ ID NO: 1728491 - RNA, 19 nt, Homo sapiens
  misc_RNA (1)...(19): siRNA sense strand
ucacugauggcaagacugu

SEQ ID NO: 1728492 - RNA, 19 nt, Homo sapiens
  misc_RNA (1)...(19): siRNA sense strand
gcagaagcggcucaguuag

SEQ ID NO: 1728493 - RNA, 19 nt, Homo sapiens
  misc_RNA (1)...(19): siRNA sense strand
ggaagccaagaaaggacua

SEQ ID NO: 1728494 - RNA, 19 nt, Homo sapiens
  misc_RNA (1)...(19): siRNA sense strand
ccaaggguguagagauaac

SEQ ID NO: 1728495 - RNA, 19 nt, Homo sapiens
  misc_RNA (1)...(19): siRNA sense strand
ucauggcaaguaaagguua

SEQ ID NO: 1728496 - RNA, 19 nt, Homo sapiens
  misc_RNA (1)...(19): siRNA sense strand
agaggguacuccauauaca

SEQ ID NO: 1728497 - RNA, 19 nt, Homo sapiens
  misc_RNA (1)...(19): siRNA sense strand
gcacagucucaucauguca

SEQ ID NO: 1728498 - RNA, 19 nt, Homo sapiens
  misc_RNA (1)...(19): siRNA sense strand
ggcaaaguaguaacucaug

SEQ ID NO: 1728499 - RNA, 19 nt, Homo sapiens
  misc_RNA (1)...(19): siRNA sense strand
uuugagggagcaauuuaua

SEQ ID NO: 1728500 - RNA, 19 nt, Homo sapiens
  misc_RNA (1)...(19): siRNA sense strand
agaagcggcucaguuagag

SEQ ID NO: 1728501 - RNA, 19 nt, Homo sapiens
  misc_RNA (1)...(19): siRNA sense strand
acagucucaucaugucaaa

SEQ ID NO: 1728502 - RNA, 19 nt, Homo sapiens
  misc_RNA (1)...(19): siRNA sense strand
gaguuuaauugccguuuug

SEQ ID NO: 1728503 - RNA, 19 nt, Homo sapiens
  misc_RNA (1)...(19): siRNA sense strand
agcaagaggguacuccaua

SEQ ID NO: 1728504 - RNA, 19 nt, Homo sapiens
  misc_RNA (1)...(19): siRNA sense strand
aagagaucaugcaggagaa

SEQ ID NO: 1728505 - RNA, 19 nt, Homo sapiens
  misc_RNA (1)...(19): siRNA sense strand
aaaguuugagggagcaauu

SEQ ID NO: 1728506 - RNA, 19 nt, Homo sapiens
  misc_RNA (1)...(19): siRNA sense strand
ccacacugcccuugcucaa

SEQ ID NO: 1728507 - RNA, 19 nt, Homo sapiens
  misc_RNA (1)...(19): siRNA sense strand
guagagauaacaggguuuc

SEQ ID NO: 1728508 - RNA, 19 nt, Homo sapiens
  misc_RNA (1)...(19): siRNA sense strand
uguaguuguuggaccagaa

SEQ ID NO: 1728509 - RNA, 19 nt, Homo sapiens
  misc_RNA (1)...(19): siRNA sense strand
gcacaauggaaggcuuuca

SEQ ID NO: 1728510 - RNA, 19 nt, Homo sapiens
  misc_RNA (1)...(19): siRNA sense strand
gagcaauuuauaggaaaga

SEQ ID NO: 1728511 - RNA, 19 nt, Homo sapiens
  misc_RNA (1)...(19): siRNA sense strand
cugcacaucucugccuguu

SEQ ID NO: 1728512 - RNA, 19 nt, Homo sapiens
  misc_RNA (1)...(19): siRNA sense strand
ugucuguguuucacugaug

SEQ ID NO: 1728513 - RNA, 19 nt, Homo sapiens
  misc_RNA (1)...(19): siRNA sense strand
agaagaggccugcaaagcu

SEQ ID NO: 1728514 - RNA, 19 nt, Homo sapiens
  misc_RNA (1)...(19): siRNA sense strand
gccugcagcuucauuuuga

SEQ ID NO: 1728515 - RNA, 19 nt, Homo sapiens
  misc_RNA (1)...(19): siRNA sense strand
aauggaaggcuuucaccaa

SEQ ID NO: 1728516 - RNA, 19 nt, Homo sapiens
  misc_RNA (1)...(19): siRNA sense strand
ccccucagguuucuaauga

SEQ ID NO: 1728517 - RNA, 19 nt, Homo sapiens
  misc_RNA (1)...(19): siRNA sense strand
acaccgcccuaacuguugu

SEQ ID NO: 1728518 - RNA, 19 nt, Homo sapiens
  misc_RNA (1)...(19): siRNA sense strand
gaaaaccacaccgcccuaa

SEQ ID NO: 1728519 - RNA, 19 nt, Homo sapiens
  misc_RNA (1)...(19): siRNA sense strand
caagaauggcccaaaaguu

SEQ ID NO: 1728520 - RNA, 19 nt, Homo sapiens
  misc_RNA (1)...(19): siRNA sense strand
gugaaggccaguggucuug

SEQ ID NO: 1728521 - RNA, 19 nt, Homo sapiens
  misc_RNA (1)...(19): siRNA sense strand
aagguuauccuggagacua

SEQ ID NO: 1728522 - RNA, 19 nt, Homo sapiens
  misc_RNA (1)...(19): siRNA sense strand
cccgaguacuuauaauugg

SEQ ID NO: 1728523 - RNA, 19 nt, Homo sapiens
  misc_RNA (1)...(19): siRNA sense strand
ugauccagagugccaagua

SEQ ID NO: 1728524 - RNA, 19 nt, Homo sapiens
  misc_RNA (1)...(19): siRNA sense strand
gaaaugcccucaaauuaga

SEQ ID NO: 1728525 - RNA, 19 nt, Homo sapiens
  misc_RNA (1)...(19): siRNA sense strand
agaagaagcuuaugaguuu

SEQ ID NO: 1728526 - RNA, 19 nt, Homo sapiens
  misc_RNA (1)...(19): siRNA sense strand
guaaaggacuucguaauga

SEQ ID NO: 1728527 - RNA, 19 nt, Homo sapiens
  misc_RNA (1)...(19): siRNA sense strand
aagagaggcuucaaauuua

SEQ ID NO: 1728528 - RNA, 19 nt, Homo sapiens
  misc_RNA (1)...(19): siRNA sense strand
gggaaauacuguugaaauu

SEQ ID NO: 1728529 - RNA, 19 nt, Homo sapiens
  misc_RNA (1)...(19): siRNA sense strand
gcugaaagauuaugauaug

SEQ ID NO: 1728530 - RNA, 19 nt, Homo sapiens
  misc_RNA (1)...(19): siRNA sense strand
gcaaguuccuccaaacaaa

SEQ ID NO: 1728531 - RNA, 19 nt, Homo sapiens
  misc_RNA (1)...(19): siRNA sense strand
gaaauacuguugaaauugg

SEQ ID NO: 1728532 - RNA, 19 nt, Homo sapiens
  misc_RNA (1)...(19): siRNA sense strand
guaaugaugucaagaguca

SEQ ID NO: 1728533 - RNA, 19 nt, Homo sapiens
  misc_RNA (1)...(19): siRNA sense strand
gauaccagcuucuucaguu

SEQ ID NO: 1728534 - RNA, 19 nt, Homo sapiens
  misc_RNA (1)...(19): siRNA sense strand
gcauguauauggacucuug

SEQ ID NO: 1728535 - RNA, 19 nt, Homo sapiens
  misc_RNA (1)...(19): siRNA sense strand
gcaagaugauucugucgaa

SEQ ID NO: 1728536 - RNA, 19 nt, Homo sapiens
  misc_RNA (1)...(19): siRNA sense strand
ggagagacuuuggcuauga

SEQ ID NO: 1728537 - RNA, 19 nt, Homo sapiens
  misc_RNA (1)...(19): siRNA sense strand
acacugaacuguuuaggaa

SEQ ID NO: 1728538 - RNA, 19 nt, Homo sapiens
  misc_RNA (1)...(19): siRNA sense strand
aaacgcaucuugaaauguu

SEQ ID NO: 1728539 - RNA, 19 nt, Homo sapiens
  misc_RNA (1)...(19): siRNA sense strand
ccgaaaugcccucaaauua

SEQ ID NO: 1728540 - RNA, 19 nt, Homo sapiens
  misc_RNA (1)...(19): siRNA sense strand
caaauuagcacuuuagaag

SEQ ID NO: 1728541 - RNA, 19 nt, Homo sapiens
  misc_RNA (1)...(19): siRNA sense strand
gcaggaaucuuuggaacau

SEQ ID NO: 1728542 - RNA, 19 nt, Homo sapiens
  misc_RNA (1)...(19): siRNA sense strand
uccaggaacuuguuacuaa

SEQ ID NO: 1728543 - RNA, 19 nt, Homo sapiens
  misc_RNA (1)...(19): siRNA sense strand
gcagaucuguugcaggaau

SEQ ID NO: 1728544 - RNA, 19 nt, Homo sapiens
  misc_RNA (1)...(19): siRNA sense strand
gcaauuacacccagaagau

SEQ ID NO: 1728545 - RNA, 19 nt, Homo sapiens
  misc_RNA (1)...(19): siRNA sense strand
ggaaauacuguugaaauug

SEQ ID NO: 1728546 - RNA, 19 nt, Homo sapiens
  misc_RNA (1)...(19): siRNA sense strand
ggaagaauuuagacaaacu

SEQ ID NO: 1728547 - RNA, 19 nt, Homo sapiens
  misc_RNA (1)...(19): siRNA sense strand
gagagaggcagaucuguug

SEQ ID NO: 1728548 - RNA, 19 nt, Homo sapiens
  misc_RNA (1)...(19): siRNA sense strand
cccagaagauuaccuuuga

SEQ ID NO: 1728549 - RNA, 19 nt, Homo sapiens
  misc_RNA (1)...(19): siRNA sense strand
uaaaggacuucguaaugau

SEQ ID NO: 1728550 - RNA, 19 nt, Homo sapiens
  misc_RNA (1)...(19): siRNA sense strand
accauuugcugaaagauua

SEQ ID NO: 1728551 - RNA, 19 nt, Homo sapiens
  misc_RNA (1)...(19): siRNA sense strand
gagagacuuuggcuaugaa

SEQ ID NO: 1728552 - RNA, 19 nt, Homo sapiens
  misc_RNA (1)...(19): siRNA sense strand
cagcgugccuccuggauug

SEQ ID NO: 1728553 - RNA, 19 nt, Homo sapiens
  misc_RNA (1)...(19): siRNA sense strand
cgaaaugcccucaaauuag

SEQ ID NO: 1728554 - RNA, 19 nt, Homo sapiens
  misc_RNA (1)...(19): siRNA sense strand
cuuaugaguuuguucguaa

SEQ ID NO: 1728555 - RNA, 19 nt, Homo sapiens
  misc_RNA (1)...(19): siRNA sense strand
gaagauuaccuuugacucu

SEQ ID NO: 1728556 - RNA, 19 nt, Homo sapiens
  misc_RNA (1)...(19): siRNA sense strand
gaagaagcuuaugaguuug

SEQ ID NO: 1728557 - RNA, 19 nt, Homo sapiens
  misc_RNA (1)...(19): siRNA sense strand
guuaugaacagaagcagua

SEQ ID NO: 1728558 - RNA, 19 nt, Homo sapiens
  misc_RNA (1)...(19): siRNA sense strand
gaacagaagcaguacaaaa

SEQ ID NO: 1728559 - RNA, 19 nt, Homo sapiens
  misc_RNA (1)...(19): siRNA sense strand
gaacauggagagacuuugg

SEQ ID NO: 1728560 - RNA, 19 nt, Homo sapiens
  misc_RNA (1)...(19): siRNA sense strand
guugaaauugggaagauua

SEQ ID NO: 1728561 - RNA, 19 nt, Homo sapiens
  misc_RNA (1)...(19): siRNA sense strand
augaaaggauuaacacuga

SEQ ID NO: 1728562 - RNA, 19 nt, Homo sapiens
  misc_RNA (1)...(19): siRNA sense strand
uuaccgaaaugcccucaaa

SEQ ID NO: 1728563 - RNA, 19 nt, Homo sapiens
  misc_RNA (1)...(19): siRNA sense strand
gcuuaugaguuuguucgua

SEQ ID NO: 1728564 - RNA, 19 nt, Homo sapiens
  misc_RNA (1)...(19): siRNA sense strand
cguaaaggacuucguaaug

SEQ ID NO: 1728565 - RNA, 19 nt, Homo sapiens
  misc_RNA (1)...(19): siRNA sense strand
agagaggcuucaaauuuau

SEQ ID NO: 1728566 - RNA, 19 nt, Homo sapiens
  misc_RNA (1)...(19): siRNA sense strand
agauaaagauaaccugcaa

SEQ ID NO: 1728567 - RNA, 19 nt, Homo sapiens
  misc_RNA (1)...(19): siRNA sense strand
gauuggauaugcuauugca

SEQ ID NO: 1728568 - RNA, 19 nt, Homo sapiens
  misc_RNA (1)...(19): siRNA sense strand
ucaagagucaugucuguug

SEQ ID NO: 1728569 - RNA, 19 nt, Homo sapiens
  misc_RNA (1)...(19): siRNA sense strand
ugaaaggauuaacacugaa

SEQ ID NO: 1728570 - RNA, 19 nt, Homo sapiens
  misc_RNA (1)...(19): siRNA sense strand
aagaagaagcuuaugaguu

SEQ ID NO: 1728571 - RNA, 19 nt, Homo sapiens
  misc_RNA (1)...(19): siRNA sense strand
cauaccauuugcugaaaga

SEQ ID NO: 1728572 - RNA, 19 nt, Homo sapiens
  misc_RNA (1)...(19): siRNA sense strand
guucguaaaggacuucgua

SEQ ID NO: 1728573 - RNA, 19 nt, Homo sapiens
  misc_RNA (1)...(19): siRNA sense strand
caaaugagagaccuugaag

SEQ ID NO: 1728574 - RNA, 19 nt, Homo sapiens
  misc_RNA (1)...(19): siRNA sense strand
ccaaaugagagaccuugaa

SEQ ID NO: 1728575 - RNA, 19 nt, Homo sapiens
  misc_RNA (1)...(19): siRNA sense strand
ugucaagagucaugucugu

SEQ ID NO: 1728576 - RNA, 19 nt, Homo sapiens
  misc_RNA (1)...(19): siRNA sense strand
ggaaucuuuggaacauaua

SEQ ID NO: 1728577 - RNA, 19 nt, Homo sapiens
  misc_RNA (1)...(19): siRNA sense strand
aauuacacccagaagauua

SEQ ID NO: 1728578 - RNA, 19 nt, Homo sapiens
  misc_RNA (1)...(19): siRNA sense strand
ugaguuuguucguaaagga

SEQ ID NO: 1728579 - RNA, 19 nt, Homo sapiens
  misc_RNA (1)...(19): siRNA sense strand
caauuacacccagaagauu

SEQ ID NO: 1728580 - RNA, 19 nt, Homo sapiens
  misc_RNA (1)...(19): siRNA sense strand
aggaaucuuuggaacauau

SEQ ID NO: 1728581 - RNA, 19 nt, Homo sapiens
  misc_RNA (1)...(19): siRNA sense strand
gaugagagaggcagaucug

SEQ ID NO: 1728582 - RNA, 19 nt, Homo sapiens
  misc_RNA (1)...(19): siRNA sense strand
uggauuggauaugcuauug

SEQ ID NO: 1728583 - RNA, 19 nt, Homo sapiens
  misc_RNA (1)...(19): siRNA sense strand
gcauaccauuugcugaaag

SEQ ID NO: 1728584 - RNA, 19 nt, Homo sapiens
  misc_RNA (1)...(19): siRNA sense strand
caggaaucuuuggaacaua

SEQ ID NO: 1728585 - RNA, 19 nt, Homo sapiens
  misc_RNA (1)...(19): siRNA sense strand
auuaugauauggcccuaaa

SEQ ID NO: 1728586 - RNA, 19 nt, Homo sapiens
  misc_RNA (1)...(19): siRNA sense strand
aauuagcacuuuagaagag

SEQ ID NO: 1728587 - RNA, 19 nt, Homo sapiens
  misc_RNA (1)...(19): siRNA sense strand
agaagccagugaaguguuc

SEQ ID NO: 1728588 - RNA, 19 nt, Homo sapiens
  misc_RNA (1)...(19): siRNA sense strand
gauaaagauaaccugcaaa

SEQ ID NO: 1728589 - RNA, 19 nt, Homo sapiens
  misc_RNA (1)...(19): siRNA sense strand
aaaauuugcugaacaugga

SEQ ID NO: 1728590 - RNA, 19 nt, Homo sapiens
  misc_RNA (1)...(19): siRNA sense strand
ugagagaggcagaucuguu

SEQ ID NO: 1728591 - RNA, 19 nt, Homo sapiens
  misc_RNA (1)...(19): siRNA sense strand
gcccucaaauuagauaaag

SEQ ID NO: 1728592 - RNA, 19 nt, Homo sapiens
  misc_RNA (1)...(19): siRNA sense strand
cuacaaauuagcacuuuag

SEQ ID NO: 1728593 - RNA, 19 nt, Homo sapiens
  misc_RNA (1)...(19): siRNA sense strand
gaaaggauuaacacugaac

SEQ ID NO: 1728594 - RNA, 19 nt, Homo sapiens
  misc_RNA (1)...(19): siRNA sense strand
gaagguuaccgagagacaa

SEQ ID NO: 1728595 - RNA, 19 nt, Homo sapiens
  misc_RNA (1)...(19): siRNA sense strand
gcuauugcauaccauuugc

SEQ ID NO: 1728596 - RNA, 19 nt, Homo sapiens
  misc_RNA (1)...(19): siRNA sense strand
agauuaccuuugacucuug

SEQ ID NO: 1728597 - RNA, 19 nt, Homo sapiens
  misc_RNA (1)...(19): siRNA sense strand
guuggaagaauuuagacaa

SEQ ID NO: 1728598 - RNA, 19 nt, Homo sapiens
  misc_RNA (1)...(19): siRNA sense strand
uauaauccaggaacuuguu

SEQ ID NO: 1728599 - RNA, 19 nt, Homo sapiens
  misc_RNA (1)...(19): siRNA sense strand
gauuaccuuugacucuugu

SEQ ID NO: 1728600 - RNA, 19 nt, Homo sapiens
  misc_RNA (1)...(19): siRNA sense strand
gagaggcuucaaauuuaug

SEQ ID NO: 1728601 - RNA, 19 nt, Homo sapiens
  misc_RNA (1)...(19): siRNA sense strand
gaagaauuuagacaaacuc

SEQ ID NO: 1728602 - RNA, 19 nt, Homo sapiens
  misc_RNA (1)...(19): siRNA sense strand
aaaagaagccagugaagug

SEQ ID NO: 1728603 - RNA, 19 nt, Homo sapiens
  misc_RNA (1)...(19): siRNA sense strand
ucagcaaguuccuccaaac

SEQ ID NO: 1728604 - RNA, 19 nt, Homo sapiens
  misc_RNA (1)...(19): siRNA sense strand
gcucuacaaauuagcacuu

SEQ ID NO: 1728605 - RNA, 19 nt, Homo sapiens
  misc_RNA (1)...(19): siRNA sense strand
cagcaaguuccuccaaaca

SEQ ID NO: 1728606 - RNA, 19 nt, Homo sapiens
  misc_RNA (1)...(19): siRNA sense strand
ucuugcagcguucugauaa

SEQ ID NO: 1728607 - RNA, 19 nt, Homo sapiens
  misc_RNA (1)...(19): siRNA sense strand
gaaauuaaaggggaaauac

SEQ ID NO: 1728608 - RNA, 19 nt, Homo sapiens
  misc_RNA (1)...(19): siRNA sense strand
gauauggcccuaaaacugu

SEQ ID NO: 1728609 - RNA, 19 nt, Homo sapiens
  misc_RNA (1)...(19): siRNA sense strand
aaagaagaagcuuaugagu

SEQ ID NO: 1728610 - RNA, 19 nt, Homo sapiens
  misc_RNA (1)...(19): siRNA sense strand
auaccagcuucuucaguug

SEQ ID NO: 1728611 - RNA, 19 nt, Homo sapiens
  misc_RNA (1)...(19): siRNA sense strand
ucuauaauccaggaacuug

SEQ ID NO: 1728612 - RNA, 19 nt, Homo sapiens
  misc_RNA (1)...(19): siRNA sense strand
accgaaaugcccucaaauu

SEQ ID NO: 1728613 - RNA, 19 nt, Homo sapiens
  misc_RNA (1)...(19): siRNA sense strand
caaacgcaucuugaaaugu

SEQ ID NO: 1728614 - RNA, 19 nt, Homo sapiens
  misc_RNA (1)...(19): siRNA sense strand
ggacuucguaaugauguca

SEQ ID NO: 1728615 - RNA, 19 nt, Homo sapiens
  misc_RNA (1)...(19): siRNA sense strand
uaccauuugcugaaagauu

SEQ ID NO: 1728616 - RNA, 19 nt, Homo sapiens
  misc_RNA (1)...(19): siRNA sense strand
uugcauaccauuugcugaa

SEQ ID NO: 1728617 - RNA, 19 nt, Homo sapiens
  misc_RNA (1)...(19): siRNA sense strand
uggagagacuuuggcuaug

SEQ ID NO: 1728618 - RNA, 19 nt, Homo sapiens
  misc_RNA (1)...(19): siRNA sense strand
aaaggacuucguaaugaug

SEQ ID NO: 1728619 - RNA, 19 nt, Homo sapiens
  misc_RNA (1)...(19): siRNA sense strand
ugcauaccauuugcugaaa

SEQ ID NO: 1728620 - RNA, 19 nt, Homo sapiens
  misc_RNA (1)...(19): siRNA sense strand
aaagaagccagugaagugu

SEQ ID NO: 1728621 - RNA, 19 nt, Homo sapiens
  misc_RNA (1)...(19): siRNA sense strand
gaaaugcccucaaauuaga

SEQ ID NO: 1728622 - RNA, 19 nt, Homo sapiens
  misc_RNA (1)...(19): siRNA sense strand
agaagaagcuuaugaguuu

SEQ ID NO: 1728623 - RNA, 19 nt, Homo sapiens
  misc_RNA (1)...(19): siRNA sense strand
guaaaggacuucguaauga

SEQ ID NO: 1728624 - RNA, 19 nt, Homo sapiens
  misc_RNA (1)...(19): siRNA sense strand
aagagaggcuucaaauuua

SEQ ID NO: 1728625 - RNA, 19 nt, Homo sapiens
  misc_RNA (1)...(19): siRNA sense strand
gggaaauacuguugaaauu

SEQ ID NO: 1728626 - RNA, 19 nt, Homo sapiens
  misc_RNA (1)...(19): siRNA sense strand
gcugaaagauuaugauaug

SEQ ID NO: 1728627 - RNA, 19 nt, Homo sapiens
  misc_RNA (1)...(19): siRNA sense strand
gcaaguuccuccaaacaaa

SEQ ID NO: 1728628 - RNA, 19 nt, Homo sapiens
  misc_RNA (1)...(19): siRNA sense strand
gaaauacuguugaaauugg

SEQ ID NO: 1728629 - RNA, 19 nt, Homo sapiens
  misc_RNA (1)...(19): siRNA sense strand
guaaugaugucaagaguca

SEQ ID NO: 1728630 - RNA, 19 nt, Homo sapiens
  misc_RNA (1)...(19): siRNA sense strand
gauaccagcuucuucaguu

SEQ ID NO: 1728631 - RNA, 19 nt, Homo sapiens
  misc_RNA (1)...(19): siRNA sense strand
gcauguauauggacucuug

SEQ ID NO: 1728632 - RNA, 19 nt, Homo sapiens
  misc_RNA (1)...(19): siRNA sense strand
gcaagaugauucugucgaa

SEQ ID NO: 1728633 - RNA, 19 nt, Homo sapiens
  misc_RNA (1)...(19): siRNA sense strand
ggagagacuuuggcuauga

SEQ ID NO: 1728634 - RNA, 19 nt, Homo sapiens
  misc_RNA (1)...(19): siRNA sense strand
acacugaacuguuuaggaa

SEQ ID NO: 1728635 - RNA, 19 nt, Homo sapiens
  misc_RNA (1)...(19): siRNA sense strand
aaacgcaucuugaaauguu

SEQ ID NO: 1728636 - RNA, 19 nt, Homo sapiens
  misc_RNA (1)...(19): siRNA sense strand
ccgaaaugcccucaaauua

SEQ ID NO: 1728637 - RNA, 19 nt, Homo sapiens
  misc_RNA (1)...(19): siRNA sense strand
gcacagcacuuugauaaac

SEQ ID NO: 1728638 - RNA, 19 nt, Homo sapiens
  misc_RNA (1)...(19): siRNA sense strand
caaauuagcacuuuagaag

SEQ ID NO: 1728639 - RNA, 19 nt, Homo sapiens
  misc_RNA (1)...(19): siRNA sense strand
gcaggaaucuuuggaacau

SEQ ID NO: 1728640 - RNA, 19 nt, Homo sapiens
  misc_RNA (1)...(19): siRNA sense strand
uccaggaacuuguuacuaa

SEQ ID NO: 1728641 - RNA, 19 nt, Homo sapiens
  misc_RNA (1)...(19): siRNA sense strand
gcagaucuguugcaggaau

SEQ ID NO: 1728642 - RNA, 19 nt, Homo sapiens
  misc_RNA (1)...(19): siRNA sense strand
gcaauuacacccagaagau

SEQ ID NO: 1728643 - RNA, 19 nt, Homo sapiens
  misc_RNA (1)...(19): siRNA sense strand
ggaaauacuguugaaauug

SEQ ID NO: 1728644 - RNA, 19 nt, Homo sapiens
  misc_RNA (1)...(19): siRNA sense strand
ggaagaauuuagacaaacu

SEQ ID NO: 1728645 - RNA, 19 nt, Homo sapiens
  misc_RNA (1)...(19): siRNA sense strand
gcacuuugauaaacuugga

SEQ ID NO: 1728646 - RNA, 19 nt, Homo sapiens
  misc_RNA (1)...(19): siRNA sense strand
gagagaggcagaucuguug

SEQ ID NO: 1728647 - RNA, 19 nt, Homo sapiens
  misc_RNA (1)...(19): siRNA sense strand
cccagaagauuaccuuuga

SEQ ID NO: 1728648 - RNA, 19 nt, Homo sapiens
  misc_RNA (1)...(19): siRNA sense strand
uaaaggacuucguaaugau

SEQ ID NO: 1728649 - RNA, 19 nt, Homo sapiens
  misc_RNA (1)...(19): siRNA sense strand
gcagaaaauugguguuauu

SEQ ID NO: 1728650 - RNA, 19 nt, Homo sapiens
  misc_RNA (1)...(19): siRNA sense strand
accauuugcugaaagauua

SEQ ID NO: 1728651 - RNA, 19 nt, Homo sapiens
  misc_RNA (1)...(19): siRNA sense strand
gagagacuuuggcuaugaa

SEQ ID NO: 1728652 - RNA, 19 nt, Homo sapiens
  misc_RNA (1)...(19): siRNA sense strand
cagcgugccuccuggauug

SEQ ID NO: 1728653 - RNA, 19 nt, Homo sapiens
  misc_RNA (1)...(19): siRNA sense strand
cgaaaugcccucaaauuag

SEQ ID NO: 1728654 - RNA, 19 nt, Homo sapiens
  misc_RNA (1)...(19): siRNA sense strand
cuuaugaguuuguucguaa

SEQ ID NO: 1728655 - RNA, 19 nt, Homo sapiens
  misc_RNA (1)...(19): siRNA sense strand
gaagauuaccuuugacucu

SEQ ID NO: 1728656 - RNA, 19 nt, Homo sapiens
  misc_RNA (1)...(19): siRNA sense strand
gaagaagcuuaugaguuug

SEQ ID NO: 1728657 - RNA, 19 nt, Homo sapiens
  misc_RNA (1)...(19): siRNA sense strand
gcuaguacuccaacucuaa

SEQ ID NO: 1728658 - RNA, 19 nt, Homo sapiens
  misc_RNA (1)...(19): siRNA sense strand
ugauaaacuuggacaguau

SEQ ID NO: 1728659 - RNA, 19 nt, Homo sapiens
  misc_RNA (1)...(19): siRNA sense strand
guuaugaacagaagcagua

SEQ ID NO: 1728660 - RNA, 19 nt, Homo sapiens
  misc_RNA (1)...(19): siRNA sense strand
gaacagaagcaguacaaaa

SEQ ID NO: 1728661 - RNA, 19 nt, Homo sapiens
  misc_RNA (1)...(19): siRNA sense strand
gaacauggagagacuuugg

SEQ ID NO: 1728662 - RNA, 19 nt, Homo sapiens
  misc_RNA (1)...(19): siRNA sense strand
guugaaauugggaagauua

SEQ ID NO: 1728663 - RNA, 19 nt, Homo sapiens
  misc_RNA (1)...(19): siRNA sense strand
augaaaggauuaacacuga

SEQ ID NO: 1728664 - RNA, 19 nt, Homo sapiens
  misc_RNA (1)...(19): siRNA sense strand
uggcacagcacuuugauaa

SEQ ID NO: 1728665 - RNA, 19 nt, Homo sapiens
  misc_RNA (1)...(19): siRNA sense strand
uuaccgaaaugcccucaaa

SEQ ID NO: 1728666 - RNA, 19 nt, Homo sapiens
  misc_RNA (1)...(19): siRNA sense strand
uugauaaacuuggacagua

SEQ ID NO: 1728667 - RNA, 19 nt, Homo sapiens
  misc_RNA (1)...(19): siRNA sense strand
gcuuaugaguuuguucgua

SEQ ID NO: 1728668 - RNA, 19 nt, Homo sapiens
  misc_RNA (1)...(19): siRNA sense strand
gacaguauucuuuggcuuu

SEQ ID NO: 1728669 - RNA, 19 nt, Homo sapiens
  misc_RNA (1)...(19): siRNA sense strand
uuaugaagccucucuuaaa

SEQ ID NO: 1728670 - RNA, 19 nt, Homo sapiens
  misc_RNA (1)...(19): siRNA sense strand
cguaaaggacuucguaaug

SEQ ID NO: 1728671 - RNA, 19 nt, Homo sapiens
  misc_RNA (1)...(19): siRNA sense strand
agagaggcuucaaauuuau

SEQ ID NO: 1728672 - RNA, 19 nt, Homo sapiens
  misc_RNA (1)...(19): siRNA sense strand
agauaaagauaaccugcaa

SEQ ID NO: 1728673 - RNA, 19 nt, Homo sapiens
  misc_RNA (1)...(19): siRNA sense strand
gauuggauaugcuauugca

SEQ ID NO: 1728674 - RNA, 19 nt, Homo sapiens
  misc_RNA (1)...(19): siRNA sense strand
ccaggaacuuguuacuaau

SEQ ID NO: 1728675 - RNA, 19 nt, Homo sapiens
  misc_RNA (1)...(19): siRNA sense strand
ucaagagucaugucuguug

SEQ ID NO: 1728676 - RNA, 19 nt, Homo sapiens
  misc_RNA (1)...(19): siRNA sense strand
uaugaagccucucuuaaaa

SEQ ID NO: 1728677 - RNA, 19 nt, Homo sapiens
  misc_RNA (1)...(19): siRNA sense strand
aagaagaagcuuaugaguu

SEQ ID NO: 1728678 - RNA, 19 nt, Homo sapiens
  misc_RNA (1)...(19): siRNA sense strand
gauaaacuuggacaguauu

SEQ ID NO: 1728679 - RNA, 19 nt, Homo sapiens
  misc_RNA (1)...(19): siRNA sense strand
ugaaaggauuaacacugaa

SEQ ID NO: 1728680 - RNA, 19 nt, Homo sapiens
  misc_RNA (1)...(19): siRNA sense strand
cauaccauuugcugaaaga

SEQ ID NO: 1728681 - RNA, 19 nt, Homo sapiens
  misc_RNA (1)...(19): siRNA sense strand
guucguaaaggacuucgua

SEQ ID NO: 1728682 - RNA, 19 nt, Homo sapiens
  misc_RNA (1)...(19): siRNA sense strand
caacacuacucuggguuca

SEQ ID NO: 1728683 - RNA, 19 nt, Homo sapiens
  misc_RNA (1)...(19): siRNA sense strand
caaaugagagaccuugaag

SEQ ID NO: 1728684 - RNA, 19 nt, Homo sapiens
  misc_RNA (1)...(19): siRNA sense strand
ccaaaugagagaccuugaa

SEQ ID NO: 1728685 - RNA, 19 nt, Homo sapiens
  misc_RNA (1)...(19): siRNA sense strand
ugucaagagucaugucugu

SEQ ID NO: 1728686 - RNA, 19 nt, Homo sapiens
  misc_RNA (1)...(19): siRNA sense strand
ggaaucuuuggaacauaua

SEQ ID NO: 1728687 - RNA, 19 nt, Homo sapiens
  misc_RNA (1)...(19): siRNA sense strand
aauuacacccagaagauua

SEQ ID NO: 1728688 - RNA, 19 nt, Homo sapiens
  misc_RNA (1)...(19): siRNA sense strand
ugaguuuguucguaaagga

SEQ ID NO: 1728689 - RNA, 19 nt, Homo sapiens
  misc_RNA (1)...(19): siRNA sense strand
caauuacacccagaagauu

SEQ ID NO: 1728690 - RNA, 19 nt, Homo sapiens
  misc_RNA (1)...(19): siRNA sense strand
aggaaucuuuggaacauau

SEQ ID NO: 1728691 - RNA, 19 nt, Homo sapiens
  misc_RNA (1)...(19): siRNA sense strand
gaugagagaggcagaucug

SEQ ID NO: 1728692 - RNA, 19 nt, Homo sapiens
  misc_RNA (1)...(19): siRNA sense strand
uggauuggauaugcuauug

SEQ ID NO: 1728693 - RNA, 19 nt, Homo sapiens
  misc_RNA (1)...(19): siRNA sense strand
gcauaccauuugcugaaag

SEQ ID NO: 1728694 - RNA, 19 nt, Homo sapiens
  misc_RNA (1)...(19): siRNA sense strand
caggaaucuuuggaacaua

SEQ ID NO: 1728695 - RNA, 19 nt, Homo sapiens
  misc_RNA (1)...(19): siRNA sense strand
auuaugauauggcccuaaa

SEQ ID NO: 1728696 - RNA, 19 nt, Homo sapiens
  misc_RNA (1)...(19): siRNA sense strand
aauuagcacuuuagaagag

SEQ ID NO: 1728697 - RNA, 19 nt, Homo sapiens
  misc_RNA (1)...(19): siRNA sense strand
agaagccagugaaguguuc

SEQ ID NO: 1728698 - RNA, 19 nt, Homo sapiens
  misc_RNA (1)...(19): siRNA sense strand
gauaaagauaaccugcaaa

SEQ ID NO: 1728699 - RNA, 19 nt, Homo sapiens
  misc_RNA (1)...(19): siRNA sense strand
aaaauuugcugaacaugga

SEQ ID NO: 1728700 - RNA, 19 nt, Homo sapiens
  misc_RNA (1)...(19): siRNA sense strand
aaacuuggacaguauucuu

SEQ ID NO: 1728701 - RNA, 19 nt, Homo sapiens
  misc_RNA (1)...(19): siRNA sense strand
ugagagaggcagaucuguu

SEQ ID NO: 1728702 - RNA, 19 nt, Homo sapiens
  misc_RNA (1)...(19): siRNA sense strand
gaaaggauuaacacugaac

SEQ ID NO: 1728703 - RNA, 19 nt, Homo sapiens
  misc_RNA (1)...(19): siRNA sense strand
gcaauugcuaguacuccaa

SEQ ID NO: 1728704 - RNA, 19 nt, Homo sapiens
  misc_RNA (1)...(19): siRNA sense strand
caggaacuuguuacuaauu

SEQ ID NO: 1728705 - RNA, 19 nt, Homo sapiens
  misc_RNA (1)...(19): siRNA sense strand
cuacaaauuagcacuuuag

SEQ ID NO: 1728706 - RNA, 19 nt, Homo sapiens
  misc_RNA (1)...(19): siRNA sense strand
gaagguuaccgagagacaa

SEQ ID NO: 1728707 - RNA, 19 nt, Homo sapiens
  misc_RNA (1)...(19): siRNA sense strand
gcccucaaauuagauaaag

SEQ ID NO: 1728708 - RNA, 19 nt, Homo sapiens
  misc_RNA (1)...(19): siRNA sense strand
acacuacucuggguucagu

SEQ ID NO: 1728709 - RNA, 19 nt, Homo sapiens
  misc_RNA (1)...(19): siRNA sense strand
gcuauugcauaccauuugc

SEQ ID NO: 1728710 - RNA, 19 nt, Homo sapiens
  misc_RNA (1)...(19): siRNA sense strand
aauuaugaagccucucuua

SEQ ID NO: 1728711 - RNA, 19 nt, Homo sapiens
  misc_RNA (1)...(19): siRNA sense strand
agauuaccuuugacucuug

SEQ ID NO: 1728712 - RNA, 19 nt, Homo sapiens
  misc_RNA (1)...(19): siRNA sense strand
guuggaagaauuuagacaa

SEQ ID NO: 1728713 - RNA, 19 nt, Homo sapiens
  misc_RNA (1)...(19): siRNA sense strand
uauaauccaggaacuuguu

SEQ ID NO: 1728714 - RNA, 19 nt, Homo sapiens
  misc_RNA (1)...(19): siRNA sense strand
gauuaccuuugacucuugu

SEQ ID NO: 1728715 - RNA, 19 nt, Homo sapiens
  misc_RNA (1)...(19): siRNA sense strand
gagaggcuucaaauuuaug

SEQ ID NO: 1728716 - RNA, 19 nt, Homo sapiens
  misc_RNA (1)...(19): siRNA sense strand
acaguauucuuuggcuuug

SEQ ID NO: 1728717 - RNA, 19 nt, Homo sapiens
  misc_RNA (1)...(19): siRNA sense strand
gaagaauuuagacaaacuc

SEQ ID NO: 1728718 - RNA, 19 nt, Homo sapiens
  misc_RNA (1)...(19): siRNA sense strand
auucuuuggcuuuggauua

SEQ ID NO: 1728719 - RNA, 19 nt, Homo sapiens
  misc_RNA (1)...(19): siRNA sense strand
aaaagaagccagugaagug

SEQ ID NO: 1728720 - RNA, 19 nt, Homo sapiens
  misc_RNA (1)...(19): siRNA sense strand
acagcacuuugauaaacuu

SEQ ID NO: 1728721 - RNA, 19 nt, Homo sapiens
  misc_RNA (1)...(19): siRNA sense strand
ggaagaauauucacaucaa

SEQ ID NO: 1728722 - RNA, 19 nt, Homo sapiens
  misc_RNA (1)...(19): siRNA sense strand
uaacaggacuuacugagaa

SEQ ID NO: 1728723 - RNA, 19 nt, Homo sapiens
  misc_RNA (1)...(19): siRNA sense strand
gaucuggaaucuacuguuu

SEQ ID NO: 1728724 - RNA, 19 nt, Homo sapiens
  misc_RNA (1)...(19): siRNA sense strand
gaaaucagcuucaaaauac

SEQ ID NO: 1728725 - RNA, 19 nt, Homo sapiens
  misc_RNA (1)...(19): siRNA sense strand
ggaaaucauucaagagcaa

SEQ ID NO: 1728726 - RNA, 19 nt, Homo sapiens
  misc_RNA (1)...(19): siRNA sense strand
guaguggugucacaucuaa

SEQ ID NO: 1728727 - RNA, 19 nt, Homo sapiens
  misc_RNA (1)...(19): siRNA sense strand
gggcucagcuauuaguaaa

SEQ ID NO: 1728728 - RNA, 19 nt, Homo sapiens
  misc_RNA (1)...(19): siRNA sense strand
agucaaagauuuacagaga

SEQ ID NO: 1728729 - RNA, 19 nt, Homo sapiens
  misc_RNA (1)...(19): siRNA sense strand
cagagaagacuaaaugaaa

SEQ ID NO: 1728730 - RNA, 19 nt, Homo sapiens
  misc_RNA (1)...(19): siRNA sense strand
gaaauaacaggacuuacug

SEQ ID NO: 1728731 - RNA, 19 nt, Homo sapiens
  misc_RNA (1)...(19): siRNA sense strand
gggaggauauuuccaguag

SEQ ID NO: 1728732 - RNA, 19 nt, Homo sapiens
  misc_RNA (1)...(19): siRNA sense strand
ggcagucagucauugauuu

SEQ ID NO: 1728733 - RNA, 19 nt, Homo sapiens
  misc_RNA (1)...(19): siRNA sense strand
cacaucaagucaaagauuu

SEQ ID NO: 1728734 - RNA, 19 nt, Homo sapiens
  misc_RNA (1)...(19): siRNA sense strand
ccaauaguauccagaguca

SEQ ID NO: 1728735 - RNA, 19 nt, Homo sapiens
  misc_RNA (1)...(19): siRNA sense strand
uaagagaauuagacacaga

SEQ ID NO: 1728736 - RNA, 19 nt, Homo sapiens
  misc_RNA (1)...(19): siRNA sense strand
gaagaauauucacaucaag

SEQ ID NO: 1728737 - RNA, 19 nt, Homo sapiens
  misc_RNA (1)...(19): siRNA sense strand
ggaacuugauucuccuaga

SEQ ID NO: 1728738 - RNA, 19 nt, Homo sapiens
  misc_RNA (1)...(19): siRNA sense strand
gaggauauuuccaguagag

SEQ ID NO: 1728739 - RNA, 19 nt, Homo sapiens
  misc_RNA (1)...(19): siRNA sense strand
uaauggagguucuucaagu

SEQ ID NO: 1728740 - RNA, 19 nt, Homo sapiens
  misc_RNA (1)...(19): siRNA sense strand
gcucgaagccaagccaaua

SEQ ID NO: 1728741 - RNA, 19 nt, Homo sapiens
  misc_RNA (1)...(19): siRNA sense strand
aagaggacaugcugaaaga

SEQ ID NO: 1728742 - RNA, 19 nt, Homo sapiens
  misc_RNA (1)...(19): siRNA sense strand
uugaagcacugaaaucuga

SEQ ID NO: 1728743 - RNA, 19 nt, Homo sapiens
  misc_RNA (1)...(19): siRNA sense strand
uuacagagaagacuaaaug

SEQ ID NO: 1728744 - RNA, 19 nt, Homo sapiens
  misc_RNA (1)...(19): siRNA sense strand
uaagugaacaugaaguuga

SEQ ID NO: 1728745 - RNA, 19 nt, Homo sapiens
  misc_RNA (1)...(19): siRNA sense strand
gaauuagacacagagauuu

SEQ ID NO: 1728746 - RNA, 19 nt, Homo sapiens
  misc_RNA (1)...(19): siRNA sense strand
gaagcugccaaaugccuua

SEQ ID NO: 1728747 - RNA, 19 nt, Homo sapiens
  misc_RNA (1)...(19): siRNA sense strand
cagcuacguucugaauuaa

SEQ ID NO: 1728748 - RNA, 19 nt, Homo sapiens
  misc_RNA (1)...(19): siRNA sense strand
ggauugagcaguuaauaag

SEQ ID NO: 1728749 - RNA, 19 nt, Homo sapiens
  misc_RNA (1)...(19): siRNA sense strand
ccaaaaggauguaugaaga

SEQ ID NO: 1728750 - RNA, 19 nt, Homo sapiens
  misc_RNA (1)...(19): siRNA sense strand
aaacaaaacuucaggagau

SEQ ID NO: 1728751 - RNA, 19 nt, Homo sapiens
  misc_RNA (1)...(19): siRNA sense strand
agaauuagacacagagauu

SEQ ID NO: 1728752 - RNA, 19 nt, Homo sapiens
  misc_RNA (1)...(19): siRNA sense strand
gaagccaagccaauaguau

SEQ ID NO: 1728753 - RNA, 19 nt, Homo sapiens
  misc_RNA (1)...(19): siRNA sense strand
aagauaggauugagcaguu

SEQ ID NO: 1728754 - RNA, 19 nt, Homo sapiens
  misc_RNA (1)...(19): siRNA sense strand
ucaaagauuuacagagaag

SEQ ID NO: 1728755 - RNA, 19 nt, Homo sapiens
  misc_RNA (1)...(19): siRNA sense strand
gcucagcgaucuggaaucu

SEQ ID NO: 1728756 - RNA, 19 nt, Homo sapiens
  misc_RNA (1)...(19): siRNA sense strand
gcuugggaaucaaauaaug

SEQ ID NO: 1728757 - RNA, 19 nt, Homo sapiens
  misc_RNA (1)...(19): siRNA sense strand
caagaaauccggucaaucc

SEQ ID NO: 1728758 - RNA, 19 nt, Homo sapiens
  misc_RNA (1)...(19): siRNA sense strand
ucacaucaagucaaagauu

SEQ ID NO: 1728759 - RNA, 19 nt, Homo sapiens
  misc_RNA (1)...(19): siRNA sense strand
gagcaagcaagaaaccaaa

SEQ ID NO: 1728760 - RNA, 19 nt, Homo sapiens
  misc_RNA (1)...(19): siRNA sense strand
ugaauugcaugagaaacaa

SEQ ID NO: 1728761 - RNA, 19 nt, Homo sapiens
  misc_RNA (1)...(19): siRNA sense strand
caacaacaccaagauagga

SEQ ID NO: 1728762 - RNA, 19 nt, Homo sapiens
  misc_RNA (1)...(19): siRNA sense strand
gagaugcuauggcugacau

SEQ ID NO: 1728763 - RNA, 19 nt, Homo sapiens
  misc_RNA (1)...(19): siRNA sense strand
agagaagacuaaaugaaag

SEQ ID NO: 1728764 - RNA, 19 nt, Homo sapiens
  misc_RNA (1)...(19): siRNA sense strand
gggaaucaaauaaugaaga

SEQ ID NO: 1728765 - RNA, 19 nt, Homo sapiens
  misc_RNA (1)...(19): siRNA sense strand
guugaaauaacaggacuua

SEQ ID NO: 1728766 - RNA, 19 nt, Homo sapiens
  misc_RNA (1)...(19): siRNA sense strand
gggagugcuucaagaaauc

SEQ ID NO: 1728767 - RNA, 19 nt, Homo sapiens
  misc_RNA (1)...(19): siRNA sense strand
gcagucagucauugauuug

SEQ ID NO: 1728768 - RNA, 19 nt, Homo sapiens
  misc_RNA (1)...(19): siRNA sense strand
agacagcaacacacagaua

SEQ ID NO: 1728769 - RNA, 19 nt, Homo sapiens
  misc_RNA (1)...(19): siRNA sense strand
ucagcgaucuggaaucuac

SEQ ID NO: 1728770 - RNA, 19 nt, Homo sapiens
  misc_RNA (1)...(19): siRNA sense strand
ggacuuacugagaaagcua

SEQ ID NO: 1728771 - RNA, 19 nt, Homo sapiens
  misc_RNA (1)...(19): siRNA sense strand
aauccuaguugacuuugaa

SEQ ID NO: 1728772 - RNA, 19 nt, Homo sapiens
  misc_RNA (1)...(19): siRNA sense strand
gucaaagauuuacagagaa

SEQ ID NO: 1728773 - RNA, 19 nt, Homo sapiens
  misc_RNA (1)...(19): siRNA sense strand
aauaguauccagagucaaa

SEQ ID NO: 1728774 - RNA, 19 nt, Homo sapiens
  misc_RNA (1)...(19): siRNA sense strand
gagggagugcuucaagaaa

SEQ ID NO: 1728775 - RNA, 19 nt, Homo sapiens
  misc_RNA (1)...(19): siRNA sense strand
agauaggauugagcaguua

SEQ ID NO: 1728776 - RNA, 19 nt, Homo sapiens
  misc_RNA (1)...(19): siRNA sense strand
ggaggauauuuccaguaga

SEQ ID NO: 1728777 - RNA, 19 nt, Homo sapiens
  misc_RNA (1)...(19): siRNA sense strand
ugaauuaagggaagccaaa

SEQ ID NO: 1728778 - RNA, 19 nt, Homo sapiens
  misc_RNA (1)...(19): siRNA sense strand
ugaaauaacaggacuuacu

SEQ ID NO: 1728779 - RNA, 19 nt, Homo sapiens
  misc_RNA (1)...(19): siRNA sense strand
gcacugaaaucugaaucac

SEQ ID NO: 1728780 - RNA, 19 nt, Homo sapiens
  misc_RNA (1)...(19): siRNA sense strand
caacuugaagcacugaaau

SEQ ID NO: 1728781 - RNA, 19 nt, Homo sapiens
  misc_RNA (1)...(19): siRNA sense strand
gauuuacagagaagacuaa

SEQ ID NO: 1728782 - RNA, 19 nt, Homo sapiens
  misc_RNA (1)...(19): siRNA sense strand
gauaggauugagcaguuaa

SEQ ID NO: 1728783 - RNA, 19 nt, Homo sapiens
  misc_RNA (1)...(19): siRNA sense strand
gaacuugaagcugccaaau

SEQ ID NO: 1728784 - RNA, 19 nt, Homo sapiens
  misc_RNA (1)...(19): siRNA sense strand
aauggagguucuucaaguu

SEQ ID NO: 1728785 - RNA, 19 nt, Homo sapiens
  misc_RNA (1)...(19): siRNA sense strand
gaacuacuucugcaacaac

SEQ ID NO: 1728786 - RNA, 19 nt, Homo sapiens
  misc_RNA (1)...(19): siRNA sense strand
aaagacagcaacacacaga

SEQ ID NO: 1728787 - RNA, 19 nt, Homo sapiens
  misc_RNA (1)...(19): siRNA sense strand
uuaaagaggacaugcugaa

SEQ ID NO: 1728788 - RNA, 19 nt, Homo sapiens
  misc_RNA (1)...(19): siRNA sense strand
gaauauucacaucaaguca

SEQ ID NO: 1728789 - RNA, 19 nt, Homo sapiens
  misc_RNA (1)...(19): siRNA sense strand
gcaagaaaccaaaacucua

SEQ ID NO: 1728790 - RNA, 19 nt, Homo sapiens
  misc_RNA (1)...(19): siRNA sense strand
cgaagccaagccaauagua

SEQ ID NO: 1728791 - RNA, 19 nt, Homo sapiens
  misc_RNA (1)...(19): siRNA sense strand
uaaagaggacaugcugaaa

SEQ ID NO: 1728792 - RNA, 19 nt, Homo sapiens
  misc_RNA (1)...(19): siRNA sense strand
ugaaagacagcaacacaca

SEQ ID NO: 1728793 - RNA, 19 nt, Homo sapiens
  misc_RNA (1)...(19): siRNA sense strand
gcuacguucugaauuaagg

SEQ ID NO: 1728794 - RNA, 19 nt, Homo sapiens
  misc_RNA (1)...(19): siRNA sense strand
caacaccaagauaggauug

SEQ ID NO: 1728795 - RNA, 19 nt, Homo sapiens
  misc_RNA (1)...(19): siRNA sense strand
gcaacaacaccaagauagg

SEQ ID NO: 1728796 - RNA, 19 nt, Homo sapiens
  misc_RNA (1)...(19): siRNA sense strand
cccuaaauaugaaguggaa

SEQ ID NO: 1728797 - RNA, 19 nt, Homo sapiens
  misc_RNA (1)...(19): siRNA sense strand
acagagaagacuaaaugaa

SEQ ID NO: 1728798 - RNA, 19 nt, Homo sapiens
  misc_RNA (1)...(19): siRNA sense strand
aagugaacaugaaguugaa

SEQ ID NO: 1728799 - RNA, 19 nt, Homo sapiens
  misc_RNA (1)...(19): siRNA sense strand
uagacacagagauuucuua

SEQ ID NO: 1728800 - RNA, 19 nt, Homo sapiens
  misc_RNA (1)...(19): siRNA sense strand
acacacagauagagcaacu

SEQ ID NO: 1728801 - RNA, 19 nt, Homo sapiens
  misc_RNA (1)...(19): siRNA sense strand
caucccaucuccuggaaag

SEQ ID NO: 1728802 - RNA, 19 nt, Homo sapiens
  misc_RNA (1)...(19): siRNA sense strand
gaggacaugcugaaagaca

SEQ ID NO: 1728803 - RNA, 19 nt, Homo sapiens
  misc_RNA (1)...(19): siRNA sense strand
aagcuugggaaucaaauaa

SEQ ID NO: 1728804 - RNA, 19 nt, Homo sapiens
  misc_RNA (1)...(19): siRNA sense strand
gaagacuaaaugaaagcaa

SEQ ID NO: 1728805 - RNA, 19 nt, Homo sapiens
  misc_RNA (1)...(19): siRNA sense strand
agggagugcuucaagaaau

SEQ ID NO: 1728806 - RNA, 19 nt, Homo sapiens
  misc_RNA (1)...(19): siRNA sense strand
agauagagcaacuacgaaa

SEQ ID NO: 1728807 - RNA, 19 nt, Homo sapiens
  misc_RNA (1)...(19): siRNA sense strand
acagauagagcaacuacga

SEQ ID NO: 1728808 - RNA, 19 nt, Homo sapiens
  misc_RNA (1)...(19): siRNA sense strand
caacacacagauagagcaa

SEQ ID NO: 1728809 - RNA, 19 nt, Homo sapiens
  misc_RNA (1)...(19): siRNA sense strand
gucauugauuugcaaacaa

SEQ ID NO: 1728810 - RNA, 19 nt, Homo sapiens
  misc_RNA (1)...(19): siRNA sense strand
gaauugcaugagaaacaaa

SEQ ID NO: 1728811 - RNA, 19 nt, Homo sapiens
  misc_RNA (1)...(19): siRNA sense strand
agaaauccggucaauccua

SEQ ID NO: 1728812 - RNA, 19 nt, Homo sapiens
  misc_RNA (1)...(19): siRNA sense strand
ugagggagugcuucaagaa

SEQ ID NO: 1728813 - RNA, 19 nt, Homo sapiens
  misc_RNA (1)...(19): siRNA sense strand
gacagcaacacacagauag

SEQ ID NO: 1728814 - RNA, 19 nt, Homo sapiens
  misc_RNA (1)...(19): siRNA sense strand
gcugccaaaugccuuaaag

SEQ ID NO: 1728815 - RNA, 19 nt, Homo sapiens
  misc_RNA (1)...(19): siRNA sense strand
cuaguugacuuugaagaag

SEQ ID NO: 1728816 - RNA, 19 nt, Homo sapiens
  misc_RNA (1)...(19): siRNA sense strand
gaaaccaaaacucuaugua

SEQ ID NO: 1728817 - RNA, 19 nt, Homo sapiens
  misc_RNA (1)...(19): siRNA sense strand
ccuaguugacuuugaagaa

SEQ ID NO: 1728818 - RNA, 19 nt, Homo sapiens
  misc_RNA (1)...(19): siRNA sense strand
aaggauguaugaagacaag

SEQ ID NO: 1728819 - RNA, 19 nt, Homo sapiens
  misc_RNA (1)...(19): siRNA sense strand
ccaaaacucuauguauaug

SEQ ID NO: 1728820 - RNA, 19 nt, Homo sapiens
  misc_RNA (1)...(19): siRNA sense strand
caagaaaccaaaacucuau

SEQ ID NO: 1728821 - RNA, 19 nt, Homo sapiens
  misc_RNA (1)...(19): siRNA sense strand
ggaagaauauucacaucaa

SEQ ID NO: 1728822 - RNA, 19 nt, Homo sapiens
  misc_RNA (1)...(19): siRNA sense strand
uaacaggacuuacugagaa

SEQ ID NO: 1728823 - RNA, 19 nt, Homo sapiens
  misc_RNA (1)...(19): siRNA sense strand
gaucuggaaucuacuguuu

SEQ ID NO: 1728824 - RNA, 19 nt, Homo sapiens
  misc_RNA (1)...(19): siRNA sense strand
gaaaucagcuucaaaauac

SEQ ID NO: 1728825 - RNA, 19 nt, Homo sapiens
  misc_RNA (1)...(19): siRNA sense strand
ggaaaucauucaagagcaa

SEQ ID NO: 1728826 - RNA, 19 nt, Homo sapiens
  misc_RNA (1)...(19): siRNA sense strand
guaguggugucacaucuaa

SEQ ID NO: 1728827 - RNA, 19 nt, Homo sapiens
  misc_RNA (1)...(19): siRNA sense strand
gggcucagcuauuaguaaa

SEQ ID NO: 1728828 - RNA, 19 nt, Homo sapiens
  misc_RNA (1)...(19): siRNA sense strand
agucaaagauuuacagaga

SEQ ID NO: 1728829 - RNA, 19 nt, Homo sapiens
  misc_RNA (1)...(19): siRNA sense strand
cagagaagacuaaaugaaa

SEQ ID NO: 1728830 - RNA, 19 nt, Homo sapiens
  misc_RNA (1)...(19): siRNA sense strand
gaaauaacaggacuuacug

SEQ ID NO: 1728831 - RNA, 19 nt, Homo sapiens
  misc_RNA (1)...(19): siRNA sense strand
gggaggauauuuccaguag

SEQ ID NO: 1728832 - RNA, 19 nt, Homo sapiens
  misc_RNA (1)...(19): siRNA sense strand
ggcagucagucauugauuu

SEQ ID NO: 1728833 - RNA, 19 nt, Homo sapiens
  misc_RNA (1)...(19): siRNA sense strand
cacaucaagucaaagauuu

SEQ ID NO: 1728834 - RNA, 19 nt, Homo sapiens
  misc_RNA (1)...(19): siRNA sense strand
ccaauaguauccagaguca

SEQ ID NO: 1728835 - RNA, 19 nt, Homo sapiens
  misc_RNA (1)...(19): siRNA sense strand
uaagagaauuagacacaga

SEQ ID NO: 1728836 - RNA, 19 nt, Homo sapiens
  misc_RNA (1)...(19): siRNA sense strand
gaagaauauucacaucaag

SEQ ID NO: 1728837 - RNA, 19 nt, Homo sapiens
  misc_RNA (1)...(19): siRNA sense strand
ggaacuugauucuccuaga

SEQ ID NO: 1728838 - RNA, 19 nt, Homo sapiens
  misc_RNA (1)...(19): siRNA sense strand
gaggauauuuccaguagag

SEQ ID NO: 1728839 - RNA, 19 nt, Homo sapiens
  misc_RNA (1)...(19): siRNA sense strand
uaauggagguucuucaagu

SEQ ID NO: 1728840 - RNA, 19 nt, Homo sapiens
  misc_RNA (1)...(19): siRNA sense strand
gcucgaagccaagccaaua

SEQ ID NO: 1728841 - RNA, 19 nt, Homo sapiens
  misc_RNA (1)...(19): siRNA sense strand
aagaggacaugcugaaaga

SEQ ID NO: 1728842 - RNA, 19 nt, Homo sapiens
  misc_RNA (1)...(19): siRNA sense strand
uugaagcacugaaaucuga

SEQ ID NO: 1728843 - RNA, 19 nt, Homo sapiens
  misc_RNA (1)...(19): siRNA sense strand
uuacagagaagacuaaaug

SEQ ID NO: 1728844 - RNA, 19 nt, Homo sapiens
  misc_RNA (1)...(19): siRNA sense strand
uaagugaacaugaaguuga

SEQ ID NO: 1728845 - RNA, 19 nt, Homo sapiens
  misc_RNA (1)...(19): siRNA sense strand
gaauuagacacagagauuu

SEQ ID NO: 1728846 - RNA, 19 nt, Homo sapiens
  misc_RNA (1)...(19): siRNA sense strand
gaagcugccaaaugccuua

SEQ ID NO: 1728847 - RNA, 19 nt, Homo sapiens
  misc_RNA (1)...(19): siRNA sense strand
cagcuacguucugaauuaa

SEQ ID NO: 1728848 - RNA, 19 nt, Homo sapiens
  misc_RNA (1)...(19): siRNA sense strand
ggauugagcaguuaauaag

SEQ ID NO: 1728849 - RNA, 19 nt, Homo sapiens
  misc_RNA (1)...(19): siRNA sense strand
ccaaaaggauguaugaaga

SEQ ID NO: 1728850 - RNA, 19 nt, Homo sapiens
  misc_RNA (1)...(19): siRNA sense strand
aaacaaaacuucaggagau

SEQ ID NO: 1728851 - RNA, 19 nt, Homo sapiens
  misc_RNA (1)...(19): siRNA sense strand
agaauuagacacagagauu

SEQ ID NO: 1728852 - RNA, 19 nt, Homo sapiens
  misc_RNA (1)...(19): siRNA sense strand
gaagccaagccaauaguau

SEQ ID NO: 1728853 - RNA, 19 nt, Homo sapiens
  misc_RNA (1)...(19): siRNA sense strand
aagauaggauugagcaguu

SEQ ID NO: 1728854 - RNA, 19 nt, Homo sapiens
  misc_RNA (1)...(19): siRNA sense strand
ucaaagauuuacagagaag

SEQ ID NO: 1728855 - RNA, 19 nt, Homo sapiens
  misc_RNA (1)...(19): siRNA sense strand
gcucagcgaucuggaaucu

SEQ ID NO: 1728856 - RNA, 19 nt, Homo sapiens
  misc_RNA (1)...(19): siRNA sense strand
gcuugggaaucaaauaaug

SEQ ID NO: 1728857 - RNA, 19 nt, Homo sapiens
  misc_RNA (1)...(19): siRNA sense strand
caagaaauccggucaaucc

SEQ ID NO: 1728858 - RNA, 19 nt, Homo sapiens
  misc_RNA (1)...(19): siRNA sense strand
ucacaucaagucaaagauu

SEQ ID NO: 1728859 - RNA, 19 nt, Homo sapiens
  misc_RNA (1)...(19): siRNA sense strand
gagcaagcaagaaaccaaa

SEQ ID NO: 1728860 - RNA, 19 nt, Homo sapiens
  misc_RNA (1)...(19): siRNA sense strand
ugaauugcaugagaaacaa

SEQ ID NO: 1728861 - RNA, 19 nt, Homo sapiens
  misc_RNA (1)...(19): siRNA sense strand
caacaacaccaagauagga

SEQ ID NO: 1728862 - RNA, 19 nt, Homo sapiens
  misc_RNA (1)...(19): siRNA sense strand
gagaugcuauggcugacau

SEQ ID NO: 1728863 - RNA, 19 nt, Homo sapiens
  misc_RNA (1)...(19): siRNA sense strand
agagaagacuaaaugaaag

SEQ ID NO: 1728864 - RNA, 19 nt, Homo sapiens
  misc_RNA (1)...(19): siRNA sense strand
gggaaucaaauaaugaaga

SEQ ID NO: 1728865 - RNA, 19 nt, Homo sapiens
  misc_RNA (1)...(19): siRNA sense strand
guugaaauaacaggacuua

SEQ ID NO: 1728866 - RNA, 19 nt, Homo sapiens
  misc_RNA (1)...(19): siRNA sense strand
gggagugcuucaagaaauc

SEQ ID NO: 1728867 - RNA, 19 nt, Homo sapiens
  misc_RNA (1)...(19): siRNA sense strand
gcagucagucauugauuug

SEQ ID NO: 1728868 - RNA, 19 nt, Homo sapiens
  misc_RNA (1)...(19): siRNA sense strand
agacagcaacacacagaua

SEQ ID NO: 1728869 - RNA, 19 nt, Homo sapiens
  misc_RNA (1)...(19): siRNA sense strand
ucagcgaucuggaaucuac

SEQ ID NO: 1728870 - RNA, 19 nt, Homo sapiens
  misc_RNA (1)...(19): siRNA sense strand
ggacuuacugagaaagcua

SEQ ID NO: 1728871 - RNA, 19 nt, Homo sapiens
  misc_RNA (1)...(19): siRNA sense strand
aauccuaguugacuuugaa

SEQ ID NO: 1728872 - RNA, 19 nt, Homo sapiens
  misc_RNA (1)...(19): siRNA sense strand
gucaaagauuuacagagaa

SEQ ID NO: 1728873 - RNA, 19 nt, Homo sapiens
  misc_RNA (1)...(19): siRNA sense strand
aauaguauccagagucaaa

SEQ ID NO: 1728874 - RNA, 19 nt, Homo sapiens
  misc_RNA (1)...(19): siRNA sense strand
gagggagugcuucaagaaa

SEQ ID NO: 1728875 - RNA, 19 nt, Homo sapiens
  misc_RNA (1)...(19): siRNA sense strand
agauaggauugagcaguua

SEQ ID NO: 1728876 - RNA, 19 nt, Homo sapiens
  misc_RNA (1)...(19): siRNA sense strand
ggaggauauuuccaguaga

SEQ ID NO: 1728877 - RNA, 19 nt, Homo sapiens
  misc_RNA (1)...(19): siRNA sense strand
ugaauuaagggaagccaaa

SEQ ID NO: 1728878 - RNA, 19 nt, Homo sapiens
  misc_RNA (1)...(19): siRNA sense strand
ugaaauaacaggacuuacu

SEQ ID NO: 1728879 - RNA, 19 nt, Homo sapiens
  misc_RNA (1)...(19): siRNA sense strand
gcacugaaaucugaaucac

SEQ ID NO: 1728880 - RNA, 19 nt, Homo sapiens
  misc_RNA (1)...(19): siRNA sense strand
caacuugaagcacugaaau

SEQ ID NO: 1728881 - RNA, 19 nt, Homo sapiens
  misc_RNA (1)...(19): siRNA sense strand
gauuuacagagaagacuaa

SEQ ID NO: 1728882 - RNA, 19 nt, Homo sapiens
  misc_RNA (1)...(19): siRNA sense strand
gauaggauugagcaguuaa

SEQ ID NO: 1728883 - RNA, 19 nt, Homo sapiens
  misc_RNA (1)...(19): siRNA sense strand
gaacuugaagcugccaaau

SEQ ID NO: 1728884 - RNA, 19 nt, Homo sapiens
  misc_RNA (1)...(19): siRNA sense strand
aauggagguucuucaaguu

SEQ ID NO: 1728885 - RNA, 19 nt, Homo sapiens
  misc_RNA (1)...(19): siRNA sense strand
gaacuacuucugcaacaac

SEQ ID NO: 1728886 - RNA, 19 nt, Homo sapiens
  misc_RNA (1)...(19): siRNA sense strand
aaagacagcaacacacaga

SEQ ID NO: 1728887 - RNA, 19 nt, Homo sapiens
  misc_RNA (1)...(19): siRNA sense strand
uuaaagaggacaugcugaa

SEQ ID NO: 1728888 - RNA, 19 nt, Homo sapiens
  misc_RNA (1)...(19): siRNA sense strand
gaauauucacaucaaguca

SEQ ID NO: 1728889 - RNA, 19 nt, Homo sapiens
  misc_RNA (1)...(19): siRNA sense strand
gcaagaaaccaaaacucua

SEQ ID NO: 1728890 - RNA, 19 nt, Homo sapiens
  misc_RNA (1)...(19): siRNA sense strand
cgaagccaagccaauagua

SEQ ID NO: 1728891 - RNA, 19 nt, Homo sapiens
  misc_RNA (1)...(19): siRNA sense strand
uaaagaggacaugcugaaa

SEQ ID NO: 1728892 - RNA, 19 nt, Homo sapiens
  misc_RNA (1)...(19): siRNA sense strand
ugaaagacagcaacacaca

SEQ ID NO: 1728893 - RNA, 19 nt, Homo sapiens
  misc_RNA (1)...(19): siRNA sense strand
gcuacguucugaauuaagg

SEQ ID NO: 1728894 - RNA, 19 nt, Homo sapiens
  misc_RNA (1)...(19): siRNA sense strand
caacaccaagauaggauug

SEQ ID NO: 1728895 - RNA, 19 nt, Homo sapiens
  misc_RNA (1)...(19): siRNA sense strand
gcaacaacaccaagauagg

SEQ ID NO: 1728896 - RNA, 19 nt, Homo sapiens
  misc_RNA (1)...(19): siRNA sense strand
cccuaaauaugaaguggaa

SEQ ID NO: 1728897 - RNA, 19 nt, Homo sapiens
  misc_RNA (1)...(19): siRNA sense strand
acagagaagacuaaaugaa

SEQ ID NO: 1728898 - RNA, 19 nt, Homo sapiens
  misc_RNA (1)...(19): siRNA sense strand
aagugaacaugaaguugaa

SEQ ID NO: 1728899 - RNA, 19 nt, Homo sapiens
  misc_RNA (1)...(19): siRNA sense strand
uagacacagagauuucuua

SEQ ID NO: 1728900 - RNA, 19 nt, Homo sapiens
  misc_RNA (1)...(19): siRNA sense strand
acacacagauagagcaacu

SEQ ID NO: 1728901 - RNA, 19 nt, Homo sapiens
  misc_RNA (1)...(19): siRNA sense strand
caucccaucuccuggaaag

SEQ ID NO: 1728902 - RNA, 19 nt, Homo sapiens
  misc_RNA (1)...(19): siRNA sense strand
gaggacaugcugaaagaca

SEQ ID NO: 1728903 - RNA, 19 nt, Homo sapiens
  misc_RNA (1)...(19): siRNA sense strand
aagcuugggaaucaaauaa

SEQ ID NO: 1728904 - RNA, 19 nt, Homo sapiens
  misc_RNA (1)...(19): siRNA sense strand
gaagacuaaaugaaagcaa

SEQ ID NO: 1728905 - RNA, 19 nt, Homo sapiens
  misc_RNA (1)...(19): siRNA sense strand
agggagugcuucaagaaau

SEQ ID NO: 1728906 - RNA, 19 nt, Homo sapiens
  misc_RNA (1)...(19): siRNA sense strand
agauagagcaacuacgaaa

SEQ ID NO: 1728907 - RNA, 19 nt, Homo sapiens
  misc_RNA (1)...(19): siRNA sense strand
acagauagagcaacuacga

SEQ ID NO: 1728908 - RNA, 19 nt, Homo sapiens
  misc_RNA (1)...(19): siRNA sense strand
caacacacagauagagcaa

SEQ ID NO: 1728909 - RNA, 19 nt, Homo sapiens
  misc_RNA (1)...(19): siRNA sense strand
gucauugauuugcaaacaa

SEQ ID NO: 1728910 - RNA, 19 nt, Homo sapiens
  misc_RNA (1)...(19): siRNA sense strand
gaauugcaugagaaacaaa

SEQ ID NO: 1728911 - RNA, 19 nt, Homo sapiens
  misc_RNA (1)...(19): siRNA sense strand
agaaauccggucaauccua

SEQ ID NO: 1728912 - RNA, 19 nt, Homo sapiens
  misc_RNA (1)...(19): siRNA sense strand
ugagggagugcuucaagaa

SEQ ID NO: 1728913 - RNA, 19 nt, Homo sapiens
  misc_RNA (1)...(19): siRNA sense strand
gacagcaacacacagauag

SEQ ID NO: 1728914 - RNA, 19 nt, Homo sapiens
  misc_RNA (1)...(19): siRNA sense strand
gcugccaaaugccuuaaag

SEQ ID NO: 1728915 - RNA, 19 nt, Homo sapiens
  misc_RNA (1)...(19): siRNA sense strand
cuaguugacuuugaagaag

SEQ ID NO: 1728916 - RNA, 19 nt, Homo sapiens
  misc_RNA (1)...(19): siRNA sense strand
gaaaccaaaacucuaugua

SEQ ID NO: 1728917 - RNA, 19 nt, Homo sapiens
  misc_RNA (1)...(19): siRNA sense strand
ccuaguugacuuugaagaa

SEQ ID NO: 1728918 - RNA, 19 nt, Homo sapiens
  misc_RNA (1)...(19): siRNA sense strand
aaggauguaugaagacaag

SEQ ID NO: 1728919 - RNA, 19 nt, Homo sapiens
  misc_RNA (1)...(19): siRNA sense strand
ccaaaacucuauguauaug

SEQ ID NO: 1728920 - RNA, 19 nt, Homo sapiens
  misc_RNA (1)...(19): siRNA sense strand
caagaaaccaaaacucuau

SEQ ID NO: 1728921 - RNA, 19 nt, Homo sapiens
  misc_RNA (1)...(19): siRNA sense strand
gaacaggccugauggaauu

SEQ ID NO: 1728922 - RNA, 19 nt, Homo sapiens
  misc_RNA (1)...(19): siRNA sense strand
gaucgaaucuugugucaaa

SEQ ID NO: 1728923 - RNA, 19 nt, Homo sapiens
  misc_RNA (1)...(19): siRNA sense strand
gaaccaggauugcauuuga

SEQ ID NO: 1728924 - RNA, 19 nt, Homo sapiens
  misc_RNA (1)...(19): siRNA sense strand
gagagaaacuacagacuga

SEQ ID NO: 1728925 - RNA, 19 nt, Homo sapiens
  misc_RNA (1)...(19): siRNA sense strand
cuacagagauuuccgauug

SEQ ID NO: 1728926 - RNA, 19 nt, Homo sapiens
  misc_RNA (1)...(19): siRNA sense strand
agacauggaugcagccuua

SEQ ID NO: 1728927 - RNA, 19 nt, Homo sapiens
  misc_RNA (1)...(19): siRNA sense strand
gcaaggagcaacucuauga

SEQ ID NO: 1728928 - RNA, 19 nt, Homo sapiens
  misc_RNA (1)...(19): siRNA sense strand
gaagcauucuggguauuua

SEQ ID NO: 1728929 - RNA, 19 nt, Homo sapiens
  misc_RNA (1)...(19): siRNA sense strand
gaggagauguacauagaaa

SEQ ID NO: 1728930 - RNA, 19 nt, Homo sapiens
  misc_RNA (1)...(19): siRNA sense strand
caaaucgcaucguauauug

SEQ ID NO: 1728931 - RNA, 19 nt, Homo sapiens
  misc_RNA (1)...(19): siRNA sense strand
acaaauggcagaccaaaua

SEQ ID NO: 1728932 - RNA, 19 nt, Homo sapiens
  misc_RNA (1)...(19): siRNA sense strand
gaacgcaaauuucccaagu

SEQ ID NO: 1728933 - RNA, 19 nt, Homo sapiens
  misc_RNA (1)...(19): siRNA sense strand
gagcugaagucaucuguca

SEQ ID NO: 1728934 - RNA, 19 nt, Homo sapiens
  misc_RNA (1)...(19): siRNA sense strand
ggauggacgucuacaaaug

SEQ ID NO: 1728935 - RNA, 19 nt, Homo sapiens
  misc_RNA (1)...(19): siRNA sense strand
gaagaagaaucggaugaga

SEQ ID NO: 1728936 - RNA, 19 nt, Homo sapiens
  misc_RNA (1)...(19): siRNA sense strand
ugaccacgcuucccucuuu

SEQ ID NO: 1728937 - RNA, 19 nt, Homo sapiens
  misc_RNA (1)...(19): siRNA sense strand
gcacuggccugaagaagag

SEQ ID NO: 1728938 - RNA, 19 nt, Homo sapiens
  misc_RNA (1)...(19): siRNA sense strand
ccacaaugcuuccaucauc

SEQ ID NO: 1728939 - RNA, 19 nt, Homo sapiens
  misc_RNA (1)...(19): siRNA sense strand
ggacuuacagcuucauauu

SEQ ID NO: 1728940 - RNA, 19 nt, Homo sapiens
  misc_RNA (1)...(19): siRNA sense strand
guuaaucacuccugccaaa

SEQ ID NO: 1728941 - RNA, 19 nt, Homo sapiens
  misc_RNA (1)...(19): siRNA sense strand
agaagaggcugcagcugua

SEQ ID NO: 1728942 - RNA, 19 nt, Homo sapiens
  misc_RNA (1)...(19): siRNA sense strand
ggagggagacaccgugaua

SEQ ID NO: 1728943 - RNA, 19 nt, Homo sapiens
  misc_RNA (1)...(19): siRNA sense strand
gcaguuaucgggagaagaa

SEQ ID NO: 1728944 - RNA, 19 nt, Homo sapiens
  misc_RNA (1)...(19): siRNA sense strand
ucaagaaguucgaacauca

SEQ ID NO: 1728945 - RNA, 19 nt, Homo sapiens
  misc_RNA (1)...(19): siRNA sense strand
ugaacgcugugcagaguua

SEQ ID NO: 1728946 - RNA, 19 nt, Homo sapiens
  misc_RNA (1)...(19): siRNA sense strand
gaacaucagcuccuuuaca

SEQ ID NO: 1728947 - RNA, 19 nt, Homo sapiens
  misc_RNA (1)...(19): siRNA sense strand
caagugacaugaucgaauc

SEQ ID NO: 1728948 - RNA, 19 nt, Homo sapiens
  misc_RNA (1)...(19): siRNA sense strand
caaacuugcuguccgaaug

SEQ ID NO: 1728949 - RNA, 19 nt, Homo sapiens
  misc_RNA (1)...(19): siRNA sense strand
gcuccuggauggccaaauu

SEQ ID NO: 1728950 - RNA, 19 nt, Homo sapiens
  misc_RNA (1)...(19): siRNA sense strand
gaacugugacuguugaaga

SEQ ID NO: 1728951 - RNA, 19 nt, Homo sapiens
  misc_RNA (1)...(19): siRNA sense strand
ggagacaccgugauauuug

SEQ ID NO: 1728952 - RNA, 19 nt, Homo sapiens
  misc_RNA (1)...(19): siRNA sense strand
ucaggaacuucuacaauug

SEQ ID NO: 1728953 - RNA, 19 nt, Homo sapiens
  misc_RNA (1)...(19): siRNA sense strand
ggauugcauuugaaguuaa

SEQ ID NO: 1728954 - RNA, 19 nt, Homo sapiens
  misc_RNA (1)...(19): siRNA sense strand
ggaaggaggagagaaacua

SEQ ID NO: 1728955 - RNA, 19 nt, Homo sapiens
  misc_RNA (1)...(19): siRNA sense strand
gagcaucaauaccauucaa

SEQ ID NO: 1728956 - RNA, 19 nt, Homo sapiens
  misc_RNA (1)...(19): siRNA sense strand
ucuaugagauguuccagaa

SEQ ID NO: 1728957 - RNA, 19 nt, Homo sapiens
  misc_RNA (1)...(19): siRNA sense strand
ggaggaagccacagcauca

SEQ ID NO: 1728958 - RNA, 19 nt, Homo sapiens
  misc_RNA (1)...(19): siRNA sense strand
caauaugcaccauguuuaa

SEQ ID NO: 1728959 - RNA, 19 nt, Homo sapiens
  misc_RNA (1)...(19): siRNA sense strand
ugaaguugauggcaaguga

SEQ ID NO: 1728960 - RNA, 19 nt, Homo sapiens
  misc_RNA (1)...(19): siRNA sense strand
gagcaacucuaugagaugu

SEQ ID NO: 1728961 - RNA, 19 nt, Homo sapiens
  misc_RNA (1)...(19): siRNA sense strand
uccaaggccucaaaucuuu

SEQ ID NO: 1728962 - RNA, 19 nt, Homo sapiens
  misc_RNA (1)...(19): siRNA sense strand
cauuggaggugguaauuau

SEQ ID NO: 1728963 - RNA, 19 nt, Homo sapiens
  misc_RNA (1)...(19): siRNA sense strand
ucaauaugcaccauguuua

SEQ ID NO: 1728964 - RNA, 19 nt, Homo sapiens
  misc_RNA (1)...(19): siRNA sense strand
gagcaaggagcaacucuau

SEQ ID NO: 1728965 - RNA, 19 nt, Homo sapiens
  misc_RNA (1)...(19): siRNA sense strand
ugccaaagcucaaucaaca

SEQ ID NO: 1728966 - RNA, 19 nt, Homo sapiens
  misc_RNA (1)...(19): siRNA sense strand
gcaccauguuuaauguuau

SEQ ID NO: 1728967 - RNA, 19 nt, Homo sapiens
  misc_RNA (1)...(19): siRNA sense strand
ggaacaggcugcguuaguc

SEQ ID NO: 1728968 - RNA, 19 nt, Homo sapiens
  misc_RNA (1)...(19): siRNA sense strand
gcaagcagcccagaucaga

SEQ ID NO: 1728969 - RNA, 19 nt, Homo sapiens
  misc_RNA (1)...(19): siRNA sense strand
caaaguucguuacuaucuu

SEQ ID NO: 1728970 - RNA, 19 nt, Homo sapiens
  misc_RNA (1)...(19): siRNA sense strand
ggacaguuuuccacuauuu

SEQ ID NO: 1728971 - RNA, 19 nt, Homo sapiens
  misc_RNA (1)...(19): siRNA sense strand
ccaaaucgcaucguauauu

SEQ ID NO: 1728972 - RNA, 19 nt, Homo sapiens
  misc_RNA (1)...(19): siRNA sense strand
acgcaaauuucccaaguuu

SEQ ID NO: 1728973 - RNA, 19 nt, Homo sapiens
  misc_RNA (1)...(19): siRNA sense strand
gaaggagaaggaagaguug

SEQ ID NO: 1728974 - RNA, 19 nt, Homo sapiens
  misc_RNA (1)...(19): siRNA sense strand
ggacagcgaugaggaagac

SEQ ID NO: 1728975 - RNA, 19 nt, Homo sapiens
  misc_RNA (1)...(19): siRNA sense strand
ggacuuuguuuucuucuuu

SEQ ID NO: 1728976 - RNA, 19 nt, Homo sapiens
  misc_RNA (1)...(19): siRNA sense strand
gcaaaguucguuacuaucu

SEQ ID NO: 1728977 - RNA, 19 nt, Homo sapiens
  misc_RNA (1)...(19): siRNA sense strand
gaagaagaguuuggaaagc

SEQ ID NO: 1728978 - RNA, 19 nt, Homo sapiens
  misc_RNA (1)...(19): siRNA sense strand
gacuauaauuugugcaaug

SEQ ID NO: 1728979 - RNA, 19 nt, Homo sapiens
  misc_RNA (1)...(19): siRNA sense strand
gagcaugccgguauccaaa

SEQ ID NO: 1728980 - RNA, 19 nt, Homo sapiens
  misc_RNA (1)...(19): siRNA sense strand
gcaacucuaugagauguuc

SEQ ID NO: 1728981 - RNA, 19 nt, Homo sapiens
  misc_RNA (1)...(19): siRNA sense strand
gaaggacagcgaugaggaa

SEQ ID NO: 1728982 - RNA, 19 nt, Homo sapiens
  misc_RNA (1)...(19): siRNA sense strand
uugcaaaguucguuacuau

SEQ ID NO: 1728983 - RNA, 19 nt, Homo sapiens
  misc_RNA (1)...(19): siRNA sense strand
uagacgaacuaauugaaga

SEQ ID NO: 1728984 - RNA, 19 nt, Homo sapiens
  misc_RNA (1)...(19): siRNA sense strand
ccaaagcucaaucaacaaa

SEQ ID NO: 1728985 - RNA, 19 nt, Homo sapiens
  misc_RNA (1)...(19): siRNA sense strand
gggagacaccgugauauuu

SEQ ID NO: 1728986 - RNA, 19 nt, Homo sapiens
  misc_RNA (1)...(19): siRNA sense strand
cucaggaacuucuacaauu

SEQ ID NO: 1728987 - RNA, 19 nt, Homo sapiens
  misc_RNA (1)...(19): siRNA sense strand
aacaucagcuccuuuacaa

SEQ ID NO: 1728988 - RNA, 19 nt, Homo sapiens
  misc_RNA (1)...(19): siRNA sense strand
aaaguucguuacuaucuug

SEQ ID NO: 1728989 - RNA, 19 nt, Homo sapiens
  misc_RNA (1)...(19): siRNA sense strand
ggaaaugggccaagagcau

SEQ ID NO: 1728990 - RNA, 19 nt, Homo sapiens
  misc_RNA (1)...(19): siRNA sense strand
ggaacaggccugauggaau

SEQ ID NO: 1728991 - RNA, 19 nt, Homo sapiens
  misc_RNA (1)...(19): siRNA sense strand
guaagaaugucuggaagag

SEQ ID NO: 1728992 - RNA, 19 nt, Homo sapiens
  misc_RNA (1)...(19): siRNA sense strand
caucagcuccuuuacaaug

SEQ ID NO: 1728993 - RNA, 19 nt, Homo sapiens
  misc_RNA (1)...(19): siRNA sense strand
aagaaugucuggaagagau

SEQ ID NO: 1728994 - RNA, 19 nt, Homo sapiens
  misc_RNA (1)...(19): siRNA sense strand
caacuauucucggcucuca

SEQ ID NO: 1728995 - RNA, 19 nt, Homo sapiens
  misc_RNA (1)...(19): siRNA sense strand
aaacaguuauccguaaaug

SEQ ID NO: 1728996 - RNA, 19 nt, Homo sapiens
  misc_RNA (1)...(19): siRNA sense strand
ggaaaggguuuugaugaaa

SEQ ID NO: 1728997 - RNA, 19 nt, Homo sapiens
  misc_RNA (1)...(19): siRNA sense strand
aaagagaggcuccgaguuc

SEQ ID NO: 1728998 - RNA, 19 nt, Homo sapiens
  misc_RNA (1)...(19): siRNA sense strand
ggccgagccuucuucaaug

SEQ ID NO: 1728999 - RNA, 19 nt, Homo sapiens
  misc_RNA (1)...(19): siRNA sense strand
cagaugucgugcugucuuu

SEQ ID NO: 1729000 - RNA, 19 nt, Homo sapiens
  misc_RNA (1)...(19): siRNA sense strand
ugacgaagggacuuuguuu

SEQ ID NO: 1729001 - RNA, 19 nt, Homo sapiens
  misc_RNA (1)...(19): siRNA sense strand
gcauggaaaugggccaaga

SEQ ID NO: 1729002 - RNA, 19 nt, Homo sapiens
  misc_RNA (1)...(19): siRNA sense strand
gcaagugacaugaucgaau

SEQ ID NO: 1729003 - RNA, 19 nt, Homo sapiens
  misc_RNA (1)...(19): siRNA sense strand
uacaauacgucuugcugaa

SEQ ID NO: 1729004 - RNA, 19 nt, Homo sapiens
  misc_RNA (1)...(19): siRNA sense strand
gaacaggcugcguuaguca

SEQ ID NO: 1729005 - RNA, 19 nt, Homo sapiens
  misc_RNA (1)...(19): siRNA sense strand
ggaaguccaaggccucaaa

SEQ ID NO: 1729006 - RNA, 19 nt, Homo sapiens
  misc_RNA (1)...(19): siRNA sense strand
caugaagcauucuggguau

SEQ ID NO: 1729007 - RNA, 19 nt, Homo sapiens
  misc_RNA (1)...(19): siRNA sense strand
gauggcaagugacaugauc

SEQ ID NO: 1729008 - RNA, 19 nt, Homo sapiens
  misc_RNA (1)...(19): siRNA sense strand
gaugaaagauauuguuacc

SEQ ID NO: 1729009 - RNA, 19 nt, Homo sapiens
  misc_RNA (1)...(19): siRNA sense strand
uggcauggaugaauuuauc

SEQ ID NO: 1729010 - RNA, 19 nt, Homo sapiens
  misc_RNA (1)...(19): siRNA sense strand
gaaagcggagccucaggaa

SEQ ID NO: 1729011 - RNA, 19 nt, Homo sapiens
  misc_RNA (1)...(19): siRNA sense strand
ggauaagccucaaaacaug

SEQ ID NO: 1729012 - RNA, 19 nt, Homo sapiens
  misc_RNA (1)...(19): siRNA sense strand
uuugaaagcuacucucuca

SEQ ID NO: 1729013 - RNA, 19 nt, Homo sapiens
  misc_RNA (1)...(19): siRNA sense strand
ggacaauccagaugagcaa

SEQ ID NO: 1729014 - RNA, 19 nt, Homo sapiens
  misc_RNA (1)...(19): siRNA sense strand
ugcaccauguuuaauguua

SEQ ID NO: 1729015 - RNA, 19 nt, Homo sapiens
  misc_RNA (1)...(19): siRNA sense strand
aggauugcauuugaaguua

SEQ ID NO: 1729016 - RNA, 19 nt, Homo sapiens
  misc_RNA (1)...(19): siRNA sense strand
uugcugaacuagucauuga

SEQ ID NO: 1729017 - RNA, 19 nt, Homo sapiens
  misc_RNA (1)...(19): siRNA sense strand
gaccugcacuggccugaag

SEQ ID NO: 1729018 - RNA, 19 nt, Homo sapiens
  misc_RNA (1)...(19): siRNA sense strand
gauguacauagaaagguua

SEQ ID NO: 1729019 - RNA, 19 nt, Homo sapiens
  misc_RNA (1)...(19): siRNA sense strand
cgaacuaauugaagaaacu

SEQ ID NO: 1729020 - RNA, 19 nt, Homo sapiens
  misc_RNA (1)...(19): siRNA sense strand
uaugagguguuccugaaga

SEQ ID NO: 1729021 - RNA, 19 nt, Homo sapiens
  misc_RNA (1)...(19): siRNA sense strand
gaacaggccugauggaauu

SEQ ID NO: 1729022 - RNA, 19 nt, Homo sapiens
  misc_RNA (1)...(19): siRNA sense strand
gaucgaaucuugugucaaa

SEQ ID NO: 1729023 - RNA, 19 nt, Homo sapiens
  misc_RNA (1)...(19): siRNA sense strand
gaaccaggauugcauuuga

SEQ ID NO: 1729024 - RNA, 19 nt, Homo sapiens
  misc_RNA (1)...(19): siRNA sense strand
gagagaaacuacagacuga

SEQ ID NO: 1729025 - RNA, 19 nt, Homo sapiens
  misc_RNA (1)...(19): siRNA sense strand
cuacagagauuuccgauug

SEQ ID NO: 1729026 - RNA, 19 nt, Homo sapiens
  misc_RNA (1)...(19): siRNA sense strand
agacauggaugcagccuua

SEQ ID NO: 1729027 - RNA, 19 nt, Homo sapiens
  misc_RNA (1)...(19): siRNA sense strand
gcaaggagcaacucuauga

SEQ ID NO: 1729028 - RNA, 19 nt, Homo sapiens
  misc_RNA (1)...(19): siRNA sense strand
gaagcauucuggguauuua

SEQ ID NO: 1729029 - RNA, 19 nt, Homo sapiens
  misc_RNA (1)...(19): siRNA sense strand
gaggagauguacauagaaa

SEQ ID NO: 1729030 - RNA, 19 nt, Homo sapiens
  misc_RNA (1)...(19): siRNA sense strand
caaaucgcaucguauauug

SEQ ID NO: 1729031 - RNA, 19 nt, Homo sapiens
  misc_RNA (1)...(19): siRNA sense strand
acaaauggcagaccaaaua

SEQ ID NO: 1729032 - RNA, 19 nt, Homo sapiens
  misc_RNA (1)...(19): siRNA sense strand
gaacgcaaauuucccaagu

SEQ ID NO: 1729033 - RNA, 19 nt, Homo sapiens
  misc_RNA (1)...(19): siRNA sense strand
gagcugaagucaucuguca

SEQ ID NO: 1729034 - RNA, 19 nt, Homo sapiens
  misc_RNA (1)...(19): siRNA sense strand
ggauggacgucuacaaaug

SEQ ID NO: 1729035 - RNA, 19 nt, Homo sapiens
  misc_RNA (1)...(19): siRNA sense strand
gaagaagaaucggaugaga

SEQ ID NO: 1729036 - RNA, 19 nt, Homo sapiens
  misc_RNA (1)...(19): siRNA sense strand
ugaccacgcuucccucuuu

SEQ ID NO: 1729037 - RNA, 19 nt, Homo sapiens
  misc_RNA (1)...(19): siRNA sense strand
gcacuggccugaagaagag

SEQ ID NO: 1729038 - RNA, 19 nt, Homo sapiens
  misc_RNA (1)...(19): siRNA sense strand
ccacaaugcuuccaucauc

SEQ ID NO: 1729039 - RNA, 19 nt, Homo sapiens
  misc_RNA (1)...(19): siRNA sense strand
ggacuuacagcuucauauu

SEQ ID NO: 1729040 - RNA, 19 nt, Homo sapiens
  misc_RNA (1)...(19): siRNA sense strand
guuaaucacuccugccaaa

SEQ ID NO: 1729041 - RNA, 19 nt, Homo sapiens
  misc_RNA (1)...(19): siRNA sense strand
agaagaggcugcagcugua

SEQ ID NO: 1729042 - RNA, 19 nt, Homo sapiens
  misc_RNA (1)...(19): siRNA sense strand
ggagggagacaccgugaua

SEQ ID NO: 1729043 - RNA, 19 nt, Homo sapiens
  misc_RNA (1)...(19): siRNA sense strand
gcaguuaucgggagaagaa

SEQ ID NO: 1729044 - RNA, 19 nt, Homo sapiens
  misc_RNA (1)...(19): siRNA sense strand
ucaagaaguucgaacauca

SEQ ID NO: 1729045 - RNA, 19 nt, Homo sapiens
  misc_RNA (1)...(19): siRNA sense strand
ugaacgcugugcagaguua

SEQ ID NO: 1729046 - RNA, 19 nt, Homo sapiens
  misc_RNA (1)...(19): siRNA sense strand
gaacaucagcuccuuuaca

SEQ ID NO: 1729047 - RNA, 19 nt, Homo sapiens
  misc_RNA (1)...(19): siRNA sense strand
caagugacaugaucgaauc

SEQ ID NO: 1729048 - RNA, 19 nt, Homo sapiens
  misc_RNA (1)...(19): siRNA sense strand
caaacuugcuguccgaaug

SEQ ID NO: 1729049 - RNA, 19 nt, Homo sapiens
  misc_RNA (1)...(19): siRNA sense strand
gcuccuggauggccaaauu

SEQ ID NO: 1729050 - RNA, 19 nt, Homo sapiens
  misc_RNA (1)...(19): siRNA sense strand
gaacugugacuguugaaga

SEQ ID NO: 1729051 - RNA, 19 nt, Homo sapiens
  misc_RNA (1)...(19): siRNA sense strand
ggagacaccgugauauuug

SEQ ID NO: 1729052 - RNA, 19 nt, Homo sapiens
  misc_RNA (1)...(19): siRNA sense strand
ucaggaacuucuacaauug

SEQ ID NO: 1729053 - RNA, 19 nt, Homo sapiens
  misc_RNA (1)...(19): siRNA sense strand
ggauugcauuugaaguuaa

SEQ ID NO: 1729054 - RNA, 19 nt, Homo sapiens
  misc_RNA (1)...(19): siRNA sense strand
ggaaggaggagagaaacua

SEQ ID NO: 1729055 - RNA, 19 nt, Homo sapiens
  misc_RNA (1)...(19): siRNA sense strand
gagcaucaauaccauucaa

SEQ ID NO: 1729056 - RNA, 19 nt, Homo sapiens
  misc_RNA (1)...(19): siRNA sense strand
ucuaugagauguuccagaa

SEQ ID NO: 1729057 - RNA, 19 nt, Homo sapiens
  misc_RNA (1)...(19): siRNA sense strand
ggaggaagccacagcauca

SEQ ID NO: 1729058 - RNA, 19 nt, Homo sapiens
  misc_RNA (1)...(19): siRNA sense strand
caauaugcaccauguuuaa

SEQ ID NO: 1729059 - RNA, 19 nt, Homo sapiens
  misc_RNA (1)...(19): siRNA sense strand
ugaaguugauggcaaguga

SEQ ID NO: 1729060 - RNA, 19 nt, Homo sapiens
  misc_RNA (1)...(19): siRNA sense strand
gagcaacucuaugagaugu

SEQ ID NO: 1729061 - RNA, 19 nt, Homo sapiens
  misc_RNA (1)...(19): siRNA sense strand
uccaaggccucaaaucuuu

SEQ ID NO: 1729062 - RNA, 19 nt, Homo sapiens
  misc_RNA (1)...(19): siRNA sense strand
cauuggaggugguaauuau

SEQ ID NO: 1729063 - RNA, 19 nt, Homo sapiens
  misc_RNA (1)...(19): siRNA sense strand
ucaauaugcaccauguuua

SEQ ID NO: 1729064 - RNA, 19 nt, Homo sapiens
  misc_RNA (1)...(19): siRNA sense strand
gagcaaggagcaacucuau

SEQ ID NO: 1729065 - RNA, 19 nt, Homo sapiens
  misc_RNA (1)...(19): siRNA sense strand
ugccaaagcucaaucaaca

SEQ ID NO: 1729066 - RNA, 19 nt, Homo sapiens
  misc_RNA (1)...(19): siRNA sense strand
gcaccauguuuaauguuau

SEQ ID NO: 1729067 - RNA, 19 nt, Homo sapiens
  misc_RNA (1)...(19): siRNA sense strand
ggaacaggcugcguuaguc

SEQ ID NO: 1729068 - RNA, 19 nt, Homo sapiens
  misc_RNA (1)...(19): siRNA sense strand
gcaagcagcccagaucaga

SEQ ID NO: 1729069 - RNA, 19 nt, Homo sapiens
  misc_RNA (1)...(19): siRNA sense strand
caaaguucguuacuaucuu

SEQ ID NO: 1729070 - RNA, 19 nt, Homo sapiens
  misc_RNA (1)...(19): siRNA sense strand
ggacaguuuuccacuauuu

SEQ ID NO: 1729071 - RNA, 19 nt, Homo sapiens
  misc_RNA (1)...(19): siRNA sense strand
ccaaaucgcaucguauauu

SEQ ID NO: 1729072 - RNA, 19 nt, Homo sapiens
  misc_RNA (1)...(19): siRNA sense strand
acgcaaauuucccaaguuu

SEQ ID NO: 1729073 - RNA, 19 nt, Homo sapiens
  misc_RNA (1)...(19): siRNA sense strand
gaaggagaaggaagaguug

SEQ ID NO: 1729074 - RNA, 19 nt, Homo sapiens
  misc_RNA (1)...(19): siRNA sense strand
ggacagcgaugaggaagac

SEQ ID NO: 1729075 - RNA, 19 nt, Homo sapiens
  misc_RNA (1)...(19): siRNA sense strand
ggacuuuguuuucuucuuu

SEQ ID NO: 1729076 - RNA, 19 nt, Homo sapiens
  misc_RNA (1)...(19): siRNA sense strand
gcaaaguucguuacuaucu

SEQ ID NO: 1729077 - RNA, 19 nt, Homo sapiens
  misc_RNA (1)...(19): siRNA sense strand
gaagaagaguuuggaaagc

SEQ ID NO: 1729078 - RNA, 19 nt, Homo sapiens
  misc_RNA (1)...(19): siRNA sense strand
gacuauaauuugugcaaug

SEQ ID NO: 1729079 - RNA, 19 nt, Homo sapiens
  misc_RNA (1)...(19): siRNA sense strand
gagcaugccgguauccaaa

SEQ ID NO: 1729080 - RNA, 19 nt, Homo sapiens
  misc_RNA (1)...(19): siRNA sense strand
gcaacucuaugagauguuc

SEQ ID NO: 1729081 - RNA, 19 nt, Homo sapiens
  misc_RNA (1)...(19): siRNA sense strand
gaaggacagcgaugaggaa

SEQ ID NO: 1729082 - RNA, 19 nt, Homo sapiens
  misc_RNA (1)...(19): siRNA sense strand
uugcaaaguucguuacuau

SEQ ID NO: 1729083 - RNA, 19 nt, Homo sapiens
  misc_RNA (1)...(19): siRNA sense strand
uagacgaacuaauugaaga

SEQ ID NO: 1729084 - RNA, 19 nt, Homo sapiens
  misc_RNA (1)...(19): siRNA sense strand
ccaaagcucaaucaacaaa

SEQ ID NO: 1729085 - RNA, 19 nt, Homo sapiens
  misc_RNA (1)...(19): siRNA sense strand
gggagacaccgugauauuu

SEQ ID NO: 1729086 - RNA, 19 nt, Homo sapiens
  misc_RNA (1)...(19): siRNA sense strand
cucaggaacuucuacaauu

SEQ ID NO: 1729087 - RNA, 19 nt, Homo sapiens
  misc_RNA (1)...(19): siRNA sense strand
aacaucagcuccuuuacaa

SEQ ID NO: 1729088 - RNA, 19 nt, Homo sapiens
  misc_RNA (1)...(19): siRNA sense strand
aaaguucguuacuaucuug

SEQ ID NO: 1729089 - RNA, 19 nt, Homo sapiens
  misc_RNA (1)...(19): siRNA sense strand
ggaaaugggccaagagcau

SEQ ID NO: 1729090 - RNA, 19 nt, Homo sapiens
  misc_RNA (1)...(19): siRNA sense strand
ggaacaggccugauggaau

SEQ ID NO: 1729091 - RNA, 19 nt, Homo sapiens
  misc_RNA (1)...(19): siRNA sense strand
guaagaaugucuggaagag

SEQ ID NO: 1729092 - RNA, 19 nt, Homo sapiens
  misc_RNA (1)...(19): siRNA sense strand
caucagcuccuuuacaaug

SEQ ID NO: 1729093 - RNA, 19 nt, Homo sapiens
  misc_RNA (1)...(19): siRNA sense strand
aagaaugucuggaagagau

SEQ ID NO: 1729094 - RNA, 19 nt, Homo sapiens
  misc_RNA (1)...(19): siRNA sense strand
caacuauucucggcucuca

SEQ ID NO: 1729095 - RNA, 19 nt, Homo sapiens
  misc_RNA (1)...(19): siRNA sense strand
aaacaguuauccguaaaug

SEQ ID NO: 1729096 - RNA, 19 nt, Homo sapiens
  misc_RNA (1)...(19): siRNA sense strand
ggaaaggguuuugaugaaa

SEQ ID NO: 1729097 - RNA, 19 nt, Homo sapiens
  misc_RNA (1)...(19): siRNA sense strand
aaagagaggcuccgaguuc

SEQ ID NO: 1729098 - RNA, 19 nt, Homo sapiens
  misc_RNA (1)...(19): siRNA sense strand
ggccgagccuucuucaaug

SEQ ID NO: 1729099 - RNA, 19 nt, Homo sapiens
  misc_RNA (1)...(19): siRNA sense strand
cagaugucgugcugucuuu

SEQ ID NO: 1729100 - RNA, 19 nt, Homo sapiens
  misc_RNA (1)...(19): siRNA sense strand
ugacgaagggacuuuguuu

SEQ ID NO: 1729101 - RNA, 19 nt, Homo sapiens
  misc_RNA (1)...(19): siRNA sense strand
gcauggaaaugggccaaga

SEQ ID NO: 1729102 - RNA, 19 nt, Homo sapiens
  misc_RNA (1)...(19): siRNA sense strand
gcaagugacaugaucgaau

SEQ ID NO: 1729103 - RNA, 19 nt, Homo sapiens
  misc_RNA (1)...(19): siRNA sense strand
uacaauacgucuugcugaa

SEQ ID NO: 1729104 - RNA, 19 nt, Homo sapiens
  misc_RNA (1)...(19): siRNA sense strand
gaacaggcugcguuaguca

SEQ ID NO: 1729105 - RNA, 19 nt, Homo sapiens
  misc_RNA (1)...(19): siRNA sense strand
ggaaguccaaggccucaaa

SEQ ID NO: 1729106 - RNA, 19 nt, Homo sapiens
  misc_RNA (1)...(19): siRNA sense strand
caugaagcauucuggguau

SEQ ID NO: 1729107 - RNA, 19 nt, Homo sapiens
  misc_RNA (1)...(19): siRNA sense strand
gauggcaagugacaugauc

SEQ ID NO: 1729108 - RNA, 19 nt, Homo sapiens
  misc_RNA (1)...(19): siRNA sense strand
gaugaaagauauuguuacc

SEQ ID NO: 1729109 - RNA, 19 nt, Homo sapiens
  misc_RNA (1)...(19): siRNA sense strand
uggcauggaugaauuuauc

SEQ ID NO: 1729110 - RNA, 19 nt, Homo sapiens
  misc_RNA (1)...(19): siRNA sense strand
gaaagcggagccucaggaa

SEQ ID NO: 1729111 - RNA, 19 nt, Homo sapiens
  misc_RNA (1)...(19): siRNA sense strand
ggauaagccucaaaacaug

SEQ ID NO: 1729112 - RNA, 19 nt, Homo sapiens
  misc_RNA (1)...(19): siRNA sense strand
uuugaaagcuacucucuca

SEQ ID NO: 1729113 - RNA, 19 nt, Homo sapiens
  misc_RNA (1)...(19): siRNA sense strand
ggacaauccagaugagcaa

SEQ ID NO: 1729114 - RNA, 19 nt, Homo sapiens
  misc_RNA (1)...(19): siRNA sense strand
ugcaccauguuuaauguua

SEQ ID NO: 1729115 - RNA, 19 nt, Homo sapiens
  misc_RNA (1)...(19): siRNA sense strand
aggauugcauuugaaguua

SEQ ID NO: 1729116 - RNA, 19 nt, Homo sapiens
  misc_RNA (1)...(19): siRNA sense strand
uugcugaacuagucauuga

SEQ ID NO: 1729117 - RNA, 19 nt, Homo sapiens
  misc_RNA (1)...(19): siRNA sense strand
gaccugcacuggccugaag

SEQ ID NO: 1729118 - RNA, 19 nt, Homo sapiens
  misc_RNA (1)...(19): siRNA sense strand
gauguacauagaaagguua

SEQ ID NO: 1729119 - RNA, 19 nt, Homo sapiens
  misc_RNA (1)...(19): siRNA sense strand
cgaacuaauugaagaaacu

SEQ ID NO: 1729120 - RNA, 19 nt, Homo sapiens
  misc_RNA (1)...(19): siRNA sense strand
uaugagguguuccugaaga

SEQ ID NO: 1729121 - RNA, 19 nt, Homo sapiens
  misc_RNA (1)...(19): siRNA sense strand
gaacaggccugauggaauu

SEQ ID NO: 1729122 - RNA, 19 nt, Homo sapiens
  misc_RNA (1)...(19): siRNA sense strand
gaucgaaucuugugucaaa

SEQ ID NO: 1729123 - RNA, 19 nt, Homo sapiens
  misc_RNA (1)...(19): siRNA sense strand
gaaccaggauugcauuuga

SEQ ID NO: 1729124 - RNA, 19 nt, Homo sapiens
  misc_RNA (1)...(19): siRNA sense strand
gagagaaacuacagacuga

SEQ ID NO: 1729125 - RNA, 19 nt, Homo sapiens
  misc_RNA (1)...(19): siRNA sense strand
cuacagagauuuccgauug

SEQ ID NO: 1729126 - RNA, 19 nt, Homo sapiens
  misc_RNA (1)...(19): siRNA sense strand
agacauggaugcagccuua

SEQ ID NO: 1729127 - RNA, 19 nt, Homo sapiens
  misc_RNA (1)...(19): siRNA sense strand
gcaaggagcaacucuauga

SEQ ID NO: 1729128 - RNA, 19 nt, Homo sapiens
  misc_RNA (1)...(19): siRNA sense strand
gaagcauucuggguauuua

SEQ ID NO: 1729129 - RNA, 19 nt, Homo sapiens
  misc_RNA (1)...(19): siRNA sense strand
gaggagauguacauagaaa

SEQ ID NO: 1729130 - RNA, 19 nt, Homo sapiens
  misc_RNA (1)...(19): siRNA sense strand
caaaucgcaucguauauug

SEQ ID NO: 1729131 - RNA, 19 nt, Homo sapiens
  misc_RNA (1)...(19): siRNA sense strand
acaaauggcagaccaaaua

SEQ ID NO: 1729132 - RNA, 19 nt, Homo sapiens
  misc_RNA (1)...(19): siRNA sense strand
gaacgcaaauuucccaagu

SEQ ID NO: 1729133 - RNA, 19 nt, Homo sapiens
  misc_RNA (1)...(19): siRNA sense strand
gagcugaagucaucuguca

SEQ ID NO: 1729134 - RNA, 19 nt, Homo sapiens
  misc_RNA (1)...(19): siRNA sense strand
ggauggacgucuacaaaug

SEQ ID NO: 1729135 - RNA, 19 nt, Homo sapiens
  misc_RNA (1)...(19): siRNA sense strand
gaagaagaaucggaugaga

SEQ ID NO: 1729136 - RNA, 19 nt, Homo sapiens
  misc_RNA (1)...(19): siRNA sense strand
ugaccacgcuucccucuuu

SEQ ID NO: 1729137 - RNA, 19 nt, Homo sapiens
  misc_RNA (1)...(19): siRNA sense strand
gcacuggccugaagaagag

SEQ ID NO: 1729138 - RNA, 19 nt, Homo sapiens
  misc_RNA (1)...(19): siRNA sense strand
ccacaaugcuuccaucauc

SEQ ID NO: 1729139 - RNA, 19 nt, Homo sapiens
  misc_RNA (1)...(19): siRNA sense strand
ggacuuacagcuucauauu

SEQ ID NO: 1729140 - RNA, 19 nt, Homo sapiens
  misc_RNA (1)...(19): siRNA sense strand
guuaaucacuccugccaaa

SEQ ID NO: 1729141 - RNA, 19 nt, Homo sapiens
  misc_RNA (1)...(19): siRNA sense strand
agaagaggcugcagcugua

SEQ ID NO: 1729142 - RNA, 19 nt, Homo sapiens
  misc_RNA (1)...(19): siRNA sense strand
ggagggagacaccgugaua

SEQ ID NO: 1729143 - RNA, 19 nt, Homo sapiens
  misc_RNA (1)...(19): siRNA sense strand
gcaguuaucgggagaagaa

SEQ ID NO: 1729144 - RNA, 19 nt, Homo sapiens
  misc_RNA (1)...(19): siRNA sense strand
ucaagaaguucgaacauca

SEQ ID NO: 1729145 - RNA, 19 nt, Homo sapiens
  misc_RNA (1)...(19): siRNA sense strand
ugaacgcugugcagaguua

SEQ ID NO: 1729146 - RNA, 19 nt, Homo sapiens
  misc_RNA (1)...(19): siRNA sense strand
gaacaucagcuccuuuaca

SEQ ID NO: 1729147 - RNA, 19 nt, Homo sapiens
  misc_RNA (1)...(19): siRNA sense strand
caagugacaugaucgaauc

SEQ ID NO: 1729148 - RNA, 19 nt, Homo sapiens
  misc_RNA (1)...(19): siRNA sense strand
caaacuugcuguccgaaug

SEQ ID NO: 1729149 - RNA, 19 nt, Homo sapiens
  misc_RNA (1)...(19): siRNA sense strand
gcuccuggauggccaaauu

SEQ ID NO: 1729150 - RNA, 19 nt, Homo sapiens
  misc_RNA (1)...(19): siRNA sense strand
gaacugugacuguugaaga

SEQ ID NO: 1729151 - RNA, 19 nt, Homo sapiens
  misc_RNA (1)...(19): siRNA sense strand
ggagacaccgugauauuug

SEQ ID NO: 1729152 - RNA, 19 nt, Homo sapiens
  misc_RNA (1)...(19): siRNA sense strand
ucaggaacuucuacaauug

SEQ ID NO: 1729153 - RNA, 19 nt, Homo sapiens
  misc_RNA (1)...(19): siRNA sense strand
ggauugcauuugaaguuaa

SEQ ID NO: 1729154 - RNA, 19 nt, Homo sapiens
  misc_RNA (1)...(19): siRNA sense strand
ggaaggaggagagaaacua

SEQ ID NO: 1729155 - RNA, 19 nt, Homo sapiens
  misc_RNA (1)...(19): siRNA sense strand
gagcaucaauaccauucaa

SEQ ID NO: 1729156 - RNA, 19 nt, Homo sapiens
  misc_RNA (1)...(19): siRNA sense strand
ucuaugagauguuccagaa

SEQ ID NO: 1729157 - RNA, 19 nt, Homo sapiens
  misc_RNA (1)...(19): siRNA sense strand
ggaggaagccacagcauca

SEQ ID NO: 1729158 - RNA, 19 nt, Homo sapiens
  misc_RNA (1)...(19): siRNA sense strand
caauaugcaccauguuuaa

SEQ ID NO: 1729159 - RNA, 19 nt, Homo sapiens
  misc_RNA (1)...(19): siRNA sense strand
ugaaguugauggcaaguga

SEQ ID NO: 1729160 - RNA, 19 nt, Homo sapiens
  misc_RNA (1)...(19): siRNA sense strand
gagcaacucuaugagaugu

SEQ ID NO: 1729161 - RNA, 19 nt, Homo sapiens
  misc_RNA (1)...(19): siRNA sense strand
uccaaggccucaaaucuuu

SEQ ID NO: 1729162 - RNA, 19 nt, Homo sapiens
  misc_RNA (1)...(19): siRNA sense strand
cauuggaggugguaauuau

SEQ ID NO: 1729163 - RNA, 19 nt, Homo sapiens
  misc_RNA (1)...(19): siRNA sense strand
ucaauaugcaccauguuua

SEQ ID NO: 1729164 - RNA, 19 nt, Homo sapiens
  misc_RNA (1)...(19): siRNA sense strand
gagcaaggagcaacucuau

SEQ ID NO: 1729165 - RNA, 19 nt, Homo sapiens
  misc_RNA (1)...(19): siRNA sense strand
ugccaaagcucaaucaaca

SEQ ID NO: 1729166 - RNA, 19 nt, Homo sapiens
  misc_RNA (1)...(19): siRNA sense strand
gcaccauguuuaauguuau

SEQ ID NO: 1729167 - RNA, 19 nt, Homo sapiens
  misc_RNA (1)...(19): siRNA sense strand
ggaacaggcugcguuaguc

SEQ ID NO: 1729168 - RNA, 19 nt, Homo sapiens
  misc_RNA (1)...(19): siRNA sense strand
gcaagcagcccagaucaga

SEQ ID NO: 1729169 - RNA, 19 nt, Homo sapiens
  misc_RNA (1)...(19): siRNA sense strand
caaaguucguuacuaucuu

SEQ ID NO: 1729170 - RNA, 19 nt, Homo sapiens
  misc_RNA (1)...(19): siRNA sense strand
ggacaguuuuccacuauuu

SEQ ID NO: 1729171 - RNA, 19 nt, Homo sapiens
  misc_RNA (1)...(19): siRNA sense strand
ccaaaucgcaucguauauu

SEQ ID NO: 1729172 - RNA, 19 nt, Homo sapiens
  misc_RNA (1)...(19): siRNA sense strand
acgcaaauuucccaaguuu

SEQ ID NO: 1729173 - RNA, 19 nt, Homo sapiens
  misc_RNA (1)...(19): siRNA sense strand
gaaggagaaggaagaguug

SEQ ID NO: 1729174 - RNA, 19 nt, Homo sapiens
  misc_RNA (1)...(19): siRNA sense strand
ggacagcgaugaggaagac

SEQ ID NO: 1729175 - RNA, 19 nt, Homo sapiens
  misc_RNA (1)...(19): siRNA sense strand
ggacuuuguuuucuucuuu

SEQ ID NO: 1729176 - RNA, 19 nt, Homo sapiens
  misc_RNA (1)...(19): siRNA sense strand
gcaaaguucguuacuaucu

SEQ ID NO: 1729177 - RNA, 19 nt, Homo sapiens
  misc_RNA (1)...(19): siRNA sense strand
gaagaagaguuuggaaagc

SEQ ID NO: 1729178 - RNA, 19 nt, Homo sapiens
  misc_RNA (1)...(19): siRNA sense strand
gacuauaauuugugcaaug

SEQ ID NO: 1729179 - RNA, 19 nt, Homo sapiens
  misc_RNA (1)...(19): siRNA sense strand
gagcaugccgguauccaaa

SEQ ID NO: 1729180 - RNA, 19 nt, Homo sapiens
  misc_RNA (1)...(19): siRNA sense strand
gcaacucuaugagauguuc

SEQ ID NO: 1729181 - RNA, 19 nt, Homo sapiens
  misc_RNA (1)...(19): siRNA sense strand
gaaggacagcgaugaggaa

SEQ ID NO: 1729182 - RNA, 19 nt, Homo sapiens
  misc_RNA (1)...(19): siRNA sense strand
uugcaaaguucguuacuau

SEQ ID NO: 1729183 - RNA, 19 nt, Homo sapiens
  misc_RNA (1)...(19): siRNA sense strand
uagacgaacuaauugaaga

SEQ ID NO: 1729184 - RNA, 19 nt, Homo sapiens
  misc_RNA (1)...(19): siRNA sense strand
ccaaagcucaaucaacaaa

SEQ ID NO: 1729185 - RNA, 19 nt, Homo sapiens
  misc_RNA (1)...(19): siRNA sense strand
gggagacaccgugauauuu

SEQ ID NO: 1729186 - RNA, 19 nt, Homo sapiens
  misc_RNA (1)...(19): siRNA sense strand
cucaggaacuucuacaauu

SEQ ID NO: 1729187 - RNA, 19 nt, Homo sapiens
  misc_RNA (1)...(19): siRNA sense strand
aacaucagcuccuuuacaa

SEQ ID NO: 1729188 - RNA, 19 nt, Homo sapiens
  misc_RNA (1)...(19): siRNA sense strand
aaaguucguuacuaucuug

SEQ ID NO: 1729189 - RNA, 19 nt, Homo sapiens
  misc_RNA (1)...(19): siRNA sense strand
ggaaaugggccaagagcau

SEQ ID NO: 1729190 - RNA, 19 nt, Homo sapiens
  misc_RNA (1)...(19): siRNA sense strand
ggaacaggccugauggaau

SEQ ID NO: 1729191 - RNA, 19 nt, Homo sapiens
  misc_RNA (1)...(19): siRNA sense strand
guaagaaugucuggaagag

SEQ ID NO: 1729192 - RNA, 19 nt, Homo sapiens
  misc_RNA (1)...(19): siRNA sense strand
caucagcuccuuuacaaug

SEQ ID NO: 1729193 - RNA, 19 nt, Homo sapiens
  misc_RNA (1)...(19): siRNA sense strand
aagaaugucuggaagagau

SEQ ID NO: 1729194 - RNA, 19 nt, Homo sapiens
  misc_RNA (1)...(19): siRNA sense strand
caacuauucucggcucuca

SEQ ID NO: 1729195 - RNA, 19 nt, Homo sapiens
  misc_RNA (1)...(19): siRNA sense strand
aaacaguuauccguaaaug

SEQ ID NO: 1729196 - RNA, 19 nt, Homo sapiens
  misc_RNA (1)...(19): siRNA sense strand
ggaaaggguuuugaugaaa

SEQ ID NO: 1729197 - RNA, 19 nt, Homo sapiens
  misc_RNA (1)...(19): siRNA sense strand
aaagagaggcuccgaguuc

SEQ ID NO: 1729198 - RNA, 19 nt, Homo sapiens
  misc_RNA (1)...(19): siRNA sense strand
ggccgagccuucuucaaug

SEQ ID NO: 1729199 - RNA, 19 nt, Homo sapiens
  misc_RNA (1)...(19): siRNA sense strand
cagaugucgugcugucuuu

SEQ ID NO: 1729200 - RNA, 19 nt, Homo sapiens
  misc_RNA (1)...(19): siRNA sense strand
ugacgaagggacuuuguuu

SEQ ID NO: 1729201 - RNA, 19 nt, Homo sapiens
  misc_RNA (1)...(19): siRNA sense strand
gcauggaaaugggccaaga

SEQ ID NO: 1729202 - RNA, 19 nt, Homo sapiens
  misc_RNA (1)...(19): siRNA sense strand
gcaagugacaugaucgaau

SEQ ID NO: 1729203 - RNA, 19 nt, Homo sapiens
  misc_RNA (1)...(19): siRNA sense strand
uacaauacgucuugcugaa

SEQ ID NO: 1729204 - RNA, 19 nt, Homo sapiens
  misc_RNA (1)...(19): siRNA sense strand
gaacaggcugcguuaguca

SEQ ID NO: 1729205 - RNA, 19 nt, Homo sapiens
  misc_RNA (1)...(19): siRNA sense strand
ggaaguccaaggccucaaa

SEQ ID NO: 1729206 - RNA, 19 nt, Homo sapiens
  misc_RNA (1)...(19): siRNA sense strand
caugaagcauucuggguau

SEQ ID NO: 1729207 - RNA, 19 nt, Homo sapiens
  misc_RNA (1)...(19): siRNA sense strand
gauggcaagugacaugauc

SEQ ID NO: 1729208 - RNA, 19 nt, Homo sapiens
  misc_RNA (1)...(19): siRNA sense strand
gaugaaagauauuguuacc

SEQ ID NO: 1729209 - RNA, 19 nt, Homo sapiens
  misc_RNA (1)...(19): siRNA sense strand
uggcauggaugaauuuauc

SEQ ID NO: 1729210 - RNA, 19 nt, Homo sapiens
  misc_RNA (1)...(19): siRNA sense strand
gaaagcggagccucaggaa

SEQ ID NO: 1729211 - RNA, 19 nt, Homo sapiens
  misc_RNA (1)...(19): siRNA sense strand
ggauaagccucaaaacaug

SEQ ID NO: 1729212 - RNA, 19 nt, Homo sapiens
  misc_RNA (1)...(19): siRNA sense strand
uuugaaagcuacucucuca

SEQ ID NO: 1729213 - RNA, 19 nt, Homo sapiens
  misc_RNA (1)...(19): siRNA sense strand
ggacaauccagaugagcaa

SEQ ID NO: 1729214 - RNA, 19 nt, Homo sapiens
  misc_RNA (1)...(19): siRNA sense strand
ugcaccauguuuaauguua

SEQ ID NO: 1729215 - RNA, 19 nt, Homo sapiens
  misc_RNA (1)...(19): siRNA sense strand
aggauugcauuugaaguua

SEQ ID NO: 1729216 - RNA, 19 nt, Homo sapiens
  misc_RNA (1)...(19): siRNA sense strand
uugcugaacuagucauuga

SEQ ID NO: 1729217 - RNA, 19 nt, Homo sapiens
  misc_RNA (1)...(19): siRNA sense strand
gaccugcacuggccugaag

SEQ ID NO: 1729218 - RNA, 19 nt, Homo sapiens
  misc_RNA (1)...(19): siRNA sense strand
gauguacauagaaagguua

SEQ ID NO: 1729219 - RNA, 19 nt, Homo sapiens
  misc_RNA (1)...(19): siRNA sense strand
cgaacuaauugaagaaacu

SEQ ID NO: 1729220 - RNA, 19 nt, Homo sapiens
  misc_RNA (1)...(19): siRNA sense strand
uaugagguguuccugaaga

SEQ ID NO: 1729221 - RNA, 19 nt, Homo sapiens
  misc_RNA (1)...(19): siRNA sense strand
gaacaggccugauggaauu

SEQ ID NO: 1729222 - RNA, 19 nt, Homo sapiens
  misc_RNA (1)...(19): siRNA sense strand
gaucgaaucuugugucaaa

SEQ ID NO: 1729223 - RNA, 19 nt, Homo sapiens
  misc_RNA (1)...(19): siRNA sense strand
gaaccaggauugcauuuga

SEQ ID NO: 1729224 - RNA, 19 nt, Homo sapiens
  misc_RNA (1)...(19): siRNA sense strand
gagagaaacuacagacuga

SEQ ID NO: 1729225 - RNA, 19 nt, Homo sapiens
  misc_RNA (1)...(19): siRNA sense strand
cuacagagauuuccgauug

SEQ ID NO: 1729226 - RNA, 19 nt, Homo sapiens
  misc_RNA (1)...(19): siRNA sense strand
agacauggaugcagccuua

SEQ ID NO: 1729227 - RNA, 19 nt, Homo sapiens
  misc_RNA (1)...(19): siRNA sense strand
gcaaggagcaacucuauga

SEQ ID NO: 1729228 - RNA, 19 nt, Homo sapiens
  misc_RNA (1)...(19): siRNA sense strand
gaagcauucuggguauuua

SEQ ID NO: 1729229 - RNA, 19 nt, Homo sapiens
  misc_RNA (1)...(19): siRNA sense strand
gaggagauguacauagaaa

SEQ ID NO: 1729230 - RNA, 19 nt, Homo sapiens
  misc_RNA (1)...(19): siRNA sense strand
caaaucgcaucguauauug

SEQ ID NO: 1729231 - RNA, 19 nt, Homo sapiens
  misc_RNA (1)...(19): siRNA sense strand
acaaauggcagaccaaaua

SEQ ID NO: 1729232 - RNA, 19 nt, Homo sapiens
  misc_RNA (1)...(19): siRNA sense strand
gaacgcaaauuucccaagu

SEQ ID NO: 1729233 - RNA, 19 nt, Homo sapiens
  misc_RNA (1)...(19): siRNA sense strand
gagcugaagucaucuguca

SEQ ID NO: 1729234 - RNA, 19 nt, Homo sapiens
  misc_RNA (1)...(19): siRNA sense strand
ggauggacgucuacaaaug

SEQ ID NO: 1729235 - RNA, 19 nt, Homo sapiens
  misc_RNA (1)...(19): siRNA sense strand
gaagaagaaucggaugaga

SEQ ID NO: 1729236 - RNA, 19 nt, Homo sapiens
  misc_RNA (1)...(19): siRNA sense strand
ugaccacgcuucccucuuu

SEQ ID NO: 1729237 - RNA, 19 nt, Homo sapiens
  misc_RNA (1)...(19): siRNA sense strand
gcacuggccugaagaagag

SEQ ID NO: 1729238 - RNA, 19 nt, Homo sapiens
  misc_RNA (1)...(19): siRNA sense strand
ccacaaugcuuccaucauc

SEQ ID NO: 1729239 - RNA, 19 nt, Homo sapiens
  misc_RNA (1)...(19): siRNA sense strand
ggacuuacagcuucauauu

SEQ ID NO: 1729240 - RNA, 19 nt, Homo sapiens
  misc_RNA (1)...(19): siRNA sense strand
guuaaucacuccugccaaa

SEQ ID NO: 1729241 - RNA, 19 nt, Homo sapiens
  misc_RNA (1)...(19): siRNA sense strand
agaagaggcugcagcugua

SEQ ID NO: 1729242 - RNA, 19 nt, Homo sapiens
  misc_RNA (1)...(19): siRNA sense strand
ggagggagacaccgugaua

SEQ ID NO: 1729243 - RNA, 19 nt, Homo sapiens
  misc_RNA (1)...(19): siRNA sense strand
gcaguuaucgggagaagaa

SEQ ID NO: 1729244 - RNA, 19 nt, Homo sapiens
  misc_RNA (1)...(19): siRNA sense strand
ucaagaaguucgaacauca

SEQ ID NO: 1729245 - RNA, 19 nt, Homo sapiens
  misc_RNA (1)...(19): siRNA sense strand
ugaacgcugugcagaguua

SEQ ID NO: 1729246 - RNA, 19 nt, Homo sapiens
  misc_RNA (1)...(19): siRNA sense strand
gaacaucagcuccuuuaca

SEQ ID NO: 1729247 - RNA, 19 nt, Homo sapiens
  misc_RNA (1)...(19): siRNA sense strand
caagugacaugaucgaauc

SEQ ID NO: 1729248 - RNA, 19 nt, Homo sapiens
  misc_RNA (1)...(19): siRNA sense strand
caaacuugcuguccgaaug

SEQ ID NO: 1729249 - RNA, 19 nt, Homo sapiens
  misc_RNA (1)...(19): siRNA sense strand
gcuccuggauggccaaauu

SEQ ID NO: 1729250 - RNA, 19 nt, Homo sapiens
  misc_RNA (1)...(19): siRNA sense strand
gaacugugacuguugaaga

SEQ ID NO: 1729251 - RNA, 19 nt, Homo sapiens
  misc_RNA (1)...(19): siRNA sense strand
ggagacaccgugauauuug

SEQ ID NO: 1729252 - RNA, 19 nt, Homo sapiens
  misc_RNA (1)...(19): siRNA sense strand
ucaggaacuucuacaauug

SEQ ID NO: 1729253 - RNA, 19 nt, Homo sapiens
  misc_RNA (1)...(19): siRNA sense strand
ggauugcauuugaaguuaa

SEQ ID NO: 1729254 - RNA, 19 nt, Homo sapiens
  misc_RNA (1)...(19): siRNA sense strand
ggaaggaggagagaaacua

SEQ ID NO: 1729255 - RNA, 19 nt, Homo sapiens
  misc_RNA (1)...(19): siRNA sense strand
gagcaucaauaccauucaa

SEQ ID NO: 1729256 - RNA, 19 nt, Homo sapiens
  misc_RNA (1)...(19): siRNA sense strand
ucuaugagauguuccagaa

SEQ ID NO: 1729257 - RNA, 19 nt, Homo sapiens
  misc_RNA (1)...(19): siRNA sense strand
ggaggaagccacagcauca

SEQ ID NO: 1729258 - RNA, 19 nt, Homo sapiens
  misc_RNA (1)...(19): siRNA sense strand
caauaugcaccauguuuaa

SEQ ID NO: 1729259 - RNA, 19 nt, Homo sapiens
  misc_RNA (1)...(19): siRNA sense strand
ugaaguugauggcaaguga

SEQ ID NO: 1729260 - RNA, 19 nt, Homo sapiens
  misc_RNA (1)...(19): siRNA sense strand
gagcaacucuaugagaugu

SEQ ID NO: 1729261 - RNA, 19 nt, Homo sapiens
  misc_RNA (1)...(19): siRNA sense strand
uccaaggccucaaaucuuu

SEQ ID NO: 1729262 - RNA, 19 nt, Homo sapiens
  misc_RNA (1)...(19): siRNA sense strand
cauuggaggugguaauuau

SEQ ID NO: 1729263 - RNA, 19 nt, Homo sapiens
  misc_RNA (1)...(19): siRNA sense strand
ucaauaugcaccauguuua

SEQ ID NO: 1729264 - RNA, 19 nt, Homo sapiens
  misc_RNA (1)...(19): siRNA sense strand
gagcaaggagcaacucuau

SEQ ID NO: 1729265 - RNA, 19 nt, Homo sapiens
  misc_RNA (1)...(19): siRNA sense strand
ugccaaagcucaaucaaca

SEQ ID NO: 1729266 - RNA, 19 nt, Homo sapiens
  misc_RNA (1)...(19): siRNA sense strand
gcaccauguuuaauguuau

SEQ ID NO: 1729267 - RNA, 19 nt, Homo sapiens
  misc_RNA (1)...(19): siRNA sense strand
ggaacaggcugcguuaguc

SEQ ID NO: 1729268 - RNA, 19 nt, Homo sapiens
  misc_RNA (1)...(19): siRNA sense strand
gcaagcagcccagaucaga

SEQ ID NO: 1729269 - RNA, 19 nt, Homo sapiens
  misc_RNA (1)...(19): siRNA sense strand
caaaguucguuacuaucuu

SEQ ID NO: 1729270 - RNA, 19 nt, Homo sapiens
  misc_RNA (1)...(19): siRNA sense strand
ggacaguuuuccacuauuu

SEQ ID NO: 1729271 - RNA, 19 nt, Homo sapiens
  misc_RNA (1)...(19): siRNA sense strand
ccaaaucgcaucguauauu

SEQ ID NO: 1729272 - RNA, 19 nt, Homo sapiens
  misc_RNA (1)...(19): siRNA sense strand
acgcaaauuucccaaguuu

SEQ ID NO: 1729273 - RNA, 19 nt, Homo sapiens
  misc_RNA (1)...(19): siRNA sense strand
gaaggagaaggaagaguug

SEQ ID NO: 1729274 - RNA, 19 nt, Homo sapiens
  misc_RNA (1)...(19): siRNA sense strand
ggacagcgaugaggaagac

SEQ ID NO: 1729275 - RNA, 19 nt, Homo sapiens
  misc_RNA (1)...(19): siRNA sense strand
ggacuuuguuuucuucuuu

SEQ ID NO: 1729276 - RNA, 19 nt, Homo sapiens
  misc_RNA (1)...(19): siRNA sense strand
gcaaaguucguuacuaucu

SEQ ID NO: 1729277 - RNA, 19 nt, Homo sapiens
  misc_RNA (1)...(19): siRNA sense strand
gaagaagaguuuggaaagc

SEQ ID NO: 1729278 - RNA, 19 nt, Homo sapiens
  misc_RNA (1)...(19): siRNA sense strand
gacuauaauuugugcaaug

SEQ ID NO: 1729279 - RNA, 19 nt, Homo sapiens
  misc_RNA (1)...(19): siRNA sense strand
gagcaugccgguauccaaa

SEQ ID NO: 1729280 - RNA, 19 nt, Homo sapiens
  misc_RNA (1)...(19): siRNA sense strand
gcaacucuaugagauguuc

SEQ ID NO: 1729281 - RNA, 19 nt, Homo sapiens
  misc_RNA (1)...(19): siRNA sense strand
gaaggacagcgaugaggaa

SEQ ID NO: 1729282 - RNA, 19 nt, Homo sapiens
  misc_RNA (1)...(19): siRNA sense strand
uugcaaaguucguuacuau

SEQ ID NO: 1729283 - RNA, 19 nt, Homo sapiens
  misc_RNA (1)...(19): siRNA sense strand
uagacgaacuaauugaaga

SEQ ID NO: 1729284 - RNA, 19 nt, Homo sapiens
  misc_RNA (1)...(19): siRNA sense strand
ccaaagcucaaucaacaaa

SEQ ID NO: 1729285 - RNA, 19 nt, Homo sapiens
  misc_RNA (1)...(19): siRNA sense strand
gggagacaccgugauauuu

SEQ ID NO: 1729286 - RNA, 19 nt, Homo sapiens
  misc_RNA (1)...(19): siRNA sense strand
cucaggaacuucuacaauu

SEQ ID NO: 1729287 - RNA, 19 nt, Homo sapiens
  misc_RNA (1)...(19): siRNA sense strand
aacaucagcuccuuuacaa

SEQ ID NO: 1729288 - RNA, 19 nt, Homo sapiens
  misc_RNA (1)...(19): siRNA sense strand
aaaguucguuacuaucuug

SEQ ID NO: 1729289 - RNA, 19 nt, Homo sapiens
  misc_RNA (1)...(19): siRNA sense strand
ggaaaugggccaagagcau

SEQ ID NO: 1729290 - RNA, 19 nt, Homo sapiens
  misc_RNA (1)...(19): siRNA sense strand
ggaacaggccugauggaau

SEQ ID NO: 1729291 - RNA, 19 nt, Homo sapiens
  misc_RNA (1)...(19): siRNA sense strand
guaagaaugucuggaagag

SEQ ID NO: 1729292 - RNA, 19 nt, Homo sapiens
  misc_RNA (1)...(19): siRNA sense strand
caucagcuccuuuacaaug

SEQ ID NO: 1729293 - RNA, 19 nt, Homo sapiens
  misc_RNA (1)...(19): siRNA sense strand
aagaaugucuggaagagau

SEQ ID NO: 1729294 - RNA, 19 nt, Homo sapiens
  misc_RNA (1)...(19): siRNA sense strand
caacuauucucggcucuca

SEQ ID NO: 1729295 - RNA, 19 nt, Homo sapiens
  misc_RNA (1)...(19): siRNA sense strand
aaacaguuauccguaaaug

SEQ ID NO: 1729296 - RNA, 19 nt, Homo sapiens
  misc_RNA (1)...(19): siRNA sense strand
ggaaaggguuuugaugaaa

SEQ ID NO: 1729297 - RNA, 19 nt, Homo sapiens
  misc_RNA (1)...(19): siRNA sense strand
aaagagaggcuccgaguuc

SEQ ID NO: 1729298 - RNA, 19 nt, Homo sapiens
  misc_RNA (1)...(19): siRNA sense strand
ggccgagccuucuucaaug

SEQ ID NO: 1729299 - RNA, 19 nt, Homo sapiens
  misc_RNA (1)...(19): siRNA sense strand
cagaugucgugcugucuuu

SEQ ID NO: 1729300 - RNA, 19 nt, Homo sapiens
  misc_RNA (1)...(19): siRNA sense strand
ugacgaagggacuuuguuu

SEQ ID NO: 1729301 - RNA, 19 nt, Homo sapiens
  misc_RNA (1)...(19): siRNA sense strand
gcauggaaaugggccaaga

SEQ ID NO: 1729302 - RNA, 19 nt, Homo sapiens
  misc_RNA (1)...(19): siRNA sense strand
gcaagugacaugaucgaau

SEQ ID NO: 1729303 - RNA, 19 nt, Homo sapiens
  misc_RNA (1)...(19): siRNA sense strand
uacaauacgucuugcugaa

SEQ ID NO: 1729304 - RNA, 19 nt, Homo sapiens
  misc_RNA (1)...(19): siRNA sense strand
gaacaggcugcguuaguca

SEQ ID NO: 1729305 - RNA, 19 nt, Homo sapiens
  misc_RNA (1)...(19): siRNA sense strand
ggaaguccaaggccucaaa

SEQ ID NO: 1729306 - RNA, 19 nt, Homo sapiens
  misc_RNA (1)...(19): siRNA sense strand
caugaagcauucuggguau

SEQ ID NO: 1729307 - RNA, 19 nt, Homo sapiens
  misc_RNA (1)...(19): siRNA sense strand
gauggcaagugacaugauc

SEQ ID NO: 1729308 - RNA, 19 nt, Homo sapiens
  misc_RNA (1)...(19): siRNA sense strand
gaugaaagauauuguuacc

SEQ ID NO: 1729309 - RNA, 19 nt, Homo sapiens
  misc_RNA (1)...(19): siRNA sense strand
uggcauggaugaauuuauc

SEQ ID NO: 1729310 - RNA, 19 nt, Homo sapiens
  misc_RNA (1)...(19): siRNA sense strand
gaaagcggagccucaggaa

SEQ ID NO: 1729311 - RNA, 19 nt, Homo sapiens
  misc_RNA (1)...(19): siRNA sense strand
ggauaagccucaaaacaug

SEQ ID NO: 1729312 - RNA, 19 nt, Homo sapiens
  misc_RNA (1)...(19): siRNA sense strand
uuugaaagcuacucucuca

SEQ ID NO: 1729313 - RNA, 19 nt, Homo sapiens
  misc_RNA (1)...(19): siRNA sense strand
ggacaauccagaugagcaa

SEQ ID NO: 1729314 - RNA, 19 nt, Homo sapiens
  misc_RNA (1)...(19): siRNA sense strand
ugcaccauguuuaauguua

SEQ ID NO: 1729315 - RNA, 19 nt, Homo sapiens
  misc_RNA (1)...(19): siRNA sense strand
aggauugcauuugaaguua

SEQ ID NO: 1729316 - RNA, 19 nt, Homo sapiens
  misc_RNA (1)...(19): siRNA sense strand
uugcugaacuagucauuga

SEQ ID NO: 1729317 - RNA, 19 nt, Homo sapiens
  misc_RNA (1)...(19): siRNA sense strand
gaccugcacuggccugaag

SEQ ID NO: 1729318 - RNA, 19 nt, Homo sapiens
  misc_RNA (1)...(19): siRNA sense strand
gauguacauagaaagguua

SEQ ID NO: 1729319 - RNA, 19 nt, Homo sapiens
  misc_RNA (1)...(19): siRNA sense strand
cgaacuaauugaagaaacu

SEQ ID NO: 1729320 - RNA, 19 nt, Homo sapiens
  misc_RNA (1)...(19): siRNA sense strand
uaugagguguuccugaaga

SEQ ID NO: 1729321 - RNA, 19 nt, Homo sapiens
  misc_RNA (1)...(19): siRNA sense strand
gaacaggccugauggaauu

SEQ ID NO: 1729322 - RNA, 19 nt, Homo sapiens
  misc_RNA (1)...(19): siRNA sense strand
gaucgaaucuugugucaaa

SEQ ID NO: 1729323 - RNA, 19 nt, Homo sapiens
  misc_RNA (1)...(19): siRNA sense strand
gaaccaggauugcauuuga

SEQ ID NO: 1729324 - RNA, 19 nt, Homo sapiens
  misc_RNA (1)...(19): siRNA sense strand
gagagaaacuacagacuga

SEQ ID NO: 1729325 - RNA, 19 nt, Homo sapiens
  misc_RNA (1)...(19): siRNA sense strand
cuacagagauuuccgauug

SEQ ID NO: 1729326 - RNA, 19 nt, Homo sapiens
  misc_RNA (1)...(19): siRNA sense strand
agacauggaugcagccuua

SEQ ID NO: 1729327 - RNA, 19 nt, Homo sapiens
  misc_RNA (1)...(19): siRNA sense strand
gcaaggagcaacucuauga

SEQ ID NO: 1729328 - RNA, 19 nt, Homo sapiens
  misc_RNA (1)...(19): siRNA sense strand
gaagcauucuggguauuua

SEQ ID NO: 1729329 - RNA, 19 nt, Homo sapiens
  misc_RNA (1)...(19): siRNA sense strand
gaggagauguacauagaaa

SEQ ID NO: 1729330 - RNA, 19 nt, Homo sapiens
  misc_RNA (1)...(19): siRNA sense strand
caaaucgcaucguauauug

SEQ ID NO: 1729331 - RNA, 19 nt, Homo sapiens
  misc_RNA (1)...(19): siRNA sense strand
acaaauggcagaccaaaua

SEQ ID NO: 1729332 - RNA, 19 nt, Homo sapiens
  misc_RNA (1)...(19): siRNA sense strand
gaacgcaaauuucccaagu

SEQ ID NO: 1729333 - RNA, 19 nt, Homo sapiens
  misc_RNA (1)...(19): siRNA sense strand
gagcugaagucaucuguca

SEQ ID NO: 1729334 - RNA, 19 nt, Homo sapiens
  misc_RNA (1)...(19): siRNA sense strand
ggauggacgucuacaaaug

SEQ ID NO: 1729335 - RNA, 19 nt, Homo sapiens
  misc_RNA (1)...(19): siRNA sense strand
gaagaagaaucggaugaga

SEQ ID NO: 1729336 - RNA, 19 nt, Homo sapiens
  misc_RNA (1)...(19): siRNA sense strand
ugaccacgcuucccucuuu

SEQ ID NO: 1729337 - RNA, 19 nt, Homo sapiens
  misc_RNA (1)...(19): siRNA sense strand
gcacuggccugaagaagag

SEQ ID NO: 1729338 - RNA, 19 nt, Homo sapiens
  misc_RNA (1)...(19): siRNA sense strand
ccacaaugcuuccaucauc

SEQ ID NO: 1729339 - RNA, 19 nt, Homo sapiens
  misc_RNA (1)...(19): siRNA sense strand
ggacuuacagcuucauauu

SEQ ID NO: 1729340 - RNA, 19 nt, Homo sapiens
  misc_RNA (1)...(19): siRNA sense strand
guuaaucacuccugccaaa

SEQ ID NO: 1729341 - RNA, 19 nt, Homo sapiens
  misc_RNA (1)...(19): siRNA sense strand
agaagaggcugcagcugua

SEQ ID NO: 1729342 - RNA, 19 nt, Homo sapiens
  misc_RNA (1)...(19): siRNA sense strand
ggagggagacaccgugaua

SEQ ID NO: 1729343 - RNA, 19 nt, Homo sapiens
  misc_RNA (1)...(19): siRNA sense strand
gcaguuaucgggagaagaa

SEQ ID NO: 1729344 - RNA, 19 nt, Homo sapiens
  misc_RNA (1)...(19): siRNA sense strand
ucaagaaguucgaacauca

SEQ ID NO: 1729345 - RNA, 19 nt, Homo sapiens
  misc_RNA (1)...(19): siRNA sense strand
ugaacgcugugcagaguua

SEQ ID NO: 1729346 - RNA, 19 nt, Homo sapiens
  misc_RNA (1)...(19): siRNA sense strand
gaacaucagcuccuuuaca

SEQ ID NO: 1729347 - RNA, 19 nt, Homo sapiens
  misc_RNA (1)...(19): siRNA sense strand
caagugacaugaucgaauc

SEQ ID NO: 1729348 - RNA, 19 nt, Homo sapiens
  misc_RNA (1)...(19): siRNA sense strand
caaacuugcuguccgaaug

SEQ ID NO: 1729349 - RNA, 19 nt, Homo sapiens
  misc_RNA (1)...(19): siRNA sense strand
gcuccuggauggccaaauu

SEQ ID NO: 1729350 - RNA, 19 nt, Homo sapiens
  misc_RNA (1)...(19): siRNA sense strand
gaacugugacuguugaaga

SEQ ID NO: 1729351 - RNA, 19 nt, Homo sapiens
  misc_RNA (1)...(19): siRNA sense strand
ggagacaccgugauauuug

SEQ ID NO: 1729352 - RNA, 19 nt, Homo sapiens
  misc_RNA (1)...(19): siRNA sense strand
ucaggaacuucuacaauug

SEQ ID NO: 1729353 - RNA, 19 nt, Homo sapiens
  misc_RNA (1)...(19): siRNA sense strand
ggauugcauuugaaguuaa

SEQ ID NO: 1729354 - RNA, 19 nt, Homo sapiens
  misc_RNA (1)...(19): siRNA sense strand
ggaaggaggagagaaacua

SEQ ID NO: 1729355 - RNA, 19 nt, Homo sapiens
  misc_RNA (1)...(19): siRNA sense strand
gagcaucaauaccauucaa

SEQ ID NO: 1729356 - RNA, 19 nt, Homo sapiens
  misc_RNA (1)...(19): siRNA sense strand
ucuaugagauguuccagaa

SEQ ID NO: 1729357 - RNA, 19 nt, Homo sapiens
  misc_RNA (1)...(19): siRNA sense strand
ggaggaagccacagcauca

SEQ ID NO: 1729358 - RNA, 19 nt, Homo sapiens
  misc_RNA (1)...(19): siRNA sense strand
caauaugcaccauguuuaa

SEQ ID NO: 1729359 - RNA, 19 nt, Homo sapiens
  misc_RNA (1)...(19): siRNA sense strand
ugaaguugauggcaaguga

SEQ ID NO: 1729360 - RNA, 19 nt, Homo sapiens
  misc_RNA (1)...(19): siRNA sense strand
gagcaacucuaugagaugu

SEQ ID NO: 1729361 - RNA, 19 nt, Homo sapiens
  misc_RNA (1)...(19): siRNA sense strand
uccaaggccucaaaucuuu

SEQ ID NO: 1729362 - RNA, 19 nt, Homo sapiens
  misc_RNA (1)...(19): siRNA sense strand
cauuggaggugguaauuau

SEQ ID NO: 1729363 - RNA, 19 nt, Homo sapiens
  misc_RNA (1)...(19): siRNA sense strand
ucaauaugcaccauguuua

SEQ ID NO: 1729364 - RNA, 19 nt, Homo sapiens
  misc_RNA (1)...(19): siRNA sense strand
gagcaaggagcaacucuau

SEQ ID NO: 1729365 - RNA, 19 nt, Homo sapiens
  misc_RNA (1)...(19): siRNA sense strand
ugccaaagcucaaucaaca

SEQ ID NO: 1729366 - RNA, 19 nt, Homo sapiens
  misc_RNA (1)...(19): siRNA sense strand
gcaccauguuuaauguuau

SEQ ID NO: 1729367 - RNA, 19 nt, Homo sapiens
  misc_RNA (1)...(19): siRNA sense strand
ggaacaggcugcguuaguc

SEQ ID NO: 1729368 - RNA, 19 nt, Homo sapiens
  misc_RNA (1)...(19): siRNA sense strand
gcaagcagcccagaucaga

SEQ ID NO: 1729369 - RNA, 19 nt, Homo sapiens
  misc_RNA (1)...(19): siRNA sense strand
caaaguucguuacuaucuu

SEQ ID NO: 1729370 - RNA, 19 nt, Homo sapiens
  misc_RNA (1)...(19): siRNA sense strand
ggacaguuuuccacuauuu

SEQ ID NO: 1729371 - RNA, 19 nt, Homo sapiens
  misc_RNA (1)...(19): siRNA sense strand
ccaaaucgcaucguauauu

SEQ ID NO: 1729372 - RNA, 19 nt, Homo sapiens
  misc_RNA (1)...(19): siRNA sense strand
acgcaaauuucccaaguuu

SEQ ID NO: 1729373 - RNA, 19 nt, Homo sapiens
  misc_RNA (1)...(19): siRNA sense strand
gaaggagaaggaagaguug

SEQ ID NO: 1729374 - RNA, 19 nt, Homo sapiens
  misc_RNA (1)...(19): siRNA sense strand
ggacagcgaugaggaagac

SEQ ID NO: 1729375 - RNA, 19 nt, Homo sapiens
  misc_RNA (1)...(19): siRNA sense strand
ggacuuuguuuucuucuuu

SEQ ID NO: 1729376 - RNA, 19 nt, Homo sapiens
  misc_RNA (1)...(19): siRNA sense strand
gcaaaguucguuacuaucu

SEQ ID NO: 1729377 - RNA, 19 nt, Homo sapiens
  misc_RNA (1)...(19): siRNA sense strand
gaagaagaguuuggaaagc

SEQ ID NO: 1729378 - RNA, 19 nt, Homo sapiens
  misc_RNA (1)...(19): siRNA sense strand
gacuauaauuugugcaaug

SEQ ID NO: 1729379 - RNA, 19 nt, Homo sapiens
  misc_RNA (1)...(19): siRNA sense strand
gagcaugccgguauccaaa

SEQ ID NO: 1729380 - RNA, 19 nt, Homo sapiens
  misc_RNA (1)...(19): siRNA sense strand
gcaacucuaugagauguuc

SEQ ID NO: 1729381 - RNA, 19 nt, Homo sapiens
  misc_RNA (1)...(19): siRNA sense strand
gaaggacagcgaugaggaa

SEQ ID NO: 1729382 - RNA, 19 nt, Homo sapiens
  misc_RNA (1)...(19): siRNA sense strand
uugcaaaguucguuacuau

SEQ ID NO: 1729383 - RNA, 19 nt, Homo sapiens
  misc_RNA (1)...(19): siRNA sense strand
uagacgaacuaauugaaga

SEQ ID NO: 1729384 - RNA, 19 nt, Homo sapiens
  misc_RNA (1)...(19): siRNA sense strand
ccaaagcucaaucaacaaa

SEQ ID NO: 1729385 - RNA, 19 nt, Homo sapiens
  misc_RNA (1)...(19): siRNA sense strand
gggagacaccgugauauuu

SEQ ID NO: 1729386 - RNA, 19 nt, Homo sapiens
  misc_RNA (1)...(19): siRNA sense strand
cucaggaacuucuacaauu

SEQ ID NO: 1729387 - RNA, 19 nt, Homo sapiens
  misc_RNA (1)...(19): siRNA sense strand
aacaucagcuccuuuacaa

SEQ ID NO: 1729388 - RNA, 19 nt, Homo sapiens
  misc_RNA (1)...(19): siRNA sense strand
aaaguucguuacuaucuug

SEQ ID NO: 1729389 - RNA, 19 nt, Homo sapiens
  misc_RNA (1)...(19): siRNA sense strand
ggaaaugggccaagagcau

SEQ ID NO: 1729390 - RNA, 19 nt, Homo sapiens
  misc_RNA (1)...(19): siRNA sense strand
ggaacaggccugauggaau

SEQ ID NO: 1729391 - RNA, 19 nt, Homo sapiens
  misc_RNA (1)...(19): siRNA sense strand
guaagaaugucuggaagag

SEQ ID NO: 1729392 - RNA, 19 nt, Homo sapiens
  misc_RNA (1)...(19): siRNA sense strand
caucagcuccuuuacaaug

SEQ ID NO: 1729393 - RNA, 19 nt, Homo sapiens
  misc_RNA (1)...(19): siRNA sense strand
aagaaugucuggaagagau

SEQ ID NO: 1729394 - RNA, 19 nt, Homo sapiens
  misc_RNA (1)...(19): siRNA sense strand
caacuauucucggcucuca

SEQ ID NO: 1729395 - RNA, 19 nt, Homo sapiens
  misc_RNA (1)...(19): siRNA sense strand
aaacaguuauccguaaaug

SEQ ID NO: 1729396 - RNA, 19 nt, Homo sapiens
  misc_RNA (1)...(19): siRNA sense strand
ggaaaggguuuugaugaaa

SEQ ID NO: 1729397 - RNA, 19 nt, Homo sapiens
  misc_RNA (1)...(19): siRNA sense strand
aaagagaggcuccgaguuc

SEQ ID NO: 1729398 - RNA, 19 nt, Homo sapiens
  misc_RNA (1)...(19): siRNA sense strand
ggccgagccuucuucaaug

SEQ ID NO: 1729399 - RNA, 19 nt, Homo sapiens
  misc_RNA (1)...(19): siRNA sense strand
cagaugucgugcugucuuu

SEQ ID NO: 1729400 - RNA, 19 nt, Homo sapiens
  misc_RNA (1)...(19): siRNA sense strand
ugacgaagggacuuuguuu

SEQ ID NO: 1729401 - RNA, 19 nt, Homo sapiens
  misc_RNA (1)...(19): siRNA sense strand
gcauggaaaugggccaaga

SEQ ID NO: 1729402 - RNA, 19 nt, Homo sapiens
  misc_RNA (1)...(19): siRNA sense strand
gcaagugacaugaucgaau

SEQ ID NO: 1729403 - RNA, 19 nt, Homo sapiens
  misc_RNA (1)...(19): siRNA sense strand
uacaauacgucuugcugaa

SEQ ID NO: 1729404 - RNA, 19 nt, Homo sapiens
  misc_RNA (1)...(19): siRNA sense strand
gaacaggcugcguuaguca

SEQ ID NO: 1729405 - RNA, 19 nt, Homo sapiens
  misc_RNA (1)...(19): siRNA sense strand
ggaaguccaaggccucaaa

SEQ ID NO: 1729406 - RNA, 19 nt, Homo sapiens
  misc_RNA (1)...(19): siRNA sense strand
caugaagcauucuggguau

SEQ ID NO: 1729407 - RNA, 19 nt, Homo sapiens
  misc_RNA (1)...(19): siRNA sense strand
gauggcaagugacaugauc

SEQ ID NO: 1729408 - RNA, 19 nt, Homo sapiens
  misc_RNA (1)...(19): siRNA sense strand
gaugaaagauauuguuacc

SEQ ID NO: 1729409 - RNA, 19 nt, Homo sapiens
  misc_RNA (1)...(19): siRNA sense strand
uggcauggaugaauuuauc

SEQ ID NO: 1729410 - RNA, 19 nt, Homo sapiens
  misc_RNA (1)...(19): siRNA sense strand
gaaagcggagccucaggaa

SEQ ID NO: 1729411 - RNA, 19 nt, Homo sapiens
  misc_RNA (1)...(19): siRNA sense strand
ggauaagccucaaaacaug

SEQ ID NO: 1729412 - RNA, 19 nt, Homo sapiens
  misc_RNA (1)...(19): siRNA sense strand
uuugaaagcuacucucuca

SEQ ID NO: 1729413 - RNA, 19 nt, Homo sapiens
  misc_RNA (1)...(19): siRNA sense strand
ggacaauccagaugagcaa

SEQ ID NO: 1729414 - RNA, 19 nt, Homo sapiens
  misc_RNA (1)...(19): siRNA sense strand
ugcaccauguuuaauguua

SEQ ID NO: 1729415 - RNA, 19 nt, Homo sapiens
  misc_RNA (1)...(19): siRNA sense strand
aggauugcauuugaaguua

SEQ ID NO: 1729416 - RNA, 19 nt, Homo sapiens
  misc_RNA (1)...(19): siRNA sense strand
uugcugaacuagucauuga

SEQ ID NO: 1729417 - RNA, 19 nt, Homo sapiens
  misc_RNA (1)...(19): siRNA sense strand
gaccugcacuggccugaag

SEQ ID NO: 1729418 - RNA, 19 nt, Homo sapiens
  misc_RNA (1)...(19): siRNA sense strand
gauguacauagaaagguua

SEQ ID NO: 1729419 - RNA, 19 nt, Homo sapiens
  misc_RNA (1)...(19): siRNA sense strand
cgaacuaauugaagaaacu

SEQ ID NO: 1729420 - RNA, 19 nt, Homo sapiens
  misc_RNA (1)...(19): siRNA sense strand
uaugagguguuccugaaga

SEQ ID NO: 1729421 - RNA, 19 nt, Homo sapiens
  misc_RNA (1)...(19): siRNA sense strand
gaacaggccugauggaauu

SEQ ID NO: 1729422 - RNA, 19 nt, Homo sapiens
  misc_RNA (1)...(19): siRNA sense strand
gaucgaaucuugugucaaa

SEQ ID NO: 1729423 - RNA, 19 nt, Homo sapiens
  misc_RNA (1)...(19): siRNA sense strand
gaaccaggauugcauuuga

SEQ ID NO: 1729424 - RNA, 19 nt, Homo sapiens
  misc_RNA (1)...(19): siRNA sense strand
gagagaaacuacagacuga

SEQ ID NO: 1729425 - RNA, 19 nt, Homo sapiens
  misc_RNA (1)...(19): siRNA sense strand
cuacagagauuuccgauug

SEQ ID NO: 1729426 - RNA, 19 nt, Homo sapiens
  misc_RNA (1)...(19): siRNA sense strand
agacauggaugcagccuua

SEQ ID NO: 1729427 - RNA, 19 nt, Homo sapiens
  misc_RNA (1)...(19): siRNA sense strand
gcaaggagcaacucuauga

SEQ ID NO: 1729428 - RNA, 19 nt, Homo sapiens
  misc_RNA (1)...(19): siRNA sense strand
gaagcauucuggguauuua

SEQ ID NO: 1729429 - RNA, 19 nt, Homo sapiens
  misc_RNA (1)...(19): siRNA sense strand
gaggagauguacauagaaa

SEQ ID NO: 1729430 - RNA, 19 nt, Homo sapiens
  misc_RNA (1)...(19): siRNA sense strand
caaaucgcaucguauauug

SEQ ID NO: 1729431 - RNA, 19 nt, Homo sapiens
  misc_RNA (1)...(19): siRNA sense strand
acaaauggcagaccaaaua

SEQ ID NO: 1729432 - RNA, 19 nt, Homo sapiens
  misc_RNA (1)...(19): siRNA sense strand
gaacgcaaauuucccaagu

SEQ ID NO: 1729433 - RNA, 19 nt, Homo sapiens
  misc_RNA (1)...(19): siRNA sense strand
gagcugaagucaucuguca

SEQ ID NO: 1729434 - RNA, 19 nt, Homo sapiens
  misc_RNA (1)...(19): siRNA sense strand
ggauggacgucuacaaaug

SEQ ID NO: 1729435 - RNA, 19 nt, Homo sapiens
  misc_RNA (1)...(19): siRNA sense strand
gaagaagaaucggaugaga

SEQ ID NO: 1729436 - RNA, 19 nt, Homo sapiens
  misc_RNA (1)...(19): siRNA sense strand
ugaccacgcuucccucuuu

SEQ ID NO: 1729437 - RNA, 19 nt, Homo sapiens
  misc_RNA (1)...(19): siRNA sense strand
gcacuggccugaagaagag

SEQ ID NO: 1729438 - RNA, 19 nt, Homo sapiens
  misc_RNA (1)...(19): siRNA sense strand
ccacaaugcuuccaucauc

SEQ ID NO: 1729439 - RNA, 19 nt, Homo sapiens
  misc_RNA (1)...(19): siRNA sense strand
ggacuuacagcuucauauu

SEQ ID NO: 1729440 - RNA, 19 nt, Homo sapiens
  misc_RNA (1)...(19): siRNA sense strand
guuaaucacuccugccaaa

SEQ ID NO: 1729441 - RNA, 19 nt, Homo sapiens
  misc_RNA (1)...(19): siRNA sense strand
agaagaggcugcagcugua

SEQ ID NO: 1729442 - RNA, 19 nt, Homo sapiens
  misc_RNA (1)...(19): siRNA sense strand
ggagggagacaccgugaua

SEQ ID NO: 1729443 - RNA, 19 nt, Homo sapiens
  misc_RNA (1)...(19): siRNA sense strand
gcaguuaucgggagaagaa

SEQ ID NO: 1729444 - RNA, 19 nt, Homo sapiens
  misc_RNA (1)...(19): siRNA sense strand
ucaagaaguucgaacauca

SEQ ID NO: 1729445 - RNA, 19 nt, Homo sapiens
  misc_RNA (1)...(19): siRNA sense strand
ugaacgcugugcagaguua

SEQ ID NO: 1729446 - RNA, 19 nt, Homo sapiens
  misc_RNA (1)...(19): siRNA sense strand
gaacaucagcuccuuuaca

SEQ ID NO: 1729447 - RNA, 19 nt, Homo sapiens
  misc_RNA (1)...(19): siRNA sense strand
caagugacaugaucgaauc

SEQ ID NO: 1729448 - RNA, 19 nt, Homo sapiens
  misc_RNA (1)...(19): siRNA sense strand
caaacuugcuguccgaaug

SEQ ID NO: 1729449 - RNA, 19 nt, Homo sapiens
  misc_RNA (1)...(19): siRNA sense strand
gcuccuggauggccaaauu

SEQ ID NO: 1729450 - RNA, 19 nt, Homo sapiens
  misc_RNA (1)...(19): siRNA sense strand
gaacugugacuguugaaga

SEQ ID NO: 1729451 - RNA, 19 nt, Homo sapiens
  misc_RNA (1)...(19): siRNA sense strand
ggagacaccgugauauuug

SEQ ID NO: 1729452 - RNA, 19 nt, Homo sapiens
  misc_RNA (1)...(19): siRNA sense strand
ucaggaacuucuacaauug

SEQ ID NO: 1729453 - RNA, 19 nt, Homo sapiens
  misc_RNA (1)...(19): siRNA sense strand
ggauugcauuugaaguuaa

SEQ ID NO: 1729454 - RNA, 19 nt, Homo sapiens
  misc_RNA (1)...(19): siRNA sense strand
ggaaggaggagagaaacua

SEQ ID NO: 1729455 - RNA, 19 nt, Homo sapiens
  misc_RNA (1)...(19): siRNA sense strand
gagcaucaauaccauucaa

SEQ ID NO: 1729456 - RNA, 19 nt, Homo sapiens
  misc_RNA (1)...(19): siRNA sense strand
ucuaugagauguuccagaa

SEQ ID NO: 1729457 - RNA, 19 nt, Homo sapiens
  misc_RNA (1)...(19): siRNA sense strand
ggaggaagccacagcauca

SEQ ID NO: 1729458 - RNA, 19 nt, Homo sapiens
  misc_RNA (1)...(19): siRNA sense strand
caauaugcaccauguuuaa

SEQ ID NO: 1729459 - RNA, 19 nt, Homo sapiens
  misc_RNA (1)...(19): siRNA sense strand
ugaaguugauggcaaguga

SEQ ID NO: 1729460 - RNA, 19 nt, Homo sapiens
  misc_RNA (1)...(19): siRNA sense strand
gagcaacucuaugagaugu

SEQ ID NO: 1729461 - RNA, 19 nt, Homo sapiens
  misc_RNA (1)...(19): siRNA sense strand
uccaaggccucaaaucuuu

SEQ ID NO: 1729462 - RNA, 19 nt, Homo sapiens
  misc_RNA (1)...(19): siRNA sense strand
cauuggaggugguaauuau

SEQ ID NO: 1729463 - RNA, 19 nt, Homo sapiens
  misc_RNA (1)...(19): siRNA sense strand
ucaauaugcaccauguuua

SEQ ID NO: 1729464 - RNA, 19 nt, Homo sapiens
  misc_RNA (1)...(19): siRNA sense strand
gagcaaggagcaacucuau

SEQ ID NO: 1729465 - RNA, 19 nt, Homo sapiens
  misc_RNA (1)...(19): siRNA sense strand
ugccaaagcucaaucaaca

SEQ ID NO: 1729466 - RNA, 19 nt, Homo sapiens
  misc_RNA (1)...(19): siRNA sense strand
gcaccauguuuaauguuau

SEQ ID NO: 1729467 - RNA, 19 nt, Homo sapiens
  misc_RNA (1)...(19): siRNA sense strand
ggaacaggcugcguuaguc

SEQ ID NO: 1729468 - RNA, 19 nt, Homo sapiens
  misc_RNA (1)...(19): siRNA sense strand
gcaagcagcccagaucaga

SEQ ID NO: 1729469 - RNA, 19 nt, Homo sapiens
  misc_RNA (1)...(19): siRNA sense strand
caaaguucguuacuaucuu

SEQ ID NO: 1729470 - RNA, 19 nt, Homo sapiens
  misc_RNA (1)...(19): siRNA sense strand
ggacaguuuuccacuauuu

SEQ ID NO: 1729471 - RNA, 19 nt, Homo sapiens
  misc_RNA (1)...(19): siRNA sense strand
ccaaaucgcaucguauauu

SEQ ID NO: 1729472 - RNA, 19 nt, Homo sapiens
  misc_RNA (1)...(19): siRNA sense strand
acgcaaauuucccaaguuu

SEQ ID NO: 1729473 - RNA, 19 nt, Homo sapiens
  misc_RNA (1)...(19): siRNA sense strand
gaaggagaaggaagaguug

SEQ ID NO: 1729474 - RNA, 19 nt, Homo sapiens
  misc_RNA (1)...(19): siRNA sense strand
ggacagcgaugaggaagac

SEQ ID NO: 1729475 - RNA, 19 nt, Homo sapiens
  misc_RNA (1)...(19): siRNA sense strand
ggacuuuguuuucuucuuu

SEQ ID NO: 1729476 - RNA, 19 nt, Homo sapiens
  misc_RNA (1)...(19): siRNA sense strand
gcaaaguucguuacuaucu

SEQ ID NO: 1729477 - RNA, 19 nt, Homo sapiens
  misc_RNA (1)...(19): siRNA sense strand
gaagaagaguuuggaaagc

SEQ ID NO: 1729478 - RNA, 19 nt, Homo sapiens
  misc_RNA (1)...(19): siRNA sense strand
gacuauaauuugugcaaug

SEQ ID NO: 1729479 - RNA, 19 nt, Homo sapiens
  misc_RNA (1)...(19): siRNA sense strand
gagcaugccgguauccaaa

SEQ ID NO: 1729480 - RNA, 19 nt, Homo sapiens
  misc_RNA (1)...(19): siRNA sense strand
gcaacucuaugagauguuc

SEQ ID NO: 1729481 - RNA, 19 nt, Homo sapiens
  misc_RNA (1)...(19): siRNA sense strand
gaaggacagcgaugaggaa

SEQ ID NO: 1729482 - RNA, 19 nt, Homo sapiens
  misc_RNA (1)...(19): siRNA sense strand
uugcaaaguucguuacuau

SEQ ID NO: 1729483 - RNA, 19 nt, Homo sapiens
  misc_RNA (1)...(19): siRNA sense strand
uagacgaacuaauugaaga

SEQ ID NO: 1729484 - RNA, 19 nt, Homo sapiens
  misc_RNA (1)...(19): siRNA sense strand
ccaaagcucaaucaacaaa

SEQ ID NO: 1729485 - RNA, 19 nt, Homo sapiens
  misc_RNA (1)...(19): siRNA sense strand
gggagacaccgugauauuu

SEQ ID NO: 1729486 - RNA, 19 nt, Homo sapiens
  misc_RNA (1)...(19): siRNA sense strand
cucaggaacuucuacaauu

SEQ ID NO: 1729487 - RNA, 19 nt, Homo sapiens
  misc_RNA (1)...(19): siRNA sense strand
aacaucagcuccuuuacaa

SEQ ID NO: 1729488 - RNA, 19 nt, Homo sapiens
  misc_RNA (1)...(19): siRNA sense strand
aaaguucguuacuaucuug

SEQ ID NO: 1729489 - RNA, 19 nt, Homo sapiens
  misc_RNA (1)...(19): siRNA sense strand
ggaaaugggccaagagcau

SEQ ID NO: 1729490 - RNA, 19 nt, Homo sapiens
  misc_RNA (1)...(19): siRNA sense strand
ggaacaggccugauggaau

SEQ ID NO: 1729491 - RNA, 19 nt, Homo sapiens
  misc_RNA (1)...(19): siRNA sense strand
guaagaaugucuggaagag

SEQ ID NO: 1729492 - RNA, 19 nt, Homo sapiens
  misc_RNA (1)...(19): siRNA sense strand
caucagcuccuuuacaaug

SEQ ID NO: 1729493 - RNA, 19 nt, Homo sapiens
  misc_RNA (1)...(19): siRNA sense strand
aagaaugucuggaagagau

SEQ ID NO: 1729494 - RNA, 19 nt, Homo sapiens
  misc_RNA (1)...(19): siRNA sense strand
caacuauucucggcucuca

SEQ ID NO: 1729495 - RNA, 19 nt, Homo sapiens
  misc_RNA (1)...(19): siRNA sense strand
aaacaguuauccguaaaug

SEQ ID NO: 1729496 - RNA, 19 nt, Homo sapiens
  misc_RNA (1)...(19): siRNA sense strand
ggaaaggguuuugaugaaa

SEQ ID NO: 1729497 - RNA, 19 nt, Homo sapiens
  misc_RNA (1)...(19): siRNA sense strand
aaagagaggcuccgaguuc

SEQ ID NO: 1729498 - RNA, 19 nt, Homo sapiens
  misc_RNA (1)...(19): siRNA sense strand
ggccgagccuucuucaaug

SEQ ID NO: 1729499 - RNA, 19 nt, Homo sapiens
  misc_RNA (1)...(19): siRNA sense strand
cagaugucgugcugucuuu

SEQ ID NO: 1729500 - RNA, 19 nt, Homo sapiens
  misc_RNA (1)...(19): siRNA sense strand
ugacgaagggacuuuguuu

SEQ ID NO: 1729501 - RNA, 19 nt, Homo sapiens
  misc_RNA (1)...(19): siRNA sense strand
gcauggaaaugggccaaga

SEQ ID NO: 1729502 - RNA, 19 nt, Homo sapiens
  misc_RNA (1)...(19): siRNA sense strand
gcaagugacaugaucgaau

SEQ ID NO: 1729503 - RNA, 19 nt, Homo sapiens
  misc_RNA (1)...(19): siRNA sense strand
uacaauacgucuugcugaa

SEQ ID NO: 1729504 - RNA, 19 nt, Homo sapiens
  misc_RNA (1)...(19): siRNA sense strand
gaacaggcugcguuaguca

SEQ ID NO: 1729505 - RNA, 19 nt, Homo sapiens
  misc_RNA (1)...(19): siRNA sense strand
ggaaguccaaggccucaaa

SEQ ID NO: 1729506 - RNA, 19 nt, Homo sapiens
  misc_RNA (1)...(19): siRNA sense strand
caugaagcauucuggguau

SEQ ID NO: 1729507 - RNA, 19 nt, Homo sapiens
  misc_RNA (1)...(19): siRNA sense strand
gauggcaagugacaugauc

SEQ ID NO: 1729508 - RNA, 19 nt, Homo sapiens
  misc_RNA (1)...(19): siRNA sense strand
gaugaaagauauuguuacc

SEQ ID NO: 1729509 - RNA, 19 nt, Homo sapiens
  misc_RNA (1)...(19): siRNA sense strand
uggcauggaugaauuuauc

SEQ ID NO: 1729510 - RNA, 19 nt, Homo sapiens
  misc_RNA (1)...(19): siRNA sense strand
gaaagcggagccucaggaa

SEQ ID NO: 1729511 - RNA, 19 nt, Homo sapiens
  misc_RNA (1)...(19): siRNA sense strand
ggauaagccucaaaacaug

SEQ ID NO: 1729512 - RNA, 19 nt, Homo sapiens
  misc_RNA (1)...(19): siRNA sense strand
uuugaaagcuacucucuca

SEQ ID NO: 1729513 - RNA, 19 nt, Homo sapiens
  misc_RNA (1)...(19): siRNA sense strand
ggacaauccagaugagcaa

SEQ ID NO: 1729514 - RNA, 19 nt, Homo sapiens
  misc_RNA (1)...(19): siRNA sense strand
ugcaccauguuuaauguua

SEQ ID NO: 1729515 - RNA, 19 nt, Homo sapiens
  misc_RNA (1)...(19): siRNA sense strand
aggauugcauuugaaguua

SEQ ID NO: 1729516 - RNA, 19 nt, Homo sapiens
  misc_RNA (1)...(19): siRNA sense strand
uugcugaacuagucauuga

SEQ ID NO: 1729517 - RNA, 19 nt, Homo sapiens
  misc_RNA (1)...(19): siRNA sense strand
gaccugcacuggccugaag

SEQ ID NO: 1729518 - RNA, 19 nt, Homo sapiens
  misc_RNA (1)...(19): siRNA sense strand
gauguacauagaaagguua

SEQ ID NO: 1729519 - RNA, 19 nt, Homo sapiens
  misc_RNA (1)...(19): siRNA sense strand
cgaacuaauugaagaaacu

SEQ ID NO: 1729520 - RNA, 19 nt, Homo sapiens
  misc_RNA (1)...(19): siRNA sense strand
uaugagguguuccugaaga

SEQ ID NO: 1729521 - RNA, 19 nt, Homo sapiens
  misc_RNA (1)...(19): siRNA sense strand
guauggguguuccugauaa

SEQ ID NO: 1729522 - RNA, 19 nt, Homo sapiens
  misc_RNA (1)...(19): siRNA sense strand
uaaagaaggguuaccaaga

SEQ ID NO: 1729523 - RNA, 19 nt, Homo sapiens
  misc_RNA (1)...(19): siRNA sense strand
gggcaccugugagaucuuu

SEQ ID NO: 1729524 - RNA, 19 nt, Homo sapiens
  misc_RNA (1)...(19): siRNA sense strand
aaagaaggguuaccaagac

SEQ ID NO: 1729525 - RNA, 19 nt, Homo sapiens
  misc_RNA (1)...(19): siRNA sense strand
ggguguuccugauaaagaa

SEQ ID NO: 1729526 - RNA, 19 nt, Homo sapiens
  misc_RNA (1)...(19): siRNA sense strand
gauaaagaaggguuaccaa

SEQ ID NO: 1729527 - RNA, 19 nt, Homo sapiens
  misc_RNA (1)...(19): siRNA sense strand
uggcguaccuggucguaug

SEQ ID NO: 1729528 - RNA, 19 nt, Homo sapiens
  misc_RNA (1)...(19): siRNA sense strand
cuacaagaccgagaaguau

SEQ ID NO: 1729529 - RNA, 19 nt, Homo sapiens
  misc_RNA (1)...(19): siRNA sense strand
acuacaagaccgagaagua

SEQ ID NO: 1729530 - RNA, 19 nt, Homo sapiens
  misc_RNA (1)...(19): siRNA sense strand
uauggguguuccugauaaa

SEQ ID NO: 1729531 - RNA, 19 nt, Homo sapiens
  misc_RNA (1)...(19): siRNA sense strand
agagugcugucaucaccaa

SEQ ID NO: 1729532 - RNA, 19 nt, Homo sapiens
  misc_RNA (1)...(19): siRNA sense strand
ggcguggccuucaccaaca

SEQ ID NO: 1729533 - RNA, 19 nt, Homo sapiens
  misc_RNA (1)...(19): siRNA sense strand
gaaggugggccugcuguac

SEQ ID NO: 1729534 - RNA, 19 nt, Homo sapiens
  misc_RNA (1)...(19): siRNA sense strand
cguauggguguuccugaua

SEQ ID NO: 1729535 - RNA, 19 nt, Homo sapiens
  misc_RNA (1)...(19): siRNA sense strand
gcugucaucaccaaaguca

SEQ ID NO: 1729536 - RNA, 19 nt, Homo sapiens
  misc_RNA (1)...(19): siRNA sense strand
gugcugucaucaccaaagu

SEQ ID NO: 1729537 - RNA, 19 nt, Homo sapiens
  misc_RNA (1)...(19): siRNA sense strand
accaacaccucggaucuug

SEQ ID NO: 1729538 - RNA, 19 nt, Homo sapiens
  misc_RNA (1)...(19): siRNA sense strand
aguaugucaucgccaagaa

SEQ ID NO: 1729539 - RNA, 19 nt, Homo sapiens
  misc_RNA (1)...(19): siRNA sense strand
gcuggaaacggagugaaga

SEQ ID NO: 1729540 - RNA, 19 nt, Homo sapiens
  misc_RNA (1)...(19): siRNA sense strand
acaagaccgagaaguaugu

SEQ ID NO: 1729541 - RNA, 19 nt, Homo sapiens
  misc_RNA (1)...(19): siRNA sense strand
guauggguguuccugauaa

SEQ ID NO: 1729542 - RNA, 19 nt, Homo sapiens
  misc_RNA (1)...(19): siRNA sense strand
uaaagaaggguuaccaaga

SEQ ID NO: 1729543 - RNA, 19 nt, Homo sapiens
  misc_RNA (1)...(19): siRNA sense strand
gggcaccugugagaucuuu

SEQ ID NO: 1729544 - RNA, 19 nt, Homo sapiens
  misc_RNA (1)...(19): siRNA sense strand
aaagaaggguuaccaagac

SEQ ID NO: 1729545 - RNA, 19 nt, Homo sapiens
  misc_RNA (1)...(19): siRNA sense strand
ggguguuccugauaaagaa

SEQ ID NO: 1729546 - RNA, 19 nt, Homo sapiens
  misc_RNA (1)...(19): siRNA sense strand
gauaaagaaggguuaccaa

SEQ ID NO: 1729547 - RNA, 19 nt, Homo sapiens
  misc_RNA (1)...(19): siRNA sense strand
uggcguaccuggucguaug

SEQ ID NO: 1729548 - RNA, 19 nt, Homo sapiens
  misc_RNA (1)...(19): siRNA sense strand
cuacaagaccgagaaguau

SEQ ID NO: 1729549 - RNA, 19 nt, Homo sapiens
  misc_RNA (1)...(19): siRNA sense strand
acuacaagaccgagaagua

SEQ ID NO: 1729550 - RNA, 19 nt, Homo sapiens
  misc_RNA (1)...(19): siRNA sense strand
uauggguguuccugauaaa

SEQ ID NO: 1729551 - RNA, 19 nt, Homo sapiens
  misc_RNA (1)...(19): siRNA sense strand
agagugcugucaucaccaa

SEQ ID NO: 1729552 - RNA, 19 nt, Homo sapiens
  misc_RNA (1)...(19): siRNA sense strand
ggcguggccuucaccaaca

SEQ ID NO: 1729553 - RNA, 19 nt, Homo sapiens
  misc_RNA (1)...(19): siRNA sense strand
gaaggugggccugcuguac

SEQ ID NO: 1729554 - RNA, 19 nt, Homo sapiens
  misc_RNA (1)...(19): siRNA sense strand
cguauggguguuccugaua

SEQ ID NO: 1729555 - RNA, 19 nt, Homo sapiens
  misc_RNA (1)...(19): siRNA sense strand
gcugucaucaccaaaguca

SEQ ID NO: 1729556 - RNA, 19 nt, Homo sapiens
  misc_RNA (1)...(19): siRNA sense strand
gugcugucaucaccaaagu

SEQ ID NO: 1729557 - RNA, 19 nt, Homo sapiens
  misc_RNA (1)...(19): siRNA sense strand
accaacaccucggaucuug

SEQ ID NO: 1729558 - RNA, 19 nt, Homo sapiens
  misc_RNA (1)...(19): siRNA sense strand
aguaugucaucgccaagaa

SEQ ID NO: 1729559 - RNA, 19 nt, Homo sapiens
  misc_RNA (1)...(19): siRNA sense strand
gcuggaaacggagugaaga

SEQ ID NO: 1729560 - RNA, 19 nt, Homo sapiens
  misc_RNA (1)...(19): siRNA sense strand
acaagaccgagaaguaugu

SEQ ID NO: 1729561 - RNA, 19 nt, Homo sapiens
  misc_RNA (1)...(19): siRNA sense strand
guauggguguuccugauaa

SEQ ID NO: 1729562 - RNA, 19 nt, Homo sapiens
  misc_RNA (1)...(19): siRNA sense strand
uaaagaaggguuaccaaga

SEQ ID NO: 1729563 - RNA, 19 nt, Homo sapiens
  misc_RNA (1)...(19): siRNA sense strand
gggcaccugugagaucuuu

SEQ ID NO: 1729564 - RNA, 19 nt, Homo sapiens
  misc_RNA (1)...(19): siRNA sense strand
aaagaaggguuaccaagac

SEQ ID NO: 1729565 - RNA, 19 nt, Homo sapiens
  misc_RNA (1)...(19): siRNA sense strand
ggguguuccugauaaagaa

SEQ ID NO: 1729566 - RNA, 19 nt, Homo sapiens
  misc_RNA (1)...(19): siRNA sense strand
gauaaagaaggguuaccaa

SEQ ID NO: 1729567 - RNA, 19 nt, Homo sapiens
  misc_RNA (1)...(19): siRNA sense strand
uggcguaccuggucguaug

SEQ ID NO: 1729568 - RNA, 19 nt, Homo sapiens
  misc_RNA (1)...(19): siRNA sense strand
cuacaagaccgagaaguau

SEQ ID NO: 1729569 - RNA, 19 nt, Homo sapiens
  misc_RNA (1)...(19): siRNA sense strand
acuacaagaccgagaagua

SEQ ID NO: 1729570 - RNA, 19 nt, Homo sapiens
  misc_RNA (1)...(19): siRNA sense strand
uauggguguuccugauaaa

SEQ ID NO: 1729571 - RNA, 19 nt, Homo sapiens
  misc_RNA (1)...(19): siRNA sense strand
agagugcugucaucaccaa

SEQ ID NO: 1729572 - RNA, 19 nt, Homo sapiens
  misc_RNA (1)...(19): siRNA sense strand
ggcguggccuucaccaaca

SEQ ID NO: 1729573 - RNA, 19 nt, Homo sapiens
  misc_RNA (1)...(19): siRNA sense strand
gaaggugggccugcuguac

SEQ ID NO: 1729574 - RNA, 19 nt, Homo sapiens
  misc_RNA (1)...(19): siRNA sense strand
cguauggguguuccugaua

SEQ ID NO: 1729575 - RNA, 19 nt, Homo sapiens
  misc_RNA (1)...(19): siRNA sense strand
gcugucaucaccaaaguca

SEQ ID NO: 1729576 - RNA, 19 nt, Homo sapiens
  misc_RNA (1)...(19): siRNA sense strand
gugcugucaucaccaaagu

SEQ ID NO: 1729577 - RNA, 19 nt, Homo sapiens
  misc_RNA (1)...(19): siRNA sense strand
accaacaccucggaucuug

SEQ ID NO: 1729578 - RNA, 19 nt, Homo sapiens
  misc_RNA (1)...(19): siRNA sense strand
aguaugucaucgccaagaa

SEQ ID NO: 1729579 - RNA, 19 nt, Homo sapiens
  misc_RNA (1)...(19): siRNA sense strand
gcuggaaacggagugaaga

SEQ ID NO: 1729580 - RNA, 19 nt, Homo sapiens
  misc_RNA (1)...(19): siRNA sense strand
acaagaccgagaaguaugu

SEQ ID NO: 1729581 - RNA, 19 nt, Homo sapiens
  misc_RNA (1)...(19): siRNA sense strand
guauggguguuccugauaa

SEQ ID NO: 1729582 - RNA, 19 nt, Homo sapiens
  misc_RNA (1)...(19): siRNA sense strand
uaaagaaggguuaccaaga

SEQ ID NO: 1729583 - RNA, 19 nt, Homo sapiens
  misc_RNA (1)...(19): siRNA sense strand
gggcaccugugagaucuuu

SEQ ID NO: 1729584 - RNA, 19 nt, Homo sapiens
  misc_RNA (1)...(19): siRNA sense strand
aaagaaggguuaccaagac

SEQ ID NO: 1729585 - RNA, 19 nt, Homo sapiens
  misc_RNA (1)...(19): siRNA sense strand
ggguguuccugauaaagaa

SEQ ID NO: 1729586 - RNA, 19 nt, Homo sapiens
  misc_RNA (1)...(19): siRNA sense strand
gauaaagaaggguuaccaa

SEQ ID NO: 1729587 - RNA, 19 nt, Homo sapiens
  misc_RNA (1)...(19): siRNA sense strand
uggcguaccuggucguaug

SEQ ID NO: 1729588 - RNA, 19 nt, Homo sapiens
  misc_RNA (1)...(19): siRNA sense strand
cuacaagaccgagaaguau

SEQ ID NO: 1729589 - RNA, 19 nt, Homo sapiens
  misc_RNA (1)...(19): siRNA sense strand
acuacaagaccgagaagua

SEQ ID NO: 1729590 - RNA, 19 nt, Homo sapiens
  misc_RNA (1)...(19): siRNA sense strand
uauggguguuccugauaaa

SEQ ID NO: 1729591 - RNA, 19 nt, Homo sapiens
  misc_RNA (1)...(19): siRNA sense strand
agagugcugucaucaccaa

SEQ ID NO: 1729592 - RNA, 19 nt, Homo sapiens
  misc_RNA (1)...(19): siRNA sense strand
ggcguggccuucaccaaca

SEQ ID NO: 1729593 - RNA, 19 nt, Homo sapiens
  misc_RNA (1)...(19): siRNA sense strand
gaaggugggccugcuguac

SEQ ID NO: 1729594 - RNA, 19 nt, Homo sapiens
  misc_RNA (1)...(19): siRNA sense strand
cguauggguguuccugaua

SEQ ID NO: 1729595 - RNA, 19 nt, Homo sapiens
  misc_RNA (1)...(19): siRNA sense strand
gcugucaucaccaaaguca

SEQ ID NO: 1729596 - RNA, 19 nt, Homo sapiens
  misc_RNA (1)...(19): siRNA sense strand
gugcugucaucaccaaagu

SEQ ID NO: 1729597 - RNA, 19 nt, Homo sapiens
  misc_RNA (1)...(19): siRNA sense strand
accaacaccucggaucuug

SEQ ID NO: 1729598 - RNA, 19 nt, Homo sapiens
  misc_RNA (1)...(19): siRNA sense strand
aguaugucaucgccaagaa

SEQ ID NO: 1729599 - RNA, 19 nt, Homo sapiens
  misc_RNA (1)...(19): siRNA sense strand
gcuggaaacggagugaaga

SEQ ID NO: 1729600 - RNA, 19 nt, Homo sapiens
  misc_RNA (1)...(19): siRNA sense strand
acaagaccgagaaguaugu

SEQ ID NO: 1729601 - RNA, 19 nt, Homo sapiens
  misc_RNA (1)...(19): siRNA sense strand
guauggguguuccugauaa

SEQ ID NO: 1729602 - RNA, 19 nt, Homo sapiens
  misc_RNA (1)...(19): siRNA sense strand
uaaagaaggguuaccaaga

SEQ ID NO: 1729603 - RNA, 19 nt, Homo sapiens
  misc_RNA (1)...(19): siRNA sense strand
gggcaccugugagaucuuu

SEQ ID NO: 1729604 - RNA, 19 nt, Homo sapiens
  misc_RNA (1)...(19): siRNA sense strand
aaagaaggguuaccaagac

SEQ ID NO: 1729605 - RNA, 19 nt, Homo sapiens
  misc_RNA (1)...(19): siRNA sense strand
ggguguuccugauaaagaa

SEQ ID NO: 1729606 - RNA, 19 nt, Homo sapiens
  misc_RNA (1)...(19): siRNA sense strand
gauaaagaaggguuaccaa

SEQ ID NO: 1729607 - RNA, 19 nt, Homo sapiens
  misc_RNA (1)...(19): siRNA sense strand
uggcguaccuggucguaug

SEQ ID NO: 1729608 - RNA, 19 nt, Homo sapiens
  misc_RNA (1)...(19): siRNA sense strand
cuacaagaccgagaaguau

SEQ ID NO: 1729609 - RNA, 19 nt, Homo sapiens
  misc_RNA (1)...(19): siRNA sense strand
acuacaagaccgagaagua

SEQ ID NO: 1729610 - RNA, 19 nt, Homo sapiens
  misc_RNA (1)...(19): siRNA sense strand
uauggguguuccugauaaa

SEQ ID NO: 1729611 - RNA, 19 nt, Homo sapiens
  misc_RNA (1)...(19): siRNA sense strand
agagugcugucaucaccaa

SEQ ID NO: 1729612 - RNA, 19 nt, Homo sapiens
  misc_RNA (1)...(19): siRNA sense strand
ggcguggccuucaccaaca

SEQ ID NO: 1729613 - RNA, 19 nt, Homo sapiens
  misc_RNA (1)...(19): siRNA sense strand
gaaggugggccugcuguac

SEQ ID NO: 1729614 - RNA, 19 nt, Homo sapiens
  misc_RNA (1)...(19): siRNA sense strand
cguauggguguuccugaua

SEQ ID NO: 1729615 - RNA, 19 nt, Homo sapiens
  misc_RNA (1)...(19): siRNA sense strand
gcugucaucaccaaaguca

SEQ ID NO: 1729616 - RNA, 19 nt, Homo sapiens
  misc_RNA (1)...(19): siRNA sense strand
gugcugucaucaccaaagu

SEQ ID NO: 1729617 - RNA, 19 nt, Homo sapiens
  misc_RNA (1)...(19): siRNA sense strand
accaacaccucggaucuug

SEQ ID NO: 1729618 - RNA, 19 nt, Homo sapiens
  misc_RNA (1)...(19): siRNA sense strand
aguaugucaucgccaagaa

SEQ ID NO: 1729619 - RNA, 19 nt, Homo sapiens
  misc_RNA (1)...(19): siRNA sense strand
gcuggaaacggagugaaga

SEQ ID NO: 1729620 - RNA, 19 nt, Homo sapiens
  misc_RNA (1)...(19): siRNA sense strand
acaagaccgagaaguaugu

SEQ ID NO: 1729621 - RNA, 19 nt, Homo sapiens
  misc_RNA (1)...(19): siRNA sense strand
guauggguguuccugauaa

SEQ ID NO: 1729622 - RNA, 19 nt, Homo sapiens
  misc_RNA (1)...(19): siRNA sense strand
uaaagaaggguuaccaaga

SEQ ID NO: 1729623 - RNA, 19 nt, Homo sapiens
  misc_RNA (1)...(19): siRNA sense strand
gggcaccugugagaucuuu

SEQ ID NO: 1729624 - RNA, 19 nt, Homo sapiens
  misc_RNA (1)...(19): siRNA sense strand
aaagaaggguuaccaagac

SEQ ID NO: 1729625 - RNA, 19 nt, Homo sapiens
  misc_RNA (1)...(19): siRNA sense strand
ggguguuccugauaaagaa

SEQ ID NO: 1729626 - RNA, 19 nt, Homo sapiens
  misc_RNA (1)...(19): siRNA sense strand
gauaaagaaggguuaccaa

SEQ ID NO: 1729627 - RNA, 19 nt, Homo sapiens
  misc_RNA (1)...(19): siRNA sense strand
uggcguaccuggucguaug

SEQ ID NO: 1729628 - RNA, 19 nt, Homo sapiens
  misc_RNA (1)...(19): siRNA sense strand
cuacaagaccgagaaguau

SEQ ID NO: 1729629 - RNA, 19 nt, Homo sapiens
  misc_RNA (1)...(19): siRNA sense strand
acuacaagaccgagaagua

SEQ ID NO: 1729630 - RNA, 19 nt, Homo sapiens
  misc_RNA (1)...(19): siRNA sense strand
uauggguguuccugauaaa

SEQ ID NO: 1729631 - RNA, 19 nt, Homo sapiens
  misc_RNA (1)...(19): siRNA sense strand
agagugcugucaucaccaa

SEQ ID NO: 1729632 - RNA, 19 nt, Homo sapiens
  misc_RNA (1)...(19): siRNA sense strand
ggcguggccuucaccaaca

SEQ ID NO: 1729633 - RNA, 19 nt, Homo sapiens
  misc_RNA (1)...(19): siRNA sense strand
gaaggugggccugcuguac

SEQ ID NO: 1729634 - RNA, 19 nt, Homo sapiens
  misc_RNA (1)...(19): siRNA sense strand
cguauggguguuccugaua

SEQ ID NO: 1729635 - RNA, 19 nt, Homo sapiens
  misc_RNA (1)...(19): siRNA sense strand
gcugucaucaccaaaguca

SEQ ID NO: 1729636 - RNA, 19 nt, Homo sapiens
  misc_RNA (1)...(19): siRNA sense strand
gugcugucaucaccaaagu

SEQ ID NO: 1729637 - RNA, 19 nt, Homo sapiens
  misc_RNA (1)...(19): siRNA sense strand
accaacaccucggaucuug

SEQ ID NO: 1729638 - RNA, 19 nt, Homo sapiens
  misc_RNA (1)...(19): siRNA sense strand
aguaugucaucgccaagaa

SEQ ID NO: 1729639 - RNA, 19 nt, Homo sapiens
  misc_RNA (1)...(19): siRNA sense strand
gcuggaaacggagugaaga

SEQ ID NO: 1729640 - RNA, 19 nt, Homo sapiens
  misc_RNA (1)...(19): siRNA sense strand
acaagaccgagaaguaugu

SEQ ID NO: 1729641 - RNA, 19 nt, Homo sapiens
  misc_RNA (1)...(19): siRNA sense strand
gcaaagccauguacacaaa

SEQ ID NO: 1729642 - RNA, 19 nt, Homo sapiens
  misc_RNA (1)...(19): siRNA sense strand
gaugagaccuuaaacuuca

SEQ ID NO: 1729643 - RNA, 19 nt, Homo sapiens
  misc_RNA (1)...(19): siRNA sense strand
gaagauagccgaggaaauc

SEQ ID NO: 1729644 - RNA, 19 nt, Homo sapiens
  misc_RNA (1)...(19): siRNA sense strand
acaaggagguguuggaauu

SEQ ID NO: 1729645 - RNA, 19 nt, Homo sapiens
  misc_RNA (1)...(19): siRNA sense strand
aaagggacaucauauuuga

SEQ ID NO: 1729646 - RNA, 19 nt, Homo sapiens
  misc_RNA (1)...(19): siRNA sense strand
gaaaggaugaugaccaaga

SEQ ID NO: 1729647 - RNA, 19 nt, Homo sapiens
  misc_RNA (1)...(19): siRNA sense strand
gcuaugacuuugucuauca

SEQ ID NO: 1729648 - RNA, 19 nt, Homo sapiens
  misc_RNA (1)...(19): siRNA sense strand
caucgcaccuaauaaauau

SEQ ID NO: 1729649 - RNA, 19 nt, Homo sapiens
  misc_RNA (1)...(19): siRNA sense strand
ucaaagggacaucauauuu

SEQ ID NO: 1729650 - RNA, 19 nt, Homo sapiens
  misc_RNA (1)...(19): siRNA sense strand
ugacaaggcucguggaaag

SEQ ID NO: 1729651 - RNA, 19 nt, Homo sapiens
  misc_RNA (1)...(19): siRNA sense strand
ggcagcagcuuccgaaaga

SEQ ID NO: 1729652 - RNA, 19 nt, Homo sapiens
  misc_RNA (1)...(19): siRNA sense strand
ccagugagcugaccaagag

SEQ ID NO: 1729653 - RNA, 19 nt, Homo sapiens
  misc_RNA (1)...(19): siRNA sense strand
ugaggaggauugcauuuga

SEQ ID NO: 1729654 - RNA, 19 nt, Homo sapiens
  misc_RNA (1)...(19): siRNA sense strand
gaacagacucgcagugaca

SEQ ID NO: 1729655 - RNA, 19 nt, Homo sapiens
  misc_RNA (1)...(19): siRNA sense strand
aagcaucuccggucuauaa

SEQ ID NO: 1729656 - RNA, 19 nt, Homo sapiens
  misc_RNA (1)...(19): siRNA sense strand
gagcaaaucacucgagcuu

SEQ ID NO: 1729657 - RNA, 19 nt, Homo sapiens
  misc_RNA (1)...(19): siRNA sense strand
ugccaaacccagaguauua

SEQ ID NO: 1729658 - RNA, 19 nt, Homo sapiens
  misc_RNA (1)...(19): siRNA sense strand
ucaacaagguuaugcaagu

SEQ ID NO: 1729659 - RNA, 19 nt, Homo sapiens
  misc_RNA (1)...(19): siRNA sense strand
guacacaaaggacuacaaa

SEQ ID NO: 1729660 - RNA, 19 nt, Homo sapiens
  misc_RNA (1)...(19): siRNA sense strand
gacaucauauuugaacuga

SEQ ID NO: 1729661 - RNA, 19 nt, Homo sapiens
  misc_RNA (1)...(19): siRNA sense strand
gaggacaaacgacaggaua

SEQ ID NO: 1729662 - RNA, 19 nt, Homo sapiens
  misc_RNA (1)...(19): siRNA sense strand
gaacugaggaggauugcau

SEQ ID NO: 1729663 - RNA, 19 nt, Homo sapiens
  misc_RNA (1)...(19): siRNA sense strand
ucaaucaccuuuauuaagc

SEQ ID NO: 1729664 - RNA, 19 nt, Homo sapiens
  misc_RNA (1)...(19): siRNA sense strand
ggucuauaauccugaauca

SEQ ID NO: 1729665 - RNA, 19 nt, Homo sapiens
  misc_RNA (1)...(19): siRNA sense strand
gacaggauauggcaaaugc

SEQ ID NO: 1729666 - RNA, 19 nt, Homo sapiens
  misc_RNA (1)...(19): siRNA sense strand
cuacugaguucaucaacau

SEQ ID NO: 1729667 - RNA, 19 nt, Homo sapiens
  misc_RNA (1)...(19): siRNA sense strand
aagaaaggaugaugaccaa

SEQ ID NO: 1729668 - RNA, 19 nt, Homo sapiens
  misc_RNA (1)...(19): siRNA sense strand
cuucaaguccuaaccuuua

SEQ ID NO: 1729669 - RNA, 19 nt, Homo sapiens
  misc_RNA (1)...(19): siRNA sense strand
gcucaaagggacaucauau

SEQ ID NO: 1729670 - RNA, 19 nt, Homo sapiens
  misc_RNA (1)...(19): siRNA sense strand
uaaacuucaucgcaccuaa

SEQ ID NO: 1729671 - RNA, 19 nt, Homo sapiens
  misc_RNA (1)...(19): siRNA sense strand
ggaacuaccaaaugaagga

SEQ ID NO: 1729672 - RNA, 19 nt, Homo sapiens
  misc_RNA (1)...(19): siRNA sense strand
ccaaggagcccagcagcua

SEQ ID NO: 1729673 - RNA, 19 nt, Homo sapiens
  misc_RNA (1)...(19): siRNA sense strand
ggacaaacgacaggauaug

SEQ ID NO: 1729674 - RNA, 19 nt, Homo sapiens
  misc_RNA (1)...(19): siRNA sense strand
cagcagaggacuucaacaa

SEQ ID NO: 1729675 - RNA, 19 nt, Homo sapiens
  misc_RNA (1)...(19): siRNA sense strand
ucaucgcaccuaauaaaua

SEQ ID NO: 1729676 - RNA, 19 nt, Homo sapiens
  misc_RNA (1)...(19): siRNA sense strand
gaaucugcauccagcuguu

SEQ ID NO: 1729677 - RNA, 19 nt, Homo sapiens
  misc_RNA (1)...(19): siRNA sense strand
caaauugcguagccugagu

SEQ ID NO: 1729678 - RNA, 19 nt, Homo sapiens
  misc_RNA (1)...(19): siRNA sense strand
caacaagguuaugcaaguc

SEQ ID NO: 1729679 - RNA, 19 nt, Homo sapiens
  misc_RNA (1)...(19): siRNA sense strand
gacuuucgcuacugaguuc

SEQ ID NO: 1729680 - RNA, 19 nt, Homo sapiens
  misc_RNA (1)...(19): siRNA sense strand
ccuccaaacccaacucuuu

SEQ ID NO: 1729681 - RNA, 19 nt, Homo sapiens
  misc_RNA (1)...(19): siRNA sense strand
ccauugagcucaccaaaau

SEQ ID NO: 1729682 - RNA, 19 nt, Homo sapiens
  misc_RNA (1)...(19): siRNA sense strand
uggcauccauuaucaagga

SEQ ID NO: 1729683 - RNA, 19 nt, Homo sapiens
  misc_RNA (1)...(19): siRNA sense strand
agaagcaucuccggucuau

SEQ ID NO: 1729684 - RNA, 19 nt, Homo sapiens
  misc_RNA (1)...(19): siRNA sense strand
ucuauaauccugaaucaug

SEQ ID NO: 1729685 - RNA, 19 nt, Homo sapiens
  misc_RNA (1)...(19): siRNA sense strand
gcccagcagcuaugacuuu

SEQ ID NO: 1729686 - RNA, 19 nt, Homo sapiens
  misc_RNA (1)...(19): siRNA sense strand
aaaggaugaugaccaagau

SEQ ID NO: 1729687 - RNA, 19 nt, Homo sapiens
  misc_RNA (1)...(19): siRNA sense strand
guacaucaccgaacagacu

SEQ ID NO: 1729688 - RNA, 19 nt, Homo sapiens
  misc_RNA (1)...(19): siRNA sense strand
ggacaucauauuugaacug

SEQ ID NO: 1729689 - RNA, 19 nt, Homo sapiens
  misc_RNA (1)...(19): siRNA sense strand
gaaugggacaaucuuacaa

SEQ ID NO: 1729690 - RNA, 19 nt, Homo sapiens
  misc_RNA (1)...(19): siRNA sense strand
cagcagcuaugacuuuguc

SEQ ID NO: 1729691 - RNA, 19 nt, Homo sapiens
  misc_RNA (1)...(19): siRNA sense strand
uugaaucccugcaggagaa

SEQ ID NO: 1729692 - RNA, 19 nt, Homo sapiens
  misc_RNA (1)...(19): siRNA sense strand
gcaagucguccgagagcaa

SEQ ID NO: 1729693 - RNA, 19 nt, Homo sapiens
  misc_RNA (1)...(19): siRNA sense strand
caaaugaaggacgcaauga

SEQ ID NO: 1729694 - RNA, 19 nt, Homo sapiens
  misc_RNA (1)...(19): siRNA sense strand
ucagcuauauguccuucaa

SEQ ID NO: 1729695 - RNA, 19 nt, Homo sapiens
  misc_RNA (1)...(19): siRNA sense strand
cuauaauccugaaucaugu

SEQ ID NO: 1729696 - RNA, 19 nt, Homo sapiens
  misc_RNA (1)...(19): siRNA sense strand
ugggacagcucaucucaca

SEQ ID NO: 1729697 - RNA, 19 nt, Homo sapiens
  misc_RNA (1)...(19): siRNA sense strand
gcacugauuaaugcacuuu

SEQ ID NO: 1729698 - RNA, 19 nt, Homo sapiens
  misc_RNA (1)...(19): siRNA sense strand
cuucaucgcaccuaauaaa

SEQ ID NO: 1729699 - RNA, 19 nt, Homo sapiens
  misc_RNA (1)...(19): siRNA sense strand
cagaugguccucagcugua

SEQ ID NO: 1729700 - RNA, 19 nt, Homo sapiens
  misc_RNA (1)...(19): siRNA sense strand
ccaaacccagaguauuaua

SEQ ID NO: 1729701 - RNA, 19 nt, Homo sapiens
  misc_RNA (1)...(19): siRNA sense strand
cagacucgcagugacauua

SEQ ID NO: 1729702 - RNA, 19 nt, Homo sapiens
  misc_RNA (1)...(19): siRNA sense strand
ggauuuaccaaccacauca

SEQ ID NO: 1729703 - RNA, 19 nt, Homo sapiens
  misc_RNA (1)...(19): siRNA sense strand
accaggagauucagaccua

SEQ ID NO: 1729704 - RNA, 19 nt, Homo sapiens
  misc_RNA (1)...(19): siRNA sense strand
gcuacugaguucaucaaca

SEQ ID NO: 1729705 - RNA, 19 nt, Homo sapiens
  misc_RNA (1)...(19): siRNA sense strand
cgacgugacuuucgcuacu

SEQ ID NO: 1729706 - RNA, 19 nt, Homo sapiens
  misc_RNA (1)...(19): siRNA sense strand
ggacaccuacauccggauu

SEQ ID NO: 1729707 - RNA, 19 nt, Homo sapiens
  misc_RNA (1)...(19): siRNA sense strand
gaaaagugcucugaaacag

SEQ ID NO: 1729708 - RNA, 19 nt, Homo sapiens
  misc_RNA (1)...(19): siRNA sense strand
gaaagauuguccccacaug

SEQ ID NO: 1729709 - RNA, 19 nt, Homo sapiens
  misc_RNA (1)...(19): siRNA sense strand
cagaggacuucaacaaggu

SEQ ID NO: 1729710 - RNA, 19 nt, Homo sapiens
  misc_RNA (1)...(19): siRNA sense strand
caacagcagaggacuucaa

SEQ ID NO: 1729711 - RNA, 19 nt, Homo sapiens
  misc_RNA (1)...(19): siRNA sense strand
ugaccgagccuuugaagag

SEQ ID NO: 1729712 - RNA, 19 nt, Homo sapiens
  misc_RNA (1)...(19): siRNA sense strand
ccaaaugaaggacgcaaug

SEQ ID NO: 1729713 - RNA, 19 nt, Homo sapiens
  misc_RNA (1)...(19): siRNA sense strand
ccugggacaugguuucaau

SEQ ID NO: 1729714 - RNA, 19 nt, Homo sapiens
  misc_RNA (1)...(19): siRNA sense strand
ggaagacaaacaugaaugc

SEQ ID NO: 1729715 - RNA, 19 nt, Homo sapiens
  misc_RNA (1)...(19): siRNA sense strand
gggaagacaaacaugaaug

SEQ ID NO: 1729716 - RNA, 19 nt, Homo sapiens
  misc_RNA (1)...(19): siRNA sense strand
ggacaacaugcuguacuug

SEQ ID NO: 1729717 - RNA, 19 nt, Homo sapiens
  misc_RNA (1)...(19): siRNA sense strand
uauuauacccuccguuaug

SEQ ID NO: 1729718 - RNA, 19 nt, Homo sapiens
  misc_RNA (1)...(19): siRNA sense strand
ccaaugaccaggcucaaag

SEQ ID NO: 1729719 - RNA, 19 nt, Homo sapiens
  misc_RNA (1)...(19): siRNA sense strand
cacccugacugccuuccua

SEQ ID NO: 1729720 - RNA, 19 nt, Homo sapiens
  misc_RNA (1)...(19): siRNA sense strand
gcagcuaugacuuugucua

SEQ ID NO: 1729721 - RNA, 19 nt, Homo sapiens
  misc_RNA (1)...(19): siRNA sense strand
uggacaacaugcuguacuu

SEQ ID NO: 1729722 - RNA, 19 nt, Homo sapiens
  misc_RNA (1)...(19): siRNA sense strand
gacuuugucuaucacuaug

SEQ ID NO: 1729723 - RNA, 19 nt, Homo sapiens
  misc_RNA (1)...(19): siRNA sense strand
cagcuaugacuuugucuau

SEQ ID NO: 1729724 - RNA, 19 nt, Homo sapiens
  misc_RNA (1)...(19): siRNA sense strand
ccaccaccgucagacauug

SEQ ID NO: 1729725 - RNA, 19 nt, Homo sapiens
  misc_RNA (1)...(19): siRNA sense strand
gaggacuucaacaagguua

SEQ ID NO: 1729726 - RNA, 19 nt, Homo sapiens
  misc_RNA (1)...(19): siRNA sense strand
gcucuugucccacuacagu

SEQ ID NO: 1729727 - RNA, 19 nt, Homo sapiens
  misc_RNA (1)...(19): siRNA sense strand
cugaugagaccuuaaacuu

SEQ ID NO: 1729728 - RNA, 19 nt, Homo sapiens
  misc_RNA (1)...(19): siRNA sense strand
cagcagcuuccgaaagauu

SEQ ID NO: 1729729 - RNA, 19 nt, Homo sapiens
  misc_RNA (1)...(19): siRNA sense strand
gaucaguucaagagcaaau

SEQ ID NO: 1729730 - RNA, 19 nt, Homo sapiens
  misc_RNA (1)...(19): siRNA sense strand
aaacaugaaugccccuuug

SEQ ID NO: 1729731 - RNA, 19 nt, Homo sapiens
  misc_RNA (1)...(19): siRNA sense strand
cuacgccauugcacugauu

SEQ ID NO: 1729732 - RNA, 19 nt, Homo sapiens
  misc_RNA (1)...(19): siRNA sense strand
uggagagcauggucuugaa

SEQ ID NO: 1729733 - RNA, 19 nt, Homo sapiens
  misc_RNA (1)...(19): siRNA sense strand
uaagcagauugcaggguau

SEQ ID NO: 1729734 - RNA, 19 nt, Homo sapiens
  misc_RNA (1)...(19): siRNA sense strand
ugacuuugucuaucacuau

SEQ ID NO: 1729735 - RNA, 19 nt, Homo sapiens
  misc_RNA (1)...(19): siRNA sense strand
ugacccugaugagaccuua

SEQ ID NO: 1729736 - RNA, 19 nt, Homo sapiens
  misc_RNA (1)...(19): siRNA sense strand
ggagaaaauuccuguugca

SEQ ID NO: 1729737 - RNA, 19 nt, Homo sapiens
  misc_RNA (1)...(19): siRNA sense strand
ggacuucaacaagguuaug

SEQ ID NO: 1729738 - RNA, 19 nt, Homo sapiens
  misc_RNA (1)...(19): siRNA sense strand
ccaaaaugcucugugaaau

SEQ ID NO: 1729739 - RNA, 19 nt, Homo sapiens
  misc_RNA (1)...(19): siRNA sense strand
ugaugagaccuuaaacuuc

SEQ ID NO: 1729740 - RNA, 19 nt, Homo sapiens
  misc_RNA (1)...(19): siRNA sense strand
caaggagcccagcagcuau

SEQ ID NO: 1729741 - RNA, 19 nt, Homo sapiens
  misc_RNA (1)...(19): siRNA sense strand
gcaaagccauguacacaaa

SEQ ID NO: 1729742 - RNA, 19 nt, Homo sapiens
  misc_RNA (1)...(19): siRNA sense strand
gaugagaccuuaaacuuca

SEQ ID NO: 1729743 - RNA, 19 nt, Homo sapiens
  misc_RNA (1)...(19): siRNA sense strand
gaagauagccgaggaaauc

SEQ ID NO: 1729744 - RNA, 19 nt, Homo sapiens
  misc_RNA (1)...(19): siRNA sense strand
acaaggagguguuggaauu

SEQ ID NO: 1729745 - RNA, 19 nt, Homo sapiens
  misc_RNA (1)...(19): siRNA sense strand
aaagggacaucauauuuga

SEQ ID NO: 1729746 - RNA, 19 nt, Homo sapiens
  misc_RNA (1)...(19): siRNA sense strand
gaaaggaugaugaccaaga

SEQ ID NO: 1729747 - RNA, 19 nt, Homo sapiens
  misc_RNA (1)...(19): siRNA sense strand
gcuaugacuuugucuauca

SEQ ID NO: 1729748 - RNA, 19 nt, Homo sapiens
  misc_RNA (1)...(19): siRNA sense strand
caucgcaccuaauaaauau

SEQ ID NO: 1729749 - RNA, 19 nt, Homo sapiens
  misc_RNA (1)...(19): siRNA sense strand
ucaaagggacaucauauuu

SEQ ID NO: 1729750 - RNA, 19 nt, Homo sapiens
  misc_RNA (1)...(19): siRNA sense strand
ugacaaggcucguggaaag

SEQ ID NO: 1729751 - RNA, 19 nt, Homo sapiens
  misc_RNA (1)...(19): siRNA sense strand
ggcagcagcuuccgaaaga

SEQ ID NO: 1729752 - RNA, 19 nt, Homo sapiens
  misc_RNA (1)...(19): siRNA sense strand
ccagugagcugaccaagag

SEQ ID NO: 1729753 - RNA, 19 nt, Homo sapiens
  misc_RNA (1)...(19): siRNA sense strand
ugaggaggauugcauuuga

SEQ ID NO: 1729754 - RNA, 19 nt, Homo sapiens
  misc_RNA (1)...(19): siRNA sense strand
gaacagacucgcagugaca

SEQ ID NO: 1729755 - RNA, 19 nt, Homo sapiens
  misc_RNA (1)...(19): siRNA sense strand
aagcaucuccggucuauaa

SEQ ID NO: 1729756 - RNA, 19 nt, Homo sapiens
  misc_RNA (1)...(19): siRNA sense strand
gagcaaaucacucgagcuu

SEQ ID NO: 1729757 - RNA, 19 nt, Homo sapiens
  misc_RNA (1)...(19): siRNA sense strand
ugccaaacccagaguauua

SEQ ID NO: 1729758 - RNA, 19 nt, Homo sapiens
  misc_RNA (1)...(19): siRNA sense strand
ucaacaagguuaugcaagu

SEQ ID NO: 1729759 - RNA, 19 nt, Homo sapiens
  misc_RNA (1)...(19): siRNA sense strand
guacacaaaggacuacaaa

SEQ ID NO: 1729760 - RNA, 19 nt, Homo sapiens
  misc_RNA (1)...(19): siRNA sense strand
gacaucauauuugaacuga

SEQ ID NO: 1729761 - RNA, 19 nt, Homo sapiens
  misc_RNA (1)...(19): siRNA sense strand
gaggacaaacgacaggaua

SEQ ID NO: 1729762 - RNA, 19 nt, Homo sapiens
  misc_RNA (1)...(19): siRNA sense strand
gaacugaggaggauugcau

SEQ ID NO: 1729763 - RNA, 19 nt, Homo sapiens
  misc_RNA (1)...(19): siRNA sense strand
ucaaucaccuuuauuaagc

SEQ ID NO: 1729764 - RNA, 19 nt, Homo sapiens
  misc_RNA (1)...(19): siRNA sense strand
ggucuauaauccugaauca

SEQ ID NO: 1729765 - RNA, 19 nt, Homo sapiens
  misc_RNA (1)...(19): siRNA sense strand
gacaggauauggcaaaugc

SEQ ID NO: 1729766 - RNA, 19 nt, Homo sapiens
  misc_RNA (1)...(19): siRNA sense strand
cuacugaguucaucaacau

SEQ ID NO: 1729767 - RNA, 19 nt, Homo sapiens
  misc_RNA (1)...(19): siRNA sense strand
aagaaaggaugaugaccaa

SEQ ID NO: 1729768 - RNA, 19 nt, Homo sapiens
  misc_RNA (1)...(19): siRNA sense strand
cuucaaguccuaaccuuua

SEQ ID NO: 1729769 - RNA, 19 nt, Homo sapiens
  misc_RNA (1)...(19): siRNA sense strand
gcucaaagggacaucauau

SEQ ID NO: 1729770 - RNA, 19 nt, Homo sapiens
  misc_RNA (1)...(19): siRNA sense strand
uaaacuucaucgcaccuaa

SEQ ID NO: 1729771 - RNA, 19 nt, Homo sapiens
  misc_RNA (1)...(19): siRNA sense strand
ggaacuaccaaaugaagga

SEQ ID NO: 1729772 - RNA, 19 nt, Homo sapiens
  misc_RNA (1)...(19): siRNA sense strand
ccaaggagcccagcagcua

SEQ ID NO: 1729773 - RNA, 19 nt, Homo sapiens
  misc_RNA (1)...(19): siRNA sense strand
ggacaaacgacaggauaug

SEQ ID NO: 1729774 - RNA, 19 nt, Homo sapiens
  misc_RNA (1)...(19): siRNA sense strand
cagcagaggacuucaacaa

SEQ ID NO: 1729775 - RNA, 19 nt, Homo sapiens
  misc_RNA (1)...(19): siRNA sense strand
ucaucgcaccuaauaaaua

SEQ ID NO: 1729776 - RNA, 19 nt, Homo sapiens
  misc_RNA (1)...(19): siRNA sense strand
gaaucugcauccagcuguu

SEQ ID NO: 1729777 - RNA, 19 nt, Homo sapiens
  misc_RNA (1)...(19): siRNA sense strand
caaauugcguagccugagu

SEQ ID NO: 1729778 - RNA, 19 nt, Homo sapiens
  misc_RNA (1)...(19): siRNA sense strand
caacaagguuaugcaaguc

SEQ ID NO: 1729779 - RNA, 19 nt, Homo sapiens
  misc_RNA (1)...(19): siRNA sense strand
gacuuucgcuacugaguuc

SEQ ID NO: 1729780 - RNA, 19 nt, Homo sapiens
  misc_RNA (1)...(19): siRNA sense strand
ccuccaaacccaacucuuu

SEQ ID NO: 1729781 - RNA, 19 nt, Homo sapiens
  misc_RNA (1)...(19): siRNA sense strand
ccauugagcucaccaaaau

SEQ ID NO: 1729782 - RNA, 19 nt, Homo sapiens
  misc_RNA (1)...(19): siRNA sense strand
uggcauccauuaucaagga

SEQ ID NO: 1729783 - RNA, 19 nt, Homo sapiens
  misc_RNA (1)...(19): siRNA sense strand
agaagcaucuccggucuau

SEQ ID NO: 1729784 - RNA, 19 nt, Homo sapiens
  misc_RNA (1)...(19): siRNA sense strand
ucuauaauccugaaucaug

SEQ ID NO: 1729785 - RNA, 19 nt, Homo sapiens
  misc_RNA (1)...(19): siRNA sense strand
gcccagcagcuaugacuuu

SEQ ID NO: 1729786 - RNA, 19 nt, Homo sapiens
  misc_RNA (1)...(19): siRNA sense strand
aaaggaugaugaccaagau

SEQ ID NO: 1729787 - RNA, 19 nt, Homo sapiens
  misc_RNA (1)...(19): siRNA sense strand
guacaucaccgaacagacu

SEQ ID NO: 1729788 - RNA, 19 nt, Homo sapiens
  misc_RNA (1)...(19): siRNA sense strand
ggacaucauauuugaacug

SEQ ID NO: 1729789 - RNA, 19 nt, Homo sapiens
  misc_RNA (1)...(19): siRNA sense strand
gaaugggacaaucuuacaa

SEQ ID NO: 1729790 - RNA, 19 nt, Homo sapiens
  misc_RNA (1)...(19): siRNA sense strand
cagcagcuaugacuuuguc

SEQ ID NO: 1729791 - RNA, 19 nt, Homo sapiens
  misc_RNA (1)...(19): siRNA sense strand
uugaaucccugcaggagaa

SEQ ID NO: 1729792 - RNA, 19 nt, Homo sapiens
  misc_RNA (1)...(19): siRNA sense strand
gcaagucguccgagagcaa

SEQ ID NO: 1729793 - RNA, 19 nt, Homo sapiens
  misc_RNA (1)...(19): siRNA sense strand
caaaugaaggacgcaauga

SEQ ID NO: 1729794 - RNA, 19 nt, Homo sapiens
  misc_RNA (1)...(19): siRNA sense strand
ucagcuauauguccuucaa

SEQ ID NO: 1729795 - RNA, 19 nt, Homo sapiens
  misc_RNA (1)...(19): siRNA sense strand
cuauaauccugaaucaugu

SEQ ID NO: 1729796 - RNA, 19 nt, Homo sapiens
  misc_RNA (1)...(19): siRNA sense strand
ugggacagcucaucucaca

SEQ ID NO: 1729797 - RNA, 19 nt, Homo sapiens
  misc_RNA (1)...(19): siRNA sense strand
gcacugauuaaugcacuuu

SEQ ID NO: 1729798 - RNA, 19 nt, Homo sapiens
  misc_RNA (1)...(19): siRNA sense strand
cuucaucgcaccuaauaaa

SEQ ID NO: 1729799 - RNA, 19 nt, Homo sapiens
  misc_RNA (1)...(19): siRNA sense strand
cagaugguccucagcugua

SEQ ID NO: 1729800 - RNA, 19 nt, Homo sapiens
  misc_RNA (1)...(19): siRNA sense strand
ccaaacccagaguauuaua

SEQ ID NO: 1729801 - RNA, 19 nt, Homo sapiens
  misc_RNA (1)...(19): siRNA sense strand
cagacucgcagugacauua

SEQ ID NO: 1729802 - RNA, 19 nt, Homo sapiens
  misc_RNA (1)...(19): siRNA sense strand
ggauuuaccaaccacauca

SEQ ID NO: 1729803 - RNA, 19 nt, Homo sapiens
  misc_RNA (1)...(19): siRNA sense strand
accaggagauucagaccua

SEQ ID NO: 1729804 - RNA, 19 nt, Homo sapiens
  misc_RNA (1)...(19): siRNA sense strand
gcuacugaguucaucaaca

SEQ ID NO: 1729805 - RNA, 19 nt, Homo sapiens
  misc_RNA (1)...(19): siRNA sense strand
cgacgugacuuucgcuacu

SEQ ID NO: 1729806 - RNA, 19 nt, Homo sapiens
  misc_RNA (1)...(19): siRNA sense strand
ggacaccuacauccggauu

SEQ ID NO: 1729807 - RNA, 19 nt, Homo sapiens
  misc_RNA (1)...(19): siRNA sense strand
gaaaagugcucugaaacag

SEQ ID NO: 1729808 - RNA, 19 nt, Homo sapiens
  misc_RNA (1)...(19): siRNA sense strand
gaaagauuguccccacaug

SEQ ID NO: 1729809 - RNA, 19 nt, Homo sapiens
  misc_RNA (1)...(19): siRNA sense strand
cagaggacuucaacaaggu

SEQ ID NO: 1729810 - RNA, 19 nt, Homo sapiens
  misc_RNA (1)...(19): siRNA sense strand
caacagcagaggacuucaa

SEQ ID NO: 1729811 - RNA, 19 nt, Homo sapiens
  misc_RNA (1)...(19): siRNA sense strand
ugaccgagccuuugaagag

SEQ ID NO: 1729812 - RNA, 19 nt, Homo sapiens
  misc_RNA (1)...(19): siRNA sense strand
ccaaaugaaggacgcaaug

SEQ ID NO: 1729813 - RNA, 19 nt, Homo sapiens
  misc_RNA (1)...(19): siRNA sense strand
ccugggacaugguuucaau

SEQ ID NO: 1729814 - RNA, 19 nt, Homo sapiens
  misc_RNA (1)...(19): siRNA sense strand
ggaagacaaacaugaaugc

SEQ ID NO: 1729815 - RNA, 19 nt, Homo sapiens
  misc_RNA (1)...(19): siRNA sense strand
gggaagacaaacaugaaug

SEQ ID NO: 1729816 - RNA, 19 nt, Homo sapiens
  misc_RNA (1)...(19): siRNA sense strand
ggacaacaugcuguacuug

SEQ ID NO: 1729817 - RNA, 19 nt, Homo sapiens
  misc_RNA (1)...(19): siRNA sense strand
uauuauacccuccguuaug

SEQ ID NO: 1729818 - RNA, 19 nt, Homo sapiens
  misc_RNA (1)...(19): siRNA sense strand
ccaaugaccaggcucaaag

SEQ ID NO: 1729819 - RNA, 19 nt, Homo sapiens
  misc_RNA (1)...(19): siRNA sense strand
cacccugacugccuuccua

SEQ ID NO: 1729820 - RNA, 19 nt, Homo sapiens
  misc_RNA (1)...(19): siRNA sense strand
gcagcuaugacuuugucua

SEQ ID NO: 1729821 - RNA, 19 nt, Homo sapiens
  misc_RNA (1)...(19): siRNA sense strand
uggacaacaugcuguacuu

SEQ ID NO: 1729822 - RNA, 19 nt, Homo sapiens
  misc_RNA (1)...(19): siRNA sense strand
gacuuugucuaucacuaug

SEQ ID NO: 1729823 - RNA, 19 nt, Homo sapiens
  misc_RNA (1)...(19): siRNA sense strand
cagcuaugacuuugucuau

SEQ ID NO: 1729824 - RNA, 19 nt, Homo sapiens
  misc_RNA (1)...(19): siRNA sense strand
ccaccaccgucagacauug

SEQ ID NO: 1729825 - RNA, 19 nt, Homo sapiens
  misc_RNA (1)...(19): siRNA sense strand
gaggacuucaacaagguua

SEQ ID NO: 1729826 - RNA, 19 nt, Homo sapiens
  misc_RNA (1)...(19): siRNA sense strand
gcucuugucccacuacagu

SEQ ID NO: 1729827 - RNA, 19 nt, Homo sapiens
  misc_RNA (1)...(19): siRNA sense strand
cugaugagaccuuaaacuu

SEQ ID NO: 1729828 - RNA, 19 nt, Homo sapiens
  misc_RNA (1)...(19): siRNA sense strand
cagcagcuuccgaaagauu

SEQ ID NO: 1729829 - RNA, 19 nt, Homo sapiens
  misc_RNA (1)...(19): siRNA sense strand
gaucaguucaagagcaaau

SEQ ID NO: 1729830 - RNA, 19 nt, Homo sapiens
  misc_RNA (1)...(19): siRNA sense strand
aaacaugaaugccccuuug

SEQ ID NO: 1729831 - RNA, 19 nt, Homo sapiens
  misc_RNA (1)...(19): siRNA sense strand
cuacgccauugcacugauu

SEQ ID NO: 1729832 - RNA, 19 nt, Homo sapiens
  misc_RNA (1)...(19): siRNA sense strand
uggagagcauggucuugaa

SEQ ID NO: 1729833 - RNA, 19 nt, Homo sapiens
  misc_RNA (1)...(19): siRNA sense strand
uaagcagauugcaggguau

SEQ ID NO: 1729834 - RNA, 19 nt, Homo sapiens
  misc_RNA (1)...(19): siRNA sense strand
ugacuuugucuaucacuau

SEQ ID NO: 1729835 - RNA, 19 nt, Homo sapiens
  misc_RNA (1)...(19): siRNA sense strand
ugacccugaugagaccuua

SEQ ID NO: 1729836 - RNA, 19 nt, Homo sapiens
  misc_RNA (1)...(19): siRNA sense strand
ggagaaaauuccuguugca

SEQ ID NO: 1729837 - RNA, 19 nt, Homo sapiens
  misc_RNA (1)...(19): siRNA sense strand
ggacuucaacaagguuaug

SEQ ID NO: 1729838 - RNA, 19 nt, Homo sapiens
  misc_RNA (1)...(19): siRNA sense strand
ccaaaaugcucugugaaau

SEQ ID NO: 1729839 - RNA, 19 nt, Homo sapiens
  misc_RNA (1)...(19): siRNA sense strand
ugaugagaccuuaaacuuc

SEQ ID NO: 1729840 - RNA, 19 nt, Homo sapiens
  misc_RNA (1)...(19): siRNA sense strand
caaggagcccagcagcuau

SEQ ID NO: 1729841 - RNA, 19 nt, Homo sapiens
  misc_RNA (1)...(19): siRNA sense strand
gcaaagccauguacacaaa

SEQ ID NO: 1729842 - RNA, 19 nt, Homo sapiens
  misc_RNA (1)...(19): siRNA sense strand
gaugagaccuuaaacuuca

SEQ ID NO: 1729843 - RNA, 19 nt, Homo sapiens
  misc_RNA (1)...(19): siRNA sense strand
gaagauagccgaggaaauc

SEQ ID NO: 1729844 - RNA, 19 nt, Homo sapiens
  misc_RNA (1)...(19): siRNA sense strand
acaaggagguguuggaauu

SEQ ID NO: 1729845 - RNA, 19 nt, Homo sapiens
  misc_RNA (1)...(19): siRNA sense strand
aaagggacaucauauuuga

SEQ ID NO: 1729846 - RNA, 19 nt, Homo sapiens
  misc_RNA (1)...(19): siRNA sense strand
gaaaggaugaugaccaaga

SEQ ID NO: 1729847 - RNA, 19 nt, Homo sapiens
  misc_RNA (1)...(19): siRNA sense strand
gcuaugacuuugucuauca

SEQ ID NO: 1729848 - RNA, 19 nt, Homo sapiens
  misc_RNA (1)...(19): siRNA sense strand
caucgcaccuaauaaauau

SEQ ID NO: 1729849 - RNA, 19 nt, Homo sapiens
  misc_RNA (1)...(19): siRNA sense strand
ucaaagggacaucauauuu

SEQ ID NO: 1729850 - RNA, 19 nt, Homo sapiens
  misc_RNA (1)...(19): siRNA sense strand
ugacaaggcucguggaaag

SEQ ID NO: 1729851 - RNA, 19 nt, Homo sapiens
  misc_RNA (1)...(19): siRNA sense strand
ggcagcagcuuccgaaaga

SEQ ID NO: 1729852 - RNA, 19 nt, Homo sapiens
  misc_RNA (1)...(19): siRNA sense strand
ccagugagcugaccaagag

SEQ ID NO: 1729853 - RNA, 19 nt, Homo sapiens
  misc_RNA (1)...(19): siRNA sense strand
ugaggaggauugcauuuga

SEQ ID NO: 1729854 - RNA, 19 nt, Homo sapiens
  misc_RNA (1)...(19): siRNA sense strand
gaacagacucgcagugaca

SEQ ID NO: 1729855 - RNA, 19 nt, Homo sapiens
  misc_RNA (1)...(19): siRNA sense strand
aagcaucuccggucuauaa

SEQ ID NO: 1729856 - RNA, 19 nt, Homo sapiens
  misc_RNA (1)...(19): siRNA sense strand
gagcaaaucacucgagcuu

SEQ ID NO: 1729857 - RNA, 19 nt, Homo sapiens
  misc_RNA (1)...(19): siRNA sense strand
ugccaaacccagaguauua

SEQ ID NO: 1729858 - RNA, 19 nt, Homo sapiens
  misc_RNA (1)...(19): siRNA sense strand
ucaacaagguuaugcaagu

SEQ ID NO: 1729859 - RNA, 19 nt, Homo sapiens
  misc_RNA (1)...(19): siRNA sense strand
guacacaaaggacuacaaa

SEQ ID NO: 1729860 - RNA, 19 nt, Homo sapiens
  misc_RNA (1)...(19): siRNA sense strand
gacaucauauuugaacuga

SEQ ID NO: 1729861 - RNA, 19 nt, Homo sapiens
  misc_RNA (1)...(19): siRNA sense strand
gaggacaaacgacaggaua

SEQ ID NO: 1729862 - RNA, 19 nt, Homo sapiens
  misc_RNA (1)...(19): siRNA sense strand
gaacugaggaggauugcau

SEQ ID NO: 1729863 - RNA, 19 nt, Homo sapiens
  misc_RNA (1)...(19): siRNA sense strand
ucaaucaccuuuauuaagc

SEQ ID NO: 1729864 - RNA, 19 nt, Homo sapiens
  misc_RNA (1)...(19): siRNA sense strand
ggucuauaauccugaauca

SEQ ID NO: 1729865 - RNA, 19 nt, Homo sapiens
  misc_RNA (1)...(19): siRNA sense strand
gacaggauauggcaaaugc

SEQ ID NO: 1729866 - RNA, 19 nt, Homo sapiens
  misc_RNA (1)...(19): siRNA sense strand
cuacugaguucaucaacau

SEQ ID NO: 1729867 - RNA, 19 nt, Homo sapiens
  misc_RNA (1)...(19): siRNA sense strand
aagaaaggaugaugaccaa

SEQ ID NO: 1729868 - RNA, 19 nt, Homo sapiens
  misc_RNA (1)...(19): siRNA sense strand
cuucaaguccuaaccuuua

SEQ ID NO: 1729869 - RNA, 19 nt, Homo sapiens
  misc_RNA (1)...(19): siRNA sense strand
gcucaaagggacaucauau

SEQ ID NO: 1729870 - RNA, 19 nt, Homo sapiens
  misc_RNA (1)...(19): siRNA sense strand
uaaacuucaucgcaccuaa

SEQ ID NO: 1729871 - RNA, 19 nt, Homo sapiens
  misc_RNA (1)...(19): siRNA sense strand
ggaacuaccaaaugaagga

SEQ ID NO: 1729872 - RNA, 19 nt, Homo sapiens
  misc_RNA (1)...(19): siRNA sense strand
ccaaggagcccagcagcua

SEQ ID NO: 1729873 - RNA, 19 nt, Homo sapiens
  misc_RNA (1)...(19): siRNA sense strand
ggacaaacgacaggauaug

SEQ ID NO: 1729874 - RNA, 19 nt, Homo sapiens
  misc_RNA (1)...(19): siRNA sense strand
cagcagaggacuucaacaa

SEQ ID NO: 1729875 - RNA, 19 nt, Homo sapiens
  misc_RNA (1)...(19): siRNA sense strand
ucaucgcaccuaauaaaua

SEQ ID NO: 1729876 - RNA, 19 nt, Homo sapiens
  misc_RNA (1)...(19): siRNA sense strand
gaaucugcauccagcuguu

SEQ ID NO: 1729877 - RNA, 19 nt, Homo sapiens
  misc_RNA (1)...(19): siRNA sense strand
caaauugcguagccugagu

SEQ ID NO: 1729878 - RNA, 19 nt, Homo sapiens
  misc_RNA (1)...(19): siRNA sense strand
caacaagguuaugcaaguc

SEQ ID NO: 1729879 - RNA, 19 nt, Homo sapiens
  misc_RNA (1)...(19): siRNA sense strand
gacuuucgcuacugaguuc

SEQ ID NO: 1729880 - RNA, 19 nt, Homo sapiens
  misc_RNA (1)...(19): siRNA sense strand
ccuccaaacccaacucuuu

SEQ ID NO: 1729881 - RNA, 19 nt, Homo sapiens
  misc_RNA (1)...(19): siRNA sense strand
ccauugagcucaccaaaau

SEQ ID NO: 1729882 - RNA, 19 nt, Homo sapiens
  misc_RNA (1)...(19): siRNA sense strand
uggcauccauuaucaagga

SEQ ID NO: 1729883 - RNA, 19 nt, Homo sapiens
  misc_RNA (1)...(19): siRNA sense strand
agaagcaucuccggucuau

SEQ ID NO: 1729884 - RNA, 19 nt, Homo sapiens
  misc_RNA (1)...(19): siRNA sense strand
ucuauaauccugaaucaug

SEQ ID NO: 1729885 - RNA, 19 nt, Homo sapiens
  misc_RNA (1)...(19): siRNA sense strand
gcccagcagcuaugacuuu

SEQ ID NO: 1729886 - RNA, 19 nt, Homo sapiens
  misc_RNA (1)...(19): siRNA sense strand
aaaggaugaugaccaagau

SEQ ID NO: 1729887 - RNA, 19 nt, Homo sapiens
  misc_RNA (1)...(19): siRNA sense strand
guacaucaccgaacagacu

SEQ ID NO: 1729888 - RNA, 19 nt, Homo sapiens
  misc_RNA (1)...(19): siRNA sense strand
ggacaucauauuugaacug

SEQ ID NO: 1729889 - RNA, 19 nt, Homo sapiens
  misc_RNA (1)...(19): siRNA sense strand
gaaugggacaaucuuacaa

SEQ ID NO: 1729890 - RNA, 19 nt, Homo sapiens
  misc_RNA (1)...(19): siRNA sense strand
cagcagcuaugacuuuguc

SEQ ID NO: 1729891 - RNA, 19 nt, Homo sapiens
  misc_RNA (1)...(19): siRNA sense strand
uugaaucccugcaggagaa

SEQ ID NO: 1729892 - RNA, 19 nt, Homo sapiens
  misc_RNA (1)...(19): siRNA sense strand
gcaagucguccgagagcaa

SEQ ID NO: 1729893 - RNA, 19 nt, Homo sapiens
  misc_RNA (1)...(19): siRNA sense strand
caaaugaaggacgcaauga

SEQ ID NO: 1729894 - RNA, 19 nt, Homo sapiens
  misc_RNA (1)...(19): siRNA sense strand
ucagcuauauguccuucaa

SEQ ID NO: 1729895 - RNA, 19 nt, Homo sapiens
  misc_RNA (1)...(19): siRNA sense strand
cuauaauccugaaucaugu

SEQ ID NO: 1729896 - RNA, 19 nt, Homo sapiens
  misc_RNA (1)...(19): siRNA sense strand
ugggacagcucaucucaca

SEQ ID NO: 1729897 - RNA, 19 nt, Homo sapiens
  misc_RNA (1)...(19): siRNA sense strand
gcacugauuaaugcacuuu

SEQ ID NO: 1729898 - RNA, 19 nt, Homo sapiens
  misc_RNA (1)...(19): siRNA sense strand
cuucaucgcaccuaauaaa

SEQ ID NO: 1729899 - RNA, 19 nt, Homo sapiens
  misc_RNA (1)...(19): siRNA sense strand
cagaugguccucagcugua

SEQ ID NO: 1729900 - RNA, 19 nt, Homo sapiens
  misc_RNA (1)...(19): siRNA sense strand
ccaaacccagaguauuaua

SEQ ID NO: 1729901 - RNA, 19 nt, Homo sapiens
  misc_RNA (1)...(19): siRNA sense strand
cagacucgcagugacauua

SEQ ID NO: 1729902 - RNA, 19 nt, Homo sapiens
  misc_RNA (1)...(19): siRNA sense strand
ggauuuaccaaccacauca

SEQ ID NO: 1729903 - RNA, 19 nt, Homo sapiens
  misc_RNA (1)...(19): siRNA sense strand
accaggagauucagaccua

SEQ ID NO: 1729904 - RNA, 19 nt, Homo sapiens
  misc_RNA (1)...(19): siRNA sense strand
gcuacugaguucaucaaca

SEQ ID NO: 1729905 - RNA, 19 nt, Homo sapiens
  misc_RNA (1)...(19): siRNA sense strand
cgacgugacuuucgcuacu

SEQ ID NO: 1729906 - RNA, 19 nt, Homo sapiens
  misc_RNA (1)...(19): siRNA sense strand
ggacaccuacauccggauu

SEQ ID NO: 1729907 - RNA, 19 nt, Homo sapiens
  misc_RNA (1)...(19): siRNA sense strand
gaaaagugcucugaaacag

SEQ ID NO: 1729908 - RNA, 19 nt, Homo sapiens
  misc_RNA (1)...(19): siRNA sense strand
gaaagauuguccccacaug

SEQ ID NO: 1729909 - RNA, 19 nt, Homo sapiens
  misc_RNA (1)...(19): siRNA sense strand
cagaggacuucaacaaggu

SEQ ID NO: 1729910 - RNA, 19 nt, Homo sapiens
  misc_RNA (1)...(19): siRNA sense strand
caacagcagaggacuucaa

SEQ ID NO: 1729911 - RNA, 19 nt, Homo sapiens
  misc_RNA (1)...(19): siRNA sense strand
ugaccgagccuuugaagag

SEQ ID NO: 1729912 - RNA, 19 nt, Homo sapiens
  misc_RNA (1)...(19): siRNA sense strand
ccaaaugaaggacgcaaug

SEQ ID NO: 1729913 - RNA, 19 nt, Homo sapiens
  misc_RNA (1)...(19): siRNA sense strand
ccugggacaugguuucaau

SEQ ID NO: 1729914 - RNA, 19 nt, Homo sapiens
  misc_RNA (1)...(19): siRNA sense strand
ggaagacaaacaugaaugc

SEQ ID NO: 1729915 - RNA, 19 nt, Homo sapiens
  misc_RNA (1)...(19): siRNA sense strand
gggaagacaaacaugaaug

SEQ ID NO: 1729916 - RNA, 19 nt, Homo sapiens
  misc_RNA (1)...(19): siRNA sense strand
ggacaacaugcuguacuug

SEQ ID NO: 1729917 - RNA, 19 nt, Homo sapiens
  misc_RNA (1)...(19): siRNA sense strand
uauuauacccuccguuaug

SEQ ID NO: 1729918 - RNA, 19 nt, Homo sapiens
  misc_RNA (1)...(19): siRNA sense strand
ccaaugaccaggcucaaag

SEQ ID NO: 1729919 - RNA, 19 nt, Homo sapiens
  misc_RNA (1)...(19): siRNA sense strand
cacccugacugccuuccua

SEQ ID NO: 1729920 - RNA, 19 nt, Homo sapiens
  misc_RNA (1)...(19): siRNA sense strand
gcagcuaugacuuugucua

SEQ ID NO: 1729921 - RNA, 19 nt, Homo sapiens
  misc_RNA (1)...(19): siRNA sense strand
uggacaacaugcuguacuu

SEQ ID NO: 1729922 - RNA, 19 nt, Homo sapiens
  misc_RNA (1)...(19): siRNA sense strand
gacuuugucuaucacuaug

SEQ ID NO: 1729923 - RNA, 19 nt, Homo sapiens
  misc_RNA (1)...(19): siRNA sense strand
cagcuaugacuuugucuau

SEQ ID NO: 1729924 - RNA, 19 nt, Homo sapiens
  misc_RNA (1)...(19): siRNA sense strand
ccaccaccgucagacauug

SEQ ID NO: 1729925 - RNA, 19 nt, Homo sapiens
  misc_RNA (1)...(19): siRNA sense strand
gaggacuucaacaagguua

SEQ ID NO: 1729926 - RNA, 19 nt, Homo sapiens
  misc_RNA (1)...(19): siRNA sense strand
gcucuugucccacuacagu

SEQ ID NO: 1729927 - RNA, 19 nt, Homo sapiens
  misc_RNA (1)...(19): siRNA sense strand
cugaugagaccuuaaacuu

SEQ ID NO: 1729928 - RNA, 19 nt, Homo sapiens
  misc_RNA (1)...(19): siRNA sense strand
cagcagcuuccgaaagauu

SEQ ID NO: 1729929 - RNA, 19 nt, Homo sapiens
  misc_RNA (1)...(19): siRNA sense strand
gaucaguucaagagcaaau

SEQ ID NO: 1729930 - RNA, 19 nt, Homo sapiens
  misc_RNA (1)...(19): siRNA sense strand
aaacaugaaugccccuuug

SEQ ID NO: 1729931 - RNA, 19 nt, Homo sapiens
  misc_RNA (1)...(19): siRNA sense strand
cuacgccauugcacugauu

SEQ ID NO: 1729932 - RNA, 19 nt, Homo sapiens
  misc_RNA (1)...(19): siRNA sense strand
uggagagcauggucuugaa

SEQ ID NO: 1729933 - RNA, 19 nt, Homo sapiens
  misc_RNA (1)...(19): siRNA sense strand
uaagcagauugcaggguau

SEQ ID NO: 1729934 - RNA, 19 nt, Homo sapiens
  misc_RNA (1)...(19): siRNA sense strand
ugacuuugucuaucacuau

SEQ ID NO: 1729935 - RNA, 19 nt, Homo sapiens
  misc_RNA (1)...(19): siRNA sense strand
ugacccugaugagaccuua

SEQ ID NO: 1729936 - RNA, 19 nt, Homo sapiens
  misc_RNA (1)...(19): siRNA sense strand
ggagaaaauuccuguugca

SEQ ID NO: 1729937 - RNA, 19 nt, Homo sapiens
  misc_RNA (1)...(19): siRNA sense strand
ggacuucaacaagguuaug

SEQ ID NO: 1729938 - RNA, 19 nt, Homo sapiens
  misc_RNA (1)...(19): siRNA sense strand
ccaaaaugcucugugaaau

SEQ ID NO: 1729939 - RNA, 19 nt, Homo sapiens
  misc_RNA (1)...(19): siRNA sense strand
ugaugagaccuuaaacuuc

SEQ ID NO: 1729940 - RNA, 19 nt, Homo sapiens
  misc_RNA (1)...(19): siRNA sense strand
caaggagcccagcagcuau

SEQ ID NO: 1729941 - RNA, 19 nt, Homo sapiens
  misc_RNA (1)...(19): siRNA sense strand
gcaaagccauguacacaaa

SEQ ID NO: 1729942 - RNA, 19 nt, Homo sapiens
  misc_RNA (1)...(19): siRNA sense strand
gaugagaccuuaaacuuca

SEQ ID NO: 1729943 - RNA, 19 nt, Homo sapiens
  misc_RNA (1)...(19): siRNA sense strand
gaagauagccgaggaaauc

SEQ ID NO: 1729944 - RNA, 19 nt, Homo sapiens
  misc_RNA (1)...(19): siRNA sense strand
acaaggagguguuggaauu

SEQ ID NO: 1729945 - RNA, 19 nt, Homo sapiens
  misc_RNA (1)...(19): siRNA sense strand
aaagggacaucauauuuga

SEQ ID NO: 1729946 - RNA, 19 nt, Homo sapiens
  misc_RNA (1)...(19): siRNA sense strand
gaaaggaugaugaccaaga

SEQ ID NO: 1729947 - RNA, 19 nt, Homo sapiens
  misc_RNA (1)...(19): siRNA sense strand
gcuaugacuuugucuauca

SEQ ID NO: 1729948 - RNA, 19 nt, Homo sapiens
  misc_RNA (1)...(19): siRNA sense strand
caucgcaccuaauaaauau

SEQ ID NO: 1729949 - RNA, 19 nt, Homo sapiens
  misc_RNA (1)...(19): siRNA sense strand
ucaaagggacaucauauuu

SEQ ID NO: 1729950 - RNA, 19 nt, Homo sapiens
  misc_RNA (1)...(19): siRNA sense strand
ugacaaggcucguggaaag

SEQ ID NO: 1729951 - RNA, 19 nt, Homo sapiens
  misc_RNA (1)...(19): siRNA sense strand
ggcagcagcuuccgaaaga

SEQ ID NO: 1729952 - RNA, 19 nt, Homo sapiens
  misc_RNA (1)...(19): siRNA sense strand
ccagugagcugaccaagag

SEQ ID NO: 1729953 - RNA, 19 nt, Homo sapiens
  misc_RNA (1)...(19): siRNA sense strand
ugaggaggauugcauuuga

SEQ ID NO: 1729954 - RNA, 19 nt, Homo sapiens
  misc_RNA (1)...(19): siRNA sense strand
gaacagacucgcagugaca

SEQ ID NO: 1729955 - RNA, 19 nt, Homo sapiens
  misc_RNA (1)...(19): siRNA sense strand
aagcaucuccggucuauaa

SEQ ID NO: 1729956 - RNA, 19 nt, Homo sapiens
  misc_RNA (1)...(19): siRNA sense strand
gagcaaaucacucgagcuu

SEQ ID NO: 1729957 - RNA, 19 nt, Homo sapiens
  misc_RNA (1)...(19): siRNA sense strand
ugccaaacccagaguauua

SEQ ID NO: 1729958 - RNA, 19 nt, Homo sapiens
  misc_RNA (1)...(19): siRNA sense strand
ucaacaagguuaugcaagu

SEQ ID NO: 1729959 - RNA, 19 nt, Homo sapiens
  misc_RNA (1)...(19): siRNA sense strand
guacacaaaggacuacaaa

SEQ ID NO: 1729960 - RNA, 19 nt, Homo sapiens
  misc_RNA (1)...(19): siRNA sense strand
gacaucauauuugaacuga

SEQ ID NO: 1729961 - RNA, 19 nt, Homo sapiens
  misc_RNA (1)...(19): siRNA sense strand
gaggacaaacgacaggaua

SEQ ID NO: 1729962 - RNA, 19 nt, Homo sapiens
  misc_RNA (1)...(19): siRNA sense strand
gaacugaggaggauugcau

SEQ ID NO: 1729963 - RNA, 19 nt, Homo sapiens
  misc_RNA (1)...(19): siRNA sense strand
ucaaucaccuuuauuaagc

SEQ ID NO: 1729964 - RNA, 19 nt, Homo sapiens
  misc_RNA (1)...(19): siRNA sense strand
ggucuauaauccugaauca

SEQ ID NO: 1729965 - RNA, 19 nt, Homo sapiens
  misc_RNA (1)...(19): siRNA sense strand
gacaggauauggcaaaugc

SEQ ID NO: 1729966 - RNA, 19 nt, Homo sapiens
  misc_RNA (1)...(19): siRNA sense strand
cuacugaguucaucaacau

SEQ ID NO: 1729967 - RNA, 19 nt, Homo sapiens
  misc_RNA (1)...(19): siRNA sense strand
aagaaaggaugaugaccaa

SEQ ID NO: 1729968 - RNA, 19 nt, Homo sapiens
  misc_RNA (1)...(19): siRNA sense strand
cuucaaguccuaaccuuua

SEQ ID NO: 1729969 - RNA, 19 nt, Homo sapiens
  misc_RNA (1)...(19): siRNA sense strand
gcucaaagggacaucauau

SEQ ID NO: 1729970 - RNA, 19 nt, Homo sapiens
  misc_RNA (1)...(19): siRNA sense strand
uaaacuucaucgcaccuaa

SEQ ID NO: 1729971 - RNA, 19 nt, Homo sapiens
  misc_RNA (1)...(19): siRNA sense strand
ggaacuaccaaaugaagga

SEQ ID NO: 1729972 - RNA, 19 nt, Homo sapiens
  misc_RNA (1)...(19): siRNA sense strand
ccaaggagcccagcagcua

SEQ ID NO: 1729973 - RNA, 19 nt, Homo sapiens
  misc_RNA (1)...(19): siRNA sense strand
ggacaaacgacaggauaug

SEQ ID NO: 1729974 - RNA, 19 nt, Homo sapiens
  misc_RNA (1)...(19): siRNA sense strand
cagcagaggacuucaacaa

SEQ ID NO: 1729975 - RNA, 19 nt, Homo sapiens
  misc_RNA (1)...(19): siRNA sense strand
ucaucgcaccuaauaaaua

SEQ ID NO: 1729976 - RNA, 19 nt, Homo sapiens
  misc_RNA (1)...(19): siRNA sense strand
gaaucugcauccagcuguu

SEQ ID NO: 1729977 - RNA, 19 nt, Homo sapiens
  misc_RNA (1)...(19): siRNA sense strand
caaauugcguagccugagu

SEQ ID NO: 1729978 - RNA, 19 nt, Homo sapiens
  misc_RNA (1)...(19): siRNA sense strand
caacaagguuaugcaaguc

SEQ ID NO: 1729979 - RNA, 19 nt, Homo sapiens
  misc_RNA (1)...(19): siRNA sense strand
gacuuucgcuacugaguuc

SEQ ID NO: 1729980 - RNA, 19 nt, Homo sapiens
  misc_RNA (1)...(19): siRNA sense strand
ccuccaaacccaacucuuu

SEQ ID NO: 1729981 - RNA, 19 nt, Homo sapiens
  misc_RNA (1)...(19): siRNA sense strand
ccauugagcucaccaaaau

SEQ ID NO: 1729982 - RNA, 19 nt, Homo sapiens
  misc_RNA (1)...(19): siRNA sense strand
uggcauccauuaucaagga

SEQ ID NO: 1729983 - RNA, 19 nt, Homo sapiens
  misc_RNA (1)...(19): siRNA sense strand
agaagcaucuccggucuau

SEQ ID NO: 1729984 - RNA, 19 nt, Homo sapiens
  misc_RNA (1)...(19): siRNA sense strand
ucuauaauccugaaucaug

SEQ ID NO: 1729985 - RNA, 19 nt, Homo sapiens
  misc_RNA (1)...(19): siRNA sense strand
gcccagcagcuaugacuuu

SEQ ID NO: 1729986 - RNA, 19 nt, Homo sapiens
  misc_RNA (1)...(19): siRNA sense strand
aaaggaugaugaccaagau

SEQ ID NO: 1729987 - RNA, 19 nt, Homo sapiens
  misc_RNA (1)...(19): siRNA sense strand
guacaucaccgaacagacu

SEQ ID NO: 1729988 - RNA, 19 nt, Homo sapiens
  misc_RNA (1)...(19): siRNA sense strand
ggacaucauauuugaacug

SEQ ID NO: 1729989 - RNA, 19 nt, Homo sapiens
  misc_RNA (1)...(19): siRNA sense strand
gaaugggacaaucuuacaa

SEQ ID NO: 1729990 - RNA, 19 nt, Homo sapiens
  misc_RNA (1)...(19): siRNA sense strand
cagcagcuaugacuuuguc

SEQ ID NO: 1729991 - RNA, 19 nt, Homo sapiens
  misc_RNA (1)...(19): siRNA sense strand
uugaaucccugcaggagaa

SEQ ID NO: 1729992 - RNA, 19 nt, Homo sapiens
  misc_RNA (1)...(19): siRNA sense strand
gcaagucguccgagagcaa

SEQ ID NO: 1729993 - RNA, 19 nt, Homo sapiens
  misc_RNA (1)...(19): siRNA sense strand
caaaugaaggacgcaauga

SEQ ID NO: 1729994 - RNA, 19 nt, Homo sapiens
  misc_RNA (1)...(19): siRNA sense strand
ucagcuauauguccuucaa

SEQ ID NO: 1729995 - RNA, 19 nt, Homo sapiens
  misc_RNA (1)...(19): siRNA sense strand
cuauaauccugaaucaugu

SEQ ID NO: 1729996 - RNA, 19 nt, Homo sapiens
  misc_RNA (1)...(19): siRNA sense strand
ugggacagcucaucucaca

SEQ ID NO: 1729997 - RNA, 19 nt, Homo sapiens
  misc_RNA (1)...(19): siRNA sense strand
gcacugauuaaugcacuuu

SEQ ID NO: 1729998 - RNA, 19 nt, Homo sapiens
  misc_RNA (1)...(19): siRNA sense strand
cuucaucgcaccuaauaaa

SEQ ID NO: 1729999 - RNA, 19 nt, Homo sapiens
  misc_RNA (1)...(19): siRNA sense strand
cagaugguccucagcugua

SEQ ID NO: 1730000 - RNA, 19 nt, Homo sapiens
  misc_RNA (1)...(19): siRNA sense strand
ccaaacccagaguauuaua

SEQ ID NO: 1730001 - RNA, 19 nt, Homo sapiens
  misc_RNA (1)...(19): siRNA sense strand
cagacucgcagugacauua

SEQ ID NO: 1730002 - RNA, 19 nt, Homo sapiens
  misc_RNA (1)...(19): siRNA sense strand
ggauuuaccaaccacauca

SEQ ID NO: 1730003 - RNA, 19 nt, Homo sapiens
  misc_RNA (1)...(19): siRNA sense strand
accaggagauucagaccua

SEQ ID NO: 1730004 - RNA, 19 nt, Homo sapiens
  misc_RNA (1)...(19): siRNA sense strand
gcuacugaguucaucaaca

SEQ ID NO: 1730005 - RNA, 19 nt, Homo sapiens
  misc_RNA (1)...(19): siRNA sense strand
cgacgugacuuucgcuacu

SEQ ID NO: 1730006 - RNA, 19 nt, Homo sapiens
  misc_RNA (1)...(19): siRNA sense strand
ggacaccuacauccggauu

SEQ ID NO: 1730007 - RNA, 19 nt, Homo sapiens
  misc_RNA (1)...(19): siRNA sense strand
gaaaagugcucugaaacag

SEQ ID NO: 1730008 - RNA, 19 nt, Homo sapiens
  misc_RNA (1)...(19): siRNA sense strand
gaaagauuguccccacaug

SEQ ID NO: 1730009 - RNA, 19 nt, Homo sapiens
  misc_RNA (1)...(19): siRNA sense strand
cagaggacuucaacaaggu

SEQ ID NO: 1730010 - RNA, 19 nt, Homo sapiens
  misc_RNA (1)...(19): siRNA sense strand
caacagcagaggacuucaa

SEQ ID NO: 1730011 - RNA, 19 nt, Homo sapiens
  misc_RNA (1)...(19): siRNA sense strand
ugaccgagccuuugaagag

SEQ ID NO: 1730012 - RNA, 19 nt, Homo sapiens
  misc_RNA (1)...(19): siRNA sense strand
ccaaaugaaggacgcaaug

SEQ ID NO: 1730013 - RNA, 19 nt, Homo sapiens
  misc_RNA (1)...(19): siRNA sense strand
ccugggacaugguuucaau

SEQ ID NO: 1730014 - RNA, 19 nt, Homo sapiens
  misc_RNA (1)...(19): siRNA sense strand
ggaagacaaacaugaaugc

SEQ ID NO: 1730015 - RNA, 19 nt, Homo sapiens
  misc_RNA (1)...(19): siRNA sense strand
gggaagacaaacaugaaug

SEQ ID NO: 1730016 - RNA, 19 nt, Homo sapiens
  misc_RNA (1)...(19): siRNA sense strand
ggacaacaugcuguacuug

SEQ ID NO: 1730017 - RNA, 19 nt, Homo sapiens
  misc_RNA (1)...(19): siRNA sense strand
uauuauacccuccguuaug

SEQ ID NO: 1730018 - RNA, 19 nt, Homo sapiens
  misc_RNA (1)...(19): siRNA sense strand
ccaaugaccaggcucaaag

SEQ ID NO: 1730019 - RNA, 19 nt, Homo sapiens
  misc_RNA (1)...(19): siRNA sense strand
cacccugacugccuuccua

SEQ ID NO: 1730020 - RNA, 19 nt, Homo sapiens
  misc_RNA (1)...(19): siRNA sense strand
gcagcuaugacuuugucua

SEQ ID NO: 1730021 - RNA, 19 nt, Homo sapiens
  misc_RNA (1)...(19): siRNA sense strand
uggacaacaugcuguacuu

SEQ ID NO: 1730022 - RNA, 19 nt, Homo sapiens
  misc_RNA (1)...(19): siRNA sense strand
gacuuugucuaucacuaug

SEQ ID NO: 1730023 - RNA, 19 nt, Homo sapiens
  misc_RNA (1)...(19): siRNA sense strand
cagcuaugacuuugucuau

SEQ ID NO: 1730024 - RNA, 19 nt, Homo sapiens
  misc_RNA (1)...(19): siRNA sense strand
ccaccaccgucagacauug

SEQ ID NO: 1730025 - RNA, 19 nt, Homo sapiens
  misc_RNA (1)...(19): siRNA sense strand
gaggacuucaacaagguua

SEQ ID NO: 1730026 - RNA, 19 nt, Homo sapiens
  misc_RNA (1)...(19): siRNA sense strand
gcucuugucccacuacagu

SEQ ID NO: 1730027 - RNA, 19 nt, Homo sapiens
  misc_RNA (1)...(19): siRNA sense strand
cugaugagaccuuaaacuu

SEQ ID NO: 1730028 - RNA, 19 nt, Homo sapiens
  misc_RNA (1)...(19): siRNA sense strand
cagcagcuuccgaaagauu

SEQ ID NO: 1730029 - RNA, 19 nt, Homo sapiens
  misc_RNA (1)...(19): siRNA sense strand
gaucaguucaagagcaaau

SEQ ID NO: 1730030 - RNA, 19 nt, Homo sapiens
  misc_RNA (1)...(19): siRNA sense strand
aaacaugaaugccccuuug

SEQ ID NO: 1730031 - RNA, 19 nt, Homo sapiens
  misc_RNA (1)...(19): siRNA sense strand
cuacgccauugcacugauu

SEQ ID NO: 1730032 - RNA, 19 nt, Homo sapiens
  misc_RNA (1)...(19): siRNA sense strand
uggagagcauggucuugaa

SEQ ID NO: 1730033 - RNA, 19 nt, Homo sapiens
  misc_RNA (1)...(19): siRNA sense strand
uaagcagauugcaggguau

SEQ ID NO: 1730034 - RNA, 19 nt, Homo sapiens
  misc_RNA (1)...(19): siRNA sense strand
ugacuuugucuaucacuau

SEQ ID NO: 1730035 - RNA, 19 nt, Homo sapiens
  misc_RNA (1)...(19): siRNA sense strand
ugacccugaugagaccuua

SEQ ID NO: 1730036 - RNA, 19 nt, Homo sapiens
  misc_RNA (1)...(19): siRNA sense strand
ggagaaaauuccuguugca

SEQ ID NO: 1730037 - RNA, 19 nt, Homo sapiens
  misc_RNA (1)...(19): siRNA sense strand
ggacuucaacaagguuaug

SEQ ID NO: 1730038 - RNA, 19 nt, Homo sapiens
  misc_RNA (1)...(19): siRNA sense strand
ccaaaaugcucugugaaau

SEQ ID NO: 1730039 - RNA, 19 nt, Homo sapiens
  misc_RNA (1)...(19): siRNA sense strand
ugaugagaccuuaaacuuc

SEQ ID NO: 1730040 - RNA, 19 nt, Homo sapiens
  misc_RNA (1)...(19): siRNA sense strand
caaggagcccagcagcuau

SEQ ID NO: 1730041 - RNA, 19 nt, Homo sapiens
  misc_RNA (1)...(19): siRNA sense strand
gcaaagccauguacacaaa

SEQ ID NO: 1730042 - RNA, 19 nt, Homo sapiens
  misc_RNA (1)...(19): siRNA sense strand
gaugagaccuuaaacuuca

SEQ ID NO: 1730043 - RNA, 19 nt, Homo sapiens
  misc_RNA (1)...(19): siRNA sense strand
gaagauagccgaggaaauc

SEQ ID NO: 1730044 - RNA, 19 nt, Homo sapiens
  misc_RNA (1)...(19): siRNA sense strand
acaaggagguguuggaauu

SEQ ID NO: 1730045 - RNA, 19 nt, Homo sapiens
  misc_RNA (1)...(19): siRNA sense strand
aaagggacaucauauuuga

SEQ ID NO: 1730046 - RNA, 19 nt, Homo sapiens
  misc_RNA (1)...(19): siRNA sense strand
gaaaggaugaugaccaaga

SEQ ID NO: 1730047 - RNA, 19 nt, Homo sapiens
  misc_RNA (1)...(19): siRNA sense strand
gcuaugacuuugucuauca

SEQ ID NO: 1730048 - RNA, 19 nt, Homo sapiens
  misc_RNA (1)...(19): siRNA sense strand
caucgcaccuaauaaauau

SEQ ID NO: 1730049 - RNA, 19 nt, Homo sapiens
  misc_RNA (1)...(19): siRNA sense strand
ucaaagggacaucauauuu

SEQ ID NO: 1730050 - RNA, 19 nt, Homo sapiens
  misc_RNA (1)...(19): siRNA sense strand
ugacaaggcucguggaaag

SEQ ID NO: 1730051 - RNA, 19 nt, Homo sapiens
  misc_RNA (1)...(19): siRNA sense strand
ggcagcagcuuccgaaaga

SEQ ID NO: 1730052 - RNA, 19 nt, Homo sapiens
  misc_RNA (1)...(19): siRNA sense strand
ccagugagcugaccaagag

SEQ ID NO: 1730053 - RNA, 19 nt, Homo sapiens
  misc_RNA (1)...(19): siRNA sense strand
ugaggaggauugcauuuga

SEQ ID NO: 1730054 - RNA, 19 nt, Homo sapiens
  misc_RNA (1)...(19): siRNA sense strand
gaacagacucgcagugaca

SEQ ID NO: 1730055 - RNA, 19 nt, Homo sapiens
  misc_RNA (1)...(19): siRNA sense strand
aagcaucuccggucuauaa

SEQ ID NO: 1730056 - RNA, 19 nt, Homo sapiens
  misc_RNA (1)...(19): siRNA sense strand
gagcaaaucacucgagcuu

SEQ ID NO: 1730057 - RNA, 19 nt, Homo sapiens
  misc_RNA (1)...(19): siRNA sense strand
ugccaaacccagaguauua

SEQ ID NO: 1730058 - RNA, 19 nt, Homo sapiens
  misc_RNA (1)...(19): siRNA sense strand
ucaacaagguuaugcaagu

SEQ ID NO: 1730059 - RNA, 19 nt, Homo sapiens
  misc_RNA (1)...(19): siRNA sense strand
guacacaaaggacuacaaa

SEQ ID NO: 1730060 - RNA, 19 nt, Homo sapiens
  misc_RNA (1)...(19): siRNA sense strand
gacaucauauuugaacuga

SEQ ID NO: 1730061 - RNA, 19 nt, Homo sapiens
  misc_RNA (1)...(19): siRNA sense strand
gaggacaaacgacaggaua

SEQ ID NO: 1730062 - RNA, 19 nt, Homo sapiens
  misc_RNA (1)...(19): siRNA sense strand
gaacugaggaggauugcau

SEQ ID NO: 1730063 - RNA, 19 nt, Homo sapiens
  misc_RNA (1)...(19): siRNA sense strand
ucaaucaccuuuauuaagc

SEQ ID NO: 1730064 - RNA, 19 nt, Homo sapiens
  misc_RNA (1)...(19): siRNA sense strand
ggucuauaauccugaauca

SEQ ID NO: 1730065 - RNA, 19 nt, Homo sapiens
  misc_RNA (1)...(19): siRNA sense strand
gacaggauauggcaaaugc

SEQ ID NO: 1730066 - RNA, 19 nt, Homo sapiens
  misc_RNA (1)...(19): siRNA sense strand
cuacugaguucaucaacau

SEQ ID NO: 1730067 - RNA, 19 nt, Homo sapiens
  misc_RNA (1)...(19): siRNA sense strand
aagaaaggaugaugaccaa

SEQ ID NO: 1730068 - RNA, 19 nt, Homo sapiens
  misc_RNA (1)...(19): siRNA sense strand
cuucaaguccuaaccuuua

SEQ ID NO: 1730069 - RNA, 19 nt, Homo sapiens
  misc_RNA (1)...(19): siRNA sense strand
gcucaaagggacaucauau

SEQ ID NO: 1730070 - RNA, 19 nt, Homo sapiens
  misc_RNA (1)...(19): siRNA sense strand
uaaacuucaucgcaccuaa

SEQ ID NO: 1730071 - RNA, 19 nt, Homo sapiens
  misc_RNA (1)...(19): siRNA sense strand
ggaacuaccaaaugaagga

SEQ ID NO: 1730072 - RNA, 19 nt, Homo sapiens
  misc_RNA (1)...(19): siRNA sense strand
ccaaggagcccagcagcua

SEQ ID NO: 1730073 - RNA, 19 nt, Homo sapiens
  misc_RNA (1)...(19): siRNA sense strand
ggacaaacgacaggauaug

SEQ ID NO: 1730074 - RNA, 19 nt, Homo sapiens
  misc_RNA (1)...(19): siRNA sense strand
cagcagaggacuucaacaa

SEQ ID NO: 1730075 - RNA, 19 nt, Homo sapiens
  misc_RNA (1)...(19): siRNA sense strand
ucaucgcaccuaauaaaua

SEQ ID NO: 1730076 - RNA, 19 nt, Homo sapiens
  misc_RNA (1)...(19): siRNA sense strand
gaaucugcauccagcuguu

SEQ ID NO: 1730077 - RNA, 19 nt, Homo sapiens
  misc_RNA (1)...(19): siRNA sense strand
caaauugcguagccugagu

SEQ ID NO: 1730078 - RNA, 19 nt, Homo sapiens
  misc_RNA (1)...(19): siRNA sense strand
caacaagguuaugcaaguc

SEQ ID NO: 1730079 - RNA, 19 nt, Homo sapiens
  misc_RNA (1)...(19): siRNA sense strand
gacuuucgcuacugaguuc

SEQ ID NO: 1730080 - RNA, 19 nt, Homo sapiens
  misc_RNA (1)...(19): siRNA sense strand
ccuccaaacccaacucuuu

SEQ ID NO: 1730081 - RNA, 19 nt, Homo sapiens
  misc_RNA (1)...(19): siRNA sense strand
ccauugagcucaccaaaau

SEQ ID NO: 1730082 - RNA, 19 nt, Homo sapiens
  misc_RNA (1)...(19): siRNA sense strand
uggcauccauuaucaagga

SEQ ID NO: 1730083 - RNA, 19 nt, Homo sapiens
  misc_RNA (1)...(19): siRNA sense strand
agaagcaucuccggucuau

SEQ ID NO: 1730084 - RNA, 19 nt, Homo sapiens
  misc_RNA (1)...(19): siRNA sense strand
ucuauaauccugaaucaug

SEQ ID NO: 1730085 - RNA, 19 nt, Homo sapiens
  misc_RNA (1)...(19): siRNA sense strand
gcccagcagcuaugacuuu

SEQ ID NO: 1730086 - RNA, 19 nt, Homo sapiens
  misc_RNA (1)...(19): siRNA sense strand
aaaggaugaugaccaagau

SEQ ID NO: 1730087 - RNA, 19 nt, Homo sapiens
  misc_RNA (1)...(19): siRNA sense strand
guacaucaccgaacagacu

SEQ ID NO: 1730088 - RNA, 19 nt, Homo sapiens
  misc_RNA (1)...(19): siRNA sense strand
ggacaucauauuugaacug

SEQ ID NO: 1730089 - RNA, 19 nt, Homo sapiens
  misc_RNA (1)...(19): siRNA sense strand
gaaugggacaaucuuacaa

SEQ ID NO: 1730090 - RNA, 19 nt, Homo sapiens
  misc_RNA (1)...(19): siRNA sense strand
cagcagcuaugacuuuguc

SEQ ID NO: 1730091 - RNA, 19 nt, Homo sapiens
  misc_RNA (1)...(19): siRNA sense strand
uugaaucccugcaggagaa

SEQ ID NO: 1730092 - RNA, 19 nt, Homo sapiens
  misc_RNA (1)...(19): siRNA sense strand
gcaagucguccgagagcaa

SEQ ID NO: 1730093 - RNA, 19 nt, Homo sapiens
  misc_RNA (1)...(19): siRNA sense strand
caaaugaaggacgcaauga

SEQ ID NO: 1730094 - RNA, 19 nt, Homo sapiens
  misc_RNA (1)...(19): siRNA sense strand
ucagcuauauguccuucaa

SEQ ID NO: 1730095 - RNA, 19 nt, Homo sapiens
  misc_RNA (1)...(19): siRNA sense strand
cuauaauccugaaucaugu

SEQ ID NO: 1730096 - RNA, 19 nt, Homo sapiens
  misc_RNA (1)...(19): siRNA sense strand
ugggacagcucaucucaca

SEQ ID NO: 1730097 - RNA, 19 nt, Homo sapiens
  misc_RNA (1)...(19): siRNA sense strand
gcacugauuaaugcacuuu

SEQ ID NO: 1730098 - RNA, 19 nt, Homo sapiens
  misc_RNA (1)...(19): siRNA sense strand
cuucaucgcaccuaauaaa

SEQ ID NO: 1730099 - RNA, 19 nt, Homo sapiens
  misc_RNA (1)...(19): siRNA sense strand
cagaugguccucagcugua

SEQ ID NO: 1730100 - RNA, 19 nt, Homo sapiens
  misc_RNA (1)...(19): siRNA sense strand
ccaaacccagaguauuaua

SEQ ID NO: 1730101 - RNA, 19 nt, Homo sapiens
  misc_RNA (1)...(19): siRNA sense strand
cagacucgcagugacauua

SEQ ID NO: 1730102 - RNA, 19 nt, Homo sapiens
  misc_RNA (1)...(19): siRNA sense strand
ggauuuaccaaccacauca

SEQ ID NO: 1730103 - RNA, 19 nt, Homo sapiens
  misc_RNA (1)...(19): siRNA sense strand
accaggagauucagaccua

SEQ ID NO: 1730104 - RNA, 19 nt, Homo sapiens
  misc_RNA (1)...(19): siRNA sense strand
gcuacugaguucaucaaca

SEQ ID NO: 1730105 - RNA, 19 nt, Homo sapiens
  misc_RNA (1)...(19): siRNA sense strand
cgacgugacuuucgcuacu

SEQ ID NO: 1730106 - RNA, 19 nt, Homo sapiens
  misc_RNA (1)...(19): siRNA sense strand
ggacaccuacauccggauu

SEQ ID NO: 1730107 - RNA, 19 nt, Homo sapiens
  misc_RNA (1)...(19): siRNA sense strand
gaaaagugcucugaaacag

SEQ ID NO: 1730108 - RNA, 19 nt, Homo sapiens
  misc_RNA (1)...(19): siRNA sense strand
gaaagauuguccccacaug

SEQ ID NO: 1730109 - RNA, 19 nt, Homo sapiens
  misc_RNA (1)...(19): siRNA sense strand
cagaggacuucaacaaggu

SEQ ID NO: 1730110 - RNA, 19 nt, Homo sapiens
  misc_RNA (1)...(19): siRNA sense strand
caacagcagaggacuucaa

SEQ ID NO: 1730111 - RNA, 19 nt, Homo sapiens
  misc_RNA (1)...(19): siRNA sense strand
ugaccgagccuuugaagag

SEQ ID NO: 1730112 - RNA, 19 nt, Homo sapiens
  misc_RNA (1)...(19): siRNA sense strand
ccaaaugaaggacgcaaug

SEQ ID NO: 1730113 - RNA, 19 nt, Homo sapiens
  misc_RNA (1)...(19): siRNA sense strand
ccugggacaugguuucaau

SEQ ID NO: 1730114 - RNA, 19 nt, Homo sapiens
  misc_RNA (1)...(19): siRNA sense strand
ggaagacaaacaugaaugc

SEQ ID NO: 1730115 - RNA, 19 nt, Homo sapiens
  misc_RNA (1)...(19): siRNA sense strand
gggaagacaaacaugaaug

SEQ ID NO: 1730116 - RNA, 19 nt, Homo sapiens
  misc_RNA (1)...(19): siRNA sense strand
ggacaacaugcuguacuug

SEQ ID NO: 1730117 - RNA, 19 nt, Homo sapiens
  misc_RNA (1)...(19): siRNA sense strand
uauuauacccuccguuaug

SEQ ID NO: 1730118 - RNA, 19 nt, Homo sapiens
  misc_RNA (1)...(19): siRNA sense strand
ccaaugaccaggcucaaag

SEQ ID NO: 1730119 - RNA, 19 nt, Homo sapiens
  misc_RNA (1)...(19): siRNA sense strand
cacccugacugccuuccua

SEQ ID NO: 1730120 - RNA, 19 nt, Homo sapiens
  misc_RNA (1)...(19): siRNA sense strand
gcagcuaugacuuugucua

SEQ ID NO: 1730121 - RNA, 19 nt, Homo sapiens
  misc_RNA (1)...(19): siRNA sense strand
uggacaacaugcuguacuu

SEQ ID NO: 1730122 - RNA, 19 nt, Homo sapiens
  misc_RNA (1)...(19): siRNA sense strand
gacuuugucuaucacuaug

SEQ ID NO: 1730123 - RNA, 19 nt, Homo sapiens
  misc_RNA (1)...(19): siRNA sense strand
cagcuaugacuuugucuau

SEQ ID NO: 1730124 - RNA, 19 nt, Homo sapiens
  misc_RNA (1)...(19): siRNA sense strand
ccaccaccgucagacauug

SEQ ID NO: 1730125 - RNA, 19 nt, Homo sapiens
  misc_RNA (1)...(19): siRNA sense strand
gaggacuucaacaagguua

SEQ ID NO: 1730126 - RNA, 19 nt, Homo sapiens
  misc_RNA (1)...(19): siRNA sense strand
gcucuugucccacuacagu

SEQ ID NO: 1730127 - RNA, 19 nt, Homo sapiens
  misc_RNA (1)...(19): siRNA sense strand
cugaugagaccuuaaacuu

SEQ ID NO: 1730128 - RNA, 19 nt, Homo sapiens
  misc_RNA (1)...(19): siRNA sense strand
cagcagcuuccgaaagauu

SEQ ID NO: 1730129 - RNA, 19 nt, Homo sapiens
  misc_RNA (1)...(19): siRNA sense strand
gaucaguucaagagcaaau

SEQ ID NO: 1730130 - RNA, 19 nt, Homo sapiens
  misc_RNA (1)...(19): siRNA sense strand
aaacaugaaugccccuuug

SEQ ID NO: 1730131 - RNA, 19 nt, Homo sapiens
  misc_RNA (1)...(19): siRNA sense strand
cuacgccauugcacugauu

SEQ ID NO: 1730132 - RNA, 19 nt, Homo sapiens
  misc_RNA (1)...(19): siRNA sense strand
uggagagcauggucuugaa

SEQ ID NO: 1730133 - RNA, 19 nt, Homo sapiens
  misc_RNA (1)...(19): siRNA sense strand
uaagcagauugcaggguau

SEQ ID NO: 1730134 - RNA, 19 nt, Homo sapiens
  misc_RNA (1)...(19): siRNA sense strand
ugacuuugucuaucacuau

SEQ ID NO: 1730135 - RNA, 19 nt, Homo sapiens
  misc_RNA (1)...(19): siRNA sense strand
ugacccugaugagaccuua

SEQ ID NO: 1730136 - RNA, 19 nt, Homo sapiens
  misc_RNA (1)...(19): siRNA sense strand
ggagaaaauuccuguugca

SEQ ID NO: 1730137 - RNA, 19 nt, Homo sapiens
  misc_RNA (1)...(19): siRNA sense strand
ggacuucaacaagguuaug

SEQ ID NO: 1730138 - RNA, 19 nt, Homo sapiens
  misc_RNA (1)...(19): siRNA sense strand
ccaaaaugcucugugaaau

SEQ ID NO: 1730139 - RNA, 19 nt, Homo sapiens
  misc_RNA (1)...(19): siRNA sense strand
ugaugagaccuuaaacuuc

SEQ ID NO: 1730140 - RNA, 19 nt, Homo sapiens
  misc_RNA (1)...(19): siRNA sense strand
caaggagcccagcagcuau

SEQ ID NO: 1730141 - RNA, 19 nt, Homo sapiens
  misc_RNA (1)...(19): siRNA sense strand
gcaaagccauguacacaaa

SEQ ID NO: 1730142 - RNA, 19 nt, Homo sapiens
  misc_RNA (1)...(19): siRNA sense strand
gaugagaccuuaaacuuca

SEQ ID NO: 1730143 - RNA, 19 nt, Homo sapiens
  misc_RNA (1)...(19): siRNA sense strand
gaagauagccgaggaaauc

SEQ ID NO: 1730144 - RNA, 19 nt, Homo sapiens
  misc_RNA (1)...(19): siRNA sense strand
acaaggagguguuggaauu

SEQ ID NO: 1730145 - RNA, 19 nt, Homo sapiens
  misc_RNA (1)...(19): siRNA sense strand
aaagggacaucauauuuga

SEQ ID NO: 1730146 - RNA, 19 nt, Homo sapiens
  misc_RNA (1)...(19): siRNA sense strand
gaaaggaugaugaccaaga

SEQ ID NO: 1730147 - RNA, 19 nt, Homo sapiens
  misc_RNA (1)...(19): siRNA sense strand
gcuaugacuuugucuauca

SEQ ID NO: 1730148 - RNA, 19 nt, Homo sapiens
  misc_RNA (1)...(19): siRNA sense strand
caucgcaccuaauaaauau

SEQ ID NO: 1730149 - RNA, 19 nt, Homo sapiens
  misc_RNA (1)...(19): siRNA sense strand
ucaaagggacaucauauuu

SEQ ID NO: 1730150 - RNA, 19 nt, Homo sapiens
  misc_RNA (1)...(19): siRNA sense strand
ugacaaggcucguggaaag

SEQ ID NO: 1730151 - RNA, 19 nt, Homo sapiens
  misc_RNA (1)...(19): siRNA sense strand
ggcagcagcuuccgaaaga

SEQ ID NO: 1730152 - RNA, 19 nt, Homo sapiens
  misc_RNA (1)...(19): siRNA sense strand
ccagugagcugaccaagag

SEQ ID NO: 1730153 - RNA, 19 nt, Homo sapiens
  misc_RNA (1)...(19): siRNA sense strand
ugaggaggauugcauuuga

SEQ ID NO: 1730154 - RNA, 19 nt, Homo sapiens
  misc_RNA (1)...(19): siRNA sense strand
gaacagacucgcagugaca

SEQ ID NO: 1730155 - RNA, 19 nt, Homo sapiens
  misc_RNA (1)...(19): siRNA sense strand
aagcaucuccggucuauaa

SEQ ID NO: 1730156 - RNA, 19 nt, Homo sapiens
  misc_RNA (1)...(19): siRNA sense strand
gagcaaaucacucgagcuu

SEQ ID NO: 1730157 - RNA, 19 nt, Homo sapiens
  misc_RNA (1)...(19): siRNA sense strand
ugccaaacccagaguauua

SEQ ID NO: 1730158 - RNA, 19 nt, Homo sapiens
  misc_RNA (1)...(19): siRNA sense strand
ucaacaagguuaugcaagu

SEQ ID NO: 1730159 - RNA, 19 nt, Homo sapiens
  misc_RNA (1)...(19): siRNA sense strand
guacacaaaggacuacaaa

SEQ ID NO: 1730160 - RNA, 19 nt, Homo sapiens
  misc_RNA (1)...(19): siRNA sense strand
gacaucauauuugaacuga

SEQ ID NO: 1730161 - RNA, 19 nt, Homo sapiens
  misc_RNA (1)...(19): siRNA sense strand
gaggacaaacgacaggaua

SEQ ID NO: 1730162 - RNA, 19 nt, Homo sapiens
  misc_RNA (1)...(19): siRNA sense strand
gaacugaggaggauugcau

SEQ ID NO: 1730163 - RNA, 19 nt, Homo sapiens
  misc_RNA (1)...(19): siRNA sense strand
ucaaucaccuuuauuaagc

SEQ ID NO: 1730164 - RNA, 19 nt, Homo sapiens
  misc_RNA (1)...(19): siRNA sense strand
ggucuauaauccugaauca

SEQ ID NO: 1730165 - RNA, 19 nt, Homo sapiens
  misc_RNA (1)...(19): siRNA sense strand
gacaggauauggcaaaugc

SEQ ID NO: 1730166 - RNA, 19 nt, Homo sapiens
  misc_RNA (1)...(19): siRNA sense strand
cuacugaguucaucaacau

SEQ ID NO: 1730167 - RNA, 19 nt, Homo sapiens
  misc_RNA (1)...(19): siRNA sense strand
aagaaaggaugaugaccaa

SEQ ID NO: 1730168 - RNA, 19 nt, Homo sapiens
  misc_RNA (1)...(19): siRNA sense strand
cuucaaguccuaaccuuua

SEQ ID NO: 1730169 - RNA, 19 nt, Homo sapiens
  misc_RNA (1)...(19): siRNA sense strand
gcucaaagggacaucauau

SEQ ID NO: 1730170 - RNA, 19 nt, Homo sapiens
  misc_RNA (1)...(19): siRNA sense strand
uaaacuucaucgcaccuaa

SEQ ID NO: 1730171 - RNA, 19 nt, Homo sapiens
  misc_RNA (1)...(19): siRNA sense strand
ggaacuaccaaaugaagga

SEQ ID NO: 1730172 - RNA, 19 nt, Homo sapiens
  misc_RNA (1)...(19): siRNA sense strand
ccaaggagcccagcagcua

SEQ ID NO: 1730173 - RNA, 19 nt, Homo sapiens
  misc_RNA (1)...(19): siRNA sense strand
ggacaaacgacaggauaug

SEQ ID NO: 1730174 - RNA, 19 nt, Homo sapiens
  misc_RNA (1)...(19): siRNA sense strand
cagcagaggacuucaacaa

SEQ ID NO: 1730175 - RNA, 19 nt, Homo sapiens
  misc_RNA (1)...(19): siRNA sense strand
ucaucgcaccuaauaaaua

SEQ ID NO: 1730176 - RNA, 19 nt, Homo sapiens
  misc_RNA (1)...(19): siRNA sense strand
gaaucugcauccagcuguu

SEQ ID NO: 1730177 - RNA, 19 nt, Homo sapiens
  misc_RNA (1)...(19): siRNA sense strand
caaauugcguagccugagu

SEQ ID NO: 1730178 - RNA, 19 nt, Homo sapiens
  misc_RNA (1)...(19): siRNA sense strand
caacaagguuaugcaaguc

SEQ ID NO: 1730179 - RNA, 19 nt, Homo sapiens
  misc_RNA (1)...(19): siRNA sense strand
gacuuucgcuacugaguuc

SEQ ID NO: 1730180 - RNA, 19 nt, Homo sapiens
  misc_RNA (1)...(19): siRNA sense strand
ccuccaaacccaacucuuu

SEQ ID NO: 1730181 - RNA, 19 nt, Homo sapiens
  misc_RNA (1)...(19): siRNA sense strand
ccauugagcucaccaaaau

SEQ ID NO: 1730182 - RNA, 19 nt, Homo sapiens
  misc_RNA (1)...(19): siRNA sense strand
uggcauccauuaucaagga

SEQ ID NO: 1730183 - RNA, 19 nt, Homo sapiens
  misc_RNA (1)...(19): siRNA sense strand
agaagcaucuccggucuau

SEQ ID NO: 1730184 - RNA, 19 nt, Homo sapiens
  misc_RNA (1)...(19): siRNA sense strand
ucuauaauccugaaucaug

SEQ ID NO: 1730185 - RNA, 19 nt, Homo sapiens
  misc_RNA (1)...(19): siRNA sense strand
gcccagcagcuaugacuuu

SEQ ID NO: 1730186 - RNA, 19 nt, Homo sapiens
  misc_RNA (1)...(19): siRNA sense strand
aaaggaugaugaccaagau

SEQ ID NO: 1730187 - RNA, 19 nt, Homo sapiens
  misc_RNA (1)...(19): siRNA sense strand
guacaucaccgaacagacu

SEQ ID NO: 1730188 - RNA, 19 nt, Homo sapiens
  misc_RNA (1)...(19): siRNA sense strand
ggacaucauauuugaacug

SEQ ID NO: 1730189 - RNA, 19 nt, Homo sapiens
  misc_RNA (1)...(19): siRNA sense strand
gaaugggacaaucuuacaa

SEQ ID NO: 1730190 - RNA, 19 nt, Homo sapiens
  misc_RNA (1)...(19): siRNA sense strand
cagcagcuaugacuuuguc

SEQ ID NO: 1730191 - RNA, 19 nt, Homo sapiens
  misc_RNA (1)...(19): siRNA sense strand
uugaaucccugcaggagaa

SEQ ID NO: 1730192 - RNA, 19 nt, Homo sapiens
  misc_RNA (1)...(19): siRNA sense strand
gcaagucguccgagagcaa

SEQ ID NO: 1730193 - RNA, 19 nt, Homo sapiens
  misc_RNA (1)...(19): siRNA sense strand
caaaugaaggacgcaauga

SEQ ID NO: 1730194 - RNA, 19 nt, Homo sapiens
  misc_RNA (1)...(19): siRNA sense strand
ucagcuauauguccuucaa

SEQ ID NO: 1730195 - RNA, 19 nt, Homo sapiens
  misc_RNA (1)...(19): siRNA sense strand
cuauaauccugaaucaugu

SEQ ID NO: 1730196 - RNA, 19 nt, Homo sapiens
  misc_RNA (1)...(19): siRNA sense strand
ugggacagcucaucucaca

SEQ ID NO: 1730197 - RNA, 19 nt, Homo sapiens
  misc_RNA (1)...(19): siRNA sense strand
gcacugauuaaugcacuuu

SEQ ID NO: 1730198 - RNA, 19 nt, Homo sapiens
  misc_RNA (1)...(19): siRNA sense strand
cuucaucgcaccuaauaaa

SEQ ID NO: 1730199 - RNA, 19 nt, Homo sapiens
  misc_RNA (1)...(19): siRNA sense strand
cagaugguccucagcugua

SEQ ID NO: 1730200 - RNA, 19 nt, Homo sapiens
  misc_RNA (1)...(19): siRNA sense strand
ccaaacccagaguauuaua

SEQ ID NO: 1730201 - RNA, 19 nt, Homo sapiens
  misc_RNA (1)...(19): siRNA sense strand
cagacucgcagugacauua

SEQ ID NO: 1730202 - RNA, 19 nt, Homo sapiens
  misc_RNA (1)...(19): siRNA sense strand
ggauuuaccaaccacauca

SEQ ID NO: 1730203 - RNA, 19 nt, Homo sapiens
  misc_RNA (1)...(19): siRNA sense strand
accaggagauucagaccua

SEQ ID NO: 1730204 - RNA, 19 nt, Homo sapiens
  misc_RNA (1)...(19): siRNA sense strand
gcuacugaguucaucaaca

SEQ ID NO: 1730205 - RNA, 19 nt, Homo sapiens
  misc_RNA (1)...(19): siRNA sense strand
cgacgugacuuucgcuacu

SEQ ID NO: 1730206 - RNA, 19 nt, Homo sapiens
  misc_RNA (1)...(19): siRNA sense strand
ggacaccuacauccggauu

SEQ ID NO: 1730207 - RNA, 19 nt, Homo sapiens
  misc_RNA (1)...(19): siRNA sense strand
gaaaagugcucugaaacag

SEQ ID NO: 1730208 - RNA, 19 nt, Homo sapiens
  misc_RNA (1)...(19): siRNA sense strand
gaaagauuguccccacaug

SEQ ID NO: 1730209 - RNA, 19 nt, Homo sapiens
  misc_RNA (1)...(19): siRNA sense strand
cagaggacuucaacaaggu

SEQ ID NO: 1730210 - RNA, 19 nt, Homo sapiens
  misc_RNA (1)...(19): siRNA sense strand
caacagcagaggacuucaa

SEQ ID NO: 1730211 - RNA, 19 nt, Homo sapiens
  misc_RNA (1)...(19): siRNA sense strand
ugaccgagccuuugaagag

SEQ ID NO: 1730212 - RNA, 19 nt, Homo sapiens
  misc_RNA (1)...(19): siRNA sense strand
ccaaaugaaggacgcaaug

SEQ ID NO: 1730213 - RNA, 19 nt, Homo sapiens
  misc_RNA (1)...(19): siRNA sense strand
ccugggacaugguuucaau

SEQ ID NO: 1730214 - RNA, 19 nt, Homo sapiens
  misc_RNA (1)...(19): siRNA sense strand
ggaagacaaacaugaaugc

SEQ ID NO: 1730215 - RNA, 19 nt, Homo sapiens
  misc_RNA (1)...(19): siRNA sense strand
gggaagacaaacaugaaug

SEQ ID NO: 1730216 - RNA, 19 nt, Homo sapiens
  misc_RNA (1)...(19): siRNA sense strand
ggacaacaugcuguacuug

SEQ ID NO: 1730217 - RNA, 19 nt, Homo sapiens
  misc_RNA (1)...(19): siRNA sense strand
uauuauacccuccguuaug

SEQ ID NO: 1730218 - RNA, 19 nt, Homo sapiens
  misc_RNA (1)...(19): siRNA sense strand
ccaaugaccaggcucaaag

SEQ ID NO: 1730219 - RNA, 19 nt, Homo sapiens
  misc_RNA (1)...(19): siRNA sense strand
cacccugacugccuuccua

SEQ ID NO: 1730220 - RNA, 19 nt, Homo sapiens
  misc_RNA (1)...(19): siRNA sense strand
gcagcuaugacuuugucua

SEQ ID NO: 1730221 - RNA, 19 nt, Homo sapiens
  misc_RNA (1)...(19): siRNA sense strand
uggacaacaugcuguacuu

SEQ ID NO: 1730222 - RNA, 19 nt, Homo sapiens
  misc_RNA (1)...(19): siRNA sense strand
gacuuugucuaucacuaug

SEQ ID NO: 1730223 - RNA, 19 nt, Homo sapiens
  misc_RNA (1)...(19): siRNA sense strand
cagcuaugacuuugucuau

SEQ ID NO: 1730224 - RNA, 19 nt, Homo sapiens
  misc_RNA (1)...(19): siRNA sense strand
ccaccaccgucagacauug

SEQ ID NO: 1730225 - RNA, 19 nt, Homo sapiens
  misc_RNA (1)...(19): siRNA sense strand
gaggacuucaacaagguua

SEQ ID NO: 1730226 - RNA, 19 nt, Homo sapiens
  misc_RNA (1)...(19): siRNA sense strand
gcucuugucccacuacagu

SEQ ID NO: 1730227 - RNA, 19 nt, Homo sapiens
  misc_RNA (1)...(19): siRNA sense strand
cugaugagaccuuaaacuu

SEQ ID NO: 1730228 - RNA, 19 nt, Homo sapiens
  misc_RNA (1)...(19): siRNA sense strand
cagcagcuuccgaaagauu

SEQ ID NO: 1730229 - RNA, 19 nt, Homo sapiens
  misc_RNA (1)...(19): siRNA sense strand
gaucaguucaagagcaaau

SEQ ID NO: 1730230 - RNA, 19 nt, Homo sapiens
  misc_RNA (1)...(19): siRNA sense strand
aaacaugaaugccccuuug

SEQ ID NO: 1730231 - RNA, 19 nt, Homo sapiens
  misc_RNA (1)...(19): siRNA sense strand
cuacgccauugcacugauu

SEQ ID NO: 1730232 - RNA, 19 nt, Homo sapiens
  misc_RNA (1)...(19): siRNA sense strand
uggagagcauggucuugaa

SEQ ID NO: 1730233 - RNA, 19 nt, Homo sapiens
  misc_RNA (1)...(19): siRNA sense strand
uaagcagauugcaggguau

SEQ ID NO: 1730234 - RNA, 19 nt, Homo sapiens
  misc_RNA (1)...(19): siRNA sense strand
ugacuuugucuaucacuau

SEQ ID NO: 1730235 - RNA, 19 nt, Homo sapiens
  misc_RNA (1)...(19): siRNA sense strand
ugacccugaugagaccuua

SEQ ID NO: 1730236 - RNA, 19 nt, Homo sapiens
  misc_RNA (1)...(19): siRNA sense strand
ggagaaaauuccuguugca

SEQ ID NO: 1730237 - RNA, 19 nt, Homo sapiens
  misc_RNA (1)...(19): siRNA sense strand
ggacuucaacaagguuaug

SEQ ID NO: 1730238 - RNA, 19 nt, Homo sapiens
  misc_RNA (1)...(19): siRNA sense strand
ccaaaaugcucugugaaau

SEQ ID NO: 1730239 - RNA, 19 nt, Homo sapiens
  misc_RNA (1)...(19): siRNA sense strand
ugaugagaccuuaaacuuc

SEQ ID NO: 1730240 - RNA, 19 nt, Homo sapiens
  misc_RNA (1)...(19): siRNA sense strand
caaggagcccagcagcuau

SEQ ID NO: 1730241 - RNA, 19 nt, Homo sapiens
  misc_RNA (1)...(19): siRNA sense strand
ggaaugugcugcuggcuuu

SEQ ID NO: 1730242 - RNA, 19 nt, Homo sapiens
  misc_RNA (1)...(19): siRNA sense strand
ggcagucgcuggagauuau

SEQ ID NO: 1730243 - RNA, 19 nt, Homo sapiens
  misc_RNA (1)...(19): siRNA sense strand
gaagguggcaucaggaaug

SEQ ID NO: 1730244 - RNA, 19 nt, Homo sapiens
  misc_RNA (1)...(19): siRNA sense strand
gguuuggcauaucuaauaa

SEQ ID NO: 1730245 - RNA, 19 nt, Homo sapiens
  misc_RNA (1)...(19): siRNA sense strand
gagcugguuuggcauaucu

SEQ ID NO: 1730246 - RNA, 19 nt, Homo sapiens
  misc_RNA (1)...(19): siRNA sense strand
gauuaucucucgguaccuu

SEQ ID NO: 1730247 - RNA, 19 nt, Homo sapiens
  misc_RNA (1)...(19): siRNA sense strand
uaaucggacucaaccucua

SEQ ID NO: 1730248 - RNA, 19 nt, Homo sapiens
  misc_RNA (1)...(19): siRNA sense strand
ccauguagaggaccuagaa

SEQ ID NO: 1730249 - RNA, 19 nt, Homo sapiens
  misc_RNA (1)...(19): siRNA sense strand
ugguuuggcauaucuaaua

SEQ ID NO: 1730250 - RNA, 19 nt, Homo sapiens
  misc_RNA (1)...(19): siRNA sense strand
ggagcugguuuggcauauc

SEQ ID NO: 1730251 - RNA, 19 nt, Homo sapiens
  misc_RNA (1)...(19): siRNA sense strand
ccaaggacacaaagccaau

SEQ ID NO: 1730252 - RNA, 19 nt, Homo sapiens
  misc_RNA (1)...(19): siRNA sense strand
ggauggguuuguggaguuc

SEQ ID NO: 1730253 - RNA, 19 nt, Homo sapiens
  misc_RNA (1)...(19): siRNA sense strand
ccacgagacggccuuccaa

SEQ ID NO: 1730254 - RNA, 19 nt, Homo sapiens
  misc_RNA (1)...(19): siRNA sense strand
ggaguucuuccauguagag

SEQ ID NO: 1730255 - RNA, 19 nt, Homo sapiens
  misc_RNA (1)...(19): siRNA sense strand
uaggagcugguuuggcaua

SEQ ID NO: 1730256 - RNA, 19 nt, Homo sapiens
  misc_RNA (1)...(19): siRNA sense strand
gcugguuuggcauaucuaa

SEQ ID NO: 1730257 - RNA, 19 nt, Homo sapiens
  misc_RNA (1)...(19): siRNA sense strand
uagaagguggcaucaggaa

SEQ ID NO: 1730258 - RNA, 19 nt, Homo sapiens
  misc_RNA (1)...(19): siRNA sense strand
caaaagaaacgcgguaauc

SEQ ID NO: 1730259 - RNA, 19 nt, Homo sapiens
  misc_RNA (1)...(19): siRNA sense strand
ggaaugugcugcuggcuuu

SEQ ID NO: 1730260 - RNA, 19 nt, Homo sapiens
  misc_RNA (1)...(19): siRNA sense strand
ggcagucgcuggagauuau

SEQ ID NO: 1730261 - RNA, 19 nt, Homo sapiens
  misc_RNA (1)...(19): siRNA sense strand
gaagguggcaucaggaaug

SEQ ID NO: 1730262 - RNA, 19 nt, Homo sapiens
  misc_RNA (1)...(19): siRNA sense strand
gguuuggcauaucuaauaa

SEQ ID NO: 1730263 - RNA, 19 nt, Homo sapiens
  misc_RNA (1)...(19): siRNA sense strand
gagcugguuuggcauaucu

SEQ ID NO: 1730264 - RNA, 19 nt, Homo sapiens
  misc_RNA (1)...(19): siRNA sense strand
gauuaucucucgguaccuu

SEQ ID NO: 1730265 - RNA, 19 nt, Homo sapiens
  misc_RNA (1)...(19): siRNA sense strand
uaaucggacucaaccucua

SEQ ID NO: 1730266 - RNA, 19 nt, Homo sapiens
  misc_RNA (1)...(19): siRNA sense strand
ccauguagaggaccuagaa

SEQ ID NO: 1730267 - RNA, 19 nt, Homo sapiens
  misc_RNA (1)...(19): siRNA sense strand
ugguuuggcauaucuaaua

SEQ ID NO: 1730268 - RNA, 19 nt, Homo sapiens
  misc_RNA (1)...(19): siRNA sense strand
ggagcugguuuggcauauc

SEQ ID NO: 1730269 - RNA, 19 nt, Homo sapiens
  misc_RNA (1)...(19): siRNA sense strand
ccaaggacacaaagccaau

SEQ ID NO: 1730270 - RNA, 19 nt, Homo sapiens
  misc_RNA (1)...(19): siRNA sense strand
ggauggguuuguggaguuc

SEQ ID NO: 1730271 - RNA, 19 nt, Homo sapiens
  misc_RNA (1)...(19): siRNA sense strand
ccacgagacggccuuccaa

SEQ ID NO: 1730272 - RNA, 19 nt, Homo sapiens
  misc_RNA (1)...(19): siRNA sense strand
ggaguucuuccauguagag

SEQ ID NO: 1730273 - RNA, 19 nt, Homo sapiens
  misc_RNA (1)...(19): siRNA sense strand
uaggagcugguuuggcaua

SEQ ID NO: 1730274 - RNA, 19 nt, Homo sapiens
  misc_RNA (1)...(19): siRNA sense strand
gcugguuuggcauaucuaa

SEQ ID NO: 1730275 - RNA, 19 nt, Homo sapiens
  misc_RNA (1)...(19): siRNA sense strand
uagaagguggcaucaggaa

SEQ ID NO: 1730276 - RNA, 19 nt, Homo sapiens
  misc_RNA (1)...(19): siRNA sense strand
caaaagaaacgcgguaauc

SEQ ID NO: 1730277 - RNA, 19 nt, Homo sapiens
  misc_RNA (1)...(19): siRNA sense strand
gcaaagccauguacacaaa

SEQ ID NO: 1730278 - RNA, 19 nt, Homo sapiens
  misc_RNA (1)...(19): siRNA sense strand
gaugagaccuuaaacuuca

SEQ ID NO: 1730279 - RNA, 19 nt, Homo sapiens
  misc_RNA (1)...(19): siRNA sense strand
gaagauagccgaggaaauc

SEQ ID NO: 1730280 - RNA, 19 nt, Homo sapiens
  misc_RNA (1)...(19): siRNA sense strand
acaaggagguguuggaauu

SEQ ID NO: 1730281 - RNA, 19 nt, Homo sapiens
  misc_RNA (1)...(19): siRNA sense strand
aaagggacaucauauuuga

SEQ ID NO: 1730282 - RNA, 19 nt, Homo sapiens
  misc_RNA (1)...(19): siRNA sense strand
gaaaggaugaugaccaaga

SEQ ID NO: 1730283 - RNA, 19 nt, Homo sapiens
  misc_RNA (1)...(19): siRNA sense strand
gcuaugacuuugucuauca

SEQ ID NO: 1730284 - RNA, 19 nt, Homo sapiens
  misc_RNA (1)...(19): siRNA sense strand
caucgcaccuaauaaauau

SEQ ID NO: 1730285 - RNA, 19 nt, Homo sapiens
  misc_RNA (1)...(19): siRNA sense strand
ucaaagggacaucauauuu

SEQ ID NO: 1730286 - RNA, 19 nt, Homo sapiens
  misc_RNA (1)...(19): siRNA sense strand
ugacaaggcucguggaaag

SEQ ID NO: 1730287 - RNA, 19 nt, Homo sapiens
  misc_RNA (1)...(19): siRNA sense strand
ggcagcagcuuccgaaaga

SEQ ID NO: 1730288 - RNA, 19 nt, Homo sapiens
  misc_RNA (1)...(19): siRNA sense strand
ccagugagcugaccaagag

SEQ ID NO: 1730289 - RNA, 19 nt, Homo sapiens
  misc_RNA (1)...(19): siRNA sense strand
ugaggaggauugcauuuga

SEQ ID NO: 1730290 - RNA, 19 nt, Homo sapiens
  misc_RNA (1)...(19): siRNA sense strand
gaacagacucgcagugaca

SEQ ID NO: 1730291 - RNA, 19 nt, Homo sapiens
  misc_RNA (1)...(19): siRNA sense strand
aagcaucuccggucuauaa

SEQ ID NO: 1730292 - RNA, 19 nt, Homo sapiens
  misc_RNA (1)...(19): siRNA sense strand
gagcaaaucacucgagcuu

SEQ ID NO: 1730293 - RNA, 19 nt, Homo sapiens
  misc_RNA (1)...(19): siRNA sense strand
ugccaaacccagaguauua

SEQ ID NO: 1730294 - RNA, 19 nt, Homo sapiens
  misc_RNA (1)...(19): siRNA sense strand
ucaacaagguuaugcaagu

SEQ ID NO: 1730295 - RNA, 19 nt, Homo sapiens
  misc_RNA (1)...(19): siRNA sense strand
guacacaaaggacuacaaa

SEQ ID NO: 1730296 - RNA, 19 nt, Homo sapiens
  misc_RNA (1)...(19): siRNA sense strand
gacaucauauuugaacuga

SEQ ID NO: 1730297 - RNA, 19 nt, Homo sapiens
  misc_RNA (1)...(19): siRNA sense strand
gaggacaaacgacaggaua

SEQ ID NO: 1730298 - RNA, 19 nt, Homo sapiens
  misc_RNA (1)...(19): siRNA sense strand
gaacugaggaggauugcau

SEQ ID NO: 1730299 - RNA, 19 nt, Homo sapiens
  misc_RNA (1)...(19): siRNA sense strand
ucaaucaccuuuauuaagc

SEQ ID NO: 1730300 - RNA, 19 nt, Homo sapiens
  misc_RNA (1)...(19): siRNA sense strand
ggucuauaauccugaauca

SEQ ID NO: 1730301 - RNA, 19 nt, Homo sapiens
  misc_RNA (1)...(19): siRNA sense strand
gacaggauauggcaaaugc

SEQ ID NO: 1730302 - RNA, 19 nt, Homo sapiens
  misc_RNA (1)...(19): siRNA sense strand
cuacugaguucaucaacau

SEQ ID NO: 1730303 - RNA, 19 nt, Homo sapiens
  misc_RNA (1)...(19): siRNA sense strand
aagaaaggaugaugaccaa

SEQ ID NO: 1730304 - RNA, 19 nt, Homo sapiens
  misc_RNA (1)...(19): siRNA sense strand
cuucaaguccuaaccuuua

SEQ ID NO: 1730305 - RNA, 19 nt, Homo sapiens
  misc_RNA (1)...(19): siRNA sense strand
gcucaaagggacaucauau

SEQ ID NO: 1730306 - RNA, 19 nt, Homo sapiens
  misc_RNA (1)...(19): siRNA sense strand
uaaacuucaucgcaccuaa

SEQ ID NO: 1730307 - RNA, 19 nt, Homo sapiens
  misc_RNA (1)...(19): siRNA sense strand
ggaacuaccaaaugaagga

SEQ ID NO: 1730308 - RNA, 19 nt, Homo sapiens
  misc_RNA (1)...(19): siRNA sense strand
ccaaggagcccagcagcua

SEQ ID NO: 1730309 - RNA, 19 nt, Homo sapiens
  misc_RNA (1)...(19): siRNA sense strand
ggacaaacgacaggauaug

SEQ ID NO: 1730310 - RNA, 19 nt, Homo sapiens
  misc_RNA (1)...(19): siRNA sense strand
cagcagaggacuucaacaa

SEQ ID NO: 1730311 - RNA, 19 nt, Homo sapiens
  misc_RNA (1)...(19): siRNA sense strand
ucaucgcaccuaauaaaua

SEQ ID NO: 1730312 - RNA, 19 nt, Homo sapiens
  misc_RNA (1)...(19): siRNA sense strand
gaaucugcauccagcuguu

SEQ ID NO: 1730313 - RNA, 19 nt, Homo sapiens
  misc_RNA (1)...(19): siRNA sense strand
caaauugcguagccugagu

SEQ ID NO: 1730314 - RNA, 19 nt, Homo sapiens
  misc_RNA (1)...(19): siRNA sense strand
caacaagguuaugcaaguc

SEQ ID NO: 1730315 - RNA, 19 nt, Homo sapiens
  misc_RNA (1)...(19): siRNA sense strand
gacuuucgcuacugaguuc

SEQ ID NO: 1730316 - RNA, 19 nt, Homo sapiens
  misc_RNA (1)...(19): siRNA sense strand
ccuccaaacccaacucuuu

SEQ ID NO: 1730317 - RNA, 19 nt, Homo sapiens
  misc_RNA (1)...(19): siRNA sense strand
ccauugagcucaccaaaau

SEQ ID NO: 1730318 - RNA, 19 nt, Homo sapiens
  misc_RNA (1)...(19): siRNA sense strand
uggcauccauuaucaagga

SEQ ID NO: 1730319 - RNA, 19 nt, Homo sapiens
  misc_RNA (1)...(19): siRNA sense strand
agaagcaucuccggucuau

SEQ ID NO: 1730320 - RNA, 19 nt, Homo sapiens
  misc_RNA (1)...(19): siRNA sense strand
ucuauaauccugaaucaug

SEQ ID NO: 1730321 - RNA, 19 nt, Homo sapiens
  misc_RNA (1)...(19): siRNA sense strand
gcccagcagcuaugacuuu

SEQ ID NO: 1730322 - RNA, 19 nt, Homo sapiens
  misc_RNA (1)...(19): siRNA sense strand
aaaggaugaugaccaagau

SEQ ID NO: 1730323 - RNA, 19 nt, Homo sapiens
  misc_RNA (1)...(19): siRNA sense strand
guacaucaccgaacagacu

SEQ ID NO: 1730324 - RNA, 19 nt, Homo sapiens
  misc_RNA (1)...(19): siRNA sense strand
ggacaucauauuugaacug

SEQ ID NO: 1730325 - RNA, 19 nt, Homo sapiens
  misc_RNA (1)...(19): siRNA sense strand
gaaugggacaaucuuacaa

SEQ ID NO: 1730326 - RNA, 19 nt, Homo sapiens
  misc_RNA (1)...(19): siRNA sense strand
cagcagcuaugacuuuguc

SEQ ID NO: 1730327 - RNA, 19 nt, Homo sapiens
  misc_RNA (1)...(19): siRNA sense strand
uugaaucccugcaggagaa

SEQ ID NO: 1730328 - RNA, 19 nt, Homo sapiens
  misc_RNA (1)...(19): siRNA sense strand
gcaagucguccgagagcaa

SEQ ID NO: 1730329 - RNA, 19 nt, Homo sapiens
  misc_RNA (1)...(19): siRNA sense strand
caaaugaaggacgcaauga

SEQ ID NO: 1730330 - RNA, 19 nt, Homo sapiens
  misc_RNA (1)...(19): siRNA sense strand
ucagcuauauguccuucaa

SEQ ID NO: 1730331 - RNA, 19 nt, Homo sapiens
  misc_RNA (1)...(19): siRNA sense strand
cuauaauccugaaucaugu

SEQ ID NO: 1730332 - RNA, 19 nt, Homo sapiens
  misc_RNA (1)...(19): siRNA sense strand
ugggacagcucaucucaca

SEQ ID NO: 1730333 - RNA, 19 nt, Homo sapiens
  misc_RNA (1)...(19): siRNA sense strand
gcacugauuaaugcacuuu

SEQ ID NO: 1730334 - RNA, 19 nt, Homo sapiens
  misc_RNA (1)...(19): siRNA sense strand
cuucaucgcaccuaauaaa

SEQ ID NO: 1730335 - RNA, 19 nt, Homo sapiens
  misc_RNA (1)...(19): siRNA sense strand
cagaugguccucagcugua

SEQ ID NO: 1730336 - RNA, 19 nt, Homo sapiens
  misc_RNA (1)...(19): siRNA sense strand
ccaaacccagaguauuaua

SEQ ID NO: 1730337 - RNA, 19 nt, Homo sapiens
  misc_RNA (1)...(19): siRNA sense strand
cagacucgcagugacauua

SEQ ID NO: 1730338 - RNA, 19 nt, Homo sapiens
  misc_RNA (1)...(19): siRNA sense strand
ggauuuaccaaccacauca

SEQ ID NO: 1730339 - RNA, 19 nt, Homo sapiens
  misc_RNA (1)...(19): siRNA sense strand
accaggagauucagaccua

SEQ ID NO: 1730340 - RNA, 19 nt, Homo sapiens
  misc_RNA (1)...(19): siRNA sense strand
gcuacugaguucaucaaca

SEQ ID NO: 1730341 - RNA, 19 nt, Homo sapiens
  misc_RNA (1)...(19): siRNA sense strand
cgacgugacuuucgcuacu

SEQ ID NO: 1730342 - RNA, 19 nt, Homo sapiens
  misc_RNA (1)...(19): siRNA sense strand
ggacaccuacauccggauu

SEQ ID NO: 1730343 - RNA, 19 nt, Homo sapiens
  misc_RNA (1)...(19): siRNA sense strand
gaaaagugcucugaaacag

SEQ ID NO: 1730344 - RNA, 19 nt, Homo sapiens
  misc_RNA (1)...(19): siRNA sense strand
gaaagauuguccccacaug

SEQ ID NO: 1730345 - RNA, 19 nt, Homo sapiens
  misc_RNA (1)...(19): siRNA sense strand
cagaggacuucaacaaggu

SEQ ID NO: 1730346 - RNA, 19 nt, Homo sapiens
  misc_RNA (1)...(19): siRNA sense strand
caacagcagaggacuucaa

SEQ ID NO: 1730347 - RNA, 19 nt, Homo sapiens
  misc_RNA (1)...(19): siRNA sense strand
ugaccgagccuuugaagag

SEQ ID NO: 1730348 - RNA, 19 nt, Homo sapiens
  misc_RNA (1)...(19): siRNA sense strand
ccaaaugaaggacgcaaug

SEQ ID NO: 1730349 - RNA, 19 nt, Homo sapiens
  misc_RNA (1)...(19): siRNA sense strand
ccugggacaugguuucaau

SEQ ID NO: 1730350 - RNA, 19 nt, Homo sapiens
  misc_RNA (1)...(19): siRNA sense strand
ggaagacaaacaugaaugc

SEQ ID NO: 1730351 - RNA, 19 nt, Homo sapiens
  misc_RNA (1)...(19): siRNA sense strand
gggaagacaaacaugaaug

SEQ ID NO: 1730352 - RNA, 19 nt, Homo sapiens
  misc_RNA (1)...(19): siRNA sense strand
ggacaacaugcuguacuug

SEQ ID NO: 1730353 - RNA, 19 nt, Homo sapiens
  misc_RNA (1)...(19): siRNA sense strand
uauuauacccuccguuaug

SEQ ID NO: 1730354 - RNA, 19 nt, Homo sapiens
  misc_RNA (1)...(19): siRNA sense strand
ccaaugaccaggcucaaag

SEQ ID NO: 1730355 - RNA, 19 nt, Homo sapiens
  misc_RNA (1)...(19): siRNA sense strand
cacccugacugccuuccua

SEQ ID NO: 1730356 - RNA, 19 nt, Homo sapiens
  misc_RNA (1)...(19): siRNA sense strand
gcagcuaugacuuugucua

SEQ ID NO: 1730357 - RNA, 19 nt, Homo sapiens
  misc_RNA (1)...(19): siRNA sense strand
uggacaacaugcuguacuu

SEQ ID NO: 1730358 - RNA, 19 nt, Homo sapiens
  misc_RNA (1)...(19): siRNA sense strand
gacuuugucuaucacuaug

SEQ ID NO: 1730359 - RNA, 19 nt, Homo sapiens
  misc_RNA (1)...(19): siRNA sense strand
cagcuaugacuuugucuau

SEQ ID NO: 1730360 - RNA, 19 nt, Homo sapiens
  misc_RNA (1)...(19): siRNA sense strand
ccaccaccgucagacauug

SEQ ID NO: 1730361 - RNA, 19 nt, Homo sapiens
  misc_RNA (1)...(19): siRNA sense strand
gaggacuucaacaagguua

SEQ ID NO: 1730362 - RNA, 19 nt, Homo sapiens
  misc_RNA (1)...(19): siRNA sense strand
gcucuugucccacuacagu

SEQ ID NO: 1730363 - RNA, 19 nt, Homo sapiens
  misc_RNA (1)...(19): siRNA sense strand
cugaugagaccuuaaacuu

SEQ ID NO: 1730364 - RNA, 19 nt, Homo sapiens
  misc_RNA (1)...(19): siRNA sense strand
cagcagcuuccgaaagauu

SEQ ID NO: 1730365 - RNA, 19 nt, Homo sapiens
  misc_RNA (1)...(19): siRNA sense strand
gaucaguucaagagcaaau

SEQ ID NO: 1730366 - RNA, 19 nt, Homo sapiens
  misc_RNA (1)...(19): siRNA sense strand
aaacaugaaugccccuuug

SEQ ID NO: 1730367 - RNA, 19 nt, Homo sapiens
  misc_RNA (1)...(19): siRNA sense strand
cuacgccauugcacugauu

SEQ ID NO: 1730368 - RNA, 19 nt, Homo sapiens
  misc_RNA (1)...(19): siRNA sense strand
uggagagcauggucuugaa

SEQ ID NO: 1730369 - RNA, 19 nt, Homo sapiens
  misc_RNA (1)...(19): siRNA sense strand
uaagcagauugcaggguau

SEQ ID NO: 1730370 - RNA, 19 nt, Homo sapiens
  misc_RNA (1)...(19): siRNA sense strand
ugacuuugucuaucacuau

SEQ ID NO: 1730371 - RNA, 19 nt, Homo sapiens
  misc_RNA (1)...(19): siRNA sense strand
ugacccugaugagaccuua

SEQ ID NO: 1730372 - RNA, 19 nt, Homo sapiens
  misc_RNA (1)...(19): siRNA sense strand
ggagaaaauuccuguugca

SEQ ID NO: 1730373 - RNA, 19 nt, Homo sapiens
  misc_RNA (1)...(19): siRNA sense strand
ggacuucaacaagguuaug

SEQ ID NO: 1730374 - RNA, 19 nt, Homo sapiens
  misc_RNA (1)...(19): siRNA sense strand
ccaaaaugcucugugaaau

SEQ ID NO: 1730375 - RNA, 19 nt, Homo sapiens
  misc_RNA (1)...(19): siRNA sense strand
ugaugagaccuuaaacuuc

SEQ ID NO: 1730376 - RNA, 19 nt, Homo sapiens
  misc_RNA (1)...(19): siRNA sense strand
caaggagcccagcagcuau

SEQ ID NO: 1730377 - RNA, 19 nt, Homo sapiens
  misc_RNA (1)...(19): siRNA sense strand
gcaaagccauguacacaaa

SEQ ID NO: 1730378 - RNA, 19 nt, Homo sapiens
  misc_RNA (1)...(19): siRNA sense strand
gaugagaccuuaaacuuca

SEQ ID NO: 1730379 - RNA, 19 nt, Homo sapiens
  misc_RNA (1)...(19): siRNA sense strand
gaagauagccgaggaaauc

SEQ ID NO: 1730380 - RNA, 19 nt, Homo sapiens
  misc_RNA (1)...(19): siRNA sense strand
acaaggagguguuggaauu

SEQ ID NO: 1730381 - RNA, 19 nt, Homo sapiens
  misc_RNA (1)...(19): siRNA sense strand
aaagggacaucauauuuga

SEQ ID NO: 1730382 - RNA, 19 nt, Homo sapiens
  misc_RNA (1)...(19): siRNA sense strand
gaaaggaugaugaccaaga

SEQ ID NO: 1730383 - RNA, 19 nt, Homo sapiens
  misc_RNA (1)...(19): siRNA sense strand
gcuaugacuuugucuauca

SEQ ID NO: 1730384 - RNA, 19 nt, Homo sapiens
  misc_RNA (1)...(19): siRNA sense strand
caucgcaccuaauaaauau

SEQ ID NO: 1730385 - RNA, 19 nt, Homo sapiens
  misc_RNA (1)...(19): siRNA sense strand
ucaaagggacaucauauuu

SEQ ID NO: 1730386 - RNA, 19 nt, Homo sapiens
  misc_RNA (1)...(19): siRNA sense strand
ugacaaggcucguggaaag

SEQ ID NO: 1730387 - RNA, 19 nt, Homo sapiens
  misc_RNA (1)...(19): siRNA sense strand
ggcagcagcuuccgaaaga

SEQ ID NO: 1730388 - RNA, 19 nt, Homo sapiens
  misc_RNA (1)...(19): siRNA sense strand
ccagugagcugaccaagag

SEQ ID NO: 1730389 - RNA, 19 nt, Homo sapiens
  misc_RNA (1)...(19): siRNA sense strand
ugaggaggauugcauuuga

SEQ ID NO: 1730390 - RNA, 19 nt, Homo sapiens
  misc_RNA (1)...(19): siRNA sense strand
gaacagacucgcagugaca

SEQ ID NO: 1730391 - RNA, 19 nt, Homo sapiens
  misc_RNA (1)...(19): siRNA sense strand
aagcaucuccggucuauaa

SEQ ID NO: 1730392 - RNA, 19 nt, Homo sapiens
  misc_RNA (1)...(19): siRNA sense strand
gagcaaaucacucgagcuu

SEQ ID NO: 1730393 - RNA, 19 nt, Homo sapiens
  misc_RNA (1)...(19): siRNA sense strand
ugccaaacccagaguauua

SEQ ID NO: 1730394 - RNA, 19 nt, Homo sapiens
  misc_RNA (1)...(19): siRNA sense strand
ucaacaagguuaugcaagu

SEQ ID NO: 1730395 - RNA, 19 nt, Homo sapiens
  misc_RNA (1)...(19): siRNA sense strand
guacacaaaggacuacaaa

SEQ ID NO: 1730396 - RNA, 19 nt, Homo sapiens
  misc_RNA (1)...(19): siRNA sense strand
gacaucauauuugaacuga

SEQ ID NO: 1730397 - RNA, 19 nt, Homo sapiens
  misc_RNA (1)...(19): siRNA sense strand
gaggacaaacgacaggaua

SEQ ID NO: 1730398 - RNA, 19 nt, Homo sapiens
  misc_RNA (1)...(19): siRNA sense strand
gaacugaggaggauugcau

SEQ ID NO: 1730399 - RNA, 19 nt, Homo sapiens
  misc_RNA (1)...(19): siRNA sense strand
ucaaucaccuuuauuaagc

SEQ ID NO: 1730400 - RNA, 19 nt, Homo sapiens
  misc_RNA (1)...(19): siRNA sense strand
ggucuauaauccugaauca

SEQ ID NO: 1730401 - RNA, 19 nt, Homo sapiens
  misc_RNA (1)...(19): siRNA sense strand
gacaggauauggcaaaugc

SEQ ID NO: 1730402 - RNA, 19 nt, Homo sapiens
  misc_RNA (1)...(19): siRNA sense strand
cuacugaguucaucaacau

SEQ ID NO: 1730403 - RNA, 19 nt, Homo sapiens
  misc_RNA (1)...(19): siRNA sense strand
aagaaaggaugaugaccaa

SEQ ID NO: 1730404 - RNA, 19 nt, Homo sapiens
  misc_RNA (1)...(19): siRNA sense strand
cuucaaguccuaaccuuua

SEQ ID NO: 1730405 - RNA, 19 nt, Homo sapiens
  misc_RNA (1)...(19): siRNA sense strand
gcucaaagggacaucauau

SEQ ID NO: 1730406 - RNA, 19 nt, Homo sapiens
  misc_RNA (1)...(19): siRNA sense strand
uaaacuucaucgcaccuaa

SEQ ID NO: 1730407 - RNA, 19 nt, Homo sapiens
  misc_RNA (1)...(19): siRNA sense strand
ggaacuaccaaaugaagga

SEQ ID NO: 1730408 - RNA, 19 nt, Homo sapiens
  misc_RNA (1)...(19): siRNA sense strand
ccaaggagcccagcagcua

SEQ ID NO: 1730409 - RNA, 19 nt, Homo sapiens
  misc_RNA (1)...(19): siRNA sense strand
ggacaaacgacaggauaug

SEQ ID NO: 1730410 - RNA, 19 nt, Homo sapiens
  misc_RNA (1)...(19): siRNA sense strand
cagcagaggacuucaacaa

SEQ ID NO: 1730411 - RNA, 19 nt, Homo sapiens
  misc_RNA (1)...(19): siRNA sense strand
ucaucgcaccuaauaaaua

SEQ ID NO: 1730412 - RNA, 19 nt, Homo sapiens
  misc_RNA (1)...(19): siRNA sense strand
gaaucugcauccagcuguu

SEQ ID NO: 1730413 - RNA, 19 nt, Homo sapiens
  misc_RNA (1)...(19): siRNA sense strand
caaauugcguagccugagu

SEQ ID NO: 1730414 - RNA, 19 nt, Homo sapiens
  misc_RNA (1)...(19): siRNA sense strand
caacaagguuaugcaaguc

SEQ ID NO: 1730415 - RNA, 19 nt, Homo sapiens
  misc_RNA (1)...(19): siRNA sense strand
gacuuucgcuacugaguuc

SEQ ID NO: 1730416 - RNA, 19 nt, Homo sapiens
  misc_RNA (1)...(19): siRNA sense strand
ccuccaaacccaacucuuu

SEQ ID NO: 1730417 - RNA, 19 nt, Homo sapiens
  misc_RNA (1)...(19): siRNA sense strand
ccauugagcucaccaaaau

SEQ ID NO: 1730418 - RNA, 19 nt, Homo sapiens
  misc_RNA (1)...(19): siRNA sense strand
uggcauccauuaucaagga

SEQ ID NO: 1730419 - RNA, 19 nt, Homo sapiens
  misc_RNA (1)...(19): siRNA sense strand
agaagcaucuccggucuau

SEQ ID NO: 1730420 - RNA, 19 nt, Homo sapiens
  misc_RNA (1)...(19): siRNA sense strand
ucuauaauccugaaucaug

SEQ ID NO: 1730421 - RNA, 19 nt, Homo sapiens
  misc_RNA (1)...(19): siRNA sense strand
gcccagcagcuaugacuuu

SEQ ID NO: 1730422 - RNA, 19 nt, Homo sapiens
  misc_RNA (1)...(19): siRNA sense strand
aaaggaugaugaccaagau

SEQ ID NO: 1730423 - RNA, 19 nt, Homo sapiens
  misc_RNA (1)...(19): siRNA sense strand
guacaucaccgaacagacu

SEQ ID NO: 1730424 - RNA, 19 nt, Homo sapiens
  misc_RNA (1)...(19): siRNA sense strand
ggacaucauauuugaacug

SEQ ID NO: 1730425 - RNA, 19 nt, Homo sapiens
  misc_RNA (1)...(19): siRNA sense strand
gaaugggacaaucuuacaa

SEQ ID NO: 1730426 - RNA, 19 nt, Homo sapiens
  misc_RNA (1)...(19): siRNA sense strand
cagcagcuaugacuuuguc

SEQ ID NO: 1730427 - RNA, 19 nt, Homo sapiens
  misc_RNA (1)...(19): siRNA sense strand
uugaaucccugcaggagaa

SEQ ID NO: 1730428 - RNA, 19 nt, Homo sapiens
  misc_RNA (1)...(19): siRNA sense strand
gcaagucguccgagagcaa

SEQ ID NO: 1730429 - RNA, 19 nt, Homo sapiens
  misc_RNA (1)...(19): siRNA sense strand
caaaugaaggacgcaauga

SEQ ID NO: 1730430 - RNA, 19 nt, Homo sapiens
  misc_RNA (1)...(19): siRNA sense strand
ucagcuauauguccuucaa

SEQ ID NO: 1730431 - RNA, 19 nt, Homo sapiens
  misc_RNA (1)...(19): siRNA sense strand
cuauaauccugaaucaugu

SEQ ID NO: 1730432 - RNA, 19 nt, Homo sapiens
  misc_RNA (1)...(19): siRNA sense strand
ugggacagcucaucucaca

SEQ ID NO: 1730433 - RNA, 19 nt, Homo sapiens
  misc_RNA (1)...(19): siRNA sense strand
gcacugauuaaugcacuuu

SEQ ID NO: 1730434 - RNA, 19 nt, Homo sapiens
  misc_RNA (1)...(19): siRNA sense strand
cuucaucgcaccuaauaaa

SEQ ID NO: 1730435 - RNA, 19 nt, Homo sapiens
  misc_RNA (1)...(19): siRNA sense strand
cagaugguccucagcugua

SEQ ID NO: 1730436 - RNA, 19 nt, Homo sapiens
  misc_RNA (1)...(19): siRNA sense strand
ccaaacccagaguauuaua

SEQ ID NO: 1730437 - RNA, 19 nt, Homo sapiens
  misc_RNA (1)...(19): siRNA sense strand
cagacucgcagugacauua

SEQ ID NO: 1730438 - RNA, 19 nt, Homo sapiens
  misc_RNA (1)...(19): siRNA sense strand
ggauuuaccaaccacauca

SEQ ID NO: 1730439 - RNA, 19 nt, Homo sapiens
  misc_RNA (1)...(19): siRNA sense strand
accaggagauucagaccua

SEQ ID NO: 1730440 - RNA, 19 nt, Homo sapiens
  misc_RNA (1)...(19): siRNA sense strand
gcuacugaguucaucaaca

SEQ ID NO: 1730441 - RNA, 19 nt, Homo sapiens
  misc_RNA (1)...(19): siRNA sense strand
cgacgugacuuucgcuacu

SEQ ID NO: 1730442 - RNA, 19 nt, Homo sapiens
  misc_RNA (1)...(19): siRNA sense strand
ggacaccuacauccggauu

SEQ ID NO: 1730443 - RNA, 19 nt, Homo sapiens
  misc_RNA (1)...(19): siRNA sense strand
gaaaagugcucugaaacag

SEQ ID NO: 1730444 - RNA, 19 nt, Homo sapiens
  misc_RNA (1)...(19): siRNA sense strand
gaaagauuguccccacaug

SEQ ID NO: 1730445 - RNA, 19 nt, Homo sapiens
  misc_RNA (1)...(19): siRNA sense strand
cagaggacuucaacaaggu

SEQ ID NO: 1730446 - RNA, 19 nt, Homo sapiens
  misc_RNA (1)...(19): siRNA sense strand
caacagcagaggacuucaa

SEQ ID NO: 1730447 - RNA, 19 nt, Homo sapiens
  misc_RNA (1)...(19): siRNA sense strand
ugaccgagccuuugaagag

SEQ ID NO: 1730448 - RNA, 19 nt, Homo sapiens
  misc_RNA (1)...(19): siRNA sense strand
ccaaaugaaggacgcaaug

SEQ ID NO: 1730449 - RNA, 19 nt, Homo sapiens
  misc_RNA (1)...(19): siRNA sense strand
ccugggacaugguuucaau

SEQ ID NO: 1730450 - RNA, 19 nt, Homo sapiens
  misc_RNA (1)...(19): siRNA sense strand
ggaagacaaacaugaaugc

SEQ ID NO: 1730451 - RNA, 19 nt, Homo sapiens
  misc_RNA (1)...(19): siRNA sense strand
gggaagacaaacaugaaug

SEQ ID NO: 1730452 - RNA, 19 nt, Homo sapiens
  misc_RNA (1)...(19): siRNA sense strand
ggacaacaugcuguacuug

SEQ ID NO: 1730453 - RNA, 19 nt, Homo sapiens
  misc_RNA (1)...(19): siRNA sense strand
uauuauacccuccguuaug

SEQ ID NO: 1730454 - RNA, 19 nt, Homo sapiens
  misc_RNA (1)...(19): siRNA sense strand
ccaaugaccaggcucaaag

SEQ ID NO: 1730455 - RNA, 19 nt, Homo sapiens
  misc_RNA (1)...(19): siRNA sense strand
cacccugacugccuuccua

SEQ ID NO: 1730456 - RNA, 19 nt, Homo sapiens
  misc_RNA (1)...(19): siRNA sense strand
gcagcuaugacuuugucua

SEQ ID NO: 1730457 - RNA, 19 nt, Homo sapiens
  misc_RNA (1)...(19): siRNA sense strand
uggacaacaugcuguacuu

SEQ ID NO: 1730458 - RNA, 19 nt, Homo sapiens
  misc_RNA (1)...(19): siRNA sense strand
gacuuugucuaucacuaug

SEQ ID NO: 1730459 - RNA, 19 nt, Homo sapiens
  misc_RNA (1)...(19): siRNA sense strand
cagcuaugacuuugucuau

SEQ ID NO: 1730460 - RNA, 19 nt, Homo sapiens
  misc_RNA (1)...(19): siRNA sense strand
ccaccaccgucagacauug

SEQ ID NO: 1730461 - RNA, 19 nt, Homo sapiens
  misc_RNA (1)...(19): siRNA sense strand
gaggacuucaacaagguua

SEQ ID NO: 1730462 - RNA, 19 nt, Homo sapiens
  misc_RNA (1)...(19): siRNA sense strand
gcucuugucccacuacagu

SEQ ID NO: 1730463 - RNA, 19 nt, Homo sapiens
  misc_RNA (1)...(19): siRNA sense strand
cugaugagaccuuaaacuu

SEQ ID NO: 1730464 - RNA, 19 nt, Homo sapiens
  misc_RNA (1)...(19): siRNA sense strand
cagcagcuuccgaaagauu

SEQ ID NO: 1730465 - RNA, 19 nt, Homo sapiens
  misc_RNA (1)...(19): siRNA sense strand
gaucaguucaagagcaaau

SEQ ID NO: 1730466 - RNA, 19 nt, Homo sapiens
  misc_RNA (1)...(19): siRNA sense strand
aaacaugaaugccccuuug

SEQ ID NO: 1730467 - RNA, 19 nt, Homo sapiens
  misc_RNA (1)...(19): siRNA sense strand
cuacgccauugcacugauu

SEQ ID NO: 1730468 - RNA, 19 nt, Homo sapiens
  misc_RNA (1)...(19): siRNA sense strand
uggagagcauggucuugaa

SEQ ID NO: 1730469 - RNA, 19 nt, Homo sapiens
  misc_RNA (1)...(19): siRNA sense strand
uaagcagauugcaggguau

SEQ ID NO: 1730470 - RNA, 19 nt, Homo sapiens
  misc_RNA (1)...(19): siRNA sense strand
ugacuuugucuaucacuau

SEQ ID NO: 1730471 - RNA, 19 nt, Homo sapiens
  misc_RNA (1)...(19): siRNA sense strand
ugacccugaugagaccuua

SEQ ID NO: 1730472 - RNA, 19 nt, Homo sapiens
  misc_RNA (1)...(19): siRNA sense strand
ggagaaaauuccuguugca

SEQ ID NO: 1730473 - RNA, 19 nt, Homo sapiens
  misc_RNA (1)...(19): siRNA sense strand
ggacuucaacaagguuaug

SEQ ID NO: 1730474 - RNA, 19 nt, Homo sapiens
  misc_RNA (1)...(19): siRNA sense strand
ccaaaaugcucugugaaau

SEQ ID NO: 1730475 - RNA, 19 nt, Homo sapiens
  misc_RNA (1)...(19): siRNA sense strand
ugaugagaccuuaaacuuc

SEQ ID NO: 1730476 - RNA, 19 nt, Homo sapiens
  misc_RNA (1)...(19): siRNA sense strand
caaggagcccagcagcuau

SEQ ID NO: 1730477 - RNA, 19 nt, Homo sapiens
  misc_RNA (1)...(19): siRNA sense strand
gcaaagccauguacacaaa

SEQ ID NO: 1730478 - RNA, 19 nt, Homo sapiens
  misc_RNA (1)...(19): siRNA sense strand
gaugagaccuuaaacuuca

SEQ ID NO: 1730479 - RNA, 19 nt, Homo sapiens
  misc_RNA (1)...(19): siRNA sense strand
gaagauagccgaggaaauc

SEQ ID NO: 1730480 - RNA, 19 nt, Homo sapiens
  misc_RNA (1)...(19): siRNA sense strand
acaaggagguguuggaauu

SEQ ID NO: 1730481 - RNA, 19 nt, Homo sapiens
  misc_RNA (1)...(19): siRNA sense strand
aaagggacaucauauuuga

SEQ ID NO: 1730482 - RNA, 19 nt, Homo sapiens
  misc_RNA (1)...(19): siRNA sense strand
gaaaggaugaugaccaaga

SEQ ID NO: 1730483 - RNA, 19 nt, Homo sapiens
  misc_RNA (1)...(19): siRNA sense strand
gcuaugacuuugucuauca

SEQ ID NO: 1730484 - RNA, 19 nt, Homo sapiens
  misc_RNA (1)...(19): siRNA sense strand
caucgcaccuaauaaauau

SEQ ID NO: 1730485 - RNA, 19 nt, Homo sapiens
  misc_RNA (1)...(19): siRNA sense strand
ucaaagggacaucauauuu

SEQ ID NO: 1730486 - RNA, 19 nt, Homo sapiens
  misc_RNA (1)...(19): siRNA sense strand
ugacaaggcucguggaaag

SEQ ID NO: 1730487 - RNA, 19 nt, Homo sapiens
  misc_RNA (1)...(19): siRNA sense strand
ggcagcagcuuccgaaaga

SEQ ID NO: 1730488 - RNA, 19 nt, Homo sapiens
  misc_RNA (1)...(19): siRNA sense strand
ccagugagcugaccaagag

SEQ ID NO: 1730489 - RNA, 19 nt, Homo sapiens
  misc_RNA (1)...(19): siRNA sense strand
ugaggaggauugcauuuga

SEQ ID NO: 1730490 - RNA, 19 nt, Homo sapiens
  misc_RNA (1)...(19): siRNA sense strand
gaacagacucgcagugaca

SEQ ID NO: 1730491 - RNA, 19 nt, Homo sapiens
  misc_RNA (1)...(19): siRNA sense strand
aagcaucuccggucuauaa

SEQ ID NO: 1730492 - RNA, 19 nt, Homo sapiens
  misc_RNA (1)...(19): siRNA sense strand
gagcaaaucacucgagcuu

SEQ ID NO: 1730493 - RNA, 19 nt, Homo sapiens
  misc_RNA (1)...(19): siRNA sense strand
ugccaaacccagaguauua

SEQ ID NO: 1730494 - RNA, 19 nt, Homo sapiens
  misc_RNA (1)...(19): siRNA sense strand
ucaacaagguuaugcaagu

SEQ ID NO: 1730495 - RNA, 19 nt, Homo sapiens
  misc_RNA (1)...(19): siRNA sense strand
guacacaaaggacuacaaa

SEQ ID NO: 1730496 - RNA, 19 nt, Homo sapiens
  misc_RNA (1)...(19): siRNA sense strand
gacaucauauuugaacuga

SEQ ID NO: 1730497 - RNA, 19 nt, Homo sapiens
  misc_RNA (1)...(19): siRNA sense strand
gaggacaaacgacaggaua

SEQ ID NO: 1730498 - RNA, 19 nt, Homo sapiens
  misc_RNA (1)...(19): siRNA sense strand
gaacugaggaggauugcau

SEQ ID NO: 1730499 - RNA, 19 nt, Homo sapiens
  misc_RNA (1)...(19): siRNA sense strand
ucaaucaccuuuauuaagc

SEQ ID NO: 1730500 - RNA, 19 nt, Homo sapiens
  misc_RNA (1)...(19): siRNA sense strand
ggucuauaauccugaauca

SEQ ID NO: 1730501 - RNA, 19 nt, Homo sapiens
  misc_RNA (1)...(19): siRNA sense strand
gacaggauauggcaaaugc

SEQ ID NO: 1730502 - RNA, 19 nt, Homo sapiens
  misc_RNA (1)...(19): siRNA sense strand
cuacugaguucaucaacau

SEQ ID NO: 1730503 - RNA, 19 nt, Homo sapiens
  misc_RNA (1)...(19): siRNA sense strand
aagaaaggaugaugaccaa

SEQ ID NO: 1730504 - RNA, 19 nt, Homo sapiens
  misc_RNA (1)...(19): siRNA sense strand
cuucaaguccuaaccuuua

SEQ ID NO: 1730505 - RNA, 19 nt, Homo sapiens
  misc_RNA (1)...(19): siRNA sense strand
gcucaaagggacaucauau

SEQ ID NO: 1730506 - RNA, 19 nt, Homo sapiens
  misc_RNA (1)...(19): siRNA sense strand
uaaacuucaucgcaccuaa

SEQ ID NO: 1730507 - RNA, 19 nt, Homo sapiens
  misc_RNA (1)...(19): siRNA sense strand
ggaacuaccaaaugaagga

SEQ ID NO: 1730508 - RNA, 19 nt, Homo sapiens
  misc_RNA (1)...(19): siRNA sense strand
ccaaggagcccagcagcua

SEQ ID NO: 1730509 - RNA, 19 nt, Homo sapiens
  misc_RNA (1)...(19): siRNA sense strand
ggacaaacgacaggauaug

SEQ ID NO: 1730510 - RNA, 19 nt, Homo sapiens
  misc_RNA (1)...(19): siRNA sense strand
cagcagaggacuucaacaa

SEQ ID NO: 1730511 - RNA, 19 nt, Homo sapiens
  misc_RNA (1)...(19): siRNA sense strand
ucaucgcaccuaauaaaua

SEQ ID NO: 1730512 - RNA, 19 nt, Homo sapiens
  misc_RNA (1)...(19): siRNA sense strand
gaaucugcauccagcuguu

SEQ ID NO: 1730513 - RNA, 19 nt, Homo sapiens
  misc_RNA (1)...(19): siRNA sense strand
caaauugcguagccugagu

SEQ ID NO: 1730514 - RNA, 19 nt, Homo sapiens
  misc_RNA (1)...(19): siRNA sense strand
caacaagguuaugcaaguc

SEQ ID NO: 1730515 - RNA, 19 nt, Homo sapiens
  misc_RNA (1)...(19): siRNA sense strand
gacuuucgcuacugaguuc

SEQ ID NO: 1730516 - RNA, 19 nt, Homo sapiens
  misc_RNA (1)...(19): siRNA sense strand
ccuccaaacccaacucuuu

SEQ ID NO: 1730517 - RNA, 19 nt, Homo sapiens
  misc_RNA (1)...(19): siRNA sense strand
ccauugagcucaccaaaau

SEQ ID NO: 1730518 - RNA, 19 nt, Homo sapiens
  misc_RNA (1)...(19): siRNA sense strand
uggcauccauuaucaagga

SEQ ID NO: 1730519 - RNA, 19 nt, Homo sapiens
  misc_RNA (1)...(19): siRNA sense strand
agaagcaucuccggucuau

SEQ ID NO: 1730520 - RNA, 19 nt, Homo sapiens
  misc_RNA (1)...(19): siRNA sense strand
ucuauaauccugaaucaug

SEQ ID NO: 1730521 - RNA, 19 nt, Homo sapiens
  misc_RNA (1)...(19): siRNA sense strand
gcccagcagcuaugacuuu

SEQ ID NO: 1730522 - RNA, 19 nt, Homo sapiens
  misc_RNA (1)...(19): siRNA sense strand
aaaggaugaugaccaagau

SEQ ID NO: 1730523 - RNA, 19 nt, Homo sapiens
  misc_RNA (1)...(19): siRNA sense strand
guacaucaccgaacagacu

SEQ ID NO: 1730524 - RNA, 19 nt, Homo sapiens
  misc_RNA (1)...(19): siRNA sense strand
ggacaucauauuugaacug

SEQ ID NO: 1730525 - RNA, 19 nt, Homo sapiens
  misc_RNA (1)...(19): siRNA sense strand
gaaugggacaaucuuacaa

SEQ ID NO: 1730526 - RNA, 19 nt, Homo sapiens
  misc_RNA (1)...(19): siRNA sense strand
cagcagcuaugacuuuguc

SEQ ID NO: 1730527 - RNA, 19 nt, Homo sapiens
  misc_RNA (1)...(19): siRNA sense strand
uugaaucccugcaggagaa

SEQ ID NO: 1730528 - RNA, 19 nt, Homo sapiens
  misc_RNA (1)...(19): siRNA sense strand
gcaagucguccgagagcaa

SEQ ID NO: 1730529 - RNA, 19 nt, Homo sapiens
  misc_RNA (1)...(19): siRNA sense strand
caaaugaaggacgcaauga

SEQ ID NO: 1730530 - RNA, 19 nt, Homo sapiens
  misc_RNA (1)...(19): siRNA sense strand
ucagcuauauguccuucaa

SEQ ID NO: 1730531 - RNA, 19 nt, Homo sapiens
  misc_RNA (1)...(19): siRNA sense strand
cuauaauccugaaucaugu

SEQ ID NO: 1730532 - RNA, 19 nt, Homo sapiens
  misc_RNA (1)...(19): siRNA sense strand
ugggacagcucaucucaca

SEQ ID NO: 1730533 - RNA, 19 nt, Homo sapiens
  misc_RNA (1)...(19): siRNA sense strand
gcacugauuaaugcacuuu

SEQ ID NO: 1730534 - RNA, 19 nt, Homo sapiens
  misc_RNA (1)...(19): siRNA sense strand
cuucaucgcaccuaauaaa

SEQ ID NO: 1730535 - RNA, 19 nt, Homo sapiens
  misc_RNA (1)...(19): siRNA sense strand
cagaugguccucagcugua

SEQ ID NO: 1730536 - RNA, 19 nt, Homo sapiens
  misc_RNA (1)...(19): siRNA sense strand
ccaaacccagaguauuaua

SEQ ID NO: 1730537 - RNA, 19 nt, Homo sapiens
  misc_RNA (1)...(19): siRNA sense strand
cagacucgcagugacauua

SEQ ID NO: 1730538 - RNA, 19 nt, Homo sapiens
  misc_RNA (1)...(19): siRNA sense strand
ggauuuaccaaccacauca

SEQ ID NO: 1730539 - RNA, 19 nt, Homo sapiens
  misc_RNA (1)...(19): siRNA sense strand
accaggagauucagaccua

SEQ ID NO: 1730540 - RNA, 19 nt, Homo sapiens
  misc_RNA (1)...(19): siRNA sense strand
gcuacugaguucaucaaca

SEQ ID NO: 1730541 - RNA, 19 nt, Homo sapiens
  misc_RNA (1)...(19): siRNA sense strand
cgacgugacuuucgcuacu

SEQ ID NO: 1730542 - RNA, 19 nt, Homo sapiens
  misc_RNA (1)...(19): siRNA sense strand
ggacaccuacauccggauu

SEQ ID NO: 1730543 - RNA, 19 nt, Homo sapiens
  misc_RNA (1)...(19): siRNA sense strand
gaaaagugcucugaaacag

SEQ ID NO: 1730544 - RNA, 19 nt, Homo sapiens
  misc_RNA (1)...(19): siRNA sense strand
gaaagauuguccccacaug

SEQ ID NO: 1730545 - RNA, 19 nt, Homo sapiens
  misc_RNA (1)...(19): siRNA sense strand
cagaggacuucaacaaggu

SEQ ID NO: 1730546 - RNA, 19 nt, Homo sapiens
  misc_RNA (1)...(19): siRNA sense strand
caacagcagaggacuucaa

SEQ ID NO: 1730547 - RNA, 19 nt, Homo sapiens
  misc_RNA (1)...(19): siRNA sense strand
ugaccgagccuuugaagag

SEQ ID NO: 1730548 - RNA, 19 nt, Homo sapiens
  misc_RNA (1)...(19): siRNA sense strand
ccaaaugaaggacgcaaug

SEQ ID NO: 1730549 - RNA, 19 nt, Homo sapiens
  misc_RNA (1)...(19): siRNA sense strand
ccugggacaugguuucaau

SEQ ID NO: 1730550 - RNA, 19 nt, Homo sapiens
  misc_RNA (1)...(19): siRNA sense strand
ggaagacaaacaugaaugc

SEQ ID NO: 1730551 - RNA, 19 nt, Homo sapiens
  misc_RNA (1)...(19): siRNA sense strand
gggaagacaaacaugaaug

SEQ ID NO: 1730552 - RNA, 19 nt, Homo sapiens
  misc_RNA (1)...(19): siRNA sense strand
ggacaacaugcuguacuug

SEQ ID NO: 1730553 - RNA, 19 nt, Homo sapiens
  misc_RNA (1)...(19): siRNA sense strand
uauuauacccuccguuaug

SEQ ID NO: 1730554 - RNA, 19 nt, Homo sapiens
  misc_RNA (1)...(19): siRNA sense strand
ccaaugaccaggcucaaag

SEQ ID NO: 1730555 - RNA, 19 nt, Homo sapiens
  misc_RNA (1)...(19): siRNA sense strand
cacccugacugccuuccua

SEQ ID NO: 1730556 - RNA, 19 nt, Homo sapiens
  misc_RNA (1)...(19): siRNA sense strand
gcagcuaugacuuugucua

SEQ ID NO: 1730557 - RNA, 19 nt, Homo sapiens
  misc_RNA (1)...(19): siRNA sense strand
uggacaacaugcuguacuu

SEQ ID NO: 1730558 - RNA, 19 nt, Homo sapiens
  misc_RNA (1)...(19): siRNA sense strand
gacuuugucuaucacuaug

SEQ ID NO: 1730559 - RNA, 19 nt, Homo sapiens
  misc_RNA (1)...(19): siRNA sense strand
cagcuaugacuuugucuau

SEQ ID NO: 1730560 - RNA, 19 nt, Homo sapiens
  misc_RNA (1)...(19): siRNA sense strand
ccaccaccgucagacauug

SEQ ID NO: 1730561 - RNA, 19 nt, Homo sapiens
  misc_RNA (1)...(19): siRNA sense strand
gaggacuucaacaagguua

SEQ ID NO: 1730562 - RNA, 19 nt, Homo sapiens
  misc_RNA (1)...(19): siRNA sense strand
gcucuugucccacuacagu

SEQ ID NO: 1730563 - RNA, 19 nt, Homo sapiens
  misc_RNA (1)...(19): siRNA sense strand
cugaugagaccuuaaacuu

SEQ ID NO: 1730564 - RNA, 19 nt, Homo sapiens
  misc_RNA (1)...(19): siRNA sense strand
cagcagcuuccgaaagauu

SEQ ID NO: 1730565 - RNA, 19 nt, Homo sapiens
  misc_RNA (1)...(19): siRNA sense strand
gaucaguucaagagcaaau

SEQ ID NO: 1730566 - RNA, 19 nt, Homo sapiens
  misc_RNA (1)...(19): siRNA sense strand
aaacaugaaugccccuuug

SEQ ID NO: 1730567 - RNA, 19 nt, Homo sapiens
  misc_RNA (1)...(19): siRNA sense strand
cuacgccauugcacugauu

SEQ ID NO: 1730568 - RNA, 19 nt, Homo sapiens
  misc_RNA (1)...(19): siRNA sense strand
uggagagcauggucuugaa

SEQ ID NO: 1730569 - RNA, 19 nt, Homo sapiens
  misc_RNA (1)...(19): siRNA sense strand
uaagcagauugcaggguau

SEQ ID NO: 1730570 - RNA, 19 nt, Homo sapiens
  misc_RNA (1)...(19): siRNA sense strand
ugacuuugucuaucacuau

SEQ ID NO: 1730571 - RNA, 19 nt, Homo sapiens
  misc_RNA (1)...(19): siRNA sense strand
ugacccugaugagaccuua

SEQ ID NO: 1730572 - RNA, 19 nt, Homo sapiens
  misc_RNA (1)...(19): siRNA sense strand
ggagaaaauuccuguugca

SEQ ID NO: 1730573 - RNA, 19 nt, Homo sapiens
  misc_RNA (1)...(19): siRNA sense strand
ggacuucaacaagguuaug

SEQ ID NO: 1730574 - RNA, 19 nt, Homo sapiens
  misc_RNA (1)...(19): siRNA sense strand
ccaaaaugcucugugaaau

SEQ ID NO: 1730575 - RNA, 19 nt, Homo sapiens
  misc_RNA (1)...(19): siRNA sense strand
ugaugagaccuuaaacuuc

SEQ ID NO: 1730576 - RNA, 19 nt, Homo sapiens
  misc_RNA (1)...(19): siRNA sense strand
caaggagcccagcagcuau

SEQ ID NO: 1730577 - RNA, 19 nt, Homo sapiens
  misc_RNA (1)...(19): siRNA sense strand
gagaaaggauggagaauga

SEQ ID NO: 1730578 - RNA, 19 nt, Homo sapiens
  misc_RNA (1)...(19): siRNA sense strand
ggagaaacuuagugaauaa

SEQ ID NO: 1730579 - RNA, 19 nt, Homo sapiens
  misc_RNA (1)...(19): siRNA sense strand
gaagauaggcaaugaaauu

SEQ ID NO: 1730580 - RNA, 19 nt, Homo sapiens
  misc_RNA (1)...(19): siRNA sense strand
caaggaaguuguaccaaua

SEQ ID NO: 1730581 - RNA, 19 nt, Homo sapiens
  misc_RNA (1)...(19): siRNA sense strand
ggaaaagaaugccaaaaua

SEQ ID NO: 1730582 - RNA, 19 nt, Homo sapiens
  misc_RNA (1)...(19): siRNA sense strand
ggacaaugguuacuccaaa

SEQ ID NO: 1730583 - RNA, 19 nt, Homo sapiens
  misc_RNA (1)...(19): siRNA sense strand
ggaggaaagugcugagaaa

SEQ ID NO: 1730584 - RNA, 19 nt, Homo sapiens
  misc_RNA (1)...(19): siRNA sense strand
gcaaaugcuugaccagauu

SEQ ID NO: 1730585 - RNA, 19 nt, Homo sapiens
  misc_RNA (1)...(19): siRNA sense strand
gaacagaccauuuacaaca

SEQ ID NO: 1730586 - RNA, 19 nt, Homo sapiens
  misc_RNA (1)...(19): siRNA sense strand
gcacaaacuacuacauaua

SEQ ID NO: 1730587 - RNA, 19 nt, Homo sapiens
  misc_RNA (1)...(19): siRNA sense strand
gcuagaagacuuuaccuua

SEQ ID NO: 1730588 - RNA, 19 nt, Homo sapiens
  misc_RNA (1)...(19): siRNA sense strand
ggcagaagauccugaauga

SEQ ID NO: 1730589 - RNA, 19 nt, Homo sapiens
  misc_RNA (1)...(19): siRNA sense strand
gaaaggauggagaaugaua

SEQ ID NO: 1730590 - RNA, 19 nt, Homo sapiens
  misc_RNA (1)...(19): siRNA sense strand
caacgaagaugcacaaacu

SEQ ID NO: 1730591 - RNA, 19 nt, Homo sapiens
  misc_RNA (1)...(19): siRNA sense strand
uaacaacgguaacauugaa

SEQ ID NO: 1730592 - RNA, 19 nt, Homo sapiens
  misc_RNA (1)...(19): siRNA sense strand
cuagaagacuuuaccuuaa

SEQ ID NO: 1730593 - RNA, 19 nt, Homo sapiens
  misc_RNA (1)...(19): siRNA sense strand
gaaaucacacuuggauaua

SEQ ID NO: 1730594 - RNA, 19 nt, Homo sapiens
  misc_RNA (1)...(19): siRNA sense strand
gauggagaaugauaugaaa

SEQ ID NO: 1730595 - RNA, 19 nt, Homo sapiens
  misc_RNA (1)...(19): siRNA sense strand
ugagaaacaugauauagga

SEQ ID NO: 1730596 - RNA, 19 nt, Homo sapiens
  misc_RNA (1)...(19): siRNA sense strand
gaaggugauugaaagaaau

SEQ ID NO: 1730597 - RNA, 19 nt, Homo sapiens
  misc_RNA (1)...(19): siRNA sense strand
ggcaggaguucuucaauga

SEQ ID NO: 1730598 - RNA, 19 nt, Homo sapiens
  misc_RNA (1)...(19): siRNA sense strand
gaagaugcacaaacuacua

SEQ ID NO: 1730599 - RNA, 19 nt, Homo sapiens
  misc_RNA (1)...(19): siRNA sense strand
agaaggaacagaccauuua

SEQ ID NO: 1730600 - RNA, 19 nt, Homo sapiens
  misc_RNA (1)...(19): siRNA sense strand
gaaacaugauauaggaguu

SEQ ID NO: 1730601 - RNA, 19 nt, Homo sapiens
  misc_RNA (1)...(19): siRNA sense strand
ggaaagugcugagaaacau

SEQ ID NO: 1730602 - RNA, 19 nt, Homo sapiens
  misc_RNA (1)...(19): siRNA sense strand
uggagaaacuuagugaaua

SEQ ID NO: 1730603 - RNA, 19 nt, Homo sapiens
  misc_RNA (1)...(19): siRNA sense strand
cgauugaacugacaaggaa

SEQ ID NO: 1730604 - RNA, 19 nt, Homo sapiens
  misc_RNA (1)...(19): siRNA sense strand
gaugugaaauuaacaaagg

SEQ ID NO: 1730605 - RNA, 19 nt, Homo sapiens
  misc_RNA (1)...(19): siRNA sense strand
uaacaugauucaacaaugg

SEQ ID NO: 1730606 - RNA, 19 nt, Homo sapiens
  misc_RNA (1)...(19): siRNA sense strand
ugaaggugauugaaagaaa

SEQ ID NO: 1730607 - RNA, 19 nt, Homo sapiens
  misc_RNA (1)...(19): siRNA sense strand
cagaagauccugaaugaga

SEQ ID NO: 1730608 - RNA, 19 nt, Homo sapiens
  misc_RNA (1)...(19): siRNA sense strand
gacaguacauggaggaaau

SEQ ID NO: 1730609 - RNA, 19 nt, Homo sapiens
  misc_RNA (1)...(19): siRNA sense strand
gcagaugauugauuucuac

SEQ ID NO: 1730610 - RNA, 19 nt, Homo sapiens
  misc_RNA (1)...(19): siRNA sense strand
agagagggcugguguggaa

SEQ ID NO: 1730611 - RNA, 19 nt, Homo sapiens
  misc_RNA (1)...(19): siRNA sense strand
ggagcuagaugcgauugaa

SEQ ID NO: 1730612 - RNA, 19 nt, Homo sapiens
  misc_RNA (1)...(19): siRNA sense strand
acaaagacuugguaacuca

SEQ ID NO: 1730613 - RNA, 19 nt, Homo sapiens
  misc_RNA (1)...(19): siRNA sense strand
gauuaguucucuugacuuc

SEQ ID NO: 1730614 - RNA, 19 nt, Homo sapiens
  misc_RNA (1)...(19): siRNA sense strand
cauauuggcuagaagacuu

SEQ ID NO: 1730615 - RNA, 19 nt, Homo sapiens
  misc_RNA (1)...(19): siRNA sense strand
gaaauuaacaacgguaaca

SEQ ID NO: 1730616 - RNA, 19 nt, Homo sapiens
  misc_RNA (1)...(19): siRNA sense strand
ccaaaauucuuccaaguuu

SEQ ID NO: 1730617 - RNA, 19 nt, Homo sapiens
  misc_RNA (1)...(19): siRNA sense strand
ugaaugaugugauggauac

SEQ ID NO: 1730618 - RNA, 19 nt, Homo sapiens
  misc_RNA (1)...(19): siRNA sense strand
aggaugggcuuaucaaaug

SEQ ID NO: 1730619 - RNA, 19 nt, Homo sapiens
  misc_RNA (1)...(19): siRNA sense strand
ccacaaggauuuggcacaa

SEQ ID NO: 1730620 - RNA, 19 nt, Homo sapiens
  misc_RNA (1)...(19): siRNA sense strand
gaacugaccagggaacugu

SEQ ID NO: 1730621 - RNA, 19 nt, Homo sapiens
  misc_RNA (1)...(19): siRNA sense strand
gauaggcaaugaaauuaac

SEQ ID NO: 1730622 - RNA, 19 nt, Homo sapiens
  misc_RNA (1)...(19): siRNA sense strand
ugaaaucacacuuggauau

SEQ ID NO: 1730623 - RNA, 19 nt, Homo sapiens
  misc_RNA (1)...(19): siRNA sense strand
gggauguucuacugucaaa

SEQ ID NO: 1730624 - RNA, 19 nt, Homo sapiens
  misc_RNA (1)...(19): siRNA sense strand
cacuaagcauuucaucaua

SEQ ID NO: 1730625 - RNA, 19 nt, Homo sapiens
  misc_RNA (1)...(19): siRNA sense strand
gagcucagccacauaugaa

SEQ ID NO: 1730626 - RNA, 19 nt, Homo sapiens
  misc_RNA (1)...(19): siRNA sense strand
uugcagaaguugacacaaa

SEQ ID NO: 1730627 - RNA, 19 nt, Homo sapiens
  misc_RNA (1)...(19): siRNA sense strand
ccacauggaugaguuacau

SEQ ID NO: 1730628 - RNA, 19 nt, Homo sapiens
  misc_RNA (1)...(19): siRNA sense strand
ggauggagaaugauaugaa

SEQ ID NO: 1730629 - RNA, 19 nt, Homo sapiens
  misc_RNA (1)...(19): siRNA sense strand
gaagaaggaacagaccauu

SEQ ID NO: 1730630 - RNA, 19 nt, Homo sapiens
  misc_RNA (1)...(19): siRNA sense strand
caacuuuacugaccaagac

SEQ ID NO: 1730631 - RNA, 19 nt, Homo sapiens
  misc_RNA (1)...(19): siRNA sense strand
augguaaacuugcugauuu

SEQ ID NO: 1730632 - RNA, 19 nt, Homo sapiens
  misc_RNA (1)...(19): siRNA sense strand
gcaccacauggaugaguua

SEQ ID NO: 1730633 - RNA, 19 nt, Homo sapiens
  misc_RNA (1)...(19): siRNA sense strand
agaagauccugaaugagaa

SEQ ID NO: 1730634 - RNA, 19 nt, Homo sapiens
  misc_RNA (1)...(19): siRNA sense strand
gaacaaauggaagagucua

SEQ ID NO: 1730635 - RNA, 19 nt, Homo sapiens
  misc_RNA (1)...(19): siRNA sense strand
cugaagaccuugcacuguu

SEQ ID NO: 1730636 - RNA, 19 nt, Homo sapiens
  misc_RNA (1)...(19): siRNA sense strand
caaacaaggacacugaaga

SEQ ID NO: 1730637 - RNA, 19 nt, Homo sapiens
  misc_RNA (1)...(19): siRNA sense strand
gaauauacaggaccaacga

SEQ ID NO: 1730638 - RNA, 19 nt, Homo sapiens
  misc_RNA (1)...(19): siRNA sense strand
ggcagaugauugauuucua

SEQ ID NO: 1730639 - RNA, 19 nt, Homo sapiens
  misc_RNA (1)...(19): siRNA sense strand
uaaacaagagguagaacaa

SEQ ID NO: 1730640 - RNA, 19 nt, Homo sapiens
  misc_RNA (1)...(19): siRNA sense strand
gcaauggcucugaguaaau

SEQ ID NO: 1730641 - RNA, 19 nt, Homo sapiens
  misc_RNA (1)...(19): siRNA sense strand
aaaccuuacugguauuguu

SEQ ID NO: 1730642 - RNA, 19 nt, Homo sapiens
  misc_RNA (1)...(19): siRNA sense strand
uguuaaaccuuacugguau

SEQ ID NO: 1730643 - RNA, 19 nt, Homo sapiens
  misc_RNA (1)...(19): siRNA sense strand
guacauggaggaaauuauc

SEQ ID NO: 1730644 - RNA, 19 nt, Homo sapiens
  misc_RNA (1)...(19): siRNA sense strand
ugaagaccuugcacuguug

SEQ ID NO: 1730645 - RNA, 19 nt, Homo sapiens
  misc_RNA (1)...(19): siRNA sense strand
caacaucuacagagaagga

SEQ ID NO: 1730646 - RNA, 19 nt, Homo sapiens
  misc_RNA (1)...(19): siRNA sense strand
cuacugaagaccuuuauga

SEQ ID NO: 1730647 - RNA, 19 nt, Homo sapiens
  misc_RNA (1)...(19): siRNA sense strand
guaaauccacuaacucaca

SEQ ID NO: 1730648 - RNA, 19 nt, Homo sapiens
  misc_RNA (1)...(19): siRNA sense strand
gaaguggcccagcugaaug

SEQ ID NO: 1730649 - RNA, 19 nt, Homo sapiens
  misc_RNA (1)...(19): siRNA sense strand
cuccaagcguauauauuua

SEQ ID NO: 1730650 - RNA, 19 nt, Homo sapiens
  misc_RNA (1)...(19): siRNA sense strand
ugaagaauggcaggaaaua

SEQ ID NO: 1730651 - RNA, 19 nt, Homo sapiens
  misc_RNA (1)...(19): siRNA sense strand
acgauacucucaagauuau

SEQ ID NO: 1730652 - RNA, 19 nt, Homo sapiens
  misc_RNA (1)...(19): siRNA sense strand
gaagauccugaaugagaaa

SEQ ID NO: 1730653 - RNA, 19 nt, Homo sapiens
  misc_RNA (1)...(19): siRNA sense strand
cagcaauggcucugaguaa

SEQ ID NO: 1730654 - RNA, 19 nt, Homo sapiens
  misc_RNA (1)...(19): siRNA sense strand
acuccaagcguauauauuu

SEQ ID NO: 1730655 - RNA, 19 nt, Homo sapiens
  misc_RNA (1)...(19): siRNA sense strand
auacgauacucucaagauu

SEQ ID NO: 1730656 - RNA, 19 nt, Homo sapiens
  misc_RNA (1)...(19): siRNA sense strand
ggagcucagccacauauga

SEQ ID NO: 1730657 - RNA, 19 nt, Homo sapiens
  misc_RNA (1)...(19): siRNA sense strand
caauggcucugaguaaauc

SEQ ID NO: 1730658 - RNA, 19 nt, Homo sapiens
  misc_RNA (1)...(19): siRNA sense strand
ugaaaugaaaucacacuug

SEQ ID NO: 1730659 - RNA, 19 nt, Homo sapiens
  misc_RNA (1)...(19): siRNA sense strand
ugacuucuguucuuucaag

SEQ ID NO: 1730660 - RNA, 19 nt, Homo sapiens
  misc_RNA (1)...(19): siRNA sense strand
aacaagagguagaacaaau

SEQ ID NO: 1730661 - RNA, 19 nt, Homo sapiens
  misc_RNA (1)...(19): siRNA sense strand
ggaauaaauacacuaagca

SEQ ID NO: 1730662 - RNA, 19 nt, Homo sapiens
  misc_RNA (1)...(19): siRNA sense strand
ccagauugcucggcagaug

SEQ ID NO: 1730663 - RNA, 19 nt, Homo sapiens
  misc_RNA (1)...(19): siRNA sense strand
uacgauacucucaagauua

SEQ ID NO: 1730664 - RNA, 19 nt, Homo sapiens
  misc_RNA (1)...(19): siRNA sense strand
gaccauuuacaacaugaua

SEQ ID NO: 1730665 - RNA, 19 nt, Homo sapiens
  misc_RNA (1)...(19): siRNA sense strand
ucaaauggcaggaguucuu

SEQ ID NO: 1730666 - RNA, 19 nt, Homo sapiens
  misc_RNA (1)...(19): siRNA sense strand
cauaugaauuggcccugaa

SEQ ID NO: 1730667 - RNA, 19 nt, Homo sapiens
  misc_RNA (1)...(19): siRNA sense strand
gaaaagaaugccaaaauag

SEQ ID NO: 1730668 - RNA, 19 nt, Homo sapiens
  misc_RNA (1)...(19): siRNA sense strand
aaccuggaguuuccugaua

SEQ ID NO: 1730669 - RNA, 19 nt, Homo sapiens
  misc_RNA (1)...(19): siRNA sense strand
uaucaaacaaggacacuga

SEQ ID NO: 1730670 - RNA, 19 nt, Homo sapiens
  misc_RNA (1)...(19): siRNA sense strand
gaagacuuuaccuuaauga

SEQ ID NO: 1730671 - RNA, 19 nt, Homo sapiens
  misc_RNA (1)...(19): siRNA sense strand
agagagagguaugugcaaa

SEQ ID NO: 1730672 - RNA, 19 nt, Homo sapiens
  misc_RNA (1)...(19): siRNA sense strand
uauaggaguugcgcgauug

SEQ ID NO: 1730673 - RNA, 19 nt, Homo sapiens
  misc_RNA (1)...(19): siRNA sense strand
gaugguaaacuugcugauu

SEQ ID NO: 1730674 - RNA, 19 nt, Homo sapiens
  misc_RNA (1)...(19): siRNA sense strand
cuuccaaguuugauuaguu

SEQ ID NO: 1730675 - RNA, 19 nt, Homo sapiens
  misc_RNA (1)...(19): siRNA sense strand
gacauuuuauccccuaaua

SEQ ID NO: 1730676 - RNA, 19 nt, Homo sapiens
  misc_RNA (1)...(19): siRNA sense strand
guaccaauacuccagcuau

SEQ ID NO: 1730677 - RNA, 19 nt, Homo sapiens
  misc_RNA (1)...(19): siRNA sense strand
gagaaaggauggagaauga

SEQ ID NO: 1730678 - RNA, 19 nt, Homo sapiens
  misc_RNA (1)...(19): siRNA sense strand
ggagaaacuuagugaauaa

SEQ ID NO: 1730679 - RNA, 19 nt, Homo sapiens
  misc_RNA (1)...(19): siRNA sense strand
gaagauaggcaaugaaauu

SEQ ID NO: 1730680 - RNA, 19 nt, Homo sapiens
  misc_RNA (1)...(19): siRNA sense strand
caaggaaguuguaccaaua

SEQ ID NO: 1730681 - RNA, 19 nt, Homo sapiens
  misc_RNA (1)...(19): siRNA sense strand
ggaaaagaaugccaaaaua

SEQ ID NO: 1730682 - RNA, 19 nt, Homo sapiens
  misc_RNA (1)...(19): siRNA sense strand
ggacaaugguuacuccaaa

SEQ ID NO: 1730683 - RNA, 19 nt, Homo sapiens
  misc_RNA (1)...(19): siRNA sense strand
ggaggaaagugcugagaaa

SEQ ID NO: 1730684 - RNA, 19 nt, Homo sapiens
  misc_RNA (1)...(19): siRNA sense strand
gcaaaugcuugaccagauu

SEQ ID NO: 1730685 - RNA, 19 nt, Homo sapiens
  misc_RNA (1)...(19): siRNA sense strand
gaacagaccauuuacaaca

SEQ ID NO: 1730686 - RNA, 19 nt, Homo sapiens
  misc_RNA (1)...(19): siRNA sense strand
gcacaaacuacuacauaua

SEQ ID NO: 1730687 - RNA, 19 nt, Homo sapiens
  misc_RNA (1)...(19): siRNA sense strand
gaaaggagucuaaagaaga

SEQ ID NO: 1730688 - RNA, 19 nt, Homo sapiens
  misc_RNA (1)...(19): siRNA sense strand
gcuagaagacuuuaccuua

SEQ ID NO: 1730689 - RNA, 19 nt, Homo sapiens
  misc_RNA (1)...(19): siRNA sense strand
ggcagaagauccugaauga

SEQ ID NO: 1730690 - RNA, 19 nt, Homo sapiens
  misc_RNA (1)...(19): siRNA sense strand
gaaaggauggagaaugaua

SEQ ID NO: 1730691 - RNA, 19 nt, Homo sapiens
  misc_RNA (1)...(19): siRNA sense strand
caacgaagaugcacaaacu

SEQ ID NO: 1730692 - RNA, 19 nt, Homo sapiens
  misc_RNA (1)...(19): siRNA sense strand
gaagucaggucagcagaaa

SEQ ID NO: 1730693 - RNA, 19 nt, Homo sapiens
  misc_RNA (1)...(19): siRNA sense strand
uaacaacgguaacauugaa

SEQ ID NO: 1730694 - RNA, 19 nt, Homo sapiens
  misc_RNA (1)...(19): siRNA sense strand
cuagaagacuuuaccuuaa

SEQ ID NO: 1730695 - RNA, 19 nt, Homo sapiens
  misc_RNA (1)...(19): siRNA sense strand
gaaaucacacuuggauaua

SEQ ID NO: 1730696 - RNA, 19 nt, Homo sapiens
  misc_RNA (1)...(19): siRNA sense strand
gauggagaaugauaugaaa

SEQ ID NO: 1730697 - RNA, 19 nt, Homo sapiens
  misc_RNA (1)...(19): siRNA sense strand
ugagaaacaugauauagga

SEQ ID NO: 1730698 - RNA, 19 nt, Homo sapiens
  misc_RNA (1)...(19): siRNA sense strand
caagaaaggagucuaaaga

SEQ ID NO: 1730699 - RNA, 19 nt, Homo sapiens
  misc_RNA (1)...(19): siRNA sense strand
gaaggugauugaaagaaau

SEQ ID NO: 1730700 - RNA, 19 nt, Homo sapiens
  misc_RNA (1)...(19): siRNA sense strand
ggcaggaguucuucaauga

SEQ ID NO: 1730701 - RNA, 19 nt, Homo sapiens
  misc_RNA (1)...(19): siRNA sense strand
gaagaugcacaaacuacua

SEQ ID NO: 1730702 - RNA, 19 nt, Homo sapiens
  misc_RNA (1)...(19): siRNA sense strand
agaaggaacagaccauuua

SEQ ID NO: 1730703 - RNA, 19 nt, Homo sapiens
  misc_RNA (1)...(19): siRNA sense strand
gaaacaugauauaggaguu

SEQ ID NO: 1730704 - RNA, 19 nt, Homo sapiens
  misc_RNA (1)...(19): siRNA sense strand
ggaaagugcugagaaacau

SEQ ID NO: 1730705 - RNA, 19 nt, Homo sapiens
  misc_RNA (1)...(19): siRNA sense strand
uggagaaacuuagugaaua

SEQ ID NO: 1730706 - RNA, 19 nt, Homo sapiens
  misc_RNA (1)...(19): siRNA sense strand
cgauugaacugacaaggaa

SEQ ID NO: 1730707 - RNA, 19 nt, Homo sapiens
  misc_RNA (1)...(19): siRNA sense strand
gaugugaaauuaacaaagg

SEQ ID NO: 1730708 - RNA, 19 nt, Homo sapiens
  misc_RNA (1)...(19): siRNA sense strand
uaacaugauucaacaaugg

SEQ ID NO: 1730709 - RNA, 19 nt, Homo sapiens
  misc_RNA (1)...(19): siRNA sense strand
ugaaggugauugaaagaaa

SEQ ID NO: 1730710 - RNA, 19 nt, Homo sapiens
  misc_RNA (1)...(19): siRNA sense strand
cagaagauccugaaugaga

SEQ ID NO: 1730711 - RNA, 19 nt, Homo sapiens
  misc_RNA (1)...(19): siRNA sense strand
gaggagaaguuugaagaug

SEQ ID NO: 1730712 - RNA, 19 nt, Homo sapiens
  misc_RNA (1)...(19): siRNA sense strand
gacaguacauggaggaaau

SEQ ID NO: 1730713 - RNA, 19 nt, Homo sapiens
  misc_RNA (1)...(19): siRNA sense strand
gcagaugauugauuucuac

SEQ ID NO: 1730714 - RNA, 19 nt, Homo sapiens
  misc_RNA (1)...(19): siRNA sense strand
ggagcuagaugcgauugaa

SEQ ID NO: 1730715 - RNA, 19 nt, Homo sapiens
  misc_RNA (1)...(19): siRNA sense strand
agagagggcugguguggaa

SEQ ID NO: 1730716 - RNA, 19 nt, Homo sapiens
  misc_RNA (1)...(19): siRNA sense strand
acaaagacuugguaacuca

SEQ ID NO: 1730717 - RNA, 19 nt, Homo sapiens
  misc_RNA (1)...(19): siRNA sense strand
gauuaguucucuugacuuc

SEQ ID NO: 1730718 - RNA, 19 nt, Homo sapiens
  misc_RNA (1)...(19): siRNA sense strand
cauauuggcuagaagacuu

SEQ ID NO: 1730719 - RNA, 19 nt, Homo sapiens
  misc_RNA (1)...(19): siRNA sense strand
ugaaugaugugauggauac

SEQ ID NO: 1730720 - RNA, 19 nt, Homo sapiens
  misc_RNA (1)...(19): siRNA sense strand
gaaauuaacaacgguaaca

SEQ ID NO: 1730721 - RNA, 19 nt, Homo sapiens
  misc_RNA (1)...(19): siRNA sense strand
ccaaaauucuuccaaguuu

SEQ ID NO: 1730722 - RNA, 19 nt, Homo sapiens
  misc_RNA (1)...(19): siRNA sense strand
aggaugggcuuaucaaaug

SEQ ID NO: 1730723 - RNA, 19 nt, Homo sapiens
  misc_RNA (1)...(19): siRNA sense strand
ccacaaggauuuggcacaa

SEQ ID NO: 1730724 - RNA, 19 nt, Homo sapiens
  misc_RNA (1)...(19): siRNA sense strand
gcagaaaauuccucaaaau

SEQ ID NO: 1730725 - RNA, 19 nt, Homo sapiens
  misc_RNA (1)...(19): siRNA sense strand
gaacugaccagggaacugu

SEQ ID NO: 1730726 - RNA, 19 nt, Homo sapiens
  misc_RNA (1)...(19): siRNA sense strand
gaaguuugaagaugcauau

SEQ ID NO: 1730727 - RNA, 19 nt, Homo sapiens
  misc_RNA (1)...(19): siRNA sense strand
gauaggcaaugaaauuaac

SEQ ID NO: 1730728 - RNA, 19 nt, Homo sapiens
  misc_RNA (1)...(19): siRNA sense strand
ugaaaucacacuuggauau

SEQ ID NO: 1730729 - RNA, 19 nt, Homo sapiens
  misc_RNA (1)...(19): siRNA sense strand
gggauguucuacugucaaa

SEQ ID NO: 1730730 - RNA, 19 nt, Homo sapiens
  misc_RNA (1)...(19): siRNA sense strand
cacuaagcauuucaucaua

SEQ ID NO: 1730731 - RNA, 19 nt, Homo sapiens
  misc_RNA (1)...(19): siRNA sense strand
gagcucagccacauaugaa

SEQ ID NO: 1730732 - RNA, 19 nt, Homo sapiens
  misc_RNA (1)...(19): siRNA sense strand
uugcagaaguugacacaaa

SEQ ID NO: 1730733 - RNA, 19 nt, Homo sapiens
  misc_RNA (1)...(19): siRNA sense strand
ccacauggaugaguuacau

SEQ ID NO: 1730734 - RNA, 19 nt, Homo sapiens
  misc_RNA (1)...(19): siRNA sense strand
ggauggagaaugauaugaa

SEQ ID NO: 1730735 - RNA, 19 nt, Homo sapiens
  misc_RNA (1)...(19): siRNA sense strand
agaagaagaacaacaagaa

SEQ ID NO: 1730736 - RNA, 19 nt, Homo sapiens
  misc_RNA (1)...(19): siRNA sense strand
ggagaaguuugaagaugca

SEQ ID NO: 1730737 - RNA, 19 nt, Homo sapiens
  misc_RNA (1)...(19): siRNA sense strand
ggcagaugauugauuucua

SEQ ID NO: 1730738 - RNA, 19 nt, Homo sapiens
  misc_RNA (1)...(19): siRNA sense strand
caacuuuacugaccaagac

SEQ ID NO: 1730739 - RNA, 19 nt, Homo sapiens
  misc_RNA (1)...(19): siRNA sense strand
augguaaacuugcugauuu

SEQ ID NO: 1730740 - RNA, 19 nt, Homo sapiens
  misc_RNA (1)...(19): siRNA sense strand
gcaccacauggaugaguua

SEQ ID NO: 1730741 - RNA, 19 nt, Homo sapiens
  misc_RNA (1)...(19): siRNA sense strand
gaauauacaggaccaacga

SEQ ID NO: 1730742 - RNA, 19 nt, Homo sapiens
  misc_RNA (1)...(19): siRNA sense strand
agaagauccugaaugagaa

SEQ ID NO: 1730743 - RNA, 19 nt, Homo sapiens
  misc_RNA (1)...(19): siRNA sense strand
gaacaaauggaagagucua

SEQ ID NO: 1730744 - RNA, 19 nt, Homo sapiens
  misc_RNA (1)...(19): siRNA sense strand
gaagaaggaacagaccauu

SEQ ID NO: 1730745 - RNA, 19 nt, Homo sapiens
  misc_RNA (1)...(19): siRNA sense strand
cugaagaccuugcacuguu

SEQ ID NO: 1730746 - RNA, 19 nt, Homo sapiens
  misc_RNA (1)...(19): siRNA sense strand
caaacaaggacacugaaga

SEQ ID NO: 1730747 - RNA, 19 nt, Homo sapiens
  misc_RNA (1)...(19): siRNA sense strand
uaaacaagagguagaacaa

SEQ ID NO: 1730748 - RNA, 19 nt, Homo sapiens
  misc_RNA (1)...(19): siRNA sense strand
gcaauggcucugaguaaau

SEQ ID NO: 1730749 - RNA, 19 nt, Homo sapiens
  misc_RNA (1)...(19): siRNA sense strand
aaaccuuacugguauuguu

SEQ ID NO: 1730750 - RNA, 19 nt, Homo sapiens
  misc_RNA (1)...(19): siRNA sense strand
uguuaaaccuuacugguau

SEQ ID NO: 1730751 - RNA, 19 nt, Homo sapiens
  misc_RNA (1)...(19): siRNA sense strand
guacauggaggaaauuauc

SEQ ID NO: 1730752 - RNA, 19 nt, Homo sapiens
  misc_RNA (1)...(19): siRNA sense strand
ugaagaccuugcacuguug

SEQ ID NO: 1730753 - RNA, 19 nt, Homo sapiens
  misc_RNA (1)...(19): siRNA sense strand
agaaaggagucuaaagaag

SEQ ID NO: 1730754 - RNA, 19 nt, Homo sapiens
  misc_RNA (1)...(19): siRNA sense strand
gaacauaugcaggagaagu

SEQ ID NO: 1730755 - RNA, 19 nt, Homo sapiens
  misc_RNA (1)...(19): siRNA sense strand
caacaucuacagagaagga

SEQ ID NO: 1730756 - RNA, 19 nt, Homo sapiens
  misc_RNA (1)...(19): siRNA sense strand
cuacugaagaccuuuauga

SEQ ID NO: 1730757 - RNA, 19 nt, Homo sapiens
  misc_RNA (1)...(19): siRNA sense strand
guaaauccacuaacucaca

SEQ ID NO: 1730758 - RNA, 19 nt, Homo sapiens
  misc_RNA (1)...(19): siRNA sense strand
gaaguggcccagcugaaug

SEQ ID NO: 1730759 - RNA, 19 nt, Homo sapiens
  misc_RNA (1)...(19): siRNA sense strand
cuccaagcguauauauuua

SEQ ID NO: 1730760 - RNA, 19 nt, Homo sapiens
  misc_RNA (1)...(19): siRNA sense strand
ugaagaauggcaggaaaua

SEQ ID NO: 1730761 - RNA, 19 nt, Homo sapiens
  misc_RNA (1)...(19): siRNA sense strand
acgauacucucaagauuau

SEQ ID NO: 1730762 - RNA, 19 nt, Homo sapiens
  misc_RNA (1)...(19): siRNA sense strand
gaagauccugaaugagaaa

SEQ ID NO: 1730763 - RNA, 19 nt, Homo sapiens
  misc_RNA (1)...(19): siRNA sense strand
gaagaagaacaacaagaag

SEQ ID NO: 1730764 - RNA, 19 nt, Homo sapiens
  misc_RNA (1)...(19): siRNA sense strand
caucaagaaaggagucuaa

SEQ ID NO: 1730765 - RNA, 19 nt, Homo sapiens
  misc_RNA (1)...(19): siRNA sense strand
gaauuagucaugacaucaa

SEQ ID NO: 1730766 - RNA, 19 nt, Homo sapiens
  misc_RNA (1)...(19): siRNA sense strand
agaaguuacuggagguuga

SEQ ID NO: 1730767 - RNA, 19 nt, Homo sapiens
  misc_RNA (1)...(19): siRNA sense strand
cagcaauggcucugaguaa

SEQ ID NO: 1730768 - RNA, 19 nt, Homo sapiens
  misc_RNA (1)...(19): siRNA sense strand
acuccaagcguauauauuu

SEQ ID NO: 1730769 - RNA, 19 nt, Homo sapiens
  misc_RNA (1)...(19): siRNA sense strand
auacgauacucucaagauu

SEQ ID NO: 1730770 - RNA, 19 nt, Homo sapiens
  misc_RNA (1)...(19): siRNA sense strand
aacaagagguagaacaaau

SEQ ID NO: 1730771 - RNA, 19 nt, Homo sapiens
  misc_RNA (1)...(19): siRNA sense strand
caagaugaaagagaaguaa

SEQ ID NO: 1730772 - RNA, 19 nt, Homo sapiens
  misc_RNA (1)...(19): siRNA sense strand
cuagaggaauuagucauga

SEQ ID NO: 1730773 - RNA, 19 nt, Homo sapiens
  misc_RNA (1)...(19): siRNA sense strand
ugaagaugcauaugagaaa

SEQ ID NO: 1730774 - RNA, 19 nt, Homo sapiens
  misc_RNA (1)...(19): siRNA sense strand
caauggcucugaguaaauc

SEQ ID NO: 1730775 - RNA, 19 nt, Homo sapiens
  misc_RNA (1)...(19): siRNA sense strand
ugaaaugaaaucacacuug

SEQ ID NO: 1730776 - RNA, 19 nt, Homo sapiens
  misc_RNA (1)...(19): siRNA sense strand
ugacuucuguucuuucaag

SEQ ID NO: 1730777 - RNA, 19 nt, Homo sapiens
  misc_RNA (1)...(19): siRNA sense strand
gcaagaagcuccugaugga

SEQ ID NO: 1730778 - RNA, 19 nt, Homo sapiens
  misc_RNA (1)...(19): siRNA sense strand
gcaaagagaagaauuagaa

SEQ ID NO: 1730779 - RNA, 19 nt, Homo sapiens
  misc_RNA (1)...(19): siRNA sense strand
gaaggaagguguuuaugau

SEQ ID NO: 1730780 - RNA, 19 nt, Homo sapiens
  misc_RNA (1)...(19): siRNA sense strand
gaagcaaagagaagaauua

SEQ ID NO: 1730781 - RNA, 19 nt, Homo sapiens
  misc_RNA (1)...(19): siRNA sense strand
caaaggacauuacagauca

SEQ ID NO: 1730782 - RNA, 19 nt, Homo sapiens
  misc_RNA (1)...(19): siRNA sense strand
ggaagaggauguugaagau

SEQ ID NO: 1730783 - RNA, 19 nt, Homo sapiens
  misc_RNA (1)...(19): siRNA sense strand
gcaaagaaacguuuaagga

SEQ ID NO: 1730784 - RNA, 19 nt, Homo sapiens
  misc_RNA (1)...(19): siRNA sense strand
gaaagacuccagaaagaaa

SEQ ID NO: 1730785 - RNA, 19 nt, Homo sapiens
  misc_RNA (1)...(19): siRNA sense strand
caugaaauauccuacauug

SEQ ID NO: 1730786 - RNA, 19 nt, Homo sapiens
  misc_RNA (1)...(19): siRNA sense strand
gaaauauccuacauugcaa

SEQ ID NO: 1730787 - RNA, 19 nt, Homo sapiens
  misc_RNA (1)...(19): siRNA sense strand
guacaaagccaaauugauc

SEQ ID NO: 1730788 - RNA, 19 nt, Homo sapiens
  misc_RNA (1)...(19): siRNA sense strand
gcccaguggugauaauaua

SEQ ID NO: 1730789 - RNA, 19 nt, Homo sapiens
  misc_RNA (1)...(19): siRNA sense strand
aagaaagacuccagaaaga

SEQ ID NO: 1730790 - RNA, 19 nt, Homo sapiens
  misc_RNA (1)...(19): siRNA sense strand
gugcagauguguuuaguuc

SEQ ID NO: 1730791 - RNA, 19 nt, Homo sapiens
  misc_RNA (1)...(19): siRNA sense strand
gaucgggauugaugaaguu

SEQ ID NO: 1730792 - RNA, 19 nt, Homo sapiens
  misc_RNA (1)...(19): siRNA sense strand
agacgacugugaugacuuu

SEQ ID NO: 1730793 - RNA, 19 nt, Homo sapiens
  misc_RNA (1)...(19): siRNA sense strand
gcaaaggacauuacagauc

SEQ ID NO: 1730794 - RNA, 19 nt, Homo sapiens
  misc_RNA (1)...(19): siRNA sense strand
cagaggccuucuccaguua

SEQ ID NO: 1730795 - RNA, 19 nt, Homo sapiens
  misc_RNA (1)...(19): siRNA sense strand
uaagugcugugacccaauu

SEQ ID NO: 1730796 - RNA, 19 nt, Homo sapiens
  misc_RNA (1)...(19): siRNA sense strand
ccaaauugaucgggauuga

SEQ ID NO: 1730797 - RNA, 19 nt, Homo sapiens
  misc_RNA (1)...(19): siRNA sense strand
ucacaggccucauccaaca

SEQ ID NO: 1730798 - RNA, 19 nt, Homo sapiens
  misc_RNA (1)...(19): siRNA sense strand
caagaaagacuccagaaag

SEQ ID NO: 1730799 - RNA, 19 nt, Homo sapiens
  misc_RNA (1)...(19): siRNA sense strand
ucagaggccuucuccaguu

SEQ ID NO: 1730800 - RNA, 19 nt, Homo sapiens
  misc_RNA (1)...(19): siRNA sense strand
caaagaaacguuuaaggau

SEQ ID NO: 1730801 - RNA, 19 nt, Homo sapiens
  misc_RNA (1)...(19): siRNA sense strand
cacaaacuguuaugccuuu

SEQ ID NO: 1730802 - RNA, 19 nt, Homo sapiens
  misc_RNA (1)...(19): siRNA sense strand
agacagagcucuccaucca

SEQ ID NO: 1730803 - RNA, 19 nt, Homo sapiens
  misc_RNA (1)...(19): siRNA sense strand
ggaagguguuuaugaugug

SEQ ID NO: 1730804 - RNA, 19 nt, Homo sapiens
  misc_RNA (1)...(19): siRNA sense strand
caacagugauccauuuggu

SEQ ID NO: 1730805 - RNA, 19 nt, Homo sapiens
  misc_RNA (1)...(19): siRNA sense strand
acagagcucuccauccaaa

SEQ ID NO: 1730806 - RNA, 19 nt, Homo sapiens
  misc_RNA (1)...(19): siRNA sense strand
gaaggaagggaaucacaga

SEQ ID NO: 1730807 - RNA, 19 nt, Homo sapiens
  misc_RNA (1)...(19): siRNA sense strand
ugaaauauccuacauugca

SEQ ID NO: 1730808 - RNA, 19 nt, Homo sapiens
  misc_RNA (1)...(19): siRNA sense strand
gaucacaggccucauccaa

SEQ ID NO: 1730809 - RNA, 19 nt, Homo sapiens
  misc_RNA (1)...(19): siRNA sense strand
caacugagacagaacuuca

SEQ ID NO: 1730810 - RNA, 19 nt, Homo sapiens
  misc_RNA (1)...(19): siRNA sense strand
gauaagcagugugaacaag

SEQ ID NO: 1730811 - RNA, 19 nt, Homo sapiens
  misc_RNA (1)...(19): siRNA sense strand
ccagugauccuaccacaga

SEQ ID NO: 1730812 - RNA, 19 nt, Homo sapiens
  misc_RNA (1)...(19): siRNA sense strand
ccaagaaagacuccagaaa

SEQ ID NO: 1730813 - RNA, 19 nt, Homo sapiens
  misc_RNA (1)...(19): siRNA sense strand
guuuaaggauuuccagaug

SEQ ID NO: 1730814 - RNA, 19 nt, Homo sapiens
  misc_RNA (1)...(19): siRNA sense strand
caaguuaugucaagauucc

SEQ ID NO: 1730815 - RNA, 19 nt, Homo sapiens
  misc_RNA (1)...(19): siRNA sense strand
agaaggaagguguuuauga

SEQ ID NO: 1730816 - RNA, 19 nt, Homo sapiens
  misc_RNA (1)...(19): siRNA sense strand
ugucaagauuccaugauga

SEQ ID NO: 1730817 - RNA, 19 nt, Homo sapiens
  misc_RNA (1)...(19): siRNA sense strand
acagauuuguggccauaaa

SEQ ID NO: 1730818 - RNA, 19 nt, Homo sapiens
  misc_RNA (1)...(19): siRNA sense strand
gugaagccacuuugauaaa

SEQ ID NO: 1730819 - RNA, 19 nt, Homo sapiens
  misc_RNA (1)...(19): siRNA sense strand
aaagaaggaagguguuuau

SEQ ID NO: 1730820 - RNA, 19 nt, Homo sapiens
  misc_RNA (1)...(19): siRNA sense strand
gaaacucaagggcguuguu

SEQ ID NO: 1730821 - RNA, 19 nt, Homo sapiens
  misc_RNA (1)...(19): siRNA sense strand
caaaggagaacacaaacag

SEQ ID NO: 1730822 - RNA, 19 nt, Homo sapiens
  misc_RNA (1)...(19): siRNA sense strand
gaauugaagcaaagagaag

SEQ ID NO: 1730823 - RNA, 19 nt, Homo sapiens
  misc_RNA (1)...(19): siRNA sense strand
accaguacauuguguuuga

SEQ ID NO: 1730824 - RNA, 19 nt, Homo sapiens
  misc_RNA (1)...(19): siRNA sense strand
ggauaagcagugugaacaa

SEQ ID NO: 1730825 - RNA, 19 nt, Homo sapiens
  misc_RNA (1)...(19): siRNA sense strand
aagauccuguguaccagua

SEQ ID NO: 1730826 - RNA, 19 nt, Homo sapiens
  misc_RNA (1)...(19): siRNA sense strand
aggaagguguuuaugaugu

SEQ ID NO: 1730827 - RNA, 19 nt, Homo sapiens
  misc_RNA (1)...(19): siRNA sense strand
gaaaaccagcgccaagaaa

SEQ ID NO: 1730828 - RNA, 19 nt, Homo sapiens
  misc_RNA (1)...(19): siRNA sense strand
ggagcccaguggugauaau

SEQ ID NO: 1730829 - RNA, 19 nt, Homo sapiens
  misc_RNA (1)...(19): siRNA sense strand
uuugacaucucccaguuga

SEQ ID NO: 1730830 - RNA, 19 nt, Homo sapiens
  misc_RNA (1)...(19): siRNA sense strand
aaagagguuuaaaggugaa

SEQ ID NO: 1730831 - RNA, 19 nt, Homo sapiens
  misc_RNA (1)...(19): siRNA sense strand
uggaagaggauguugaaga

SEQ ID NO: 1730832 - RNA, 19 nt, Homo sapiens
  misc_RNA (1)...(19): siRNA sense strand
ugacaucucccaguugaau

SEQ ID NO: 1730833 - RNA, 19 nt, Homo sapiens
  misc_RNA (1)...(19): siRNA sense strand
aaggagaacacaaacagaa

SEQ ID NO: 1730834 - RNA, 19 nt, Homo sapiens
  misc_RNA (1)...(19): siRNA sense strand
gagcccaguggugauaaua

SEQ ID NO: 1730835 - RNA, 19 nt, Homo sapiens
  misc_RNA (1)...(19): siRNA sense strand
cgacaagcccaggcagaaa

SEQ ID NO: 1730836 - RNA, 19 nt, Homo sapiens
  misc_RNA (1)...(19): siRNA sense strand
aaauugaucgggauugaug

SEQ ID NO: 1730837 - RNA, 19 nt, Homo sapiens
  misc_RNA (1)...(19): siRNA sense strand
agaaagacuccagaaagaa

SEQ ID NO: 1730838 - RNA, 19 nt, Homo sapiens
  misc_RNA (1)...(19): siRNA sense strand
uuucggcacugcugcugua

SEQ ID NO: 1730839 - RNA, 19 nt, Homo sapiens
  misc_RNA (1)...(19): siRNA sense strand
ugaauugaagcaaagagaa

SEQ ID NO: 1730840 - RNA, 19 nt, Homo sapiens
  misc_RNA (1)...(19): siRNA sense strand
ggcugaaccuguuauucug

SEQ ID NO: 1730841 - RNA, 19 nt, Homo sapiens
  misc_RNA (1)...(19): siRNA sense strand
gaacacaaacagaaaaucu

SEQ ID NO: 1730842 - RNA, 19 nt, Homo sapiens
  misc_RNA (1)...(19): siRNA sense strand
auccaacagugauccauuu

SEQ ID NO: 1730843 - RNA, 19 nt, Homo sapiens
  misc_RNA (1)...(19): siRNA sense strand
caagcuguguaccagacaa

SEQ ID NO: 1730844 - RNA, 19 nt, Homo sapiens
  misc_RNA (1)...(19): siRNA sense strand
guuuaguucuguaccuuuc

SEQ ID NO: 1730845 - RNA, 19 nt, Homo sapiens
  misc_RNA (1)...(19): siRNA sense strand
gagugcagauguguuuagu

SEQ ID NO: 1730846 - RNA, 19 nt, Homo sapiens
  misc_RNA (1)...(19): siRNA sense strand
guaccagacaauauuggaa

SEQ ID NO: 1730847 - RNA, 19 nt, Homo sapiens
  misc_RNA (1)...(19): siRNA sense strand
gacaauauuggaagaggau

SEQ ID NO: 1730848 - RNA, 19 nt, Homo sapiens
  misc_RNA (1)...(19): siRNA sense strand
aaaccagcgccaagaaaga

SEQ ID NO: 1730849 - RNA, 19 nt, Homo sapiens
  misc_RNA (1)...(19): siRNA sense strand
gguacaaagccaaauugau

SEQ ID NO: 1730850 - RNA, 19 nt, Homo sapiens
  misc_RNA (1)...(19): siRNA sense strand
cgacugugaugacuuugac

SEQ ID NO: 1730851 - RNA, 19 nt, Homo sapiens
  misc_RNA (1)...(19): siRNA sense strand
aagauuccaugaugaaacu

SEQ ID NO: 1730852 - RNA, 19 nt, Homo sapiens
  misc_RNA (1)...(19): siRNA sense strand
gucaagauuccaugaugaa

SEQ ID NO: 1730853 - RNA, 19 nt, Homo sapiens
  misc_RNA (1)...(19): siRNA sense strand
ccaaaggagaacacaaaca

SEQ ID NO: 1730854 - RNA, 19 nt, Homo sapiens
  misc_RNA (1)...(19): siRNA sense strand
gagcucuccauccaaauca

SEQ ID NO: 1730855 - RNA, 19 nt, Homo sapiens
  misc_RNA (1)...(19): siRNA sense strand
gugacccaauuagaacuuu

SEQ ID NO: 1730856 - RNA, 19 nt, Homo sapiens
  misc_RNA (1)...(19): siRNA sense strand
gcuguguaccagacaauau

SEQ ID NO: 1730857 - RNA, 19 nt, Homo sapiens
  misc_RNA (1)...(19): siRNA sense strand
ugaagcaaagagaagaauu

SEQ ID NO: 1730858 - RNA, 19 nt, Homo sapiens
  misc_RNA (1)...(19): siRNA sense strand
cggcugaaccuguuauucu

SEQ ID NO: 1730859 - RNA, 19 nt, Homo sapiens
  misc_RNA (1)...(19): siRNA sense strand
ggagaacacaaacagaaaa

SEQ ID NO: 1730860 - RNA, 19 nt, Homo sapiens
  misc_RNA (1)...(19): siRNA sense strand
uugcaaaggacauuacaga

SEQ ID NO: 1730861 - RNA, 19 nt, Homo sapiens
  misc_RNA (1)...(19): siRNA sense strand
gaagaggauguugaagauc

SEQ ID NO: 1730862 - RNA, 19 nt, Homo sapiens
  misc_RNA (1)...(19): siRNA sense strand
gccaagaaagacuccagaa

SEQ ID NO: 1730863 - RNA, 19 nt, Homo sapiens
  misc_RNA (1)...(19): siRNA sense strand
gcagaaaaugggcaaagaa

SEQ ID NO: 1730864 - RNA, 19 nt, Homo sapiens
  misc_RNA (1)...(19): siRNA sense strand
uguugaagauccuguguac

SEQ ID NO: 1730865 - RNA, 19 nt, Homo sapiens
  misc_RNA (1)...(19): siRNA sense strand
gaaacggaagaaaacauuu

SEQ ID NO: 1730866 - RNA, 19 nt, Homo sapiens
  misc_RNA (1)...(19): siRNA sense strand
caagauuccaugaugaaac

SEQ ID NO: 1730867 - RNA, 19 nt, Homo sapiens
  misc_RNA (1)...(19): siRNA sense strand
gggaaggaagggaaucaca

SEQ ID NO: 1730868 - RNA, 19 nt, Homo sapiens
  misc_RNA (1)...(19): siRNA sense strand
ugaucgggauugaugaagu

SEQ ID NO: 1730869 - RNA, 19 nt, Homo sapiens
  misc_RNA (1)...(19): siRNA sense strand
ucgaccaacucaccuccaa

SEQ ID NO: 1730870 - RNA, 19 nt, Homo sapiens
  misc_RNA (1)...(19): siRNA sense strand
acaucucccaguugaauuu

SEQ ID NO: 1730871 - RNA, 19 nt, Homo sapiens
  misc_RNA (1)...(19): siRNA sense strand
uaagcagugugaacaagcu

SEQ ID NO: 1730872 - RNA, 19 nt, Homo sapiens
  misc_RNA (1)...(19): siRNA sense strand
gaucucuuucaacucauuu

SEQ ID NO: 1730873 - RNA, 19 nt, Homo sapiens
  misc_RNA (1)...(19): siRNA sense strand
cugcuguacccucagguua

SEQ ID NO: 1730874 - RNA, 19 nt, Homo sapiens
  misc_RNA (1)...(19): siRNA sense strand
cauccaacagugauccauu

SEQ ID NO: 1730875 - RNA, 19 nt, Homo sapiens
  misc_RNA (1)...(19): siRNA sense strand
gauccuaccacagaugaca

SEQ ID NO: 1730876 - RNA, 19 nt, Homo sapiens
  misc_RNA (1)...(19): siRNA sense strand
ggccuucuccaguuacuuc

SEQ ID NO: 1730877 - RNA, 19 nt, Homo sapiens
  misc_RNA (1)...(19): siRNA sense strand
gaauggagcccaaacagau

SEQ ID NO: 1730878 - RNA, 19 nt, Homo sapiens
  misc_RNA (1)...(19): siRNA sense strand
ggaccuccguagcgucuug

SEQ ID NO: 1730879 - RNA, 19 nt, Homo sapiens
  misc_RNA (1)...(19): siRNA sense strand
ugagccagcugcagagaau

SEQ ID NO: 1730880 - RNA, 19 nt, Homo sapiens
  misc_RNA (1)...(19): siRNA sense strand
caaaagagguacccauugg

SEQ ID NO: 1730881 - RNA, 19 nt, Homo sapiens
  misc_RNA (1)...(19): siRNA sense strand
aagagcugcuugacuguga

SEQ ID NO: 1730882 - RNA, 19 nt, Homo sapiens
  misc_RNA (1)...(19): siRNA sense strand
ccucauugaccaguauuua

SEQ ID NO: 1730883 - RNA, 19 nt, Homo sapiens
  misc_RNA (1)...(19): siRNA sense strand
gauggaguccuagcuguga

SEQ ID NO: 1730884 - RNA, 19 nt, Homo sapiens
  misc_RNA (1)...(19): siRNA sense strand
gacccucauugaccaguau

SEQ ID NO: 1730885 - RNA, 19 nt, Homo sapiens
  misc_RNA (1)...(19): siRNA sense strand
cauuggcgcucaaccgaau

SEQ ID NO: 1730886 - RNA, 19 nt, Homo sapiens
  misc_RNA (1)...(19): siRNA sense strand
caaguggagcggacacgaa

SEQ ID NO: 1730887 - RNA, 19 nt, Homo sapiens
  misc_RNA (1)...(19): siRNA sense strand
gagaauggagcccaaacag

SEQ ID NO: 1730888 - RNA, 19 nt, Homo sapiens
  misc_RNA (1)...(19): siRNA sense strand
cgaacagggucgagcuucu

SEQ ID NO: 1730889 - RNA, 19 nt, Homo sapiens
  misc_RNA (1)...(19): siRNA sense strand
gcagagaauggagcccaaa

SEQ ID NO: 1730890 - RNA, 19 nt, Homo sapiens
  misc_RNA (1)...(19): siRNA sense strand
gugaaggccgugcaacaug

SEQ ID NO: 1730891 - RNA, 19 nt, Homo sapiens
  misc_RNA (1)...(19): siRNA sense strand
gaacagggucgagcuucuc

SEQ ID NO: 1730892 - RNA, 19 nt, Homo sapiens
  misc_RNA (1)...(19): siRNA sense strand
cgaagcugccaguacugua

SEQ ID NO: 1730893 - RNA, 19 nt, Homo sapiens
  misc_RNA (1)...(19): siRNA sense strand
agaauggagcccaaacaga

SEQ ID NO: 1730894 - RNA, 19 nt, Homo sapiens
  misc_RNA (1)...(19): siRNA sense strand
caccagaagagcugcuuga

SEQ ID NO: 1730895 - RNA, 19 nt, Homo sapiens
  misc_RNA (1)...(19): siRNA sense strand
agacccucauugaccagua

SEQ ID NO: 1730896 - RNA, 19 nt, Homo sapiens
  misc_RNA (1)...(19): siRNA sense strand
ucauugaccaguauuuaag

SEQ ID NO: 1730897 - RNA, 19 nt, Homo sapiens
  misc_RNA (1)...(19): siRNA sense strand
cucauugaccaguauuuaa

SEQ ID NO: 1730898 - RNA, 19 nt, Homo sapiens
  misc_RNA (1)...(19): siRNA sense strand
gcuggacgaggaucucuuc

SEQ ID NO: 1730899 - RNA, 19 nt, Homo sapiens
  misc_RNA (1)...(19): siRNA sense strand
gacccuaaccuccaaaaga

SEQ ID NO: 1730900 - RNA, 19 nt, Homo sapiens
  misc_RNA (1)...(19): siRNA sense strand
ggaccuccguagcgucuug

SEQ ID NO: 1730901 - RNA, 19 nt, Homo sapiens
  misc_RNA (1)...(19): siRNA sense strand
caaguggagcggacacgaa

SEQ ID NO: 1730902 - RNA, 19 nt, Homo sapiens
  misc_RNA (1)...(19): siRNA sense strand
cgaacagggucgagcuucu

SEQ ID NO: 1730903 - RNA, 19 nt, Homo sapiens
  misc_RNA (1)...(19): siRNA sense strand
gugaaggccgugcaacaug

SEQ ID NO: 1730904 - RNA, 19 nt, Homo sapiens
  misc_RNA (1)...(19): siRNA sense strand
gaacagggucgagcuucuc

SEQ ID NO: 1730905 - RNA, 19 nt, Homo sapiens
  misc_RNA (1)...(19): siRNA sense strand
cgaagcugccaguacugua

SEQ ID NO: 1730906 - RNA, 19 nt, Homo sapiens
  misc_RNA (1)...(19): siRNA sense strand
caccagaagagcugcuuga

SEQ ID NO: 1730907 - RNA, 19 nt, Homo sapiens
  misc_RNA (1)...(19): siRNA sense strand
gcuggacgaggaucucuuc

SEQ ID NO: 1730908 - RNA, 19 nt, Homo sapiens
  misc_RNA (1)...(19): siRNA sense strand
gaauggagcccaaacagau

SEQ ID NO: 1730909 - RNA, 19 nt, Homo sapiens
  misc_RNA (1)...(19): siRNA sense strand
ggaccuccguagcgucuug

SEQ ID NO: 1730910 - RNA, 19 nt, Homo sapiens
  misc_RNA (1)...(19): siRNA sense strand
ugagccagcugcagagaau

SEQ ID NO: 1730911 - RNA, 19 nt, Homo sapiens
  misc_RNA (1)...(19): siRNA sense strand
caaaagagguacccauugg

SEQ ID NO: 1730912 - RNA, 19 nt, Homo sapiens
  misc_RNA (1)...(19): siRNA sense strand
aagagcugcuugacuguga

SEQ ID NO: 1730913 - RNA, 19 nt, Homo sapiens
  misc_RNA (1)...(19): siRNA sense strand
ccucauugaccaguauuua

SEQ ID NO: 1730914 - RNA, 19 nt, Homo sapiens
  misc_RNA (1)...(19): siRNA sense strand
gauggaguccuagcuguga

SEQ ID NO: 1730915 - RNA, 19 nt, Homo sapiens
  misc_RNA (1)...(19): siRNA sense strand
gacccucauugaccaguau

SEQ ID NO: 1730916 - RNA, 19 nt, Homo sapiens
  misc_RNA (1)...(19): siRNA sense strand
cauuggcgcucaaccgaau

SEQ ID NO: 1730917 - RNA, 19 nt, Homo sapiens
  misc_RNA (1)...(19): siRNA sense strand
caaguggagcggacacgaa

SEQ ID NO: 1730918 - RNA, 19 nt, Homo sapiens
  misc_RNA (1)...(19): siRNA sense strand
gagaauggagcccaaacag

SEQ ID NO: 1730919 - RNA, 19 nt, Homo sapiens
  misc_RNA (1)...(19): siRNA sense strand
cgaacagggucgagcuucu

SEQ ID NO: 1730920 - RNA, 19 nt, Homo sapiens
  misc_RNA (1)...(19): siRNA sense strand
gcagagaauggagcccaaa

SEQ ID NO: 1730921 - RNA, 19 nt, Homo sapiens
  misc_RNA (1)...(19): siRNA sense strand
gugaaggccgugcaacaug

SEQ ID NO: 1730922 - RNA, 19 nt, Homo sapiens
  misc_RNA (1)...(19): siRNA sense strand
gaacagggucgagcuucuc

SEQ ID NO: 1730923 - RNA, 19 nt, Homo sapiens
  misc_RNA (1)...(19): siRNA sense strand
cgaagcugccaguacugua

SEQ ID NO: 1730924 - RNA, 19 nt, Homo sapiens
  misc_RNA (1)...(19): siRNA sense strand
agaauggagcccaaacaga

SEQ ID NO: 1730925 - RNA, 19 nt, Homo sapiens
  misc_RNA (1)...(19): siRNA sense strand
caccagaagagcugcuuga

SEQ ID NO: 1730926 - RNA, 19 nt, Homo sapiens
  misc_RNA (1)...(19): siRNA sense strand
agacccucauugaccagua

SEQ ID NO: 1730927 - RNA, 19 nt, Homo sapiens
  misc_RNA (1)...(19): siRNA sense strand
ucauugaccaguauuuaag

SEQ ID NO: 1730928 - RNA, 19 nt, Homo sapiens
  misc_RNA (1)...(19): siRNA sense strand
cucauugaccaguauuuaa

SEQ ID NO: 1730929 - RNA, 19 nt, Homo sapiens
  misc_RNA (1)...(19): siRNA sense strand
gcuggacgaggaucucuuc

SEQ ID NO: 1730930 - RNA, 19 nt, Homo sapiens
  misc_RNA (1)...(19): siRNA sense strand
gacccuaaccuccaaaaga

SEQ ID NO: 1730931 - RNA, 19 nt, Homo sapiens
  misc_RNA (1)...(19): siRNA sense strand
ggagauacuucuacuggua

SEQ ID NO: 1730932 - RNA, 19 nt, Homo sapiens
  misc_RNA (1)...(19): siRNA sense strand
gggaaagacucguguuuga

SEQ ID NO: 1730933 - RNA, 19 nt, Homo sapiens
  misc_RNA (1)...(19): siRNA sense strand
gcuggaaggugaaccguua

SEQ ID NO: 1730934 - RNA, 19 nt, Homo sapiens
  misc_RNA (1)...(19): siRNA sense strand
gacaguaacuccuuagauc

SEQ ID NO: 1730935 - RNA, 19 nt, Homo sapiens
  misc_RNA (1)...(19): siRNA sense strand
ggaauccacuacacaguau

SEQ ID NO: 1730936 - RNA, 19 nt, Homo sapiens
  misc_RNA (1)...(19): siRNA sense strand
gaaaggagauacuucuacu

SEQ ID NO: 1730937 - RNA, 19 nt, Homo sapiens
  misc_RNA (1)...(19): siRNA sense strand
gacacaggcugcugggaua

SEQ ID NO: 1730938 - RNA, 19 nt, Homo sapiens
  misc_RNA (1)...(19): siRNA sense strand
gaucaaaggcccugugguu

SEQ ID NO: 1730939 - RNA, 19 nt, Homo sapiens
  misc_RNA (1)...(19): siRNA sense strand
ggaccaggauuauuacuac

SEQ ID NO: 1730940 - RNA, 19 nt, Homo sapiens
  misc_RNA (1)...(19): siRNA sense strand
gcccugagcucuuccgaau

SEQ ID NO: 1730941 - RNA, 19 nt, Homo sapiens
  misc_RNA (1)...(19): siRNA sense strand
cugaugggcuucaaugauu

SEQ ID NO: 1730942 - RNA, 19 nt, Homo sapiens
  misc_RNA (1)...(19): siRNA sense strand
aagcggagaucaagcgaaa

SEQ ID NO: 1730943 - RNA, 19 nt, Homo sapiens
  misc_RNA (1)...(19): siRNA sense strand
gcaaugaguccagcaucua

SEQ ID NO: 1730944 - RNA, 19 nt, Homo sapiens
  misc_RNA (1)...(19): siRNA sense strand
ccuguggguuugaugaaua

SEQ ID NO: 1730945 - RNA, 19 nt, Homo sapiens
  misc_RNA (1)...(19): siRNA sense strand
gggcuacgcugagacucua

SEQ ID NO: 1730946 - RNA, 19 nt, Homo sapiens
  misc_RNA (1)...(19): siRNA sense strand
gcacugcacacgcaacuuc

SEQ ID NO: 1730947 - RNA, 19 nt, Homo sapiens
  misc_RNA (1)...(19): siRNA sense strand
gagaccuucuucccugaaa

SEQ ID NO: 1730948 - RNA, 19 nt, Homo sapiens
  misc_RNA (1)...(19): siRNA sense strand
gcucuaucaugguuaacuu

SEQ ID NO: 1730949 - RNA, 19 nt, Homo sapiens
  misc_RNA (1)...(19): siRNA sense strand
uggcuguucucuacuguuu

SEQ ID NO: 1730950 - RNA, 19 nt, Homo sapiens
  misc_RNA (1)...(19): siRNA sense strand
uuacuucgcuguggacuuc

SEQ ID NO: 1730951 - RNA, 19 nt, Homo sapiens
  misc_RNA (1)...(19): siRNA sense strand
acccuucccucauuacuuu

SEQ ID NO: 1730952 - RNA, 19 nt, Homo sapiens
  misc_RNA (1)...(19): siRNA sense strand
gaucuccgucuucaucaaa

SEQ ID NO: 1730953 - RNA, 19 nt, Homo sapiens
  misc_RNA (1)...(19): siRNA sense strand
ccaugugccuggagaagau

SEQ ID NO: 1730954 - RNA, 19 nt, Homo sapiens
  misc_RNA (1)...(19): siRNA sense strand
gagcugaugggcuucaaug

SEQ ID NO: 1730955 - RNA, 19 nt, Homo sapiens
  misc_RNA (1)...(19): siRNA sense strand
ucaaagacuggauucugua

SEQ ID NO: 1730956 - RNA, 19 nt, Homo sapiens
  misc_RNA (1)...(19): siRNA sense strand
ccugagcucuuccgaaucu

SEQ ID NO: 1730957 - RNA, 19 nt, Homo sapiens
  misc_RNA (1)...(19): siRNA sense strand
uaucaugguuaacuuugug

SEQ ID NO: 1730958 - RNA, 19 nt, Homo sapiens
  misc_RNA (1)...(19): siRNA sense strand
gcacccagcucuccauccu

SEQ ID NO: 1730959 - RNA, 19 nt, Homo sapiens
  misc_RNA (1)...(19): siRNA sense strand
cggaauccacuacacagua

SEQ ID NO: 1730960 - RNA, 19 nt, Homo sapiens
  misc_RNA (1)...(19): siRNA sense strand
gggaccaggauuauuacua

SEQ ID NO: 1730961 - RNA, 19 nt, Homo sapiens
  misc_RNA (1)...(19): siRNA sense strand
caaagacuggauucuguau

SEQ ID NO: 1730962 - RNA, 19 nt, Homo sapiens
  misc_RNA (1)...(19): siRNA sense strand
ggcaaugaguccagcaucu

SEQ ID NO: 1730963 - RNA, 19 nt, Homo sapiens
  misc_RNA (1)...(19): siRNA sense strand
gguuggcucuaucaugguu

SEQ ID NO: 1730964 - RNA, 19 nt, Homo sapiens
  misc_RNA (1)...(19): siRNA sense strand
guaaggccgucaugguuuu

SEQ ID NO: 1730965 - RNA, 19 nt, Homo sapiens
  misc_RNA (1)...(19): siRNA sense strand
ccuuagaucucucagacau

SEQ ID NO: 1730966 - RNA, 19 nt, Homo sapiens
  misc_RNA (1)...(19): siRNA sense strand
gcauuaucgucauccuugu

SEQ ID NO: 1730967 - RNA, 19 nt, Homo sapiens
  misc_RNA (1)...(19): siRNA sense strand
cgaaaccauuggagagucu

SEQ ID NO: 1730968 - RNA, 19 nt, Homo sapiens
  misc_RNA (1)...(19): siRNA sense strand
gcugaugggcuucaaugau

SEQ ID NO: 1730969 - RNA, 19 nt, Homo sapiens
  misc_RNA (1)...(19): siRNA sense strand
gccuguaccucuucacucu

SEQ ID NO: 1730970 - RNA, 19 nt, Homo sapiens
  misc_RNA (1)...(19): siRNA sense strand
cugagacucuacuuugaug

SEQ ID NO: 1730971 - RNA, 19 nt, Homo sapiens
  misc_RNA (1)...(19): siRNA sense strand
ugagggcgaucuccgucuu

SEQ ID NO: 1730972 - RNA, 19 nt, Homo sapiens
  misc_RNA (1)...(19): siRNA sense strand
gcuggugucgugcacguuu

SEQ ID NO: 1730973 - RNA, 19 nt, Homo sapiens
  misc_RNA (1)...(19): siRNA sense strand
ugugguggcuguucucuac

SEQ ID NO: 1730974 - RNA, 19 nt, Homo sapiens
  misc_RNA (1)...(19): siRNA sense strand
ggaaagacucguguuugag

SEQ ID NO: 1730975 - RNA, 19 nt, Homo sapiens
  misc_RNA (1)...(19): siRNA sense strand
cgucauccuugugcagaaa

SEQ ID NO: 1730976 - RNA, 19 nt, Homo sapiens
  misc_RNA (1)...(19): siRNA sense strand
gcugcugggauaugaauga

SEQ ID NO: 1730977 - RNA, 19 nt, Homo sapiens
  misc_RNA (1)...(19): siRNA sense strand
acaggcugcugggauauga

SEQ ID NO: 1730978 - RNA, 19 nt, Homo sapiens
  misc_RNA (1)...(19): siRNA sense strand
uguaaggccgucaugguuu

SEQ ID NO: 1730979 - RNA, 19 nt, Homo sapiens
  misc_RNA (1)...(19): siRNA sense strand
uggguuugaugaauaugaa

SEQ ID NO: 1730980 - RNA, 19 nt, Homo sapiens
  misc_RNA (1)...(19): siRNA sense strand
cccagagaaugucagcaaa

SEQ ID NO: 1730981 - RNA, 19 nt, Homo sapiens
  misc_RNA (1)...(19): siRNA sense strand
augguuaacuuugugcuuu

SEQ ID NO: 1730982 - RNA, 19 nt, Homo sapiens
  misc_RNA (1)...(19): siRNA sense strand
gcucuguggugggugauca

SEQ ID NO: 1730983 - RNA, 19 nt, Homo sapiens
  misc_RNA (1)...(19): siRNA sense strand
ggaauguaaggccgucaug

SEQ ID NO: 1730984 - RNA, 19 nt, Homo sapiens
  misc_RNA (1)...(19): siRNA sense strand
caucaaagacuggauucug

SEQ ID NO: 1730985 - RNA, 19 nt, Homo sapiens
  misc_RNA (1)...(19): siRNA sense strand
ugacaguaacuccuuagau

SEQ ID NO: 1730986 - RNA, 19 nt, Homo sapiens
  misc_RNA (1)...(19): siRNA sense strand
cgcugagacucuacuuuga

SEQ ID NO: 1730987 - RNA, 19 nt, Homo sapiens
  misc_RNA (1)...(19): siRNA sense strand
ggauuauuacuaccuguca

SEQ ID NO: 1730988 - RNA, 19 nt, Homo sapiens
  misc_RNA (1)...(19): siRNA sense strand
gaaaauggcgaagcuggaa

SEQ ID NO: 1730989 - RNA, 19 nt, Homo sapiens
  misc_RNA (1)...(19): siRNA sense strand
gcugagacucuacuuugau

SEQ ID NO: 1730990 - RNA, 19 nt, Homo sapiens
  misc_RNA (1)...(19): siRNA sense strand
ccauuggagagucugauuu

SEQ ID NO: 1730991 - RNA, 19 nt, Homo sapiens
  misc_RNA (1)...(19): siRNA sense strand
ccaacuacuucuggcuguu

SEQ ID NO: 1730992 - RNA, 19 nt, Homo sapiens
  misc_RNA (1)...(19): siRNA sense strand
aucaaagacuggauucugu

SEQ ID NO: 1730993 - RNA, 19 nt, Homo sapiens
  misc_RNA (1)...(19): siRNA sense strand
auuacuaccugucagugaa

SEQ ID NO: 1730994 - RNA, 19 nt, Homo sapiens
  misc_RNA (1)...(19): siRNA sense strand
ggaaggugaaccguuacuu

SEQ ID NO: 1730995 - RNA, 19 nt, Homo sapiens
  misc_RNA (1)...(19): siRNA sense strand
ugaugggcuucaaugauuc

SEQ ID NO: 1730996 - RNA, 19 nt, Homo sapiens
  misc_RNA (1)...(19): siRNA sense strand
acgcugagacucuacuuug

SEQ ID NO: 1730997 - RNA, 19 nt, Homo sapiens
  misc_RNA (1)...(19): siRNA sense strand
ugaaaggagauacuucuac

SEQ ID NO: 1730998 - RNA, 19 nt, Homo sapiens
  misc_RNA (1)...(19): siRNA sense strand
agaaggagcaagccaugug

SEQ ID NO: 1730999 - RNA, 19 nt, Homo sapiens
  misc_RNA (1)...(19): siRNA sense strand
aagacuggauucuguaugc

SEQ ID NO: 1731000 - RNA, 19 nt, Homo sapiens
  misc_RNA (1)...(19): siRNA sense strand
uggugacaguaacuccuua

SEQ ID NO: 1731001 - RNA, 19 nt, Homo sapiens
  misc_RNA (1)...(19): siRNA sense strand
cauucugacugcaucuuca

SEQ ID NO: 1731002 - RNA, 19 nt, Homo sapiens
  misc_RNA (1)...(19): siRNA sense strand
ggagaccuucuucccugaa

SEQ ID NO: 1731003 - RNA, 19 nt, Homo sapiens
  misc_RNA (1)...(19): siRNA sense strand
ggagaccgaaaccauugga

SEQ ID NO: 1731004 - RNA, 19 nt, Homo sapiens
  misc_RNA (1)...(19): siRNA sense strand
aagggaaagacucguguuu

SEQ ID NO: 1731005 - RNA, 19 nt, Homo sapiens
  misc_RNA (1)...(19): siRNA sense strand
gagggccaaugagcugaug

SEQ ID NO: 1731006 - RNA, 19 nt, Homo sapiens
  misc_RNA (1)...(19): siRNA sense strand
gcccugugguuggcucuau

SEQ ID NO: 1731007 - RNA, 19 nt, Homo sapiens
  misc_RNA (1)...(19): siRNA sense strand
gagcucuuccgaaucuuca

SEQ ID NO: 1731008 - RNA, 19 nt, Homo sapiens
  misc_RNA (1)...(19): siRNA sense strand
ggcgaucuccgucuucauc

SEQ ID NO: 1731009 - RNA, 19 nt, Homo sapiens
  misc_RNA (1)...(19): siRNA sense strand
uggccucccugcugacaau

SEQ ID NO: 1731010 - RNA, 19 nt, Homo sapiens
  misc_RNA (1)...(19): siRNA sense strand
aauccacuacacaguauuu

SEQ ID NO: 1731011 - RNA, 19 nt, Homo sapiens
  misc_RNA (1)...(19): siRNA sense strand
caacuacuucuggcuguuc

SEQ ID NO: 1731012 - RNA, 19 nt, Homo sapiens
  misc_RNA (1)...(19): siRNA sense strand
cgaucuccgucuucaucaa

SEQ ID NO: 1731013 - RNA, 19 nt, Homo sapiens
  misc_RNA (1)...(19): siRNA sense strand
gcauucugacugcaucuuc

SEQ ID NO: 1731014 - RNA, 19 nt, Homo sapiens
  misc_RNA (1)...(19): siRNA sense strand
gguccacccugcugcucau

SEQ ID NO: 1731015 - RNA, 19 nt, Homo sapiens
  misc_RNA (1)...(19): siRNA sense strand
ugaaccuguuugugucguu

SEQ ID NO: 1731016 - RNA, 19 nt, Homo sapiens
  misc_RNA (1)...(19): siRNA sense strand
gacaugggaggcaaugagu

SEQ ID NO: 1731017 - RNA, 19 nt, Homo sapiens
  misc_RNA (1)...(19): siRNA sense strand
gcaaauaacuugacguuua

SEQ ID NO: 1731018 - RNA, 19 nt, Homo sapiens
  misc_RNA (1)...(19): siRNA sense strand
caugacagcuuuauagaua

SEQ ID NO: 1731019 - RNA, 19 nt, Homo sapiens
  misc_RNA (1)...(19): siRNA sense strand
gaaggaauuuggccaguaa

SEQ ID NO: 1731020 - RNA, 19 nt, Homo sapiens
  misc_RNA (1)...(19): siRNA sense strand
gacaaggaaugcugaaaua

SEQ ID NO: 1731021 - RNA, 19 nt, Homo sapiens
  misc_RNA (1)...(19): siRNA sense strand
gcaaagacauuccaagcuu

SEQ ID NO: 1731022 - RNA, 19 nt, Homo sapiens
  misc_RNA (1)...(19): siRNA sense strand
gcaaaggagcuaccaguua

SEQ ID NO: 1731023 - RNA, 19 nt, Homo sapiens
  misc_RNA (1)...(19): siRNA sense strand
gauggaagcuucuuaaugg

SEQ ID NO: 1731024 - RNA, 19 nt, Homo sapiens
  misc_RNA (1)...(19): siRNA sense strand
guggaaagaucacauauug

SEQ ID NO: 1731025 - RNA, 19 nt, Homo sapiens
  misc_RNA (1)...(19): siRNA sense strand
uagaggaucuugugucuuu

SEQ ID NO: 1731026 - RNA, 19 nt, Homo sapiens
  misc_RNA (1)...(19): siRNA sense strand
cagagaaacuccagacaaa

SEQ ID NO: 1731027 - RNA, 19 nt, Homo sapiens
  misc_RNA (1)...(19): siRNA sense strand
cacaaagaauggugaaaua

SEQ ID NO: 1731028 - RNA, 19 nt, Homo sapiens
  misc_RNA (1)...(19): siRNA sense strand
gaaaacaucuuauggauca

SEQ ID NO: 1731029 - RNA, 19 nt, Homo sapiens
  misc_RNA (1)...(19): siRNA sense strand
gaugacagcauguugguua

SEQ ID NO: 1731030 - RNA, 19 nt, Homo sapiens
  misc_RNA (1)...(19): siRNA sense strand
gaaaucaguuacaccauca

SEQ ID NO: 1731031 - RNA, 19 nt, Homo sapiens
  misc_RNA (1)...(19): siRNA sense strand
ggcagagacuguaggaaua

SEQ ID NO: 1731032 - RNA, 19 nt, Homo sapiens
  misc_RNA (1)...(19): siRNA sense strand
gauauuagaggaaagcuuu

SEQ ID NO: 1731033 - RNA, 19 nt, Homo sapiens
  misc_RNA (1)...(19): siRNA sense strand
gaaaggaaaggccgucaaa

SEQ ID NO: 1731034 - RNA, 19 nt, Homo sapiens
  misc_RNA (1)...(19): siRNA sense strand
aaagaacccucaauugaug

SEQ ID NO: 1731035 - RNA, 19 nt, Homo sapiens
  misc_RNA (1)...(19): siRNA sense strand
caaaggagcuaccaguuac

SEQ ID NO: 1731036 - RNA, 19 nt, Homo sapiens
  misc_RNA (1)...(19): siRNA sense strand
ggacuagacccagaacaua

SEQ ID NO: 1731037 - RNA, 19 nt, Homo sapiens
  misc_RNA (1)...(19): siRNA sense strand
gaaagcugaugucaacugu

SEQ ID NO: 1731038 - RNA, 19 nt, Homo sapiens
  misc_RNA (1)...(19): siRNA sense strand
ucagucagcuucagugcua

SEQ ID NO: 1731039 - RNA, 19 nt, Homo sapiens
  misc_RNA (1)...(19): siRNA sense strand
ugagaaagcugaugucaac

SEQ ID NO: 1731040 - RNA, 19 nt, Homo sapiens
  misc_RNA (1)...(19): siRNA sense strand
caacaaauauucgcccaau

SEQ ID NO: 1731041 - RNA, 19 nt, Homo sapiens
  misc_RNA (1)...(19): siRNA sense strand
ucaggaaucagucuuguua

SEQ ID NO: 1731042 - RNA, 19 nt, Homo sapiens
  misc_RNA (1)...(19): siRNA sense strand
gcaguagguucuagugaga

SEQ ID NO: 1731043 - RNA, 19 nt, Homo sapiens
  misc_RNA (1)...(19): siRNA sense strand
gcaggaaggugccaaaauu

SEQ ID NO: 1731044 - RNA, 19 nt, Homo sapiens
  misc_RNA (1)...(19): siRNA sense strand
caauaacacuucugguuca

SEQ ID NO: 1731045 - RNA, 19 nt, Homo sapiens
  misc_RNA (1)...(19): siRNA sense strand
caaauaacuugacguuuac

SEQ ID NO: 1731046 - RNA, 19 nt, Homo sapiens
  misc_RNA (1)...(19): siRNA sense strand
ggagcuaccaguuacauaa

SEQ ID NO: 1731047 - RNA, 19 nt, Homo sapiens
  misc_RNA (1)...(19): siRNA sense strand
gaugugcaauccaugauau

SEQ ID NO: 1731048 - RNA, 19 nt, Homo sapiens
  misc_RNA (1)...(19): siRNA sense strand
ggauaaaaguggcccaaua

SEQ ID NO: 1731049 - RNA, 19 nt, Homo sapiens
  misc_RNA (1)...(19): siRNA sense strand
aaucaagccucauuuacaa

SEQ ID NO: 1731050 - RNA, 19 nt, Homo sapiens
  misc_RNA (1)...(19): siRNA sense strand
caacacuggugcuaaggaa

SEQ ID NO: 1731051 - RNA, 19 nt, Homo sapiens
  misc_RNA (1)...(19): siRNA sense strand
ggugaugacugcagcuuau

SEQ ID NO: 1731052 - RNA, 19 nt, Homo sapiens
  misc_RNA (1)...(19): siRNA sense strand
gacuuuaucuauccuaaga

SEQ ID NO: 1731053 - RNA, 19 nt, Homo sapiens
  misc_RNA (1)...(19): siRNA sense strand
caucagagccuuaucaaca

SEQ ID NO: 1731054 - RNA, 19 nt, Homo sapiens
  misc_RNA (1)...(19): siRNA sense strand
acagauaugucuuuaaugg

SEQ ID NO: 1731055 - RNA, 19 nt, Homo sapiens
  misc_RNA (1)...(19): siRNA sense strand
ggacaaggaaugcugaaau

SEQ ID NO: 1731056 - RNA, 19 nt, Homo sapiens
  misc_RNA (1)...(19): siRNA sense strand
gaaucaagccucauuuaca

SEQ ID NO: 1731057 - RNA, 19 nt, Homo sapiens
  misc_RNA (1)...(19): siRNA sense strand
gcacaaagaauggugaaau

SEQ ID NO: 1731058 - RNA, 19 nt, Homo sapiens
  misc_RNA (1)...(19): siRNA sense strand
gcagaauuccgaccagauu

SEQ ID NO: 1731059 - RNA, 19 nt, Homo sapiens
  misc_RNA (1)...(19): siRNA sense strand
guccagacaugcugagaaa

SEQ ID NO: 1731060 - RNA, 19 nt, Homo sapiens
  misc_RNA (1)...(19): siRNA sense strand
aaucgaaguuggagagaaa

SEQ ID NO: 1731061 - RNA, 19 nt, Homo sapiens
  misc_RNA (1)...(19): siRNA sense strand
gggagaaugaaaucaguua

SEQ ID NO: 1731062 - RNA, 19 nt, Homo sapiens
  misc_RNA (1)...(19): siRNA sense strand
ggacuucucugcagauagc

SEQ ID NO: 1731063 - RNA, 19 nt, Homo sapiens
  misc_RNA (1)...(19): siRNA sense strand
gauggaaggcuaucgagaa

SEQ ID NO: 1731064 - RNA, 19 nt, Homo sapiens
  misc_RNA (1)...(19): siRNA sense strand
cagcuuauuugucuggaaa

SEQ ID NO: 1731065 - RNA, 19 nt, Homo sapiens
  misc_RNA (1)...(19): siRNA sense strand
gcagagacuguaggaauaa

SEQ ID NO: 1731066 - RNA, 19 nt, Homo sapiens
  misc_RNA (1)...(19): siRNA sense strand
uagaggaccuuguguugga

SEQ ID NO: 1731067 - RNA, 19 nt, Homo sapiens
  misc_RNA (1)...(19): siRNA sense strand
gccaguaauuggagaaguu

SEQ ID NO: 1731068 - RNA, 19 nt, Homo sapiens
  misc_RNA (1)...(19): siRNA sense strand
uaaacggcaugucuaugaa

SEQ ID NO: 1731069 - RNA, 19 nt, Homo sapiens
  misc_RNA (1)...(19): siRNA sense strand
caaacaauguaggcaagaa

SEQ ID NO: 1731070 - RNA, 19 nt, Homo sapiens
  misc_RNA (1)...(19): siRNA sense strand
gcccaucugugcuacugua

SEQ ID NO: 1731071 - RNA, 19 nt, Homo sapiens
  misc_RNA (1)...(19): siRNA sense strand
gaagagagacaggagaugu

SEQ ID NO: 1731072 - RNA, 19 nt, Homo sapiens
  misc_RNA (1)...(19): siRNA sense strand
ggaauucugcacaauguug

SEQ ID NO: 1731073 - RNA, 19 nt, Homo sapiens
  misc_RNA (1)...(19): siRNA sense strand
gagaaacuccagacaaaca

SEQ ID NO: 1731074 - RNA, 19 nt, Homo sapiens
  misc_RNA (1)...(19): siRNA sense strand
gaaaggcagggaguaguaa

SEQ ID NO: 1731075 - RNA, 19 nt, Homo sapiens
  misc_RNA (1)...(19): siRNA sense strand
ggucaacacuggugcuaag

SEQ ID NO: 1731076 - RNA, 19 nt, Homo sapiens
  misc_RNA (1)...(19): siRNA sense strand
ggugggagguguugcuguu

SEQ ID NO: 1731077 - RNA, 19 nt, Homo sapiens
  misc_RNA (1)...(19): siRNA sense strand
caaggaaugcugaaauaau

SEQ ID NO: 1731078 - RNA, 19 nt, Homo sapiens
  misc_RNA (1)...(19): siRNA sense strand
ugggaaauaucuugcugua

SEQ ID NO: 1731079 - RNA, 19 nt, Homo sapiens
  misc_RNA (1)...(19): siRNA sense strand
caacgauggaagcuucuua

SEQ ID NO: 1731080 - RNA, 19 nt, Homo sapiens
  misc_RNA (1)...(19): siRNA sense strand
ggagaugugcaauccauga

SEQ ID NO: 1731081 - RNA, 19 nt, Homo sapiens
  misc_RNA (1)...(19): siRNA sense strand
gaacaagcagacuuuaucu

SEQ ID NO: 1731082 - RNA, 19 nt, Homo sapiens
  misc_RNA (1)...(19): siRNA sense strand
gcaaugaacaagcagacuu

SEQ ID NO: 1731083 - RNA, 19 nt, Homo sapiens
  misc_RNA (1)...(19): siRNA sense strand
uuaaugguguggacaaaug

SEQ ID NO: 1731084 - RNA, 19 nt, Homo sapiens
  misc_RNA (1)...(19): siRNA sense strand
uuggaaaguuuaagaggua

SEQ ID NO: 1731085 - RNA, 19 nt, Homo sapiens
  misc_RNA (1)...(19): siRNA sense strand
ugaaggaauuuggccagua

SEQ ID NO: 1731086 - RNA, 19 nt, Homo sapiens
  misc_RNA (1)...(19): siRNA sense strand
caaauguucgcuggacuua

SEQ ID NO: 1731087 - RNA, 19 nt, Homo sapiens
  misc_RNA (1)...(19): siRNA sense strand
acagugagacuuugggaua

SEQ ID NO: 1731088 - RNA, 19 nt, Homo sapiens
  misc_RNA (1)...(19): siRNA sense strand
gaugggacagugagacuuu

SEQ ID NO: 1731089 - RNA, 19 nt, Homo sapiens
  misc_RNA (1)...(19): siRNA sense strand
aaggaaugcugaaauaauc

SEQ ID NO: 1731090 - RNA, 19 nt, Homo sapiens
  misc_RNA (1)...(19): siRNA sense strand
caagcagacuuuaucuauc

SEQ ID NO: 1731091 - RNA, 19 nt, Homo sapiens
  misc_RNA (1)...(19): siRNA sense strand
agggaaauuuggaaaguuu

SEQ ID NO: 1731092 - RNA, 19 nt, Homo sapiens
  misc_RNA (1)...(19): siRNA sense strand
gauaaaaguggcccaauaa

SEQ ID NO: 1731093 - RNA, 19 nt, Homo sapiens
  misc_RNA (1)...(19): siRNA sense strand
gaaauacuagaaguggaua

SEQ ID NO: 1731094 - RNA, 19 nt, Homo sapiens
  misc_RNA (1)...(19): siRNA sense strand
caugguggcuauuggaaug

SEQ ID NO: 1731095 - RNA, 19 nt, Homo sapiens
  misc_RNA (1)...(19): siRNA sense strand
ggucacaaucaacguauuu

SEQ ID NO: 1731096 - RNA, 19 nt, Homo sapiens
  misc_RNA (1)...(19): siRNA sense strand
gacccagaacauacuauua

SEQ ID NO: 1731097 - RNA, 19 nt, Homo sapiens
  misc_RNA (1)...(19): siRNA sense strand
aauguucgcuggacuuaug

SEQ ID NO: 1731098 - RNA, 19 nt, Homo sapiens
  misc_RNA (1)...(19): siRNA sense strand
caacugugccuguguaucu

SEQ ID NO: 1731099 - RNA, 19 nt, Homo sapiens
  misc_RNA (1)...(19): siRNA sense strand
gcuauaaacggcaugucua

SEQ ID NO: 1731100 - RNA, 19 nt, Homo sapiens
  misc_RNA (1)...(19): siRNA sense strand
caaugaacaagcagacuuu

SEQ ID NO: 1731101 - RNA, 19 nt, Homo sapiens
  misc_RNA (1)...(19): siRNA sense strand
guaggaauaauguucacua

SEQ ID NO: 1731102 - RNA, 19 nt, Homo sapiens
  misc_RNA (1)...(19): siRNA sense strand
ugaaaggcagggaguagua

SEQ ID NO: 1731103 - RNA, 19 nt, Homo sapiens
  misc_RNA (1)...(19): siRNA sense strand
ugaagaauccgacauugau

SEQ ID NO: 1731104 - RNA, 19 nt, Homo sapiens
  misc_RNA (1)...(19): siRNA sense strand
ggugaucgacauguuguua

SEQ ID NO: 1731105 - RNA, 19 nt, Homo sapiens
  misc_RNA (1)...(19): siRNA sense strand
agaaucagcuacugcaaag

SEQ ID NO: 1731106 - RNA, 19 nt, Homo sapiens
  misc_RNA (1)...(19): siRNA sense strand
gcagagcuggucacaauca

SEQ ID NO: 1731107 - RNA, 19 nt, Homo sapiens
  misc_RNA (1)...(19): siRNA sense strand
cuacagcuccuucuauuca

SEQ ID NO: 1731108 - RNA, 19 nt, Homo sapiens
  misc_RNA (1)...(19): siRNA sense strand
gggaugcaaugaacaagca

SEQ ID NO: 1731109 - RNA, 19 nt, Homo sapiens
  misc_RNA (1)...(19): siRNA sense strand
gaucaugccgcuauugaca

SEQ ID NO: 1731110 - RNA, 19 nt, Homo sapiens
  misc_RNA (1)...(19): siRNA sense strand
uuugggauauugcugauaa

SEQ ID NO: 1731111 - RNA, 19 nt, Homo sapiens
  misc_RNA (1)...(19): siRNA sense strand
acaagcagacuuuaucuau

SEQ ID NO: 1731112 - RNA, 19 nt, Homo sapiens
  misc_RNA (1)...(19): siRNA sense strand
aaagggaaauuuggaaagu

SEQ ID NO: 1731113 - RNA, 19 nt, Homo sapiens
  misc_RNA (1)...(19): siRNA sense strand
gacugcagcuuauuugucu

SEQ ID NO: 1731114 - RNA, 19 nt, Homo sapiens
  misc_RNA (1)...(19): siRNA sense strand
gcuauugacagaauuacuu

SEQ ID NO: 1731115 - RNA, 19 nt, Homo sapiens
  misc_RNA (1)...(19): siRNA sense strand
ggaaucaagccucauuuac

SEQ ID NO: 1731116 - RNA, 19 nt, Homo sapiens
  misc_RNA (1)...(19): siRNA sense strand
uggcaugguuaaguuauuu

SEQ ID NO: 1731117 - RNA, 19 nt, Homo sapiens
  misc_RNA (1)...(19): siRNA sense strand
gcaaauaacuugacguuua

SEQ ID NO: 1731118 - RNA, 19 nt, Homo sapiens
  misc_RNA (1)...(19): siRNA sense strand
gacaaggaaugcugaaaua

SEQ ID NO: 1731119 - RNA, 19 nt, Homo sapiens
  misc_RNA (1)...(19): siRNA sense strand
gcaaagacauuccaagcuu

SEQ ID NO: 1731120 - RNA, 19 nt, Homo sapiens
  misc_RNA (1)...(19): siRNA sense strand
guggaaagaucacauauug

SEQ ID NO: 1731121 - RNA, 19 nt, Homo sapiens
  misc_RNA (1)...(19): siRNA sense strand
gaaaacaucuuauggauca

SEQ ID NO: 1731122 - RNA, 19 nt, Homo sapiens
  misc_RNA (1)...(19): siRNA sense strand
gaaaggaaaggccgucaaa

SEQ ID NO: 1731123 - RNA, 19 nt, Homo sapiens
  misc_RNA (1)...(19): siRNA sense strand
ggacuagacccagaacaua

SEQ ID NO: 1731124 - RNA, 19 nt, Homo sapiens
  misc_RNA (1)...(19): siRNA sense strand
gaaagcugaugucaacugu

SEQ ID NO: 1731125 - RNA, 19 nt, Homo sapiens
  misc_RNA (1)...(19): siRNA sense strand
ucagucagcuucagugcua

SEQ ID NO: 1731126 - RNA, 19 nt, Homo sapiens
  misc_RNA (1)...(19): siRNA sense strand
ugagaaagcugaugucaac

SEQ ID NO: 1731127 - RNA, 19 nt, Homo sapiens
  misc_RNA (1)...(19): siRNA sense strand
gcaggaaggugccaaaauu

SEQ ID NO: 1731128 - RNA, 19 nt, Homo sapiens
  misc_RNA (1)...(19): siRNA sense strand
ucaggaaucagucuuguua

SEQ ID NO: 1731129 - RNA, 19 nt, Homo sapiens
  misc_RNA (1)...(19): siRNA sense strand
gcaguagguucuagugaga

SEQ ID NO: 1731130 - RNA, 19 nt, Homo sapiens
  misc_RNA (1)...(19): siRNA sense strand
caaauaacuugacguuuac

SEQ ID NO: 1731131 - RNA, 19 nt, Homo sapiens
  misc_RNA (1)...(19): siRNA sense strand
gaugugcaauccaugauau

SEQ ID NO: 1731132 - RNA, 19 nt, Homo sapiens
  misc_RNA (1)...(19): siRNA sense strand
gacuuuaucuauccuaaga

SEQ ID NO: 1731133 - RNA, 19 nt, Homo sapiens
  misc_RNA (1)...(19): siRNA sense strand
ggugaugacugcagcuuau

SEQ ID NO: 1731134 - RNA, 19 nt, Homo sapiens
  misc_RNA (1)...(19): siRNA sense strand
ggacaaggaaugcugaaau

SEQ ID NO: 1731135 - RNA, 19 nt, Homo sapiens
  misc_RNA (1)...(19): siRNA sense strand
gcagaauuccgaccagauu

SEQ ID NO: 1731136 - RNA, 19 nt, Homo sapiens
  misc_RNA (1)...(19): siRNA sense strand
guccagacaugcugagaaa

SEQ ID NO: 1731137 - RNA, 19 nt, Homo sapiens
  misc_RNA (1)...(19): siRNA sense strand
aaucgaaguuggagagaaa

SEQ ID NO: 1731138 - RNA, 19 nt, Homo sapiens
  misc_RNA (1)...(19): siRNA sense strand
ggacuucucugcagauagc

SEQ ID NO: 1731139 - RNA, 19 nt, Homo sapiens
  misc_RNA (1)...(19): siRNA sense strand
cagcuuauuugucuggaaa

SEQ ID NO: 1731140 - RNA, 19 nt, Homo sapiens
  misc_RNA (1)...(19): siRNA sense strand
uaaacggcaugucuaugaa

SEQ ID NO: 1731141 - RNA, 19 nt, Homo sapiens
  misc_RNA (1)...(19): siRNA sense strand
gaagagagacaggagaugu

SEQ ID NO: 1731142 - RNA, 19 nt, Homo sapiens
  misc_RNA (1)...(19): siRNA sense strand
caaggaaugcugaaauaau

SEQ ID NO: 1731143 - RNA, 19 nt, Homo sapiens
  misc_RNA (1)...(19): siRNA sense strand
gcaaugaacaagcagacuu

SEQ ID NO: 1731144 - RNA, 19 nt, Homo sapiens
  misc_RNA (1)...(19): siRNA sense strand
gaacaagcagacuuuaucu

SEQ ID NO: 1731145 - RNA, 19 nt, Homo sapiens
  misc_RNA (1)...(19): siRNA sense strand
ggagaugugcaauccauga

SEQ ID NO: 1731146 - RNA, 19 nt, Homo sapiens
  misc_RNA (1)...(19): siRNA sense strand
aaggaaugcugaaauaauc

SEQ ID NO: 1731147 - RNA, 19 nt, Homo sapiens
  misc_RNA (1)...(19): siRNA sense strand
caagcagacuuuaucuauc

SEQ ID NO: 1731148 - RNA, 19 nt, Homo sapiens
  misc_RNA (1)...(19): siRNA sense strand
acagugagacuuugggaua

SEQ ID NO: 1731149 - RNA, 19 nt, Homo sapiens
  misc_RNA (1)...(19): siRNA sense strand
gaugggacagugagacuuu

SEQ ID NO: 1731150 - RNA, 19 nt, Homo sapiens
  misc_RNA (1)...(19): siRNA sense strand
gacccagaacauacuauua

SEQ ID NO: 1731151 - RNA, 19 nt, Homo sapiens
  misc_RNA (1)...(19): siRNA sense strand
caugguggcuauuggaaug

SEQ ID NO: 1731152 - RNA, 19 nt, Homo sapiens
  misc_RNA (1)...(19): siRNA sense strand
ggucacaaucaacguauuu

SEQ ID NO: 1731153 - RNA, 19 nt, Homo sapiens
  misc_RNA (1)...(19): siRNA sense strand
caaugaacaagcagacuuu

SEQ ID NO: 1731154 - RNA, 19 nt, Homo sapiens
  misc_RNA (1)...(19): siRNA sense strand
caacugugccuguguaucu

SEQ ID NO: 1731155 - RNA, 19 nt, Homo sapiens
  misc_RNA (1)...(19): siRNA sense strand
gcuauaaacggcaugucua

SEQ ID NO: 1731156 - RNA, 19 nt, Homo sapiens
  misc_RNA (1)...(19): siRNA sense strand
gcagagcuggucacaauca

SEQ ID NO: 1731157 - RNA, 19 nt, Homo sapiens
  misc_RNA (1)...(19): siRNA sense strand
ggugaucgacauguuguua

SEQ ID NO: 1731158 - RNA, 19 nt, Homo sapiens
  misc_RNA (1)...(19): siRNA sense strand
agaaucagcuacugcaaag

SEQ ID NO: 1731159 - RNA, 19 nt, Homo sapiens
  misc_RNA (1)...(19): siRNA sense strand
cuacagcuccuucuauuca

SEQ ID NO: 1731160 - RNA, 19 nt, Homo sapiens
  misc_RNA (1)...(19): siRNA sense strand
acaagcagacuuuaucuau

SEQ ID NO: 1731161 - RNA, 19 nt, Homo sapiens
  misc_RNA (1)...(19): siRNA sense strand
gaucaugccgcuauugaca

SEQ ID NO: 1731162 - RNA, 19 nt, Homo sapiens
  misc_RNA (1)...(19): siRNA sense strand
gggaugcaaugaacaagca

SEQ ID NO: 1731163 - RNA, 19 nt, Homo sapiens
  misc_RNA (1)...(19): siRNA sense strand
uuugggauauugcugauaa

SEQ ID NO: 1731164 - RNA, 19 nt, Homo sapiens
  misc_RNA (1)...(19): siRNA sense strand
gcuauugacagaauuacuu

SEQ ID NO: 1731165 - RNA, 19 nt, Homo sapiens
  misc_RNA (1)...(19): siRNA sense strand
gacugcagcuuauuugucu

SEQ ID NO: 1731166 - RNA, 19 nt, Homo sapiens
  misc_RNA (1)...(19): siRNA sense strand
agauucagauacccaguuu

SEQ ID NO: 1731167 - RNA, 19 nt, Homo sapiens
  misc_RNA (1)...(19): siRNA sense strand
uggcaugguuaaguuauuu

SEQ ID NO: 1731168 - RNA, 19 nt, Homo sapiens
  misc_RNA (1)...(19): siRNA sense strand
ugucaacugugccugugua

SEQ ID NO: 1731169 - RNA, 19 nt, Homo sapiens
  misc_RNA (1)...(19): siRNA sense strand
gagaugagguuuugggaau

SEQ ID NO: 1731170 - RNA, 19 nt, Homo sapiens
  misc_RNA (1)...(19): siRNA sense strand
ucuaguggcugcuauaaac

SEQ ID NO: 1731171 - RNA, 19 nt, Homo sapiens
  misc_RNA (1)...(19): siRNA sense strand
ggacaugguggcuauugga

SEQ ID NO: 1731172 - RNA, 19 nt, Homo sapiens
  misc_RNA (1)...(19): siRNA sense strand
ugaaauaaucgaaguugga

SEQ ID NO: 1731173 - RNA, 19 nt, Homo sapiens
  misc_RNA (1)...(19): siRNA sense strand
uacauggacuaguauucua

SEQ ID NO: 1731174 - RNA, 19 nt, Homo sapiens
  misc_RNA (1)...(19): siRNA sense strand
auaaacggcaugucuauga

SEQ ID NO: 1731175 - RNA, 19 nt, Homo sapiens
  misc_RNA (1)...(19): siRNA sense strand
cuaagaugcuaccauucaa

SEQ ID NO: 1731176 - RNA, 19 nt, Homo sapiens
  misc_RNA (1)...(19): siRNA sense strand
cagacuuuaucuauccuaa

SEQ ID NO: 1731177 - RNA, 19 nt, Homo sapiens
  misc_RNA (1)...(19): siRNA sense strand
caugauaucagauuuaguc

SEQ ID NO: 1731178 - RNA, 19 nt, Homo sapiens
  misc_RNA (1)...(19): siRNA sense strand
ggaaaggccgucaaaagaa

SEQ ID NO: 1731179 - RNA, 19 nt, Homo sapiens
  misc_RNA (1)...(19): siRNA sense strand
gaugacugcagcuuauuug

SEQ ID NO: 1731180 - RNA, 19 nt, Homo sapiens
  misc_RNA (1)...(19): siRNA sense strand
ugggcuacauggacuagua

SEQ ID NO: 1731181 - RNA, 19 nt, Homo sapiens
  misc_RNA (1)...(19): siRNA sense strand
gcagaagaugggacaguga

SEQ ID NO: 1731182 - RNA, 19 nt, Homo sapiens
  misc_RNA (1)...(19): siRNA sense strand
gaaaggccgucaaaagaag

SEQ ID NO: 1731183 - RNA, 19 nt, Homo sapiens
  misc_RNA (1)...(19): siRNA sense strand
cagaaucagcuacugcaaa

SEQ ID NO: 1731184 - RNA, 19 nt, Homo sapiens
  misc_RNA (1)...(19): siRNA sense strand
caggagaugugcaauccau

SEQ ID NO: 1731185 - RNA, 19 nt, Homo sapiens
  misc_RNA (1)...(19): siRNA sense strand
ugaacaagcagacuuuauc

SEQ ID NO: 1731186 - RNA, 19 nt, Homo sapiens
  misc_RNA (1)...(19): siRNA sense strand
gugcaaauaacuugacguu

SEQ ID NO: 1731187 - RNA, 19 nt, Homo sapiens
  misc_RNA (1)...(19): siRNA sense strand
ccuaagaugcuaccauuca

SEQ ID NO: 1731188 - RNA, 19 nt, Homo sapiens
  misc_RNA (1)...(19): siRNA sense strand
ggccuguguuugccaugua

SEQ ID NO: 1731189 - RNA, 19 nt, Homo sapiens
  misc_RNA (1)...(19): siRNA sense strand
aaagaaggaggagcgguua

SEQ ID NO: 1731190 - RNA, 19 nt, Homo sapiens
  misc_RNA (1)...(19): siRNA sense strand
uaagaugcuaccauucaaa

SEQ ID NO: 1731191 - RNA, 19 nt, Homo sapiens
  misc_RNA (1)...(19): siRNA sense strand
gcagcuuauuugucuggaa

SEQ ID NO: 1731192 - RNA, 19 nt, Homo sapiens
  misc_RNA (1)...(19): siRNA sense strand
ugcaauccaugauaucaga

SEQ ID NO: 1731193 - RNA, 19 nt, Homo sapiens
  misc_RNA (1)...(19): siRNA sense strand
aaagugaauuugggacaug

SEQ ID NO: 1731194 - RNA, 19 nt, Homo sapiens
  misc_RNA (1)...(19): siRNA sense strand
ggacuagcaacacauccuu

SEQ ID NO: 1731195 - RNA, 19 nt, Homo sapiens
  misc_RNA (1)...(19): siRNA sense strand
ggaaaggaaaggccgucaa

SEQ ID NO: 1731196 - RNA, 19 nt, Homo sapiens
  misc_RNA (1)...(19): siRNA sense strand
gugagacuuugggauauug

SEQ ID NO: 1731197 - RNA, 19 nt, Homo sapiens
  misc_RNA (1)...(19): siRNA sense strand
gcugaaauaaucgaaguug

SEQ ID NO: 1731198 - RNA, 19 nt, Homo sapiens
  misc_RNA (1)...(19): siRNA sense strand
gacaggagaugugcaaucc

SEQ ID NO: 1731199 - RNA, 19 nt, Homo sapiens
  misc_RNA (1)...(19): siRNA sense strand
caaagggaguauguucagu

SEQ ID NO: 1731200 - RNA, 19 nt, Homo sapiens
  misc_RNA (1)...(19): siRNA sense strand
ugacuucccauguccagaa

SEQ ID NO: 1731201 - RNA, 19 nt, Homo sapiens
  misc_RNA (1)...(19): siRNA sense strand
uuacuagugaguucucuaa

SEQ ID NO: 1731202 - RNA, 19 nt, Homo sapiens
  misc_RNA (1)...(19): siRNA sense strand
ucagauacccaguuugucu

SEQ ID NO: 1731203 - RNA, 19 nt, Homo sapiens
  misc_RNA (1)...(19): siRNA sense strand
ucaugccgcuauugacaga

SEQ ID NO: 1731204 - RNA, 19 nt, Homo sapiens
  misc_RNA (1)...(19): siRNA sense strand
uaaucgaaguuggagagaa

SEQ ID NO: 1731205 - RNA, 19 nt, Homo sapiens
  misc_RNA (1)...(19): siRNA sense strand
acaaggaaugcugaaauaa

SEQ ID NO: 1731206 - RNA, 19 nt, Homo sapiens
  misc_RNA (1)...(19): siRNA sense strand
aacuugacguuuacaggua

SEQ ID NO: 1731207 - RNA, 19 nt, Homo sapiens
  misc_RNA (1)...(19): siRNA sense strand
caggacaagccacagauug

SEQ ID NO: 1731208 - RNA, 19 nt, Homo sapiens
  misc_RNA (1)...(19): siRNA sense strand
gagaugacuuuggcauggu

SEQ ID NO: 1731209 - RNA, 19 nt, Homo sapiens
  misc_RNA (1)...(19): siRNA sense strand
cagugagacuuugggauau

SEQ ID NO: 1731210 - RNA, 19 nt, Homo sapiens
  misc_RNA (1)...(19): siRNA sense strand
uaaaacaugugaaguucug

SEQ ID NO: 1731211 - RNA, 19 nt, Homo sapiens
  misc_RNA (1)...(19): siRNA sense strand
gacuucccauguccagaaa

SEQ ID NO: 1731212 - RNA, 19 nt, Homo sapiens
  misc_RNA (1)...(19): siRNA sense strand
aggaaucagucuuguuaca

SEQ ID NO: 1731213 - RNA, 19 nt, Homo sapiens
  misc_RNA (1)...(19): siRNA sense strand
ggacaugcugcucguacug

SEQ ID NO: 1731214 - RNA, 19 nt, Homo sapiens
  misc_RNA (1)...(19): siRNA sense strand
ggaggagcgguuaaacugu

SEQ ID NO: 1731215 - RNA, 19 nt, Homo sapiens
  misc_RNA (1)...(19): siRNA sense strand
gcaugguuaaguuauuuga

SEQ ID NO: 1731216 - RNA, 19 nt, Homo sapiens
  misc_RNA (1)...(19): siRNA sense strand
aagcagacuuuaucuaucc

SEQ ID NO: 1731217 - RNA, 19 nt, Homo sapiens
  misc_RNA (1)...(19): siRNA sense strand
guauggguguuccugauaa

SEQ ID NO: 1731218 - RNA, 19 nt, Homo sapiens
  misc_RNA (1)...(19): siRNA sense strand
uaaagaaggguuaccaaga

SEQ ID NO: 1731219 - RNA, 19 nt, Homo sapiens
  misc_RNA (1)...(19): siRNA sense strand
gggcaccugugagaucuuu

SEQ ID NO: 1731220 - RNA, 19 nt, Homo sapiens
  misc_RNA (1)...(19): siRNA sense strand
aaagaaggguuaccaagac

SEQ ID NO: 1731221 - RNA, 19 nt, Homo sapiens
  misc_RNA (1)...(19): siRNA sense strand
ggguguuccugauaaagaa

SEQ ID NO: 1731222 - RNA, 19 nt, Homo sapiens
  misc_RNA (1)...(19): siRNA sense strand
gauaaagaaggguuaccaa

SEQ ID NO: 1731223 - RNA, 19 nt, Homo sapiens
  misc_RNA (1)...(19): siRNA sense strand
uggcguaccuggucguaug

SEQ ID NO: 1731224 - RNA, 19 nt, Homo sapiens
  misc_RNA (1)...(19): siRNA sense strand
cuacaagaccgagaaguau

SEQ ID NO: 1731225 - RNA, 19 nt, Homo sapiens
  misc_RNA (1)...(19): siRNA sense strand
acuacaagaccgagaagua

SEQ ID NO: 1731226 - RNA, 19 nt, Homo sapiens
  misc_RNA (1)...(19): siRNA sense strand
uauggguguuccugauaaa

SEQ ID NO: 1731227 - RNA, 19 nt, Homo sapiens
  misc_RNA (1)...(19): siRNA sense strand
agagugcugucaucaccaa

SEQ ID NO: 1731228 - RNA, 19 nt, Homo sapiens
  misc_RNA (1)...(19): siRNA sense strand
ggcguggccuucaccaaca

SEQ ID NO: 1731229 - RNA, 19 nt, Homo sapiens
  misc_RNA (1)...(19): siRNA sense strand
gaaggugggccugcuguac

SEQ ID NO: 1731230 - RNA, 19 nt, Homo sapiens
  misc_RNA (1)...(19): siRNA sense strand
cguauggguguuccugaua

SEQ ID NO: 1731231 - RNA, 19 nt, Homo sapiens
  misc_RNA (1)...(19): siRNA sense strand
gcugucaucaccaaaguca

SEQ ID NO: 1731232 - RNA, 19 nt, Homo sapiens
  misc_RNA (1)...(19): siRNA sense strand
gugcugucaucaccaaagu

SEQ ID NO: 1731233 - RNA, 19 nt, Homo sapiens
  misc_RNA (1)...(19): siRNA sense strand
accaacaccucggaucuug

SEQ ID NO: 1731234 - RNA, 19 nt, Homo sapiens
  misc_RNA (1)...(19): siRNA sense strand
aguaugucaucgccaagaa

SEQ ID NO: 1731235 - RNA, 19 nt, Homo sapiens
  misc_RNA (1)...(19): siRNA sense strand
gcuggaaacggagugaaga

SEQ ID NO: 1731236 - RNA, 19 nt, Homo sapiens
  misc_RNA (1)...(19): siRNA sense strand
acaagaccgagaaguaugu

SEQ ID NO: 1731237 - RNA, 19 nt, Homo sapiens
  misc_RNA (1)...(19): siRNA sense strand
guauggguguuccugauaa

SEQ ID NO: 1731238 - RNA, 19 nt, Homo sapiens
  misc_RNA (1)...(19): siRNA sense strand
uaaagaaggguuaccaaga

SEQ ID NO: 1731239 - RNA, 19 nt, Homo sapiens
  misc_RNA (1)...(19): siRNA sense strand
gggcaccugugagaucuuu

SEQ ID NO: 1731240 - RNA, 19 nt, Homo sapiens
  misc_RNA (1)...(19): siRNA sense strand
aaagaaggguuaccaagac

SEQ ID NO: 1731241 - RNA, 19 nt, Homo sapiens
  misc_RNA (1)...(19): siRNA sense strand
ggguguuccugauaaagaa

SEQ ID NO: 1731242 - RNA, 19 nt, Homo sapiens
  misc_RNA (1)...(19): siRNA sense strand
gauaaagaaggguuaccaa

SEQ ID NO: 1731243 - RNA, 19 nt, Homo sapiens
  misc_RNA (1)...(19): siRNA sense strand
uggcguaccuggucguaug

SEQ ID NO: 1731244 - RNA, 19 nt, Homo sapiens
  misc_RNA (1)...(19): siRNA sense strand
cuacaagaccgagaaguau

SEQ ID NO: 1731245 - RNA, 19 nt, Homo sapiens
  misc_RNA (1)...(19): siRNA sense strand
acuacaagaccgagaagua

SEQ ID NO: 1731246 - RNA, 19 nt, Homo sapiens
  misc_RNA (1)...(19): siRNA sense strand
uauggguguuccugauaaa

SEQ ID NO: 1731247 - RNA, 19 nt, Homo sapiens
  misc_RNA (1)...(19): siRNA sense strand
agagugcugucaucaccaa

SEQ ID NO: 1731248 - RNA, 19 nt, Homo sapiens
  misc_RNA (1)...(19): siRNA sense strand
ggcguggccuucaccaaca

SEQ ID NO: 1731249 - RNA, 19 nt, Homo sapiens
  misc_RNA (1)...(19): siRNA sense strand
gaaggugggccugcuguac

SEQ ID NO: 1731250 - RNA, 19 nt, Homo sapiens
  misc_RNA (1)...(19): siRNA sense strand
cguauggguguuccugaua

SEQ ID NO: 1731251 - RNA, 19 nt, Homo sapiens
  misc_RNA (1)...(19): siRNA sense strand
gcugucaucaccaaaguca

SEQ ID NO: 1731252 - RNA, 19 nt, Homo sapiens
  misc_RNA (1)...(19): siRNA sense strand
gugcugucaucaccaaagu

SEQ ID NO: 1731253 - RNA, 19 nt, Homo sapiens
  misc_RNA (1)...(19): siRNA sense strand
accaacaccucggaucuug

SEQ ID NO: 1731254 - RNA, 19 nt, Homo sapiens
  misc_RNA (1)...(19): siRNA sense strand
aguaugucaucgccaagaa

SEQ ID NO: 1731255 - RNA, 19 nt, Homo sapiens
  misc_RNA (1)...(19): siRNA sense strand
gcuggaaacggagugaaga

SEQ ID NO: 1731256 - RNA, 19 nt, Homo sapiens
  misc_RNA (1)...(19): siRNA sense strand
acaagaccgagaaguaugu

SEQ ID NO: 1731257 - RNA, 19 nt, Homo sapiens
  misc_RNA (1)...(19): siRNA sense strand
guauggguguuccugauaa

SEQ ID NO: 1731258 - RNA, 19 nt, Homo sapiens
  misc_RNA (1)...(19): siRNA sense strand
uaaagaaggguuaccaaga

SEQ ID NO: 1731259 - RNA, 19 nt, Homo sapiens
  misc_RNA (1)...(19): siRNA sense strand
gggcaccugugagaucuuu

SEQ ID NO: 1731260 - RNA, 19 nt, Homo sapiens
  misc_RNA (1)...(19): siRNA sense strand
aaagaaggguuaccaagac

SEQ ID NO: 1731261 - RNA, 19 nt, Homo sapiens
  misc_RNA (1)...(19): siRNA sense strand
ggguguuccugauaaagaa

SEQ ID NO: 1731262 - RNA, 19 nt, Homo sapiens
  misc_RNA (1)...(19): siRNA sense strand
gauaaagaaggguuaccaa

SEQ ID NO: 1731263 - RNA, 19 nt, Homo sapiens
  misc_RNA (1)...(19): siRNA sense strand
uggcguaccuggucguaug

SEQ ID NO: 1731264 - RNA, 19 nt, Homo sapiens
  misc_RNA (1)...(19): siRNA sense strand
cuacaagaccgagaaguau

SEQ ID NO: 1731265 - RNA, 19 nt, Homo sapiens
  misc_RNA (1)...(19): siRNA sense strand
acuacaagaccgagaagua

SEQ ID NO: 1731266 - RNA, 19 nt, Homo sapiens
  misc_RNA (1)...(19): siRNA sense strand
uauggguguuccugauaaa

SEQ ID NO: 1731267 - RNA, 19 nt, Homo sapiens
  misc_RNA (1)...(19): siRNA sense strand
agagugcugucaucaccaa

SEQ ID NO: 1731268 - RNA, 19 nt, Homo sapiens
  misc_RNA (1)...(19): siRNA sense strand
ggcguggccuucaccaaca

SEQ ID NO: 1731269 - RNA, 19 nt, Homo sapiens
  misc_RNA (1)...(19): siRNA sense strand
gaaggugggccugcuguac

SEQ ID NO: 1731270 - RNA, 19 nt, Homo sapiens
  misc_RNA (1)...(19): siRNA sense strand
cguauggguguuccugaua

SEQ ID NO: 1731271 - RNA, 19 nt, Homo sapiens
  misc_RNA (1)...(19): siRNA sense strand
gcugucaucaccaaaguca

SEQ ID NO: 1731272 - RNA, 19 nt, Homo sapiens
  misc_RNA (1)...(19): siRNA sense strand
gugcugucaucaccaaagu

SEQ ID NO: 1731273 - RNA, 19 nt, Homo sapiens
  misc_RNA (1)...(19): siRNA sense strand
accaacaccucggaucuug

SEQ ID NO: 1731274 - RNA, 19 nt, Homo sapiens
  misc_RNA (1)...(19): siRNA sense strand
aguaugucaucgccaagaa

SEQ ID NO: 1731275 - RNA, 19 nt, Homo sapiens
  misc_RNA (1)...(19): siRNA sense strand
gcuggaaacggagugaaga

SEQ ID NO: 1731276 - RNA, 19 nt, Homo sapiens
  misc_RNA (1)...(19): siRNA sense strand
acaagaccgagaaguaugu

SEQ ID NO: 1731277 - RNA, 19 nt, Homo sapiens
  misc_RNA (1)...(19): siRNA sense strand
ggacaccacucaacuggaa

SEQ ID NO: 1731278 - RNA, 19 nt, Homo sapiens
  misc_RNA (1)...(19): siRNA sense strand
cagaggaacugcuguuguu

SEQ ID NO: 1731279 - RNA, 19 nt, Homo sapiens
  misc_RNA (1)...(19): siRNA sense strand
ugacgaggcugucucuuug

SEQ ID NO: 1731280 - RNA, 19 nt, Homo sapiens
  misc_RNA (1)...(19): siRNA sense strand
ggacggugcugucugaagu

SEQ ID NO: 1731281 - RNA, 19 nt, Homo sapiens
  misc_RNA (1)...(19): siRNA sense strand
gacaauggcuggcuguaca

SEQ ID NO: 1731282 - RNA, 19 nt, Homo sapiens
  misc_RNA (1)...(19): siRNA sense strand
ggaggagucucuucucagu

SEQ ID NO: 1731283 - RNA, 19 nt, Homo sapiens
  misc_RNA (1)...(19): siRNA sense strand
gguggacggugcugucuga

SEQ ID NO: 1731284 - RNA, 19 nt, Homo sapiens
  misc_RNA (1)...(19): siRNA sense strand
ggagaaagcagaggaacug

SEQ ID NO: 1731285 - RNA, 19 nt, Homo sapiens
  misc_RNA (1)...(19): siRNA sense strand
aggagucucuucucaguga

SEQ ID NO: 1731286 - RNA, 19 nt, Homo sapiens
  misc_RNA (1)...(19): siRNA sense strand
ggugcugucugaagucuca

SEQ ID NO: 1731287 - RNA, 19 nt, Homo sapiens
  misc_RNA (1)...(19): siRNA sense strand
ucccucagcuucuacauca

SEQ ID NO: 1731288 - RNA, 19 nt, Homo sapiens
  misc_RNA (1)...(19): siRNA sense strand
gaccauggaagcagagaga

SEQ ID NO: 1731289 - RNA, 19 nt, Homo sapiens
  misc_RNA (1)...(19): siRNA sense strand
cauugaccaucgucucuga

SEQ ID NO: 1731290 - RNA, 19 nt, Homo sapiens
  misc_RNA (1)...(19): siRNA sense strand
gugcagaggacaccacuca

SEQ ID NO: 1731291 - RNA, 19 nt, Homo sapiens
  misc_RNA (1)...(19): siRNA sense strand
gauauaccccuaccuguga

SEQ ID NO: 1731292 - RNA, 19 nt, Homo sapiens
  misc_RNA (1)...(19): siRNA sense strand
gcagaggacaccacucaac

SEQ ID NO: 1731293 - RNA, 19 nt, Homo sapiens
  misc_RNA (1)...(19): siRNA sense strand
gauccacugccuugacaau

SEQ ID NO: 1731294 - RNA, 19 nt, Homo sapiens
  misc_RNA (1)...(19): siRNA sense strand
gaaugacgaggcugucucu

SEQ ID NO: 1731295 - RNA, 19 nt, Homo sapiens
  misc_RNA (1)...(19): siRNA sense strand
gaccaucgucucugaggau

SEQ ID NO: 1731296 - RNA, 19 nt, Homo sapiens
  misc_RNA (1)...(19): siRNA sense strand
gggaccggaucagacacua

SEQ ID NO: 1731297 - RNA, 19 nt, Homo sapiens
  misc_RNA (1)...(19): siRNA sense strand
gaccggaucagacacuaca

SEQ ID NO: 1731298 - RNA, 19 nt, Homo sapiens
  misc_RNA (1)...(19): siRNA sense strand
ucccauggguggcuguaug

SEQ ID NO: 1731299 - RNA, 19 nt, Homo sapiens
  misc_RNA (1)...(19): siRNA sense strand
gcucuuacucucugucagu

SEQ ID NO: 1731300 - RNA, 19 nt, Homo sapiens
  misc_RNA (1)...(19): siRNA sense strand
gaggaacugcuguuguuac

SEQ ID NO: 1731301 - RNA, 19 nt, Homo sapiens
  misc_RNA (1)...(19): siRNA sense strand
agaggaacugcuguuguua

SEQ ID NO: 1731302 - RNA, 19 nt, Homo sapiens
  misc_RNA (1)...(19): siRNA sense strand
aggcagagaguauaacauc

SEQ ID NO: 1731303 - RNA, 19 nt, Homo sapiens
  misc_RNA (1)...(19): siRNA sense strand
ggacaccacucaacuggaa

SEQ ID NO: 1731304 - RNA, 19 nt, Homo sapiens
  misc_RNA (1)...(19): siRNA sense strand
cagaggaacugcuguuguu

SEQ ID NO: 1731305 - RNA, 19 nt, Homo sapiens
  misc_RNA (1)...(19): siRNA sense strand
ggacggugcugucugaagu

SEQ ID NO: 1731306 - RNA, 19 nt, Homo sapiens
  misc_RNA (1)...(19): siRNA sense strand
gacaauggcuggcuguaca

SEQ ID NO: 1731307 - RNA, 19 nt, Homo sapiens
  misc_RNA (1)...(19): siRNA sense strand
gguggacggugcugucuga

SEQ ID NO: 1731308 - RNA, 19 nt, Homo sapiens
  misc_RNA (1)...(19): siRNA sense strand
ggagaaagcagaggaacug

SEQ ID NO: 1731309 - RNA, 19 nt, Homo sapiens
  misc_RNA (1)...(19): siRNA sense strand
ggugcugucugaagucuca

SEQ ID NO: 1731310 - RNA, 19 nt, Homo sapiens
  misc_RNA (1)...(19): siRNA sense strand
gaccauggaagcagagaga

SEQ ID NO: 1731311 - RNA, 19 nt, Homo sapiens
  misc_RNA (1)...(19): siRNA sense strand
cauugaccaucgucucuga

SEQ ID NO: 1731312 - RNA, 19 nt, Homo sapiens
  misc_RNA (1)...(19): siRNA sense strand
gugcagaggacaccacuca

SEQ ID NO: 1731313 - RNA, 19 nt, Homo sapiens
  misc_RNA (1)...(19): siRNA sense strand
gauauaccccuaccuguga

SEQ ID NO: 1731314 - RNA, 19 nt, Homo sapiens
  misc_RNA (1)...(19): siRNA sense strand
gcagaggacaccacucaac

SEQ ID NO: 1731315 - RNA, 19 nt, Homo sapiens
  misc_RNA (1)...(19): siRNA sense strand
gauccacugccuugacaau

SEQ ID NO: 1731316 - RNA, 19 nt, Homo sapiens
  misc_RNA (1)...(19): siRNA sense strand
gaccaucgucucugaggau

SEQ ID NO: 1731317 - RNA, 19 nt, Homo sapiens
  misc_RNA (1)...(19): siRNA sense strand
gggaccggaucagacacua

SEQ ID NO: 1731318 - RNA, 19 nt, Homo sapiens
  misc_RNA (1)...(19): siRNA sense strand
gaccggaucagacacuaca

SEQ ID NO: 1731319 - RNA, 19 nt, Homo sapiens
  misc_RNA (1)...(19): siRNA sense strand
ucccauggguggcuguaug

SEQ ID NO: 1731320 - RNA, 19 nt, Homo sapiens
  misc_RNA (1)...(19): siRNA sense strand
gcucuuacucucugucagu

SEQ ID NO: 1731321 - RNA, 19 nt, Homo sapiens
  misc_RNA (1)...(19): siRNA sense strand
gaggaacugcuguuguuac

SEQ ID NO: 1731322 - RNA, 19 nt, Homo sapiens
  misc_RNA (1)...(19): siRNA sense strand
agaggaacugcuguuguua

SEQ ID NO: 1731323 - RNA, 19 nt, Homo sapiens
  misc_RNA (1)...(19): siRNA sense strand
aggcagagaguauaacauc

SEQ ID NO: 1731324 - RNA, 19 nt, Homo sapiens
  misc_RNA (1)...(19): siRNA sense strand
ggacaccacucaacuggaa

SEQ ID NO: 1731325 - RNA, 19 nt, Homo sapiens
  misc_RNA (1)...(19): siRNA sense strand
cagaggaacugcuguuguu

SEQ ID NO: 1731326 - RNA, 19 nt, Homo sapiens
  misc_RNA (1)...(19): siRNA sense strand
ugacgaggcugucucuuug

SEQ ID NO: 1731327 - RNA, 19 nt, Homo sapiens
  misc_RNA (1)...(19): siRNA sense strand
ggacggugcugucugaagu

SEQ ID NO: 1731328 - RNA, 19 nt, Homo sapiens
  misc_RNA (1)...(19): siRNA sense strand
gacaauggcuggcuguaca

SEQ ID NO: 1731329 - RNA, 19 nt, Homo sapiens
  misc_RNA (1)...(19): siRNA sense strand
ggaggagucucuucucagu

SEQ ID NO: 1731330 - RNA, 19 nt, Homo sapiens
  misc_RNA (1)...(19): siRNA sense strand
gguggacggugcugucuga

SEQ ID NO: 1731331 - RNA, 19 nt, Homo sapiens
  misc_RNA (1)...(19): siRNA sense strand
ggagaaagcagaggaacug

SEQ ID NO: 1731332 - RNA, 19 nt, Homo sapiens
  misc_RNA (1)...(19): siRNA sense strand
aggagucucuucucaguga

SEQ ID NO: 1731333 - RNA, 19 nt, Homo sapiens
  misc_RNA (1)...(19): siRNA sense strand
ggugcugucugaagucuca

SEQ ID NO: 1731334 - RNA, 19 nt, Homo sapiens
  misc_RNA (1)...(19): siRNA sense strand
ucccucagcuucuacauca

SEQ ID NO: 1731335 - RNA, 19 nt, Homo sapiens
  misc_RNA (1)...(19): siRNA sense strand
gaccauggaagcagagaga

SEQ ID NO: 1731336 - RNA, 19 nt, Homo sapiens
  misc_RNA (1)...(19): siRNA sense strand
cauugaccaucgucucuga

SEQ ID NO: 1731337 - RNA, 19 nt, Homo sapiens
  misc_RNA (1)...(19): siRNA sense strand
gugcagaggacaccacuca

SEQ ID NO: 1731338 - RNA, 19 nt, Homo sapiens
  misc_RNA (1)...(19): siRNA sense strand
gauauaccccuaccuguga

SEQ ID NO: 1731339 - RNA, 19 nt, Homo sapiens
  misc_RNA (1)...(19): siRNA sense strand
gcagaggacaccacucaac

SEQ ID NO: 1731340 - RNA, 19 nt, Homo sapiens
  misc_RNA (1)...(19): siRNA sense strand
gauccacugccuugacaau

SEQ ID NO: 1731341 - RNA, 19 nt, Homo sapiens
  misc_RNA (1)...(19): siRNA sense strand
gaaugacgaggcugucucu

SEQ ID NO: 1731342 - RNA, 19 nt, Homo sapiens
  misc_RNA (1)...(19): siRNA sense strand
gaccaucgucucugaggau

SEQ ID NO: 1731343 - RNA, 19 nt, Homo sapiens
  misc_RNA (1)...(19): siRNA sense strand
gggaccggaucagacacua

SEQ ID NO: 1731344 - RNA, 19 nt, Homo sapiens
  misc_RNA (1)...(19): siRNA sense strand
gaccggaucagacacuaca

SEQ ID NO: 1731345 - RNA, 19 nt, Homo sapiens
  misc_RNA (1)...(19): siRNA sense strand
ucccauggguggcuguaug

SEQ ID NO: 1731346 - RNA, 19 nt, Homo sapiens
  misc_RNA (1)...(19): siRNA sense strand
gcucuuacucucugucagu

SEQ ID NO: 1731347 - RNA, 19 nt, Homo sapiens
  misc_RNA (1)...(19): siRNA sense strand
gaggaacugcuguuguuac

SEQ ID NO: 1731348 - RNA, 19 nt, Homo sapiens
  misc_RNA (1)...(19): siRNA sense strand
agaggaacugcuguuguua

SEQ ID NO: 1731349 - RNA, 19 nt, Homo sapiens
  misc_RNA (1)...(19): siRNA sense strand
aggcagagaguauaacauc

SEQ ID NO: 1731350 - RNA, 19 nt, Homo sapiens
  misc_RNA (1)...(19): siRNA sense strand
ggacaccacucaacuggaa

SEQ ID NO: 1731351 - RNA, 19 nt, Homo sapiens
  misc_RNA (1)...(19): siRNA sense strand
cagaggaacugcuguuguu

SEQ ID NO: 1731352 - RNA, 19 nt, Homo sapiens
  misc_RNA (1)...(19): siRNA sense strand
ggacggugcugucugaagu

SEQ ID NO: 1731353 - RNA, 19 nt, Homo sapiens
  misc_RNA (1)...(19): siRNA sense strand
gacaauggcuggcuguaca

SEQ ID NO: 1731354 - RNA, 19 nt, Homo sapiens
  misc_RNA (1)...(19): siRNA sense strand
gguggacggugcugucuga

SEQ ID NO: 1731355 - RNA, 19 nt, Homo sapiens
  misc_RNA (1)...(19): siRNA sense strand
ggagaaagcagaggaacug

SEQ ID NO: 1731356 - RNA, 19 nt, Homo sapiens
  misc_RNA (1)...(19): siRNA sense strand
ggugcugucugaagucuca

SEQ ID NO: 1731357 - RNA, 19 nt, Homo sapiens
  misc_RNA (1)...(19): siRNA sense strand
gaccauggaagcagagaga

SEQ ID NO: 1731358 - RNA, 19 nt, Homo sapiens
  misc_RNA (1)...(19): siRNA sense strand
cauugaccaucgucucuga

SEQ ID NO: 1731359 - RNA, 19 nt, Homo sapiens
  misc_RNA (1)...(19): siRNA sense strand
gugcagaggacaccacuca

SEQ ID NO: 1731360 - RNA, 19 nt, Homo sapiens
  misc_RNA (1)...(19): siRNA sense strand
gauauaccccuaccuguga

SEQ ID NO: 1731361 - RNA, 19 nt, Homo sapiens
  misc_RNA (1)...(19): siRNA sense strand
gcagaggacaccacucaac

SEQ ID NO: 1731362 - RNA, 19 nt, Homo sapiens
  misc_RNA (1)...(19): siRNA sense strand
gauccacugccuugacaau

SEQ ID NO: 1731363 - RNA, 19 nt, Homo sapiens
  misc_RNA (1)...(19): siRNA sense strand
gaccaucgucucugaggau

SEQ ID NO: 1731364 - RNA, 19 nt, Homo sapiens
  misc_RNA (1)...(19): siRNA sense strand
gggaccggaucagacacua

SEQ ID NO: 1731365 - RNA, 19 nt, Homo sapiens
  misc_RNA (1)...(19): siRNA sense strand
gaccggaucagacacuaca

SEQ ID NO: 1731366 - RNA, 19 nt, Homo sapiens
  misc_RNA (1)...(19): siRNA sense strand
ucccauggguggcuguaug

SEQ ID NO: 1731367 - RNA, 19 nt, Homo sapiens
  misc_RNA (1)...(19): siRNA sense strand
gcucuuacucucugucagu

SEQ ID NO: 1731368 - RNA, 19 nt, Homo sapiens
  misc_RNA (1)...(19): siRNA sense strand
gaggaacugcuguuguuac

SEQ ID NO: 1731369 - RNA, 19 nt, Homo sapiens
  misc_RNA (1)...(19): siRNA sense strand
agaggaacugcuguuguua

SEQ ID NO: 1731370 - RNA, 19 nt, Homo sapiens
  misc_RNA (1)...(19): siRNA sense strand
aggcagagaguauaacauc

SEQ ID NO: 1731371 - RNA, 19 nt, Homo sapiens
  misc_RNA (1)...(19): siRNA sense strand
ccaaggcccugcagcugua

SEQ ID NO: 1731372 - RNA, 19 nt, Homo sapiens
  misc_RNA (1)...(19): siRNA sense strand
ggaggaggaugaagacaca

SEQ ID NO: 1731373 - RNA, 19 nt, Homo sapiens
  misc_RNA (1)...(19): siRNA sense strand
ggacacugaugcugaccuu

SEQ ID NO: 1731374 - RNA, 19 nt, Homo sapiens
  misc_RNA (1)...(19): siRNA sense strand
gaagcagcaugcccaggaa

SEQ ID NO: 1731375 - RNA, 19 nt, Homo sapiens
  misc_RNA (1)...(19): siRNA sense strand
gagccgagauccaccugau

SEQ ID NO: 1731376 - RNA, 19 nt, Homo sapiens
  misc_RNA (1)...(19): siRNA sense strand
cugcguaggucucaggauu

SEQ ID NO: 1731377 - RNA, 19 nt, Homo sapiens
  misc_RNA (1)...(19): siRNA sense strand
uugagccucuuuccugaua

SEQ ID NO: 1731378 - RNA, 19 nt, Homo sapiens
  misc_RNA (1)...(19): siRNA sense strand
gagcacauccagaaagaag

SEQ ID NO: 1731379 - RNA, 19 nt, Homo sapiens
  misc_RNA (1)...(19): siRNA sense strand
ccgagugccugcagaagau

SEQ ID NO: 1731380 - RNA, 19 nt, Homo sapiens
  misc_RNA (1)...(19): siRNA sense strand
ggacauacggggaaauuga

SEQ ID NO: 1731381 - RNA, 19 nt, Homo sapiens
  misc_RNA (1)...(19): siRNA sense strand
gaaagcugcuccggacacu

SEQ ID NO: 1731382 - RNA, 19 nt, Homo sapiens
  misc_RNA (1)...(19): siRNA sense strand
aguacaagcugcccaugga

SEQ ID NO: 1731383 - RNA, 19 nt, Homo sapiens
  misc_RNA (1)...(19): siRNA sense strand
ggaugaagacacagagaca

SEQ ID NO: 1731384 - RNA, 19 nt, Homo sapiens
  misc_RNA (1)...(19): siRNA sense strand
guuacgagcacauccagaa

SEQ ID NO: 1731385 - RNA, 19 nt, Homo sapiens
  misc_RNA (1)...(19): siRNA sense strand
ccugauccgugacaugaug

SEQ ID NO: 1731386 - RNA, 19 nt, Homo sapiens
  misc_RNA (1)...(19): siRNA sense strand
ugacgagcaaucagaggua

SEQ ID NO: 1731387 - RNA, 19 nt, Homo sapiens
  misc_RNA (1)...(19): siRNA sense strand
acgagcacauccagaaaga

SEQ ID NO: 1731388 - RNA, 19 nt, Homo sapiens
  misc_RNA (1)...(19): siRNA sense strand
gcugcgaguugccuuagag

SEQ ID NO: 1731389 - RNA, 19 nt, Homo sapiens
  misc_RNA (1)...(19): siRNA sense strand
caccugauccgugacauga

SEQ ID NO: 1731390 - RNA, 19 nt, Homo sapiens
  misc_RNA (1)...(19): siRNA sense strand
aagcugcuccggacacuga

SEQ ID NO: 1731391 - RNA, 19 nt, Homo sapiens
  misc_RNA (1)...(19): siRNA sense strand
ucuaccugcugcuucauga

SEQ ID NO: 1731392 - RNA, 19 nt, Homo sapiens
  misc_RNA (1)...(19): siRNA sense strand
gaugaagacacagagacaa

SEQ ID NO: 1731393 - RNA, 19 nt, Homo sapiens
  misc_RNA (1)...(19): siRNA sense strand
ggacagugugggcaguaug

SEQ ID NO: 1731394 - RNA, 19 nt, Homo sapiens
  misc_RNA (1)...(19): siRNA sense strand
gcguaggucucaggauuac

SEQ ID NO: 1731395 - RNA, 19 nt, Homo sapiens
  misc_RNA (1)...(19): siRNA sense strand
gaggacagugugggcagua

SEQ ID NO: 1731396 - RNA, 19 nt, Homo sapiens
  misc_RNA (1)...(19): siRNA sense strand
gcacauccagaaagaagac

SEQ ID NO: 1731397 - RNA, 19 nt, Homo sapiens
  misc_RNA (1)...(19): siRNA sense strand
gaccugcugccacuucuca

SEQ ID NO: 1731398 - RNA, 19 nt, Homo sapiens
  misc_RNA (1)...(19): siRNA sense strand
gaggaugaagacacagaga

SEQ ID NO: 1731399 - RNA, 19 nt, Homo sapiens
  misc_RNA (1)...(19): siRNA sense strand
caugaggcugcaccgcuua

SEQ ID NO: 1731400 - RNA, 19 nt, Homo sapiens
  misc_RNA (1)...(19): siRNA sense strand
ccaccgagugccugcagaa

SEQ ID NO: 1731401 - RNA, 19 nt, Homo sapiens
  misc_RNA (1)...(19): siRNA sense strand
ggcacggugucgaggguau

SEQ ID NO: 1731402 - RNA, 19 nt, Homo sapiens
  misc_RNA (1)...(19): siRNA sense strand
ccaaggcccugcagcugua

SEQ ID NO: 1731403 - RNA, 19 nt, Homo sapiens
  misc_RNA (1)...(19): siRNA sense strand
ggacacugaugcugaccuu

SEQ ID NO: 1731404 - RNA, 19 nt, Homo sapiens
  misc_RNA (1)...(19): siRNA sense strand
gaagcagcaugcccaggaa

SEQ ID NO: 1731405 - RNA, 19 nt, Homo sapiens
  misc_RNA (1)...(19): siRNA sense strand
cugcguaggucucaggauu

SEQ ID NO: 1731406 - RNA, 19 nt, Homo sapiens
  misc_RNA (1)...(19): siRNA sense strand
gaaagcugcuccggacacu

SEQ ID NO: 1731407 - RNA, 19 nt, Homo sapiens
  misc_RNA (1)...(19): siRNA sense strand
ggacagugugggcaguaug

SEQ ID NO: 1731408 - RNA, 19 nt, Homo sapiens
  misc_RNA (1)...(19): siRNA sense strand
aagcugcuccggacacuga

SEQ ID NO: 1731409 - RNA, 19 nt, Homo sapiens
  misc_RNA (1)...(19): siRNA sense strand
gcguaggucucaggauuac

SEQ ID NO: 1731410 - RNA, 19 nt, Homo sapiens
  misc_RNA (1)...(19): siRNA sense strand
gaggacagugugggcagua

SEQ ID NO: 1731411 - RNA, 19 nt, Homo sapiens
  misc_RNA (1)...(19): siRNA sense strand
ccaaggcccugcagcugua

SEQ ID NO: 1731412 - RNA, 19 nt, Homo sapiens
  misc_RNA (1)...(19): siRNA sense strand
ggaggaggaugaagacaca

SEQ ID NO: 1731413 - RNA, 19 nt, Homo sapiens
  misc_RNA (1)...(19): siRNA sense strand
ggacacugaugcugaccuu

SEQ ID NO: 1731414 - RNA, 19 nt, Homo sapiens
  misc_RNA (1)...(19): siRNA sense strand
gaagcagcaugcccaggaa

SEQ ID NO: 1731415 - RNA, 19 nt, Homo sapiens
  misc_RNA (1)...(19): siRNA sense strand
gagccgagauccaccugau

SEQ ID NO: 1731416 - RNA, 19 nt, Homo sapiens
  misc_RNA (1)...(19): siRNA sense strand
uugagccucuuuccugaua

SEQ ID NO: 1731417 - RNA, 19 nt, Homo sapiens
  misc_RNA (1)...(19): siRNA sense strand
gagcacauccagaaagaag

SEQ ID NO: 1731418 - RNA, 19 nt, Homo sapiens
  misc_RNA (1)...(19): siRNA sense strand
ccgagugccugcagaagau

SEQ ID NO: 1731419 - RNA, 19 nt, Homo sapiens
  misc_RNA (1)...(19): siRNA sense strand
ggacauacggggaaauuga

SEQ ID NO: 1731420 - RNA, 19 nt, Homo sapiens
  misc_RNA (1)...(19): siRNA sense strand
gaaagcugcuccggacacu

SEQ ID NO: 1731421 - RNA, 19 nt, Homo sapiens
  misc_RNA (1)...(19): siRNA sense strand
aguacaagcugcccaugga

SEQ ID NO: 1731422 - RNA, 19 nt, Homo sapiens
  misc_RNA (1)...(19): siRNA sense strand
ggaugaagacacagagaca

SEQ ID NO: 1731423 - RNA, 19 nt, Homo sapiens
  misc_RNA (1)...(19): siRNA sense strand
guuacgagcacauccagaa

SEQ ID NO: 1731424 - RNA, 19 nt, Homo sapiens
  misc_RNA (1)...(19): siRNA sense strand
ccugauccgugacaugaug

SEQ ID NO: 1731425 - RNA, 19 nt, Homo sapiens
  misc_RNA (1)...(19): siRNA sense strand
ugacgagcaaucagaggua

SEQ ID NO: 1731426 - RNA, 19 nt, Homo sapiens
  misc_RNA (1)...(19): siRNA sense strand
acgagcacauccagaaaga

SEQ ID NO: 1731427 - RNA, 19 nt, Homo sapiens
  misc_RNA (1)...(19): siRNA sense strand
gcugcgaguugccuuagag

SEQ ID NO: 1731428 - RNA, 19 nt, Homo sapiens
  misc_RNA (1)...(19): siRNA sense strand
caccugauccgugacauga

SEQ ID NO: 1731429 - RNA, 19 nt, Homo sapiens
  misc_RNA (1)...(19): siRNA sense strand
gaugaagacacagagacaa

SEQ ID NO: 1731430 - RNA, 19 nt, Homo sapiens
  misc_RNA (1)...(19): siRNA sense strand
aagcugcuccggacacuga

SEQ ID NO: 1731431 - RNA, 19 nt, Homo sapiens
  misc_RNA (1)...(19): siRNA sense strand
ucuaccugcugcuucauga

SEQ ID NO: 1731432 - RNA, 19 nt, Homo sapiens
  misc_RNA (1)...(19): siRNA sense strand
gaggaugaagacacagaga

SEQ ID NO: 1731433 - RNA, 19 nt, Homo sapiens
  misc_RNA (1)...(19): siRNA sense strand
gcacauccagaaagaagac

SEQ ID NO: 1731434 - RNA, 19 nt, Homo sapiens
  misc_RNA (1)...(19): siRNA sense strand
gaccugcugccacuucuca

SEQ ID NO: 1731435 - RNA, 19 nt, Homo sapiens
  misc_RNA (1)...(19): siRNA sense strand
caugaggcugcaccgcuua

SEQ ID NO: 1731436 - RNA, 19 nt, Homo sapiens
  misc_RNA (1)...(19): siRNA sense strand
ccaccgagugccugcagaa

SEQ ID NO: 1731437 - RNA, 19 nt, Homo sapiens
  misc_RNA (1)...(19): siRNA sense strand
ggcacggugucgaggguau

SEQ ID NO: 1731438 - RNA, 19 nt, Homo sapiens
  misc_RNA (1)...(19): siRNA sense strand
ccaaggcccugcagcugua

SEQ ID NO: 1731439 - RNA, 19 nt, Homo sapiens
  misc_RNA (1)...(19): siRNA sense strand
ggaggaggaugaagacaca

SEQ ID NO: 1731440 - RNA, 19 nt, Homo sapiens
  misc_RNA (1)...(19): siRNA sense strand
ggacacugaugcugaccuu

SEQ ID NO: 1731441 - RNA, 19 nt, Homo sapiens
  misc_RNA (1)...(19): siRNA sense strand
gaagcagcaugcccaggaa

SEQ ID NO: 1731442 - RNA, 19 nt, Homo sapiens
  misc_RNA (1)...(19): siRNA sense strand
gagccgagauccaccugau

SEQ ID NO: 1731443 - RNA, 19 nt, Homo sapiens
  misc_RNA (1)...(19): siRNA sense strand
cugcguaggucucaggauu

SEQ ID NO: 1731444 - RNA, 19 nt, Homo sapiens
  misc_RNA (1)...(19): siRNA sense strand
uugagccucuuuccugaua

SEQ ID NO: 1731445 - RNA, 19 nt, Homo sapiens
  misc_RNA (1)...(19): siRNA sense strand
gagcacauccagaaagaag

SEQ ID NO: 1731446 - RNA, 19 nt, Homo sapiens
  misc_RNA (1)...(19): siRNA sense strand
ccgagugccugcagaagau

SEQ ID NO: 1731447 - RNA, 19 nt, Homo sapiens
  misc_RNA (1)...(19): siRNA sense strand
ggacauacggggaaauuga

SEQ ID NO: 1731448 - RNA, 19 nt, Homo sapiens
  misc_RNA (1)...(19): siRNA sense strand
gaaagcugcuccggacacu

SEQ ID NO: 1731449 - RNA, 19 nt, Homo sapiens
  misc_RNA (1)...(19): siRNA sense strand
aguacaagcugcccaugga

SEQ ID NO: 1731450 - RNA, 19 nt, Homo sapiens
  misc_RNA (1)...(19): siRNA sense strand
ggaugaagacacagagaca

SEQ ID NO: 1731451 - RNA, 19 nt, Homo sapiens
  misc_RNA (1)...(19): siRNA sense strand
guuacgagcacauccagaa

SEQ ID NO: 1731452 - RNA, 19 nt, Homo sapiens
  misc_RNA (1)...(19): siRNA sense strand
ccugauccgugacaugaug

SEQ ID NO: 1731453 - RNA, 19 nt, Homo sapiens
  misc_RNA (1)...(19): siRNA sense strand
ugacgagcaaucagaggua

SEQ ID NO: 1731454 - RNA, 19 nt, Homo sapiens
  misc_RNA (1)...(19): siRNA sense strand
acgagcacauccagaaaga

SEQ ID NO: 1731455 - RNA, 19 nt, Homo sapiens
  misc_RNA (1)...(19): siRNA sense strand
gcugcgaguugccuuagag

SEQ ID NO: 1731456 - RNA, 19 nt, Homo sapiens
  misc_RNA (1)...(19): siRNA sense strand
caccugauccgugacauga

SEQ ID NO: 1731457 - RNA, 19 nt, Homo sapiens
  misc_RNA (1)...(19): siRNA sense strand
aagcugcuccggacacuga

SEQ ID NO: 1731458 - RNA, 19 nt, Homo sapiens
  misc_RNA (1)...(19): siRNA sense strand
ucuaccugcugcuucauga

SEQ ID NO: 1731459 - RNA, 19 nt, Homo sapiens
  misc_RNA (1)...(19): siRNA sense strand
gaugaagacacagagacaa

SEQ ID NO: 1731460 - RNA, 19 nt, Homo sapiens
  misc_RNA (1)...(19): siRNA sense strand
ggacagugugggcaguaug

SEQ ID NO: 1731461 - RNA, 19 nt, Homo sapiens
  misc_RNA (1)...(19): siRNA sense strand
gcguaggucucaggauuac

SEQ ID NO: 1731462 - RNA, 19 nt, Homo sapiens
  misc_RNA (1)...(19): siRNA sense strand
gaggacagugugggcagua

SEQ ID NO: 1731463 - RNA, 19 nt, Homo sapiens
  misc_RNA (1)...(19): siRNA sense strand
gcacauccagaaagaagac

SEQ ID NO: 1731464 - RNA, 19 nt, Homo sapiens
  misc_RNA (1)...(19): siRNA sense strand
gaccugcugccacuucuca

SEQ ID NO: 1731465 - RNA, 19 nt, Homo sapiens
  misc_RNA (1)...(19): siRNA sense strand
gaggaugaagacacagaga

SEQ ID NO: 1731466 - RNA, 19 nt, Homo sapiens
  misc_RNA (1)...(19): siRNA sense strand
caugaggcugcaccgcuua

SEQ ID NO: 1731467 - RNA, 19 nt, Homo sapiens
  misc_RNA (1)...(19): siRNA sense strand
ccaccgagugccugcagaa

SEQ ID NO: 1731468 - RNA, 19 nt, Homo sapiens
  misc_RNA (1)...(19): siRNA sense strand
ggcacggugucgaggguau

SEQ ID NO: 1731469 - RNA, 19 nt, Homo sapiens
  misc_RNA (1)...(19): siRNA sense strand
gaaacuuccuguacauaaa

SEQ ID NO: 1731470 - RNA, 19 nt, Homo sapiens
  misc_RNA (1)...(19): siRNA sense strand
gacagaaucuucagacuau

SEQ ID NO: 1731471 - RNA, 19 nt, Homo sapiens
  misc_RNA (1)...(19): siRNA sense strand
gaaacagacuucguaaaga

SEQ ID NO: 1731472 - RNA, 19 nt, Homo sapiens
  misc_RNA (1)...(19): siRNA sense strand
gaaaggagaugaguaugau

SEQ ID NO: 1731473 - RNA, 19 nt, Homo sapiens
  misc_RNA (1)...(19): siRNA sense strand
guaugaagauggagacaaa

SEQ ID NO: 1731474 - RNA, 19 nt, Homo sapiens
  misc_RNA (1)...(19): siRNA sense strand
cuaauucucugaaagauga

SEQ ID NO: 1731475 - RNA, 19 nt, Homo sapiens
  misc_RNA (1)...(19): siRNA sense strand
ugaacgggauuacaacaua

SEQ ID NO: 1731476 - RNA, 19 nt, Homo sapiens
  misc_RNA (1)...(19): siRNA sense strand
gaacauaccccuuuacuga

SEQ ID NO: 1731477 - RNA, 19 nt, Homo sapiens
  misc_RNA (1)...(19): siRNA sense strand
gaacaugacagaaucuuca

SEQ ID NO: 1731478 - RNA, 19 nt, Homo sapiens
  misc_RNA (1)...(19): siRNA sense strand
cuaauucccuuccuuauca

SEQ ID NO: 1731479 - RNA, 19 nt, Homo sapiens
  misc_RNA (1)...(19): siRNA sense strand
cauagugccuccaccagua

SEQ ID NO: 1731480 - RNA, 19 nt, Homo sapiens
  misc_RNA (1)...(19): siRNA sense strand
aaacagacuucguaaagau

SEQ ID NO: 1731481 - RNA, 19 nt, Homo sapiens
  misc_RNA (1)...(19): siRNA sense strand
gggcaucugucucaucuug

SEQ ID NO: 1731482 - RNA, 19 nt, Homo sapiens
  misc_RNA (1)...(19): siRNA sense strand
caagaaaggagaugaguau

SEQ ID NO: 1731483 - RNA, 19 nt, Homo sapiens
  misc_RNA (1)...(19): siRNA sense strand
gaaugccugugaacccaua

SEQ ID NO: 1731484 - RNA, 19 nt, Homo sapiens
  misc_RNA (1)...(19): siRNA sense strand
gcacuuucaucguguuaau

SEQ ID NO: 1731485 - RNA, 19 nt, Homo sapiens
  misc_RNA (1)...(19): siRNA sense strand
gaacgggauuacaacauag

SEQ ID NO: 1731486 - RNA, 19 nt, Homo sapiens
  misc_RNA (1)...(19): siRNA sense strand
gaaucccgcucacaucaga

SEQ ID NO: 1731487 - RNA, 19 nt, Homo sapiens
  misc_RNA (1)...(19): siRNA sense strand
ggauagacauagagcuaga

SEQ ID NO: 1731488 - RNA, 19 nt, Homo sapiens
  misc_RNA (1)...(19): siRNA sense strand
agacauagagcuagaagaa

SEQ ID NO: 1731489 - RNA, 19 nt, Homo sapiens
  misc_RNA (1)...(19): siRNA sense strand
ggagaugaguaugauguau

SEQ ID NO: 1731490 - RNA, 19 nt, Homo sapiens
  misc_RNA (1)...(19): siRNA sense strand
uaagaaacuuccuguacau

SEQ ID NO: 1731491 - RNA, 19 nt, Homo sapiens
  misc_RNA (1)...(19): siRNA sense strand
caauucaucuggcacuuuc

SEQ ID NO: 1731492 - RNA, 19 nt, Homo sapiens
  misc_RNA (1)...(19): siRNA sense strand
uuaagaaacuuccuguaca

SEQ ID NO: 1731493 - RNA, 19 nt, Homo sapiens
  misc_RNA (1)...(19): siRNA sense strand
agacaguagucaagaagaa

SEQ ID NO: 1731494 - RNA, 19 nt, Homo sapiens
  misc_RNA (1)...(19): siRNA sense strand
guagacccuuggcuaacua

SEQ ID NO: 1731495 - RNA, 19 nt, Homo sapiens
  misc_RNA (1)...(19): siRNA sense strand
gaagacgacaaugaagaua

SEQ ID NO: 1731496 - RNA, 19 nt, Homo sapiens
  misc_RNA (1)...(19): siRNA sense strand
ggaugaguaugaagaugga

SEQ ID NO: 1731497 - RNA, 19 nt, Homo sapiens
  misc_RNA (1)...(19): siRNA sense strand
ggaagacgacaaugaagau

SEQ ID NO: 1731498 - RNA, 19 nt, Homo sapiens
  misc_RNA (1)...(19): siRNA sense strand
aaauugacauuccaucugu

SEQ ID NO: 1731499 - RNA, 19 nt, Homo sapiens
  misc_RNA (1)...(19): siRNA sense strand
ugacaguagugaugcagaa

SEQ ID NO: 1731500 - RNA, 19 nt, Homo sapiens
  misc_RNA (1)...(19): siRNA sense strand
ugacagaaucuucagacua

SEQ ID NO: 1731501 - RNA, 19 nt, Homo sapiens
  misc_RNA (1)...(19): siRNA sense strand
caucagaacaugacagaau

SEQ ID NO: 1731502 - RNA, 19 nt, Homo sapiens
  misc_RNA (1)...(19): siRNA sense strand
gaauuuagucuuccuuugg

SEQ ID NO: 1731503 - RNA, 19 nt, Homo sapiens
  misc_RNA (1)...(19): siRNA sense strand
ugucucaucuugauaguca

SEQ ID NO: 1731504 - RNA, 19 nt, Homo sapiens
  misc_RNA (1)...(19): siRNA sense strand
uaugauguaugugccauuu

SEQ ID NO: 1731505 - RNA, 19 nt, Homo sapiens
  misc_RNA (1)...(19): siRNA sense strand
gcaucugucucaucuugau

SEQ ID NO: 1731506 - RNA, 19 nt, Homo sapiens
  misc_RNA (1)...(19): siRNA sense strand
ucaaggcgauucagacucu

SEQ ID NO: 1731507 - RNA, 19 nt, Homo sapiens
  misc_RNA (1)...(19): siRNA sense strand
ccauuuguuuggaugagua

SEQ ID NO: 1731508 - RNA, 19 nt, Homo sapiens
  misc_RNA (1)...(19): siRNA sense strand
gcacagagagcaggauaca

SEQ ID NO: 1731509 - RNA, 19 nt, Homo sapiens
  misc_RNA (1)...(19): siRNA sense strand
ggugaaucaucagcuaauu

SEQ ID NO: 1731510 - RNA, 19 nt, Homo sapiens
  misc_RNA (1)...(19): siRNA sense strand
agaaacuuccuguacauaa

SEQ ID NO: 1731511 - RNA, 19 nt, Homo sapiens
  misc_RNA (1)...(19): siRNA sense strand
ugaggaagacgacaaugaa

SEQ ID NO: 1731512 - RNA, 19 nt, Homo sapiens
  misc_RNA (1)...(19): siRNA sense strand
cauuccaucugucuuuauu

SEQ ID NO: 1731513 - RNA, 19 nt, Homo sapiens
  misc_RNA (1)...(19): siRNA sense strand
ugauguaugugccauuugu

SEQ ID NO: 1731514 - RNA, 19 nt, Homo sapiens
  misc_RNA (1)...(19): siRNA sense strand
agaaaggagaugaguauga

SEQ ID NO: 1731515 - RNA, 19 nt, Homo sapiens
  misc_RNA (1)...(19): siRNA sense strand
agaaacagacuucguaaag

SEQ ID NO: 1731516 - RNA, 19 nt, Homo sapiens
  misc_RNA (1)...(19): siRNA sense strand
caggauagacauagagcua

SEQ ID NO: 1731517 - RNA, 19 nt, Homo sapiens
  misc_RNA (1)...(19): siRNA sense strand
acauagagcuagaagaaac

SEQ ID NO: 1731518 - RNA, 19 nt, Homo sapiens
  misc_RNA (1)...(19): siRNA sense strand
gggauuacaacauagcaaa

SEQ ID NO: 1731519 - RNA, 19 nt, Homo sapiens
  misc_RNA (1)...(19): siRNA sense strand
gagaugaguaugauguaug

SEQ ID NO: 1731520 - RNA, 19 nt, Homo sapiens
  misc_RNA (1)...(19): siRNA sense strand
auacaaggcagccauaguu

SEQ ID NO: 1731521 - RNA, 19 nt, Homo sapiens
  misc_RNA (1)...(19): siRNA sense strand
gacagaacauaccccuuua

SEQ ID NO: 1731522 - RNA, 19 nt, Homo sapiens
  misc_RNA (1)...(19): siRNA sense strand
cagcuaauucucugaaaga

SEQ ID NO: 1731523 - RNA, 19 nt, Homo sapiens
  misc_RNA (1)...(19): siRNA sense strand
agaauuuagucuuccuuug

SEQ ID NO: 1731524 - RNA, 19 nt, Homo sapiens
  misc_RNA (1)...(19): siRNA sense strand
ucaagaaaggagaugagua

SEQ ID NO: 1731525 - RNA, 19 nt, Homo sapiens
  misc_RNA (1)...(19): siRNA sense strand
agccauaguucacaauguu

SEQ ID NO: 1731526 - RNA, 19 nt, Homo sapiens
  misc_RNA (1)...(19): siRNA sense strand
ucguaaagaucaacuuaag

SEQ ID NO: 1731527 - RNA, 19 nt, Homo sapiens
  misc_RNA (1)...(19): siRNA sense strand
guuccagaauuuagucuuc

SEQ ID NO: 1731528 - RNA, 19 nt, Homo sapiens
  misc_RNA (1)...(19): siRNA sense strand
ucacaauguugauucugau

SEQ ID NO: 1731529 - RNA, 19 nt, Homo sapiens
  misc_RNA (1)...(19): siRNA sense strand
uuacugagaccuuuagcuu

SEQ ID NO: 1731530 - RNA, 19 nt, Homo sapiens
  misc_RNA (1)...(19): siRNA sense strand
agaugaguaugauguaugu

SEQ ID NO: 1731531 - RNA, 19 nt, Homo sapiens
  misc_RNA (1)...(19): siRNA sense strand
cacagacaguagucaagaa

SEQ ID NO: 1731532 - RNA, 19 nt, Homo sapiens
  misc_RNA (1)...(19): siRNA sense strand
cagaaucuucagacuauga

SEQ ID NO: 1731533 - RNA, 19 nt, Homo sapiens
  misc_RNA (1)...(19): siRNA sense strand
acagagagcaggauacaag

SEQ ID NO: 1731534 - RNA, 19 nt, Homo sapiens
  misc_RNA (1)...(19): siRNA sense strand
uaccuaauucccuuccuua

SEQ ID NO: 1731535 - RNA, 19 nt, Homo sapiens
  misc_RNA (1)...(19): siRNA sense strand
cuucguaaagaucaacuua

SEQ ID NO: 1731536 - RNA, 19 nt, Homo sapiens
  misc_RNA (1)...(19): siRNA sense strand
cuaccuaauucccuuccuu

SEQ ID NO: 1731537 - RNA, 19 nt, Homo sapiens
  misc_RNA (1)...(19): siRNA sense strand
aaaaugaagugacagaaca

SEQ ID NO: 1731538 - RNA, 19 nt, Homo sapiens
  misc_RNA (1)...(19): siRNA sense strand
cagaauuuagucuuccuuu

SEQ ID NO: 1731539 - RNA, 19 nt, Homo sapiens
  misc_RNA (1)...(19): siRNA sense strand
gacaguagucaagaagaaa

SEQ ID NO: 1731540 - RNA, 19 nt, Homo sapiens
  misc_RNA (1)...(19): siRNA sense strand
gaucaacuuaagaaacuuc

SEQ ID NO: 1731541 - RNA, 19 nt, Homo sapiens
  misc_RNA (1)...(19): siRNA sense strand
gacauagagcuagaagaaa

SEQ ID NO: 1731542 - RNA, 19 nt, Homo sapiens
  misc_RNA (1)...(19): siRNA sense strand
aaccagagaaugccuguga

SEQ ID NO: 1731543 - RNA, 19 nt, Homo sapiens
  misc_RNA (1)...(19): siRNA sense strand
acugagaccuuuagcuucu

SEQ ID NO: 1731544 - RNA, 19 nt, Homo sapiens
  misc_RNA (1)...(19): siRNA sense strand
ugacagaacauaccccuuu

SEQ ID NO: 1731545 - RNA, 19 nt, Homo sapiens
  misc_RNA (1)...(19): siRNA sense strand
cagccauaguucacaaugu

SEQ ID NO: 1731546 - RNA, 19 nt, Homo sapiens
  misc_RNA (1)...(19): siRNA sense strand
gugggcaucugucucaucu

SEQ ID NO: 1731547 - RNA, 19 nt, Homo sapiens
  misc_RNA (1)...(19): siRNA sense strand
uaucauagugggcaucugu

SEQ ID NO: 1731548 - RNA, 19 nt, Homo sapiens
  misc_RNA (1)...(19): siRNA sense strand
gauacaaggcagccauagu

SEQ ID NO: 1731549 - RNA, 19 nt, Homo sapiens
  misc_RNA (1)...(19): siRNA sense strand
gggccaccuuaucuuaguu

SEQ ID NO: 1731550 - RNA, 19 nt, Homo sapiens
  misc_RNA (1)...(19): siRNA sense strand
aauuuagucuuccuuugga

SEQ ID NO: 1731551 - RNA, 19 nt, Homo sapiens
  misc_RNA (1)...(19): siRNA sense strand
ggauuacaacauagcaaau

SEQ ID NO: 1731552 - RNA, 19 nt, Homo sapiens
  misc_RNA (1)...(19): siRNA sense strand
agacgacaaugaagauacu

SEQ ID NO: 1731553 - RNA, 19 nt, Homo sapiens
  misc_RNA (1)...(19): siRNA sense strand
gacaauucaucuggcacuu

SEQ ID NO: 1731554 - RNA, 19 nt, Homo sapiens
  misc_RNA (1)...(19): siRNA sense strand
gcuaauucucugaaagaug

SEQ ID NO: 1731555 - RNA, 19 nt, Homo sapiens
  misc_RNA (1)...(19): siRNA sense strand
ugucagugcccagucauuu

SEQ ID NO: 1731556 - RNA, 19 nt, Homo sapiens
  misc_RNA (1)...(19): siRNA sense strand
uucacaauguugauucuga

SEQ ID NO: 1731557 - RNA, 19 nt, Homo sapiens
  misc_RNA (1)...(19): siRNA sense strand
gcagccauaguucacaaug

SEQ ID NO: 1731558 - RNA, 19 nt, Homo sapiens
  misc_RNA (1)...(19): siRNA sense strand
caauguugauucugaugac

SEQ ID NO: 1731559 - RNA, 19 nt, Homo sapiens
  misc_RNA (1)...(19): siRNA sense strand
gaggaagacgacaaugaag

SEQ ID NO: 1731560 - RNA, 19 nt, Homo sapiens
  misc_RNA (1)...(19): siRNA sense strand
aagaaacuuccuguacaua

SEQ ID NO: 1731561 - RNA, 19 nt, Homo sapiens
  misc_RNA (1)...(19): siRNA sense strand
ccuuuggaauacuaccuaa

SEQ ID NO: 1731562 - RNA, 19 nt, Homo sapiens
  misc_RNA (1)...(19): siRNA sense strand
agaagaaaaugaagugaca

SEQ ID NO: 1731563 - RNA, 19 nt, Homo sapiens
  misc_RNA (1)...(19): siRNA sense strand
ccauaguucacaauguuga

SEQ ID NO: 1731564 - RNA, 19 nt, Homo sapiens
  misc_RNA (1)...(19): siRNA sense strand
acacagacaguagucaaga

SEQ ID NO: 1731565 - RNA, 19 nt, Homo sapiens
  misc_RNA (1)...(19): siRNA sense strand
cguaaagaucaacuuaaga

SEQ ID NO: 1731566 - RNA, 19 nt, Homo sapiens
  misc_RNA (1)...(19): siRNA sense strand
ugucuuuauuggugaauca

SEQ ID NO: 1731567 - RNA, 19 nt, Homo sapiens
  misc_RNA (1)...(19): siRNA sense strand
cggaaucccgcucacauca

SEQ ID NO: 1731568 - RNA, 19 nt, Homo sapiens
  misc_RNA (1)...(19): siRNA sense strand
guagugaugcagaaaauga

SEQ ID NO: 1731569 - RNA, 19 nt, Homo sapiens
  misc_RNA (1)...(19): siRNA sense strand
gaaacuuccuguacauaaa

SEQ ID NO: 1731570 - RNA, 19 nt, Homo sapiens
  misc_RNA (1)...(19): siRNA sense strand
gacagaaucuucagacuau

SEQ ID NO: 1731571 - RNA, 19 nt, Homo sapiens
  misc_RNA (1)...(19): siRNA sense strand
gaaacagacuucguaaaga

SEQ ID NO: 1731572 - RNA, 19 nt, Homo sapiens
  misc_RNA (1)...(19): siRNA sense strand
gaaaggagaugaguaugau

SEQ ID NO: 1731573 - RNA, 19 nt, Homo sapiens
  misc_RNA (1)...(19): siRNA sense strand
guaugaagauggagacaaa

SEQ ID NO: 1731574 - RNA, 19 nt, Homo sapiens
  misc_RNA (1)...(19): siRNA sense strand
cuaauucucugaaagauga

SEQ ID NO: 1731575 - RNA, 19 nt, Homo sapiens
  misc_RNA (1)...(19): siRNA sense strand
ugaacgggauuacaacaua

SEQ ID NO: 1731576 - RNA, 19 nt, Homo sapiens
  misc_RNA (1)...(19): siRNA sense strand
gaacauaccccuuuacuga

SEQ ID NO: 1731577 - RNA, 19 nt, Homo sapiens
  misc_RNA (1)...(19): siRNA sense strand
gaacaugacagaaucuuca

SEQ ID NO: 1731578 - RNA, 19 nt, Homo sapiens
  misc_RNA (1)...(19): siRNA sense strand
cuaauucccuuccuuauca

SEQ ID NO: 1731579 - RNA, 19 nt, Homo sapiens
  misc_RNA (1)...(19): siRNA sense strand
cauagugccuccaccagua

SEQ ID NO: 1731580 - RNA, 19 nt, Homo sapiens
  misc_RNA (1)...(19): siRNA sense strand
aaacagacuucguaaagau

SEQ ID NO: 1731581 - RNA, 19 nt, Homo sapiens
  misc_RNA (1)...(19): siRNA sense strand
gggcaucugucucaucuug

SEQ ID NO: 1731582 - RNA, 19 nt, Homo sapiens
  misc_RNA (1)...(19): siRNA sense strand
caagaaaggagaugaguau

SEQ ID NO: 1731583 - RNA, 19 nt, Homo sapiens
  misc_RNA (1)...(19): siRNA sense strand
gaaugccugugaacccaua

SEQ ID NO: 1731584 - RNA, 19 nt, Homo sapiens
  misc_RNA (1)...(19): siRNA sense strand
gcacuuucaucguguuaau

SEQ ID NO: 1731585 - RNA, 19 nt, Homo sapiens
  misc_RNA (1)...(19): siRNA sense strand
gaacgggauuacaacauag

SEQ ID NO: 1731586 - RNA, 19 nt, Homo sapiens
  misc_RNA (1)...(19): siRNA sense strand
gaaucccgcucacaucaga

SEQ ID NO: 1731587 - RNA, 19 nt, Homo sapiens
  misc_RNA (1)...(19): siRNA sense strand
ggauagacauagagcuaga

SEQ ID NO: 1731588 - RNA, 19 nt, Homo sapiens
  misc_RNA (1)...(19): siRNA sense strand
agacauagagcuagaagaa

SEQ ID NO: 1731589 - RNA, 19 nt, Homo sapiens
  misc_RNA (1)...(19): siRNA sense strand
ggagaugaguaugauguau

SEQ ID NO: 1731590 - RNA, 19 nt, Homo sapiens
  misc_RNA (1)...(19): siRNA sense strand
uaagaaacuuccuguacau

SEQ ID NO: 1731591 - RNA, 19 nt, Homo sapiens
  misc_RNA (1)...(19): siRNA sense strand
caauucaucuggcacuuuc

SEQ ID NO: 1731592 - RNA, 19 nt, Homo sapiens
  misc_RNA (1)...(19): siRNA sense strand
uuaagaaacuuccuguaca

SEQ ID NO: 1731593 - RNA, 19 nt, Homo sapiens
  misc_RNA (1)...(19): siRNA sense strand
agacaguagucaagaagaa

SEQ ID NO: 1731594 - RNA, 19 nt, Homo sapiens
  misc_RNA (1)...(19): siRNA sense strand
guagacccuuggcuaacua

SEQ ID NO: 1731595 - RNA, 19 nt, Homo sapiens
  misc_RNA (1)...(19): siRNA sense strand
gaagacgacaaugaagaua

SEQ ID NO: 1731596 - RNA, 19 nt, Homo sapiens
  misc_RNA (1)...(19): siRNA sense strand
ggaugaguaugaagaugga

SEQ ID NO: 1731597 - RNA, 19 nt, Homo sapiens
  misc_RNA (1)...(19): siRNA sense strand
ggaagacgacaaugaagau

SEQ ID NO: 1731598 - RNA, 19 nt, Homo sapiens
  misc_RNA (1)...(19): siRNA sense strand
aaauugacauuccaucugu

SEQ ID NO: 1731599 - RNA, 19 nt, Homo sapiens
  misc_RNA (1)...(19): siRNA sense strand
ugacaguagugaugcagaa

SEQ ID NO: 1731600 - RNA, 19 nt, Homo sapiens
  misc_RNA (1)...(19): siRNA sense strand
ugacagaaucuucagacua

SEQ ID NO: 1731601 - RNA, 19 nt, Homo sapiens
  misc_RNA (1)...(19): siRNA sense strand
caucagaacaugacagaau

SEQ ID NO: 1731602 - RNA, 19 nt, Homo sapiens
  misc_RNA (1)...(19): siRNA sense strand
gaauuuagucuuccuuugg

SEQ ID NO: 1731603 - RNA, 19 nt, Homo sapiens
  misc_RNA (1)...(19): siRNA sense strand
ugucucaucuugauaguca

SEQ ID NO: 1731604 - RNA, 19 nt, Homo sapiens
  misc_RNA (1)...(19): siRNA sense strand
uaugauguaugugccauuu

SEQ ID NO: 1731605 - RNA, 19 nt, Homo sapiens
  misc_RNA (1)...(19): siRNA sense strand
gcaucugucucaucuugau

SEQ ID NO: 1731606 - RNA, 19 nt, Homo sapiens
  misc_RNA (1)...(19): siRNA sense strand
ucaaggcgauucagacucu

SEQ ID NO: 1731607 - RNA, 19 nt, Homo sapiens
  misc_RNA (1)...(19): siRNA sense strand
ccauuuguuuggaugagua

SEQ ID NO: 1731608 - RNA, 19 nt, Homo sapiens
  misc_RNA (1)...(19): siRNA sense strand
gcacagagagcaggauaca

SEQ ID NO: 1731609 - RNA, 19 nt, Homo sapiens
  misc_RNA (1)...(19): siRNA sense strand
ggugaaucaucagcuaauu

SEQ ID NO: 1731610 - RNA, 19 nt, Homo sapiens
  misc_RNA (1)...(19): siRNA sense strand
agaaacuuccuguacauaa

SEQ ID NO: 1731611 - RNA, 19 nt, Homo sapiens
  misc_RNA (1)...(19): siRNA sense strand
ugaggaagacgacaaugaa

SEQ ID NO: 1731612 - RNA, 19 nt, Homo sapiens
  misc_RNA (1)...(19): siRNA sense strand
cauuccaucugucuuuauu

SEQ ID NO: 1731613 - RNA, 19 nt, Homo sapiens
  misc_RNA (1)...(19): siRNA sense strand
ugauguaugugccauuugu

SEQ ID NO: 1731614 - RNA, 19 nt, Homo sapiens
  misc_RNA (1)...(19): siRNA sense strand
agaaaggagaugaguauga

SEQ ID NO: 1731615 - RNA, 19 nt, Homo sapiens
  misc_RNA (1)...(19): siRNA sense strand
agaaacagacuucguaaag

SEQ ID NO: 1731616 - RNA, 19 nt, Homo sapiens
  misc_RNA (1)...(19): siRNA sense strand
caggauagacauagagcua

SEQ ID NO: 1731617 - RNA, 19 nt, Homo sapiens
  misc_RNA (1)...(19): siRNA sense strand
acauagagcuagaagaaac

SEQ ID NO: 1731618 - RNA, 19 nt, Homo sapiens
  misc_RNA (1)...(19): siRNA sense strand
gggauuacaacauagcaaa

SEQ ID NO: 1731619 - RNA, 19 nt, Homo sapiens
  misc_RNA (1)...(19): siRNA sense strand
gagaugaguaugauguaug

SEQ ID NO: 1731620 - RNA, 19 nt, Homo sapiens
  misc_RNA (1)...(19): siRNA sense strand
auacaaggcagccauaguu

SEQ ID NO: 1731621 - RNA, 19 nt, Homo sapiens
  misc_RNA (1)...(19): siRNA sense strand
gacagaacauaccccuuua

SEQ ID NO: 1731622 - RNA, 19 nt, Homo sapiens
  misc_RNA (1)...(19): siRNA sense strand
cagcuaauucucugaaaga

SEQ ID NO: 1731623 - RNA, 19 nt, Homo sapiens
  misc_RNA (1)...(19): siRNA sense strand
agaauuuagucuuccuuug

SEQ ID NO: 1731624 - RNA, 19 nt, Homo sapiens
  misc_RNA (1)...(19): siRNA sense strand
ucaagaaaggagaugagua

SEQ ID NO: 1731625 - RNA, 19 nt, Homo sapiens
  misc_RNA (1)...(19): siRNA sense strand
agccauaguucacaauguu

SEQ ID NO: 1731626 - RNA, 19 nt, Homo sapiens
  misc_RNA (1)...(19): siRNA sense strand
ucguaaagaucaacuuaag

SEQ ID NO: 1731627 - RNA, 19 nt, Homo sapiens
  misc_RNA (1)...(19): siRNA sense strand
guuccagaauuuagucuuc

SEQ ID NO: 1731628 - RNA, 19 nt, Homo sapiens
  misc_RNA (1)...(19): siRNA sense strand
ucacaauguugauucugau

SEQ ID NO: 1731629 - RNA, 19 nt, Homo sapiens
  misc_RNA (1)...(19): siRNA sense strand
uuacugagaccuuuagcuu

SEQ ID NO: 1731630 - RNA, 19 nt, Homo sapiens
  misc_RNA (1)...(19): siRNA sense strand
agaugaguaugauguaugu

SEQ ID NO: 1731631 - RNA, 19 nt, Homo sapiens
  misc_RNA (1)...(19): siRNA sense strand
cacagacaguagucaagaa

SEQ ID NO: 1731632 - RNA, 19 nt, Homo sapiens
  misc_RNA (1)...(19): siRNA sense strand
cagaaucuucagacuauga

SEQ ID NO: 1731633 - RNA, 19 nt, Homo sapiens
  misc_RNA (1)...(19): siRNA sense strand
acagagagcaggauacaag

SEQ ID NO: 1731634 - RNA, 19 nt, Homo sapiens
  misc_RNA (1)...(19): siRNA sense strand
uaccuaauucccuuccuua

SEQ ID NO: 1731635 - RNA, 19 nt, Homo sapiens
  misc_RNA (1)...(19): siRNA sense strand
cuucguaaagaucaacuua

SEQ ID NO: 1731636 - RNA, 19 nt, Homo sapiens
  misc_RNA (1)...(19): siRNA sense strand
cuaccuaauucccuuccuu

SEQ ID NO: 1731637 - RNA, 19 nt, Homo sapiens
  misc_RNA (1)...(19): siRNA sense strand
aaaaugaagugacagaaca

SEQ ID NO: 1731638 - RNA, 19 nt, Homo sapiens
  misc_RNA (1)...(19): siRNA sense strand
cagaauuuagucuuccuuu

SEQ ID NO: 1731639 - RNA, 19 nt, Homo sapiens
  misc_RNA (1)...(19): siRNA sense strand
gacaguagucaagaagaaa

SEQ ID NO: 1731640 - RNA, 19 nt, Homo sapiens
  misc_RNA (1)...(19): siRNA sense strand
gaucaacuuaagaaacuuc

SEQ ID NO: 1731641 - RNA, 19 nt, Homo sapiens
  misc_RNA (1)...(19): siRNA sense strand
gacauagagcuagaagaaa

SEQ ID NO: 1731642 - RNA, 19 nt, Homo sapiens
  misc_RNA (1)...(19): siRNA sense strand
aaccagagaaugccuguga

SEQ ID NO: 1731643 - RNA, 19 nt, Homo sapiens
  misc_RNA (1)...(19): siRNA sense strand
acugagaccuuuagcuucu

SEQ ID NO: 1731644 - RNA, 19 nt, Homo sapiens
  misc_RNA (1)...(19): siRNA sense strand
ugacagaacauaccccuuu

SEQ ID NO: 1731645 - RNA, 19 nt, Homo sapiens
  misc_RNA (1)...(19): siRNA sense strand
cagccauaguucacaaugu

SEQ ID NO: 1731646 - RNA, 19 nt, Homo sapiens
  misc_RNA (1)...(19): siRNA sense strand
gugggcaucugucucaucu

SEQ ID NO: 1731647 - RNA, 19 nt, Homo sapiens
  misc_RNA (1)...(19): siRNA sense strand
uaucauagugggcaucugu

SEQ ID NO: 1731648 - RNA, 19 nt, Homo sapiens
  misc_RNA (1)...(19): siRNA sense strand
gauacaaggcagccauagu

SEQ ID NO: 1731649 - RNA, 19 nt, Homo sapiens
  misc_RNA (1)...(19): siRNA sense strand
gggccaccuuaucuuaguu

SEQ ID NO: 1731650 - RNA, 19 nt, Homo sapiens
  misc_RNA (1)...(19): siRNA sense strand
aauuuagucuuccuuugga

SEQ ID NO: 1731651 - RNA, 19 nt, Homo sapiens
  misc_RNA (1)...(19): siRNA sense strand
ggauuacaacauagcaaau

SEQ ID NO: 1731652 - RNA, 19 nt, Homo sapiens
  misc_RNA (1)...(19): siRNA sense strand
agacgacaaugaagauacu

SEQ ID NO: 1731653 - RNA, 19 nt, Homo sapiens
  misc_RNA (1)...(19): siRNA sense strand
gacaauucaucuggcacuu

SEQ ID NO: 1731654 - RNA, 19 nt, Homo sapiens
  misc_RNA (1)...(19): siRNA sense strand
gcuaauucucugaaagaug

SEQ ID NO: 1731655 - RNA, 19 nt, Homo sapiens
  misc_RNA (1)...(19): siRNA sense strand
ugucagugcccagucauuu

SEQ ID NO: 1731656 - RNA, 19 nt, Homo sapiens
  misc_RNA (1)...(19): siRNA sense strand
uucacaauguugauucuga

SEQ ID NO: 1731657 - RNA, 19 nt, Homo sapiens
  misc_RNA (1)...(19): siRNA sense strand
gcagccauaguucacaaug

SEQ ID NO: 1731658 - RNA, 19 nt, Homo sapiens
  misc_RNA (1)...(19): siRNA sense strand
caauguugauucugaugac

SEQ ID NO: 1731659 - RNA, 19 nt, Homo sapiens
  misc_RNA (1)...(19): siRNA sense strand
gaggaagacgacaaugaag

SEQ ID NO: 1731660 - RNA, 19 nt, Homo sapiens
  misc_RNA (1)...(19): siRNA sense strand
aagaaacuuccuguacaua

SEQ ID NO: 1731661 - RNA, 19 nt, Homo sapiens
  misc_RNA (1)...(19): siRNA sense strand
ccuuuggaauacuaccuaa

SEQ ID NO: 1731662 - RNA, 19 nt, Homo sapiens
  misc_RNA (1)...(19): siRNA sense strand
agaagaaaaugaagugaca

SEQ ID NO: 1731663 - RNA, 19 nt, Homo sapiens
  misc_RNA (1)...(19): siRNA sense strand
ccauaguucacaauguuga

SEQ ID NO: 1731664 - RNA, 19 nt, Homo sapiens
  misc_RNA (1)...(19): siRNA sense strand
acacagacaguagucaaga

SEQ ID NO: 1731665 - RNA, 19 nt, Homo sapiens
  misc_RNA (1)...(19): siRNA sense strand
cguaaagaucaacuuaaga

SEQ ID NO: 1731666 - RNA, 19 nt, Homo sapiens
  misc_RNA (1)...(19): siRNA sense strand
ugucuuuauuggugaauca

SEQ ID NO: 1731667 - RNA, 19 nt, Homo sapiens
  misc_RNA (1)...(19): siRNA sense strand
cggaaucccgcucacauca

SEQ ID NO: 1731668 - RNA, 19 nt, Homo sapiens
  misc_RNA (1)...(19): siRNA sense strand
guagugaugcagaaaauga

SEQ ID NO: 1731669 - RNA, 19 nt, Homo sapiens
  misc_RNA (1)...(19): siRNA sense strand
cauagugccuccaccagua

SEQ ID NO: 1731670 - RNA, 19 nt, Homo sapiens
  misc_RNA (1)...(19): siRNA sense strand
gaaugccugugaacccaua

SEQ ID NO: 1731671 - RNA, 19 nt, Homo sapiens
  misc_RNA (1)...(19): siRNA sense strand
gcacuuucaucguguuaau

SEQ ID NO: 1731672 - RNA, 19 nt, Homo sapiens
  misc_RNA (1)...(19): siRNA sense strand
caauucaucuggcacuuuc

SEQ ID NO: 1731673 - RNA, 19 nt, Homo sapiens
  misc_RNA (1)...(19): siRNA sense strand
gcacagagagcaggauaca

SEQ ID NO: 1731674 - RNA, 19 nt, Homo sapiens
  misc_RNA (1)...(19): siRNA sense strand
auacaaggcagccauaguu

SEQ ID NO: 1731675 - RNA, 19 nt, Homo sapiens
  misc_RNA (1)...(19): siRNA sense strand
agccauaguucacaauguu

SEQ ID NO: 1731676 - RNA, 19 nt, Homo sapiens
  misc_RNA (1)...(19): siRNA sense strand
ucacaauguugauucugau

SEQ ID NO: 1731677 - RNA, 19 nt, Homo sapiens
  misc_RNA (1)...(19): siRNA sense strand
acagagagcaggauacaag

SEQ ID NO: 1731678 - RNA, 19 nt, Homo sapiens
  misc_RNA (1)...(19): siRNA sense strand
gauacaaggcagccauagu

SEQ ID NO: 1731679 - RNA, 19 nt, Homo sapiens
  misc_RNA (1)...(19): siRNA sense strand
cagccauaguucacaaugu

SEQ ID NO: 1731680 - RNA, 19 nt, Homo sapiens
  misc_RNA (1)...(19): siRNA sense strand
aaccagagaaugccuguga

SEQ ID NO: 1731681 - RNA, 19 nt, Homo sapiens
  misc_RNA (1)...(19): siRNA sense strand
gacaauucaucuggcacuu

SEQ ID NO: 1731682 - RNA, 19 nt, Homo sapiens
  misc_RNA (1)...(19): siRNA sense strand
uucacaauguugauucuga

SEQ ID NO: 1731683 - RNA, 19 nt, Homo sapiens
  misc_RNA (1)...(19): siRNA sense strand
gcagccauaguucacaaug

SEQ ID NO: 1731684 - RNA, 19 nt, Homo sapiens
  misc_RNA (1)...(19): siRNA sense strand
caauguugauucugaugac

SEQ ID NO: 1731685 - RNA, 19 nt, Homo sapiens
  misc_RNA (1)...(19): siRNA sense strand
ccauaguucacaauguuga

SEQ ID NO: 1731686 - RNA, 19 nt, Homo sapiens
  misc_RNA (1)...(19): siRNA sense strand
cguguuaauuagaagacuu

SEQ ID NO: 1731687 - RNA, 19 nt, Homo sapiens
  misc_RNA (1)...(19): siRNA sense strand
gguuuuaaaugcacagaga

SEQ ID NO: 1731688 - RNA, 19 nt, Homo sapiens
  misc_RNA (1)...(19): siRNA sense strand
acaauucaucuggcacuuu

SEQ ID NO: 1731689 - RNA, 19 nt, Homo sapiens
  misc_RNA (1)...(19): siRNA sense strand
acaauguugauucugauga

SEQ ID NO: 1731690 - RNA, 19 nt, Homo sapiens
  misc_RNA (1)...(19): siRNA sense strand
gaaacuuccuguacauaaa

SEQ ID NO: 1731691 - RNA, 19 nt, Homo sapiens
  misc_RNA (1)...(19): siRNA sense strand
gacagaaucuucagacuau

SEQ ID NO: 1731692 - RNA, 19 nt, Homo sapiens
  misc_RNA (1)...(19): siRNA sense strand
gaaacagacuucguaaaga

SEQ ID NO: 1731693 - RNA, 19 nt, Homo sapiens
  misc_RNA (1)...(19): siRNA sense strand
gaaaggagaugaguaugau

SEQ ID NO: 1731694 - RNA, 19 nt, Homo sapiens
  misc_RNA (1)...(19): siRNA sense strand
guaugaagauggagacaaa

SEQ ID NO: 1731695 - RNA, 19 nt, Homo sapiens
  misc_RNA (1)...(19): siRNA sense strand
ugaacgggauuacaacaua

SEQ ID NO: 1731696 - RNA, 19 nt, Homo sapiens
  misc_RNA (1)...(19): siRNA sense strand
gaacauaccccuuuacuga

SEQ ID NO: 1731697 - RNA, 19 nt, Homo sapiens
  misc_RNA (1)...(19): siRNA sense strand
gaacaugacagaaucuuca

SEQ ID NO: 1731698 - RNA, 19 nt, Homo sapiens
  misc_RNA (1)...(19): siRNA sense strand
aaacagacuucguaaagau

SEQ ID NO: 1731699 - RNA, 19 nt, Homo sapiens
  misc_RNA (1)...(19): siRNA sense strand
caagaaaggagaugaguau

SEQ ID NO: 1731700 - RNA, 19 nt, Homo sapiens
  misc_RNA (1)...(19): siRNA sense strand
gaacgggauuacaacauag

SEQ ID NO: 1731701 - RNA, 19 nt, Homo sapiens
  misc_RNA (1)...(19): siRNA sense strand
gaaucccgcucacaucaga

SEQ ID NO: 1731702 - RNA, 19 nt, Homo sapiens
  misc_RNA (1)...(19): siRNA sense strand
ggauagacauagagcuaga

SEQ ID NO: 1731703 - RNA, 19 nt, Homo sapiens
  misc_RNA (1)...(19): siRNA sense strand
agacauagagcuagaagaa

SEQ ID NO: 1731704 - RNA, 19 nt, Homo sapiens
  misc_RNA (1)...(19): siRNA sense strand
ggagaugaguaugauguau

SEQ ID NO: 1731705 - RNA, 19 nt, Homo sapiens
  misc_RNA (1)...(19): siRNA sense strand
uaagaaacuuccuguacau

SEQ ID NO: 1731706 - RNA, 19 nt, Homo sapiens
  misc_RNA (1)...(19): siRNA sense strand
uuaagaaacuuccuguaca

SEQ ID NO: 1731707 - RNA, 19 nt, Homo sapiens
  misc_RNA (1)...(19): siRNA sense strand
agacaguagucaagaagaa

SEQ ID NO: 1731708 - RNA, 19 nt, Homo sapiens
  misc_RNA (1)...(19): siRNA sense strand
guagacccuuggcuaacua

SEQ ID NO: 1731709 - RNA, 19 nt, Homo sapiens
  misc_RNA (1)...(19): siRNA sense strand
gaagacgacaaugaagaua

SEQ ID NO: 1731710 - RNA, 19 nt, Homo sapiens
  misc_RNA (1)...(19): siRNA sense strand
ggaugaguaugaagaugga

SEQ ID NO: 1731711 - RNA, 19 nt, Homo sapiens
  misc_RNA (1)...(19): siRNA sense strand
ggaagacgacaaugaagau

SEQ ID NO: 1731712 - RNA, 19 nt, Homo sapiens
  misc_RNA (1)...(19): siRNA sense strand
caucagaacaugacagaau

SEQ ID NO: 1731713 - RNA, 19 nt, Homo sapiens
  misc_RNA (1)...(19): siRNA sense strand
ugacaguagugaugcagaa

SEQ ID NO: 1731714 - RNA, 19 nt, Homo sapiens
  misc_RNA (1)...(19): siRNA sense strand
ugacagaaucuucagacua

SEQ ID NO: 1731715 - RNA, 19 nt, Homo sapiens
  misc_RNA (1)...(19): siRNA sense strand
uaugauguaugugccauuu

SEQ ID NO: 1731716 - RNA, 19 nt, Homo sapiens
  misc_RNA (1)...(19): siRNA sense strand
ccauuuguuuggaugagua

SEQ ID NO: 1731717 - RNA, 19 nt, Homo sapiens
  misc_RNA (1)...(19): siRNA sense strand
ucaaggcgauucagacucu

SEQ ID NO: 1731718 - RNA, 19 nt, Homo sapiens
  misc_RNA (1)...(19): siRNA sense strand
agaaacuuccuguacauaa

SEQ ID NO: 1731719 - RNA, 19 nt, Homo sapiens
  misc_RNA (1)...(19): siRNA sense strand
ugaggaagacgacaaugaa

SEQ ID NO: 1731720 - RNA, 19 nt, Homo sapiens
  misc_RNA (1)...(19): siRNA sense strand
agaaaggagaugaguauga

SEQ ID NO: 1731721 - RNA, 19 nt, Homo sapiens
  misc_RNA (1)...(19): siRNA sense strand
caggauagacauagagcua

SEQ ID NO: 1731722 - RNA, 19 nt, Homo sapiens
  misc_RNA (1)...(19): siRNA sense strand
agaaacagacuucguaaag

SEQ ID NO: 1731723 - RNA, 19 nt, Homo sapiens
  misc_RNA (1)...(19): siRNA sense strand
ugauguaugugccauuugu

SEQ ID NO: 1731724 - RNA, 19 nt, Homo sapiens
  misc_RNA (1)...(19): siRNA sense strand
gagaugaguaugauguaug

SEQ ID NO: 1731725 - RNA, 19 nt, Homo sapiens
  misc_RNA (1)...(19): siRNA sense strand
gggauuacaacauagcaaa

SEQ ID NO: 1731726 - RNA, 19 nt, Homo sapiens
  misc_RNA (1)...(19): siRNA sense strand
acauagagcuagaagaaac

SEQ ID NO: 1731727 - RNA, 19 nt, Homo sapiens
  misc_RNA (1)...(19): siRNA sense strand
gacagaacauaccccuuua

SEQ ID NO: 1731728 - RNA, 19 nt, Homo sapiens
  misc_RNA (1)...(19): siRNA sense strand
ucaagaaaggagaugagua

SEQ ID NO: 1731729 - RNA, 19 nt, Homo sapiens
  misc_RNA (1)...(19): siRNA sense strand
ucguaaagaucaacuuaag

SEQ ID NO: 1731730 - RNA, 19 nt, Homo sapiens
  misc_RNA (1)...(19): siRNA sense strand
agaugaguaugauguaugu

SEQ ID NO: 1731731 - RNA, 19 nt, Homo sapiens
  misc_RNA (1)...(19): siRNA sense strand
uuacugagaccuuuagcuu

SEQ ID NO: 1731732 - RNA, 19 nt, Homo sapiens
  misc_RNA (1)...(19): siRNA sense strand
cacagacaguagucaagaa

SEQ ID NO: 1731733 - RNA, 19 nt, Homo sapiens
  misc_RNA (1)...(19): siRNA sense strand
cagaaucuucagacuauga

SEQ ID NO: 1731734 - RNA, 19 nt, Homo sapiens
  misc_RNA (1)...(19): siRNA sense strand
cuucguaaagaucaacuua

SEQ ID NO: 1731735 - RNA, 19 nt, Homo sapiens
  misc_RNA (1)...(19): siRNA sense strand
aaaaugaagugacagaaca

SEQ ID NO: 1731736 - RNA, 19 nt, Homo sapiens
  misc_RNA (1)...(19): siRNA sense strand
gacauagagcuagaagaaa

SEQ ID NO: 1731737 - RNA, 19 nt, Homo sapiens
  misc_RNA (1)...(19): siRNA sense strand
gacaguagucaagaagaaa

SEQ ID NO: 1731738 - RNA, 19 nt, Homo sapiens
  misc_RNA (1)...(19): siRNA sense strand
gaucaacuuaagaaacuuc

SEQ ID NO: 1731739 - RNA, 19 nt, Homo sapiens
  misc_RNA (1)...(19): siRNA sense strand
ugacagaacauaccccuuu

SEQ ID NO: 1731740 - RNA, 19 nt, Homo sapiens
  misc_RNA (1)...(19): siRNA sense strand
acugagaccuuuagcuucu

SEQ ID NO: 1731741 - RNA, 19 nt, Homo sapiens
  misc_RNA (1)...(19): siRNA sense strand
agacgacaaugaagauacu

SEQ ID NO: 1731742 - RNA, 19 nt, Homo sapiens
  misc_RNA (1)...(19): siRNA sense strand
ggauuacaacauagcaaau

SEQ ID NO: 1731743 - RNA, 19 nt, Homo sapiens
  misc_RNA (1)...(19): siRNA sense strand
ugucagugcccagucauuu

SEQ ID NO: 1731744 - RNA, 19 nt, Homo sapiens
  misc_RNA (1)...(19): siRNA sense strand
gaggaagacgacaaugaag

SEQ ID NO: 1731745 - RNA, 19 nt, Homo sapiens
  misc_RNA (1)...(19): siRNA sense strand
aagaaacuuccuguacaua

SEQ ID NO: 1731746 - RNA, 19 nt, Homo sapiens
  misc_RNA (1)...(19): siRNA sense strand
acacagacaguagucaaga

SEQ ID NO: 1731747 - RNA, 19 nt, Homo sapiens
  misc_RNA (1)...(19): siRNA sense strand
cguaaagaucaacuuaaga

SEQ ID NO: 1731748 - RNA, 19 nt, Homo sapiens
  misc_RNA (1)...(19): siRNA sense strand
agaagaaaaugaagugaca

SEQ ID NO: 1731749 - RNA, 19 nt, Homo sapiens
  misc_RNA (1)...(19): siRNA sense strand
guucccaugcuuaucauug

SEQ ID NO: 1731750 - RNA, 19 nt, Homo sapiens
  misc_RNA (1)...(19): siRNA sense strand
gauagacauagagcuagaa

SEQ ID NO: 1731751 - RNA, 19 nt, Homo sapiens
  misc_RNA (1)...(19): siRNA sense strand
guagugaugcagaaaauga

SEQ ID NO: 1731752 - RNA, 19 nt, Homo sapiens
  misc_RNA (1)...(19): siRNA sense strand
cggaaucccgcucacauca

SEQ ID NO: 1731753 - RNA, 19 nt, Homo sapiens
  misc_RNA (1)...(19): siRNA sense strand
uguguagacccuuggcuaa

SEQ ID NO: 1731754 - RNA, 19 nt, Homo sapiens
  misc_RNA (1)...(19): siRNA sense strand
uguccagugugcaagcaaa

SEQ ID NO: 1731755 - RNA, 19 nt, Homo sapiens
  misc_RNA (1)...(19): siRNA sense strand
cuuaagaaacuuccuguac

SEQ ID NO: 1731756 - RNA, 19 nt, Homo sapiens
  misc_RNA (1)...(19): siRNA sense strand
aagaaacagacuucguaaa

SEQ ID NO: 1731757 - RNA, 19 nt, Homo sapiens
  misc_RNA (1)...(19): siRNA sense strand
ccgcucacaucagaacaug

SEQ ID NO: 1731758 - RNA, 19 nt, Homo sapiens
  misc_RNA (1)...(19): siRNA sense strand
cacaucagaacaugacaga

SEQ ID NO: 1731759 - RNA, 19 nt, Homo sapiens
  misc_RNA (1)...(19): siRNA sense strand
uaucauugcaaguguguag

SEQ ID NO: 1731760 - RNA, 19 nt, Homo sapiens
  misc_RNA (1)...(19): siRNA sense strand
gacaguagugaugcagaaa

SEQ ID NO: 1731761 - RNA, 19 nt, Homo sapiens
  misc_RNA (1)...(19): siRNA sense strand
gacaaugaagauacugaca

SEQ ID NO: 1731762 - RNA, 19 nt, Homo sapiens
  misc_RNA (1)...(19): siRNA sense strand
gcucacaucagaacaugac

SEQ ID NO: 1731763 - RNA, 19 nt, Homo sapiens
  misc_RNA (1)...(19): siRNA sense strand
accuuuagcuucugucagu

SEQ ID NO: 1731764 - RNA, 19 nt, Homo sapiens
  misc_RNA (1)...(19): siRNA sense strand
ugagaccuuuagcuucugu

SEQ ID NO: 1731765 - RNA, 19 nt, Homo sapiens
  misc_RNA (1)...(19): siRNA sense strand
gaaacuuccuguacauaaa

SEQ ID NO: 1731766 - RNA, 19 nt, Homo sapiens
  misc_RNA (1)...(19): siRNA sense strand
gacagaaucuucagacuau

SEQ ID NO: 1731767 - RNA, 19 nt, Homo sapiens
  misc_RNA (1)...(19): siRNA sense strand
gaaacagacuucguaaaga

SEQ ID NO: 1731768 - RNA, 19 nt, Homo sapiens
  misc_RNA (1)...(19): siRNA sense strand
gaaaggagaugaguaugau

SEQ ID NO: 1731769 - RNA, 19 nt, Homo sapiens
  misc_RNA (1)...(19): siRNA sense strand
guaugaagauggagacaaa

SEQ ID NO: 1731770 - RNA, 19 nt, Homo sapiens
  misc_RNA (1)...(19): siRNA sense strand
ugaacgggauuacaacaua

SEQ ID NO: 1731771 - RNA, 19 nt, Homo sapiens
  misc_RNA (1)...(19): siRNA sense strand
gaacauaccccuuuacuga

SEQ ID NO: 1731772 - RNA, 19 nt, Homo sapiens
  misc_RNA (1)...(19): siRNA sense strand
gaacaugacagaaucuuca

SEQ ID NO: 1731773 - RNA, 19 nt, Homo sapiens
  misc_RNA (1)...(19): siRNA sense strand
aaacagacuucguaaagau

SEQ ID NO: 1731774 - RNA, 19 nt, Homo sapiens
  misc_RNA (1)...(19): siRNA sense strand
caagaaaggagaugaguau

SEQ ID NO: 1731775 - RNA, 19 nt, Homo sapiens
  misc_RNA (1)...(19): siRNA sense strand
gaacgggauuacaacauag

SEQ ID NO: 1731776 - RNA, 19 nt, Homo sapiens
  misc_RNA (1)...(19): siRNA sense strand
gaaucccgcucacaucaga

SEQ ID NO: 1731777 - RNA, 19 nt, Homo sapiens
  misc_RNA (1)...(19): siRNA sense strand
ggauagacauagagcuaga

SEQ ID NO: 1731778 - RNA, 19 nt, Homo sapiens
  misc_RNA (1)...(19): siRNA sense strand
agacauagagcuagaagaa

SEQ ID NO: 1731779 - RNA, 19 nt, Homo sapiens
  misc_RNA (1)...(19): siRNA sense strand
ggagaugaguaugauguau

SEQ ID NO: 1731780 - RNA, 19 nt, Homo sapiens
  misc_RNA (1)...(19): siRNA sense strand
uaagaaacuuccuguacau

SEQ ID NO: 1731781 - RNA, 19 nt, Homo sapiens
  misc_RNA (1)...(19): siRNA sense strand
uuaagaaacuuccuguaca

SEQ ID NO: 1731782 - RNA, 19 nt, Homo sapiens
  misc_RNA (1)...(19): siRNA sense strand
agacaguagucaagaagaa

SEQ ID NO: 1731783 - RNA, 19 nt, Homo sapiens
  misc_RNA (1)...(19): siRNA sense strand
guagacccuuggcuaacua

SEQ ID NO: 1731784 - RNA, 19 nt, Homo sapiens
  misc_RNA (1)...(19): siRNA sense strand
gaagacgacaaugaagaua

SEQ ID NO: 1731785 - RNA, 19 nt, Homo sapiens
  misc_RNA (1)...(19): siRNA sense strand
ggaugaguaugaagaugga

SEQ ID NO: 1731786 - RNA, 19 nt, Homo sapiens
  misc_RNA (1)...(19): siRNA sense strand
ggaagacgacaaugaagau

SEQ ID NO: 1731787 - RNA, 19 nt, Homo sapiens
  misc_RNA (1)...(19): siRNA sense strand
caucagaacaugacagaau

SEQ ID NO: 1731788 - RNA, 19 nt, Homo sapiens
  misc_RNA (1)...(19): siRNA sense strand
ugacaguagugaugcagaa

SEQ ID NO: 1731789 - RNA, 19 nt, Homo sapiens
  misc_RNA (1)...(19): siRNA sense strand
ugacagaaucuucagacua

SEQ ID NO: 1731790 - RNA, 19 nt, Homo sapiens
  misc_RNA (1)...(19): siRNA sense strand
uaugauguaugugccauuu

SEQ ID NO: 1731791 - RNA, 19 nt, Homo sapiens
  misc_RNA (1)...(19): siRNA sense strand
ccauuuguuuggaugagua

SEQ ID NO: 1731792 - RNA, 19 nt, Homo sapiens
  misc_RNA (1)...(19): siRNA sense strand
ucaaggcgauucagacucu

SEQ ID NO: 1731793 - RNA, 19 nt, Homo sapiens
  misc_RNA (1)...(19): siRNA sense strand
agaaacuuccuguacauaa

SEQ ID NO: 1731794 - RNA, 19 nt, Homo sapiens
  misc_RNA (1)...(19): siRNA sense strand
ugaggaagacgacaaugaa

SEQ ID NO: 1731795 - RNA, 19 nt, Homo sapiens
  misc_RNA (1)...(19): siRNA sense strand
agaaaggagaugaguauga

SEQ ID NO: 1731796 - RNA, 19 nt, Homo sapiens
  misc_RNA (1)...(19): siRNA sense strand
caggauagacauagagcua

SEQ ID NO: 1731797 - RNA, 19 nt, Homo sapiens
  misc_RNA (1)...(19): siRNA sense strand
agaaacagacuucguaaag

SEQ ID NO: 1731798 - RNA, 19 nt, Homo sapiens
  misc_RNA (1)...(19): siRNA sense strand
ugauguaugugccauuugu

SEQ ID NO: 1731799 - RNA, 19 nt, Homo sapiens
  misc_RNA (1)...(19): siRNA sense strand
gagaugaguaugauguaug

SEQ ID NO: 1731800 - RNA, 19 nt, Homo sapiens
  misc_RNA (1)...(19): siRNA sense strand
gggauuacaacauagcaaa

SEQ ID NO: 1731801 - RNA, 19 nt, Homo sapiens
  misc_RNA (1)...(19): siRNA sense strand
acauagagcuagaagaaac

SEQ ID NO: 1731802 - RNA, 19 nt, Homo sapiens
  misc_RNA (1)...(19): siRNA sense strand
gacagaacauaccccuuua

SEQ ID NO: 1731803 - RNA, 19 nt, Homo sapiens
  misc_RNA (1)...(19): siRNA sense strand
ucaagaaaggagaugagua

SEQ ID NO: 1731804 - RNA, 19 nt, Homo sapiens
  misc_RNA (1)...(19): siRNA sense strand
ucguaaagaucaacuuaag

SEQ ID NO: 1731805 - RNA, 19 nt, Homo sapiens
  misc_RNA (1)...(19): siRNA sense strand
agaugaguaugauguaugu

SEQ ID NO: 1731806 - RNA, 19 nt, Homo sapiens
  misc_RNA (1)...(19): siRNA sense strand
uuacugagaccuuuagcuu

SEQ ID NO: 1731807 - RNA, 19 nt, Homo sapiens
  misc_RNA (1)...(19): siRNA sense strand
cacagacaguagucaagaa

SEQ ID NO: 1731808 - RNA, 19 nt, Homo sapiens
  misc_RNA (1)...(19): siRNA sense strand
cagaaucuucagacuauga

SEQ ID NO: 1731809 - RNA, 19 nt, Homo sapiens
  misc_RNA (1)...(19): siRNA sense strand
cuucguaaagaucaacuua

SEQ ID NO: 1731810 - RNA, 19 nt, Homo sapiens
  misc_RNA (1)...(19): siRNA sense strand
aaaaugaagugacagaaca

SEQ ID NO: 1731811 - RNA, 19 nt, Homo sapiens
  misc_RNA (1)...(19): siRNA sense strand
gacauagagcuagaagaaa

SEQ ID NO: 1731812 - RNA, 19 nt, Homo sapiens
  misc_RNA (1)...(19): siRNA sense strand
gacaguagucaagaagaaa

SEQ ID NO: 1731813 - RNA, 19 nt, Homo sapiens
  misc_RNA (1)...(19): siRNA sense strand
gaucaacuuaagaaacuuc

SEQ ID NO: 1731814 - RNA, 19 nt, Homo sapiens
  misc_RNA (1)...(19): siRNA sense strand
ugacagaacauaccccuuu

SEQ ID NO: 1731815 - RNA, 19 nt, Homo sapiens
  misc_RNA (1)...(19): siRNA sense strand
acugagaccuuuagcuucu

SEQ ID NO: 1731816 - RNA, 19 nt, Homo sapiens
  misc_RNA (1)...(19): siRNA sense strand
agacgacaaugaagauacu

SEQ ID NO: 1731817 - RNA, 19 nt, Homo sapiens
  misc_RNA (1)...(19): siRNA sense strand
ggauuacaacauagcaaau

SEQ ID NO: 1731818 - RNA, 19 nt, Homo sapiens
  misc_RNA (1)...(19): siRNA sense strand
ugucagugcccagucauuu

SEQ ID NO: 1731819 - RNA, 19 nt, Homo sapiens
  misc_RNA (1)...(19): siRNA sense strand
gaggaagacgacaaugaag

SEQ ID NO: 1731820 - RNA, 19 nt, Homo sapiens
  misc_RNA (1)...(19): siRNA sense strand
aagaaacuuccuguacaua

SEQ ID NO: 1731821 - RNA, 19 nt, Homo sapiens
  misc_RNA (1)...(19): siRNA sense strand
acacagacaguagucaaga

SEQ ID NO: 1731822 - RNA, 19 nt, Homo sapiens
  misc_RNA (1)...(19): siRNA sense strand
cguaaagaucaacuuaaga

SEQ ID NO: 1731823 - RNA, 19 nt, Homo sapiens
  misc_RNA (1)...(19): siRNA sense strand
agaagaaaaugaagugaca

SEQ ID NO: 1731824 - RNA, 19 nt, Homo sapiens
  misc_RNA (1)...(19): siRNA sense strand
guucccaugcuuaucauug

SEQ ID NO: 1731825 - RNA, 19 nt, Homo sapiens
  misc_RNA (1)...(19): siRNA sense strand
gauagacauagagcuagaa

SEQ ID NO: 1731826 - RNA, 19 nt, Homo sapiens
  misc_RNA (1)...(19): siRNA sense strand
guagugaugcagaaaauga

SEQ ID NO: 1731827 - RNA, 19 nt, Homo sapiens
  misc_RNA (1)...(19): siRNA sense strand
cggaaucccgcucacauca

SEQ ID NO: 1731828 - RNA, 19 nt, Homo sapiens
  misc_RNA (1)...(19): siRNA sense strand
uguguagacccuuggcuaa

SEQ ID NO: 1731829 - RNA, 19 nt, Homo sapiens
  misc_RNA (1)...(19): siRNA sense strand
uguccagugugcaagcaaa

SEQ ID NO: 1731830 - RNA, 19 nt, Homo sapiens
  misc_RNA (1)...(19): siRNA sense strand
cuuaagaaacuuccuguac

SEQ ID NO: 1731831 - RNA, 19 nt, Homo sapiens
  misc_RNA (1)...(19): siRNA sense strand
aagaaacagacuucguaaa

SEQ ID NO: 1731832 - RNA, 19 nt, Homo sapiens
  misc_RNA (1)...(19): siRNA sense strand
ccgcucacaucagaacaug

SEQ ID NO: 1731833 - RNA, 19 nt, Homo sapiens
  misc_RNA (1)...(19): siRNA sense strand
cacaucagaacaugacaga

SEQ ID NO: 1731834 - RNA, 19 nt, Homo sapiens
  misc_RNA (1)...(19): siRNA sense strand
uaucauugcaaguguguag

SEQ ID NO: 1731835 - RNA, 19 nt, Homo sapiens
  misc_RNA (1)...(19): siRNA sense strand
gacaguagugaugcagaaa

SEQ ID NO: 1731836 - RNA, 19 nt, Homo sapiens
  misc_RNA (1)...(19): siRNA sense strand
gacaaugaagauacugaca

SEQ ID NO: 1731837 - RNA, 19 nt, Homo sapiens
  misc_RNA (1)...(19): siRNA sense strand
gcucacaucagaacaugac

SEQ ID NO: 1731838 - RNA, 19 nt, Homo sapiens
  misc_RNA (1)...(19): siRNA sense strand
accuuuagcuucugucagu

SEQ ID NO: 1731839 - RNA, 19 nt, Homo sapiens
  misc_RNA (1)...(19): siRNA sense strand
ugagaccuuuagcuucugu

SEQ ID NO: 1731840 - RNA, 19 nt, Homo sapiens
  misc_RNA (1)...(19): siRNA sense strand
gaaacuuccuguacauaaa

SEQ ID NO: 1731841 - RNA, 19 nt, Homo sapiens
  misc_RNA (1)...(19): siRNA sense strand
gacagaaucuucagacuau

SEQ ID NO: 1731842 - RNA, 19 nt, Homo sapiens
  misc_RNA (1)...(19): siRNA sense strand
gaaacagacuucguaaaga

SEQ ID NO: 1731843 - RNA, 19 nt, Homo sapiens
  misc_RNA (1)...(19): siRNA sense strand
gaaaggagaugaguaugau

SEQ ID NO: 1731844 - RNA, 19 nt, Homo sapiens
  misc_RNA (1)...(19): siRNA sense strand
guaugaagauggagacaaa

SEQ ID NO: 1731845 - RNA, 19 nt, Homo sapiens
  misc_RNA (1)...(19): siRNA sense strand
cuaauucucugaaagauga

SEQ ID NO: 1731846 - RNA, 19 nt, Homo sapiens
  misc_RNA (1)...(19): siRNA sense strand
ugaacgggauuacaacaua

SEQ ID NO: 1731847 - RNA, 19 nt, Homo sapiens
  misc_RNA (1)...(19): siRNA sense strand
gaacauaccccuuuacuga

SEQ ID NO: 1731848 - RNA, 19 nt, Homo sapiens
  misc_RNA (1)...(19): siRNA sense strand
gaacaugacagaaucuuca

SEQ ID NO: 1731849 - RNA, 19 nt, Homo sapiens
  misc_RNA (1)...(19): siRNA sense strand
cuaauucccuuccuuauca

SEQ ID NO: 1731850 - RNA, 19 nt, Homo sapiens
  misc_RNA (1)...(19): siRNA sense strand
cauagugccuccaccagua

SEQ ID NO: 1731851 - RNA, 19 nt, Homo sapiens
  misc_RNA (1)...(19): siRNA sense strand
aaacagacuucguaaagau

SEQ ID NO: 1731852 - RNA, 19 nt, Homo sapiens
  misc_RNA (1)...(19): siRNA sense strand
gggcaucugucucaucuug

SEQ ID NO: 1731853 - RNA, 19 nt, Homo sapiens
  misc_RNA (1)...(19): siRNA sense strand
caagaaaggagaugaguau

SEQ ID NO: 1731854 - RNA, 19 nt, Homo sapiens
  misc_RNA (1)...(19): siRNA sense strand
gaaugccugugaacccaua

SEQ ID NO: 1731855 - RNA, 19 nt, Homo sapiens
  misc_RNA (1)...(19): siRNA sense strand
gcacuuucaucguguuaau

SEQ ID NO: 1731856 - RNA, 19 nt, Homo sapiens
  misc_RNA (1)...(19): siRNA sense strand
gaacgggauuacaacauag

SEQ ID NO: 1731857 - RNA, 19 nt, Homo sapiens
  misc_RNA (1)...(19): siRNA sense strand
gaaucccgcucacaucaga

SEQ ID NO: 1731858 - RNA, 19 nt, Homo sapiens
  misc_RNA (1)...(19): siRNA sense strand
ggauagacauagagcuaga

SEQ ID NO: 1731859 - RNA, 19 nt, Homo sapiens
  misc_RNA (1)...(19): siRNA sense strand
agacauagagcuagaagaa

SEQ ID NO: 1731860 - RNA, 19 nt, Homo sapiens
  misc_RNA (1)...(19): siRNA sense strand
ggagaugaguaugauguau

SEQ ID NO: 1731861 - RNA, 19 nt, Homo sapiens
  misc_RNA (1)...(19): siRNA sense strand
uaagaaacuuccuguacau

SEQ ID NO: 1731862 - RNA, 19 nt, Homo sapiens
  misc_RNA (1)...(19): siRNA sense strand
caauucaucuggcacuuuc

SEQ ID NO: 1731863 - RNA, 19 nt, Homo sapiens
  misc_RNA (1)...(19): siRNA sense strand
uuaagaaacuuccuguaca

SEQ ID NO: 1731864 - RNA, 19 nt, Homo sapiens
  misc_RNA (1)...(19): siRNA sense strand
agacaguagucaagaagaa

SEQ ID NO: 1731865 - RNA, 19 nt, Homo sapiens
  misc_RNA (1)...(19): siRNA sense strand
guagacccuuggcuaacua

SEQ ID NO: 1731866 - RNA, 19 nt, Homo sapiens
  misc_RNA (1)...(19): siRNA sense strand
gaagacgacaaugaagaua

SEQ ID NO: 1731867 - RNA, 19 nt, Homo sapiens
  misc_RNA (1)...(19): siRNA sense strand
ggaugaguaugaagaugga

SEQ ID NO: 1731868 - RNA, 19 nt, Homo sapiens
  misc_RNA (1)...(19): siRNA sense strand
ggaagacgacaaugaagau

SEQ ID NO: 1731869 - RNA, 19 nt, Homo sapiens
  misc_RNA (1)...(19): siRNA sense strand
aaauugacauuccaucugu

SEQ ID NO: 1731870 - RNA, 19 nt, Homo sapiens
  misc_RNA (1)...(19): siRNA sense strand
ugacaguagugaugcagaa

SEQ ID NO: 1731871 - RNA, 19 nt, Homo sapiens
  misc_RNA (1)...(19): siRNA sense strand
ugacagaaucuucagacua

SEQ ID NO: 1731872 - RNA, 19 nt, Homo sapiens
  misc_RNA (1)...(19): siRNA sense strand
caucagaacaugacagaau

SEQ ID NO: 1731873 - RNA, 19 nt, Homo sapiens
  misc_RNA (1)...(19): siRNA sense strand
gaauuuagucuuccuuugg

SEQ ID NO: 1731874 - RNA, 19 nt, Homo sapiens
  misc_RNA (1)...(19): siRNA sense strand
ugucucaucuugauaguca

SEQ ID NO: 1731875 - RNA, 19 nt, Homo sapiens
  misc_RNA (1)...(19): siRNA sense strand
uaugauguaugugccauuu

SEQ ID NO: 1731876 - RNA, 19 nt, Homo sapiens
  misc_RNA (1)...(19): siRNA sense strand
gcaucugucucaucuugau

SEQ ID NO: 1731877 - RNA, 19 nt, Homo sapiens
  misc_RNA (1)...(19): siRNA sense strand
ucaaggcgauucagacucu

SEQ ID NO: 1731878 - RNA, 19 nt, Homo sapiens
  misc_RNA (1)...(19): siRNA sense strand
ccauuuguuuggaugagua

SEQ ID NO: 1731879 - RNA, 19 nt, Homo sapiens
  misc_RNA (1)...(19): siRNA sense strand
gcacagagagcaggauaca

SEQ ID NO: 1731880 - RNA, 19 nt, Homo sapiens
  misc_RNA (1)...(19): siRNA sense strand
ggugaaucaucagcuaauu

SEQ ID NO: 1731881 - RNA, 19 nt, Homo sapiens
  misc_RNA (1)...(19): siRNA sense strand
agaaacuuccuguacauaa

SEQ ID NO: 1731882 - RNA, 19 nt, Homo sapiens
  misc_RNA (1)...(19): siRNA sense strand
ugaggaagacgacaaugaa

SEQ ID NO: 1731883 - RNA, 19 nt, Homo sapiens
  misc_RNA (1)...(19): siRNA sense strand
cauuccaucugucuuuauu

SEQ ID NO: 1731884 - RNA, 19 nt, Homo sapiens
  misc_RNA (1)...(19): siRNA sense strand
ugauguaugugccauuugu

SEQ ID NO: 1731885 - RNA, 19 nt, Homo sapiens
  misc_RNA (1)...(19): siRNA sense strand
agaaaggagaugaguauga

SEQ ID NO: 1731886 - RNA, 19 nt, Homo sapiens
  misc_RNA (1)...(19): siRNA sense strand
agaaacagacuucguaaag

SEQ ID NO: 1731887 - RNA, 19 nt, Homo sapiens
  misc_RNA (1)...(19): siRNA sense strand
caggauagacauagagcua

SEQ ID NO: 1731888 - RNA, 19 nt, Homo sapiens
  misc_RNA (1)...(19): siRNA sense strand
acauagagcuagaagaaac

SEQ ID NO: 1731889 - RNA, 19 nt, Homo sapiens
  misc_RNA (1)...(19): siRNA sense strand
gggauuacaacauagcaaa

SEQ ID NO: 1731890 - RNA, 19 nt, Homo sapiens
  misc_RNA (1)...(19): siRNA sense strand
gagaugaguaugauguaug

SEQ ID NO: 1731891 - RNA, 19 nt, Homo sapiens
  misc_RNA (1)...(19): siRNA sense strand
auacaaggcagccauaguu

SEQ ID NO: 1731892 - RNA, 19 nt, Homo sapiens
  misc_RNA (1)...(19): siRNA sense strand
gacagaacauaccccuuua

SEQ ID NO: 1731893 - RNA, 19 nt, Homo sapiens
  misc_RNA (1)...(19): siRNA sense strand
cagcuaauucucugaaaga

SEQ ID NO: 1731894 - RNA, 19 nt, Homo sapiens
  misc_RNA (1)...(19): siRNA sense strand
agaauuuagucuuccuuug

SEQ ID NO: 1731895 - RNA, 19 nt, Homo sapiens
  misc_RNA (1)...(19): siRNA sense strand
ucaagaaaggagaugagua

SEQ ID NO: 1731896 - RNA, 19 nt, Homo sapiens
  misc_RNA (1)...(19): siRNA sense strand
agccauaguucacaauguu

SEQ ID NO: 1731897 - RNA, 19 nt, Homo sapiens
  misc_RNA (1)...(19): siRNA sense strand
ucguaaagaucaacuuaag

SEQ ID NO: 1731898 - RNA, 19 nt, Homo sapiens
  misc_RNA (1)...(19): siRNA sense strand
guuccagaauuuagucuuc

SEQ ID NO: 1731899 - RNA, 19 nt, Homo sapiens
  misc_RNA (1)...(19): siRNA sense strand
ucacaauguugauucugau

SEQ ID NO: 1731900 - RNA, 19 nt, Homo sapiens
  misc_RNA (1)...(19): siRNA sense strand
uuacugagaccuuuagcuu

SEQ ID NO: 1731901 - RNA, 19 nt, Homo sapiens
  misc_RNA (1)...(19): siRNA sense strand
agaugaguaugauguaugu

SEQ ID NO: 1731902 - RNA, 19 nt, Homo sapiens
  misc_RNA (1)...(19): siRNA sense strand
cacagacaguagucaagaa

SEQ ID NO: 1731903 - RNA, 19 nt, Homo sapiens
  misc_RNA (1)...(19): siRNA sense strand
cagaaucuucagacuauga

SEQ ID NO: 1731904 - RNA, 19 nt, Homo sapiens
  misc_RNA (1)...(19): siRNA sense strand
acagagagcaggauacaag

SEQ ID NO: 1731905 - RNA, 19 nt, Homo sapiens
  misc_RNA (1)...(19): siRNA sense strand
uaccuaauucccuuccuua

SEQ ID NO: 1731906 - RNA, 19 nt, Homo sapiens
  misc_RNA (1)...(19): siRNA sense strand
cuucguaaagaucaacuua

SEQ ID NO: 1731907 - RNA, 19 nt, Homo sapiens
  misc_RNA (1)...(19): siRNA sense strand
cuaccuaauucccuuccuu

SEQ ID NO: 1731908 - RNA, 19 nt, Homo sapiens
  misc_RNA (1)...(19): siRNA sense strand
aaaaugaagugacagaaca

SEQ ID NO: 1731909 - RNA, 19 nt, Homo sapiens
  misc_RNA (1)...(19): siRNA sense strand
cagaauuuagucuuccuuu

SEQ ID NO: 1731910 - RNA, 19 nt, Homo sapiens
  misc_RNA (1)...(19): siRNA sense strand
gacaguagucaagaagaaa

SEQ ID NO: 1731911 - RNA, 19 nt, Homo sapiens
  misc_RNA (1)...(19): siRNA sense strand
gaucaacuuaagaaacuuc

SEQ ID NO: 1731912 - RNA, 19 nt, Homo sapiens
  misc_RNA (1)...(19): siRNA sense strand
gacauagagcuagaagaaa

SEQ ID NO: 1731913 - RNA, 19 nt, Homo sapiens
  misc_RNA (1)...(19): siRNA sense strand
aaccagagaaugccuguga

SEQ ID NO: 1731914 - RNA, 19 nt, Homo sapiens
  misc_RNA (1)...(19): siRNA sense strand
acugagaccuuuagcuucu

SEQ ID NO: 1731915 - RNA, 19 nt, Homo sapiens
  misc_RNA (1)...(19): siRNA sense strand
ugacagaacauaccccuuu

SEQ ID NO: 1731916 - RNA, 19 nt, Homo sapiens
  misc_RNA (1)...(19): siRNA sense strand
cagccauaguucacaaugu

SEQ ID NO: 1731917 - RNA, 19 nt, Homo sapiens
  misc_RNA (1)...(19): siRNA sense strand
gugggcaucugucucaucu

SEQ ID NO: 1731918 - RNA, 19 nt, Homo sapiens
  misc_RNA (1)...(19): siRNA sense strand
uaucauagugggcaucugu

SEQ ID NO: 1731919 - RNA, 19 nt, Homo sapiens
  misc_RNA (1)...(19): siRNA sense strand
gauacaaggcagccauagu

SEQ ID NO: 1731920 - RNA, 19 nt, Homo sapiens
  misc_RNA (1)...(19): siRNA sense strand
gggccaccuuaucuuaguu

SEQ ID NO: 1731921 - RNA, 19 nt, Homo sapiens
  misc_RNA (1)...(19): siRNA sense strand
aauuuagucuuccuuugga

SEQ ID NO: 1731922 - RNA, 19 nt, Homo sapiens
  misc_RNA (1)...(19): siRNA sense strand
ggauuacaacauagcaaau

SEQ ID NO: 1731923 - RNA, 19 nt, Homo sapiens
  misc_RNA (1)...(19): siRNA sense strand
agacgacaaugaagauacu

SEQ ID NO: 1731924 - RNA, 19 nt, Homo sapiens
  misc_RNA (1)...(19): siRNA sense strand
gacaauucaucuggcacuu

SEQ ID NO: 1731925 - RNA, 19 nt, Homo sapiens
  misc_RNA (1)...(19): siRNA sense strand
gcuaauucucugaaagaug

SEQ ID NO: 1731926 - RNA, 19 nt, Homo sapiens
  misc_RNA (1)...(19): siRNA sense strand
ugucagugcccagucauuu

SEQ ID NO: 1731927 - RNA, 19 nt, Homo sapiens
  misc_RNA (1)...(19): siRNA sense strand
uucacaauguugauucuga

SEQ ID NO: 1731928 - RNA, 19 nt, Homo sapiens
  misc_RNA (1)...(19): siRNA sense strand
gcagccauaguucacaaug

SEQ ID NO: 1731929 - RNA, 19 nt, Homo sapiens
  misc_RNA (1)...(19): siRNA sense strand
caauguugauucugaugac

SEQ ID NO: 1731930 - RNA, 19 nt, Homo sapiens
  misc_RNA (1)...(19): siRNA sense strand
gaggaagacgacaaugaag

SEQ ID NO: 1731931 - RNA, 19 nt, Homo sapiens
  misc_RNA (1)...(19): siRNA sense strand
aagaaacuuccuguacaua

SEQ ID NO: 1731932 - RNA, 19 nt, Homo sapiens
  misc_RNA (1)...(19): siRNA sense strand
ccuuuggaauacuaccuaa

SEQ ID NO: 1731933 - RNA, 19 nt, Homo sapiens
  misc_RNA (1)...(19): siRNA sense strand
agaagaaaaugaagugaca

SEQ ID NO: 1731934 - RNA, 19 nt, Homo sapiens
  misc_RNA (1)...(19): siRNA sense strand
ccauaguucacaauguuga

SEQ ID NO: 1731935 - RNA, 19 nt, Homo sapiens
  misc_RNA (1)...(19): siRNA sense strand
acacagacaguagucaaga

SEQ ID NO: 1731936 - RNA, 19 nt, Homo sapiens
  misc_RNA (1)...(19): siRNA sense strand
cguaaagaucaacuuaaga

SEQ ID NO: 1731937 - RNA, 19 nt, Homo sapiens
  misc_RNA (1)...(19): siRNA sense strand
ugucuuuauuggugaauca

SEQ ID NO: 1731938 - RNA, 19 nt, Homo sapiens
  misc_RNA (1)...(19): siRNA sense strand
cggaaucccgcucacauca

SEQ ID NO: 1731939 - RNA, 19 nt, Homo sapiens
  misc_RNA (1)...(19): siRNA sense strand
guagugaugcagaaaauga

SEQ ID NO: 1731940 - RNA, 19 nt, Homo sapiens
  misc_RNA (1)...(19): siRNA sense strand
gaaacuuccuguacauaaa

SEQ ID NO: 1731941 - RNA, 19 nt, Homo sapiens
  misc_RNA (1)...(19): siRNA sense strand
gacagaaucuucagacuau

SEQ ID NO: 1731942 - RNA, 19 nt, Homo sapiens
  misc_RNA (1)...(19): siRNA sense strand
gaaacagacuucguaaaga

SEQ ID NO: 1731943 - RNA, 19 nt, Homo sapiens
  misc_RNA (1)...(19): siRNA sense strand
gaaaggagaugaguaugau

SEQ ID NO: 1731944 - RNA, 19 nt, Homo sapiens
  misc_RNA (1)...(19): siRNA sense strand
guaugaagauggagacaaa

SEQ ID NO: 1731945 - RNA, 19 nt, Homo sapiens
  misc_RNA (1)...(19): siRNA sense strand
cuaauucucugaaagauga

SEQ ID NO: 1731946 - RNA, 19 nt, Homo sapiens
  misc_RNA (1)...(19): siRNA sense strand
ugaacgggauuacaacaua

SEQ ID NO: 1731947 - RNA, 19 nt, Homo sapiens
  misc_RNA (1)...(19): siRNA sense strand
gaacauaccccuuuacuga

SEQ ID NO: 1731948 - RNA, 19 nt, Homo sapiens
  misc_RNA (1)...(19): siRNA sense strand
gaacaugacagaaucuuca

SEQ ID NO: 1731949 - RNA, 19 nt, Homo sapiens
  misc_RNA (1)...(19): siRNA sense strand
cuaauucccuuccuuauca

SEQ ID NO: 1731950 - RNA, 19 nt, Homo sapiens
  misc_RNA (1)...(19): siRNA sense strand
cauagugccuccaccagua

SEQ ID NO: 1731951 - RNA, 19 nt, Homo sapiens
  misc_RNA (1)...(19): siRNA sense strand
aaacagacuucguaaagau

SEQ ID NO: 1731952 - RNA, 19 nt, Homo sapiens
  misc_RNA (1)...(19): siRNA sense strand
gggcaucugucucaucuug

SEQ ID NO: 1731953 - RNA, 19 nt, Homo sapiens
  misc_RNA (1)...(19): siRNA sense strand
caagaaaggagaugaguau

SEQ ID NO: 1731954 - RNA, 19 nt, Homo sapiens
  misc_RNA (1)...(19): siRNA sense strand
gaaugccugugaacccaua

SEQ ID NO: 1731955 - RNA, 19 nt, Homo sapiens
  misc_RNA (1)...(19): siRNA sense strand
gcacuuucaucguguuaau

SEQ ID NO: 1731956 - RNA, 19 nt, Homo sapiens
  misc_RNA (1)...(19): siRNA sense strand
gaacgggauuacaacauag

SEQ ID NO: 1731957 - RNA, 19 nt, Homo sapiens
  misc_RNA (1)...(19): siRNA sense strand
gaaucccgcucacaucaga

SEQ ID NO: 1731958 - RNA, 19 nt, Homo sapiens
  misc_RNA (1)...(19): siRNA sense strand
ggauagacauagagcuaga

SEQ ID NO: 1731959 - RNA, 19 nt, Homo sapiens
  misc_RNA (1)...(19): siRNA sense strand
agacauagagcuagaagaa

SEQ ID NO: 1731960 - RNA, 19 nt, Homo sapiens
  misc_RNA (1)...(19): siRNA sense strand
ggagaugaguaugauguau

SEQ ID NO: 1731961 - RNA, 19 nt, Homo sapiens
  misc_RNA (1)...(19): siRNA sense strand
uaagaaacuuccuguacau

SEQ ID NO: 1731962 - RNA, 19 nt, Homo sapiens
  misc_RNA (1)...(19): siRNA sense strand
caauucaucuggcacuuuc

SEQ ID NO: 1731963 - RNA, 19 nt, Homo sapiens
  misc_RNA (1)...(19): siRNA sense strand
uuaagaaacuuccuguaca

SEQ ID NO: 1731964 - RNA, 19 nt, Homo sapiens
  misc_RNA (1)...(19): siRNA sense strand
agacaguagucaagaagaa

SEQ ID NO: 1731965 - RNA, 19 nt, Homo sapiens
  misc_RNA (1)...(19): siRNA sense strand
guagacccuuggcuaacua

SEQ ID NO: 1731966 - RNA, 19 nt, Homo sapiens
  misc_RNA (1)...(19): siRNA sense strand
gaagacgacaaugaagaua

SEQ ID NO: 1731967 - RNA, 19 nt, Homo sapiens
  misc_RNA (1)...(19): siRNA sense strand
ggaugaguaugaagaugga

SEQ ID NO: 1731968 - RNA, 19 nt, Homo sapiens
  misc_RNA (1)...(19): siRNA sense strand
ggaagacgacaaugaagau

SEQ ID NO: 1731969 - RNA, 19 nt, Homo sapiens
  misc_RNA (1)...(19): siRNA sense strand
aaauugacauuccaucugu

SEQ ID NO: 1731970 - RNA, 19 nt, Homo sapiens
  misc_RNA (1)...(19): siRNA sense strand
ugacaguagugaugcagaa

SEQ ID NO: 1731971 - RNA, 19 nt, Homo sapiens
  misc_RNA (1)...(19): siRNA sense strand
ugacagaaucuucagacua

SEQ ID NO: 1731972 - RNA, 19 nt, Homo sapiens
  misc_RNA (1)...(19): siRNA sense strand
caucagaacaugacagaau

SEQ ID NO: 1731973 - RNA, 19 nt, Homo sapiens
  misc_RNA (1)...(19): siRNA sense strand
gaauuuagucuuccuuugg

SEQ ID NO: 1731974 - RNA, 19 nt, Homo sapiens
  misc_RNA (1)...(19): siRNA sense strand
ugucucaucuugauaguca

SEQ ID NO: 1731975 - RNA, 19 nt, Homo sapiens
  misc_RNA (1)...(19): siRNA sense strand
uaugauguaugugccauuu

SEQ ID NO: 1731976 - RNA, 19 nt, Homo sapiens
  misc_RNA (1)...(19): siRNA sense strand
gcaucugucucaucuugau

SEQ ID NO: 1731977 - RNA, 19 nt, Homo sapiens
  misc_RNA (1)...(19): siRNA sense strand
ucaaggcgauucagacucu

SEQ ID NO: 1731978 - RNA, 19 nt, Homo sapiens
  misc_RNA (1)...(19): siRNA sense strand
ccauuuguuuggaugagua

SEQ ID NO: 1731979 - RNA, 19 nt, Homo sapiens
  misc_RNA (1)...(19): siRNA sense strand
gcacagagagcaggauaca

SEQ ID NO: 1731980 - RNA, 19 nt, Homo sapiens
  misc_RNA (1)...(19): siRNA sense strand
ggugaaucaucagcuaauu

SEQ ID NO: 1731981 - RNA, 19 nt, Homo sapiens
  misc_RNA (1)...(19): siRNA sense strand
agaaacuuccuguacauaa

SEQ ID NO: 1731982 - RNA, 19 nt, Homo sapiens
  misc_RNA (1)...(19): siRNA sense strand
ugaggaagacgacaaugaa

SEQ ID NO: 1731983 - RNA, 19 nt, Homo sapiens
  misc_RNA (1)...(19): siRNA sense strand
cauuccaucugucuuuauu

SEQ ID NO: 1731984 - RNA, 19 nt, Homo sapiens
  misc_RNA (1)...(19): siRNA sense strand
ugauguaugugccauuugu

SEQ ID NO: 1731985 - RNA, 19 nt, Homo sapiens
  misc_RNA (1)...(19): siRNA sense strand
agaaaggagaugaguauga

SEQ ID NO: 1731986 - RNA, 19 nt, Homo sapiens
  misc_RNA (1)...(19): siRNA sense strand
agaaacagacuucguaaag

SEQ ID NO: 1731987 - RNA, 19 nt, Homo sapiens
  misc_RNA (1)...(19): siRNA sense strand
caggauagacauagagcua

SEQ ID NO: 1731988 - RNA, 19 nt, Homo sapiens
  misc_RNA (1)...(19): siRNA sense strand
acauagagcuagaagaaac

SEQ ID NO: 1731989 - RNA, 19 nt, Homo sapiens
  misc_RNA (1)...(19): siRNA sense strand
gggauuacaacauagcaaa

SEQ ID NO: 1731990 - RNA, 19 nt, Homo sapiens
  misc_RNA (1)...(19): siRNA sense strand
gagaugaguaugauguaug

SEQ ID NO: 1731991 - RNA, 19 nt, Homo sapiens
  misc_RNA (1)...(19): siRNA sense strand
auacaaggcagccauaguu

SEQ ID NO: 1731992 - RNA, 19 nt, Homo sapiens
  misc_RNA (1)...(19): siRNA sense strand
gacagaacauaccccuuua

SEQ ID NO: 1731993 - RNA, 19 nt, Homo sapiens
  misc_RNA (1)...(19): siRNA sense strand
cagcuaauucucugaaaga

SEQ ID NO: 1731994 - RNA, 19 nt, Homo sapiens
  misc_RNA (1)...(19): siRNA sense strand
agaauuuagucuuccuuug

SEQ ID NO: 1731995 - RNA, 19 nt, Homo sapiens
  misc_RNA (1)...(19): siRNA sense strand
ucaagaaaggagaugagua

SEQ ID NO: 1731996 - RNA, 19 nt, Homo sapiens
  misc_RNA (1)...(19): siRNA sense strand
agccauaguucacaauguu

SEQ ID NO: 1731997 - RNA, 19 nt, Homo sapiens
  misc_RNA (1)...(19): siRNA sense strand
ucguaaagaucaacuuaag

SEQ ID NO: 1731998 - RNA, 19 nt, Homo sapiens
  misc_RNA (1)...(19): siRNA sense strand
guuccagaauuuagucuuc

SEQ ID NO: 1731999 - RNA, 19 nt, Homo sapiens
  misc_RNA (1)...(19): siRNA sense strand
ucacaauguugauucugau

SEQ ID NO: 1732000 - RNA, 19 nt, Homo sapiens
  misc_RNA (1)...(19): siRNA sense strand
uuacugagaccuuuagcuu

SEQ ID NO: 1732001 - RNA, 19 nt, Homo sapiens
  misc_RNA (1)...(19): siRNA sense strand
agaugaguaugauguaugu

SEQ ID NO: 1732002 - RNA, 19 nt, Homo sapiens
  misc_RNA (1)...(19): siRNA sense strand
cacagacaguagucaagaa

SEQ ID NO: 1732003 - RNA, 19 nt, Homo sapiens
  misc_RNA (1)...(19): siRNA sense strand
cagaaucuucagacuauga

SEQ ID NO: 1732004 - RNA, 19 nt, Homo sapiens
  misc_RNA (1)...(19): siRNA sense strand
acagagagcaggauacaag

SEQ ID NO: 1732005 - RNA, 19 nt, Homo sapiens
  misc_RNA (1)...(19): siRNA sense strand
uaccuaauucccuuccuua

SEQ ID NO: 1732006 - RNA, 19 nt, Homo sapiens
  misc_RNA (1)...(19): siRNA sense strand
cuucguaaagaucaacuua

SEQ ID NO: 1732007 - RNA, 19 nt, Homo sapiens
  misc_RNA (1)...(19): siRNA sense strand
cuaccuaauucccuuccuu

SEQ ID NO: 1732008 - RNA, 19 nt, Homo sapiens
  misc_RNA (1)...(19): siRNA sense strand
aaaaugaagugacagaaca

SEQ ID NO: 1732009 - RNA, 19 nt, Homo sapiens
  misc_RNA (1)...(19): siRNA sense strand
cagaauuuagucuuccuuu

SEQ ID NO: 1732010 - RNA, 19 nt, Homo sapiens
  misc_RNA (1)...(19): siRNA sense strand
gacaguagucaagaagaaa

SEQ ID NO: 1732011 - RNA, 19 nt, Homo sapiens
  misc_RNA (1)...(19): siRNA sense strand
gaucaacuuaagaaacuuc

SEQ ID NO: 1732012 - RNA, 19 nt, Homo sapiens
  misc_RNA (1)...(19): siRNA sense strand
gacauagagcuagaagaaa

SEQ ID NO: 1732013 - RNA, 19 nt, Homo sapiens
  misc_RNA (1)...(19): siRNA sense strand
aaccagagaaugccuguga

SEQ ID NO: 1732014 - RNA, 19 nt, Homo sapiens
  misc_RNA (1)...(19): siRNA sense strand
acugagaccuuuagcuucu

SEQ ID NO: 1732015 - RNA, 19 nt, Homo sapiens
  misc_RNA (1)...(19): siRNA sense strand
ugacagaacauaccccuuu

SEQ ID NO: 1732016 - RNA, 19 nt, Homo sapiens
  misc_RNA (1)...(19): siRNA sense strand
cagccauaguucacaaugu

SEQ ID NO: 1732017 - RNA, 19 nt, Homo sapiens
  misc_RNA (1)...(19): siRNA sense strand
gugggcaucugucucaucu

SEQ ID NO: 1732018 - RNA, 19 nt, Homo sapiens
  misc_RNA (1)...(19): siRNA sense strand
uaucauagugggcaucugu

SEQ ID NO: 1732019 - RNA, 19 nt, Homo sapiens
  misc_RNA (1)...(19): siRNA sense strand
gauacaaggcagccauagu

SEQ ID NO: 1732020 - RNA, 19 nt, Homo sapiens
  misc_RNA (1)...(19): siRNA sense strand
gggccaccuuaucuuaguu

SEQ ID NO: 1732021 - RNA, 19 nt, Homo sapiens
  misc_RNA (1)...(19): siRNA sense strand
aauuuagucuuccuuugga

SEQ ID NO: 1732022 - RNA, 19 nt, Homo sapiens
  misc_RNA (1)...(19): siRNA sense strand
ggauuacaacauagcaaau

SEQ ID NO: 1732023 - RNA, 19 nt, Homo sapiens
  misc_RNA (1)...(19): siRNA sense strand
agacgacaaugaagauacu

SEQ ID NO: 1732024 - RNA, 19 nt, Homo sapiens
  misc_RNA (1)...(19): siRNA sense strand
gacaauucaucuggcacuu

SEQ ID NO: 1732025 - RNA, 19 nt, Homo sapiens
  misc_RNA (1)...(19): siRNA sense strand
gcuaauucucugaaagaug

SEQ ID NO: 1732026 - RNA, 19 nt, Homo sapiens
  misc_RNA (1)...(19): siRNA sense strand
ugucagugcccagucauuu

SEQ ID NO: 1732027 - RNA, 19 nt, Homo sapiens
  misc_RNA (1)...(19): siRNA sense strand
uucacaauguugauucuga

SEQ ID NO: 1732028 - RNA, 19 nt, Homo sapiens
  misc_RNA (1)...(19): siRNA sense strand
gcagccauaguucacaaug

SEQ ID NO: 1732029 - RNA, 19 nt, Homo sapiens
  misc_RNA (1)...(19): siRNA sense strand
caauguugauucugaugac

SEQ ID NO: 1732030 - RNA, 19 nt, Homo sapiens
  misc_RNA (1)...(19): siRNA sense strand
gaggaagacgacaaugaag

SEQ ID NO: 1732031 - RNA, 19 nt, Homo sapiens
  misc_RNA (1)...(19): siRNA sense strand
aagaaacuuccuguacaua

SEQ ID NO: 1732032 - RNA, 19 nt, Homo sapiens
  misc_RNA (1)...(19): siRNA sense strand
ccuuuggaauacuaccuaa

SEQ ID NO: 1732033 - RNA, 19 nt, Homo sapiens
  misc_RNA (1)...(19): siRNA sense strand
agaagaaaaugaagugaca

SEQ ID NO: 1732034 - RNA, 19 nt, Homo sapiens
  misc_RNA (1)...(19): siRNA sense strand
ccauaguucacaauguuga

SEQ ID NO: 1732035 - RNA, 19 nt, Homo sapiens
  misc_RNA (1)...(19): siRNA sense strand
acacagacaguagucaaga

SEQ ID NO: 1732036 - RNA, 19 nt, Homo sapiens
  misc_RNA (1)...(19): siRNA sense strand
cguaaagaucaacuuaaga

SEQ ID NO: 1732037 - RNA, 19 nt, Homo sapiens
  misc_RNA (1)...(19): siRNA sense strand
ugucuuuauuggugaauca

SEQ ID NO: 1732038 - RNA, 19 nt, Homo sapiens
  misc_RNA (1)...(19): siRNA sense strand
cggaaucccgcucacauca

SEQ ID NO: 1732039 - RNA, 19 nt, Homo sapiens
  misc_RNA (1)...(19): siRNA sense strand
guagugaugcagaaaauga

SEQ ID NO: 1732040 - RNA, 19 nt, Homo sapiens
  misc_RNA (1)...(19): siRNA sense strand
cauagugccuccaccagua

SEQ ID NO: 1732041 - RNA, 19 nt, Homo sapiens
  misc_RNA (1)...(19): siRNA sense strand
gaaugccugugaacccaua

SEQ ID NO: 1732042 - RNA, 19 nt, Homo sapiens
  misc_RNA (1)...(19): siRNA sense strand
gcacuuucaucguguuaau

SEQ ID NO: 1732043 - RNA, 19 nt, Homo sapiens
  misc_RNA (1)...(19): siRNA sense strand
caauucaucuggcacuuuc

SEQ ID NO: 1732044 - RNA, 19 nt, Homo sapiens
  misc_RNA (1)...(19): siRNA sense strand
gcacagagagcaggauaca

SEQ ID NO: 1732045 - RNA, 19 nt, Homo sapiens
  misc_RNA (1)...(19): siRNA sense strand
auacaaggcagccauaguu

SEQ ID NO: 1732046 - RNA, 19 nt, Homo sapiens
  misc_RNA (1)...(19): siRNA sense strand
agccauaguucacaauguu

SEQ ID NO: 1732047 - RNA, 19 nt, Homo sapiens
  misc_RNA (1)...(19): siRNA sense strand
ucacaauguugauucugau

SEQ ID NO: 1732048 - RNA, 19 nt, Homo sapiens
  misc_RNA (1)...(19): siRNA sense strand
acagagagcaggauacaag

SEQ ID NO: 1732049 - RNA, 19 nt, Homo sapiens
  misc_RNA (1)...(19): siRNA sense strand
gauacaaggcagccauagu

SEQ ID NO: 1732050 - RNA, 19 nt, Homo sapiens
  misc_RNA (1)...(19): siRNA sense strand
cagccauaguucacaaugu

SEQ ID NO: 1732051 - RNA, 19 nt, Homo sapiens
  misc_RNA (1)...(19): siRNA sense strand
aaccagagaaugccuguga

SEQ ID NO: 1732052 - RNA, 19 nt, Homo sapiens
  misc_RNA (1)...(19): siRNA sense strand
gacaauucaucuggcacuu

SEQ ID NO: 1732053 - RNA, 19 nt, Homo sapiens
  misc_RNA (1)...(19): siRNA sense strand
uucacaauguugauucuga

SEQ ID NO: 1732054 - RNA, 19 nt, Homo sapiens
  misc_RNA (1)...(19): siRNA sense strand
gcagccauaguucacaaug

SEQ ID NO: 1732055 - RNA, 19 nt, Homo sapiens
  misc_RNA (1)...(19): siRNA sense strand
caauguugauucugaugac

SEQ ID NO: 1732056 - RNA, 19 nt, Homo sapiens
  misc_RNA (1)...(19): siRNA sense strand
ccauaguucacaauguuga

SEQ ID NO: 1732057 - RNA, 19 nt, Homo sapiens
  misc_RNA (1)...(19): siRNA sense strand
cguguuaauuagaagacuu

SEQ ID NO: 1732058 - RNA, 19 nt, Homo sapiens
  misc_RNA (1)...(19): siRNA sense strand
gguuuuaaaugcacagaga

SEQ ID NO: 1732059 - RNA, 19 nt, Homo sapiens
  misc_RNA (1)...(19): siRNA sense strand
acaauucaucuggcacuuu

SEQ ID NO: 1732060 - RNA, 19 nt, Homo sapiens
  misc_RNA (1)...(19): siRNA sense strand
acaauguugauucugauga

SEQ ID NO: 1732061 - RNA, 19 nt, Homo sapiens
  misc_RNA (1)...(19): siRNA sense strand
gaaacuuccuguacauaaa

SEQ ID NO: 1732062 - RNA, 19 nt, Homo sapiens
  misc_RNA (1)...(19): siRNA sense strand
gacagaaucuucagacuau

SEQ ID NO: 1732063 - RNA, 19 nt, Homo sapiens
  misc_RNA (1)...(19): siRNA sense strand
gaaacagacuucguaaaga

SEQ ID NO: 1732064 - RNA, 19 nt, Homo sapiens
  misc_RNA (1)...(19): siRNA sense strand
gaaaggagaugaguaugau

SEQ ID NO: 1732065 - RNA, 19 nt, Homo sapiens
  misc_RNA (1)...(19): siRNA sense strand
guaugaagauggagacaaa

SEQ ID NO: 1732066 - RNA, 19 nt, Homo sapiens
  misc_RNA (1)...(19): siRNA sense strand
ugaacgggauuacaacaua

SEQ ID NO: 1732067 - RNA, 19 nt, Homo sapiens
  misc_RNA (1)...(19): siRNA sense strand
gaacauaccccuuuacuga

SEQ ID NO: 1732068 - RNA, 19 nt, Homo sapiens
  misc_RNA (1)...(19): siRNA sense strand
gaacaugacagaaucuuca

SEQ ID NO: 1732069 - RNA, 19 nt, Homo sapiens
  misc_RNA (1)...(19): siRNA sense strand
aaacagacuucguaaagau

SEQ ID NO: 1732070 - RNA, 19 nt, Homo sapiens
  misc_RNA (1)...(19): siRNA sense strand
caagaaaggagaugaguau

SEQ ID NO: 1732071 - RNA, 19 nt, Homo sapiens
  misc_RNA (1)...(19): siRNA sense strand
gaacgggauuacaacauag

SEQ ID NO: 1732072 - RNA, 19 nt, Homo sapiens
  misc_RNA (1)...(19): siRNA sense strand
gaaucccgcucacaucaga

SEQ ID NO: 1732073 - RNA, 19 nt, Homo sapiens
  misc_RNA (1)...(19): siRNA sense strand
ggauagacauagagcuaga

SEQ ID NO: 1732074 - RNA, 19 nt, Homo sapiens
  misc_RNA (1)...(19): siRNA sense strand
agacauagagcuagaagaa

SEQ ID NO: 1732075 - RNA, 19 nt, Homo sapiens
  misc_RNA (1)...(19): siRNA sense strand
ggagaugaguaugauguau

SEQ ID NO: 1732076 - RNA, 19 nt, Homo sapiens
  misc_RNA (1)...(19): siRNA sense strand
uaagaaacuuccuguacau

SEQ ID NO: 1732077 - RNA, 19 nt, Homo sapiens
  misc_RNA (1)...(19): siRNA sense strand
uuaagaaacuuccuguaca

SEQ ID NO: 1732078 - RNA, 19 nt, Homo sapiens
  misc_RNA (1)...(19): siRNA sense strand
agacaguagucaagaagaa

SEQ ID NO: 1732079 - RNA, 19 nt, Homo sapiens
  misc_RNA (1)...(19): siRNA sense strand
guagacccuuggcuaacua

SEQ ID NO: 1732080 - RNA, 19 nt, Homo sapiens
  misc_RNA (1)...(19): siRNA sense strand
gaagacgacaaugaagaua

SEQ ID NO: 1732081 - RNA, 19 nt, Homo sapiens
  misc_RNA (1)...(19): siRNA sense strand
ggaugaguaugaagaugga

SEQ ID NO: 1732082 - RNA, 19 nt, Homo sapiens
  misc_RNA (1)...(19): siRNA sense strand
ggaagacgacaaugaagau

SEQ ID NO: 1732083 - RNA, 19 nt, Homo sapiens
  misc_RNA (1)...(19): siRNA sense strand
caucagaacaugacagaau

SEQ ID NO: 1732084 - RNA, 19 nt, Homo sapiens
  misc_RNA (1)...(19): siRNA sense strand
ugacaguagugaugcagaa

SEQ ID NO: 1732085 - RNA, 19 nt, Homo sapiens
  misc_RNA (1)...(19): siRNA sense strand
ugacagaaucuucagacua

SEQ ID NO: 1732086 - RNA, 19 nt, Homo sapiens
  misc_RNA (1)...(19): siRNA sense strand
uaugauguaugugccauuu

SEQ ID NO: 1732087 - RNA, 19 nt, Homo sapiens
  misc_RNA (1)...(19): siRNA sense strand
ccauuuguuuggaugagua

SEQ ID NO: 1732088 - RNA, 19 nt, Homo sapiens
  misc_RNA (1)...(19): siRNA sense strand
ucaaggcgauucagacucu

SEQ ID NO: 1732089 - RNA, 19 nt, Homo sapiens
  misc_RNA (1)...(19): siRNA sense strand
agaaacuuccuguacauaa

SEQ ID NO: 1732090 - RNA, 19 nt, Homo sapiens
  misc_RNA (1)...(19): siRNA sense strand
ugaggaagacgacaaugaa

SEQ ID NO: 1732091 - RNA, 19 nt, Homo sapiens
  misc_RNA (1)...(19): siRNA sense strand
agaaaggagaugaguauga

SEQ ID NO: 1732092 - RNA, 19 nt, Homo sapiens
  misc_RNA (1)...(19): siRNA sense strand
caggauagacauagagcua

SEQ ID NO: 1732093 - RNA, 19 nt, Homo sapiens
  misc_RNA (1)...(19): siRNA sense strand
agaaacagacuucguaaag

SEQ ID NO: 1732094 - RNA, 19 nt, Homo sapiens
  misc_RNA (1)...(19): siRNA sense strand
ugauguaugugccauuugu

SEQ ID NO: 1732095 - RNA, 19 nt, Homo sapiens
  misc_RNA (1)...(19): siRNA sense strand
gagaugaguaugauguaug

SEQ ID NO: 1732096 - RNA, 19 nt, Homo sapiens
  misc_RNA (1)...(19): siRNA sense strand
gggauuacaacauagcaaa

SEQ ID NO: 1732097 - RNA, 19 nt, Homo sapiens
  misc_RNA (1)...(19): siRNA sense strand
acauagagcuagaagaaac

SEQ ID NO: 1732098 - RNA, 19 nt, Homo sapiens
  misc_RNA (1)...(19): siRNA sense strand
gacagaacauaccccuuua

SEQ ID NO: 1732099 - RNA, 19 nt, Homo sapiens
  misc_RNA (1)...(19): siRNA sense strand
ucaagaaaggagaugagua

SEQ ID NO: 1732100 - RNA, 19 nt, Homo sapiens
  misc_RNA (1)...(19): siRNA sense strand
ucguaaagaucaacuuaag

SEQ ID NO: 1732101 - RNA, 19 nt, Homo sapiens
  misc_RNA (1)...(19): siRNA sense strand
agaugaguaugauguaugu

SEQ ID NO: 1732102 - RNA, 19 nt, Homo sapiens
  misc_RNA (1)...(19): siRNA sense strand
uuacugagaccuuuagcuu

SEQ ID NO: 1732103 - RNA, 19 nt, Homo sapiens
  misc_RNA (1)...(19): siRNA sense strand
cacagacaguagucaagaa

SEQ ID NO: 1732104 - RNA, 19 nt, Homo sapiens
  misc_RNA (1)...(19): siRNA sense strand
cagaaucuucagacuauga

SEQ ID NO: 1732105 - RNA, 19 nt, Homo sapiens
  misc_RNA (1)...(19): siRNA sense strand
cuucguaaagaucaacuua

SEQ ID NO: 1732106 - RNA, 19 nt, Homo sapiens
  misc_RNA (1)...(19): siRNA sense strand
aaaaugaagugacagaaca

SEQ ID NO: 1732107 - RNA, 19 nt, Homo sapiens
  misc_RNA (1)...(19): siRNA sense strand
gacauagagcuagaagaaa

SEQ ID NO: 1732108 - RNA, 19 nt, Homo sapiens
  misc_RNA (1)...(19): siRNA sense strand
gacaguagucaagaagaaa

SEQ ID NO: 1732109 - RNA, 19 nt, Homo sapiens
  misc_RNA (1)...(19): siRNA sense strand
gaucaacuuaagaaacuuc

SEQ ID NO: 1732110 - RNA, 19 nt, Homo sapiens
  misc_RNA (1)...(19): siRNA sense strand
ugacagaacauaccccuuu

SEQ ID NO: 1732111 - RNA, 19 nt, Homo sapiens
  misc_RNA (1)...(19): siRNA sense strand
acugagaccuuuagcuucu

SEQ ID NO: 1732112 - RNA, 19 nt, Homo sapiens
  misc_RNA (1)...(19): siRNA sense strand
agacgacaaugaagauacu

SEQ ID NO: 1732113 - RNA, 19 nt, Homo sapiens
  misc_RNA (1)...(19): siRNA sense strand
ggauuacaacauagcaaau

SEQ ID NO: 1732114 - RNA, 19 nt, Homo sapiens
  misc_RNA (1)...(19): siRNA sense strand
ugucagugcccagucauuu

SEQ ID NO: 1732115 - RNA, 19 nt, Homo sapiens
  misc_RNA (1)...(19): siRNA sense strand
gaggaagacgacaaugaag

SEQ ID NO: 1732116 - RNA, 19 nt, Homo sapiens
  misc_RNA (1)...(19): siRNA sense strand
aagaaacuuccuguacaua

SEQ ID NO: 1732117 - RNA, 19 nt, Homo sapiens
  misc_RNA (1)...(19): siRNA sense strand
acacagacaguagucaaga

SEQ ID NO: 1732118 - RNA, 19 nt, Homo sapiens
  misc_RNA (1)...(19): siRNA sense strand
cguaaagaucaacuuaaga

SEQ ID NO: 1732119 - RNA, 19 nt, Homo sapiens
  misc_RNA (1)...(19): siRNA sense strand
agaagaaaaugaagugaca

SEQ ID NO: 1732120 - RNA, 19 nt, Homo sapiens
  misc_RNA (1)...(19): siRNA sense strand
guucccaugcuuaucauug

SEQ ID NO: 1732121 - RNA, 19 nt, Homo sapiens
  misc_RNA (1)...(19): siRNA sense strand
gauagacauagagcuagaa

SEQ ID NO: 1732122 - RNA, 19 nt, Homo sapiens
  misc_RNA (1)...(19): siRNA sense strand
guagugaugcagaaaauga

SEQ ID NO: 1732123 - RNA, 19 nt, Homo sapiens
  misc_RNA (1)...(19): siRNA sense strand
cggaaucccgcucacauca

SEQ ID NO: 1732124 - RNA, 19 nt, Homo sapiens
  misc_RNA (1)...(19): siRNA sense strand
uguguagacccuuggcuaa

SEQ ID NO: 1732125 - RNA, 19 nt, Homo sapiens
  misc_RNA (1)...(19): siRNA sense strand
uguccagugugcaagcaaa

SEQ ID NO: 1732126 - RNA, 19 nt, Homo sapiens
  misc_RNA (1)...(19): siRNA sense strand
cuuaagaaacuuccuguac

SEQ ID NO: 1732127 - RNA, 19 nt, Homo sapiens
  misc_RNA (1)...(19): siRNA sense strand
aagaaacagacuucguaaa

SEQ ID NO: 1732128 - RNA, 19 nt, Homo sapiens
  misc_RNA (1)...(19): siRNA sense strand
ccgcucacaucagaacaug

SEQ ID NO: 1732129 - RNA, 19 nt, Homo sapiens
  misc_RNA (1)...(19): siRNA sense strand
cacaucagaacaugacaga

SEQ ID NO: 1732130 - RNA, 19 nt, Homo sapiens
  misc_RNA (1)...(19): siRNA sense strand
uaucauugcaaguguguag

SEQ ID NO: 1732131 - RNA, 19 nt, Homo sapiens
  misc_RNA (1)...(19): siRNA sense strand
gacaguagugaugcagaaa

SEQ ID NO: 1732132 - RNA, 19 nt, Homo sapiens
  misc_RNA (1)...(19): siRNA sense strand
gacaaugaagauacugaca

SEQ ID NO: 1732133 - RNA, 19 nt, Homo sapiens
  misc_RNA (1)...(19): siRNA sense strand
gcucacaucagaacaugac

SEQ ID NO: 1732134 - RNA, 19 nt, Homo sapiens
  misc_RNA (1)...(19): siRNA sense strand
accuuuagcuucugucagu

SEQ ID NO: 1732135 - RNA, 19 nt, Homo sapiens
  misc_RNA (1)...(19): siRNA sense strand
ugagaccuuuagcuucugu

SEQ ID NO: 1732136 - RNA, 19 nt, Homo sapiens
  misc_RNA (1)...(19): siRNA sense strand
gaaacuuccuguacauaaa

SEQ ID NO: 1732137 - RNA, 19 nt, Homo sapiens
  misc_RNA (1)...(19): siRNA sense strand
gacagaaucuucagacuau

SEQ ID NO: 1732138 - RNA, 19 nt, Homo sapiens
  misc_RNA (1)...(19): siRNA sense strand
gaaacagacuucguaaaga

SEQ ID NO: 1732139 - RNA, 19 nt, Homo sapiens
  misc_RNA (1)...(19): siRNA sense strand
gaaaggagaugaguaugau

SEQ ID NO: 1732140 - RNA, 19 nt, Homo sapiens
  misc_RNA (1)...(19): siRNA sense strand
guaugaagauggagacaaa

SEQ ID NO: 1732141 - RNA, 19 nt, Homo sapiens
  misc_RNA (1)...(19): siRNA sense strand
ugaacgggauuacaacaua

SEQ ID NO: 1732142 - RNA, 19 nt, Homo sapiens
  misc_RNA (1)...(19): siRNA sense strand
gaacauaccccuuuacuga

SEQ ID NO: 1732143 - RNA, 19 nt, Homo sapiens
  misc_RNA (1)...(19): siRNA sense strand
gaacaugacagaaucuuca

SEQ ID NO: 1732144 - RNA, 19 nt, Homo sapiens
  misc_RNA (1)...(19): siRNA sense strand
aaacagacuucguaaagau

SEQ ID NO: 1732145 - RNA, 19 nt, Homo sapiens
  misc_RNA (1)...(19): siRNA sense strand
caagaaaggagaugaguau

SEQ ID NO: 1732146 - RNA, 19 nt, Homo sapiens
  misc_RNA (1)...(19): siRNA sense strand
gaacgggauuacaacauag

SEQ ID NO: 1732147 - RNA, 19 nt, Homo sapiens
  misc_RNA (1)...(19): siRNA sense strand
gaaucccgcucacaucaga

SEQ ID NO: 1732148 - RNA, 19 nt, Homo sapiens
  misc_RNA (1)...(19): siRNA sense strand
ggauagacauagagcuaga

SEQ ID NO: 1732149 - RNA, 19 nt, Homo sapiens
  misc_RNA (1)...(19): siRNA sense strand
agacauagagcuagaagaa

SEQ ID NO: 1732150 - RNA, 19 nt, Homo sapiens
  misc_RNA (1)...(19): siRNA sense strand
ggagaugaguaugauguau

SEQ ID NO: 1732151 - RNA, 19 nt, Homo sapiens
  misc_RNA (1)...(19): siRNA sense strand
uaagaaacuuccuguacau

SEQ ID NO: 1732152 - RNA, 19 nt, Homo sapiens
  misc_RNA (1)...(19): siRNA sense strand
uuaagaaacuuccuguaca

SEQ ID NO: 1732153 - RNA, 19 nt, Homo sapiens
  misc_RNA (1)...(19): siRNA sense strand
agacaguagucaagaagaa

SEQ ID NO: 1732154 - RNA, 19 nt, Homo sapiens
  misc_RNA (1)...(19): siRNA sense strand
guagacccuuggcuaacua

SEQ ID NO: 1732155 - RNA, 19 nt, Homo sapiens
  misc_RNA (1)...(19): siRNA sense strand
gaagacgacaaugaagaua

SEQ ID NO: 1732156 - RNA, 19 nt, Homo sapiens
  misc_RNA (1)...(19): siRNA sense strand
ggaugaguaugaagaugga

SEQ ID NO: 1732157 - RNA, 19 nt, Homo sapiens
  misc_RNA (1)...(19): siRNA sense strand
ggaagacgacaaugaagau

SEQ ID NO: 1732158 - RNA, 19 nt, Homo sapiens
  misc_RNA (1)...(19): siRNA sense strand
caucagaacaugacagaau

SEQ ID NO: 1732159 - RNA, 19 nt, Homo sapiens
  misc_RNA (1)...(19): siRNA sense strand
ugacaguagugaugcagaa

SEQ ID NO: 1732160 - RNA, 19 nt, Homo sapiens
  misc_RNA (1)...(19): siRNA sense strand
ugacagaaucuucagacua

SEQ ID NO: 1732161 - RNA, 19 nt, Homo sapiens
  misc_RNA (1)...(19): siRNA sense strand
uaugauguaugugccauuu

SEQ ID NO: 1732162 - RNA, 19 nt, Homo sapiens
  misc_RNA (1)...(19): siRNA sense strand
ccauuuguuuggaugagua

SEQ ID NO: 1732163 - RNA, 19 nt, Homo sapiens
  misc_RNA (1)...(19): siRNA sense strand
ucaaggcgauucagacucu

SEQ ID NO: 1732164 - RNA, 19 nt, Homo sapiens
  misc_RNA (1)...(19): siRNA sense strand
agaaacuuccuguacauaa

SEQ ID NO: 1732165 - RNA, 19 nt, Homo sapiens
  misc_RNA (1)...(19): siRNA sense strand
ugaggaagacgacaaugaa

SEQ ID NO: 1732166 - RNA, 19 nt, Homo sapiens
  misc_RNA (1)...(19): siRNA sense strand
agaaaggagaugaguauga

SEQ ID NO: 1732167 - RNA, 19 nt, Homo sapiens
  misc_RNA (1)...(19): siRNA sense strand
caggauagacauagagcua

SEQ ID NO: 1732168 - RNA, 19 nt, Homo sapiens
  misc_RNA (1)...(19): siRNA sense strand
agaaacagacuucguaaag

SEQ ID NO: 1732169 - RNA, 19 nt, Homo sapiens
  misc_RNA (1)...(19): siRNA sense strand
ugauguaugugccauuugu

SEQ ID NO: 1732170 - RNA, 19 nt, Homo sapiens
  misc_RNA (1)...(19): siRNA sense strand
gagaugaguaugauguaug

SEQ ID NO: 1732171 - RNA, 19 nt, Homo sapiens
  misc_RNA (1)...(19): siRNA sense strand
gggauuacaacauagcaaa

SEQ ID NO: 1732172 - RNA, 19 nt, Homo sapiens
  misc_RNA (1)...(19): siRNA sense strand
acauagagcuagaagaaac

SEQ ID NO: 1732173 - RNA, 19 nt, Homo sapiens
  misc_RNA (1)...(19): siRNA sense strand
gacagaacauaccccuuua

SEQ ID NO: 1732174 - RNA, 19 nt, Homo sapiens
  misc_RNA (1)...(19): siRNA sense strand
ucaagaaaggagaugagua

SEQ ID NO: 1732175 - RNA, 19 nt, Homo sapiens
  misc_RNA (1)...(19): siRNA sense strand
ucguaaagaucaacuuaag

SEQ ID NO: 1732176 - RNA, 19 nt, Homo sapiens
  misc_RNA (1)...(19): siRNA sense strand
agaugaguaugauguaugu

SEQ ID NO: 1732177 - RNA, 19 nt, Homo sapiens
  misc_RNA (1)...(19): siRNA sense strand
uuacugagaccuuuagcuu

SEQ ID NO: 1732178 - RNA, 19 nt, Homo sapiens
  misc_RNA (1)...(19): siRNA sense strand
cacagacaguagucaagaa

SEQ ID NO: 1732179 - RNA, 19 nt, Homo sapiens
  misc_RNA (1)...(19): siRNA sense strand
cagaaucuucagacuauga

SEQ ID NO: 1732180 - RNA, 19 nt, Homo sapiens
  misc_RNA (1)...(19): siRNA sense strand
cuucguaaagaucaacuua

SEQ ID NO: 1732181 - RNA, 19 nt, Homo sapiens
  misc_RNA (1)...(19): siRNA sense strand
aaaaugaagugacagaaca

SEQ ID NO: 1732182 - RNA, 19 nt, Homo sapiens
  misc_RNA (1)...(19): siRNA sense strand
gacauagagcuagaagaaa

SEQ ID NO: 1732183 - RNA, 19 nt, Homo sapiens
  misc_RNA (1)...(19): siRNA sense strand
gacaguagucaagaagaaa

SEQ ID NO: 1732184 - RNA, 19 nt, Homo sapiens
  misc_RNA (1)...(19): siRNA sense strand
gaucaacuuaagaaacuuc

SEQ ID NO: 1732185 - RNA, 19 nt, Homo sapiens
  misc_RNA (1)...(19): siRNA sense strand
ugacagaacauaccccuuu

SEQ ID NO: 1732186 - RNA, 19 nt, Homo sapiens
  misc_RNA (1)...(19): siRNA sense strand
acugagaccuuuagcuucu

SEQ ID NO: 1732187 - RNA, 19 nt, Homo sapiens
  misc_RNA (1)...(19): siRNA sense strand
agacgacaaugaagauacu

SEQ ID NO: 1732188 - RNA, 19 nt, Homo sapiens
  misc_RNA (1)...(19): siRNA sense strand
ggauuacaacauagcaaau

SEQ ID NO: 1732189 - RNA, 19 nt, Homo sapiens
  misc_RNA (1)...(19): siRNA sense strand
ugucagugcccagucauuu

SEQ ID NO: 1732190 - RNA, 19 nt, Homo sapiens
  misc_RNA (1)...(19): siRNA sense strand
gaggaagacgacaaugaag

SEQ ID NO: 1732191 - RNA, 19 nt, Homo sapiens
  misc_RNA (1)...(19): siRNA sense strand
aagaaacuuccuguacaua

SEQ ID NO: 1732192 - RNA, 19 nt, Homo sapiens
  misc_RNA (1)...(19): siRNA sense strand
acacagacaguagucaaga

SEQ ID NO: 1732193 - RNA, 19 nt, Homo sapiens
  misc_RNA (1)...(19): siRNA sense strand
cguaaagaucaacuuaaga

SEQ ID NO: 1732194 - RNA, 19 nt, Homo sapiens
  misc_RNA (1)...(19): siRNA sense strand
agaagaaaaugaagugaca

SEQ ID NO: 1732195 - RNA, 19 nt, Homo sapiens
  misc_RNA (1)...(19): siRNA sense strand
guucccaugcuuaucauug

SEQ ID NO: 1732196 - RNA, 19 nt, Homo sapiens
  misc_RNA (1)...(19): siRNA sense strand
gauagacauagagcuagaa

SEQ ID NO: 1732197 - RNA, 19 nt, Homo sapiens
  misc_RNA (1)...(19): siRNA sense strand
guagugaugcagaaaauga

SEQ ID NO: 1732198 - RNA, 19 nt, Homo sapiens
  misc_RNA (1)...(19): siRNA sense strand
cggaaucccgcucacauca

SEQ ID NO: 1732199 - RNA, 19 nt, Homo sapiens
  misc_RNA (1)...(19): siRNA sense strand
uguguagacccuuggcuaa

SEQ ID NO: 1732200 - RNA, 19 nt, Homo sapiens
  misc_RNA (1)...(19): siRNA sense strand
uguccagugugcaagcaaa

SEQ ID NO: 1732201 - RNA, 19 nt, Homo sapiens
  misc_RNA (1)...(19): siRNA sense strand
cuuaagaaacuuccuguac

SEQ ID NO: 1732202 - RNA, 19 nt, Homo sapiens
  misc_RNA (1)...(19): siRNA sense strand
aagaaacagacuucguaaa

SEQ ID NO: 1732203 - RNA, 19 nt, Homo sapiens
  misc_RNA (1)...(19): siRNA sense strand
ccgcucacaucagaacaug

SEQ ID NO: 1732204 - RNA, 19 nt, Homo sapiens
  misc_RNA (1)...(19): siRNA sense strand
cacaucagaacaugacaga

SEQ ID NO: 1732205 - RNA, 19 nt, Homo sapiens
  misc_RNA (1)...(19): siRNA sense strand
uaucauugcaaguguguag

SEQ ID NO: 1732206 - RNA, 19 nt, Homo sapiens
  misc_RNA (1)...(19): siRNA sense strand
gacaguagugaugcagaaa

SEQ ID NO: 1732207 - RNA, 19 nt, Homo sapiens
  misc_RNA (1)...(19): siRNA sense strand
gacaaugaagauacugaca

SEQ ID NO: 1732208 - RNA, 19 nt, Homo sapiens
  misc_RNA (1)...(19): siRNA sense strand
gcucacaucagaacaugac

SEQ ID NO: 1732209 - RNA, 19 nt, Homo sapiens
  misc_RNA (1)...(19): siRNA sense strand
accuuuagcuucugucagu

SEQ ID NO: 1732210 - RNA, 19 nt, Homo sapiens
  misc_RNA (1)...(19): siRNA sense strand
ugagaccuuuagcuucugu

SEQ ID NO: 1732211 - RNA, 19 nt, Homo sapiens
  misc_RNA (1)...(19): siRNA sense strand
gagaaggagcccagcuuua

SEQ ID NO: 1732212 - RNA, 19 nt, Homo sapiens
  misc_RNA (1)...(19): siRNA sense strand
ccaaggaggccacauguga

SEQ ID NO: 1732213 - RNA, 19 nt, Homo sapiens
  misc_RNA (1)...(19): siRNA sense strand
gcaaagaccgcugugagaa

SEQ ID NO: 1732214 - RNA, 19 nt, Homo sapiens
  misc_RNA (1)...(19): siRNA sense strand
gcaauggcaacaacuuuga

SEQ ID NO: 1732215 - RNA, 19 nt, Homo sapiens
  misc_RNA (1)...(19): siRNA sense strand
gaaaaugggccucaaguuc

SEQ ID NO: 1732216 - RNA, 19 nt, Homo sapiens
  misc_RNA (1)...(19): siRNA sense strand
ggccacaugugaccacuuc

SEQ ID NO: 1732217 - RNA, 19 nt, Homo sapiens
  misc_RNA (1)...(19): siRNA sense strand
gggcaauggcaacaacuuu

SEQ ID NO: 1732218 - RNA, 19 nt, Homo sapiens
  misc_RNA (1)...(19): siRNA sense strand
gcaggaugcugggaucuac

SEQ ID NO: 1732219 - RNA, 19 nt, Homo sapiens
  misc_RNA (1)...(19): siRNA sense strand
cggacggccucaccuacua

SEQ ID NO: 1732220 - RNA, 19 nt, Homo sapiens
  misc_RNA (1)...(19): siRNA sense strand
agacggaccaggaguguga

SEQ ID NO: 1732221 - RNA, 19 nt, Homo sapiens
  misc_RNA (1)...(19): siRNA sense strand
guuguaaccugccgcuauc

SEQ ID NO: 1732222 - RNA, 19 nt, Homo sapiens
  misc_RNA (1)...(19): siRNA sense strand
gcaucacacuggccguugu

SEQ ID NO: 1732223 - RNA, 19 nt, Homo sapiens
  misc_RNA (1)...(19): siRNA sense strand
gugaggucaugcacaagaa

SEQ ID NO: 1732224 - RNA, 19 nt, Homo sapiens
  misc_RNA (1)...(19): siRNA sense strand
ugagaaggagcccagcuuu

SEQ ID NO: 1732225 - RNA, 19 nt, Homo sapiens
  misc_RNA (1)...(19): siRNA sense strand
cccagcuggucaucuauaa

SEQ ID NO: 1732226 - RNA, 19 nt, Homo sapiens
  misc_RNA (1)...(19): siRNA sense strand
ggcaauggcaacaacuuug

SEQ ID NO: 1732227 - RNA, 19 nt, Homo sapiens
  misc_RNA (1)...(19): siRNA sense strand
caaagaccgcugugagaag

SEQ ID NO: 1732228 - RNA, 19 nt, Homo sapiens
  misc_RNA (1)...(19): siRNA sense strand
gaagcuucgugaggucaug

SEQ ID NO: 1732229 - RNA, 19 nt, Homo sapiens
  misc_RNA (1)...(19): siRNA sense strand
gcagcagggcucugagugu

SEQ ID NO: 1732230 - RNA, 19 nt, Homo sapiens
  misc_RNA (1)...(19): siRNA sense strand
caaccacuuugagaccuau

SEQ ID NO: 1732231 - RNA, 19 nt, Homo sapiens
  misc_RNA (1)...(19): siRNA sense strand
gcccagcuggucaucuaua

SEQ ID NO: 1732232 - RNA, 19 nt, Homo sapiens
  misc_RNA (1)...(19): siRNA sense strand
ggacggccucaccuacuau

SEQ ID NO: 1732233 - RNA, 19 nt, Homo sapiens
  misc_RNA (1)...(19): siRNA sense strand
uugcccagcuggucaucua

SEQ ID NO: 1732234 - RNA, 19 nt, Homo sapiens
  misc_RNA (1)...(19): siRNA sense strand
gacuguggaugagguccua

SEQ ID NO: 1732235 - RNA, 19 nt, Homo sapiens
  misc_RNA (1)...(19): siRNA sense strand
ccaggagugugagaccuau

SEQ ID NO: 1732236 - RNA, 19 nt, Homo sapiens
  misc_RNA (1)...(19): siRNA sense strand
gccaguccuuugucuaugg

SEQ ID NO: 1732237 - RNA, 19 nt, Homo sapiens
  misc_RNA (1)...(19): siRNA sense strand
gaagugcugccccaacgua

SEQ ID NO: 1732238 - RNA, 19 nt, Homo sapiens
  misc_RNA (1)...(19): siRNA sense strand
gugccaguccuuugucuau

SEQ ID NO: 1732239 - RNA, 19 nt, Homo sapiens
  misc_RNA (1)...(19): siRNA sense strand
agaaggagcccagcuuuac

SEQ ID NO: 1732240 - RNA, 19 nt, Homo sapiens
  misc_RNA (1)...(19): siRNA sense strand
caucacacuggccguugua

SEQ ID NO: 1732241 - RNA, 19 nt, Homo sapiens
  misc_RNA (1)...(19): siRNA sense strand
gaggucaugcacaagaaga

SEQ ID NO: 1732242 - RNA, 19 nt, Homo sapiens
  misc_RNA (1)...(19): siRNA sense strand
cgagggcaauggcaacaac

SEQ ID NO: 1732243 - RNA, 19 nt, Homo sapiens
  misc_RNA (1)...(19): siRNA sense strand
ugaggacuguggcgaagag

SEQ ID NO: 1732244 - RNA, 19 nt, Homo sapiens
  misc_RNA (1)...(19): siRNA sense strand
uggaggaucgggagaaugu

SEQ ID NO: 1732245 - RNA, 19 nt, Homo sapiens
  misc_RNA (1)...(19): siRNA sense strand
uaaccugccgcuaucacuu

SEQ ID NO: 1732246 - RNA, 19 nt, Homo sapiens
  misc_RNA (1)...(19): siRNA sense strand
cagugagcuuccucuguga

SEQ ID NO: 1732247 - RNA, 19 nt, Homo sapiens
  misc_RNA (1)...(19): siRNA sense strand
gacggccucaccuacuaua

SEQ ID NO: 1732248 - RNA, 19 nt, Homo sapiens
  misc_RNA (1)...(19): siRNA sense strand
ggaggucacucugcuucac

SEQ ID NO: 1732249 - RNA, 19 nt, Homo sapiens
  misc_RNA (1)...(19): siRNA sense strand
ccuaaaggaugagaaaaug

SEQ ID NO: 1732250 - RNA, 19 nt, Homo sapiens
  misc_RNA (1)...(19): siRNA sense strand
gagcuuccucugugaugug

SEQ ID NO: 1732251 - RNA, 19 nt, Homo sapiens
  misc_RNA (1)...(19): siRNA sense strand
ggccagcccguguguaagu

SEQ ID NO: 1732252 - RNA, 19 nt, Homo sapiens
  misc_RNA (1)...(19): siRNA sense strand
guuggaggaucgggagaau

SEQ ID NO: 1732253 - RNA, 19 nt, Homo sapiens
  misc_RNA (1)...(19): siRNA sense strand
gcccaaggaggccacaugu

SEQ ID NO: 1732254 - RNA, 19 nt, Homo sapiens
  misc_RNA (1)...(19): siRNA sense strand
agugugagaccuaugagaa

SEQ ID NO: 1732255 - RNA, 19 nt, Homo sapiens
  misc_RNA (1)...(19): siRNA sense strand
ggccagugccaguccuuug

SEQ ID NO: 1732256 - RNA, 19 nt, Homo sapiens
  misc_RNA (1)...(19): siRNA sense strand
ugugagaccuaugagaagu

SEQ ID NO: 1732257 - RNA, 19 nt, Homo sapiens
  misc_RNA (1)...(19): siRNA sense strand
accguaaccucaaccacuu

SEQ ID NO: 1732258 - RNA, 19 nt, Homo sapiens
  misc_RNA (1)...(19): siRNA sense strand
gugagaaggagcccagcuu

SEQ ID NO: 1732259 - RNA, 19 nt, Homo sapiens
  misc_RNA (1)...(19): siRNA sense strand
acaagaggcugguagagua

SEQ ID NO: 1732260 - RNA, 19 nt, Homo sapiens
  misc_RNA (1)...(19): siRNA sense strand
ggaauucuuucaauacaga

SEQ ID NO: 1732261 - RNA, 19 nt, Homo sapiens
  misc_RNA (1)...(19): siRNA sense strand
aaaugcagguuuacaaaga

SEQ ID NO: 1732262 - RNA, 19 nt, Homo sapiens
  misc_RNA (1)...(19): siRNA sense strand
ugaaagaacaucucaggaa

SEQ ID NO: 1732263 - RNA, 19 nt, Homo sapiens
  misc_RNA (1)...(19): siRNA sense strand
cagaauacuuccuagaauc

SEQ ID NO: 1732264 - RNA, 19 nt, Homo sapiens
  misc_RNA (1)...(19): siRNA sense strand
ccaaaggcccguuaccauu

SEQ ID NO: 1732265 - RNA, 19 nt, Homo sapiens
  misc_RNA (1)...(19): siRNA sense strand
uagaguaacuguccgagau

SEQ ID NO: 1732266 - RNA, 19 nt, Homo sapiens
  misc_RNA (1)...(19): siRNA sense strand
caaaggcccguuaccauug

SEQ ID NO: 1732267 - RNA, 19 nt, Homo sapiens
  misc_RNA (1)...(19): siRNA sense strand
gaacaccuugaacuccuua

SEQ ID NO: 1732268 - RNA, 19 nt, Homo sapiens
  misc_RNA (1)...(19): siRNA sense strand
aaacuccgcuuccgauugg

SEQ ID NO: 1732269 - RNA, 19 nt, Homo sapiens
  misc_RNA (1)...(19): siRNA sense strand
caauacagaauacuuccua

SEQ ID NO: 1732270 - RNA, 19 nt, Homo sapiens
  misc_RNA (1)...(19): siRNA sense strand
gggaaaaggugauuguaga

SEQ ID NO: 1732271 - RNA, 19 nt, Homo sapiens
  misc_RNA (1)...(19): siRNA sense strand
acagaauacuuccuagaau

SEQ ID NO: 1732272 - RNA, 19 nt, Homo sapiens
  misc_RNA (1)...(19): siRNA sense strand
ggaccuccauuuccagucu

SEQ ID NO: 1732273 - RNA, 19 nt, Homo sapiens
  misc_RNA (1)...(19): siRNA sense strand
ggaacaccuugaacuccuu

SEQ ID NO: 1732274 - RNA, 19 nt, Homo sapiens
  misc_RNA (1)...(19): siRNA sense strand
ugaucgagaugguacaaga

SEQ ID NO: 1732275 - RNA, 19 nt, Homo sapiens
  misc_RNA (1)...(19): siRNA sense strand
caagaggcugguagaguaa

SEQ ID NO: 1732276 - RNA, 19 nt, Homo sapiens
  misc_RNA (1)...(19): siRNA sense strand
ggugauaaaggauaaauac

SEQ ID NO: 1732277 - RNA, 19 nt, Homo sapiens
  misc_RNA (1)...(19): siRNA sense strand
uuaagcauaugcacacugu

SEQ ID NO: 1732278 - RNA, 19 nt, Homo sapiens
  misc_RNA (1)...(19): siRNA sense strand
caaacuccgcuuccgauug

SEQ ID NO: 1732279 - RNA, 19 nt, Homo sapiens
  misc_RNA (1)...(19): siRNA sense strand
gagcaggugguggugauaa

SEQ ID NO: 1732280 - RNA, 19 nt, Homo sapiens
  misc_RNA (1)...(19): siRNA sense strand
gcaaacuccgcuuccgauu

SEQ ID NO: 1732281 - RNA, 19 nt, Homo sapiens
  misc_RNA (1)...(19): siRNA sense strand
uaugagccauguacaucuu

SEQ ID NO: 1732282 - RNA, 19 nt, Homo sapiens
  misc_RNA (1)...(19): siRNA sense strand
cuugaacuccuuaagcaua

SEQ ID NO: 1732283 - RNA, 19 nt, Homo sapiens
  misc_RNA (1)...(19): siRNA sense strand
uacagaauacuuccuagaa

SEQ ID NO: 1732284 - RNA, 19 nt, Homo sapiens
  misc_RNA (1)...(19): siRNA sense strand
aagaacaucucaggaagca

SEQ ID NO: 1732285 - RNA, 19 nt, Homo sapiens
  misc_RNA (1)...(19): siRNA sense strand
ugauucuccuugccuuaaa

SEQ ID NO: 1732286 - RNA, 19 nt, Homo sapiens
  misc_RNA (1)...(19): siRNA sense strand
caaaaugcagguuuacaaa

SEQ ID NO: 1732287 - RNA, 19 nt, Homo sapiens
  misc_RNA (1)...(19): siRNA sense strand
caugugaucagccaggauu

SEQ ID NO: 1732288 - RNA, 19 nt, Homo sapiens
  misc_RNA (1)...(19): siRNA sense strand
gaaaaggugauuguagauu

SEQ ID NO: 1732289 - RNA, 19 nt, Homo sapiens
  misc_RNA (1)...(19): siRNA sense strand
aaggauaaauacccaaagg

SEQ ID NO: 1732290 - RNA, 19 nt, Homo sapiens
  misc_RNA (1)...(19): siRNA sense strand
ugggaugccugagcucuug

SEQ ID NO: 1732291 - RNA, 19 nt, Homo sapiens
  misc_RNA (1)...(19): siRNA sense strand
agaauacuuccuagaauca

SEQ ID NO: 1732292 - RNA, 19 nt, Homo sapiens
  misc_RNA (1)...(19): siRNA sense strand
uugaacuccuuaagcauau

SEQ ID NO: 1732293 - RNA, 19 nt, Homo sapiens
  misc_RNA (1)...(19): siRNA sense strand
ggccagggaacaccuugaa

SEQ ID NO: 1732294 - RNA, 19 nt, Homo sapiens
  misc_RNA (1)...(19): siRNA sense strand
gguacaagaggcugguaga

SEQ ID NO: 1732295 - RNA, 19 nt, Homo sapiens
  misc_RNA (1)...(19): siRNA sense strand
uuccucagcugaaagaaca

SEQ ID NO: 1732296 - RNA, 19 nt, Homo sapiens
  misc_RNA (1)...(19): siRNA sense strand
gaguaugagccauguacau

SEQ ID NO: 1732297 - RNA, 19 nt, Homo sapiens
  misc_RNA (1)...(19): siRNA sense strand
cagcugaaagaacaucuca

SEQ ID NO: 1732298 - RNA, 19 nt, Homo sapiens
  misc_RNA (1)...(19): siRNA sense strand
gugguggugauaaaggaua

SEQ ID NO: 1732299 - RNA, 19 nt, Homo sapiens
  misc_RNA (1)...(19): siRNA sense strand
aaaggcccguuaccauugg

SEQ ID NO: 1732300 - RNA, 19 nt, Homo sapiens
  misc_RNA (1)...(19): siRNA sense strand
ccaaaaugcagguuuacaa

SEQ ID NO: 1732301 - RNA, 19 nt, Homo sapiens
  misc_RNA (1)...(19): siRNA sense strand
aaugcagguuuacaaagau

SEQ ID NO: 1732302 - RNA, 19 nt, Homo sapiens
  misc_RNA (1)...(19): siRNA sense strand
ugguggugauaaaggauaa

SEQ ID NO: 1732303 - RNA, 19 nt, Homo sapiens
  misc_RNA (1)...(19): siRNA sense strand
gaaucagacuuccacauuu

SEQ ID NO: 1732304 - RNA, 19 nt, Homo sapiens
  misc_RNA (1)...(19): siRNA sense strand
caagggauaugucaaggua

SEQ ID NO: 1732305 - RNA, 19 nt, Homo sapiens
  misc_RNA (1)...(19): siRNA sense strand
gaaauguucucgacagcaa

SEQ ID NO: 1732306 - RNA, 19 nt, Homo sapiens
  misc_RNA (1)...(19): siRNA sense strand
ggaauucuuucaauacaga

SEQ ID NO: 1732307 - RNA, 19 nt, Homo sapiens
  misc_RNA (1)...(19): siRNA sense strand
gagcaacucuggccaaugc

SEQ ID NO: 1732308 - RNA, 19 nt, Homo sapiens
  misc_RNA (1)...(19): siRNA sense strand
aaagaacccuggccuggaa

SEQ ID NO: 1732309 - RNA, 19 nt, Homo sapiens
  misc_RNA (1)...(19): siRNA sense strand
aaaugcagguuuacaaaga

SEQ ID NO: 1732310 - RNA, 19 nt, Homo sapiens
  misc_RNA (1)...(19): siRNA sense strand
gaaacacacaggaagagaa

SEQ ID NO: 1732311 - RNA, 19 nt, Homo sapiens
  misc_RNA (1)...(19): siRNA sense strand
cgaaucagacuuccacauu

SEQ ID NO: 1732312 - RNA, 19 nt, Homo sapiens
  misc_RNA (1)...(19): siRNA sense strand
aaucagacuuccacauuug

SEQ ID NO: 1732313 - RNA, 19 nt, Homo sapiens
  misc_RNA (1)...(19): siRNA sense strand
cagaauacuuccuagaauc

SEQ ID NO: 1732314 - RNA, 19 nt, Homo sapiens
  misc_RNA (1)...(19): siRNA sense strand
gaaagcagaguguaacaag

SEQ ID NO: 1732315 - RNA, 19 nt, Homo sapiens
  misc_RNA (1)...(19): siRNA sense strand
ccaaaggcccguuaccauu

SEQ ID NO: 1732316 - RNA, 19 nt, Homo sapiens
  misc_RNA (1)...(19): siRNA sense strand
caaaggcccguuaccauug

SEQ ID NO: 1732317 - RNA, 19 nt, Homo sapiens
  misc_RNA (1)...(19): siRNA sense strand
gaacaccuugaacuccuua

SEQ ID NO: 1732318 - RNA, 19 nt, Homo sapiens
  misc_RNA (1)...(19): siRNA sense strand
agaaagagaucaggcaaca

SEQ ID NO: 1732319 - RNA, 19 nt, Homo sapiens
  misc_RNA (1)...(19): siRNA sense strand
aggcaacagugauucuaua

SEQ ID NO: 1732320 - RNA, 19 nt, Homo sapiens
  misc_RNA (1)...(19): siRNA sense strand
aaacuccgcuuccgauugg

SEQ ID NO: 1732321 - RNA, 19 nt, Homo sapiens
  misc_RNA (1)...(19): siRNA sense strand
caauacagaauacuuccua

SEQ ID NO: 1732322 - RNA, 19 nt, Homo sapiens
  misc_RNA (1)...(19): siRNA sense strand
gggaaaaggugauuguaga

SEQ ID NO: 1732323 - RNA, 19 nt, Homo sapiens
  misc_RNA (1)...(19): siRNA sense strand
acagaauacuuccuagaau

SEQ ID NO: 1732324 - RNA, 19 nt, Homo sapiens
  misc_RNA (1)...(19): siRNA sense strand
ggaccuccauuuccagucu

SEQ ID NO: 1732325 - RNA, 19 nt, Homo sapiens
  misc_RNA (1)...(19): siRNA sense strand
aaacacacaggaagagaaa

SEQ ID NO: 1732326 - RNA, 19 nt, Homo sapiens
  misc_RNA (1)...(19): siRNA sense strand
ggaacaccuugaacuccuu

SEQ ID NO: 1732327 - RNA, 19 nt, Homo sapiens
  misc_RNA (1)...(19): siRNA sense strand
gcuugaagauuucuaugca

SEQ ID NO: 1732328 - RNA, 19 nt, Homo sapiens
  misc_RNA (1)...(19): siRNA sense strand
uaacaagggauaugucaag

SEQ ID NO: 1732329 - RNA, 19 nt, Homo sapiens
  misc_RNA (1)...(19): siRNA sense strand
agggauaugucaagguaaa

SEQ ID NO: 1732330 - RNA, 19 nt, Homo sapiens
  misc_RNA (1)...(19): siRNA sense strand
uuaagcauaugcacacugu

SEQ ID NO: 1732331 - RNA, 19 nt, Homo sapiens
  misc_RNA (1)...(19): siRNA sense strand
ggugauaaaggauaaauac

SEQ ID NO: 1732332 - RNA, 19 nt, Homo sapiens
  misc_RNA (1)...(19): siRNA sense strand
ucacugauaagaaauguuc

SEQ ID NO: 1732333 - RNA, 19 nt, Homo sapiens
  misc_RNA (1)...(19): siRNA sense strand
gcaacagugauucuauaga

SEQ ID NO: 1732334 - RNA, 19 nt, Homo sapiens
  misc_RNA (1)...(19): siRNA sense strand
caaacuccgcuuccgauug

SEQ ID NO: 1732335 - RNA, 19 nt, Homo sapiens
  misc_RNA (1)...(19): siRNA sense strand
gagcaggugguggugauaa

SEQ ID NO: 1732336 - RNA, 19 nt, Homo sapiens
  misc_RNA (1)...(19): siRNA sense strand
gcaaacuccgcuuccgauu

SEQ ID NO: 1732337 - RNA, 19 nt, Homo sapiens
  misc_RNA (1)...(19): siRNA sense strand
ggaaacacacaggaagaga

SEQ ID NO: 1732338 - RNA, 19 nt, Homo sapiens
  misc_RNA (1)...(19): siRNA sense strand
uaugagccauguacaucuu

SEQ ID NO: 1732339 - RNA, 19 nt, Homo sapiens
  misc_RNA (1)...(19): siRNA sense strand
gaaaagaugcaccuaucaa

SEQ ID NO: 1732340 - RNA, 19 nt, Homo sapiens
  misc_RNA (1)...(19): siRNA sense strand
aaagagaucaggcaacagu

SEQ ID NO: 1732341 - RNA, 19 nt, Homo sapiens
  misc_RNA (1)...(19): siRNA sense strand
gggaaaagaugcaccuauc

SEQ ID NO: 1732342 - RNA, 19 nt, Homo sapiens
  misc_RNA (1)...(19): siRNA sense strand
uacagaauacuuccuagaa

SEQ ID NO: 1732343 - RNA, 19 nt, Homo sapiens
  misc_RNA (1)...(19): siRNA sense strand
cuugaacuccuuaagcaua

SEQ ID NO: 1732344 - RNA, 19 nt, Homo sapiens
  misc_RNA (1)...(19): siRNA sense strand
gggagcaacucuggccaau

SEQ ID NO: 1732345 - RNA, 19 nt, Homo sapiens
  misc_RNA (1)...(19): siRNA sense strand
acacacaggaagagaaaga

SEQ ID NO: 1732346 - RNA, 19 nt, Homo sapiens
  misc_RNA (1)...(19): siRNA sense strand
ugauucuccuugccuuaaa

SEQ ID NO: 1732347 - RNA, 19 nt, Homo sapiens
  misc_RNA (1)...(19): siRNA sense strand
cagaguguaacaagggaua

SEQ ID NO: 1732348 - RNA, 19 nt, Homo sapiens
  misc_RNA (1)...(19): siRNA sense strand
aagggaugcugcucaggaa

SEQ ID NO: 1732349 - RNA, 19 nt, Homo sapiens
  misc_RNA (1)...(19): siRNA sense strand
caugugaucagccaggauu

SEQ ID NO: 1732350 - RNA, 19 nt, Homo sapiens
  misc_RNA (1)...(19): siRNA sense strand
caaaaugcagguuuacaaa

SEQ ID NO: 1732351 - RNA, 19 nt, Homo sapiens
  misc_RNA (1)...(19): siRNA sense strand
gaaaaggugauuguagauu

SEQ ID NO: 1732352 - RNA, 19 nt, Homo sapiens
  misc_RNA (1)...(19): siRNA sense strand
uggaagcaguugugauugg

SEQ ID NO: 1732353 - RNA, 19 nt, Homo sapiens
  misc_RNA (1)...(19): siRNA sense strand
agaauacuuccuagaauca

SEQ ID NO: 1732354 - RNA, 19 nt, Homo sapiens
  misc_RNA (1)...(19): siRNA sense strand
uugaacuccuuaagcauau

SEQ ID NO: 1732355 - RNA, 19 nt, Homo sapiens
  misc_RNA (1)...(19): siRNA sense strand
aaggauaaauacccaaagg

SEQ ID NO: 1732356 - RNA, 19 nt, Homo sapiens
  misc_RNA (1)...(19): siRNA sense strand
uuuggaagcaguugugauu

SEQ ID NO: 1732357 - RNA, 19 nt, Homo sapiens
  misc_RNA (1)...(19): siRNA sense strand
cagagaccaagaucacuga

SEQ ID NO: 1732358 - RNA, 19 nt, Homo sapiens
  misc_RNA (1)...(19): siRNA sense strand
ggccagggaacaccuugaa

SEQ ID NO: 1732359 - RNA, 19 nt, Homo sapiens
  misc_RNA (1)...(19): siRNA sense strand
guaacaagggauaugucaa

SEQ ID NO: 1732360 - RNA, 19 nt, Homo sapiens
  misc_RNA (1)...(19): siRNA sense strand
agagaucaggcaacaguga

SEQ ID NO: 1732361 - RNA, 19 nt, Homo sapiens
  misc_RNA (1)...(19): siRNA sense strand
gaguaugagccauguacau

SEQ ID NO: 1732362 - RNA, 19 nt, Homo sapiens
  misc_RNA (1)...(19): siRNA sense strand
caccagcgaaucagacuuc

SEQ ID NO: 1732363 - RNA, 19 nt, Homo sapiens
  misc_RNA (1)...(19): siRNA sense strand
ugaaagcagaguguaacaa

SEQ ID NO: 1732364 - RNA, 19 nt, Homo sapiens
  misc_RNA (1)...(19): siRNA sense strand
ggaaaagaugcaccuauca

SEQ ID NO: 1732365 - RNA, 19 nt, Homo sapiens
  misc_RNA (1)...(19): siRNA sense strand
ggcaacagugauucuauag

SEQ ID NO: 1732366 - RNA, 19 nt, Homo sapiens
  misc_RNA (1)...(19): siRNA sense strand
aaaggcccguuaccauugg

SEQ ID NO: 1732367 - RNA, 19 nt, Homo sapiens
  misc_RNA (1)...(19): siRNA sense strand
ugguggugauaaaggauaa

SEQ ID NO: 1732368 - RNA, 19 nt, Homo sapiens
  misc_RNA (1)...(19): siRNA sense strand
gugguggugauaaaggaua

SEQ ID NO: 1732369 - RNA, 19 nt, Homo sapiens
  misc_RNA (1)...(19): siRNA sense strand
aaugcagguuuacaaagau

SEQ ID NO: 1732370 - RNA, 19 nt, Homo sapiens
  misc_RNA (1)...(19): siRNA sense strand
ccaaaaugcagguuuacaa

SEQ ID NO: 1732371 - RNA, 19 nt, Homo sapiens
  misc_RNA (1)...(19): siRNA sense strand
acaagaggcugguagagua

SEQ ID NO: 1732372 - RNA, 19 nt, Homo sapiens
  misc_RNA (1)...(19): siRNA sense strand
ggaauucuuucaauacaga

SEQ ID NO: 1732373 - RNA, 19 nt, Homo sapiens
  misc_RNA (1)...(19): siRNA sense strand
aaaugcagguuuacaaaga

SEQ ID NO: 1732374 - RNA, 19 nt, Homo sapiens
  misc_RNA (1)...(19): siRNA sense strand
ugaaagaacaucucaggaa

SEQ ID NO: 1732375 - RNA, 19 nt, Homo sapiens
  misc_RNA (1)...(19): siRNA sense strand
cagaauacuuccuagaauc

SEQ ID NO: 1732376 - RNA, 19 nt, Homo sapiens
  misc_RNA (1)...(19): siRNA sense strand
ccaaaggcccguuaccauu

SEQ ID NO: 1732377 - RNA, 19 nt, Homo sapiens
  misc_RNA (1)...(19): siRNA sense strand
uagaguaacuguccgagau

SEQ ID NO: 1732378 - RNA, 19 nt, Homo sapiens
  misc_RNA (1)...(19): siRNA sense strand
caaaggcccguuaccauug

SEQ ID NO: 1732379 - RNA, 19 nt, Homo sapiens
  misc_RNA (1)...(19): siRNA sense strand
gaacaccuugaacuccuua

SEQ ID NO: 1732380 - RNA, 19 nt, Homo sapiens
  misc_RNA (1)...(19): siRNA sense strand
aaacuccgcuuccgauugg

SEQ ID NO: 1732381 - RNA, 19 nt, Homo sapiens
  misc_RNA (1)...(19): siRNA sense strand
caauacagaauacuuccua

SEQ ID NO: 1732382 - RNA, 19 nt, Homo sapiens
  misc_RNA (1)...(19): siRNA sense strand
gggaaaaggugauuguaga

SEQ ID NO: 1732383 - RNA, 19 nt, Homo sapiens
  misc_RNA (1)...(19): siRNA sense strand
acagaauacuuccuagaau

SEQ ID NO: 1732384 - RNA, 19 nt, Homo sapiens
  misc_RNA (1)...(19): siRNA sense strand
ggaccuccauuuccagucu

SEQ ID NO: 1732385 - RNA, 19 nt, Homo sapiens
  misc_RNA (1)...(19): siRNA sense strand
ggaacaccuugaacuccuu

SEQ ID NO: 1732386 - RNA, 19 nt, Homo sapiens
  misc_RNA (1)...(19): siRNA sense strand
ugaucgagaugguacaaga

SEQ ID NO: 1732387 - RNA, 19 nt, Homo sapiens
  misc_RNA (1)...(19): siRNA sense strand
caagaggcugguagaguaa

SEQ ID NO: 1732388 - RNA, 19 nt, Homo sapiens
  misc_RNA (1)...(19): siRNA sense strand
ggugauaaaggauaaauac

SEQ ID NO: 1732389 - RNA, 19 nt, Homo sapiens
  misc_RNA (1)...(19): siRNA sense strand
uuaagcauaugcacacugu

SEQ ID NO: 1732390 - RNA, 19 nt, Homo sapiens
  misc_RNA (1)...(19): siRNA sense strand
caaacuccgcuuccgauug

SEQ ID NO: 1732391 - RNA, 19 nt, Homo sapiens
  misc_RNA (1)...(19): siRNA sense strand
gagcaggugguggugauaa

SEQ ID NO: 1732392 - RNA, 19 nt, Homo sapiens
  misc_RNA (1)...(19): siRNA sense strand
gcaaacuccgcuuccgauu

SEQ ID NO: 1732393 - RNA, 19 nt, Homo sapiens
  misc_RNA (1)...(19): siRNA sense strand
uaugagccauguacaucuu

SEQ ID NO: 1732394 - RNA, 19 nt, Homo sapiens
  misc_RNA (1)...(19): siRNA sense strand
cuugaacuccuuaagcaua

SEQ ID NO: 1732395 - RNA, 19 nt, Homo sapiens
  misc_RNA (1)...(19): siRNA sense strand
uacagaauacuuccuagaa

SEQ ID NO: 1732396 - RNA, 19 nt, Homo sapiens
  misc_RNA (1)...(19): siRNA sense strand
aagaacaucucaggaagca

SEQ ID NO: 1732397 - RNA, 19 nt, Homo sapiens
  misc_RNA (1)...(19): siRNA sense strand
ugauucuccuugccuuaaa

SEQ ID NO: 1732398 - RNA, 19 nt, Homo sapiens
  misc_RNA (1)...(19): siRNA sense strand
caaaaugcagguuuacaaa

SEQ ID NO: 1732399 - RNA, 19 nt, Homo sapiens
  misc_RNA (1)...(19): siRNA sense strand
caugugaucagccaggauu

SEQ ID NO: 1732400 - RNA, 19 nt, Homo sapiens
  misc_RNA (1)...(19): siRNA sense strand
gaaaaggugauuguagauu

SEQ ID NO: 1732401 - RNA, 19 nt, Homo sapiens
  misc_RNA (1)...(19): siRNA sense strand
aaggauaaauacccaaagg

SEQ ID NO: 1732402 - RNA, 19 nt, Homo sapiens
  misc_RNA (1)...(19): siRNA sense strand
ugggaugccugagcucuug

SEQ ID NO: 1732403 - RNA, 19 nt, Homo sapiens
  misc_RNA (1)...(19): siRNA sense strand
agaauacuuccuagaauca

SEQ ID NO: 1732404 - RNA, 19 nt, Homo sapiens
  misc_RNA (1)...(19): siRNA sense strand
uugaacuccuuaagcauau

SEQ ID NO: 1732405 - RNA, 19 nt, Homo sapiens
  misc_RNA (1)...(19): siRNA sense strand
ggccagggaacaccuugaa

SEQ ID NO: 1732406 - RNA, 19 nt, Homo sapiens
  misc_RNA (1)...(19): siRNA sense strand
gguacaagaggcugguaga

SEQ ID NO: 1732407 - RNA, 19 nt, Homo sapiens
  misc_RNA (1)...(19): siRNA sense strand
uuccucagcugaaagaaca

SEQ ID NO: 1732408 - RNA, 19 nt, Homo sapiens
  misc_RNA (1)...(19): siRNA sense strand
gaguaugagccauguacau

SEQ ID NO: 1732409 - RNA, 19 nt, Homo sapiens
  misc_RNA (1)...(19): siRNA sense strand
cagcugaaagaacaucuca

SEQ ID NO: 1732410 - RNA, 19 nt, Homo sapiens
  misc_RNA (1)...(19): siRNA sense strand
gugguggugauaaaggaua

SEQ ID NO: 1732411 - RNA, 19 nt, Homo sapiens
  misc_RNA (1)...(19): siRNA sense strand
aaaggcccguuaccauugg

SEQ ID NO: 1732412 - RNA, 19 nt, Homo sapiens
  misc_RNA (1)...(19): siRNA sense strand
ccaaaaugcagguuuacaa

SEQ ID NO: 1732413 - RNA, 19 nt, Homo sapiens
  misc_RNA (1)...(19): siRNA sense strand
aaugcagguuuacaaagau

SEQ ID NO: 1732414 - RNA, 19 nt, Homo sapiens
  misc_RNA (1)...(19): siRNA sense strand
ugguggugauaaaggauaa

SEQ ID NO: 1732415 - RNA, 19 nt, Homo sapiens
  misc_RNA (1)...(19): siRNA sense strand
acaagaggcugguagagua

SEQ ID NO: 1732416 - RNA, 19 nt, Homo sapiens
  misc_RNA (1)...(19): siRNA sense strand
ggaauucuuucaauacaga

SEQ ID NO: 1732417 - RNA, 19 nt, Homo sapiens
  misc_RNA (1)...(19): siRNA sense strand
gagcaacucuggccaaugc

SEQ ID NO: 1732418 - RNA, 19 nt, Homo sapiens
  misc_RNA (1)...(19): siRNA sense strand
aaagaacccuggccuggaa

SEQ ID NO: 1732419 - RNA, 19 nt, Homo sapiens
  misc_RNA (1)...(19): siRNA sense strand
aaaugcagguuuacaaaga

SEQ ID NO: 1732420 - RNA, 19 nt, Homo sapiens
  misc_RNA (1)...(19): siRNA sense strand
ugaaagaacaucucaggaa

SEQ ID NO: 1732421 - RNA, 19 nt, Homo sapiens
  misc_RNA (1)...(19): siRNA sense strand
gaaacacacaggaagagaa

SEQ ID NO: 1732422 - RNA, 19 nt, Homo sapiens
  misc_RNA (1)...(19): siRNA sense strand
cagaauacuuccuagaauc

SEQ ID NO: 1732423 - RNA, 19 nt, Homo sapiens
  misc_RNA (1)...(19): siRNA sense strand
ccaaaggcccguuaccauu

SEQ ID NO: 1732424 - RNA, 19 nt, Homo sapiens
  misc_RNA (1)...(19): siRNA sense strand
uagaguaacuguccgagau

SEQ ID NO: 1732425 - RNA, 19 nt, Homo sapiens
  misc_RNA (1)...(19): siRNA sense strand
caaaggcccguuaccauug

SEQ ID NO: 1732426 - RNA, 19 nt, Homo sapiens
  misc_RNA (1)...(19): siRNA sense strand
gaacaccuugaacuccuua

SEQ ID NO: 1732427 - RNA, 19 nt, Homo sapiens
  misc_RNA (1)...(19): siRNA sense strand
agaaagagaucaggcaaca

SEQ ID NO: 1732428 - RNA, 19 nt, Homo sapiens
  misc_RNA (1)...(19): siRNA sense strand
aggcaacagugauucuaua

SEQ ID NO: 1732429 - RNA, 19 nt, Homo sapiens
  misc_RNA (1)...(19): siRNA sense strand
aaacuccgcuuccgauugg

SEQ ID NO: 1732430 - RNA, 19 nt, Homo sapiens
  misc_RNA (1)...(19): siRNA sense strand
caauacagaauacuuccua

SEQ ID NO: 1732431 - RNA, 19 nt, Homo sapiens
  misc_RNA (1)...(19): siRNA sense strand
gggaaaaggugauuguaga

SEQ ID NO: 1732432 - RNA, 19 nt, Homo sapiens
  misc_RNA (1)...(19): siRNA sense strand
acagaauacuuccuagaau

SEQ ID NO: 1732433 - RNA, 19 nt, Homo sapiens
  misc_RNA (1)...(19): siRNA sense strand
ggaccuccauuuccagucu

SEQ ID NO: 1732434 - RNA, 19 nt, Homo sapiens
  misc_RNA (1)...(19): siRNA sense strand
aaacacacaggaagagaaa

SEQ ID NO: 1732435 - RNA, 19 nt, Homo sapiens
  misc_RNA (1)...(19): siRNA sense strand
ggaacaccuugaacuccuu

SEQ ID NO: 1732436 - RNA, 19 nt, Homo sapiens
  misc_RNA (1)...(19): siRNA sense strand
gcuugaagauuucuaugca

SEQ ID NO: 1732437 - RNA, 19 nt, Homo sapiens
  misc_RNA (1)...(19): siRNA sense strand
ugaucgagaugguacaaga

SEQ ID NO: 1732438 - RNA, 19 nt, Homo sapiens
  misc_RNA (1)...(19): siRNA sense strand
caagaggcugguagaguaa

SEQ ID NO: 1732439 - RNA, 19 nt, Homo sapiens
  misc_RNA (1)...(19): siRNA sense strand
ggugauaaaggauaaauac

SEQ ID NO: 1732440 - RNA, 19 nt, Homo sapiens
  misc_RNA (1)...(19): siRNA sense strand
uuaagcauaugcacacugu

SEQ ID NO: 1732441 - RNA, 19 nt, Homo sapiens
  misc_RNA (1)...(19): siRNA sense strand
gcaacagugauucuauaga

SEQ ID NO: 1732442 - RNA, 19 nt, Homo sapiens
  misc_RNA (1)...(19): siRNA sense strand
caaacuccgcuuccgauug

SEQ ID NO: 1732443 - RNA, 19 nt, Homo sapiens
  misc_RNA (1)...(19): siRNA sense strand
gagcaggugguggugauaa

SEQ ID NO: 1732444 - RNA, 19 nt, Homo sapiens
  misc_RNA (1)...(19): siRNA sense strand
gcaaacuccgcuuccgauu

SEQ ID NO: 1732445 - RNA, 19 nt, Homo sapiens
  misc_RNA (1)...(19): siRNA sense strand
gaaaagaugcaccuaucaa

SEQ ID NO: 1732446 - RNA, 19 nt, Homo sapiens
  misc_RNA (1)...(19): siRNA sense strand
uaugagccauguacaucuu

SEQ ID NO: 1732447 - RNA, 19 nt, Homo sapiens
  misc_RNA (1)...(19): siRNA sense strand
aaagagaucaggcaacagu

SEQ ID NO: 1732448 - RNA, 19 nt, Homo sapiens
  misc_RNA (1)...(19): siRNA sense strand
ggaaacacacaggaagaga

SEQ ID NO: 1732449 - RNA, 19 nt, Homo sapiens
  misc_RNA (1)...(19): siRNA sense strand
gggaaaagaugcaccuauc

SEQ ID NO: 1732450 - RNA, 19 nt, Homo sapiens
  misc_RNA (1)...(19): siRNA sense strand
uacagaauacuuccuagaa

SEQ ID NO: 1732451 - RNA, 19 nt, Homo sapiens
  misc_RNA (1)...(19): siRNA sense strand
cuugaacuccuuaagcaua

SEQ ID NO: 1732452 - RNA, 19 nt, Homo sapiens
  misc_RNA (1)...(19): siRNA sense strand
gggagcaacucuggccaau

SEQ ID NO: 1732453 - RNA, 19 nt, Homo sapiens
  misc_RNA (1)...(19): siRNA sense strand
aagaacaucucaggaagca

SEQ ID NO: 1732454 - RNA, 19 nt, Homo sapiens
  misc_RNA (1)...(19): siRNA sense strand
acacacaggaagagaaaga

SEQ ID NO: 1732455 - RNA, 19 nt, Homo sapiens
  misc_RNA (1)...(19): siRNA sense strand
ugauucuccuugccuuaaa

SEQ ID NO: 1732456 - RNA, 19 nt, Homo sapiens
  misc_RNA (1)...(19): siRNA sense strand
caaaaugcagguuuacaaa

SEQ ID NO: 1732457 - RNA, 19 nt, Homo sapiens
  misc_RNA (1)...(19): siRNA sense strand
caugugaucagccaggauu

SEQ ID NO: 1732458 - RNA, 19 nt, Homo sapiens
  misc_RNA (1)...(19): siRNA sense strand
aagggaugcugcucaggaa

SEQ ID NO: 1732459 - RNA, 19 nt, Homo sapiens
  misc_RNA (1)...(19): siRNA sense strand
gaaaaggugauuguagauu

SEQ ID NO: 1732460 - RNA, 19 nt, Homo sapiens
  misc_RNA (1)...(19): siRNA sense strand
aaggauaaauacccaaagg

SEQ ID NO: 1732461 - RNA, 19 nt, Homo sapiens
  misc_RNA (1)...(19): siRNA sense strand
ugggaugccugagcucuug

SEQ ID NO: 1732462 - RNA, 19 nt, Homo sapiens
  misc_RNA (1)...(19): siRNA sense strand
agaauacuuccuagaauca

SEQ ID NO: 1732463 - RNA, 19 nt, Homo sapiens
  misc_RNA (1)...(19): siRNA sense strand
uugaacuccuuaagcauau

SEQ ID NO: 1732464 - RNA, 19 nt, Homo sapiens
  misc_RNA (1)...(19): siRNA sense strand
ggccagggaacaccuugaa

SEQ ID NO: 1732465 - RNA, 19 nt, Homo sapiens
  misc_RNA (1)...(19): siRNA sense strand
gguacaagaggcugguaga

SEQ ID NO: 1732466 - RNA, 19 nt, Homo sapiens
  misc_RNA (1)...(19): siRNA sense strand
uuccucagcugaaagaaca

SEQ ID NO: 1732467 - RNA, 19 nt, Homo sapiens
  misc_RNA (1)...(19): siRNA sense strand
agagaucaggcaacaguga

SEQ ID NO: 1732468 - RNA, 19 nt, Homo sapiens
  misc_RNA (1)...(19): siRNA sense strand
gaguaugagccauguacau

SEQ ID NO: 1732469 - RNA, 19 nt, Homo sapiens
  misc_RNA (1)...(19): siRNA sense strand
ggaaaagaugcaccuauca

SEQ ID NO: 1732470 - RNA, 19 nt, Homo sapiens
  misc_RNA (1)...(19): siRNA sense strand
cagcugaaagaacaucuca

SEQ ID NO: 1732471 - RNA, 19 nt, Homo sapiens
  misc_RNA (1)...(19): siRNA sense strand
ccaaaaugcagguuuacaa

SEQ ID NO: 1732472 - RNA, 19 nt, Homo sapiens
  misc_RNA (1)...(19): siRNA sense strand
ggcaacagugauucuauag

SEQ ID NO: 1732473 - RNA, 19 nt, Homo sapiens
  misc_RNA (1)...(19): siRNA sense strand
aaaggcccguuaccauugg

SEQ ID NO: 1732474 - RNA, 19 nt, Homo sapiens
  misc_RNA (1)...(19): siRNA sense strand
ugguggugauaaaggauaa

SEQ ID NO: 1732475 - RNA, 19 nt, Homo sapiens
  misc_RNA (1)...(19): siRNA sense strand
gugguggugauaaaggaua

SEQ ID NO: 1732476 - RNA, 19 nt, Homo sapiens
  misc_RNA (1)...(19): siRNA sense strand
aaugcagguuuacaaagau

SEQ ID NO: 1732477 - RNA, 19 nt, Homo sapiens
  misc_RNA (1)...(19): siRNA sense strand
gaaucagacuuccacauuu

SEQ ID NO: 1732478 - RNA, 19 nt, Homo sapiens
  misc_RNA (1)...(19): siRNA sense strand
caagggauaugucaaggua

SEQ ID NO: 1732479 - RNA, 19 nt, Homo sapiens
  misc_RNA (1)...(19): siRNA sense strand
gaaauguucucgacagcaa

SEQ ID NO: 1732480 - RNA, 19 nt, Homo sapiens
  misc_RNA (1)...(19): siRNA sense strand
acaagaggcugguagagua

SEQ ID NO: 1732481 - RNA, 19 nt, Homo sapiens
  misc_RNA (1)...(19): siRNA sense strand
ggaauucuuucaauacaga

SEQ ID NO: 1732482 - RNA, 19 nt, Homo sapiens
  misc_RNA (1)...(19): siRNA sense strand
gagcaacucuggccaaugc

SEQ ID NO: 1732483 - RNA, 19 nt, Homo sapiens
  misc_RNA (1)...(19): siRNA sense strand
aaagaacccuggccuggaa

SEQ ID NO: 1732484 - RNA, 19 nt, Homo sapiens
  misc_RNA (1)...(19): siRNA sense strand
aaaugcagguuuacaaaga

SEQ ID NO: 1732485 - RNA, 19 nt, Homo sapiens
  misc_RNA (1)...(19): siRNA sense strand
ugaaagaacaucucaggaa

SEQ ID NO: 1732486 - RNA, 19 nt, Homo sapiens
  misc_RNA (1)...(19): siRNA sense strand
gaaacacacaggaagagaa

SEQ ID NO: 1732487 - RNA, 19 nt, Homo sapiens
  misc_RNA (1)...(19): siRNA sense strand
cgaaucagacuuccacauu

SEQ ID NO: 1732488 - RNA, 19 nt, Homo sapiens
  misc_RNA (1)...(19): siRNA sense strand
aaucagacuuccacauuug

SEQ ID NO: 1732489 - RNA, 19 nt, Homo sapiens
  misc_RNA (1)...(19): siRNA sense strand
cagaauacuuccuagaauc

SEQ ID NO: 1732490 - RNA, 19 nt, Homo sapiens
  misc_RNA (1)...(19): siRNA sense strand
gaaagcagaguguaacaag

SEQ ID NO: 1732491 - RNA, 19 nt, Homo sapiens
  misc_RNA (1)...(19): siRNA sense strand
ccaaaggcccguuaccauu

SEQ ID NO: 1732492 - RNA, 19 nt, Homo sapiens
  misc_RNA (1)...(19): siRNA sense strand
uagaguaacuguccgagau

SEQ ID NO: 1732493 - RNA, 19 nt, Homo sapiens
  misc_RNA (1)...(19): siRNA sense strand
caaaggcccguuaccauug

SEQ ID NO: 1732494 - RNA, 19 nt, Homo sapiens
  misc_RNA (1)...(19): siRNA sense strand
gaacaccuugaacuccuua

SEQ ID NO: 1732495 - RNA, 19 nt, Homo sapiens
  misc_RNA (1)...(19): siRNA sense strand
agaaagagaucaggcaaca

SEQ ID NO: 1732496 - RNA, 19 nt, Homo sapiens
  misc_RNA (1)...(19): siRNA sense strand
aggcaacagugauucuaua

SEQ ID NO: 1732497 - RNA, 19 nt, Homo sapiens
  misc_RNA (1)...(19): siRNA sense strand
aaacuccgcuuccgauugg

SEQ ID NO: 1732498 - RNA, 19 nt, Homo sapiens
  misc_RNA (1)...(19): siRNA sense strand
caauacagaauacuuccua

SEQ ID NO: 1732499 - RNA, 19 nt, Homo sapiens
  misc_RNA (1)...(19): siRNA sense strand
gggaaaaggugauuguaga

SEQ ID NO: 1732500 - RNA, 19 nt, Homo sapiens
  misc_RNA (1)...(19): siRNA sense strand
acagaauacuuccuagaau

SEQ ID NO: 1732501 - RNA, 19 nt, Homo sapiens
  misc_RNA (1)...(19): siRNA sense strand
ggaccuccauuuccagucu

SEQ ID NO: 1732502 - RNA, 19 nt, Homo sapiens
  misc_RNA (1)...(19): siRNA sense strand
aaacacacaggaagagaaa

SEQ ID NO: 1732503 - RNA, 19 nt, Homo sapiens
  misc_RNA (1)...(19): siRNA sense strand
ggaacaccuugaacuccuu

SEQ ID NO: 1732504 - RNA, 19 nt, Homo sapiens
  misc_RNA (1)...(19): siRNA sense strand
gcuugaagauuucuaugca

SEQ ID NO: 1732505 - RNA, 19 nt, Homo sapiens
  misc_RNA (1)...(19): siRNA sense strand
ugaucgagaugguacaaga

SEQ ID NO: 1732506 - RNA, 19 nt, Homo sapiens
  misc_RNA (1)...(19): siRNA sense strand
uaacaagggauaugucaag

SEQ ID NO: 1732507 - RNA, 19 nt, Homo sapiens
  misc_RNA (1)...(19): siRNA sense strand
caagaggcugguagaguaa

SEQ ID NO: 1732508 - RNA, 19 nt, Homo sapiens
  misc_RNA (1)...(19): siRNA sense strand
agggauaugucaagguaaa

SEQ ID NO: 1732509 - RNA, 19 nt, Homo sapiens
  misc_RNA (1)...(19): siRNA sense strand
uuaagcauaugcacacugu

SEQ ID NO: 1732510 - RNA, 19 nt, Homo sapiens
  misc_RNA (1)...(19): siRNA sense strand
ggugauaaaggauaaauac

SEQ ID NO: 1732511 - RNA, 19 nt, Homo sapiens
  misc_RNA (1)...(19): siRNA sense strand
ucacugauaagaaauguuc

SEQ ID NO: 1732512 - RNA, 19 nt, Homo sapiens
  misc_RNA (1)...(19): siRNA sense strand
gcaacagugauucuauaga

SEQ ID NO: 1732513 - RNA, 19 nt, Homo sapiens
  misc_RNA (1)...(19): siRNA sense strand
caaacuccgcuuccgauug

SEQ ID NO: 1732514 - RNA, 19 nt, Homo sapiens
  misc_RNA (1)...(19): siRNA sense strand
gagcaggugguggugauaa

SEQ ID NO: 1732515 - RNA, 19 nt, Homo sapiens
  misc_RNA (1)...(19): siRNA sense strand
gcaaacuccgcuuccgauu

SEQ ID NO: 1732516 - RNA, 19 nt, Homo sapiens
  misc_RNA (1)...(19): siRNA sense strand
ggaaacacacaggaagaga

SEQ ID NO: 1732517 - RNA, 19 nt, Homo sapiens
  misc_RNA (1)...(19): siRNA sense strand
uaugagccauguacaucuu

SEQ ID NO: 1732518 - RNA, 19 nt, Homo sapiens
  misc_RNA (1)...(19): siRNA sense strand
gaaaagaugcaccuaucaa

SEQ ID NO: 1732519 - RNA, 19 nt, Homo sapiens
  misc_RNA (1)...(19): siRNA sense strand
aaagagaucaggcaacagu

SEQ ID NO: 1732520 - RNA, 19 nt, Homo sapiens
  misc_RNA (1)...(19): siRNA sense strand
gggaaaagaugcaccuauc

SEQ ID NO: 1732521 - RNA, 19 nt, Homo sapiens
  misc_RNA (1)...(19): siRNA sense strand
uacagaauacuuccuagaa

SEQ ID NO: 1732522 - RNA, 19 nt, Homo sapiens
  misc_RNA (1)...(19): siRNA sense strand
cuugaacuccuuaagcaua

SEQ ID NO: 1732523 - RNA, 19 nt, Homo sapiens
  misc_RNA (1)...(19): siRNA sense strand
gggagcaacucuggccaau

SEQ ID NO: 1732524 - RNA, 19 nt, Homo sapiens
  misc_RNA (1)...(19): siRNA sense strand
aagaacaucucaggaagca

SEQ ID NO: 1732525 - RNA, 19 nt, Homo sapiens
  misc_RNA (1)...(19): siRNA sense strand
acacacaggaagagaaaga

SEQ ID NO: 1732526 - RNA, 19 nt, Homo sapiens
  misc_RNA (1)...(19): siRNA sense strand
ugauucuccuugccuuaaa

SEQ ID NO: 1732527 - RNA, 19 nt, Homo sapiens
  misc_RNA (1)...(19): siRNA sense strand
cagaguguaacaagggaua

SEQ ID NO: 1732528 - RNA, 19 nt, Homo sapiens
  misc_RNA (1)...(19): siRNA sense strand
aagggaugcugcucaggaa

SEQ ID NO: 1732529 - RNA, 19 nt, Homo sapiens
  misc_RNA (1)...(19): siRNA sense strand
caugugaucagccaggauu

SEQ ID NO: 1732530 - RNA, 19 nt, Homo sapiens
  misc_RNA (1)...(19): siRNA sense strand
caaaaugcagguuuacaaa

SEQ ID NO: 1732531 - RNA, 19 nt, Homo sapiens
  misc_RNA (1)...(19): siRNA sense strand
gaaaaggugauuguagauu

SEQ ID NO: 1732532 - RNA, 19 nt, Homo sapiens
  misc_RNA (1)...(19): siRNA sense strand
aaggauaaauacccaaagg

SEQ ID NO: 1732533 - RNA, 19 nt, Homo sapiens
  misc_RNA (1)...(19): siRNA sense strand
ugggaugccugagcucuug

SEQ ID NO: 1732534 - RNA, 19 nt, Homo sapiens
  misc_RNA (1)...(19): siRNA sense strand
agaauacuuccuagaauca

SEQ ID NO: 1732535 - RNA, 19 nt, Homo sapiens
  misc_RNA (1)...(19): siRNA sense strand
uggaagcaguugugauugg

SEQ ID NO: 1732536 - RNA, 19 nt, Homo sapiens
  misc_RNA (1)...(19): siRNA sense strand
uugaacuccuuaagcauau

SEQ ID NO: 1732537 - RNA, 19 nt, Homo sapiens
  misc_RNA (1)...(19): siRNA sense strand
ggccagggaacaccuugaa

SEQ ID NO: 1732538 - RNA, 19 nt, Homo sapiens
  misc_RNA (1)...(19): siRNA sense strand
cagagaccaagaucacuga

SEQ ID NO: 1732539 - RNA, 19 nt, Homo sapiens
  misc_RNA (1)...(19): siRNA sense strand
gguacaagaggcugguaga

SEQ ID NO: 1732540 - RNA, 19 nt, Homo sapiens
  misc_RNA (1)...(19): siRNA sense strand
uuuggaagcaguugugauu

SEQ ID NO: 1732541 - RNA, 19 nt, Homo sapiens
  misc_RNA (1)...(19): siRNA sense strand
guaacaagggauaugucaa

SEQ ID NO: 1732542 - RNA, 19 nt, Homo sapiens
  misc_RNA (1)...(19): siRNA sense strand
uuccucagcugaaagaaca

SEQ ID NO: 1732543 - RNA, 19 nt, Homo sapiens
  misc_RNA (1)...(19): siRNA sense strand
agagaucaggcaacaguga

SEQ ID NO: 1732544 - RNA, 19 nt, Homo sapiens
  misc_RNA (1)...(19): siRNA sense strand
gaguaugagccauguacau

SEQ ID NO: 1732545 - RNA, 19 nt, Homo sapiens
  misc_RNA (1)...(19): siRNA sense strand
caccagcgaaucagacuuc

SEQ ID NO: 1732546 - RNA, 19 nt, Homo sapiens
  misc_RNA (1)...(19): siRNA sense strand
ggaaaagaugcaccuauca

SEQ ID NO: 1732547 - RNA, 19 nt, Homo sapiens
  misc_RNA (1)...(19): siRNA sense strand
cagcugaaagaacaucuca

SEQ ID NO: 1732548 - RNA, 19 nt, Homo sapiens
  misc_RNA (1)...(19): siRNA sense strand
ugaaagcagaguguaacaa

SEQ ID NO: 1732549 - RNA, 19 nt, Homo sapiens
  misc_RNA (1)...(19): siRNA sense strand
ggcaacagugauucuauag

SEQ ID NO: 1732550 - RNA, 19 nt, Homo sapiens
  misc_RNA (1)...(19): siRNA sense strand
aaaggcccguuaccauugg

SEQ ID NO: 1732551 - RNA, 19 nt, Homo sapiens
  misc_RNA (1)...(19): siRNA sense strand
ugguggugauaaaggauaa

SEQ ID NO: 1732552 - RNA, 19 nt, Homo sapiens
  misc_RNA (1)...(19): siRNA sense strand
gugguggugauaaaggaua

SEQ ID NO: 1732553 - RNA, 19 nt, Homo sapiens
  misc_RNA (1)...(19): siRNA sense strand
aaugcagguuuacaaagau

SEQ ID NO: 1732554 - RNA, 19 nt, Homo sapiens
  misc_RNA (1)...(19): siRNA sense strand
ccaaaaugcagguuuacaa

SEQ ID NO: 1732555 - RNA, 19 nt, Homo sapiens
  misc_RNA (1)...(19): siRNA sense strand
acaagaggcugguagagua

SEQ ID NO: 1732556 - RNA, 19 nt, Homo sapiens
  misc_RNA (1)...(19): siRNA sense strand
ggaauucuuucaauacaga

SEQ ID NO: 1732557 - RNA, 19 nt, Homo sapiens
  misc_RNA (1)...(19): siRNA sense strand
aaaugcagguuuacaaaga

SEQ ID NO: 1732558 - RNA, 19 nt, Homo sapiens
  misc_RNA (1)...(19): siRNA sense strand
ugaaagaacaucucaggaa

SEQ ID NO: 1732559 - RNA, 19 nt, Homo sapiens
  misc_RNA (1)...(19): siRNA sense strand
cagaauacuuccuagaauc

SEQ ID NO: 1732560 - RNA, 19 nt, Homo sapiens
  misc_RNA (1)...(19): siRNA sense strand
ccaaaggcccguuaccauu

SEQ ID NO: 1732561 - RNA, 19 nt, Homo sapiens
  misc_RNA (1)...(19): siRNA sense strand
uagaguaacuguccgagau

SEQ ID NO: 1732562 - RNA, 19 nt, Homo sapiens
  misc_RNA (1)...(19): siRNA sense strand
caaaggcccguuaccauug

SEQ ID NO: 1732563 - RNA, 19 nt, Homo sapiens
  misc_RNA (1)...(19): siRNA sense strand
gaacaccuugaacuccuua

SEQ ID NO: 1732564 - RNA, 19 nt, Homo sapiens
  misc_RNA (1)...(19): siRNA sense strand
aaacuccgcuuccgauugg

SEQ ID NO: 1732565 - RNA, 19 nt, Homo sapiens
  misc_RNA (1)...(19): siRNA sense strand
caauacagaauacuuccua

SEQ ID NO: 1732566 - RNA, 19 nt, Homo sapiens
  misc_RNA (1)...(19): siRNA sense strand
gggaaaaggugauuguaga

SEQ ID NO: 1732567 - RNA, 19 nt, Homo sapiens
  misc_RNA (1)...(19): siRNA sense strand
acagaauacuuccuagaau

SEQ ID NO: 1732568 - RNA, 19 nt, Homo sapiens
  misc_RNA (1)...(19): siRNA sense strand
ggaccuccauuuccagucu

SEQ ID NO: 1732569 - RNA, 19 nt, Homo sapiens
  misc_RNA (1)...(19): siRNA sense strand
ggaacaccuugaacuccuu

SEQ ID NO: 1732570 - RNA, 19 nt, Homo sapiens
  misc_RNA (1)...(19): siRNA sense strand
ugaucgagaugguacaaga

SEQ ID NO: 1732571 - RNA, 19 nt, Homo sapiens
  misc_RNA (1)...(19): siRNA sense strand
caagaggcugguagaguaa

SEQ ID NO: 1732572 - RNA, 19 nt, Homo sapiens
  misc_RNA (1)...(19): siRNA sense strand
ggugauaaaggauaaauac

SEQ ID NO: 1732573 - RNA, 19 nt, Homo sapiens
  misc_RNA (1)...(19): siRNA sense strand
uuaagcauaugcacacugu

SEQ ID NO: 1732574 - RNA, 19 nt, Homo sapiens
  misc_RNA (1)...(19): siRNA sense strand
caaacuccgcuuccgauug

SEQ ID NO: 1732575 - RNA, 19 nt, Homo sapiens
  misc_RNA (1)...(19): siRNA sense strand
gagcaggugguggugauaa

SEQ ID NO: 1732576 - RNA, 19 nt, Homo sapiens
  misc_RNA (1)...(19): siRNA sense strand
gcaaacuccgcuuccgauu

SEQ ID NO: 1732577 - RNA, 19 nt, Homo sapiens
  misc_RNA (1)...(19): siRNA sense strand
uaugagccauguacaucuu

SEQ ID NO: 1732578 - RNA, 19 nt, Homo sapiens
  misc_RNA (1)...(19): siRNA sense strand
cuugaacuccuuaagcaua

SEQ ID NO: 1732579 - RNA, 19 nt, Homo sapiens
  misc_RNA (1)...(19): siRNA sense strand
uacagaauacuuccuagaa

SEQ ID NO: 1732580 - RNA, 19 nt, Homo sapiens
  misc_RNA (1)...(19): siRNA sense strand
aagaacaucucaggaagca

SEQ ID NO: 1732581 - RNA, 19 nt, Homo sapiens
  misc_RNA (1)...(19): siRNA sense strand
ugauucuccuugccuuaaa

SEQ ID NO: 1732582 - RNA, 19 nt, Homo sapiens
  misc_RNA (1)...(19): siRNA sense strand
caaaaugcagguuuacaaa

SEQ ID NO: 1732583 - RNA, 19 nt, Homo sapiens
  misc_RNA (1)...(19): siRNA sense strand
caugugaucagccaggauu

SEQ ID NO: 1732584 - RNA, 19 nt, Homo sapiens
  misc_RNA (1)...(19): siRNA sense strand
gaaaaggugauuguagauu

SEQ ID NO: 1732585 - RNA, 19 nt, Homo sapiens
  misc_RNA (1)...(19): siRNA sense strand
aaggauaaauacccaaagg

SEQ ID NO: 1732586 - RNA, 19 nt, Homo sapiens
  misc_RNA (1)...(19): siRNA sense strand
ugggaugccugagcucuug

SEQ ID NO: 1732587 - RNA, 19 nt, Homo sapiens
  misc_RNA (1)...(19): siRNA sense strand
agaauacuuccuagaauca

SEQ ID NO: 1732588 - RNA, 19 nt, Homo sapiens
  misc_RNA (1)...(19): siRNA sense strand
uugaacuccuuaagcauau

SEQ ID NO: 1732589 - RNA, 19 nt, Homo sapiens
  misc_RNA (1)...(19): siRNA sense strand
ggccagggaacaccuugaa

SEQ ID NO: 1732590 - RNA, 19 nt, Homo sapiens
  misc_RNA (1)...(19): siRNA sense strand
gguacaagaggcugguaga

SEQ ID NO: 1732591 - RNA, 19 nt, Homo sapiens
  misc_RNA (1)...(19): siRNA sense strand
uuccucagcugaaagaaca

SEQ ID NO: 1732592 - RNA, 19 nt, Homo sapiens
  misc_RNA (1)...(19): siRNA sense strand
gaguaugagccauguacau

SEQ ID NO: 1732593 - RNA, 19 nt, Homo sapiens
  misc_RNA (1)...(19): siRNA sense strand
cagcugaaagaacaucuca

SEQ ID NO: 1732594 - RNA, 19 nt, Homo sapiens
  misc_RNA (1)...(19): siRNA sense strand
gugguggugauaaaggaua

SEQ ID NO: 1732595 - RNA, 19 nt, Homo sapiens
  misc_RNA (1)...(19): siRNA sense strand
aaaggcccguuaccauugg

SEQ ID NO: 1732596 - RNA, 19 nt, Homo sapiens
  misc_RNA (1)...(19): siRNA sense strand
ccaaaaugcagguuuacaa

SEQ ID NO: 1732597 - RNA, 19 nt, Homo sapiens
  misc_RNA (1)...(19): siRNA sense strand
aaugcagguuuacaaagau

SEQ ID NO: 1732598 - RNA, 19 nt, Homo sapiens
  misc_RNA (1)...(19): siRNA sense strand
ugguggugauaaaggauaa

SEQ ID NO: 1732599 - RNA, 19 nt, Homo sapiens
  misc_RNA (1)...(19): siRNA sense strand
gaaucagacuuccacauuu

SEQ ID NO: 1732600 - RNA, 19 nt, Homo sapiens
  misc_RNA (1)...(19): siRNA sense strand
caagggauaugucaaggua

SEQ ID NO: 1732601 - RNA, 19 nt, Homo sapiens
  misc_RNA (1)...(19): siRNA sense strand
gaaauguucucgacagcaa

SEQ ID NO: 1732602 - RNA, 19 nt, Homo sapiens
  misc_RNA (1)...(19): siRNA sense strand
ggaauucuuucaauacaga

SEQ ID NO: 1732603 - RNA, 19 nt, Homo sapiens
  misc_RNA (1)...(19): siRNA sense strand
gagcaacucuggccaaugc

SEQ ID NO: 1732604 - RNA, 19 nt, Homo sapiens
  misc_RNA (1)...(19): siRNA sense strand
aaagaacccuggccuggaa

SEQ ID NO: 1732605 - RNA, 19 nt, Homo sapiens
  misc_RNA (1)...(19): siRNA sense strand
aaaugcagguuuacaaaga

SEQ ID NO: 1732606 - RNA, 19 nt, Homo sapiens
  misc_RNA (1)...(19): siRNA sense strand
gaaacacacaggaagagaa

SEQ ID NO: 1732607 - RNA, 19 nt, Homo sapiens
  misc_RNA (1)...(19): siRNA sense strand
cgaaucagacuuccacauu

SEQ ID NO: 1732608 - RNA, 19 nt, Homo sapiens
  misc_RNA (1)...(19): siRNA sense strand
aaucagacuuccacauuug

SEQ ID NO: 1732609 - RNA, 19 nt, Homo sapiens
  misc_RNA (1)...(19): siRNA sense strand
cagaauacuuccuagaauc

SEQ ID NO: 1732610 - RNA, 19 nt, Homo sapiens
  misc_RNA (1)...(19): siRNA sense strand
gaaagcagaguguaacaag

SEQ ID NO: 1732611 - RNA, 19 nt, Homo sapiens
  misc_RNA (1)...(19): siRNA sense strand
ccaaaggcccguuaccauu

SEQ ID NO: 1732612 - RNA, 19 nt, Homo sapiens
  misc_RNA (1)...(19): siRNA sense strand
caaaggcccguuaccauug

SEQ ID NO: 1732613 - RNA, 19 nt, Homo sapiens
  misc_RNA (1)...(19): siRNA sense strand
gaacaccuugaacuccuua

SEQ ID NO: 1732614 - RNA, 19 nt, Homo sapiens
  misc_RNA (1)...(19): siRNA sense strand
agaaagagaucaggcaaca

SEQ ID NO: 1732615 - RNA, 19 nt, Homo sapiens
  misc_RNA (1)...(19): siRNA sense strand
aggcaacagugauucuaua

SEQ ID NO: 1732616 - RNA, 19 nt, Homo sapiens
  misc_RNA (1)...(19): siRNA sense strand
aaacuccgcuuccgauugg

SEQ ID NO: 1732617 - RNA, 19 nt, Homo sapiens
  misc_RNA (1)...(19): siRNA sense strand
caauacagaauacuuccua

SEQ ID NO: 1732618 - RNA, 19 nt, Homo sapiens
  misc_RNA (1)...(19): siRNA sense strand
gggaaaaggugauuguaga

SEQ ID NO: 1732619 - RNA, 19 nt, Homo sapiens
  misc_RNA (1)...(19): siRNA sense strand
acagaauacuuccuagaau

SEQ ID NO: 1732620 - RNA, 19 nt, Homo sapiens
  misc_RNA (1)...(19): siRNA sense strand
ggaccuccauuuccagucu

SEQ ID NO: 1732621 - RNA, 19 nt, Homo sapiens
  misc_RNA (1)...(19): siRNA sense strand
aaacacacaggaagagaaa

SEQ ID NO: 1732622 - RNA, 19 nt, Homo sapiens
  misc_RNA (1)...(19): siRNA sense strand
ggaacaccuugaacuccuu

SEQ ID NO: 1732623 - RNA, 19 nt, Homo sapiens
  misc_RNA (1)...(19): siRNA sense strand
gcuugaagauuucuaugca

SEQ ID NO: 1732624 - RNA, 19 nt, Homo sapiens
  misc_RNA (1)...(19): siRNA sense strand
uaacaagggauaugucaag

SEQ ID NO: 1732625 - RNA, 19 nt, Homo sapiens
  misc_RNA (1)...(19): siRNA sense strand
agggauaugucaagguaaa

SEQ ID NO: 1732626 - RNA, 19 nt, Homo sapiens
  misc_RNA (1)...(19): siRNA sense strand
uuaagcauaugcacacugu

SEQ ID NO: 1732627 - RNA, 19 nt, Homo sapiens
  misc_RNA (1)...(19): siRNA sense strand
ggugauaaaggauaaauac

SEQ ID NO: 1732628 - RNA, 19 nt, Homo sapiens
  misc_RNA (1)...(19): siRNA sense strand
ucacugauaagaaauguuc

SEQ ID NO: 1732629 - RNA, 19 nt, Homo sapiens
  misc_RNA (1)...(19): siRNA sense strand
gcaacagugauucuauaga

SEQ ID NO: 1732630 - RNA, 19 nt, Homo sapiens
  misc_RNA (1)...(19): siRNA sense strand
caaacuccgcuuccgauug

SEQ ID NO: 1732631 - RNA, 19 nt, Homo sapiens
  misc_RNA (1)...(19): siRNA sense strand
gagcaggugguggugauaa

SEQ ID NO: 1732632 - RNA, 19 nt, Homo sapiens
  misc_RNA (1)...(19): siRNA sense strand
gcaaacuccgcuuccgauu

SEQ ID NO: 1732633 - RNA, 19 nt, Homo sapiens
  misc_RNA (1)...(19): siRNA sense strand
ggaaacacacaggaagaga

SEQ ID NO: 1732634 - RNA, 19 nt, Homo sapiens
  misc_RNA (1)...(19): siRNA sense strand
uaugagccauguacaucuu

SEQ ID NO: 1732635 - RNA, 19 nt, Homo sapiens
  misc_RNA (1)...(19): siRNA sense strand
gaaaagaugcaccuaucaa

SEQ ID NO: 1732636 - RNA, 19 nt, Homo sapiens
  misc_RNA (1)...(19): siRNA sense strand
aaagagaucaggcaacagu

SEQ ID NO: 1732637 - RNA, 19 nt, Homo sapiens
  misc_RNA (1)...(19): siRNA sense strand
gggaaaagaugcaccuauc

SEQ ID NO: 1732638 - RNA, 19 nt, Homo sapiens
  misc_RNA (1)...(19): siRNA sense strand
uacagaauacuuccuagaa

SEQ ID NO: 1732639 - RNA, 19 nt, Homo sapiens
  misc_RNA (1)...(19): siRNA sense strand
cuugaacuccuuaagcaua

SEQ ID NO: 1732640 - RNA, 19 nt, Homo sapiens
  misc_RNA (1)...(19): siRNA sense strand
gggagcaacucuggccaau

SEQ ID NO: 1732641 - RNA, 19 nt, Homo sapiens
  misc_RNA (1)...(19): siRNA sense strand
acacacaggaagagaaaga

SEQ ID NO: 1732642 - RNA, 19 nt, Homo sapiens
  misc_RNA (1)...(19): siRNA sense strand
ugauucuccuugccuuaaa

SEQ ID NO: 1732643 - RNA, 19 nt, Homo sapiens
  misc_RNA (1)...(19): siRNA sense strand
cagaguguaacaagggaua

SEQ ID NO: 1732644 - RNA, 19 nt, Homo sapiens
  misc_RNA (1)...(19): siRNA sense strand
aagggaugcugcucaggaa

SEQ ID NO: 1732645 - RNA, 19 nt, Homo sapiens
  misc_RNA (1)...(19): siRNA sense strand
caugugaucagccaggauu

SEQ ID NO: 1732646 - RNA, 19 nt, Homo sapiens
  misc_RNA (1)...(19): siRNA sense strand
caaaaugcagguuuacaaa

SEQ ID NO: 1732647 - RNA, 19 nt, Homo sapiens
  misc_RNA (1)...(19): siRNA sense strand
gaaaaggugauuguagauu

SEQ ID NO: 1732648 - RNA, 19 nt, Homo sapiens
  misc_RNA (1)...(19): siRNA sense strand
uggaagcaguugugauugg

SEQ ID NO: 1732649 - RNA, 19 nt, Homo sapiens
  misc_RNA (1)...(19): siRNA sense strand
agaauacuuccuagaauca

SEQ ID NO: 1732650 - RNA, 19 nt, Homo sapiens
  misc_RNA (1)...(19): siRNA sense strand
uugaacuccuuaagcauau

SEQ ID NO: 1732651 - RNA, 19 nt, Homo sapiens
  misc_RNA (1)...(19): siRNA sense strand
aaggauaaauacccaaagg

SEQ ID NO: 1732652 - RNA, 19 nt, Homo sapiens
  misc_RNA (1)...(19): siRNA sense strand
uuuggaagcaguugugauu

SEQ ID NO: 1732653 - RNA, 19 nt, Homo sapiens
  misc_RNA (1)...(19): siRNA sense strand
cagagaccaagaucacuga

SEQ ID NO: 1732654 - RNA, 19 nt, Homo sapiens
  misc_RNA (1)...(19): siRNA sense strand
ggccagggaacaccuugaa

SEQ ID NO: 1732655 - RNA, 19 nt, Homo sapiens
  misc_RNA (1)...(19): siRNA sense strand
guaacaagggauaugucaa

SEQ ID NO: 1732656 - RNA, 19 nt, Homo sapiens
  misc_RNA (1)...(19): siRNA sense strand
agagaucaggcaacaguga

SEQ ID NO: 1732657 - RNA, 19 nt, Homo sapiens
  misc_RNA (1)...(19): siRNA sense strand
gaguaugagccauguacau

SEQ ID NO: 1732658 - RNA, 19 nt, Homo sapiens
  misc_RNA (1)...(19): siRNA sense strand
caccagcgaaucagacuuc

SEQ ID NO: 1732659 - RNA, 19 nt, Homo sapiens
  misc_RNA (1)...(19): siRNA sense strand
ugaaagcagaguguaacaa

SEQ ID NO: 1732660 - RNA, 19 nt, Homo sapiens
  misc_RNA (1)...(19): siRNA sense strand
ggaaaagaugcaccuauca

SEQ ID NO: 1732661 - RNA, 19 nt, Homo sapiens
  misc_RNA (1)...(19): siRNA sense strand
ggcaacagugauucuauag

SEQ ID NO: 1732662 - RNA, 19 nt, Homo sapiens
  misc_RNA (1)...(19): siRNA sense strand
aaaggcccguuaccauugg

SEQ ID NO: 1732663 - RNA, 19 nt, Homo sapiens
  misc_RNA (1)...(19): siRNA sense strand
ugguggugauaaaggauaa

SEQ ID NO: 1732664 - RNA, 19 nt, Homo sapiens
  misc_RNA (1)...(19): siRNA sense strand
gugguggugauaaaggaua

SEQ ID NO: 1732665 - RNA, 19 nt, Homo sapiens
  misc_RNA (1)...(19): siRNA sense strand
aaugcagguuuacaaagau

SEQ ID NO: 1732666 - RNA, 19 nt, Homo sapiens
  misc_RNA (1)...(19): siRNA sense strand
ccaaaaugcagguuuacaa

SEQ ID NO: 1732667 - RNA, 19 nt, Homo sapiens
  misc_RNA (1)...(19): siRNA sense strand
acaagaggcugguagagua

SEQ ID NO: 1732668 - RNA, 19 nt, Homo sapiens
  misc_RNA (1)...(19): siRNA sense strand
ggaauucuuucaauacaga

SEQ ID NO: 1732669 - RNA, 19 nt, Homo sapiens
  misc_RNA (1)...(19): siRNA sense strand
aaaugcagguuuacaaaga

SEQ ID NO: 1732670 - RNA, 19 nt, Homo sapiens
  misc_RNA (1)...(19): siRNA sense strand
ugaaagaacaucucaggaa

SEQ ID NO: 1732671 - RNA, 19 nt, Homo sapiens
  misc_RNA (1)...(19): siRNA sense strand
cagaauacuuccuagaauc

SEQ ID NO: 1732672 - RNA, 19 nt, Homo sapiens
  misc_RNA (1)...(19): siRNA sense strand
ccaaaggcccguuaccauu

SEQ ID NO: 1732673 - RNA, 19 nt, Homo sapiens
  misc_RNA (1)...(19): siRNA sense strand
uagaguaacuguccgagau

SEQ ID NO: 1732674 - RNA, 19 nt, Homo sapiens
  misc_RNA (1)...(19): siRNA sense strand
caaaggcccguuaccauug

SEQ ID NO: 1732675 - RNA, 19 nt, Homo sapiens
  misc_RNA (1)...(19): siRNA sense strand
gaacaccuugaacuccuua

SEQ ID NO: 1732676 - RNA, 19 nt, Homo sapiens
  misc_RNA (1)...(19): siRNA sense strand
aaacuccgcuuccgauugg

SEQ ID NO: 1732677 - RNA, 19 nt, Homo sapiens
  misc_RNA (1)...(19): siRNA sense strand
caauacagaauacuuccua

SEQ ID NO: 1732678 - RNA, 19 nt, Homo sapiens
  misc_RNA (1)...(19): siRNA sense strand
gggaaaaggugauuguaga

SEQ ID NO: 1732679 - RNA, 19 nt, Homo sapiens
  misc_RNA (1)...(19): siRNA sense strand
acagaauacuuccuagaau

SEQ ID NO: 1732680 - RNA, 19 nt, Homo sapiens
  misc_RNA (1)...(19): siRNA sense strand
ggaccuccauuuccagucu

SEQ ID NO: 1732681 - RNA, 19 nt, Homo sapiens
  misc_RNA (1)...(19): siRNA sense strand
ggaacaccuugaacuccuu

SEQ ID NO: 1732682 - RNA, 19 nt, Homo sapiens
  misc_RNA (1)...(19): siRNA sense strand
ugaucgagaugguacaaga

SEQ ID NO: 1732683 - RNA, 19 nt, Homo sapiens
  misc_RNA (1)...(19): siRNA sense strand
caagaggcugguagaguaa

SEQ ID NO: 1732684 - RNA, 19 nt, Homo sapiens
  misc_RNA (1)...(19): siRNA sense strand
ggugauaaaggauaaauac

SEQ ID NO: 1732685 - RNA, 19 nt, Homo sapiens
  misc_RNA (1)...(19): siRNA sense strand
uuaagcauaugcacacugu

SEQ ID NO: 1732686 - RNA, 19 nt, Homo sapiens
  misc_RNA (1)...(19): siRNA sense strand
caaacuccgcuuccgauug

SEQ ID NO: 1732687 - RNA, 19 nt, Homo sapiens
  misc_RNA (1)...(19): siRNA sense strand
gagcaggugguggugauaa

SEQ ID NO: 1732688 - RNA, 19 nt, Homo sapiens
  misc_RNA (1)...(19): siRNA sense strand
gcaaacuccgcuuccgauu

SEQ ID NO: 1732689 - RNA, 19 nt, Homo sapiens
  misc_RNA (1)...(19): siRNA sense strand
uaugagccauguacaucuu

SEQ ID NO: 1732690 - RNA, 19 nt, Homo sapiens
  misc_RNA (1)...(19): siRNA sense strand
cuugaacuccuuaagcaua

SEQ ID NO: 1732691 - RNA, 19 nt, Homo sapiens
  misc_RNA (1)...(19): siRNA sense strand
uacagaauacuuccuagaa

SEQ ID NO: 1732692 - RNA, 19 nt, Homo sapiens
  misc_RNA (1)...(19): siRNA sense strand
aagaacaucucaggaagca

SEQ ID NO: 1732693 - RNA, 19 nt, Homo sapiens
  misc_RNA (1)...(19): siRNA sense strand
ugauucuccuugccuuaaa

SEQ ID NO: 1732694 - RNA, 19 nt, Homo sapiens
  misc_RNA (1)...(19): siRNA sense strand
caaaaugcagguuuacaaa

SEQ ID NO: 1732695 - RNA, 19 nt, Homo sapiens
  misc_RNA (1)...(19): siRNA sense strand
caugugaucagccaggauu

SEQ ID NO: 1732696 - RNA, 19 nt, Homo sapiens
  misc_RNA (1)...(19): siRNA sense strand
gaaaaggugauuguagauu

SEQ ID NO: 1732697 - RNA, 19 nt, Homo sapiens
  misc_RNA (1)...(19): siRNA sense strand
aaggauaaauacccaaagg

SEQ ID NO: 1732698 - RNA, 19 nt, Homo sapiens
  misc_RNA (1)...(19): siRNA sense strand
ugggaugccugagcucuug

SEQ ID NO: 1732699 - RNA, 19 nt, Homo sapiens
  misc_RNA (1)...(19): siRNA sense strand
agaauacuuccuagaauca

SEQ ID NO: 1732700 - RNA, 19 nt, Homo sapiens
  misc_RNA (1)...(19): siRNA sense strand
uugaacuccuuaagcauau

SEQ ID NO: 1732701 - RNA, 19 nt, Homo sapiens
  misc_RNA (1)...(19): siRNA sense strand
ggccagggaacaccuugaa

SEQ ID NO: 1732702 - RNA, 19 nt, Homo sapiens
  misc_RNA (1)...(19): siRNA sense strand
gguacaagaggcugguaga

SEQ ID NO: 1732703 - RNA, 19 nt, Homo sapiens
  misc_RNA (1)...(19): siRNA sense strand
uuccucagcugaaagaaca

SEQ ID NO: 1732704 - RNA, 19 nt, Homo sapiens
  misc_RNA (1)...(19): siRNA sense strand
gaguaugagccauguacau

SEQ ID NO: 1732705 - RNA, 19 nt, Homo sapiens
  misc_RNA (1)...(19): siRNA sense strand
cagcugaaagaacaucuca

SEQ ID NO: 1732706 - RNA, 19 nt, Homo sapiens
  misc_RNA (1)...(19): siRNA sense strand
gugguggugauaaaggaua

SEQ ID NO: 1732707 - RNA, 19 nt, Homo sapiens
  misc_RNA (1)...(19): siRNA sense strand
aaaggcccguuaccauugg

SEQ ID NO: 1732708 - RNA, 19 nt, Homo sapiens
  misc_RNA (1)...(19): siRNA sense strand
ccaaaaugcagguuuacaa

SEQ ID NO: 1732709 - RNA, 19 nt, Homo sapiens
  misc_RNA (1)...(19): siRNA sense strand
aaugcagguuuacaaagau

SEQ ID NO: 1732710 - RNA, 19 nt, Homo sapiens
  misc_RNA (1)...(19): siRNA sense strand
ugguggugauaaaggauaa

SEQ ID NO: 1732711 - RNA, 19 nt, Homo sapiens
  misc_RNA (1)...(19): siRNA sense strand
acaagaggcugguagagua

SEQ ID NO: 1732712 - RNA, 19 nt, Homo sapiens
  misc_RNA (1)...(19): siRNA sense strand
ggaauucuuucaauacaga

SEQ ID NO: 1732713 - RNA, 19 nt, Homo sapiens
  misc_RNA (1)...(19): siRNA sense strand
gagcaacucuggccaaugc

SEQ ID NO: 1732714 - RNA, 19 nt, Homo sapiens
  misc_RNA (1)...(19): siRNA sense strand
aaagaacccuggccuggaa

SEQ ID NO: 1732715 - RNA, 19 nt, Homo sapiens
  misc_RNA (1)...(19): siRNA sense strand
aaaugcagguuuacaaaga

SEQ ID NO: 1732716 - RNA, 19 nt, Homo sapiens
  misc_RNA (1)...(19): siRNA sense strand
ugaaagaacaucucaggaa

SEQ ID NO: 1732717 - RNA, 19 nt, Homo sapiens
  misc_RNA (1)...(19): siRNA sense strand
gaaacacacaggaagagaa

SEQ ID NO: 1732718 - RNA, 19 nt, Homo sapiens
  misc_RNA (1)...(19): siRNA sense strand
cagaauacuuccuagaauc

SEQ ID NO: 1732719 - RNA, 19 nt, Homo sapiens
  misc_RNA (1)...(19): siRNA sense strand
ccaaaggcccguuaccauu

SEQ ID NO: 1732720 - RNA, 19 nt, Homo sapiens
  misc_RNA (1)...(19): siRNA sense strand
uagaguaacuguccgagau

SEQ ID NO: 1732721 - RNA, 19 nt, Homo sapiens
  misc_RNA (1)...(19): siRNA sense strand
caaaggcccguuaccauug

SEQ ID NO: 1732722 - RNA, 19 nt, Homo sapiens
  misc_RNA (1)...(19): siRNA sense strand
gaacaccuugaacuccuua

SEQ ID NO: 1732723 - RNA, 19 nt, Homo sapiens
  misc_RNA (1)...(19): siRNA sense strand
agaaagagaucaggcaaca

SEQ ID NO: 1732724 - RNA, 19 nt, Homo sapiens
  misc_RNA (1)...(19): siRNA sense strand
aggcaacagugauucuaua

SEQ ID NO: 1732725 - RNA, 19 nt, Homo sapiens
  misc_RNA (1)...(19): siRNA sense strand
aaacuccgcuuccgauugg

SEQ ID NO: 1732726 - RNA, 19 nt, Homo sapiens
  misc_RNA (1)...(19): siRNA sense strand
caauacagaauacuuccua

SEQ ID NO: 1732727 - RNA, 19 nt, Homo sapiens
  misc_RNA (1)...(19): siRNA sense strand
gggaaaaggugauuguaga

SEQ ID NO: 1732728 - RNA, 19 nt, Homo sapiens
  misc_RNA (1)...(19): siRNA sense strand
acagaauacuuccuagaau

SEQ ID NO: 1732729 - RNA, 19 nt, Homo sapiens
  misc_RNA (1)...(19): siRNA sense strand
ggaccuccauuuccagucu

SEQ ID NO: 1732730 - RNA, 19 nt, Homo sapiens
  misc_RNA (1)...(19): siRNA sense strand
aaacacacaggaagagaaa

SEQ ID NO: 1732731 - RNA, 19 nt, Homo sapiens
  misc_RNA (1)...(19): siRNA sense strand
ggaacaccuugaacuccuu

SEQ ID NO: 1732732 - RNA, 19 nt, Homo sapiens
  misc_RNA (1)...(19): siRNA sense strand
gcuugaagauuucuaugca

SEQ ID NO: 1732733 - RNA, 19 nt, Homo sapiens
  misc_RNA (1)...(19): siRNA sense strand
ugaucgagaugguacaaga

SEQ ID NO: 1732734 - RNA, 19 nt, Homo sapiens
  misc_RNA (1)...(19): siRNA sense strand
caagaggcugguagaguaa

SEQ ID NO: 1732735 - RNA, 19 nt, Homo sapiens
  misc_RNA (1)...(19): siRNA sense strand
ggugauaaaggauaaauac

SEQ ID NO: 1732736 - RNA, 19 nt, Homo sapiens
  misc_RNA (1)...(19): siRNA sense strand
uuaagcauaugcacacugu

SEQ ID NO: 1732737 - RNA, 19 nt, Homo sapiens
  misc_RNA (1)...(19): siRNA sense strand
gcaacagugauucuauaga

SEQ ID NO: 1732738 - RNA, 19 nt, Homo sapiens
  misc_RNA (1)...(19): siRNA sense strand
caaacuccgcuuccgauug

SEQ ID NO: 1732739 - RNA, 19 nt, Homo sapiens
  misc_RNA (1)...(19): siRNA sense strand
gagcaggugguggugauaa

SEQ ID NO: 1732740 - RNA, 19 nt, Homo sapiens
  misc_RNA (1)...(19): siRNA sense strand
gcaaacuccgcuuccgauu

SEQ ID NO: 1732741 - RNA, 19 nt, Homo sapiens
  misc_RNA (1)...(19): siRNA sense strand
gaaaagaugcaccuaucaa

SEQ ID NO: 1732742 - RNA, 19 nt, Homo sapiens
  misc_RNA (1)...(19): siRNA sense strand
uaugagccauguacaucuu

SEQ ID NO: 1732743 - RNA, 19 nt, Homo sapiens
  misc_RNA (1)...(19): siRNA sense strand
aaagagaucaggcaacagu

SEQ ID NO: 1732744 - RNA, 19 nt, Homo sapiens
  misc_RNA (1)...(19): siRNA sense strand
ggaaacacacaggaagaga

SEQ ID NO: 1732745 - RNA, 19 nt, Homo sapiens
  misc_RNA (1)...(19): siRNA sense strand
gggaaaagaugcaccuauc

SEQ ID NO: 1732746 - RNA, 19 nt, Homo sapiens
  misc_RNA (1)...(19): siRNA sense strand
uacagaauacuuccuagaa

SEQ ID NO: 1732747 - RNA, 19 nt, Homo sapiens
  misc_RNA (1)...(19): siRNA sense strand
cuugaacuccuuaagcaua

SEQ ID NO: 1732748 - RNA, 19 nt, Homo sapiens
  misc_RNA (1)...(19): siRNA sense strand
gggagcaacucuggccaau

SEQ ID NO: 1732749 - RNA, 19 nt, Homo sapiens
  misc_RNA (1)...(19): siRNA sense strand
aagaacaucucaggaagca

SEQ ID NO: 1732750 - RNA, 19 nt, Homo sapiens
  misc_RNA (1)...(19): siRNA sense strand
acacacaggaagagaaaga

SEQ ID NO: 1732751 - RNA, 19 nt, Homo sapiens
  misc_RNA (1)...(19): siRNA sense strand
ugauucuccuugccuuaaa

SEQ ID NO: 1732752 - RNA, 19 nt, Homo sapiens
  misc_RNA (1)...(19): siRNA sense strand
caaaaugcagguuuacaaa

SEQ ID NO: 1732753 - RNA, 19 nt, Homo sapiens
  misc_RNA (1)...(19): siRNA sense strand
caugugaucagccaggauu

SEQ ID NO: 1732754 - RNA, 19 nt, Homo sapiens
  misc_RNA (1)...(19): siRNA sense strand
aagggaugcugcucaggaa

SEQ ID NO: 1732755 - RNA, 19 nt, Homo sapiens
  misc_RNA (1)...(19): siRNA sense strand
gaaaaggugauuguagauu

SEQ ID NO: 1732756 - RNA, 19 nt, Homo sapiens
  misc_RNA (1)...(19): siRNA sense strand
aaggauaaauacccaaagg

SEQ ID NO: 1732757 - RNA, 19 nt, Homo sapiens
  misc_RNA (1)...(19): siRNA sense strand
ugggaugccugagcucuug

SEQ ID NO: 1732758 - RNA, 19 nt, Homo sapiens
  misc_RNA (1)...(19): siRNA sense strand
agaauacuuccuagaauca

SEQ ID NO: 1732759 - RNA, 19 nt, Homo sapiens
  misc_RNA (1)...(19): siRNA sense strand
uugaacuccuuaagcauau

SEQ ID NO: 1732760 - RNA, 19 nt, Homo sapiens
  misc_RNA (1)...(19): siRNA sense strand
ggccagggaacaccuugaa

SEQ ID NO: 1732761 - RNA, 19 nt, Homo sapiens
  misc_RNA (1)...(19): siRNA sense strand
gguacaagaggcugguaga

SEQ ID NO: 1732762 - RNA, 19 nt, Homo sapiens
  misc_RNA (1)...(19): siRNA sense strand
uuccucagcugaaagaaca

SEQ ID NO: 1732763 - RNA, 19 nt, Homo sapiens
  misc_RNA (1)...(19): siRNA sense strand
agagaucaggcaacaguga

SEQ ID NO: 1732764 - RNA, 19 nt, Homo sapiens
  misc_RNA (1)...(19): siRNA sense strand
gaguaugagccauguacau

SEQ ID NO: 1732765 - RNA, 19 nt, Homo sapiens
  misc_RNA (1)...(19): siRNA sense strand
ggaaaagaugcaccuauca

SEQ ID NO: 1732766 - RNA, 19 nt, Homo sapiens
  misc_RNA (1)...(19): siRNA sense strand
cagcugaaagaacaucuca

SEQ ID NO: 1732767 - RNA, 19 nt, Homo sapiens
  misc_RNA (1)...(19): siRNA sense strand
ccaaaaugcagguuuacaa

SEQ ID NO: 1732768 - RNA, 19 nt, Homo sapiens
  misc_RNA (1)...(19): siRNA sense strand
ggcaacagugauucuauag

SEQ ID NO: 1732769 - RNA, 19 nt, Homo sapiens
  misc_RNA (1)...(19): siRNA sense strand
aaaggcccguuaccauugg

SEQ ID NO: 1732770 - RNA, 19 nt, Homo sapiens
  misc_RNA (1)...(19): siRNA sense strand
ugguggugauaaaggauaa

SEQ ID NO: 1732771 - RNA, 19 nt, Homo sapiens
  misc_RNA (1)...(19): siRNA sense strand
gugguggugauaaaggaua

SEQ ID NO: 1732772 - RNA, 19 nt, Homo sapiens
  misc_RNA (1)...(19): siRNA sense strand
aaugcagguuuacaaagau

SEQ ID NO: 1732773 - RNA, 19 nt, Homo sapiens
  misc_RNA (1)...(19): siRNA sense strand
gaaucagacuuccacauuu

SEQ ID NO: 1732774 - RNA, 19 nt, Homo sapiens
  misc_RNA (1)...(19): siRNA sense strand
caagggauaugucaaggua

SEQ ID NO: 1732775 - RNA, 19 nt, Homo sapiens
  misc_RNA (1)...(19): siRNA sense strand
gaaauguucucgacagcaa

SEQ ID NO: 1732776 - RNA, 19 nt, Homo sapiens
  misc_RNA (1)...(19): siRNA sense strand
acaagaggcugguagagua

SEQ ID NO: 1732777 - RNA, 19 nt, Homo sapiens
  misc_RNA (1)...(19): siRNA sense strand
ggaauucuuucaauacaga

SEQ ID NO: 1732778 - RNA, 19 nt, Homo sapiens
  misc_RNA (1)...(19): siRNA sense strand
gagcaacucuggccaaugc

SEQ ID NO: 1732779 - RNA, 19 nt, Homo sapiens
  misc_RNA (1)...(19): siRNA sense strand
aaagaacccuggccuggaa

SEQ ID NO: 1732780 - RNA, 19 nt, Homo sapiens
  misc_RNA (1)...(19): siRNA sense strand
aaaugcagguuuacaaaga

SEQ ID NO: 1732781 - RNA, 19 nt, Homo sapiens
  misc_RNA (1)...(19): siRNA sense strand
ugaaagaacaucucaggaa

SEQ ID NO: 1732782 - RNA, 19 nt, Homo sapiens
  misc_RNA (1)...(19): siRNA sense strand
gaaacacacaggaagagaa

SEQ ID NO: 1732783 - RNA, 19 nt, Homo sapiens
  misc_RNA (1)...(19): siRNA sense strand
cgaaucagacuuccacauu

SEQ ID NO: 1732784 - RNA, 19 nt, Homo sapiens
  misc_RNA (1)...(19): siRNA sense strand
aaucagacuuccacauuug

SEQ ID NO: 1732785 - RNA, 19 nt, Homo sapiens
  misc_RNA (1)...(19): siRNA sense strand
cagaauacuuccuagaauc

SEQ ID NO: 1732786 - RNA, 19 nt, Homo sapiens
  misc_RNA (1)...(19): siRNA sense strand
gaaagcagaguguaacaag

SEQ ID NO: 1732787 - RNA, 19 nt, Homo sapiens
  misc_RNA (1)...(19): siRNA sense strand
ccaaaggcccguuaccauu

SEQ ID NO: 1732788 - RNA, 19 nt, Homo sapiens
  misc_RNA (1)...(19): siRNA sense strand
uagaguaacuguccgagau

SEQ ID NO: 1732789 - RNA, 19 nt, Homo sapiens
  misc_RNA (1)...(19): siRNA sense strand
caaaggcccguuaccauug

SEQ ID NO: 1732790 - RNA, 19 nt, Homo sapiens
  misc_RNA (1)...(19): siRNA sense strand
gaacaccuugaacuccuua

SEQ ID NO: 1732791 - RNA, 19 nt, Homo sapiens
  misc_RNA (1)...(19): siRNA sense strand
agaaagagaucaggcaaca

SEQ ID NO: 1732792 - RNA, 19 nt, Homo sapiens
  misc_RNA (1)...(19): siRNA sense strand
aggcaacagugauucuaua

SEQ ID NO: 1732793 - RNA, 19 nt, Homo sapiens
  misc_RNA (1)...(19): siRNA sense strand
aaacuccgcuuccgauugg

SEQ ID NO: 1732794 - RNA, 19 nt, Homo sapiens
  misc_RNA (1)...(19): siRNA sense strand
caauacagaauacuuccua

SEQ ID NO: 1732795 - RNA, 19 nt, Homo sapiens
  misc_RNA (1)...(19): siRNA sense strand
gggaaaaggugauuguaga

SEQ ID NO: 1732796 - RNA, 19 nt, Homo sapiens
  misc_RNA (1)...(19): siRNA sense strand
acagaauacuuccuagaau

SEQ ID NO: 1732797 - RNA, 19 nt, Homo sapiens
  misc_RNA (1)...(19): siRNA sense strand
ggaccuccauuuccagucu

SEQ ID NO: 1732798 - RNA, 19 nt, Homo sapiens
  misc_RNA (1)...(19): siRNA sense strand
aaacacacaggaagagaaa

SEQ ID NO: 1732799 - RNA, 19 nt, Homo sapiens
  misc_RNA (1)...(19): siRNA sense strand
ggaacaccuugaacuccuu

SEQ ID NO: 1732800 - RNA, 19 nt, Homo sapiens
  misc_RNA (1)...(19): siRNA sense strand
gcuugaagauuucuaugca

SEQ ID NO: 1732801 - RNA, 19 nt, Homo sapiens
  misc_RNA (1)...(19): siRNA sense strand
ugaucgagaugguacaaga

SEQ ID NO: 1732802 - RNA, 19 nt, Homo sapiens
  misc_RNA (1)...(19): siRNA sense strand
uaacaagggauaugucaag

SEQ ID NO: 1732803 - RNA, 19 nt, Homo sapiens
  misc_RNA (1)...(19): siRNA sense strand
caagaggcugguagaguaa

SEQ ID NO: 1732804 - RNA, 19 nt, Homo sapiens
  misc_RNA (1)...(19): siRNA sense strand
agggauaugucaagguaaa

SEQ ID NO: 1732805 - RNA, 19 nt, Homo sapiens
  misc_RNA (1)...(19): siRNA sense strand
uuaagcauaugcacacugu

SEQ ID NO: 1732806 - RNA, 19 nt, Homo sapiens
  misc_RNA (1)...(19): siRNA sense strand
ggugauaaaggauaaauac

SEQ ID NO: 1732807 - RNA, 19 nt, Homo sapiens
  misc_RNA (1)...(19): siRNA sense strand
ucacugauaagaaauguuc

SEQ ID NO: 1732808 - RNA, 19 nt, Homo sapiens
  misc_RNA (1)...(19): siRNA sense strand
gcaacagugauucuauaga

SEQ ID NO: 1732809 - RNA, 19 nt, Homo sapiens
  misc_RNA (1)...(19): siRNA sense strand
caaacuccgcuuccgauug

SEQ ID NO: 1732810 - RNA, 19 nt, Homo sapiens
  misc_RNA (1)...(19): siRNA sense strand
gagcaggugguggugauaa

SEQ ID NO: 1732811 - RNA, 19 nt, Homo sapiens
  misc_RNA (1)...(19): siRNA sense strand
gcaaacuccgcuuccgauu

SEQ ID NO: 1732812 - RNA, 19 nt, Homo sapiens
  misc_RNA (1)...(19): siRNA sense strand
ggaaacacacaggaagaga

SEQ ID NO: 1732813 - RNA, 19 nt, Homo sapiens
  misc_RNA (1)...(19): siRNA sense strand
uaugagccauguacaucuu

SEQ ID NO: 1732814 - RNA, 19 nt, Homo sapiens
  misc_RNA (1)...(19): siRNA sense strand
gaaaagaugcaccuaucaa

SEQ ID NO: 1732815 - RNA, 19 nt, Homo sapiens
  misc_RNA (1)...(19): siRNA sense strand
aaagagaucaggcaacagu

SEQ ID NO: 1732816 - RNA, 19 nt, Homo sapiens
  misc_RNA (1)...(19): siRNA sense strand
gggaaaagaugcaccuauc

SEQ ID NO: 1732817 - RNA, 19 nt, Homo sapiens
  misc_RNA (1)...(19): siRNA sense strand
uacagaauacuuccuagaa

SEQ ID NO: 1732818 - RNA, 19 nt, Homo sapiens
  misc_RNA (1)...(19): siRNA sense strand
cuugaacuccuuaagcaua

SEQ ID NO: 1732819 - RNA, 19 nt, Homo sapiens
  misc_RNA (1)...(19): siRNA sense strand
gggagcaacucuggccaau

SEQ ID NO: 1732820 - RNA, 19 nt, Homo sapiens
  misc_RNA (1)...(19): siRNA sense strand
aagaacaucucaggaagca

SEQ ID NO: 1732821 - RNA, 19 nt, Homo sapiens
  misc_RNA (1)...(19): siRNA sense strand
acacacaggaagagaaaga

SEQ ID NO: 1732822 - RNA, 19 nt, Homo sapiens
  misc_RNA (1)...(19): siRNA sense strand
ugauucuccuugccuuaaa

SEQ ID NO: 1732823 - RNA, 19 nt, Homo sapiens
  misc_RNA (1)...(19): siRNA sense strand
cagaguguaacaagggaua

SEQ ID NO: 1732824 - RNA, 19 nt, Homo sapiens
  misc_RNA (1)...(19): siRNA sense strand
aagggaugcugcucaggaa

SEQ ID NO: 1732825 - RNA, 19 nt, Homo sapiens
  misc_RNA (1)...(19): siRNA sense strand
caugugaucagccaggauu

SEQ ID NO: 1732826 - RNA, 19 nt, Homo sapiens
  misc_RNA (1)...(19): siRNA sense strand
caaaaugcagguuuacaaa

SEQ ID NO: 1732827 - RNA, 19 nt, Homo sapiens
  misc_RNA (1)...(19): siRNA sense strand
gaaaaggugauuguagauu

SEQ ID NO: 1732828 - RNA, 19 nt, Homo sapiens
  misc_RNA (1)...(19): siRNA sense strand
aaggauaaauacccaaagg

SEQ ID NO: 1732829 - RNA, 19 nt, Homo sapiens
  misc_RNA (1)...(19): siRNA sense strand
ugggaugccugagcucuug

SEQ ID NO: 1732830 - RNA, 19 nt, Homo sapiens
  misc_RNA (1)...(19): siRNA sense strand
agaauacuuccuagaauca

SEQ ID NO: 1732831 - RNA, 19 nt, Homo sapiens
  misc_RNA (1)...(19): siRNA sense strand
uggaagcaguugugauugg

SEQ ID NO: 1732832 - RNA, 19 nt, Homo sapiens
  misc_RNA (1)...(19): siRNA sense strand
uugaacuccuuaagcauau

SEQ ID NO: 1732833 - RNA, 19 nt, Homo sapiens
  misc_RNA (1)...(19): siRNA sense strand
ggccagggaacaccuugaa

SEQ ID NO: 1732834 - RNA, 19 nt, Homo sapiens
  misc_RNA (1)...(19): siRNA sense strand
cagagaccaagaucacuga

SEQ ID NO: 1732835 - RNA, 19 nt, Homo sapiens
  misc_RNA (1)...(19): siRNA sense strand
gguacaagaggcugguaga

SEQ ID NO: 1732836 - RNA, 19 nt, Homo sapiens
  misc_RNA (1)...(19): siRNA sense strand
uuuggaagcaguugugauu

SEQ ID NO: 1732837 - RNA, 19 nt, Homo sapiens
  misc_RNA (1)...(19): siRNA sense strand
guaacaagggauaugucaa

SEQ ID NO: 1732838 - RNA, 19 nt, Homo sapiens
  misc_RNA (1)...(19): siRNA sense strand
uuccucagcugaaagaaca

SEQ ID NO: 1732839 - RNA, 19 nt, Homo sapiens
  misc_RNA (1)...(19): siRNA sense strand
agagaucaggcaacaguga

SEQ ID NO: 1732840 - RNA, 19 nt, Homo sapiens
  misc_RNA (1)...(19): siRNA sense strand
gaguaugagccauguacau

SEQ ID NO: 1732841 - RNA, 19 nt, Homo sapiens
  misc_RNA (1)...(19): siRNA sense strand
caccagcgaaucagacuuc

SEQ ID NO: 1732842 - RNA, 19 nt, Homo sapiens
  misc_RNA (1)...(19): siRNA sense strand
ggaaaagaugcaccuauca

SEQ ID NO: 1732843 - RNA, 19 nt, Homo sapiens
  misc_RNA (1)...(19): siRNA sense strand
cagcugaaagaacaucuca

SEQ ID NO: 1732844 - RNA, 19 nt, Homo sapiens
  misc_RNA (1)...(19): siRNA sense strand
ugaaagcagaguguaacaa

SEQ ID NO: 1732845 - RNA, 19 nt, Homo sapiens
  misc_RNA (1)...(19): siRNA sense strand
ggcaacagugauucuauag

SEQ ID NO: 1732846 - RNA, 19 nt, Homo sapiens
  misc_RNA (1)...(19): siRNA sense strand
aaaggcccguuaccauugg

SEQ ID NO: 1732847 - RNA, 19 nt, Homo sapiens
  misc_RNA (1)...(19): siRNA sense strand
ugguggugauaaaggauaa

SEQ ID NO: 1732848 - RNA, 19 nt, Homo sapiens
  misc_RNA (1)...(19): siRNA sense strand
gugguggugauaaaggaua

SEQ ID NO: 1732849 - RNA, 19 nt, Homo sapiens
  misc_RNA (1)...(19): siRNA sense strand
aaugcagguuuacaaagau

SEQ ID NO: 1732850 - RNA, 19 nt, Homo sapiens
  misc_RNA (1)...(19): siRNA sense strand
ccaaaaugcagguuuacaa

SEQ ID NO: 1732851 - RNA, 19 nt, Homo sapiens
  misc_RNA (1)...(19): siRNA sense strand
ggagagaacuguuugaaga

SEQ ID NO: 1732852 - RNA, 19 nt, Homo sapiens
  misc_RNA (1)...(19): siRNA sense strand
ggaagaauguguccagcua

SEQ ID NO: 1732853 - RNA, 19 nt, Homo sapiens
  misc_RNA (1)...(19): siRNA sense strand
gaacguggaugagaacauu

SEQ ID NO: 1732854 - RNA, 19 nt, Homo sapiens
  misc_RNA (1)...(19): siRNA sense strand
gaaagcagguugaaaauga

SEQ ID NO: 1732855 - RNA, 19 nt, Homo sapiens
  misc_RNA (1)...(19): siRNA sense strand
gaucaaaggauaagaauuc

SEQ ID NO: 1732856 - RNA, 19 nt, Homo sapiens
  misc_RNA (1)...(19): siRNA sense strand
ggaggaugaugauguuaaa

SEQ ID NO: 1732857 - RNA, 19 nt, Homo sapiens
  misc_RNA (1)...(19): siRNA sense strand
gaaugaacauaaugccaaa

SEQ ID NO: 1732858 - RNA, 19 nt, Homo sapiens
  misc_RNA (1)...(19): siRNA sense strand
uagaggacgugguaguuua

SEQ ID NO: 1732859 - RNA, 19 nt, Homo sapiens
  misc_RNA (1)...(19): siRNA sense strand
aaaugaagcuagcaaagaa

SEQ ID NO: 1732860 - RNA, 19 nt, Homo sapiens
  misc_RNA (1)...(19): siRNA sense strand
gaaagaggucuauaucaga

SEQ ID NO: 1732861 - RNA, 19 nt, Homo sapiens
  misc_RNA (1)...(19): siRNA sense strand
gaaaggagagaacuguuug

SEQ ID NO: 1732862 - RNA, 19 nt, Homo sapiens
  misc_RNA (1)...(19): siRNA sense strand
ggaaauggagguuaagaug

SEQ ID NO: 1732863 - RNA, 19 nt, Homo sapiens
  misc_RNA (1)...(19): siRNA sense strand
gaaauagcgauuguucaua

SEQ ID NO: 1732864 - RNA, 19 nt, Homo sapiens
  misc_RNA (1)...(19): siRNA sense strand
gagaguagaagucggagua

SEQ ID NO: 1732865 - RNA, 19 nt, Homo sapiens
  misc_RNA (1)...(19): siRNA sense strand
ggagguagaggacguggua

SEQ ID NO: 1732866 - RNA, 19 nt, Homo sapiens
  misc_RNA (1)...(19): siRNA sense strand
ggaaauagcgauuguucau

SEQ ID NO: 1732867 - RNA, 19 nt, Homo sapiens
  misc_RNA (1)...(19): siRNA sense strand
gcauugcagucuucaguug

SEQ ID NO: 1732868 - RNA, 19 nt, Homo sapiens
  misc_RNA (1)...(19): siRNA sense strand
ggaggaaacugagguaagg

SEQ ID NO: 1732869 - RNA, 19 nt, Homo sapiens
  misc_RNA (1)...(19): siRNA sense strand
aaauagcgauuguucauag

SEQ ID NO: 1732870 - RNA, 19 nt, Homo sapiens
  misc_RNA (1)...(19): siRNA sense strand
uuaagaacguggaugagaa

SEQ ID NO: 1732871 - RNA, 19 nt, Homo sapiens
  misc_RNA (1)...(19): siRNA sense strand
gcaagaagaauggaaugaa

SEQ ID NO: 1732872 - RNA, 19 nt, Homo sapiens
  misc_RNA (1)...(19): siRNA sense strand
gaucggaagagaagggaua

SEQ ID NO: 1732873 - RNA, 19 nt, Homo sapiens
  misc_RNA (1)...(19): siRNA sense strand
ggacauaauagagauagaa

SEQ ID NO: 1732874 - RNA, 19 nt, Homo sapiens
  misc_RNA (1)...(19): siRNA sense strand
caagaagaauggaaugaac

SEQ ID NO: 1732875 - RNA, 19 nt, Homo sapiens
  misc_RNA (1)...(19): siRNA sense strand
caucgaauuugcagaacaa

SEQ ID NO: 1732876 - RNA, 19 nt, Homo sapiens
  misc_RNA (1)...(19): siRNA sense strand
aaauggagguuaagaugga

SEQ ID NO: 1732877 - RNA, 19 nt, Homo sapiens
  misc_RNA (1)...(19): siRNA sense strand
agaaagaggucuauaucag

SEQ ID NO: 1732878 - RNA, 19 nt, Homo sapiens
  misc_RNA (1)...(19): siRNA sense strand
uaaucgaguugaaagugua

SEQ ID NO: 1732879 - RNA, 19 nt, Homo sapiens
  misc_RNA (1)...(19): siRNA sense strand
aggcguggauucucagaua

SEQ ID NO: 1732880 - RNA, 19 nt, Homo sapiens
  misc_RNA (1)...(19): siRNA sense strand
gagcguggaucggaagaga

SEQ ID NO: 1732881 - RNA, 19 nt, Homo sapiens
  misc_RNA (1)...(19): siRNA sense strand
gaagagaggcgugcuaaac

SEQ ID NO: 1732882 - RNA, 19 nt, Homo sapiens
  misc_RNA (1)...(19): siRNA sense strand
gaagaauggaaugaacaua

SEQ ID NO: 1732883 - RNA, 19 nt, Homo sapiens
  misc_RNA (1)...(19): siRNA sense strand
acaaaaggaucaaaggaua

SEQ ID NO: 1732884 - RNA, 19 nt, Homo sapiens
  misc_RNA (1)...(19): siRNA sense strand
aaauugagccagauaaaga

SEQ ID NO: 1732885 - RNA, 19 nt, Homo sapiens
  misc_RNA (1)...(19): siRNA sense strand
ucauagugaugcagagaaa

SEQ ID NO: 1732886 - RNA, 19 nt, Homo sapiens
  misc_RNA (1)...(19): siRNA sense strand
gagccagucuugacaguac

SEQ ID NO: 1732887 - RNA, 19 nt, Homo sapiens
  misc_RNA (1)...(19): siRNA sense strand
ugaaaggagagaacuguuu

SEQ ID NO: 1732888 - RNA, 19 nt, Homo sapiens
  misc_RNA (1)...(19): siRNA sense strand
gaagugaaagagaccgaaa

SEQ ID NO: 1732889 - RNA, 19 nt, Homo sapiens
  misc_RNA (1)...(19): siRNA sense strand
gacagaaagaggucuauau

SEQ ID NO: 1732890 - RNA, 19 nt, Homo sapiens
  misc_RNA (1)...(19): siRNA sense strand
gaaauugagccagauaaag

SEQ ID NO: 1732891 - RNA, 19 nt, Homo sapiens
  misc_RNA (1)...(19): siRNA sense strand
cugaagaaguuauggaugu

SEQ ID NO: 1732892 - RNA, 19 nt, Homo sapiens
  misc_RNA (1)...(19): siRNA sense strand
gaagacaaucaaugaagga

SEQ ID NO: 1732893 - RNA, 19 nt, Homo sapiens
  misc_RNA (1)...(19): siRNA sense strand
ccuagaagacaaucaauga

SEQ ID NO: 1732894 - RNA, 19 nt, Homo sapiens
  misc_RNA (1)...(19): siRNA sense strand
gaaugucagugcuuuagac

SEQ ID NO: 1732895 - RNA, 19 nt, Homo sapiens
  misc_RNA (1)...(19): siRNA sense strand
cgugagaacuuugcaggaa

SEQ ID NO: 1732896 - RNA, 19 nt, Homo sapiens
  misc_RNA (1)...(19): siRNA sense strand
gauagaaagcacagaagga

SEQ ID NO: 1732897 - RNA, 19 nt, Homo sapiens
  misc_RNA (1)...(19): siRNA sense strand
ggcagcagcagcagagaua

SEQ ID NO: 1732898 - RNA, 19 nt, Homo sapiens
  misc_RNA (1)...(19): siRNA sense strand
gaaacugagguaagggaaa

SEQ ID NO: 1732899 - RNA, 19 nt, Homo sapiens
  misc_RNA (1)...(19): siRNA sense strand
aacaggaaauggagguuaa

SEQ ID NO: 1732900 - RNA, 19 nt, Homo sapiens
  misc_RNA (1)...(19): siRNA sense strand
gacaaucaaugaaggaaaa

SEQ ID NO: 1732901 - RNA, 19 nt, Homo sapiens
  misc_RNA (1)...(19): siRNA sense strand
aguagcagcuccaguacaa

SEQ ID NO: 1732902 - RNA, 19 nt, Homo sapiens
  misc_RNA (1)...(19): siRNA sense strand
caaagaauuggaaccagaa

SEQ ID NO: 1732903 - RNA, 19 nt, Homo sapiens
  misc_RNA (1)...(19): siRNA sense strand
uagagaugguugagaaugu

SEQ ID NO: 1732904 - RNA, 19 nt, Homo sapiens
  misc_RNA (1)...(19): siRNA sense strand
agaggucgagcuagaaaua

SEQ ID NO: 1732905 - RNA, 19 nt, Homo sapiens
  misc_RNA (1)...(19): siRNA sense strand
guagaggacgugguaguuu

SEQ ID NO: 1732906 - RNA, 19 nt, Homo sapiens
  misc_RNA (1)...(19): siRNA sense strand
gguggugcguaaugaagaa

SEQ ID NO: 1732907 - RNA, 19 nt, Homo sapiens
  misc_RNA (1)...(19): siRNA sense strand
aagagaaugucagugcuuu

SEQ ID NO: 1732908 - RNA, 19 nt, Homo sapiens
  misc_RNA (1)...(19): siRNA sense strand
ugaaauugagccagauaaa

SEQ ID NO: 1732909 - RNA, 19 nt, Homo sapiens
  misc_RNA (1)...(19): siRNA sense strand
ggaggaggaaacugaggua

SEQ ID NO: 1732910 - RNA, 19 nt, Homo sapiens
  misc_RNA (1)...(19): siRNA sense strand
uagaagagucacagagaaa

SEQ ID NO: 1732911 - RNA, 19 nt, Homo sapiens
  misc_RNA (1)...(19): siRNA sense strand
guagaggucgagcuagaaa

SEQ ID NO: 1732912 - RNA, 19 nt, Homo sapiens
  misc_RNA (1)...(19): siRNA sense strand
aaacaggaaauggagguua

SEQ ID NO: 1732913 - RNA, 19 nt, Homo sapiens
  misc_RNA (1)...(19): siRNA sense strand
uagcgauuguucauaguga

SEQ ID NO: 1732914 - RNA, 19 nt, Homo sapiens
  misc_RNA (1)...(19): siRNA sense strand
gagaaucacgccaggaaag

SEQ ID NO: 1732915 - RNA, 19 nt, Homo sapiens
  misc_RNA (1)...(19): siRNA sense strand
gaauggaaugaacauaaug

SEQ ID NO: 1732916 - RNA, 19 nt, Homo sapiens
  misc_RNA (1)...(19): siRNA sense strand
auagaagagucacagagaa

SEQ ID NO: 1732917 - RNA, 19 nt, Homo sapiens
  misc_RNA (1)...(19): siRNA sense strand
aguagcaguucaaccagua

SEQ ID NO: 1732918 - RNA, 19 nt, Homo sapiens
  misc_RNA (1)...(19): siRNA sense strand
agaaguagaggucgagcua

SEQ ID NO: 1732919 - RNA, 19 nt, Homo sapiens
  misc_RNA (1)...(19): siRNA sense strand
gauuugucauuagcuguuu

SEQ ID NO: 1732920 - RNA, 19 nt, Homo sapiens
  misc_RNA (1)...(19): siRNA sense strand
ugagccagauaaagaaugu

SEQ ID NO: 1732921 - RNA, 19 nt, Homo sapiens
  misc_RNA (1)...(19): siRNA sense strand
aaacugagguaagggaaag

SEQ ID NO: 1732922 - RNA, 19 nt, Homo sapiens
  misc_RNA (1)...(19): siRNA sense strand
gcaucgaauuugcagaaca

SEQ ID NO: 1732923 - RNA, 19 nt, Homo sapiens
  misc_RNA (1)...(19): siRNA sense strand
gcgcacacguagagaccuu

SEQ ID NO: 1732924 - RNA, 19 nt, Homo sapiens
  misc_RNA (1)...(19): siRNA sense strand
ugaaagagaccgaaaauca

SEQ ID NO: 1732925 - RNA, 19 nt, Homo sapiens
  misc_RNA (1)...(19): siRNA sense strand
cagaaagaggucuauauca

SEQ ID NO: 1732926 - RNA, 19 nt, Homo sapiens
  misc_RNA (1)...(19): siRNA sense strand
aguaguagcagucgcagua

SEQ ID NO: 1732927 - RNA, 19 nt, Homo sapiens
  misc_RNA (1)...(19): siRNA sense strand
agucgaagcaguagcagua

SEQ ID NO: 1732928 - RNA, 19 nt, Homo sapiens
  misc_RNA (1)...(19): siRNA sense strand
cuaaucgaguugaaagugu

SEQ ID NO: 1732929 - RNA, 19 nt, Homo sapiens
  misc_RNA (1)...(19): siRNA sense strand
gugagaagcagcaggauag

SEQ ID NO: 1732930 - RNA, 19 nt, Homo sapiens
  misc_RNA (1)...(19): siRNA sense strand
gagagaaagcagguugaaa

SEQ ID NO: 1732931 - RNA, 19 nt, Homo sapiens
  misc_RNA (1)...(19): siRNA sense strand
gguagacgcaucgaauuug

SEQ ID NO: 1732932 - RNA, 19 nt, Homo sapiens
  misc_RNA (1)...(19): siRNA sense strand
gcagagauaguagcaguag

SEQ ID NO: 1732933 - RNA, 19 nt, Homo sapiens
  misc_RNA (1)...(19): siRNA sense strand
aaagcgacccggaggauga

SEQ ID NO: 1732934 - RNA, 19 nt, Homo sapiens
  misc_RNA (1)...(19): siRNA sense strand
agcaguagcaguucuagua

SEQ ID NO: 1732935 - RNA, 19 nt, Homo sapiens
  misc_RNA (1)...(19): siRNA sense strand
uaccugagaggaaggauuu

SEQ ID NO: 1732936 - RNA, 19 nt, Homo sapiens
  misc_RNA (1)...(19): siRNA sense strand
gagaaugucagugcuuuag

SEQ ID NO: 1732937 - RNA, 19 nt, Homo sapiens
  misc_RNA (1)...(19): siRNA sense strand
ccaaacagagagaccuuga

SEQ ID NO: 1732938 - RNA, 19 nt, Homo sapiens
  misc_RNA (1)...(19): siRNA sense strand
gccaggaaauugaacaaaa

SEQ ID NO: 1732939 - RNA, 19 nt, Homo sapiens
  misc_RNA (1)...(19): siRNA sense strand
ggaaagcgacccggaggau

SEQ ID NO: 1732940 - RNA, 19 nt, Homo sapiens
  misc_RNA (1)...(19): siRNA sense strand
cgacagaaagaggucuaua

SEQ ID NO: 1732941 - RNA, 19 nt, Homo sapiens
  misc_RNA (1)...(19): siRNA sense strand
gcacagaaggagcguggau

SEQ ID NO: 1732942 - RNA, 19 nt, Homo sapiens
  misc_RNA (1)...(19): siRNA sense strand
aaguagaggucgagcuaga

SEQ ID NO: 1732943 - RNA, 19 nt, Homo sapiens
  misc_RNA (1)...(19): siRNA sense strand
agaauuggaaccagaaaug

SEQ ID NO: 1732944 - RNA, 19 nt, Homo sapiens
  misc_RNA (1)...(19): siRNA sense strand
gagguaagggaaagugaga

SEQ ID NO: 1732945 - RNA, 19 nt, Homo sapiens
  misc_RNA (1)...(19): siRNA sense strand
agagaacuguuugaagaga

SEQ ID NO: 1732946 - RNA, 19 nt, Homo sapiens
  misc_RNA (1)...(19): siRNA sense strand
ugagaacuuugcaggaaca

SEQ ID NO: 1732947 - RNA, 19 nt, Homo sapiens
  misc_RNA (1)...(19): siRNA sense strand
ggauuugucauuagcuguu

SEQ ID NO: 1732948 - RNA, 19 nt, Homo sapiens
  misc_RNA (1)...(19): siRNA sense strand
agaggaagcaggagaggaa

SEQ ID NO: 1732949 - RNA, 19 nt, Homo sapiens
  misc_RNA (1)...(19): siRNA sense strand
ugaagaaguuauggaugug

SEQ ID NO: 1732950 - RNA, 19 nt, Homo sapiens
  misc_RNA (1)...(19): siRNA sense strand
ugcuagagaugguugagaa

SEQ ID NO: 1732951 - RNA, 19 nt, Homo sapiens
  misc_RNA (1)...(19): siRNA sense strand
ccaaggcccugcagcugua

SEQ ID NO: 1732952 - RNA, 19 nt, Homo sapiens
  misc_RNA (1)...(19): siRNA sense strand
ggaggaggaugaagacaca

SEQ ID NO: 1732953 - RNA, 19 nt, Homo sapiens
  misc_RNA (1)...(19): siRNA sense strand
ggacacugaugcugaccuu

SEQ ID NO: 1732954 - RNA, 19 nt, Homo sapiens
  misc_RNA (1)...(19): siRNA sense strand
gaagcagcaugcccaggaa

SEQ ID NO: 1732955 - RNA, 19 nt, Homo sapiens
  misc_RNA (1)...(19): siRNA sense strand
gagccgagauccaccugau

SEQ ID NO: 1732956 - RNA, 19 nt, Homo sapiens
  misc_RNA (1)...(19): siRNA sense strand
cugcguaggucucaggauu

SEQ ID NO: 1732957 - RNA, 19 nt, Homo sapiens
  misc_RNA (1)...(19): siRNA sense strand
uugagccucuuuccugaua

SEQ ID NO: 1732958 - RNA, 19 nt, Homo sapiens
  misc_RNA (1)...(19): siRNA sense strand
gagcacauccagaaagaag

SEQ ID NO: 1732959 - RNA, 19 nt, Homo sapiens
  misc_RNA (1)...(19): siRNA sense strand
ccgagugccugcagaagau

SEQ ID NO: 1732960 - RNA, 19 nt, Homo sapiens
  misc_RNA (1)...(19): siRNA sense strand
ggacauacggggaaauuga

SEQ ID NO: 1732961 - RNA, 19 nt, Homo sapiens
  misc_RNA (1)...(19): siRNA sense strand
gaaagcugcuccggacacu

SEQ ID NO: 1732962 - RNA, 19 nt, Homo sapiens
  misc_RNA (1)...(19): siRNA sense strand
aguacaagcugcccaugga

SEQ ID NO: 1732963 - RNA, 19 nt, Homo sapiens
  misc_RNA (1)...(19): siRNA sense strand
ggaugaagacacagagaca

SEQ ID NO: 1732964 - RNA, 19 nt, Homo sapiens
  misc_RNA (1)...(19): siRNA sense strand
guuacgagcacauccagaa

SEQ ID NO: 1732965 - RNA, 19 nt, Homo sapiens
  misc_RNA (1)...(19): siRNA sense strand
ccugauccgugacaugaug

SEQ ID NO: 1732966 - RNA, 19 nt, Homo sapiens
  misc_RNA (1)...(19): siRNA sense strand
ugacgagcaaucagaggua

SEQ ID NO: 1732967 - RNA, 19 nt, Homo sapiens
  misc_RNA (1)...(19): siRNA sense strand
acgagcacauccagaaaga

SEQ ID NO: 1732968 - RNA, 19 nt, Homo sapiens
  misc_RNA (1)...(19): siRNA sense strand
gcugcgaguugccuuagag

SEQ ID NO: 1732969 - RNA, 19 nt, Homo sapiens
  misc_RNA (1)...(19): siRNA sense strand
caccugauccgugacauga

SEQ ID NO: 1732970 - RNA, 19 nt, Homo sapiens
  misc_RNA (1)...(19): siRNA sense strand
aagcugcuccggacacuga

SEQ ID NO: 1732971 - RNA, 19 nt, Homo sapiens
  misc_RNA (1)...(19): siRNA sense strand
ucuaccugcugcuucauga

SEQ ID NO: 1732972 - RNA, 19 nt, Homo sapiens
  misc_RNA (1)...(19): siRNA sense strand
gaugaagacacagagacaa

SEQ ID NO: 1732973 - RNA, 19 nt, Homo sapiens
  misc_RNA (1)...(19): siRNA sense strand
ggacagugugggcaguaug

SEQ ID NO: 1732974 - RNA, 19 nt, Homo sapiens
  misc_RNA (1)...(19): siRNA sense strand
gcguaggucucaggauuac

SEQ ID NO: 1732975 - RNA, 19 nt, Homo sapiens
  misc_RNA (1)...(19): siRNA sense strand
gaggacagugugggcagua

SEQ ID NO: 1732976 - RNA, 19 nt, Homo sapiens
  misc_RNA (1)...(19): siRNA sense strand
gcacauccagaaagaagac

SEQ ID NO: 1732977 - RNA, 19 nt, Homo sapiens
  misc_RNA (1)...(19): siRNA sense strand
gaccugcugccacuucuca

SEQ ID NO: 1732978 - RNA, 19 nt, Homo sapiens
  misc_RNA (1)...(19): siRNA sense strand
gaggaugaagacacagaga

SEQ ID NO: 1732979 - RNA, 19 nt, Homo sapiens
  misc_RNA (1)...(19): siRNA sense strand
caugaggcugcaccgcuua

SEQ ID NO: 1732980 - RNA, 19 nt, Homo sapiens
  misc_RNA (1)...(19): siRNA sense strand
ccaccgagugccugcagaa

SEQ ID NO: 1732981 - RNA, 19 nt, Homo sapiens
  misc_RNA (1)...(19): siRNA sense strand
ggcacggugucgaggguau

SEQ ID NO: 1732982 - RNA, 19 nt, Homo sapiens
  misc_RNA (1)...(19): siRNA sense strand
ccaaggcccugcagcugua

SEQ ID NO: 1732983 - RNA, 19 nt, Homo sapiens
  misc_RNA (1)...(19): siRNA sense strand
ggacacugaugcugaccuu

SEQ ID NO: 1732984 - RNA, 19 nt, Homo sapiens
  misc_RNA (1)...(19): siRNA sense strand
gaagcagcaugcccaggaa

SEQ ID NO: 1732985 - RNA, 19 nt, Homo sapiens
  misc_RNA (1)...(19): siRNA sense strand
cugcguaggucucaggauu

SEQ ID NO: 1732986 - RNA, 19 nt, Homo sapiens
  misc_RNA (1)...(19): siRNA sense strand
gaaagcugcuccggacacu

SEQ ID NO: 1732987 - RNA, 19 nt, Homo sapiens
  misc_RNA (1)...(19): siRNA sense strand
ggacagugugggcaguaug

SEQ ID NO: 1732988 - RNA, 19 nt, Homo sapiens
  misc_RNA (1)...(19): siRNA sense strand
aagcugcuccggacacuga

SEQ ID NO: 1732989 - RNA, 19 nt, Homo sapiens
  misc_RNA (1)...(19): siRNA sense strand
gcguaggucucaggauuac

SEQ ID NO: 1732990 - RNA, 19 nt, Homo sapiens
  misc_RNA (1)...(19): siRNA sense strand
gaggacagugugggcagua

SEQ ID NO: 1732991 - RNA, 19 nt, Homo sapiens
  misc_RNA (1)...(19): siRNA sense strand
ccaaggcccugcagcugua

SEQ ID NO: 1732992 - RNA, 19 nt, Homo sapiens
  misc_RNA (1)...(19): siRNA sense strand
ggaggaggaugaagacaca

SEQ ID NO: 1732993 - RNA, 19 nt, Homo sapiens
  misc_RNA (1)...(19): siRNA sense strand
ggacacugaugcugaccuu

SEQ ID NO: 1732994 - RNA, 19 nt, Homo sapiens
  misc_RNA (1)...(19): siRNA sense strand
gaagcagcaugcccaggaa

SEQ ID NO: 1732995 - RNA, 19 nt, Homo sapiens
  misc_RNA (1)...(19): siRNA sense strand
gagccgagauccaccugau

SEQ ID NO: 1732996 - RNA, 19 nt, Homo sapiens
  misc_RNA (1)...(19): siRNA sense strand
uugagccucuuuccugaua

SEQ ID NO: 1732997 - RNA, 19 nt, Homo sapiens
  misc_RNA (1)...(19): siRNA sense strand
gagcacauccagaaagaag

SEQ ID NO: 1732998 - RNA, 19 nt, Homo sapiens
  misc_RNA (1)...(19): siRNA sense strand
ccgagugccugcagaagau

SEQ ID NO: 1732999 - RNA, 19 nt, Homo sapiens
  misc_RNA (1)...(19): siRNA sense strand
ggacauacggggaaauuga

SEQ ID NO: 1733000 - RNA, 19 nt, Homo sapiens
  misc_RNA (1)...(19): siRNA sense strand
gaaagcugcuccggacacu

SEQ ID NO: 1733001 - RNA, 19 nt, Homo sapiens
  misc_RNA (1)...(19): siRNA sense strand
aguacaagcugcccaugga

SEQ ID NO: 1733002 - RNA, 19 nt, Homo sapiens
  misc_RNA (1)...(19): siRNA sense strand
ggaugaagacacagagaca

SEQ ID NO: 1733003 - RNA, 19 nt, Homo sapiens
  misc_RNA (1)...(19): siRNA sense strand
guuacgagcacauccagaa

SEQ ID NO: 1733004 - RNA, 19 nt, Homo sapiens
  misc_RNA (1)...(19): siRNA sense strand
ccugauccgugacaugaug

SEQ ID NO: 1733005 - RNA, 19 nt, Homo sapiens
  misc_RNA (1)...(19): siRNA sense strand
ugacgagcaaucagaggua

SEQ ID NO: 1733006 - RNA, 19 nt, Homo sapiens
  misc_RNA (1)...(19): siRNA sense strand
acgagcacauccagaaaga

SEQ ID NO: 1733007 - RNA, 19 nt, Homo sapiens
  misc_RNA (1)...(19): siRNA sense strand
gcugcgaguugccuuagag

SEQ ID NO: 1733008 - RNA, 19 nt, Homo sapiens
  misc_RNA (1)...(19): siRNA sense strand
caccugauccgugacauga

SEQ ID NO: 1733009 - RNA, 19 nt, Homo sapiens
  misc_RNA (1)...(19): siRNA sense strand
gaugaagacacagagacaa

SEQ ID NO: 1733010 - RNA, 19 nt, Homo sapiens
  misc_RNA (1)...(19): siRNA sense strand
aagcugcuccggacacuga

SEQ ID NO: 1733011 - RNA, 19 nt, Homo sapiens
  misc_RNA (1)...(19): siRNA sense strand
ucuaccugcugcuucauga

SEQ ID NO: 1733012 - RNA, 19 nt, Homo sapiens
  misc_RNA (1)...(19): siRNA sense strand
gaggaugaagacacagaga

SEQ ID NO: 1733013 - RNA, 19 nt, Homo sapiens
  misc_RNA (1)...(19): siRNA sense strand
gcacauccagaaagaagac

SEQ ID NO: 1733014 - RNA, 19 nt, Homo sapiens
  misc_RNA (1)...(19): siRNA sense strand
gaccugcugccacuucuca

SEQ ID NO: 1733015 - RNA, 19 nt, Homo sapiens
  misc_RNA (1)...(19): siRNA sense strand
caugaggcugcaccgcuua

SEQ ID NO: 1733016 - RNA, 19 nt, Homo sapiens
  misc_RNA (1)...(19): siRNA sense strand
ccaccgagugccugcagaa

SEQ ID NO: 1733017 - RNA, 19 nt, Homo sapiens
  misc_RNA (1)...(19): siRNA sense strand
ggcacggugucgaggguau

SEQ ID NO: 1733018 - RNA, 19 nt, Homo sapiens
  misc_RNA (1)...(19): siRNA sense strand
ccaaggcccugcagcugua

SEQ ID NO: 1733019 - RNA, 19 nt, Homo sapiens
  misc_RNA (1)...(19): siRNA sense strand
ggaggaggaugaagacaca

SEQ ID NO: 1733020 - RNA, 19 nt, Homo sapiens
  misc_RNA (1)...(19): siRNA sense strand
ggacacugaugcugaccuu

SEQ ID NO: 1733021 - RNA, 19 nt, Homo sapiens
  misc_RNA (1)...(19): siRNA sense strand
gaagcagcaugcccaggaa

SEQ ID NO: 1733022 - RNA, 19 nt, Homo sapiens
  misc_RNA (1)...(19): siRNA sense strand
gagccgagauccaccugau

SEQ ID NO: 1733023 - RNA, 19 nt, Homo sapiens
  misc_RNA (1)...(19): siRNA sense strand
cugcguaggucucaggauu

SEQ ID NO: 1733024 - RNA, 19 nt, Homo sapiens
  misc_RNA (1)...(19): siRNA sense strand
uugagccucuuuccugaua

SEQ ID NO: 1733025 - RNA, 19 nt, Homo sapiens
  misc_RNA (1)...(19): siRNA sense strand
gagcacauccagaaagaag

SEQ ID NO: 1733026 - RNA, 19 nt, Homo sapiens
  misc_RNA (1)...(19): siRNA sense strand
ccgagugccugcagaagau

SEQ ID NO: 1733027 - RNA, 19 nt, Homo sapiens
  misc_RNA (1)...(19): siRNA sense strand
ggacauacggggaaauuga

SEQ ID NO: 1733028 - RNA, 19 nt, Homo sapiens
  misc_RNA (1)...(19): siRNA sense strand
gaaagcugcuccggacacu

SEQ ID NO: 1733029 - RNA, 19 nt, Homo sapiens
  misc_RNA (1)...(19): siRNA sense strand
aguacaagcugcccaugga

SEQ ID NO: 1733030 - RNA, 19 nt, Homo sapiens
  misc_RNA (1)...(19): siRNA sense strand
ggaugaagacacagagaca

SEQ ID NO: 1733031 - RNA, 19 nt, Homo sapiens
  misc_RNA (1)...(19): siRNA sense strand
guuacgagcacauccagaa

SEQ ID NO: 1733032 - RNA, 19 nt, Homo sapiens
  misc_RNA (1)...(19): siRNA sense strand
ccugauccgugacaugaug

SEQ ID NO: 1733033 - RNA, 19 nt, Homo sapiens
  misc_RNA (1)...(19): siRNA sense strand
ugacgagcaaucagaggua

SEQ ID NO: 1733034 - RNA, 19 nt, Homo sapiens
  misc_RNA (1)...(19): siRNA sense strand
acgagcacauccagaaaga

SEQ ID NO: 1733035 - RNA, 19 nt, Homo sapiens
  misc_RNA (1)...(19): siRNA sense strand
gcugcgaguugccuuagag

SEQ ID NO: 1733036 - RNA, 19 nt, Homo sapiens
  misc_RNA (1)...(19): siRNA sense strand
caccugauccgugacauga

SEQ ID NO: 1733037 - RNA, 19 nt, Homo sapiens
  misc_RNA (1)...(19): siRNA sense strand
aagcugcuccggacacuga

SEQ ID NO: 1733038 - RNA, 19 nt, Homo sapiens
  misc_RNA (1)...(19): siRNA sense strand
ucuaccugcugcuucauga

SEQ ID NO: 1733039 - RNA, 19 nt, Homo sapiens
  misc_RNA (1)...(19): siRNA sense strand
gaugaagacacagagacaa

SEQ ID NO: 1733040 - RNA, 19 nt, Homo sapiens
  misc_RNA (1)...(19): siRNA sense strand
ggacagugugggcaguaug

SEQ ID NO: 1733041 - RNA, 19 nt, Homo sapiens
  misc_RNA (1)...(19): siRNA sense strand
gcguaggucucaggauuac

SEQ ID NO: 1733042 - RNA, 19 nt, Homo sapiens
  misc_RNA (1)...(19): siRNA sense strand
gaggacagugugggcagua

SEQ ID NO: 1733043 - RNA, 19 nt, Homo sapiens
  misc_RNA (1)...(19): siRNA sense strand
gcacauccagaaagaagac

SEQ ID NO: 1733044 - RNA, 19 nt, Homo sapiens
  misc_RNA (1)...(19): siRNA sense strand
gaccugcugccacuucuca

SEQ ID NO: 1733045 - RNA, 19 nt, Homo sapiens
  misc_RNA (1)...(19): siRNA sense strand
gaggaugaagacacagaga

SEQ ID NO: 1733046 - RNA, 19 nt, Homo sapiens
  misc_RNA (1)...(19): siRNA sense strand
caugaggcugcaccgcuua

SEQ ID NO: 1733047 - RNA, 19 nt, Homo sapiens
  misc_RNA (1)...(19): siRNA sense strand
ccaccgagugccugcagaa

SEQ ID NO: 1733048 - RNA, 19 nt, Homo sapiens
  misc_RNA (1)...(19): siRNA sense strand
ggcacggugucgaggguau

SEQ ID NO: 1733049 - RNA, 19 nt, Homo sapiens
  misc_RNA (1)...(19): siRNA sense strand
ccaaggcccugcagcugua

SEQ ID NO: 1733050 - RNA, 19 nt, Homo sapiens
  misc_RNA (1)...(19): siRNA sense strand
ggaggaggaugaagacaca

SEQ ID NO: 1733051 - RNA, 19 nt, Homo sapiens
  misc_RNA (1)...(19): siRNA sense strand
ggacacugaugcugaccuu

SEQ ID NO: 1733052 - RNA, 19 nt, Homo sapiens
  misc_RNA (1)...(19): siRNA sense strand
gaagcagcaugcccaggaa

SEQ ID NO: 1733053 - RNA, 19 nt, Homo sapiens
  misc_RNA (1)...(19): siRNA sense strand
gagccgagauccaccugau

SEQ ID NO: 1733054 - RNA, 19 nt, Homo sapiens
  misc_RNA (1)...(19): siRNA sense strand
cugcguaggucucaggauu

SEQ ID NO: 1733055 - RNA, 19 nt, Homo sapiens
  misc_RNA (1)...(19): siRNA sense strand
uugagccucuuuccugaua

SEQ ID NO: 1733056 - RNA, 19 nt, Homo sapiens
  misc_RNA (1)...(19): siRNA sense strand
gagcacauccagaaagaag

SEQ ID NO: 1733057 - RNA, 19 nt, Homo sapiens
  misc_RNA (1)...(19): siRNA sense strand
ccgagugccugcagaagau

SEQ ID NO: 1733058 - RNA, 19 nt, Homo sapiens
  misc_RNA (1)...(19): siRNA sense strand
ggacauacggggaaauuga

SEQ ID NO: 1733059 - RNA, 19 nt, Homo sapiens
  misc_RNA (1)...(19): siRNA sense strand
gaaagcugcuccggacacu

SEQ ID NO: 1733060 - RNA, 19 nt, Homo sapiens
  misc_RNA (1)...(19): siRNA sense strand
aguacaagcugcccaugga

SEQ ID NO: 1733061 - RNA, 19 nt, Homo sapiens
  misc_RNA (1)...(19): siRNA sense strand
ggaugaagacacagagaca

SEQ ID NO: 1733062 - RNA, 19 nt, Homo sapiens
  misc_RNA (1)...(19): siRNA sense strand
guuacgagcacauccagaa

SEQ ID NO: 1733063 - RNA, 19 nt, Homo sapiens
  misc_RNA (1)...(19): siRNA sense strand
ccugauccgugacaugaug

SEQ ID NO: 1733064 - RNA, 19 nt, Homo sapiens
  misc_RNA (1)...(19): siRNA sense strand
ugacgagcaaucagaggua

SEQ ID NO: 1733065 - RNA, 19 nt, Homo sapiens
  misc_RNA (1)...(19): siRNA sense strand
acgagcacauccagaaaga

SEQ ID NO: 1733066 - RNA, 19 nt, Homo sapiens
  misc_RNA (1)...(19): siRNA sense strand
gcugcgaguugccuuagag

SEQ ID NO: 1733067 - RNA, 19 nt, Homo sapiens
  misc_RNA (1)...(19): siRNA sense strand
caccugauccgugacauga

SEQ ID NO: 1733068 - RNA, 19 nt, Homo sapiens
  misc_RNA (1)...(19): siRNA sense strand
aagcugcuccggacacuga

SEQ ID NO: 1733069 - RNA, 19 nt, Homo sapiens
  misc_RNA (1)...(19): siRNA sense strand
ucuaccugcugcuucauga

SEQ ID NO: 1733070 - RNA, 19 nt, Homo sapiens
  misc_RNA (1)...(19): siRNA sense strand
gaugaagacacagagacaa

SEQ ID NO: 1733071 - RNA, 19 nt, Homo sapiens
  misc_RNA (1)...(19): siRNA sense strand
ggacagugugggcaguaug

SEQ ID NO: 1733072 - RNA, 19 nt, Homo sapiens
  misc_RNA (1)...(19): siRNA sense strand
gcguaggucucaggauuac

SEQ ID NO: 1733073 - RNA, 19 nt, Homo sapiens
  misc_RNA (1)...(19): siRNA sense strand
gaggacagugugggcagua

SEQ ID NO: 1733074 - RNA, 19 nt, Homo sapiens
  misc_RNA (1)...(19): siRNA sense strand
gcacauccagaaagaagac

SEQ ID NO: 1733075 - RNA, 19 nt, Homo sapiens
  misc_RNA (1)...(19): siRNA sense strand
gaccugcugccacuucuca

SEQ ID NO: 1733076 - RNA, 19 nt, Homo sapiens
  misc_RNA (1)...(19): siRNA sense strand
gaggaugaagacacagaga

SEQ ID NO: 1733077 - RNA, 19 nt, Homo sapiens
  misc_RNA (1)...(19): siRNA sense strand
caugaggcugcaccgcuua

SEQ ID NO: 1733078 - RNA, 19 nt, Homo sapiens
  misc_RNA (1)...(19): siRNA sense strand
ccaccgagugccugcagaa

SEQ ID NO: 1733079 - RNA, 19 nt, Homo sapiens
  misc_RNA (1)...(19): siRNA sense strand
ggcacggugucgaggguau

SEQ ID NO: 1733080 - RNA, 19 nt, Homo sapiens
  misc_RNA (1)...(19): siRNA sense strand
ccaaggcccugcagcugua

SEQ ID NO: 1733081 - RNA, 19 nt, Homo sapiens
  misc_RNA (1)...(19): siRNA sense strand
ggacacugaugcugaccuu

SEQ ID NO: 1733082 - RNA, 19 nt, Homo sapiens
  misc_RNA (1)...(19): siRNA sense strand
gaagcagcaugcccaggaa

SEQ ID NO: 1733083 - RNA, 19 nt, Homo sapiens
  misc_RNA (1)...(19): siRNA sense strand
cugcguaggucucaggauu

SEQ ID NO: 1733084 - RNA, 19 nt, Homo sapiens
  misc_RNA (1)...(19): siRNA sense strand
gaaagcugcuccggacacu

SEQ ID NO: 1733085 - RNA, 19 nt, Homo sapiens
  misc_RNA (1)...(19): siRNA sense strand
ggacagugugggcaguaug

SEQ ID NO: 1733086 - RNA, 19 nt, Homo sapiens
  misc_RNA (1)...(19): siRNA sense strand
aagcugcuccggacacuga

SEQ ID NO: 1733087 - RNA, 19 nt, Homo sapiens
  misc_RNA (1)...(19): siRNA sense strand
gcguaggucucaggauuac

SEQ ID NO: 1733088 - RNA, 19 nt, Homo sapiens
  misc_RNA (1)...(19): siRNA sense strand
gaggacagugugggcagua

SEQ ID NO: 1733089 - RNA, 19 nt, Homo sapiens
  misc_RNA (1)...(19): siRNA sense strand
ccaaggcccugcagcugua

SEQ ID NO: 1733090 - RNA, 19 nt, Homo sapiens
  misc_RNA (1)...(19): siRNA sense strand
ggaggaggaugaagacaca

SEQ ID NO: 1733091 - RNA, 19 nt, Homo sapiens
  misc_RNA (1)...(19): siRNA sense strand
ggacacugaugcugaccuu

SEQ ID NO: 1733092 - RNA, 19 nt, Homo sapiens
  misc_RNA (1)...(19): siRNA sense strand
gaagcagcaugcccaggaa

SEQ ID NO: 1733093 - RNA, 19 nt, Homo sapiens
  misc_RNA (1)...(19): siRNA sense strand
gagccgagauccaccugau

SEQ ID NO: 1733094 - RNA, 19 nt, Homo sapiens
  misc_RNA (1)...(19): siRNA sense strand
uugagccucuuuccugaua

SEQ ID NO: 1733095 - RNA, 19 nt, Homo sapiens
  misc_RNA (1)...(19): siRNA sense strand
gagcacauccagaaagaag

SEQ ID NO: 1733096 - RNA, 19 nt, Homo sapiens
  misc_RNA (1)...(19): siRNA sense strand
ccgagugccugcagaagau

SEQ ID NO: 1733097 - RNA, 19 nt, Homo sapiens
  misc_RNA (1)...(19): siRNA sense strand
ggacauacggggaaauuga

SEQ ID NO: 1733098 - RNA, 19 nt, Homo sapiens
  misc_RNA (1)...(19): siRNA sense strand
gaaagcugcuccggacacu

SEQ ID NO: 1733099 - RNA, 19 nt, Homo sapiens
  misc_RNA (1)...(19): siRNA sense strand
aguacaagcugcccaugga

SEQ ID NO: 1733100 - RNA, 19 nt, Homo sapiens
  misc_RNA (1)...(19): siRNA sense strand
ggaugaagacacagagaca

SEQ ID NO: 1733101 - RNA, 19 nt, Homo sapiens
  misc_RNA (1)...(19): siRNA sense strand
guuacgagcacauccagaa

SEQ ID NO: 1733102 - RNA, 19 nt, Homo sapiens
  misc_RNA (1)...(19): siRNA sense strand
ccugauccgugacaugaug

SEQ ID NO: 1733103 - RNA, 19 nt, Homo sapiens
  misc_RNA (1)...(19): siRNA sense strand
ugacgagcaaucagaggua

SEQ ID NO: 1733104 - RNA, 19 nt, Homo sapiens
  misc_RNA (1)...(19): siRNA sense strand
acgagcacauccagaaaga

SEQ ID NO: 1733105 - RNA, 19 nt, Homo sapiens
  misc_RNA (1)...(19): siRNA sense strand
gcugcgaguugccuuagag

SEQ ID NO: 1733106 - RNA, 19 nt, Homo sapiens
  misc_RNA (1)...(19): siRNA sense strand
caccugauccgugacauga

SEQ ID NO: 1733107 - RNA, 19 nt, Homo sapiens
  misc_RNA (1)...(19): siRNA sense strand
gaugaagacacagagacaa

SEQ ID NO: 1733108 - RNA, 19 nt, Homo sapiens
  misc_RNA (1)...(19): siRNA sense strand
aagcugcuccggacacuga

SEQ ID NO: 1733109 - RNA, 19 nt, Homo sapiens
  misc_RNA (1)...(19): siRNA sense strand
ucuaccugcugcuucauga

SEQ ID NO: 1733110 - RNA, 19 nt, Homo sapiens
  misc_RNA (1)...(19): siRNA sense strand
gaggaugaagacacagaga

SEQ ID NO: 1733111 - RNA, 19 nt, Homo sapiens
  misc_RNA (1)...(19): siRNA sense strand
gcacauccagaaagaagac

SEQ ID NO: 1733112 - RNA, 19 nt, Homo sapiens
  misc_RNA (1)...(19): siRNA sense strand
gaccugcugccacuucuca

SEQ ID NO: 1733113 - RNA, 19 nt, Homo sapiens
  misc_RNA (1)...(19): siRNA sense strand
caugaggcugcaccgcuua

SEQ ID NO: 1733114 - RNA, 19 nt, Homo sapiens
  misc_RNA (1)...(19): siRNA sense strand
ccaccgagugccugcagaa

SEQ ID NO: 1733115 - RNA, 19 nt, Homo sapiens
  misc_RNA (1)...(19): siRNA sense strand
ggcacggugucgaggguau

SEQ ID NO: 1733116 - RNA, 19 nt, Homo sapiens
  misc_RNA (1)...(19): siRNA sense strand
ccaaggcccugcagcugua

SEQ ID NO: 1733117 - RNA, 19 nt, Homo sapiens
  misc_RNA (1)...(19): siRNA sense strand
ggaggaggaugaagacaca

SEQ ID NO: 1733118 - RNA, 19 nt, Homo sapiens
  misc_RNA (1)...(19): siRNA sense strand
ggacacugaugcugaccuu

SEQ ID NO: 1733119 - RNA, 19 nt, Homo sapiens
  misc_RNA (1)...(19): siRNA sense strand
gaagcagcaugcccaggaa

SEQ ID NO: 1733120 - RNA, 19 nt, Homo sapiens
  misc_RNA (1)...(19): siRNA sense strand
gagccgagauccaccugau

SEQ ID NO: 1733121 - RNA, 19 nt, Homo sapiens
  misc_RNA (1)...(19): siRNA sense strand
cugcguaggucucaggauu

SEQ ID NO: 1733122 - RNA, 19 nt, Homo sapiens
  misc_RNA (1)...(19): siRNA sense strand
uugagccucuuuccugaua

SEQ ID NO: 1733123 - RNA, 19 nt, Homo sapiens
  misc_RNA (1)...(19): siRNA sense strand
gagcacauccagaaagaag

SEQ ID NO: 1733124 - RNA, 19 nt, Homo sapiens
  misc_RNA (1)...(19): siRNA sense strand
ccgagugccugcagaagau

SEQ ID NO: 1733125 - RNA, 19 nt, Homo sapiens
  misc_RNA (1)...(19): siRNA sense strand
ggacauacggggaaauuga

SEQ ID NO: 1733126 - RNA, 19 nt, Homo sapiens
  misc_RNA (1)...(19): siRNA sense strand
gaaagcugcuccggacacu

SEQ ID NO: 1733127 - RNA, 19 nt, Homo sapiens
  misc_RNA (1)...(19): siRNA sense strand
aguacaagcugcccaugga

SEQ ID NO: 1733128 - RNA, 19 nt, Homo sapiens
  misc_RNA (1)...(19): siRNA sense strand
ggaugaagacacagagaca

SEQ ID NO: 1733129 - RNA, 19 nt, Homo sapiens
  misc_RNA (1)...(19): siRNA sense strand
guuacgagcacauccagaa

SEQ ID NO: 1733130 - RNA, 19 nt, Homo sapiens
  misc_RNA (1)...(19): siRNA sense strand
ccugauccgugacaugaug

SEQ ID NO: 1733131 - RNA, 19 nt, Homo sapiens
  misc_RNA (1)...(19): siRNA sense strand
ugacgagcaaucagaggua

SEQ ID NO: 1733132 - RNA, 19 nt, Homo sapiens
  misc_RNA (1)...(19): siRNA sense strand
acgagcacauccagaaaga

SEQ ID NO: 1733133 - RNA, 19 nt, Homo sapiens
  misc_RNA (1)...(19): siRNA sense strand
gcugcgaguugccuuagag

SEQ ID NO: 1733134 - RNA, 19 nt, Homo sapiens
  misc_RNA (1)...(19): siRNA sense strand
caccugauccgugacauga

SEQ ID NO: 1733135 - RNA, 19 nt, Homo sapiens
  misc_RNA (1)...(19): siRNA sense strand
aagcugcuccggacacuga

SEQ ID NO: 1733136 - RNA, 19 nt, Homo sapiens
  misc_RNA (1)...(19): siRNA sense strand
ucuaccugcugcuucauga

SEQ ID NO: 1733137 - RNA, 19 nt, Homo sapiens
  misc_RNA (1)...(19): siRNA sense strand
gaugaagacacagagacaa

SEQ ID NO: 1733138 - RNA, 19 nt, Homo sapiens
  misc_RNA (1)...(19): siRNA sense strand
ggacagugugggcaguaug

SEQ ID NO: 1733139 - RNA, 19 nt, Homo sapiens
  misc_RNA (1)...(19): siRNA sense strand
gcguaggucucaggauuac

SEQ ID NO: 1733140 - RNA, 19 nt, Homo sapiens
  misc_RNA (1)...(19): siRNA sense strand
gaggacagugugggcagua

SEQ ID NO: 1733141 - RNA, 19 nt, Homo sapiens
  misc_RNA (1)...(19): siRNA sense strand
gcacauccagaaagaagac

SEQ ID NO: 1733142 - RNA, 19 nt, Homo sapiens
  misc_RNA (1)...(19): siRNA sense strand
gaccugcugccacuucuca

SEQ ID NO: 1733143 - RNA, 19 nt, Homo sapiens
  misc_RNA (1)...(19): siRNA sense strand
gaggaugaagacacagaga

SEQ ID NO: 1733144 - RNA, 19 nt, Homo sapiens
  misc_RNA (1)...(19): siRNA sense strand
caugaggcugcaccgcuua

SEQ ID NO: 1733145 - RNA, 19 nt, Homo sapiens
  misc_RNA (1)...(19): siRNA sense strand
ccaccgagugccugcagaa

SEQ ID NO: 1733146 - RNA, 19 nt, Homo sapiens
  misc_RNA (1)...(19): siRNA sense strand
ggcacggugucgaggguau

SEQ ID NO: 1733147 - RNA, 19 nt, Homo sapiens
  misc_RNA (1)...(19): siRNA sense strand
gaaacuuccuguacauaaa

SEQ ID NO: 1733148 - RNA, 19 nt, Homo sapiens
  misc_RNA (1)...(19): siRNA sense strand
gacagaaucuucagacuau

SEQ ID NO: 1733149 - RNA, 19 nt, Homo sapiens
  misc_RNA (1)...(19): siRNA sense strand
gaaacagacuucguaaaga

SEQ ID NO: 1733150 - RNA, 19 nt, Homo sapiens
  misc_RNA (1)...(19): siRNA sense strand
gaaaggagaugaguaugau

SEQ ID NO: 1733151 - RNA, 19 nt, Homo sapiens
  misc_RNA (1)...(19): siRNA sense strand
guaugaagauggagacaaa

SEQ ID NO: 1733152 - RNA, 19 nt, Homo sapiens
  misc_RNA (1)...(19): siRNA sense strand
cuaauucucugaaagauga

SEQ ID NO: 1733153 - RNA, 19 nt, Homo sapiens
  misc_RNA (1)...(19): siRNA sense strand
ugaacgggauuacaacaua

SEQ ID NO: 1733154 - RNA, 19 nt, Homo sapiens
  misc_RNA (1)...(19): siRNA sense strand
gaacauaccccuuuacuga

SEQ ID NO: 1733155 - RNA, 19 nt, Homo sapiens
  misc_RNA (1)...(19): siRNA sense strand
gaacaugacagaaucuuca

SEQ ID NO: 1733156 - RNA, 19 nt, Homo sapiens
  misc_RNA (1)...(19): siRNA sense strand
cuaauucccuuccuuauca

SEQ ID NO: 1733157 - RNA, 19 nt, Homo sapiens
  misc_RNA (1)...(19): siRNA sense strand
cauagugccuccaccagua

SEQ ID NO: 1733158 - RNA, 19 nt, Homo sapiens
  misc_RNA (1)...(19): siRNA sense strand
aaacagacuucguaaagau

SEQ ID NO: 1733159 - RNA, 19 nt, Homo sapiens
  misc_RNA (1)...(19): siRNA sense strand
gggcaucugucucaucuug

SEQ ID NO: 1733160 - RNA, 19 nt, Homo sapiens
  misc_RNA (1)...(19): siRNA sense strand
caagaaaggagaugaguau

SEQ ID NO: 1733161 - RNA, 19 nt, Homo sapiens
  misc_RNA (1)...(19): siRNA sense strand
gaaugccugugaacccaua

SEQ ID NO: 1733162 - RNA, 19 nt, Homo sapiens
  misc_RNA (1)...(19): siRNA sense strand
gcacuuucaucguguuaau

SEQ ID NO: 1733163 - RNA, 19 nt, Homo sapiens
  misc_RNA (1)...(19): siRNA sense strand
gaacgggauuacaacauag

SEQ ID NO: 1733164 - RNA, 19 nt, Homo sapiens
  misc_RNA (1)...(19): siRNA sense strand
gaaucccgcucacaucaga

SEQ ID NO: 1733165 - RNA, 19 nt, Homo sapiens
  misc_RNA (1)...(19): siRNA sense strand
ggauagacauagagcuaga

SEQ ID NO: 1733166 - RNA, 19 nt, Homo sapiens
  misc_RNA (1)...(19): siRNA sense strand
agacauagagcuagaagaa

SEQ ID NO: 1733167 - RNA, 19 nt, Homo sapiens
  misc_RNA (1)...(19): siRNA sense strand
ggagaugaguaugauguau

SEQ ID NO: 1733168 - RNA, 19 nt, Homo sapiens
  misc_RNA (1)...(19): siRNA sense strand
uaagaaacuuccuguacau

SEQ ID NO: 1733169 - RNA, 19 nt, Homo sapiens
  misc_RNA (1)...(19): siRNA sense strand
caauucaucuggcacuuuc

SEQ ID NO: 1733170 - RNA, 19 nt, Homo sapiens
  misc_RNA (1)...(19): siRNA sense strand
uuaagaaacuuccuguaca

SEQ ID NO: 1733171 - RNA, 19 nt, Homo sapiens
  misc_RNA (1)...(19): siRNA sense strand
agacaguagucaagaagaa

SEQ ID NO: 1733172 - RNA, 19 nt, Homo sapiens
  misc_RNA (1)...(19): siRNA sense strand
guagacccuuggcuaacua

SEQ ID NO: 1733173 - RNA, 19 nt, Homo sapiens
  misc_RNA (1)...(19): siRNA sense strand
gaagacgacaaugaagaua

SEQ ID NO: 1733174 - RNA, 19 nt, Homo sapiens
  misc_RNA (1)...(19): siRNA sense strand
ggaugaguaugaagaugga

SEQ ID NO: 1733175 - RNA, 19 nt, Homo sapiens
  misc_RNA (1)...(19): siRNA sense strand
ggaagacgacaaugaagau

SEQ ID NO: 1733176 - RNA, 19 nt, Homo sapiens
  misc_RNA (1)...(19): siRNA sense strand
aaauugacauuccaucugu

SEQ ID NO: 1733177 - RNA, 19 nt, Homo sapiens
  misc_RNA (1)...(19): siRNA sense strand
ugacaguagugaugcagaa

SEQ ID NO: 1733178 - RNA, 19 nt, Homo sapiens
  misc_RNA (1)...(19): siRNA sense strand
ugacagaaucuucagacua

SEQ ID NO: 1733179 - RNA, 19 nt, Homo sapiens
  misc_RNA (1)...(19): siRNA sense strand
caucagaacaugacagaau

SEQ ID NO: 1733180 - RNA, 19 nt, Homo sapiens
  misc_RNA (1)...(19): siRNA sense strand
gaauuuagucuuccuuugg

SEQ ID NO: 1733181 - RNA, 19 nt, Homo sapiens
  misc_RNA (1)...(19): siRNA sense strand
ugucucaucuugauaguca

SEQ ID NO: 1733182 - RNA, 19 nt, Homo sapiens
  misc_RNA (1)...(19): siRNA sense strand
uaugauguaugugccauuu

SEQ ID NO: 1733183 - RNA, 19 nt, Homo sapiens
  misc_RNA (1)...(19): siRNA sense strand
gcaucugucucaucuugau

SEQ ID NO: 1733184 - RNA, 19 nt, Homo sapiens
  misc_RNA (1)...(19): siRNA sense strand
ucaaggcgauucagacucu

SEQ ID NO: 1733185 - RNA, 19 nt, Homo sapiens
  misc_RNA (1)...(19): siRNA sense strand
ccauuuguuuggaugagua

SEQ ID NO: 1733186 - RNA, 19 nt, Homo sapiens
  misc_RNA (1)...(19): siRNA sense strand
gcacagagagcaggauaca

SEQ ID NO: 1733187 - RNA, 19 nt, Homo sapiens
  misc_RNA (1)...(19): siRNA sense strand
ggugaaucaucagcuaauu

SEQ ID NO: 1733188 - RNA, 19 nt, Homo sapiens
  misc_RNA (1)...(19): siRNA sense strand
agaaacuuccuguacauaa

SEQ ID NO: 1733189 - RNA, 19 nt, Homo sapiens
  misc_RNA (1)...(19): siRNA sense strand
ugaggaagacgacaaugaa

SEQ ID NO: 1733190 - RNA, 19 nt, Homo sapiens
  misc_RNA (1)...(19): siRNA sense strand
cauuccaucugucuuuauu

SEQ ID NO: 1733191 - RNA, 19 nt, Homo sapiens
  misc_RNA (1)...(19): siRNA sense strand
ugauguaugugccauuugu

SEQ ID NO: 1733192 - RNA, 19 nt, Homo sapiens
  misc_RNA (1)...(19): siRNA sense strand
agaaaggagaugaguauga

SEQ ID NO: 1733193 - RNA, 19 nt, Homo sapiens
  misc_RNA (1)...(19): siRNA sense strand
agaaacagacuucguaaag

SEQ ID NO: 1733194 - RNA, 19 nt, Homo sapiens
  misc_RNA (1)...(19): siRNA sense strand
caggauagacauagagcua

SEQ ID NO: 1733195 - RNA, 19 nt, Homo sapiens
  misc_RNA (1)...(19): siRNA sense strand
acauagagcuagaagaaac

SEQ ID NO: 1733196 - RNA, 19 nt, Homo sapiens
  misc_RNA (1)...(19): siRNA sense strand
gggauuacaacauagcaaa

SEQ ID NO: 1733197 - RNA, 19 nt, Homo sapiens
  misc_RNA (1)...(19): siRNA sense strand
gagaugaguaugauguaug

SEQ ID NO: 1733198 - RNA, 19 nt, Homo sapiens
  misc_RNA (1)...(19): siRNA sense strand
auacaaggcagccauaguu

SEQ ID NO: 1733199 - RNA, 19 nt, Homo sapiens
  misc_RNA (1)...(19): siRNA sense strand
gacagaacauaccccuuua

SEQ ID NO: 1733200 - RNA, 19 nt, Homo sapiens
  misc_RNA (1)...(19): siRNA sense strand
cagcuaauucucugaaaga

SEQ ID NO: 1733201 - RNA, 19 nt, Homo sapiens
  misc_RNA (1)...(19): siRNA sense strand
agaauuuagucuuccuuug

SEQ ID NO: 1733202 - RNA, 19 nt, Homo sapiens
  misc_RNA (1)...(19): siRNA sense strand
ucaagaaaggagaugagua

SEQ ID NO: 1733203 - RNA, 19 nt, Homo sapiens
  misc_RNA (1)...(19): siRNA sense strand
agccauaguucacaauguu

SEQ ID NO: 1733204 - RNA, 19 nt, Homo sapiens
  misc_RNA (1)...(19): siRNA sense strand
ucguaaagaucaacuuaag

SEQ ID NO: 1733205 - RNA, 19 nt, Homo sapiens
  misc_RNA (1)...(19): siRNA sense strand
guuccagaauuuagucuuc

SEQ ID NO: 1733206 - RNA, 19 nt, Homo sapiens
  misc_RNA (1)...(19): siRNA sense strand
ucacaauguugauucugau

SEQ ID NO: 1733207 - RNA, 19 nt, Homo sapiens
  misc_RNA (1)...(19): siRNA sense strand
uuacugagaccuuuagcuu

SEQ ID NO: 1733208 - RNA, 19 nt, Homo sapiens
  misc_RNA (1)...(19): siRNA sense strand
agaugaguaugauguaugu

SEQ ID NO: 1733209 - RNA, 19 nt, Homo sapiens
  misc_RNA (1)...(19): siRNA sense strand
cacagacaguagucaagaa

SEQ ID NO: 1733210 - RNA, 19 nt, Homo sapiens
  misc_RNA (1)...(19): siRNA sense strand
cagaaucuucagacuauga

SEQ ID NO: 1733211 - RNA, 19 nt, Homo sapiens
  misc_RNA (1)...(19): siRNA sense strand
acagagagcaggauacaag

SEQ ID NO: 1733212 - RNA, 19 nt, Homo sapiens
  misc_RNA (1)...(19): siRNA sense strand
uaccuaauucccuuccuua

SEQ ID NO: 1733213 - RNA, 19 nt, Homo sapiens
  misc_RNA (1)...(19): siRNA sense strand
cuucguaaagaucaacuua

SEQ ID NO: 1733214 - RNA, 19 nt, Homo sapiens
  misc_RNA (1)...(19): siRNA sense strand
cuaccuaauucccuuccuu

SEQ ID NO: 1733215 - RNA, 19 nt, Homo sapiens
  misc_RNA (1)...(19): siRNA sense strand
aaaaugaagugacagaaca

SEQ ID NO: 1733216 - RNA, 19 nt, Homo sapiens
  misc_RNA (1)...(19): siRNA sense strand
cagaauuuagucuuccuuu

SEQ ID NO: 1733217 - RNA, 19 nt, Homo sapiens
  misc_RNA (1)...(19): siRNA sense strand
gacaguagucaagaagaaa

SEQ ID NO: 1733218 - RNA, 19 nt, Homo sapiens
  misc_RNA (1)...(19): siRNA sense strand
gaucaacuuaagaaacuuc

SEQ ID NO: 1733219 - RNA, 19 nt, Homo sapiens
  misc_RNA (1)...(19): siRNA sense strand
gacauagagcuagaagaaa

SEQ ID NO: 1733220 - RNA, 19 nt, Homo sapiens
  misc_RNA (1)...(19): siRNA sense strand
aaccagagaaugccuguga

SEQ ID NO: 1733221 - RNA, 19 nt, Homo sapiens
  misc_RNA (1)...(19): siRNA sense strand
acugagaccuuuagcuucu

SEQ ID NO: 1733222 - RNA, 19 nt, Homo sapiens
  misc_RNA (1)...(19): siRNA sense strand
ugacagaacauaccccuuu

SEQ ID NO: 1733223 - RNA, 19 nt, Homo sapiens
  misc_RNA (1)...(19): siRNA sense strand
cagccauaguucacaaugu

SEQ ID NO: 1733224 - RNA, 19 nt, Homo sapiens
  misc_RNA (1)...(19): siRNA sense strand
gugggcaucugucucaucu

SEQ ID NO: 1733225 - RNA, 19 nt, Homo sapiens
  misc_RNA (1)...(19): siRNA sense strand
uaucauagugggcaucugu

SEQ ID NO: 1733226 - RNA, 19 nt, Homo sapiens
  misc_RNA (1)...(19): siRNA sense strand
gauacaaggcagccauagu

SEQ ID NO: 1733227 - RNA, 19 nt, Homo sapiens
  misc_RNA (1)...(19): siRNA sense strand
gggccaccuuaucuuaguu

SEQ ID NO: 1733228 - RNA, 19 nt, Homo sapiens
  misc_RNA (1)...(19): siRNA sense strand
aauuuagucuuccuuugga

SEQ ID NO: 1733229 - RNA, 19 nt, Homo sapiens
  misc_RNA (1)...(19): siRNA sense strand
ggauuacaacauagcaaau

SEQ ID NO: 1733230 - RNA, 19 nt, Homo sapiens
  misc_RNA (1)...(19): siRNA sense strand
agacgacaaugaagauacu

SEQ ID NO: 1733231 - RNA, 19 nt, Homo sapiens
  misc_RNA (1)...(19): siRNA sense strand
gacaauucaucuggcacuu

SEQ ID NO: 1733232 - RNA, 19 nt, Homo sapiens
  misc_RNA (1)...(19): siRNA sense strand
gcuaauucucugaaagaug

SEQ ID NO: 1733233 - RNA, 19 nt, Homo sapiens
  misc_RNA (1)...(19): siRNA sense strand
ugucagugcccagucauuu

SEQ ID NO: 1733234 - RNA, 19 nt, Homo sapiens
  misc_RNA (1)...(19): siRNA sense strand
uucacaauguugauucuga

SEQ ID NO: 1733235 - RNA, 19 nt, Homo sapiens
  misc_RNA (1)...(19): siRNA sense strand
gcagccauaguucacaaug

SEQ ID NO: 1733236 - RNA, 19 nt, Homo sapiens
  misc_RNA (1)...(19): siRNA sense strand
caauguugauucugaugac

SEQ ID NO: 1733237 - RNA, 19 nt, Homo sapiens
  misc_RNA (1)...(19): siRNA sense strand
gaggaagacgacaaugaag

SEQ ID NO: 1733238 - RNA, 19 nt, Homo sapiens
  misc_RNA (1)...(19): siRNA sense strand
aagaaacuuccuguacaua

SEQ ID NO: 1733239 - RNA, 19 nt, Homo sapiens
  misc_RNA (1)...(19): siRNA sense strand
ccuuuggaauacuaccuaa

SEQ ID NO: 1733240 - RNA, 19 nt, Homo sapiens
  misc_RNA (1)...(19): siRNA sense strand
agaagaaaaugaagugaca

SEQ ID NO: 1733241 - RNA, 19 nt, Homo sapiens
  misc_RNA (1)...(19): siRNA sense strand
ccauaguucacaauguuga

SEQ ID NO: 1733242 - RNA, 19 nt, Homo sapiens
  misc_RNA (1)...(19): siRNA sense strand
acacagacaguagucaaga

SEQ ID NO: 1733243 - RNA, 19 nt, Homo sapiens
  misc_RNA (1)...(19): siRNA sense strand
cguaaagaucaacuuaaga

SEQ ID NO: 1733244 - RNA, 19 nt, Homo sapiens
  misc_RNA (1)...(19): siRNA sense strand
ugucuuuauuggugaauca

SEQ ID NO: 1733245 - RNA, 19 nt, Homo sapiens
  misc_RNA (1)...(19): siRNA sense strand
cggaaucccgcucacauca

SEQ ID NO: 1733246 - RNA, 19 nt, Homo sapiens
  misc_RNA (1)...(19): siRNA sense strand
guagugaugcagaaaauga

SEQ ID NO: 1733247 - RNA, 19 nt, Homo sapiens
  misc_RNA (1)...(19): siRNA sense strand
gaaacuuccuguacauaaa

SEQ ID NO: 1733248 - RNA, 19 nt, Homo sapiens
  misc_RNA (1)...(19): siRNA sense strand
gacagaaucuucagacuau

SEQ ID NO: 1733249 - RNA, 19 nt, Homo sapiens
  misc_RNA (1)...(19): siRNA sense strand
gaaacagacuucguaaaga

SEQ ID NO: 1733250 - RNA, 19 nt, Homo sapiens
  misc_RNA (1)...(19): siRNA sense strand
gaaaggagaugaguaugau

SEQ ID NO: 1733251 - RNA, 19 nt, Homo sapiens
  misc_RNA (1)...(19): siRNA sense strand
guaugaagauggagacaaa

SEQ ID NO: 1733252 - RNA, 19 nt, Homo sapiens
  misc_RNA (1)...(19): siRNA sense strand
cuaauucucugaaagauga

SEQ ID NO: 1733253 - RNA, 19 nt, Homo sapiens
  misc_RNA (1)...(19): siRNA sense strand
ugaacgggauuacaacaua

SEQ ID NO: 1733254 - RNA, 19 nt, Homo sapiens
  misc_RNA (1)...(19): siRNA sense strand
gaacauaccccuuuacuga

SEQ ID NO: 1733255 - RNA, 19 nt, Homo sapiens
  misc_RNA (1)...(19): siRNA sense strand
gaacaugacagaaucuuca

SEQ ID NO: 1733256 - RNA, 19 nt, Homo sapiens
  misc_RNA (1)...(19): siRNA sense strand
cuaauucccuuccuuauca

SEQ ID NO: 1733257 - RNA, 19 nt, Homo sapiens
  misc_RNA (1)...(19): siRNA sense strand
cauagugccuccaccagua

SEQ ID NO: 1733258 - RNA, 19 nt, Homo sapiens
  misc_RNA (1)...(19): siRNA sense strand
aaacagacuucguaaagau

SEQ ID NO: 1733259 - RNA, 19 nt, Homo sapiens
  misc_RNA (1)...(19): siRNA sense strand
gggcaucugucucaucuug

SEQ ID NO: 1733260 - RNA, 19 nt, Homo sapiens
  misc_RNA (1)...(19): siRNA sense strand
caagaaaggagaugaguau

SEQ ID NO: 1733261 - RNA, 19 nt, Homo sapiens
  misc_RNA (1)...(19): siRNA sense strand
gaaugccugugaacccaua

SEQ ID NO: 1733262 - RNA, 19 nt, Homo sapiens
  misc_RNA (1)...(19): siRNA sense strand
gcacuuucaucguguuaau

SEQ ID NO: 1733263 - RNA, 19 nt, Homo sapiens
  misc_RNA (1)...(19): siRNA sense strand
gaacgggauuacaacauag

SEQ ID NO: 1733264 - RNA, 19 nt, Homo sapiens
  misc_RNA (1)...(19): siRNA sense strand
gaaucccgcucacaucaga

SEQ ID NO: 1733265 - RNA, 19 nt, Homo sapiens
  misc_RNA (1)...(19): siRNA sense strand
ggauagacauagagcuaga

SEQ ID NO: 1733266 - RNA, 19 nt, Homo sapiens
  misc_RNA (1)...(19): siRNA sense strand
agacauagagcuagaagaa

SEQ ID NO: 1733267 - RNA, 19 nt, Homo sapiens
  misc_RNA (1)...(19): siRNA sense strand
ggagaugaguaugauguau

SEQ ID NO: 1733268 - RNA, 19 nt, Homo sapiens
  misc_RNA (1)...(19): siRNA sense strand
uaagaaacuuccuguacau

SEQ ID NO: 1733269 - RNA, 19 nt, Homo sapiens
  misc_RNA (1)...(19): siRNA sense strand
caauucaucuggcacuuuc

SEQ ID NO: 1733270 - RNA, 19 nt, Homo sapiens
  misc_RNA (1)...(19): siRNA sense strand
uuaagaaacuuccuguaca

SEQ ID NO: 1733271 - RNA, 19 nt, Homo sapiens
  misc_RNA (1)...(19): siRNA sense strand
agacaguagucaagaagaa

SEQ ID NO: 1733272 - RNA, 19 nt, Homo sapiens
  misc_RNA (1)...(19): siRNA sense strand
guagacccuuggcuaacua

SEQ ID NO: 1733273 - RNA, 19 nt, Homo sapiens
  misc_RNA (1)...(19): siRNA sense strand
gaagacgacaaugaagaua

SEQ ID NO: 1733274 - RNA, 19 nt, Homo sapiens
  misc_RNA (1)...(19): siRNA sense strand
ggaugaguaugaagaugga

SEQ ID NO: 1733275 - RNA, 19 nt, Homo sapiens
  misc_RNA (1)...(19): siRNA sense strand
ggaagacgacaaugaagau

SEQ ID NO: 1733276 - RNA, 19 nt, Homo sapiens
  misc_RNA (1)...(19): siRNA sense strand
aaauugacauuccaucugu

SEQ ID NO: 1733277 - RNA, 19 nt, Homo sapiens
  misc_RNA (1)...(19): siRNA sense strand
ugacaguagugaugcagaa

SEQ ID NO: 1733278 - RNA, 19 nt, Homo sapiens
  misc_RNA (1)...(19): siRNA sense strand
ugacagaaucuucagacua

SEQ ID NO: 1733279 - RNA, 19 nt, Homo sapiens
  misc_RNA (1)...(19): siRNA sense strand
caucagaacaugacagaau

SEQ ID NO: 1733280 - RNA, 19 nt, Homo sapiens
  misc_RNA (1)...(19): siRNA sense strand
gaauuuagucuuccuuugg

SEQ ID NO: 1733281 - RNA, 19 nt, Homo sapiens
  misc_RNA (1)...(19): siRNA sense strand
ugucucaucuugauaguca

SEQ ID NO: 1733282 - RNA, 19 nt, Homo sapiens
  misc_RNA (1)...(19): siRNA sense strand
uaugauguaugugccauuu

SEQ ID NO: 1733283 - RNA, 19 nt, Homo sapiens
  misc_RNA (1)...(19): siRNA sense strand
gcaucugucucaucuugau

SEQ ID NO: 1733284 - RNA, 19 nt, Homo sapiens
  misc_RNA (1)...(19): siRNA sense strand
ucaaggcgauucagacucu

SEQ ID NO: 1733285 - RNA, 19 nt, Homo sapiens
  misc_RNA (1)...(19): siRNA sense strand
ccauuuguuuggaugagua

SEQ ID NO: 1733286 - RNA, 19 nt, Homo sapiens
  misc_RNA (1)...(19): siRNA sense strand
gcacagagagcaggauaca

SEQ ID NO: 1733287 - RNA, 19 nt, Homo sapiens
  misc_RNA (1)...(19): siRNA sense strand
ggugaaucaucagcuaauu

SEQ ID NO: 1733288 - RNA, 19 nt, Homo sapiens
  misc_RNA (1)...(19): siRNA sense strand
agaaacuuccuguacauaa

SEQ ID NO: 1733289 - RNA, 19 nt, Homo sapiens
  misc_RNA (1)...(19): siRNA sense strand
ugaggaagacgacaaugaa

SEQ ID NO: 1733290 - RNA, 19 nt, Homo sapiens
  misc_RNA (1)...(19): siRNA sense strand
cauuccaucugucuuuauu

SEQ ID NO: 1733291 - RNA, 19 nt, Homo sapiens
  misc_RNA (1)...(19): siRNA sense strand
ugauguaugugccauuugu

SEQ ID NO: 1733292 - RNA, 19 nt, Homo sapiens
  misc_RNA (1)...(19): siRNA sense strand
agaaaggagaugaguauga

SEQ ID NO: 1733293 - RNA, 19 nt, Homo sapiens
  misc_RNA (1)...(19): siRNA sense strand
agaaacagacuucguaaag

SEQ ID NO: 1733294 - RNA, 19 nt, Homo sapiens
  misc_RNA (1)...(19): siRNA sense strand
caggauagacauagagcua

SEQ ID NO: 1733295 - RNA, 19 nt, Homo sapiens
  misc_RNA (1)...(19): siRNA sense strand
acauagagcuagaagaaac

SEQ ID NO: 1733296 - RNA, 19 nt, Homo sapiens
  misc_RNA (1)...(19): siRNA sense strand
gggauuacaacauagcaaa

SEQ ID NO: 1733297 - RNA, 19 nt, Homo sapiens
  misc_RNA (1)...(19): siRNA sense strand
gagaugaguaugauguaug

SEQ ID NO: 1733298 - RNA, 19 nt, Homo sapiens
  misc_RNA (1)...(19): siRNA sense strand
auacaaggcagccauaguu

SEQ ID NO: 1733299 - RNA, 19 nt, Homo sapiens
  misc_RNA (1)...(19): siRNA sense strand
gacagaacauaccccuuua

SEQ ID NO: 1733300 - RNA, 19 nt, Homo sapiens
  misc_RNA (1)...(19): siRNA sense strand
cagcuaauucucugaaaga

SEQ ID NO: 1733301 - RNA, 19 nt, Homo sapiens
  misc_RNA (1)...(19): siRNA sense strand
agaauuuagucuuccuuug

SEQ ID NO: 1733302 - RNA, 19 nt, Homo sapiens
  misc_RNA (1)...(19): siRNA sense strand
ucaagaaaggagaugagua

SEQ ID NO: 1733303 - RNA, 19 nt, Homo sapiens
  misc_RNA (1)...(19): siRNA sense strand
agccauaguucacaauguu

SEQ ID NO: 1733304 - RNA, 19 nt, Homo sapiens
  misc_RNA (1)...(19): siRNA sense strand
ucguaaagaucaacuuaag

SEQ ID NO: 1733305 - RNA, 19 nt, Homo sapiens
  misc_RNA (1)...(19): siRNA sense strand
guuccagaauuuagucuuc

SEQ ID NO: 1733306 - RNA, 19 nt, Homo sapiens
  misc_RNA (1)...(19): siRNA sense strand
ucacaauguugauucugau

SEQ ID NO: 1733307 - RNA, 19 nt, Homo sapiens
  misc_RNA (1)...(19): siRNA sense strand
uuacugagaccuuuagcuu

SEQ ID NO: 1733308 - RNA, 19 nt, Homo sapiens
  misc_RNA (1)...(19): siRNA sense strand
agaugaguaugauguaugu

SEQ ID NO: 1733309 - RNA, 19 nt, Homo sapiens
  misc_RNA (1)...(19): siRNA sense strand
cacagacaguagucaagaa

SEQ ID NO: 1733310 - RNA, 19 nt, Homo sapiens
  misc_RNA (1)...(19): siRNA sense strand
cagaaucuucagacuauga

SEQ ID NO: 1733311 - RNA, 19 nt, Homo sapiens
  misc_RNA (1)...(19): siRNA sense strand
acagagagcaggauacaag

SEQ ID NO: 1733312 - RNA, 19 nt, Homo sapiens
  misc_RNA (1)...(19): siRNA sense strand
uaccuaauucccuuccuua

SEQ ID NO: 1733313 - RNA, 19 nt, Homo sapiens
  misc_RNA (1)...(19): siRNA sense strand
cuucguaaagaucaacuua

SEQ ID NO: 1733314 - RNA, 19 nt, Homo sapiens
  misc_RNA (1)...(19): siRNA sense strand
cuaccuaauucccuuccuu

SEQ ID NO: 1733315 - RNA, 19 nt, Homo sapiens
  misc_RNA (1)...(19): siRNA sense strand
aaaaugaagugacagaaca

SEQ ID NO: 1733316 - RNA, 19 nt, Homo sapiens
  misc_RNA (1)...(19): siRNA sense strand
cagaauuuagucuuccuuu

SEQ ID NO: 1733317 - RNA, 19 nt, Homo sapiens
  misc_RNA (1)...(19): siRNA sense strand
gacaguagucaagaagaaa

SEQ ID NO: 1733318 - RNA, 19 nt, Homo sapiens
  misc_RNA (1)...(19): siRNA sense strand
gaucaacuuaagaaacuuc

SEQ ID NO: 1733319 - RNA, 19 nt, Homo sapiens
  misc_RNA (1)...(19): siRNA sense strand
gacauagagcuagaagaaa

SEQ ID NO: 1733320 - RNA, 19 nt, Homo sapiens
  misc_RNA (1)...(19): siRNA sense strand
aaccagagaaugccuguga

SEQ ID NO: 1733321 - RNA, 19 nt, Homo sapiens
  misc_RNA (1)...(19): siRNA sense strand
acugagaccuuuagcuucu

SEQ ID NO: 1733322 - RNA, 19 nt, Homo sapiens
  misc_RNA (1)...(19): siRNA sense strand
ugacagaacauaccccuuu

SEQ ID NO: 1733323 - RNA, 19 nt, Homo sapiens
  misc_RNA (1)...(19): siRNA sense strand
cagccauaguucacaaugu

SEQ ID NO: 1733324 - RNA, 19 nt, Homo sapiens
  misc_RNA (1)...(19): siRNA sense strand
gugggcaucugucucaucu

SEQ ID NO: 1733325 - RNA, 19 nt, Homo sapiens
  misc_RNA (1)...(19): siRNA sense strand
uaucauagugggcaucugu

SEQ ID NO: 1733326 - RNA, 19 nt, Homo sapiens
  misc_RNA (1)...(19): siRNA sense strand
gauacaaggcagccauagu

SEQ ID NO: 1733327 - RNA, 19 nt, Homo sapiens
  misc_RNA (1)...(19): siRNA sense strand
gggccaccuuaucuuaguu

SEQ ID NO: 1733328 - RNA, 19 nt, Homo sapiens
  misc_RNA (1)...(19): siRNA sense strand
aauuuagucuuccuuugga

SEQ ID NO: 1733329 - RNA, 19 nt, Homo sapiens
  misc_RNA (1)...(19): siRNA sense strand
ggauuacaacauagcaaau

SEQ ID NO: 1733330 - RNA, 19 nt, Homo sapiens
  misc_RNA (1)...(19): siRNA sense strand
agacgacaaugaagauacu

SEQ ID NO: 1733331 - RNA, 19 nt, Homo sapiens
  misc_RNA (1)...(19): siRNA sense strand
gacaauucaucuggcacuu

SEQ ID NO: 1733332 - RNA, 19 nt, Homo sapiens
  misc_RNA (1)...(19): siRNA sense strand
gcuaauucucugaaagaug

SEQ ID NO: 1733333 - RNA, 19 nt, Homo sapiens
  misc_RNA (1)...(19): siRNA sense strand
ugucagugcccagucauuu

SEQ ID NO: 1733334 - RNA, 19 nt, Homo sapiens
  misc_RNA (1)...(19): siRNA sense strand
uucacaauguugauucuga

SEQ ID NO: 1733335 - RNA, 19 nt, Homo sapiens
  misc_RNA (1)...(19): siRNA sense strand
gcagccauaguucacaaug

SEQ ID NO: 1733336 - RNA, 19 nt, Homo sapiens
  misc_RNA (1)...(19): siRNA sense strand
caauguugauucugaugac

SEQ ID NO: 1733337 - RNA, 19 nt, Homo sapiens
  misc_RNA (1)...(19): siRNA sense strand
gaggaagacgacaaugaag

SEQ ID NO: 1733338 - RNA, 19 nt, Homo sapiens
  misc_RNA (1)...(19): siRNA sense strand
aagaaacuuccuguacaua

SEQ ID NO: 1733339 - RNA, 19 nt, Homo sapiens
  misc_RNA (1)...(19): siRNA sense strand
ccuuuggaauacuaccuaa

SEQ ID NO: 1733340 - RNA, 19 nt, Homo sapiens
  misc_RNA (1)...(19): siRNA sense strand
agaagaaaaugaagugaca

SEQ ID NO: 1733341 - RNA, 19 nt, Homo sapiens
  misc_RNA (1)...(19): siRNA sense strand
ccauaguucacaauguuga

SEQ ID NO: 1733342 - RNA, 19 nt, Homo sapiens
  misc_RNA (1)...(19): siRNA sense strand
acacagacaguagucaaga

SEQ ID NO: 1733343 - RNA, 19 nt, Homo sapiens
  misc_RNA (1)...(19): siRNA sense strand
cguaaagaucaacuuaaga

SEQ ID NO: 1733344 - RNA, 19 nt, Homo sapiens
  misc_RNA (1)...(19): siRNA sense strand
ugucuuuauuggugaauca

SEQ ID NO: 1733345 - RNA, 19 nt, Homo sapiens
  misc_RNA (1)...(19): siRNA sense strand
cggaaucccgcucacauca

SEQ ID NO: 1733346 - RNA, 19 nt, Homo sapiens
  misc_RNA (1)...(19): siRNA sense strand
guagugaugcagaaaauga

SEQ ID NO: 1733347 - RNA, 19 nt, Homo sapiens
  misc_RNA (1)...(19): siRNA sense strand
cauagugccuccaccagua

SEQ ID NO: 1733348 - RNA, 19 nt, Homo sapiens
  misc_RNA (1)...(19): siRNA sense strand
gaaugccugugaacccaua

SEQ ID NO: 1733349 - RNA, 19 nt, Homo sapiens
  misc_RNA (1)...(19): siRNA sense strand
gcacuuucaucguguuaau

SEQ ID NO: 1733350 - RNA, 19 nt, Homo sapiens
  misc_RNA (1)...(19): siRNA sense strand
caauucaucuggcacuuuc

SEQ ID NO: 1733351 - RNA, 19 nt, Homo sapiens
  misc_RNA (1)...(19): siRNA sense strand
gcacagagagcaggauaca

SEQ ID NO: 1733352 - RNA, 19 nt, Homo sapiens
  misc_RNA (1)...(19): siRNA sense strand
auacaaggcagccauaguu

SEQ ID NO: 1733353 - RNA, 19 nt, Homo sapiens
  misc_RNA (1)...(19): siRNA sense strand
agccauaguucacaauguu

SEQ ID NO: 1733354 - RNA, 19 nt, Homo sapiens
  misc_RNA (1)...(19): siRNA sense strand
ucacaauguugauucugau

SEQ ID NO: 1733355 - RNA, 19 nt, Homo sapiens
  misc_RNA (1)...(19): siRNA sense strand
acagagagcaggauacaag

SEQ ID NO: 1733356 - RNA, 19 nt, Homo sapiens
  misc_RNA (1)...(19): siRNA sense strand
gauacaaggcagccauagu

SEQ ID NO: 1733357 - RNA, 19 nt, Homo sapiens
  misc_RNA (1)...(19): siRNA sense strand
cagccauaguucacaaugu

SEQ ID NO: 1733358 - RNA, 19 nt, Homo sapiens
  misc_RNA (1)...(19): siRNA sense strand
aaccagagaaugccuguga

SEQ ID NO: 1733359 - RNA, 19 nt, Homo sapiens
  misc_RNA (1)...(19): siRNA sense strand
gacaauucaucuggcacuu

SEQ ID NO: 1733360 - RNA, 19 nt, Homo sapiens
  misc_RNA (1)...(19): siRNA sense strand
uucacaauguugauucuga

SEQ ID NO: 1733361 - RNA, 19 nt, Homo sapiens
  misc_RNA (1)...(19): siRNA sense strand
gcagccauaguucacaaug

SEQ ID NO: 1733362 - RNA, 19 nt, Homo sapiens
  misc_RNA (1)...(19): siRNA sense strand
caauguugauucugaugac

SEQ ID NO: 1733363 - RNA, 19 nt, Homo sapiens
  misc_RNA (1)...(19): siRNA sense strand
ccauaguucacaauguuga

SEQ ID NO: 1733364 - RNA, 19 nt, Homo sapiens
  misc_RNA (1)...(19): siRNA sense strand
cguguuaauuagaagacuu

SEQ ID NO: 1733365 - RNA, 19 nt, Homo sapiens
  misc_RNA (1)...(19): siRNA sense strand
gguuuuaaaugcacagaga

SEQ ID NO: 1733366 - RNA, 19 nt, Homo sapiens
  misc_RNA (1)...(19): siRNA sense strand
acaauucaucuggcacuuu

SEQ ID NO: 1733367 - RNA, 19 nt, Homo sapiens
  misc_RNA (1)...(19): siRNA sense strand
acaauguugauucugauga

SEQ ID NO: 1733368 - RNA, 19 nt, Homo sapiens
  misc_RNA (1)...(19): siRNA sense strand
gaaacuuccuguacauaaa

SEQ ID NO: 1733369 - RNA, 19 nt, Homo sapiens
  misc_RNA (1)...(19): siRNA sense strand
gacagaaucuucagacuau

SEQ ID NO: 1733370 - RNA, 19 nt, Homo sapiens
  misc_RNA (1)...(19): siRNA sense strand
gaaacagacuucguaaaga

SEQ ID NO: 1733371 - RNA, 19 nt, Homo sapiens
  misc_RNA (1)...(19): siRNA sense strand
gaaaggagaugaguaugau

SEQ ID NO: 1733372 - RNA, 19 nt, Homo sapiens
  misc_RNA (1)...(19): siRNA sense strand
guaugaagauggagacaaa

SEQ ID NO: 1733373 - RNA, 19 nt, Homo sapiens
  misc_RNA (1)...(19): siRNA sense strand
ugaacgggauuacaacaua

SEQ ID NO: 1733374 - RNA, 19 nt, Homo sapiens
  misc_RNA (1)...(19): siRNA sense strand
gaacauaccccuuuacuga

SEQ ID NO: 1733375 - RNA, 19 nt, Homo sapiens
  misc_RNA (1)...(19): siRNA sense strand
gaacaugacagaaucuuca

SEQ ID NO: 1733376 - RNA, 19 nt, Homo sapiens
  misc_RNA (1)...(19): siRNA sense strand
aaacagacuucguaaagau

SEQ ID NO: 1733377 - RNA, 19 nt, Homo sapiens
  misc_RNA (1)...(19): siRNA sense strand
caagaaaggagaugaguau

SEQ ID NO: 1733378 - RNA, 19 nt, Homo sapiens
  misc_RNA (1)...(19): siRNA sense strand
gaacgggauuacaacauag

SEQ ID NO: 1733379 - RNA, 19 nt, Homo sapiens
  misc_RNA (1)...(19): siRNA sense strand
gaaucccgcucacaucaga

SEQ ID NO: 1733380 - RNA, 19 nt, Homo sapiens
  misc_RNA (1)...(19): siRNA sense strand
ggauagacauagagcuaga

SEQ ID NO: 1733381 - RNA, 19 nt, Homo sapiens
  misc_RNA (1)...(19): siRNA sense strand
agacauagagcuagaagaa

SEQ ID NO: 1733382 - RNA, 19 nt, Homo sapiens
  misc_RNA (1)...(19): siRNA sense strand
ggagaugaguaugauguau

SEQ ID NO: 1733383 - RNA, 19 nt, Homo sapiens
  misc_RNA (1)...(19): siRNA sense strand
uaagaaacuuccuguacau

SEQ ID NO: 1733384 - RNA, 19 nt, Homo sapiens
  misc_RNA (1)...(19): siRNA sense strand
uuaagaaacuuccuguaca

SEQ ID NO: 1733385 - RNA, 19 nt, Homo sapiens
  misc_RNA (1)...(19): siRNA sense strand
agacaguagucaagaagaa

SEQ ID NO: 1733386 - RNA, 19 nt, Homo sapiens
  misc_RNA (1)...(19): siRNA sense strand
guagacccuuggcuaacua

SEQ ID NO: 1733387 - RNA, 19 nt, Homo sapiens
  misc_RNA (1)...(19): siRNA sense strand
gaagacgacaaugaagaua

SEQ ID NO: 1733388 - RNA, 19 nt, Homo sapiens
  misc_RNA (1)...(19): siRNA sense strand
ggaugaguaugaagaugga

SEQ ID NO: 1733389 - RNA, 19 nt, Homo sapiens
  misc_RNA (1)...(19): siRNA sense strand
ggaagacgacaaugaagau

SEQ ID NO: 1733390 - RNA, 19 nt, Homo sapiens
  misc_RNA (1)...(19): siRNA sense strand
caucagaacaugacagaau

SEQ ID NO: 1733391 - RNA, 19 nt, Homo sapiens
  misc_RNA (1)...(19): siRNA sense strand
ugacaguagugaugcagaa

SEQ ID NO: 1733392 - RNA, 19 nt, Homo sapiens
  misc_RNA (1)...(19): siRNA sense strand
ugacagaaucuucagacua

SEQ ID NO: 1733393 - RNA, 19 nt, Homo sapiens
  misc_RNA (1)...(19): siRNA sense strand
uaugauguaugugccauuu

SEQ ID NO: 1733394 - RNA, 19 nt, Homo sapiens
  misc_RNA (1)...(19): siRNA sense strand
ccauuuguuuggaugagua

SEQ ID NO: 1733395 - RNA, 19 nt, Homo sapiens
  misc_RNA (1)...(19): siRNA sense strand
ucaaggcgauucagacucu

SEQ ID NO: 1733396 - RNA, 19 nt, Homo sapiens
  misc_RNA (1)...(19): siRNA sense strand
agaaacuuccuguacauaa

SEQ ID NO: 1733397 - RNA, 19 nt, Homo sapiens
  misc_RNA (1)...(19): siRNA sense strand
ugaggaagacgacaaugaa

SEQ ID NO: 1733398 - RNA, 19 nt, Homo sapiens
  misc_RNA (1)...(19): siRNA sense strand
agaaaggagaugaguauga

SEQ ID NO: 1733399 - RNA, 19 nt, Homo sapiens
  misc_RNA (1)...(19): siRNA sense strand
caggauagacauagagcua

SEQ ID NO: 1733400 - RNA, 19 nt, Homo sapiens
  misc_RNA (1)...(19): siRNA sense strand
agaaacagacuucguaaag

SEQ ID NO: 1733401 - RNA, 19 nt, Homo sapiens
  misc_RNA (1)...(19): siRNA sense strand
ugauguaugugccauuugu

SEQ ID NO: 1733402 - RNA, 19 nt, Homo sapiens
  misc_RNA (1)...(19): siRNA sense strand
gagaugaguaugauguaug

SEQ ID NO: 1733403 - RNA, 19 nt, Homo sapiens
  misc_RNA (1)...(19): siRNA sense strand
gggauuacaacauagcaaa

SEQ ID NO: 1733404 - RNA, 19 nt, Homo sapiens
  misc_RNA (1)...(19): siRNA sense strand
acauagagcuagaagaaac

SEQ ID NO: 1733405 - RNA, 19 nt, Homo sapiens
  misc_RNA (1)...(19): siRNA sense strand
gacagaacauaccccuuua

SEQ ID NO: 1733406 - RNA, 19 nt, Homo sapiens
  misc_RNA (1)...(19): siRNA sense strand
ucaagaaaggagaugagua

SEQ ID NO: 1733407 - RNA, 19 nt, Homo sapiens
  misc_RNA (1)...(19): siRNA sense strand
ucguaaagaucaacuuaag

SEQ ID NO: 1733408 - RNA, 19 nt, Homo sapiens
  misc_RNA (1)...(19): siRNA sense strand
agaugaguaugauguaugu

SEQ ID NO: 1733409 - RNA, 19 nt, Homo sapiens
  misc_RNA (1)...(19): siRNA sense strand
uuacugagaccuuuagcuu

SEQ ID NO: 1733410 - RNA, 19 nt, Homo sapiens
  misc_RNA (1)...(19): siRNA sense strand
cacagacaguagucaagaa

SEQ ID NO: 1733411 - RNA, 19 nt, Homo sapiens
  misc_RNA (1)...(19): siRNA sense strand
cagaaucuucagacuauga

SEQ ID NO: 1733412 - RNA, 19 nt, Homo sapiens
  misc_RNA (1)...(19): siRNA sense strand
cuucguaaagaucaacuua

SEQ ID NO: 1733413 - RNA, 19 nt, Homo sapiens
  misc_RNA (1)...(19): siRNA sense strand
aaaaugaagugacagaaca

SEQ ID NO: 1733414 - RNA, 19 nt, Homo sapiens
  misc_RNA (1)...(19): siRNA sense strand
gacauagagcuagaagaaa

SEQ ID NO: 1733415 - RNA, 19 nt, Homo sapiens
  misc_RNA (1)...(19): siRNA sense strand
gacaguagucaagaagaaa

SEQ ID NO: 1733416 - RNA, 19 nt, Homo sapiens
  misc_RNA (1)...(19): siRNA sense strand
gaucaacuuaagaaacuuc

SEQ ID NO: 1733417 - RNA, 19 nt, Homo sapiens
  misc_RNA (1)...(19): siRNA sense strand
ugacagaacauaccccuuu

SEQ ID NO: 1733418 - RNA, 19 nt, Homo sapiens
  misc_RNA (1)...(19): siRNA sense strand
acugagaccuuuagcuucu

SEQ ID NO: 1733419 - RNA, 19 nt, Homo sapiens
  misc_RNA (1)...(19): siRNA sense strand
agacgacaaugaagauacu

SEQ ID NO: 1733420 - RNA, 19 nt, Homo sapiens
  misc_RNA (1)...(19): siRNA sense strand
ggauuacaacauagcaaau

SEQ ID NO: 1733421 - RNA, 19 nt, Homo sapiens
  misc_RNA (1)...(19): siRNA sense strand
ugucagugcccagucauuu

SEQ ID NO: 1733422 - RNA, 19 nt, Homo sapiens
  misc_RNA (1)...(19): siRNA sense strand
gaggaagacgacaaugaag

SEQ ID NO: 1733423 - RNA, 19 nt, Homo sapiens
  misc_RNA (1)...(19): siRNA sense strand
aagaaacuuccuguacaua

SEQ ID NO: 1733424 - RNA, 19 nt, Homo sapiens
  misc_RNA (1)...(19): siRNA sense strand
acacagacaguagucaaga

SEQ ID NO: 1733425 - RNA, 19 nt, Homo sapiens
  misc_RNA (1)...(19): siRNA sense strand
cguaaagaucaacuuaaga

SEQ ID NO: 1733426 - RNA, 19 nt, Homo sapiens
  misc_RNA (1)...(19): siRNA sense strand
agaagaaaaugaagugaca

SEQ ID NO: 1733427 - RNA, 19 nt, Homo sapiens
  misc_RNA (1)...(19): siRNA sense strand
guucccaugcuuaucauug

SEQ ID NO: 1733428 - RNA, 19 nt, Homo sapiens
  misc_RNA (1)...(19): siRNA sense strand
gauagacauagagcuagaa

SEQ ID NO: 1733429 - RNA, 19 nt, Homo sapiens
  misc_RNA (1)...(19): siRNA sense strand
guagugaugcagaaaauga

SEQ ID NO: 1733430 - RNA, 19 nt, Homo sapiens
  misc_RNA (1)...(19): siRNA sense strand
cggaaucccgcucacauca

SEQ ID NO: 1733431 - RNA, 19 nt, Homo sapiens
  misc_RNA (1)...(19): siRNA sense strand
uguguagacccuuggcuaa

SEQ ID NO: 1733432 - RNA, 19 nt, Homo sapiens
  misc_RNA (1)...(19): siRNA sense strand
uguccagugugcaagcaaa

SEQ ID NO: 1733433 - RNA, 19 nt, Homo sapiens
  misc_RNA (1)...(19): siRNA sense strand
cuuaagaaacuuccuguac

SEQ ID NO: 1733434 - RNA, 19 nt, Homo sapiens
  misc_RNA (1)...(19): siRNA sense strand
aagaaacagacuucguaaa

SEQ ID NO: 1733435 - RNA, 19 nt, Homo sapiens
  misc_RNA (1)...(19): siRNA sense strand
ccgcucacaucagaacaug

SEQ ID NO: 1733436 - RNA, 19 nt, Homo sapiens
  misc_RNA (1)...(19): siRNA sense strand
cacaucagaacaugacaga

SEQ ID NO: 1733437 - RNA, 19 nt, Homo sapiens
  misc_RNA (1)...(19): siRNA sense strand
uaucauugcaaguguguag

SEQ ID NO: 1733438 - RNA, 19 nt, Homo sapiens
  misc_RNA (1)...(19): siRNA sense strand
gacaguagugaugcagaaa

SEQ ID NO: 1733439 - RNA, 19 nt, Homo sapiens
  misc_RNA (1)...(19): siRNA sense strand
gacaaugaagauacugaca

SEQ ID NO: 1733440 - RNA, 19 nt, Homo sapiens
  misc_RNA (1)...(19): siRNA sense strand
gcucacaucagaacaugac

SEQ ID NO: 1733441 - RNA, 19 nt, Homo sapiens
  misc_RNA (1)...(19): siRNA sense strand
accuuuagcuucugucagu

SEQ ID NO: 1733442 - RNA, 19 nt, Homo sapiens
  misc_RNA (1)...(19): siRNA sense strand
ugagaccuuuagcuucugu

SEQ ID NO: 1733443 - RNA, 19 nt, Homo sapiens
  misc_RNA (1)...(19): siRNA sense strand
gaaacuuccuguacauaaa

SEQ ID NO: 1733444 - RNA, 19 nt, Homo sapiens
  misc_RNA (1)...(19): siRNA sense strand
gacagaaucuucagacuau

SEQ ID NO: 1733445 - RNA, 19 nt, Homo sapiens
  misc_RNA (1)...(19): siRNA sense strand
gaaacagacuucguaaaga

SEQ ID NO: 1733446 - RNA, 19 nt, Homo sapiens
  misc_RNA (1)...(19): siRNA sense strand
gaaaggagaugaguaugau

SEQ ID NO: 1733447 - RNA, 19 nt, Homo sapiens
  misc_RNA (1)...(19): siRNA sense strand
guaugaagauggagacaaa

SEQ ID NO: 1733448 - RNA, 19 nt, Homo sapiens
  misc_RNA (1)...(19): siRNA sense strand
ugaacgggauuacaacaua

SEQ ID NO: 1733449 - RNA, 19 nt, Homo sapiens
  misc_RNA (1)...(19): siRNA sense strand
gaacauaccccuuuacuga

SEQ ID NO: 1733450 - RNA, 19 nt, Homo sapiens
  misc_RNA (1)...(19): siRNA sense strand
gaacaugacagaaucuuca

SEQ ID NO: 1733451 - RNA, 19 nt, Homo sapiens
  misc_RNA (1)...(19): siRNA sense strand
aaacagacuucguaaagau

SEQ ID NO: 1733452 - RNA, 19 nt, Homo sapiens
  misc_RNA (1)...(19): siRNA sense strand
caagaaaggagaugaguau

SEQ ID NO: 1733453 - RNA, 19 nt, Homo sapiens
  misc_RNA (1)...(19): siRNA sense strand
gaacgggauuacaacauag

SEQ ID NO: 1733454 - RNA, 19 nt, Homo sapiens
  misc_RNA (1)...(19): siRNA sense strand
gaaucccgcucacaucaga

SEQ ID NO: 1733455 - RNA, 19 nt, Homo sapiens
  misc_RNA (1)...(19): siRNA sense strand
ggauagacauagagcuaga

SEQ ID NO: 1733456 - RNA, 19 nt, Homo sapiens
  misc_RNA (1)...(19): siRNA sense strand
agacauagagcuagaagaa

SEQ ID NO: 1733457 - RNA, 19 nt, Homo sapiens
  misc_RNA (1)...(19): siRNA sense strand
ggagaugaguaugauguau

SEQ ID NO: 1733458 - RNA, 19 nt, Homo sapiens
  misc_RNA (1)...(19): siRNA sense strand
uaagaaacuuccuguacau

SEQ ID NO: 1733459 - RNA, 19 nt, Homo sapiens
  misc_RNA (1)...(19): siRNA sense strand
uuaagaaacuuccuguaca

SEQ ID NO: 1733460 - RNA, 19 nt, Homo sapiens
  misc_RNA (1)...(19): siRNA sense strand
agacaguagucaagaagaa

SEQ ID NO: 1733461 - RNA, 19 nt, Homo sapiens
  misc_RNA (1)...(19): siRNA sense strand
guagacccuuggcuaacua

SEQ ID NO: 1733462 - RNA, 19 nt, Homo sapiens
  misc_RNA (1)...(19): siRNA sense strand
gaagacgacaaugaagaua

SEQ ID NO: 1733463 - RNA, 19 nt, Homo sapiens
  misc_RNA (1)...(19): siRNA sense strand
ggaugaguaugaagaugga

SEQ ID NO: 1733464 - RNA, 19 nt, Homo sapiens
  misc_RNA (1)...(19): siRNA sense strand
ggaagacgacaaugaagau

SEQ ID NO: 1733465 - RNA, 19 nt, Homo sapiens
  misc_RNA (1)...(19): siRNA sense strand
caucagaacaugacagaau

SEQ ID NO: 1733466 - RNA, 19 nt, Homo sapiens
  misc_RNA (1)...(19): siRNA sense strand
ugacaguagugaugcagaa

SEQ ID NO: 1733467 - RNA, 19 nt, Homo sapiens
  misc_RNA (1)...(19): siRNA sense strand
ugacagaaucuucagacua

SEQ ID NO: 1733468 - RNA, 19 nt, Homo sapiens
  misc_RNA (1)...(19): siRNA sense strand
uaugauguaugugccauuu

SEQ ID NO: 1733469 - RNA, 19 nt, Homo sapiens
  misc_RNA (1)...(19): siRNA sense strand
ccauuuguuuggaugagua

SEQ ID NO: 1733470 - RNA, 19 nt, Homo sapiens
  misc_RNA (1)...(19): siRNA sense strand
ucaaggcgauucagacucu

SEQ ID NO: 1733471 - RNA, 19 nt, Homo sapiens
  misc_RNA (1)...(19): siRNA sense strand
agaaacuuccuguacauaa

SEQ ID NO: 1733472 - RNA, 19 nt, Homo sapiens
  misc_RNA (1)...(19): siRNA sense strand
ugaggaagacgacaaugaa

SEQ ID NO: 1733473 - RNA, 19 nt, Homo sapiens
  misc_RNA (1)...(19): siRNA sense strand
agaaaggagaugaguauga

SEQ ID NO: 1733474 - RNA, 19 nt, Homo sapiens
  misc_RNA (1)...(19): siRNA sense strand
caggauagacauagagcua

SEQ ID NO: 1733475 - RNA, 19 nt, Homo sapiens
  misc_RNA (1)...(19): siRNA sense strand
agaaacagacuucguaaag

SEQ ID NO: 1733476 - RNA, 19 nt, Homo sapiens
  misc_RNA (1)...(19): siRNA sense strand
ugauguaugugccauuugu

SEQ ID NO: 1733477 - RNA, 19 nt, Homo sapiens
  misc_RNA (1)...(19): siRNA sense strand
gagaugaguaugauguaug

SEQ ID NO: 1733478 - RNA, 19 nt, Homo sapiens
  misc_RNA (1)...(19): siRNA sense strand
gggauuacaacauagcaaa

SEQ ID NO: 1733479 - RNA, 19 nt, Homo sapiens
  misc_RNA (1)...(19): siRNA sense strand
acauagagcuagaagaaac

SEQ ID NO: 1733480 - RNA, 19 nt, Homo sapiens
  misc_RNA (1)...(19): siRNA sense strand
gacagaacauaccccuuua

SEQ ID NO: 1733481 - RNA, 19 nt, Homo sapiens
  misc_RNA (1)...(19): siRNA sense strand
ucaagaaaggagaugagua

SEQ ID NO: 1733482 - RNA, 19 nt, Homo sapiens
  misc_RNA (1)...(19): siRNA sense strand
ucguaaagaucaacuuaag

SEQ ID NO: 1733483 - RNA, 19 nt, Homo sapiens
  misc_RNA (1)...(19): siRNA sense strand
agaugaguaugauguaugu

SEQ ID NO: 1733484 - RNA, 19 nt, Homo sapiens
  misc_RNA (1)...(19): siRNA sense strand
uuacugagaccuuuagcuu

SEQ ID NO: 1733485 - RNA, 19 nt, Homo sapiens
  misc_RNA (1)...(19): siRNA sense strand
cacagacaguagucaagaa

SEQ ID NO: 1733486 - RNA, 19 nt, Homo sapiens
  misc_RNA (1)...(19): siRNA sense strand
cagaaucuucagacuauga

SEQ ID NO: 1733487 - RNA, 19 nt, Homo sapiens
  misc_RNA (1)...(19): siRNA sense strand
cuucguaaagaucaacuua

SEQ ID NO: 1733488 - RNA, 19 nt, Homo sapiens
  misc_RNA (1)...(19): siRNA sense strand
aaaaugaagugacagaaca

SEQ ID NO: 1733489 - RNA, 19 nt, Homo sapiens
  misc_RNA (1)...(19): siRNA sense strand
gacauagagcuagaagaaa

SEQ ID NO: 1733490 - RNA, 19 nt, Homo sapiens
  misc_RNA (1)...(19): siRNA sense strand
gacaguagucaagaagaaa

SEQ ID NO: 1733491 - RNA, 19 nt, Homo sapiens
  misc_RNA (1)...(19): siRNA sense strand
gaucaacuuaagaaacuuc

SEQ ID NO: 1733492 - RNA, 19 nt, Homo sapiens
  misc_RNA (1)...(19): siRNA sense strand
ugacagaacauaccccuuu

SEQ ID NO: 1733493 - RNA, 19 nt, Homo sapiens
  misc_RNA (1)...(19): siRNA sense strand
acugagaccuuuagcuucu

SEQ ID NO: 1733494 - RNA, 19 nt, Homo sapiens
  misc_RNA (1)...(19): siRNA sense strand
agacgacaaugaagauacu

SEQ ID NO: 1733495 - RNA, 19 nt, Homo sapiens
  misc_RNA (1)...(19): siRNA sense strand
ggauuacaacauagcaaau

SEQ ID NO: 1733496 - RNA, 19 nt, Homo sapiens
  misc_RNA (1)...(19): siRNA sense strand
ugucagugcccagucauuu

SEQ ID NO: 1733497 - RNA, 19 nt, Homo sapiens
  misc_RNA (1)...(19): siRNA sense strand
gaggaagacgacaaugaag

SEQ ID NO: 1733498 - RNA, 19 nt, Homo sapiens
  misc_RNA (1)...(19): siRNA sense strand
aagaaacuuccuguacaua

SEQ ID NO: 1733499 - RNA, 19 nt, Homo sapiens
  misc_RNA (1)...(19): siRNA sense strand
acacagacaguagucaaga

SEQ ID NO: 1733500 - RNA, 19 nt, Homo sapiens
  misc_RNA (1)...(19): siRNA sense strand
cguaaagaucaacuuaaga

SEQ ID NO: 1733501 - RNA, 19 nt, Homo sapiens
  misc_RNA (1)...(19): siRNA sense strand
agaagaaaaugaagugaca

SEQ ID NO: 1733502 - RNA, 19 nt, Homo sapiens
  misc_RNA (1)...(19): siRNA sense strand
guucccaugcuuaucauug

SEQ ID NO: 1733503 - RNA, 19 nt, Homo sapiens
  misc_RNA (1)...(19): siRNA sense strand
gauagacauagagcuagaa

SEQ ID NO: 1733504 - RNA, 19 nt, Homo sapiens
  misc_RNA (1)...(19): siRNA sense strand
guagugaugcagaaaauga

SEQ ID NO: 1733505 - RNA, 19 nt, Homo sapiens
  misc_RNA (1)...(19): siRNA sense strand
cggaaucccgcucacauca

SEQ ID NO: 1733506 - RNA, 19 nt, Homo sapiens
  misc_RNA (1)...(19): siRNA sense strand
uguguagacccuuggcuaa

SEQ ID NO: 1733507 - RNA, 19 nt, Homo sapiens
  misc_RNA (1)...(19): siRNA sense strand
uguccagugugcaagcaaa

SEQ ID NO: 1733508 - RNA, 19 nt, Homo sapiens
  misc_RNA (1)...(19): siRNA sense strand
cuuaagaaacuuccuguac

SEQ ID NO: 1733509 - RNA, 19 nt, Homo sapiens
  misc_RNA (1)...(19): siRNA sense strand
aagaaacagacuucguaaa

SEQ ID NO: 1733510 - RNA, 19 nt, Homo sapiens
  misc_RNA (1)...(19): siRNA sense strand
ccgcucacaucagaacaug

SEQ ID NO: 1733511 - RNA, 19 nt, Homo sapiens
  misc_RNA (1)...(19): siRNA sense strand
cacaucagaacaugacaga

SEQ ID NO: 1733512 - RNA, 19 nt, Homo sapiens
  misc_RNA (1)...(19): siRNA sense strand
uaucauugcaaguguguag

SEQ ID NO: 1733513 - RNA, 19 nt, Homo sapiens
  misc_RNA (1)...(19): siRNA sense strand
gacaguagugaugcagaaa

SEQ ID NO: 1733514 - RNA, 19 nt, Homo sapiens
  misc_RNA (1)...(19): siRNA sense strand
gacaaugaagauacugaca

SEQ ID NO: 1733515 - RNA, 19 nt, Homo sapiens
  misc_RNA (1)...(19): siRNA sense strand
gcucacaucagaacaugac

SEQ ID NO: 1733516 - RNA, 19 nt, Homo sapiens
  misc_RNA (1)...(19): siRNA sense strand
accuuuagcuucugucagu

SEQ ID NO: 1733517 - RNA, 19 nt, Homo sapiens
  misc_RNA (1)...(19): siRNA sense strand
ugagaccuuuagcuucugu

SEQ ID NO: 1733518 - RNA, 19 nt, Homo sapiens
  misc_RNA (1)...(19): siRNA sense strand
gaaacuuccuguacauaaa

SEQ ID NO: 1733519 - RNA, 19 nt, Homo sapiens
  misc_RNA (1)...(19): siRNA sense strand
gacagaaucuucagacuau

SEQ ID NO: 1733520 - RNA, 19 nt, Homo sapiens
  misc_RNA (1)...(19): siRNA sense strand
gaaacagacuucguaaaga

SEQ ID NO: 1733521 - RNA, 19 nt, Homo sapiens
  misc_RNA (1)...(19): siRNA sense strand
gaaaggagaugaguaugau

SEQ ID NO: 1733522 - RNA, 19 nt, Homo sapiens
  misc_RNA (1)...(19): siRNA sense strand
guaugaagauggagacaaa

SEQ ID NO: 1733523 - RNA, 19 nt, Homo sapiens
  misc_RNA (1)...(19): siRNA sense strand
cuaauucucugaaagauga

SEQ ID NO: 1733524 - RNA, 19 nt, Homo sapiens
  misc_RNA (1)...(19): siRNA sense strand
ugaacgggauuacaacaua

SEQ ID NO: 1733525 - RNA, 19 nt, Homo sapiens
  misc_RNA (1)...(19): siRNA sense strand
gaacauaccccuuuacuga

SEQ ID NO: 1733526 - RNA, 19 nt, Homo sapiens
  misc_RNA (1)...(19): siRNA sense strand
gaacaugacagaaucuuca

SEQ ID NO: 1733527 - RNA, 19 nt, Homo sapiens
  misc_RNA (1)...(19): siRNA sense strand
cuaauucccuuccuuauca

SEQ ID NO: 1733528 - RNA, 19 nt, Homo sapiens
  misc_RNA (1)...(19): siRNA sense strand
cauagugccuccaccagua

SEQ ID NO: 1733529 - RNA, 19 nt, Homo sapiens
  misc_RNA (1)...(19): siRNA sense strand
aaacagacuucguaaagau

SEQ ID NO: 1733530 - RNA, 19 nt, Homo sapiens
  misc_RNA (1)...(19): siRNA sense strand
gggcaucugucucaucuug

SEQ ID NO: 1733531 - RNA, 19 nt, Homo sapiens
  misc_RNA (1)...(19): siRNA sense strand
caagaaaggagaugaguau

SEQ ID NO: 1733532 - RNA, 19 nt, Homo sapiens
  misc_RNA (1)...(19): siRNA sense strand
gaaugccugugaacccaua

SEQ ID NO: 1733533 - RNA, 19 nt, Homo sapiens
  misc_RNA (1)...(19): siRNA sense strand
gcacuuucaucguguuaau

SEQ ID NO: 1733534 - RNA, 19 nt, Homo sapiens
  misc_RNA (1)...(19): siRNA sense strand
gaacgggauuacaacauag

SEQ ID NO: 1733535 - RNA, 19 nt, Homo sapiens
  misc_RNA (1)...(19): siRNA sense strand
gaaucccgcucacaucaga

SEQ ID NO: 1733536 - RNA, 19 nt, Homo sapiens
  misc_RNA (1)...(19): siRNA sense strand
ggauagacauagagcuaga

SEQ ID NO: 1733537 - RNA, 19 nt, Homo sapiens
  misc_RNA (1)...(19): siRNA sense strand
agacauagagcuagaagaa

SEQ ID NO: 1733538 - RNA, 19 nt, Homo sapiens
  misc_RNA (1)...(19): siRNA sense strand
ggagaugaguaugauguau

SEQ ID NO: 1733539 - RNA, 19 nt, Homo sapiens
  misc_RNA (1)...(19): siRNA sense strand
uaagaaacuuccuguacau

SEQ ID NO: 1733540 - RNA, 19 nt, Homo sapiens
  misc_RNA (1)...(19): siRNA sense strand
caauucaucuggcacuuuc

SEQ ID NO: 1733541 - RNA, 19 nt, Homo sapiens
  misc_RNA (1)...(19): siRNA sense strand
uuaagaaacuuccuguaca

SEQ ID NO: 1733542 - RNA, 19 nt, Homo sapiens
  misc_RNA (1)...(19): siRNA sense strand
agacaguagucaagaagaa

SEQ ID NO: 1733543 - RNA, 19 nt, Homo sapiens
  misc_RNA (1)...(19): siRNA sense strand
guagacccuuggcuaacua

SEQ ID NO: 1733544 - RNA, 19 nt, Homo sapiens
  misc_RNA (1)...(19): siRNA sense strand
gaagacgacaaugaagaua

SEQ ID NO: 1733545 - RNA, 19 nt, Homo sapiens
  misc_RNA (1)...(19): siRNA sense strand
ggaugaguaugaagaugga

SEQ ID NO: 1733546 - RNA, 19 nt, Homo sapiens
  misc_RNA (1)...(19): siRNA sense strand
ggaagacgacaaugaagau

SEQ ID NO: 1733547 - RNA, 19 nt, Homo sapiens
  misc_RNA (1)...(19): siRNA sense strand
aaauugacauuccaucugu

SEQ ID NO: 1733548 - RNA, 19 nt, Homo sapiens
  misc_RNA (1)...(19): siRNA sense strand
ugacaguagugaugcagaa

SEQ ID NO: 1733549 - RNA, 19 nt, Homo sapiens
  misc_RNA (1)...(19): siRNA sense strand
ugacagaaucuucagacua

SEQ ID NO: 1733550 - RNA, 19 nt, Homo sapiens
  misc_RNA (1)...(19): siRNA sense strand
caucagaacaugacagaau

SEQ ID NO: 1733551 - RNA, 19 nt, Homo sapiens
  misc_RNA (1)...(19): siRNA sense strand
gaauuuagucuuccuuugg

SEQ ID NO: 1733552 - RNA, 19 nt, Homo sapiens
  misc_RNA (1)...(19): siRNA sense strand
ugucucaucuugauaguca

SEQ ID NO: 1733553 - RNA, 19 nt, Homo sapiens
  misc_RNA (1)...(19): siRNA sense strand
uaugauguaugugccauuu

SEQ ID NO: 1733554 - RNA, 19 nt, Homo sapiens
  misc_RNA (1)...(19): siRNA sense strand
gcaucugucucaucuugau

SEQ ID NO: 1733555 - RNA, 19 nt, Homo sapiens
  misc_RNA (1)...(19): siRNA sense strand
ucaaggcgauucagacucu

SEQ ID NO: 1733556 - RNA, 19 nt, Homo sapiens
  misc_RNA (1)...(19): siRNA sense strand
ccauuuguuuggaugagua

SEQ ID NO: 1733557 - RNA, 19 nt, Homo sapiens
  misc_RNA (1)...(19): siRNA sense strand
gcacagagagcaggauaca

SEQ ID NO: 1733558 - RNA, 19 nt, Homo sapiens
  misc_RNA (1)...(19): siRNA sense strand
ggugaaucaucagcuaauu

SEQ ID NO: 1733559 - RNA, 19 nt, Homo sapiens
  misc_RNA (1)...(19): siRNA sense strand
agaaacuuccuguacauaa

SEQ ID NO: 1733560 - RNA, 19 nt, Homo sapiens
  misc_RNA (1)...(19): siRNA sense strand
ugaggaagacgacaaugaa

SEQ ID NO: 1733561 - RNA, 19 nt, Homo sapiens
  misc_RNA (1)...(19): siRNA sense strand
cauuccaucugucuuuauu

SEQ ID NO: 1733562 - RNA, 19 nt, Homo sapiens
  misc_RNA (1)...(19): siRNA sense strand
ugauguaugugccauuugu

SEQ ID NO: 1733563 - RNA, 19 nt, Homo sapiens
  misc_RNA (1)...(19): siRNA sense strand
agaaaggagaugaguauga

SEQ ID NO: 1733564 - RNA, 19 nt, Homo sapiens
  misc_RNA (1)...(19): siRNA sense strand
agaaacagacuucguaaag

SEQ ID NO: 1733565 - RNA, 19 nt, Homo sapiens
  misc_RNA (1)...(19): siRNA sense strand
caggauagacauagagcua

SEQ ID NO: 1733566 - RNA, 19 nt, Homo sapiens
  misc_RNA (1)...(19): siRNA sense strand
acauagagcuagaagaaac

SEQ ID NO: 1733567 - RNA, 19 nt, Homo sapiens
  misc_RNA (1)...(19): siRNA sense strand
gggauuacaacauagcaaa

SEQ ID NO: 1733568 - RNA, 19 nt, Homo sapiens
  misc_RNA (1)...(19): siRNA sense strand
gagaugaguaugauguaug

SEQ ID NO: 1733569 - RNA, 19 nt, Homo sapiens
  misc_RNA (1)...(19): siRNA sense strand
auacaaggcagccauaguu

SEQ ID NO: 1733570 - RNA, 19 nt, Homo sapiens
  misc_RNA (1)...(19): siRNA sense strand
gacagaacauaccccuuua

SEQ ID NO: 1733571 - RNA, 19 nt, Homo sapiens
  misc_RNA (1)...(19): siRNA sense strand
cagcuaauucucugaaaga

SEQ ID NO: 1733572 - RNA, 19 nt, Homo sapiens
  misc_RNA (1)...(19): siRNA sense strand
agaauuuagucuuccuuug

SEQ ID NO: 1733573 - RNA, 19 nt, Homo sapiens
  misc_RNA (1)...(19): siRNA sense strand
ucaagaaaggagaugagua

SEQ ID NO: 1733574 - RNA, 19 nt, Homo sapiens
  misc_RNA (1)...(19): siRNA sense strand
agccauaguucacaauguu

SEQ ID NO: 1733575 - RNA, 19 nt, Homo sapiens
  misc_RNA (1)...(19): siRNA sense strand
ucguaaagaucaacuuaag

SEQ ID NO: 1733576 - RNA, 19 nt, Homo sapiens
  misc_RNA (1)...(19): siRNA sense strand
guuccagaauuuagucuuc

SEQ ID NO: 1733577 - RNA, 19 nt, Homo sapiens
  misc_RNA (1)...(19): siRNA sense strand
ucacaauguugauucugau

SEQ ID NO: 1733578 - RNA, 19 nt, Homo sapiens
  misc_RNA (1)...(19): siRNA sense strand
uuacugagaccuuuagcuu

SEQ ID NO: 1733579 - RNA, 19 nt, Homo sapiens
  misc_RNA (1)...(19): siRNA sense strand
agaugaguaugauguaugu

SEQ ID NO: 1733580 - RNA, 19 nt, Homo sapiens
  misc_RNA (1)...(19): siRNA sense strand
cacagacaguagucaagaa

SEQ ID NO: 1733581 - RNA, 19 nt, Homo sapiens
  misc_RNA (1)...(19): siRNA sense strand
cagaaucuucagacuauga

SEQ ID NO: 1733582 - RNA, 19 nt, Homo sapiens
  misc_RNA (1)...(19): siRNA sense strand
acagagagcaggauacaag

SEQ ID NO: 1733583 - RNA, 19 nt, Homo sapiens
  misc_RNA (1)...(19): siRNA sense strand
uaccuaauucccuuccuua

SEQ ID NO: 1733584 - RNA, 19 nt, Homo sapiens
  misc_RNA (1)...(19): siRNA sense strand
cuucguaaagaucaacuua

SEQ ID NO: 1733585 - RNA, 19 nt, Homo sapiens
  misc_RNA (1)...(19): siRNA sense strand
cuaccuaauucccuuccuu

SEQ ID NO: 1733586 - RNA, 19 nt, Homo sapiens
  misc_RNA (1)...(19): siRNA sense strand
aaaaugaagugacagaaca

SEQ ID NO: 1733587 - RNA, 19 nt, Homo sapiens
  misc_RNA (1)...(19): siRNA sense strand
cagaauuuagucuuccuuu

SEQ ID NO: 1733588 - RNA, 19 nt, Homo sapiens
  misc_RNA (1)...(19): siRNA sense strand
gacaguagucaagaagaaa

SEQ ID NO: 1733589 - RNA, 19 nt, Homo sapiens
  misc_RNA (1)...(19): siRNA sense strand
gaucaacuuaagaaacuuc

SEQ ID NO: 1733590 - RNA, 19 nt, Homo sapiens
  misc_RNA (1)...(19): siRNA sense strand
gacauagagcuagaagaaa

SEQ ID NO: 1733591 - RNA, 19 nt, Homo sapiens
  misc_RNA (1)...(19): siRNA sense strand
aaccagagaaugccuguga

SEQ ID NO: 1733592 - RNA, 19 nt, Homo sapiens
  misc_RNA (1)...(19): siRNA sense strand
acugagaccuuuagcuucu

SEQ ID NO: 1733593 - RNA, 19 nt, Homo sapiens
  misc_RNA (1)...(19): siRNA sense strand
ugacagaacauaccccuuu

SEQ ID NO: 1733594 - RNA, 19 nt, Homo sapiens
  misc_RNA (1)...(19): siRNA sense strand
cagccauaguucacaaugu

SEQ ID NO: 1733595 - RNA, 19 nt, Homo sapiens
  misc_RNA (1)...(19): siRNA sense strand
gugggcaucugucucaucu

SEQ ID NO: 1733596 - RNA, 19 nt, Homo sapiens
  misc_RNA (1)...(19): siRNA sense strand
uaucauagugggcaucugu

SEQ ID NO: 1733597 - RNA, 19 nt, Homo sapiens
  misc_RNA (1)...(19): siRNA sense strand
gauacaaggcagccauagu

SEQ ID NO: 1733598 - RNA, 19 nt, Homo sapiens
  misc_RNA (1)...(19): siRNA sense strand
gggccaccuuaucuuaguu

SEQ ID NO: 1733599 - RNA, 19 nt, Homo sapiens
  misc_RNA (1)...(19): siRNA sense strand
aauuuagucuuccuuugga

SEQ ID NO: 1733600 - RNA, 19 nt, Homo sapiens
  misc_RNA (1)...(19): siRNA sense strand
ggauuacaacauagcaaau

SEQ ID NO: 1733601 - RNA, 19 nt, Homo sapiens
  misc_RNA (1)...(19): siRNA sense strand
agacgacaaugaagauacu

SEQ ID NO: 1733602 - RNA, 19 nt, Homo sapiens
  misc_RNA (1)...(19): siRNA sense strand
gacaauucaucuggcacuu

SEQ ID NO: 1733603 - RNA, 19 nt, Homo sapiens
  misc_RNA (1)...(19): siRNA sense strand
gcuaauucucugaaagaug

SEQ ID NO: 1733604 - RNA, 19 nt, Homo sapiens
  misc_RNA (1)...(19): siRNA sense strand
ugucagugcccagucauuu

SEQ ID NO: 1733605 - RNA, 19 nt, Homo sapiens
  misc_RNA (1)...(19): siRNA sense strand
uucacaauguugauucuga

SEQ ID NO: 1733606 - RNA, 19 nt, Homo sapiens
  misc_RNA (1)...(19): siRNA sense strand
gcagccauaguucacaaug

SEQ ID NO: 1733607 - RNA, 19 nt, Homo sapiens
  misc_RNA (1)...(19): siRNA sense strand
caauguugauucugaugac

SEQ ID NO: 1733608 - RNA, 19 nt, Homo sapiens
  misc_RNA (1)...(19): siRNA sense strand
gaggaagacgacaaugaag

SEQ ID NO: 1733609 - RNA, 19 nt, Homo sapiens
  misc_RNA (1)...(19): siRNA sense strand
aagaaacuuccuguacaua

SEQ ID NO: 1733610 - RNA, 19 nt, Homo sapiens
  misc_RNA (1)...(19): siRNA sense strand
ccuuuggaauacuaccuaa

SEQ ID NO: 1733611 - RNA, 19 nt, Homo sapiens
  misc_RNA (1)...(19): siRNA sense strand
agaagaaaaugaagugaca

SEQ ID NO: 1733612 - RNA, 19 nt, Homo sapiens
  misc_RNA (1)...(19): siRNA sense strand
ccauaguucacaauguuga

SEQ ID NO: 1733613 - RNA, 19 nt, Homo sapiens
  misc_RNA (1)...(19): siRNA sense strand
acacagacaguagucaaga

SEQ ID NO: 1733614 - RNA, 19 nt, Homo sapiens
  misc_RNA (1)...(19): siRNA sense strand
cguaaagaucaacuuaaga

SEQ ID NO: 1733615 - RNA, 19 nt, Homo sapiens
  misc_RNA (1)...(19): siRNA sense strand
ugucuuuauuggugaauca

SEQ ID NO: 1733616 - RNA, 19 nt, Homo sapiens
  misc_RNA (1)...(19): siRNA sense strand
cggaaucccgcucacauca

SEQ ID NO: 1733617 - RNA, 19 nt, Homo sapiens
  misc_RNA (1)...(19): siRNA sense strand
guagugaugcagaaaauga

SEQ ID NO: 1733618 - RNA, 19 nt, Homo sapiens
  misc_RNA (1)...(19): siRNA sense strand
gaaacuuccuguacauaaa

SEQ ID NO: 1733619 - RNA, 19 nt, Homo sapiens
  misc_RNA (1)...(19): siRNA sense strand
gacagaaucuucagacuau

SEQ ID NO: 1733620 - RNA, 19 nt, Homo sapiens
  misc_RNA (1)...(19): siRNA sense strand
gaaacagacuucguaaaga

SEQ ID NO: 1733621 - RNA, 19 nt, Homo sapiens
  misc_RNA (1)...(19): siRNA sense strand
gaaaggagaugaguaugau

SEQ ID NO: 1733622 - RNA, 19 nt, Homo sapiens
  misc_RNA (1)...(19): siRNA sense strand
guaugaagauggagacaaa

SEQ ID NO: 1733623 - RNA, 19 nt, Homo sapiens
  misc_RNA (1)...(19): siRNA sense strand
cuaauucucugaaagauga

SEQ ID NO: 1733624 - RNA, 19 nt, Homo sapiens
  misc_RNA (1)...(19): siRNA sense strand
ugaacgggauuacaacaua

SEQ ID NO: 1733625 - RNA, 19 nt, Homo sapiens
  misc_RNA (1)...(19): siRNA sense strand
gaacauaccccuuuacuga

SEQ ID NO: 1733626 - RNA, 19 nt, Homo sapiens
  misc_RNA (1)...(19): siRNA sense strand
gaacaugacagaaucuuca

SEQ ID NO: 1733627 - RNA, 19 nt, Homo sapiens
  misc_RNA (1)...(19): siRNA sense strand
cuaauucccuuccuuauca

SEQ ID NO: 1733628 - RNA, 19 nt, Homo sapiens
  misc_RNA (1)...(19): siRNA sense strand
cauagugccuccaccagua

SEQ ID NO: 1733629 - RNA, 19 nt, Homo sapiens
  misc_RNA (1)...(19): siRNA sense strand
aaacagacuucguaaagau

SEQ ID NO: 1733630 - RNA, 19 nt, Homo sapiens
  misc_RNA (1)...(19): siRNA sense strand
gggcaucugucucaucuug

SEQ ID NO: 1733631 - RNA, 19 nt, Homo sapiens
  misc_RNA (1)...(19): siRNA sense strand
caagaaaggagaugaguau

SEQ ID NO: 1733632 - RNA, 19 nt, Homo sapiens
  misc_RNA (1)...(19): siRNA sense strand
gaaugccugugaacccaua

SEQ ID NO: 1733633 - RNA, 19 nt, Homo sapiens
  misc_RNA (1)...(19): siRNA sense strand
gcacuuucaucguguuaau

SEQ ID NO: 1733634 - RNA, 19 nt, Homo sapiens
  misc_RNA (1)...(19): siRNA sense strand
gaacgggauuacaacauag

SEQ ID NO: 1733635 - RNA, 19 nt, Homo sapiens
  misc_RNA (1)...(19): siRNA sense strand
gaaucccgcucacaucaga

SEQ ID NO: 1733636 - RNA, 19 nt, Homo sapiens
  misc_RNA (1)...(19): siRNA sense strand
ggauagacauagagcuaga

SEQ ID NO: 1733637 - RNA, 19 nt, Homo sapiens
  misc_RNA (1)...(19): siRNA sense strand
agacauagagcuagaagaa

SEQ ID NO: 1733638 - RNA, 19 nt, Homo sapiens
  misc_RNA (1)...(19): siRNA sense strand
ggagaugaguaugauguau

SEQ ID NO: 1733639 - RNA, 19 nt, Homo sapiens
  misc_RNA (1)...(19): siRNA sense strand
uaagaaacuuccuguacau

SEQ ID NO: 1733640 - RNA, 19 nt, Homo sapiens
  misc_RNA (1)...(19): siRNA sense strand
caauucaucuggcacuuuc

SEQ ID NO: 1733641 - RNA, 19 nt, Homo sapiens
  misc_RNA (1)...(19): siRNA sense strand
uuaagaaacuuccuguaca

SEQ ID NO: 1733642 - RNA, 19 nt, Homo sapiens
  misc_RNA (1)...(19): siRNA sense strand
agacaguagucaagaagaa

SEQ ID NO: 1733643 - RNA, 19 nt, Homo sapiens
  misc_RNA (1)...(19): siRNA sense strand
guagacccuuggcuaacua

SEQ ID NO: 1733644 - RNA, 19 nt, Homo sapiens
  misc_RNA (1)...(19): siRNA sense strand
gaagacgacaaugaagaua

SEQ ID NO: 1733645 - RNA, 19 nt, Homo sapiens
  misc_RNA (1)...(19): siRNA sense strand
ggaugaguaugaagaugga

SEQ ID NO: 1733646 - RNA, 19 nt, Homo sapiens
  misc_RNA (1)...(19): siRNA sense strand
ggaagacgacaaugaagau

SEQ ID NO: 1733647 - RNA, 19 nt, Homo sapiens
  misc_RNA (1)...(19): siRNA sense strand
aaauugacauuccaucugu

SEQ ID NO: 1733648 - RNA, 19 nt, Homo sapiens
  misc_RNA (1)...(19): siRNA sense strand
ugacaguagugaugcagaa

SEQ ID NO: 1733649 - RNA, 19 nt, Homo sapiens
  misc_RNA (1)...(19): siRNA sense strand
ugacagaaucuucagacua

SEQ ID NO: 1733650 - RNA, 19 nt, Homo sapiens
  misc_RNA (1)...(19): siRNA sense strand
caucagaacaugacagaau

SEQ ID NO: 1733651 - RNA, 19 nt, Homo sapiens
  misc_RNA (1)...(19): siRNA sense strand
gaauuuagucuuccuuugg

SEQ ID NO: 1733652 - RNA, 19 nt, Homo sapiens
  misc_RNA (1)...(19): siRNA sense strand
ugucucaucuugauaguca

SEQ ID NO: 1733653 - RNA, 19 nt, Homo sapiens
  misc_RNA (1)...(19): siRNA sense strand
uaugauguaugugccauuu

SEQ ID NO: 1733654 - RNA, 19 nt, Homo sapiens
  misc_RNA (1)...(19): siRNA sense strand
gcaucugucucaucuugau

SEQ ID NO: 1733655 - RNA, 19 nt, Homo sapiens
  misc_RNA (1)...(19): siRNA sense strand
ucaaggcgauucagacucu

SEQ ID NO: 1733656 - RNA, 19 nt, Homo sapiens
  misc_RNA (1)...(19): siRNA sense strand
ccauuuguuuggaugagua

SEQ ID NO: 1733657 - RNA, 19 nt, Homo sapiens
  misc_RNA (1)...(19): siRNA sense strand
gcacagagagcaggauaca

SEQ ID NO: 1733658 - RNA, 19 nt, Homo sapiens
  misc_RNA (1)...(19): siRNA sense strand
ggugaaucaucagcuaauu

SEQ ID NO: 1733659 - RNA, 19 nt, Homo sapiens
  misc_RNA (1)...(19): siRNA sense strand
agaaacuuccuguacauaa

SEQ ID NO: 1733660 - RNA, 19 nt, Homo sapiens
  misc_RNA (1)...(19): siRNA sense strand
ugaggaagacgacaaugaa

SEQ ID NO: 1733661 - RNA, 19 nt, Homo sapiens
  misc_RNA (1)...(19): siRNA sense strand
cauuccaucugucuuuauu

SEQ ID NO: 1733662 - RNA, 19 nt, Homo sapiens
  misc_RNA (1)...(19): siRNA sense strand
ugauguaugugccauuugu

SEQ ID NO: 1733663 - RNA, 19 nt, Homo sapiens
  misc_RNA (1)...(19): siRNA sense strand
agaaaggagaugaguauga

SEQ ID NO: 1733664 - RNA, 19 nt, Homo sapiens
  misc_RNA (1)...(19): siRNA sense strand
agaaacagacuucguaaag

SEQ ID NO: 1733665 - RNA, 19 nt, Homo sapiens
  misc_RNA (1)...(19): siRNA sense strand
caggauagacauagagcua

SEQ ID NO: 1733666 - RNA, 19 nt, Homo sapiens
  misc_RNA (1)...(19): siRNA sense strand
acauagagcuagaagaaac

SEQ ID NO: 1733667 - RNA, 19 nt, Homo sapiens
  misc_RNA (1)...(19): siRNA sense strand
gggauuacaacauagcaaa

SEQ ID NO: 1733668 - RNA, 19 nt, Homo sapiens
  misc_RNA (1)...(19): siRNA sense strand
gagaugaguaugauguaug

SEQ ID NO: 1733669 - RNA, 19 nt, Homo sapiens
  misc_RNA (1)...(19): siRNA sense strand
auacaaggcagccauaguu

SEQ ID NO: 1733670 - RNA, 19 nt, Homo sapiens
  misc_RNA (1)...(19): siRNA sense strand
gacagaacauaccccuuua

SEQ ID NO: 1733671 - RNA, 19 nt, Homo sapiens
  misc_RNA (1)...(19): siRNA sense strand
cagcuaauucucugaaaga

SEQ ID NO: 1733672 - RNA, 19 nt, Homo sapiens
  misc_RNA (1)...(19): siRNA sense strand
agaauuuagucuuccuuug

SEQ ID NO: 1733673 - RNA, 19 nt, Homo sapiens
  misc_RNA (1)...(19): siRNA sense strand
ucaagaaaggagaugagua

SEQ ID NO: 1733674 - RNA, 19 nt, Homo sapiens
  misc_RNA (1)...(19): siRNA sense strand
agccauaguucacaauguu

SEQ ID NO: 1733675 - RNA, 19 nt, Homo sapiens
  misc_RNA (1)...(19): siRNA sense strand
ucguaaagaucaacuuaag

SEQ ID NO: 1733676 - RNA, 19 nt, Homo sapiens
  misc_RNA (1)...(19): siRNA sense strand
guuccagaauuuagucuuc

SEQ ID NO: 1733677 - RNA, 19 nt, Homo sapiens
  misc_RNA (1)...(19): siRNA sense strand
ucacaauguugauucugau

SEQ ID NO: 1733678 - RNA, 19 nt, Homo sapiens
  misc_RNA (1)...(19): siRNA sense strand
uuacugagaccuuuagcuu

SEQ ID NO: 1733679 - RNA, 19 nt, Homo sapiens
  misc_RNA (1)...(19): siRNA sense strand
agaugaguaugauguaugu

SEQ ID NO: 1733680 - RNA, 19 nt, Homo sapiens
  misc_RNA (1)...(19): siRNA sense strand
cacagacaguagucaagaa

SEQ ID NO: 1733681 - RNA, 19 nt, Homo sapiens
  misc_RNA (1)...(19): siRNA sense strand
cagaaucuucagacuauga

SEQ ID NO: 1733682 - RNA, 19 nt, Homo sapiens
  misc_RNA (1)...(19): siRNA sense strand
acagagagcaggauacaag

SEQ ID NO: 1733683 - RNA, 19 nt, Homo sapiens
  misc_RNA (1)...(19): siRNA sense strand
uaccuaauucccuuccuua

SEQ ID NO: 1733684 - RNA, 19 nt, Homo sapiens
  misc_RNA (1)...(19): siRNA sense strand
cuucguaaagaucaacuua

SEQ ID NO: 1733685 - RNA, 19 nt, Homo sapiens
  misc_RNA (1)...(19): siRNA sense strand
cuaccuaauucccuuccuu

SEQ ID NO: 1733686 - RNA, 19 nt, Homo sapiens
  misc_RNA (1)...(19): siRNA sense strand
aaaaugaagugacagaaca

SEQ ID NO: 1733687 - RNA, 19 nt, Homo sapiens
  misc_RNA (1)...(19): siRNA sense strand
cagaauuuagucuuccuuu

SEQ ID NO: 1733688 - RNA, 19 nt, Homo sapiens
  misc_RNA (1)...(19): siRNA sense strand
gacaguagucaagaagaaa

SEQ ID NO: 1733689 - RNA, 19 nt, Homo sapiens
  misc_RNA (1)...(19): siRNA sense strand
gaucaacuuaagaaacuuc

SEQ ID NO: 1733690 - RNA, 19 nt, Homo sapiens
  misc_RNA (1)...(19): siRNA sense strand
gacauagagcuagaagaaa

SEQ ID NO: 1733691 - RNA, 19 nt, Homo sapiens
  misc_RNA (1)...(19): siRNA sense strand
aaccagagaaugccuguga

SEQ ID NO: 1733692 - RNA, 19 nt, Homo sapiens
  misc_RNA (1)...(19): siRNA sense strand
acugagaccuuuagcuucu

SEQ ID NO: 1733693 - RNA, 19 nt, Homo sapiens
  misc_RNA (1)...(19): siRNA sense strand
ugacagaacauaccccuuu

SEQ ID NO: 1733694 - RNA, 19 nt, Homo sapiens
  misc_RNA (1)...(19): siRNA sense strand
cagccauaguucacaaugu

SEQ ID NO: 1733695 - RNA, 19 nt, Homo sapiens
  misc_RNA (1)...(19): siRNA sense strand
gugggcaucugucucaucu

SEQ ID NO: 1733696 - RNA, 19 nt, Homo sapiens
  misc_RNA (1)...(19): siRNA sense strand
uaucauagugggcaucugu

SEQ ID NO: 1733697 - RNA, 19 nt, Homo sapiens
  misc_RNA (1)...(19): siRNA sense strand
gauacaaggcagccauagu

SEQ ID NO: 1733698 - RNA, 19 nt, Homo sapiens
  misc_RNA (1)...(19): siRNA sense strand
gggccaccuuaucuuaguu

SEQ ID NO: 1733699 - RNA, 19 nt, Homo sapiens
  misc_RNA (1)...(19): siRNA sense strand
aauuuagucuuccuuugga

SEQ ID NO: 1733700 - RNA, 19 nt, Homo sapiens
  misc_RNA (1)...(19): siRNA sense strand
ggauuacaacauagcaaau

SEQ ID NO: 1733701 - RNA, 19 nt, Homo sapiens
  misc_RNA (1)...(19): siRNA sense strand
agacgacaaugaagauacu

SEQ ID NO: 1733702 - RNA, 19 nt, Homo sapiens
  misc_RNA (1)...(19): siRNA sense strand
gacaauucaucuggcacuu

SEQ ID NO: 1733703 - RNA, 19 nt, Homo sapiens
  misc_RNA (1)...(19): siRNA sense strand
gcuaauucucugaaagaug

SEQ ID NO: 1733704 - RNA, 19 nt, Homo sapiens
  misc_RNA (1)...(19): siRNA sense strand
ugucagugcccagucauuu

SEQ ID NO: 1733705 - RNA, 19 nt, Homo sapiens
  misc_RNA (1)...(19): siRNA sense strand
uucacaauguugauucuga

SEQ ID NO: 1733706 - RNA, 19 nt, Homo sapiens
  misc_RNA (1)...(19): siRNA sense strand
gcagccauaguucacaaug

SEQ ID NO: 1733707 - RNA, 19 nt, Homo sapiens
  misc_RNA (1)...(19): siRNA sense strand
caauguugauucugaugac

SEQ ID NO: 1733708 - RNA, 19 nt, Homo sapiens
  misc_RNA (1)...(19): siRNA sense strand
gaggaagacgacaaugaag

SEQ ID NO: 1733709 - RNA, 19 nt, Homo sapiens
  misc_RNA (1)...(19): siRNA sense strand
aagaaacuuccuguacaua

SEQ ID NO: 1733710 - RNA, 19 nt, Homo sapiens
  misc_RNA (1)...(19): siRNA sense strand
ccuuuggaauacuaccuaa

SEQ ID NO: 1733711 - RNA, 19 nt, Homo sapiens
  misc_RNA (1)...(19): siRNA sense strand
agaagaaaaugaagugaca

SEQ ID NO: 1733712 - RNA, 19 nt, Homo sapiens
  misc_RNA (1)...(19): siRNA sense strand
ccauaguucacaauguuga

SEQ ID NO: 1733713 - RNA, 19 nt, Homo sapiens
  misc_RNA (1)...(19): siRNA sense strand
acacagacaguagucaaga

SEQ ID NO: 1733714 - RNA, 19 nt, Homo sapiens
  misc_RNA (1)...(19): siRNA sense strand
cguaaagaucaacuuaaga

SEQ ID NO: 1733715 - RNA, 19 nt, Homo sapiens
  misc_RNA (1)...(19): siRNA sense strand
ugucuuuauuggugaauca

SEQ ID NO: 1733716 - RNA, 19 nt, Homo sapiens
  misc_RNA (1)...(19): siRNA sense strand
cggaaucccgcucacauca

SEQ ID NO: 1733717 - RNA, 19 nt, Homo sapiens
  misc_RNA (1)...(19): siRNA sense strand
guagugaugcagaaaauga

SEQ ID NO: 1733718 - RNA, 19 nt, Homo sapiens
  misc_RNA (1)...(19): siRNA sense strand
cauagugccuccaccagua

SEQ ID NO: 1733719 - RNA, 19 nt, Homo sapiens
  misc_RNA (1)...(19): siRNA sense strand
gaaugccugugaacccaua

SEQ ID NO: 1733720 - RNA, 19 nt, Homo sapiens
  misc_RNA (1)...(19): siRNA sense strand
gcacuuucaucguguuaau

SEQ ID NO: 1733721 - RNA, 19 nt, Homo sapiens
  misc_RNA (1)...(19): siRNA sense strand
caauucaucuggcacuuuc

SEQ ID NO: 1733722 - RNA, 19 nt, Homo sapiens
  misc_RNA (1)...(19): siRNA sense strand
gcacagagagcaggauaca

SEQ ID NO: 1733723 - RNA, 19 nt, Homo sapiens
  misc_RNA (1)...(19): siRNA sense strand
auacaaggcagccauaguu

SEQ ID NO: 1733724 - RNA, 19 nt, Homo sapiens
  misc_RNA (1)...(19): siRNA sense strand
agccauaguucacaauguu

SEQ ID NO: 1733725 - RNA, 19 nt, Homo sapiens
  misc_RNA (1)...(19): siRNA sense strand
ucacaauguugauucugau

SEQ ID NO: 1733726 - RNA, 19 nt, Homo sapiens
  misc_RNA (1)...(19): siRNA sense strand
acagagagcaggauacaag

SEQ ID NO: 1733727 - RNA, 19 nt, Homo sapiens
  misc_RNA (1)...(19): siRNA sense strand
gauacaaggcagccauagu

SEQ ID NO: 1733728 - RNA, 19 nt, Homo sapiens
  misc_RNA (1)...(19): siRNA sense strand
cagccauaguucacaaugu

SEQ ID NO: 1733729 - RNA, 19 nt, Homo sapiens
  misc_RNA (1)...(19): siRNA sense strand
aaccagagaaugccuguga

SEQ ID NO: 1733730 - RNA, 19 nt, Homo sapiens
  misc_RNA (1)...(19): siRNA sense strand
gacaauucaucuggcacuu

SEQ ID NO: 1733731 - RNA, 19 nt, Homo sapiens
  misc_RNA (1)...(19): siRNA sense strand
uucacaauguugauucuga

SEQ ID NO: 1733732 - RNA, 19 nt, Homo sapiens
  misc_RNA (1)...(19): siRNA sense strand
gcagccauaguucacaaug

SEQ ID NO: 1733733 - RNA, 19 nt, Homo sapiens
  misc_RNA (1)...(19): siRNA sense strand
caauguugauucugaugac

SEQ ID NO: 1733734 - RNA, 19 nt, Homo sapiens
  misc_RNA (1)...(19): siRNA sense strand
ccauaguucacaauguuga

SEQ ID NO: 1733735 - RNA, 19 nt, Homo sapiens
  misc_RNA (1)...(19): siRNA sense strand
cguguuaauuagaagacuu

SEQ ID NO: 1733736 - RNA, 19 nt, Homo sapiens
  misc_RNA (1)...(19): siRNA sense strand
gguuuuaaaugcacagaga

SEQ ID NO: 1733737 - RNA, 19 nt, Homo sapiens
  misc_RNA (1)...(19): siRNA sense strand
acaauucaucuggcacuuu

SEQ ID NO: 1733738 - RNA, 19 nt, Homo sapiens
  misc_RNA (1)...(19): siRNA sense strand
acaauguugauucugauga

SEQ ID NO: 1733739 - RNA, 19 nt, Homo sapiens
  misc_RNA (1)...(19): siRNA sense strand
gaaacuuccuguacauaaa

SEQ ID NO: 1733740 - RNA, 19 nt, Homo sapiens
  misc_RNA (1)...(19): siRNA sense strand
gacagaaucuucagacuau

SEQ ID NO: 1733741 - RNA, 19 nt, Homo sapiens
  misc_RNA (1)...(19): siRNA sense strand
gaaacagacuucguaaaga

SEQ ID NO: 1733742 - RNA, 19 nt, Homo sapiens
  misc_RNA (1)...(19): siRNA sense strand
gaaaggagaugaguaugau

SEQ ID NO: 1733743 - RNA, 19 nt, Homo sapiens
  misc_RNA (1)...(19): siRNA sense strand
guaugaagauggagacaaa

SEQ ID NO: 1733744 - RNA, 19 nt, Homo sapiens
  misc_RNA (1)...(19): siRNA sense strand
ugaacgggauuacaacaua

SEQ ID NO: 1733745 - RNA, 19 nt, Homo sapiens
  misc_RNA (1)...(19): siRNA sense strand
gaacauaccccuuuacuga

SEQ ID NO: 1733746 - RNA, 19 nt, Homo sapiens
  misc_RNA (1)...(19): siRNA sense strand
gaacaugacagaaucuuca

SEQ ID NO: 1733747 - RNA, 19 nt, Homo sapiens
  misc_RNA (1)...(19): siRNA sense strand
aaacagacuucguaaagau

SEQ ID NO: 1733748 - RNA, 19 nt, Homo sapiens
  misc_RNA (1)...(19): siRNA sense strand
caagaaaggagaugaguau

SEQ ID NO: 1733749 - RNA, 19 nt, Homo sapiens
  misc_RNA (1)...(19): siRNA sense strand
gaacgggauuacaacauag

SEQ ID NO: 1733750 - RNA, 19 nt, Homo sapiens
  misc_RNA (1)...(19): siRNA sense strand
gaaucccgcucacaucaga

SEQ ID NO: 1733751 - RNA, 19 nt, Homo sapiens
  misc_RNA (1)...(19): siRNA sense strand
ggauagacauagagcuaga

SEQ ID NO: 1733752 - RNA, 19 nt, Homo sapiens
  misc_RNA (1)...(19): siRNA sense strand
agacauagagcuagaagaa

SEQ ID NO: 1733753 - RNA, 19 nt, Homo sapiens
  misc_RNA (1)...(19): siRNA sense strand
ggagaugaguaugauguau

SEQ ID NO: 1733754 - RNA, 19 nt, Homo sapiens
  misc_RNA (1)...(19): siRNA sense strand
uaagaaacuuccuguacau

SEQ ID NO: 1733755 - RNA, 19 nt, Homo sapiens
  misc_RNA (1)...(19): siRNA sense strand
uuaagaaacuuccuguaca

SEQ ID NO: 1733756 - RNA, 19 nt, Homo sapiens
  misc_RNA (1)...(19): siRNA sense strand
agacaguagucaagaagaa

SEQ ID NO: 1733757 - RNA, 19 nt, Homo sapiens
  misc_RNA (1)...(19): siRNA sense strand
guagacccuuggcuaacua

SEQ ID NO: 1733758 - RNA, 19 nt, Homo sapiens
  misc_RNA (1)...(19): siRNA sense strand
gaagacgacaaugaagaua

SEQ ID NO: 1733759 - RNA, 19 nt, Homo sapiens
  misc_RNA (1)...(19): siRNA sense strand
ggaugaguaugaagaugga

SEQ ID NO: 1733760 - RNA, 19 nt, Homo sapiens
  misc_RNA (1)...(19): siRNA sense strand
ggaagacgacaaugaagau

SEQ ID NO: 1733761 - RNA, 19 nt, Homo sapiens
  misc_RNA (1)...(19): siRNA sense strand
caucagaacaugacagaau

SEQ ID NO: 1733762 - RNA, 19 nt, Homo sapiens
  misc_RNA (1)...(19): siRNA sense strand
ugacaguagugaugcagaa

SEQ ID NO: 1733763 - RNA, 19 nt, Homo sapiens
  misc_RNA (1)...(19): siRNA sense strand
ugacagaaucuucagacua

SEQ ID NO: 1733764 - RNA, 19 nt, Homo sapiens
  misc_RNA (1)...(19): siRNA sense strand
uaugauguaugugccauuu

SEQ ID NO: 1733765 - RNA, 19 nt, Homo sapiens
  misc_RNA (1)...(19): siRNA sense strand
ccauuuguuuggaugagua

SEQ ID NO: 1733766 - RNA, 19 nt, Homo sapiens
  misc_RNA (1)...(19): siRNA sense strand
ucaaggcgauucagacucu

SEQ ID NO: 1733767 - RNA, 19 nt, Homo sapiens
  misc_RNA (1)...(19): siRNA sense strand
agaaacuuccuguacauaa

SEQ ID NO: 1733768 - RNA, 19 nt, Homo sapiens
  misc_RNA (1)...(19): siRNA sense strand
ugaggaagacgacaaugaa

SEQ ID NO: 1733769 - RNA, 19 nt, Homo sapiens
  misc_RNA (1)...(19): siRNA sense strand
agaaaggagaugaguauga

SEQ ID NO: 1733770 - RNA, 19 nt, Homo sapiens
  misc_RNA (1)...(19): siRNA sense strand
caggauagacauagagcua

SEQ ID NO: 1733771 - RNA, 19 nt, Homo sapiens
  misc_RNA (1)...(19): siRNA sense strand
agaaacagacuucguaaag

SEQ ID NO: 1733772 - RNA, 19 nt, Homo sapiens
  misc_RNA (1)...(19): siRNA sense strand
ugauguaugugccauuugu

SEQ ID NO: 1733773 - RNA, 19 nt, Homo sapiens
  misc_RNA (1)...(19): siRNA sense strand
gagaugaguaugauguaug

SEQ ID NO: 1733774 - RNA, 19 nt, Homo sapiens
  misc_RNA (1)...(19): siRNA sense strand
gggauuacaacauagcaaa

SEQ ID NO: 1733775 - RNA, 19 nt, Homo sapiens
  misc_RNA (1)...(19): siRNA sense strand
acauagagcuagaagaaac

SEQ ID NO: 1733776 - RNA, 19 nt, Homo sapiens
  misc_RNA (1)...(19): siRNA sense strand
gacagaacauaccccuuua

SEQ ID NO: 1733777 - RNA, 19 nt, Homo sapiens
  misc_RNA (1)...(19): siRNA sense strand
ucaagaaaggagaugagua

SEQ ID NO: 1733778 - RNA, 19 nt, Homo sapiens
  misc_RNA (1)...(19): siRNA sense strand
ucguaaagaucaacuuaag

SEQ ID NO: 1733779 - RNA, 19 nt, Homo sapiens
  misc_RNA (1)...(19): siRNA sense strand
agaugaguaugauguaugu

SEQ ID NO: 1733780 - RNA, 19 nt, Homo sapiens
  misc_RNA (1)...(19): siRNA sense strand
uuacugagaccuuuagcuu

SEQ ID NO: 1733781 - RNA, 19 nt, Homo sapiens
  misc_RNA (1)...(19): siRNA sense strand
cacagacaguagucaagaa

SEQ ID NO: 1733782 - RNA, 19 nt, Homo sapiens
  misc_RNA (1)...(19): siRNA sense strand
cagaaucuucagacuauga

SEQ ID NO: 1733783 - RNA, 19 nt, Homo sapiens
  misc_RNA (1)...(19): siRNA sense strand
cuucguaaagaucaacuua

SEQ ID NO: 1733784 - RNA, 19 nt, Homo sapiens
  misc_RNA (1)...(19): siRNA sense strand
aaaaugaagugacagaaca

SEQ ID NO: 1733785 - RNA, 19 nt, Homo sapiens
  misc_RNA (1)...(19): siRNA sense strand
gacauagagcuagaagaaa

SEQ ID NO: 1733786 - RNA, 19 nt, Homo sapiens
  misc_RNA (1)...(19): siRNA sense strand
gacaguagucaagaagaaa

SEQ ID NO: 1733787 - RNA, 19 nt, Homo sapiens
  misc_RNA (1)...(19): siRNA sense strand
gaucaacuuaagaaacuuc

SEQ ID NO: 1733788 - RNA, 19 nt, Homo sapiens
  misc_RNA (1)...(19): siRNA sense strand
ugacagaacauaccccuuu

SEQ ID NO: 1733789 - RNA, 19 nt, Homo sapiens
  misc_RNA (1)...(19): siRNA sense strand
acugagaccuuuagcuucu

SEQ ID NO: 1733790 - RNA, 19 nt, Homo sapiens
  misc_RNA (1)...(19): siRNA sense strand
agacgacaaugaagauacu

SEQ ID NO: 1733791 - RNA, 19 nt, Homo sapiens
  misc_RNA (1)...(19): siRNA sense strand
ggauuacaacauagcaaau

SEQ ID NO: 1733792 - RNA, 19 nt, Homo sapiens
  misc_RNA (1)...(19): siRNA sense strand
ugucagugcccagucauuu

SEQ ID NO: 1733793 - RNA, 19 nt, Homo sapiens
  misc_RNA (1)...(19): siRNA sense strand
gaggaagacgacaaugaag

SEQ ID NO: 1733794 - RNA, 19 nt, Homo sapiens
  misc_RNA (1)...(19): siRNA sense strand
aagaaacuuccuguacaua

SEQ ID NO: 1733795 - RNA, 19 nt, Homo sapiens
  misc_RNA (1)...(19): siRNA sense strand
acacagacaguagucaaga

SEQ ID NO: 1733796 - RNA, 19 nt, Homo sapiens
  misc_RNA (1)...(19): siRNA sense strand
cguaaagaucaacuuaaga

SEQ ID NO: 1733797 - RNA, 19 nt, Homo sapiens
  misc_RNA (1)...(19): siRNA sense strand
agaagaaaaugaagugaca

SEQ ID NO: 1733798 - RNA, 19 nt, Homo sapiens
  misc_RNA (1)...(19): siRNA sense strand
guucccaugcuuaucauug

SEQ ID NO: 1733799 - RNA, 19 nt, Homo sapiens
  misc_RNA (1)...(19): siRNA sense strand
gauagacauagagcuagaa

SEQ ID NO: 1733800 - RNA, 19 nt, Homo sapiens
  misc_RNA (1)...(19): siRNA sense strand
guagugaugcagaaaauga

SEQ ID NO: 1733801 - RNA, 19 nt, Homo sapiens
  misc_RNA (1)...(19): siRNA sense strand
cggaaucccgcucacauca

SEQ ID NO: 1733802 - RNA, 19 nt, Homo sapiens
  misc_RNA (1)...(19): siRNA sense strand
uguguagacccuuggcuaa

SEQ ID NO: 1733803 - RNA, 19 nt, Homo sapiens
  misc_RNA (1)...(19): siRNA sense strand
uguccagugugcaagcaaa

SEQ ID NO: 1733804 - RNA, 19 nt, Homo sapiens
  misc_RNA (1)...(19): siRNA sense strand
cuuaagaaacuuccuguac

SEQ ID NO: 1733805 - RNA, 19 nt, Homo sapiens
  misc_RNA (1)...(19): siRNA sense strand
aagaaacagacuucguaaa

SEQ ID NO: 1733806 - RNA, 19 nt, Homo sapiens
  misc_RNA (1)...(19): siRNA sense strand
ccgcucacaucagaacaug

SEQ ID NO: 1733807 - RNA, 19 nt, Homo sapiens
  misc_RNA (1)...(19): siRNA sense strand
cacaucagaacaugacaga

SEQ ID NO: 1733808 - RNA, 19 nt, Homo sapiens
  misc_RNA (1)...(19): siRNA sense strand
uaucauugcaaguguguag

SEQ ID NO: 1733809 - RNA, 19 nt, Homo sapiens
  misc_RNA (1)...(19): siRNA sense strand
gacaguagugaugcagaaa

SEQ ID NO: 1733810 - RNA, 19 nt, Homo sapiens
  misc_RNA (1)...(19): siRNA sense strand
gacaaugaagauacugaca

SEQ ID NO: 1733811 - RNA, 19 nt, Homo sapiens
  misc_RNA (1)...(19): siRNA sense strand
gcucacaucagaacaugac

SEQ ID NO: 1733812 - RNA, 19 nt, Homo sapiens
  misc_RNA (1)...(19): siRNA sense strand
accuuuagcuucugucagu

SEQ ID NO: 1733813 - RNA, 19 nt, Homo sapiens
  misc_RNA (1)...(19): siRNA sense strand
ugagaccuuuagcuucugu

SEQ ID NO: 1733814 - RNA, 19 nt, Homo sapiens
  misc_RNA (1)...(19): siRNA sense strand
gaaacuuccuguacauaaa

SEQ ID NO: 1733815 - RNA, 19 nt, Homo sapiens
  misc_RNA (1)...(19): siRNA sense strand
gacagaaucuucagacuau

SEQ ID NO: 1733816 - RNA, 19 nt, Homo sapiens
  misc_RNA (1)...(19): siRNA sense strand
gaaacagacuucguaaaga

SEQ ID NO: 1733817 - RNA, 19 nt, Homo sapiens
  misc_RNA (1)...(19): siRNA sense strand
gaaaggagaugaguaugau

SEQ ID NO: 1733818 - RNA, 19 nt, Homo sapiens
  misc_RNA (1)...(19): siRNA sense strand
guaugaagauggagacaaa

SEQ ID NO: 1733819 - RNA, 19 nt, Homo sapiens
  misc_RNA (1)...(19): siRNA sense strand
ugaacgggauuacaacaua

SEQ ID NO: 1733820 - RNA, 19 nt, Homo sapiens
  misc_RNA (1)...(19): siRNA sense strand
gaacauaccccuuuacuga

SEQ ID NO: 1733821 - RNA, 19 nt, Homo sapiens
  misc_RNA (1)...(19): siRNA sense strand
gaacaugacagaaucuuca

SEQ ID NO: 1733822 - RNA, 19 nt, Homo sapiens
  misc_RNA (1)...(19): siRNA sense strand
aaacagacuucguaaagau

SEQ ID NO: 1733823 - RNA, 19 nt, Homo sapiens
  misc_RNA (1)...(19): siRNA sense strand
caagaaaggagaugaguau

SEQ ID NO: 1733824 - RNA, 19 nt, Homo sapiens
  misc_RNA (1)...(19): siRNA sense strand
gaacgggauuacaacauag

SEQ ID NO: 1733825 - RNA, 19 nt, Homo sapiens
  misc_RNA (1)...(19): siRNA sense strand
gaaucccgcucacaucaga

SEQ ID NO: 1733826 - RNA, 19 nt, Homo sapiens
  misc_RNA (1)...(19): siRNA sense strand
ggauagacauagagcuaga

SEQ ID NO: 1733827 - RNA, 19 nt, Homo sapiens
  misc_RNA (1)...(19): siRNA sense strand
agacauagagcuagaagaa

SEQ ID NO: 1733828 - RNA, 19 nt, Homo sapiens
  misc_RNA (1)...(19): siRNA sense strand
ggagaugaguaugauguau

SEQ ID NO: 1733829 - RNA, 19 nt, Homo sapiens
  misc_RNA (1)...(19): siRNA sense strand
uaagaaacuuccuguacau

SEQ ID NO: 1733830 - RNA, 19 nt, Homo sapiens
  misc_RNA (1)...(19): siRNA sense strand
uuaagaaacuuccuguaca

SEQ ID NO: 1733831 - RNA, 19 nt, Homo sapiens
  misc_RNA (1)...(19): siRNA sense strand
agacaguagucaagaagaa

SEQ ID NO: 1733832 - RNA, 19 nt, Homo sapiens
  misc_RNA (1)...(19): siRNA sense strand
guagacccuuggcuaacua

SEQ ID NO: 1733833 - RNA, 19 nt, Homo sapiens
  misc_RNA (1)...(19): siRNA sense strand
gaagacgacaaugaagaua

SEQ ID NO: 1733834 - RNA, 19 nt, Homo sapiens
  misc_RNA (1)...(19): siRNA sense strand
ggaugaguaugaagaugga

SEQ ID NO: 1733835 - RNA, 19 nt, Homo sapiens
  misc_RNA (1)...(19): siRNA sense strand
ggaagacgacaaugaagau

SEQ ID NO: 1733836 - RNA, 19 nt, Homo sapiens
  misc_RNA (1)...(19): siRNA sense strand
caucagaacaugacagaau

SEQ ID NO: 1733837 - RNA, 19 nt, Homo sapiens
  misc_RNA (1)...(19): siRNA sense strand
ugacaguagugaugcagaa

SEQ ID NO: 1733838 - RNA, 19 nt, Homo sapiens
  misc_RNA (1)...(19): siRNA sense strand
ugacagaaucuucagacua

SEQ ID NO: 1733839 - RNA, 19 nt, Homo sapiens
  misc_RNA (1)...(19): siRNA sense strand
uaugauguaugugccauuu

SEQ ID NO: 1733840 - RNA, 19 nt, Homo sapiens
  misc_RNA (1)...(19): siRNA sense strand
ccauuuguuuggaugagua

SEQ ID NO: 1733841 - RNA, 19 nt, Homo sapiens
  misc_RNA (1)...(19): siRNA sense strand
ucaaggcgauucagacucu

SEQ ID NO: 1733842 - RNA, 19 nt, Homo sapiens
  misc_RNA (1)...(19): siRNA sense strand
agaaacuuccuguacauaa

SEQ ID NO: 1733843 - RNA, 19 nt, Homo sapiens
  misc_RNA (1)...(19): siRNA sense strand
ugaggaagacgacaaugaa

SEQ ID NO: 1733844 - RNA, 19 nt, Homo sapiens
  misc_RNA (1)...(19): siRNA sense strand
agaaaggagaugaguauga

SEQ ID NO: 1733845 - RNA, 19 nt, Homo sapiens
  misc_RNA (1)...(19): siRNA sense strand
caggauagacauagagcua

SEQ ID NO: 1733846 - RNA, 19 nt, Homo sapiens
  misc_RNA (1)...(19): siRNA sense strand
agaaacagacuucguaaag

SEQ ID NO: 1733847 - RNA, 19 nt, Homo sapiens
  misc_RNA (1)...(19): siRNA sense strand
ugauguaugugccauuugu

SEQ ID NO: 1733848 - RNA, 19 nt, Homo sapiens
  misc_RNA (1)...(19): siRNA sense strand
gagaugaguaugauguaug

SEQ ID NO: 1733849 - RNA, 19 nt, Homo sapiens
  misc_RNA (1)...(19): siRNA sense strand
gggauuacaacauagcaaa

SEQ ID NO: 1733850 - RNA, 19 nt, Homo sapiens
  misc_RNA (1)...(19): siRNA sense strand
acauagagcuagaagaaac

SEQ ID NO: 1733851 - RNA, 19 nt, Homo sapiens
  misc_RNA (1)...(19): siRNA sense strand
gacagaacauaccccuuua

SEQ ID NO: 1733852 - RNA, 19 nt, Homo sapiens
  misc_RNA (1)...(19): siRNA sense strand
ucaagaaaggagaugagua

SEQ ID NO: 1733853 - RNA, 19 nt, Homo sapiens
  misc_RNA (1)...(19): siRNA sense strand
ucguaaagaucaacuuaag

SEQ ID NO: 1733854 - RNA, 19 nt, Homo sapiens
  misc_RNA (1)...(19): siRNA sense strand
agaugaguaugauguaugu

SEQ ID NO: 1733855 - RNA, 19 nt, Homo sapiens
  misc_RNA (1)...(19): siRNA sense strand
uuacugagaccuuuagcuu

SEQ ID NO: 1733856 - RNA, 19 nt, Homo sapiens
  misc_RNA (1)...(19): siRNA sense strand
cacagacaguagucaagaa

SEQ ID NO: 1733857 - RNA, 19 nt, Homo sapiens
  misc_RNA (1)...(19): siRNA sense strand
cagaaucuucagacuauga

SEQ ID NO: 1733858 - RNA, 19 nt, Homo sapiens
  misc_RNA (1)...(19): siRNA sense strand
cuucguaaagaucaacuua

SEQ ID NO: 1733859 - RNA, 19 nt, Homo sapiens
  misc_RNA (1)...(19): siRNA sense strand
aaaaugaagugacagaaca

SEQ ID NO: 1733860 - RNA, 19 nt, Homo sapiens
  misc_RNA (1)...(19): siRNA sense strand
gacauagagcuagaagaaa

SEQ ID NO: 1733861 - RNA, 19 nt, Homo sapiens
  misc_RNA (1)...(19): siRNA sense strand
gacaguagucaagaagaaa

SEQ ID NO: 1733862 - RNA, 19 nt, Homo sapiens
  misc_RNA (1)...(19): siRNA sense strand
gaucaacuuaagaaacuuc

SEQ ID NO: 1733863 - RNA, 19 nt, Homo sapiens
  misc_RNA (1)...(19): siRNA sense strand
ugacagaacauaccccuuu

SEQ ID NO: 1733864 - RNA, 19 nt, Homo sapiens
  misc_RNA (1)...(19): siRNA sense strand
acugagaccuuuagcuucu

SEQ ID NO: 1733865 - RNA, 19 nt, Homo sapiens
  misc_RNA (1)...(19): siRNA sense strand
agacgacaaugaagauacu

SEQ ID NO: 1733866 - RNA, 19 nt, Homo sapiens
  misc_RNA (1)...(19): siRNA sense strand
ggauuacaacauagcaaau

SEQ ID NO: 1733867 - RNA, 19 nt, Homo sapiens
  misc_RNA (1)...(19): siRNA sense strand
ugucagugcccagucauuu

SEQ ID NO: 1733868 - RNA, 19 nt, Homo sapiens
  misc_RNA (1)...(19): siRNA sense strand
gaggaagacgacaaugaag

SEQ ID NO: 1733869 - RNA, 19 nt, Homo sapiens
  misc_RNA (1)...(19): siRNA sense strand
aagaaacuuccuguacaua

SEQ ID NO: 1733870 - RNA, 19 nt, Homo sapiens
  misc_RNA (1)...(19): siRNA sense strand
acacagacaguagucaaga

SEQ ID NO: 1733871 - RNA, 19 nt, Homo sapiens
  misc_RNA (1)...(19): siRNA sense strand
cguaaagaucaacuuaaga

SEQ ID NO: 1733872 - RNA, 19 nt, Homo sapiens
  misc_RNA (1)...(19): siRNA sense strand
agaagaaaaugaagugaca

SEQ ID NO: 1733873 - RNA, 19 nt, Homo sapiens
  misc_RNA (1)...(19): siRNA sense strand
guucccaugcuuaucauug

SEQ ID NO: 1733874 - RNA, 19 nt, Homo sapiens
  misc_RNA (1)...(19): siRNA sense strand
gauagacauagagcuagaa

SEQ ID NO: 1733875 - RNA, 19 nt, Homo sapiens
  misc_RNA (1)...(19): siRNA sense strand
guagugaugcagaaaauga

SEQ ID NO: 1733876 - RNA, 19 nt, Homo sapiens
  misc_RNA (1)...(19): siRNA sense strand
cggaaucccgcucacauca

SEQ ID NO: 1733877 - RNA, 19 nt, Homo sapiens
  misc_RNA (1)...(19): siRNA sense strand
uguguagacccuuggcuaa

SEQ ID NO: 1733878 - RNA, 19 nt, Homo sapiens
  misc_RNA (1)...(19): siRNA sense strand
uguccagugugcaagcaaa

SEQ ID NO: 1733879 - RNA, 19 nt, Homo sapiens
  misc_RNA (1)...(19): siRNA sense strand
cuuaagaaacuuccuguac

SEQ ID NO: 1733880 - RNA, 19 nt, Homo sapiens
  misc_RNA (1)...(19): siRNA sense strand
aagaaacagacuucguaaa

SEQ ID NO: 1733881 - RNA, 19 nt, Homo sapiens
  misc_RNA (1)...(19): siRNA sense strand
ccgcucacaucagaacaug

SEQ ID NO: 1733882 - RNA, 19 nt, Homo sapiens
  misc_RNA (1)...(19): siRNA sense strand
cacaucagaacaugacaga

SEQ ID NO: 1733883 - RNA, 19 nt, Homo sapiens
  misc_RNA (1)...(19): siRNA sense strand
uaucauugcaaguguguag

SEQ ID NO: 1733884 - RNA, 19 nt, Homo sapiens
  misc_RNA (1)...(19): siRNA sense strand
gacaguagugaugcagaaa

SEQ ID NO: 1733885 - RNA, 19 nt, Homo sapiens
  misc_RNA (1)...(19): siRNA sense strand
gacaaugaagauacugaca

SEQ ID NO: 1733886 - RNA, 19 nt, Homo sapiens
  misc_RNA (1)...(19): siRNA sense strand
gcucacaucagaacaugac

SEQ ID NO: 1733887 - RNA, 19 nt, Homo sapiens
  misc_RNA (1)...(19): siRNA sense strand
accuuuagcuucugucagu

SEQ ID NO: 1733888 - RNA, 19 nt, Homo sapiens
  misc_RNA (1)...(19): siRNA sense strand
ugagaccuuuagcuucugu

SEQ ID NO: 1733889 - RNA, 19 nt, Homo sapiens
  misc_RNA (1)...(19): siRNA sense strand
acaagaggcugguagagua

SEQ ID NO: 1733890 - RNA, 19 nt, Homo sapiens
  misc_RNA (1)...(19): siRNA sense strand
ggaauucuuucaauacaga

SEQ ID NO: 1733891 - RNA, 19 nt, Homo sapiens
  misc_RNA (1)...(19): siRNA sense strand
aaaugcagguuuacaaaga

SEQ ID NO: 1733892 - RNA, 19 nt, Homo sapiens
  misc_RNA (1)...(19): siRNA sense strand
ugaaagaacaucucaggaa

SEQ ID NO: 1733893 - RNA, 19 nt, Homo sapiens
  misc_RNA (1)...(19): siRNA sense strand
cagaauacuuccuagaauc

SEQ ID NO: 1733894 - RNA, 19 nt, Homo sapiens
  misc_RNA (1)...(19): siRNA sense strand
ccaaaggcccguuaccauu

SEQ ID NO: 1733895 - RNA, 19 nt, Homo sapiens
  misc_RNA (1)...(19): siRNA sense strand
uagaguaacuguccgagau

SEQ ID NO: 1733896 - RNA, 19 nt, Homo sapiens
  misc_RNA (1)...(19): siRNA sense strand
caaaggcccguuaccauug

SEQ ID NO: 1733897 - RNA, 19 nt, Homo sapiens
  misc_RNA (1)...(19): siRNA sense strand
gaacaccuugaacuccuua

SEQ ID NO: 1733898 - RNA, 19 nt, Homo sapiens
  misc_RNA (1)...(19): siRNA sense strand
aaacuccgcuuccgauugg

SEQ ID NO: 1733899 - RNA, 19 nt, Homo sapiens
  misc_RNA (1)...(19): siRNA sense strand
caauacagaauacuuccua

SEQ ID NO: 1733900 - RNA, 19 nt, Homo sapiens
  misc_RNA (1)...(19): siRNA sense strand
gggaaaaggugauuguaga

SEQ ID NO: 1733901 - RNA, 19 nt, Homo sapiens
  misc_RNA (1)...(19): siRNA sense strand
acagaauacuuccuagaau

SEQ ID NO: 1733902 - RNA, 19 nt, Homo sapiens
  misc_RNA (1)...(19): siRNA sense strand
ggaccuccauuuccagucu

SEQ ID NO: 1733903 - RNA, 19 nt, Homo sapiens
  misc_RNA (1)...(19): siRNA sense strand
ggaacaccuugaacuccuu

SEQ ID NO: 1733904 - RNA, 19 nt, Homo sapiens
  misc_RNA (1)...(19): siRNA sense strand
ugaucgagaugguacaaga

SEQ ID NO: 1733905 - RNA, 19 nt, Homo sapiens
  misc_RNA (1)...(19): siRNA sense strand
caagaggcugguagaguaa

SEQ ID NO: 1733906 - RNA, 19 nt, Homo sapiens
  misc_RNA (1)...(19): siRNA sense strand
ggugauaaaggauaaauac

SEQ ID NO: 1733907 - RNA, 19 nt, Homo sapiens
  misc_RNA (1)...(19): siRNA sense strand
uuaagcauaugcacacugu

SEQ ID NO: 1733908 - RNA, 19 nt, Homo sapiens
  misc_RNA (1)...(19): siRNA sense strand
caaacuccgcuuccgauug

SEQ ID NO: 1733909 - RNA, 19 nt, Homo sapiens
  misc_RNA (1)...(19): siRNA sense strand
gagcaggugguggugauaa

SEQ ID NO: 1733910 - RNA, 19 nt, Homo sapiens
  misc_RNA (1)...(19): siRNA sense strand
gcaaacuccgcuuccgauu

SEQ ID NO: 1733911 - RNA, 19 nt, Homo sapiens
  misc_RNA (1)...(19): siRNA sense strand
uaugagccauguacaucuu

SEQ ID NO: 1733912 - RNA, 19 nt, Homo sapiens
  misc_RNA (1)...(19): siRNA sense strand
cuugaacuccuuaagcaua

SEQ ID NO: 1733913 - RNA, 19 nt, Homo sapiens
  misc_RNA (1)...(19): siRNA sense strand
uacagaauacuuccuagaa

SEQ ID NO: 1733914 - RNA, 19 nt, Homo sapiens
  misc_RNA (1)...(19): siRNA sense strand
aagaacaucucaggaagca

SEQ ID NO: 1733915 - RNA, 19 nt, Homo sapiens
  misc_RNA (1)...(19): siRNA sense strand
ugauucuccuugccuuaaa

SEQ ID NO: 1733916 - RNA, 19 nt, Homo sapiens
  misc_RNA (1)...(19): siRNA sense strand
caaaaugcagguuuacaaa

SEQ ID NO: 1733917 - RNA, 19 nt, Homo sapiens
  misc_RNA (1)...(19): siRNA sense strand
caugugaucagccaggauu

SEQ ID NO: 1733918 - RNA, 19 nt, Homo sapiens
  misc_RNA (1)...(19): siRNA sense strand
gaaaaggugauuguagauu

SEQ ID NO: 1733919 - RNA, 19 nt, Homo sapiens
  misc_RNA (1)...(19): siRNA sense strand
aaggauaaauacccaaagg

SEQ ID NO: 1733920 - RNA, 19 nt, Homo sapiens
  misc_RNA (1)...(19): siRNA sense strand
ugggaugccugagcucuug

SEQ ID NO: 1733921 - RNA, 19 nt, Homo sapiens
  misc_RNA (1)...(19): siRNA sense strand
agaauacuuccuagaauca

SEQ ID NO: 1733922 - RNA, 19 nt, Homo sapiens
  misc_RNA (1)...(19): siRNA sense strand
uugaacuccuuaagcauau

SEQ ID NO: 1733923 - RNA, 19 nt, Homo sapiens
  misc_RNA (1)...(19): siRNA sense strand
ggccagggaacaccuugaa

SEQ ID NO: 1733924 - RNA, 19 nt, Homo sapiens
  misc_RNA (1)...(19): siRNA sense strand
gguacaagaggcugguaga

SEQ ID NO: 1733925 - RNA, 19 nt, Homo sapiens
  misc_RNA (1)...(19): siRNA sense strand
uuccucagcugaaagaaca

SEQ ID NO: 1733926 - RNA, 19 nt, Homo sapiens
  misc_RNA (1)...(19): siRNA sense strand
gaguaugagccauguacau

SEQ ID NO: 1733927 - RNA, 19 nt, Homo sapiens
  misc_RNA (1)...(19): siRNA sense strand
cagcugaaagaacaucuca

SEQ ID NO: 1733928 - RNA, 19 nt, Homo sapiens
  misc_RNA (1)...(19): siRNA sense strand
gugguggugauaaaggaua

SEQ ID NO: 1733929 - RNA, 19 nt, Homo sapiens
  misc_RNA (1)...(19): siRNA sense strand
aaaggcccguuaccauugg

SEQ ID NO: 1733930 - RNA, 19 nt, Homo sapiens
  misc_RNA (1)...(19): siRNA sense strand
ccaaaaugcagguuuacaa

SEQ ID NO: 1733931 - RNA, 19 nt, Homo sapiens
  misc_RNA (1)...(19): siRNA sense strand
aaugcagguuuacaaagau

SEQ ID NO: 1733932 - RNA, 19 nt, Homo sapiens
  misc_RNA (1)...(19): siRNA sense strand
ugguggugauaaaggauaa

SEQ ID NO: 1733933 - RNA, 19 nt, Homo sapiens
  misc_RNA (1)...(19): siRNA sense strand
gaaucagacuuccacauuu

SEQ ID NO: 1733934 - RNA, 19 nt, Homo sapiens
  misc_RNA (1)...(19): siRNA sense strand
caagggauaugucaaggua

SEQ ID NO: 1733935 - RNA, 19 nt, Homo sapiens
  misc_RNA (1)...(19): siRNA sense strand
gaaauguucucgacagcaa

SEQ ID NO: 1733936 - RNA, 19 nt, Homo sapiens
  misc_RNA (1)...(19): siRNA sense strand
ggaauucuuucaauacaga

SEQ ID NO: 1733937 - RNA, 19 nt, Homo sapiens
  misc_RNA (1)...(19): siRNA sense strand
gagcaacucuggccaaugc

SEQ ID NO: 1733938 - RNA, 19 nt, Homo sapiens
  misc_RNA (1)...(19): siRNA sense strand
aaagaacccuggccuggaa

SEQ ID NO: 1733939 - RNA, 19 nt, Homo sapiens
  misc_RNA (1)...(19): siRNA sense strand
aaaugcagguuuacaaaga

SEQ ID NO: 1733940 - RNA, 19 nt, Homo sapiens
  misc_RNA (1)...(19): siRNA sense strand
gaaacacacaggaagagaa

SEQ ID NO: 1733941 - RNA, 19 nt, Homo sapiens
  misc_RNA (1)...(19): siRNA sense strand
cgaaucagacuuccacauu

SEQ ID NO: 1733942 - RNA, 19 nt, Homo sapiens
  misc_RNA (1)...(19): siRNA sense strand
aaucagacuuccacauuug

SEQ ID NO: 1733943 - RNA, 19 nt, Homo sapiens
  misc_RNA (1)...(19): siRNA sense strand
cagaauacuuccuagaauc

SEQ ID NO: 1733944 - RNA, 19 nt, Homo sapiens
  misc_RNA (1)...(19): siRNA sense strand
gaaagcagaguguaacaag

SEQ ID NO: 1733945 - RNA, 19 nt, Homo sapiens
  misc_RNA (1)...(19): siRNA sense strand
ccaaaggcccguuaccauu

SEQ ID NO: 1733946 - RNA, 19 nt, Homo sapiens
  misc_RNA (1)...(19): siRNA sense strand
caaaggcccguuaccauug

SEQ ID NO: 1733947 - RNA, 19 nt, Homo sapiens
  misc_RNA (1)...(19): siRNA sense strand
gaacaccuugaacuccuua

SEQ ID NO: 1733948 - RNA, 19 nt, Homo sapiens
  misc_RNA (1)...(19): siRNA sense strand
agaaagagaucaggcaaca

SEQ ID NO: 1733949 - RNA, 19 nt, Homo sapiens
  misc_RNA (1)...(19): siRNA sense strand
aggcaacagugauucuaua

SEQ ID NO: 1733950 - RNA, 19 nt, Homo sapiens
  misc_RNA (1)...(19): siRNA sense strand
aaacuccgcuuccgauugg

SEQ ID NO: 1733951 - RNA, 19 nt, Homo sapiens
  misc_RNA (1)...(19): siRNA sense strand
caauacagaauacuuccua

SEQ ID NO: 1733952 - RNA, 19 nt, Homo sapiens
  misc_RNA (1)...(19): siRNA sense strand
gggaaaaggugauuguaga

SEQ ID NO: 1733953 - RNA, 19 nt, Homo sapiens
  misc_RNA (1)...(19): siRNA sense strand
acagaauacuuccuagaau

SEQ ID NO: 1733954 - RNA, 19 nt, Homo sapiens
  misc_RNA (1)...(19): siRNA sense strand
ggaccuccauuuccagucu

SEQ ID NO: 1733955 - RNA, 19 nt, Homo sapiens
  misc_RNA (1)...(19): siRNA sense strand
aaacacacaggaagagaaa

SEQ ID NO: 1733956 - RNA, 19 nt, Homo sapiens
  misc_RNA (1)...(19): siRNA sense strand
ggaacaccuugaacuccuu

SEQ ID NO: 1733957 - RNA, 19 nt, Homo sapiens
  misc_RNA (1)...(19): siRNA sense strand
gcuugaagauuucuaugca

SEQ ID NO: 1733958 - RNA, 19 nt, Homo sapiens
  misc_RNA (1)...(19): siRNA sense strand
uaacaagggauaugucaag

SEQ ID NO: 1733959 - RNA, 19 nt, Homo sapiens
  misc_RNA (1)...(19): siRNA sense strand
agggauaugucaagguaaa

SEQ ID NO: 1733960 - RNA, 19 nt, Homo sapiens
  misc_RNA (1)...(19): siRNA sense strand
uuaagcauaugcacacugu

SEQ ID NO: 1733961 - RNA, 19 nt, Homo sapiens
  misc_RNA (1)...(19): siRNA sense strand
ggugauaaaggauaaauac

SEQ ID NO: 1733962 - RNA, 19 nt, Homo sapiens
  misc_RNA (1)...(19): siRNA sense strand
ucacugauaagaaauguuc

SEQ ID NO: 1733963 - RNA, 19 nt, Homo sapiens
  misc_RNA (1)...(19): siRNA sense strand
gcaacagugauucuauaga

SEQ ID NO: 1733964 - RNA, 19 nt, Homo sapiens
  misc_RNA (1)...(19): siRNA sense strand
caaacuccgcuuccgauug

SEQ ID NO: 1733965 - RNA, 19 nt, Homo sapiens
  misc_RNA (1)...(19): siRNA sense strand
gagcaggugguggugauaa

SEQ ID NO: 1733966 - RNA, 19 nt, Homo sapiens
  misc_RNA (1)...(19): siRNA sense strand
gcaaacuccgcuuccgauu

SEQ ID NO: 1733967 - RNA, 19 nt, Homo sapiens
  misc_RNA (1)...(19): siRNA sense strand
ggaaacacacaggaagaga

SEQ ID NO: 1733968 - RNA, 19 nt, Homo sapiens
  misc_RNA (1)...(19): siRNA sense strand
uaugagccauguacaucuu

SEQ ID NO: 1733969 - RNA, 19 nt, Homo sapiens
  misc_RNA (1)...(19): siRNA sense strand
gaaaagaugcaccuaucaa

SEQ ID NO: 1733970 - RNA, 19 nt, Homo sapiens
  misc_RNA (1)...(19): siRNA sense strand
aaagagaucaggcaacagu

SEQ ID NO: 1733971 - RNA, 19 nt, Homo sapiens
  misc_RNA (1)...(19): siRNA sense strand
gggaaaagaugcaccuauc

SEQ ID NO: 1733972 - RNA, 19 nt, Homo sapiens
  misc_RNA (1)...(19): siRNA sense strand
uacagaauacuuccuagaa

SEQ ID NO: 1733973 - RNA, 19 nt, Homo sapiens
  misc_RNA (1)...(19): siRNA sense strand
cuugaacuccuuaagcaua

SEQ ID NO: 1733974 - RNA, 19 nt, Homo sapiens
  misc_RNA (1)...(19): siRNA sense strand
gggagcaacucuggccaau

SEQ ID NO: 1733975 - RNA, 19 nt, Homo sapiens
  misc_RNA (1)...(19): siRNA sense strand
acacacaggaagagaaaga

SEQ ID NO: 1733976 - RNA, 19 nt, Homo sapiens
  misc_RNA (1)...(19): siRNA sense strand
ugauucuccuugccuuaaa

SEQ ID NO: 1733977 - RNA, 19 nt, Homo sapiens
  misc_RNA (1)...(19): siRNA sense strand
cagaguguaacaagggaua

SEQ ID NO: 1733978 - RNA, 19 nt, Homo sapiens
  misc_RNA (1)...(19): siRNA sense strand
aagggaugcugcucaggaa

SEQ ID NO: 1733979 - RNA, 19 nt, Homo sapiens
  misc_RNA (1)...(19): siRNA sense strand
caugugaucagccaggauu

SEQ ID NO: 1733980 - RNA, 19 nt, Homo sapiens
  misc_RNA (1)...(19): siRNA sense strand
caaaaugcagguuuacaaa

SEQ ID NO: 1733981 - RNA, 19 nt, Homo sapiens
  misc_RNA (1)...(19): siRNA sense strand
gaaaaggugauuguagauu

SEQ ID NO: 1733982 - RNA, 19 nt, Homo sapiens
  misc_RNA (1)...(19): siRNA sense strand
uggaagcaguugugauugg

SEQ ID NO: 1733983 - RNA, 19 nt, Homo sapiens
  misc_RNA (1)...(19): siRNA sense strand
agaauacuuccuagaauca

SEQ ID NO: 1733984 - RNA, 19 nt, Homo sapiens
  misc_RNA (1)...(19): siRNA sense strand
uugaacuccuuaagcauau

SEQ ID NO: 1733985 - RNA, 19 nt, Homo sapiens
  misc_RNA (1)...(19): siRNA sense strand
aaggauaaauacccaaagg

SEQ ID NO: 1733986 - RNA, 19 nt, Homo sapiens
  misc_RNA (1)...(19): siRNA sense strand
uuuggaagcaguugugauu

SEQ ID NO: 1733987 - RNA, 19 nt, Homo sapiens
  misc_RNA (1)...(19): siRNA sense strand
cagagaccaagaucacuga

SEQ ID NO: 1733988 - RNA, 19 nt, Homo sapiens
  misc_RNA (1)...(19): siRNA sense strand
ggccagggaacaccuugaa

SEQ ID NO: 1733989 - RNA, 19 nt, Homo sapiens
  misc_RNA (1)...(19): siRNA sense strand
guaacaagggauaugucaa

SEQ ID NO: 1733990 - RNA, 19 nt, Homo sapiens
  misc_RNA (1)...(19): siRNA sense strand
agagaucaggcaacaguga

SEQ ID NO: 1733991 - RNA, 19 nt, Homo sapiens
  misc_RNA (1)...(19): siRNA sense strand
gaguaugagccauguacau

SEQ ID NO: 1733992 - RNA, 19 nt, Homo sapiens
  misc_RNA (1)...(19): siRNA sense strand
caccagcgaaucagacuuc

SEQ ID NO: 1733993 - RNA, 19 nt, Homo sapiens
  misc_RNA (1)...(19): siRNA sense strand
ugaaagcagaguguaacaa

SEQ ID NO: 1733994 - RNA, 19 nt, Homo sapiens
  misc_RNA (1)...(19): siRNA sense strand
ggaaaagaugcaccuauca

SEQ ID NO: 1733995 - RNA, 19 nt, Homo sapiens
  misc_RNA (1)...(19): siRNA sense strand
ggcaacagugauucuauag

SEQ ID NO: 1733996 - RNA, 19 nt, Homo sapiens
  misc_RNA (1)...(19): siRNA sense strand
aaaggcccguuaccauugg

SEQ ID NO: 1733997 - RNA, 19 nt, Homo sapiens
  misc_RNA (1)...(19): siRNA sense strand
ugguggugauaaaggauaa

SEQ ID NO: 1733998 - RNA, 19 nt, Homo sapiens
  misc_RNA (1)...(19): siRNA sense strand
gugguggugauaaaggaua

SEQ ID NO: 1733999 - RNA, 19 nt, Homo sapiens
  misc_RNA (1)...(19): siRNA sense strand
aaugcagguuuacaaagau

SEQ ID NO: 1734000 - RNA, 19 nt, Homo sapiens
  misc_RNA (1)...(19): siRNA sense strand
ccaaaaugcagguuuacaa

SEQ ID NO: 1734001 - RNA, 19 nt, Homo sapiens
  misc_RNA (1)...(19): siRNA sense strand
acaagaggcugguagagua

SEQ ID NO: 1734002 - RNA, 19 nt, Homo sapiens
  misc_RNA (1)...(19): siRNA sense strand
ggaauucuuucaauacaga

SEQ ID NO: 1734003 - RNA, 19 nt, Homo sapiens
  misc_RNA (1)...(19): siRNA sense strand
aaaugcagguuuacaaaga

SEQ ID NO: 1734004 - RNA, 19 nt, Homo sapiens
  misc_RNA (1)...(19): siRNA sense strand
ugaaagaacaucucaggaa

SEQ ID NO: 1734005 - RNA, 19 nt, Homo sapiens
  misc_RNA (1)...(19): siRNA sense strand
cagaauacuuccuagaauc

SEQ ID NO: 1734006 - RNA, 19 nt, Homo sapiens
  misc_RNA (1)...(19): siRNA sense strand
ccaaaggcccguuaccauu

SEQ ID NO: 1734007 - RNA, 19 nt, Homo sapiens
  misc_RNA (1)...(19): siRNA sense strand
uagaguaacuguccgagau

SEQ ID NO: 1734008 - RNA, 19 nt, Homo sapiens
  misc_RNA (1)...(19): siRNA sense strand
caaaggcccguuaccauug

SEQ ID NO: 1734009 - RNA, 19 nt, Homo sapiens
  misc_RNA (1)...(19): siRNA sense strand
gaacaccuugaacuccuua

SEQ ID NO: 1734010 - RNA, 19 nt, Homo sapiens
  misc_RNA (1)...(19): siRNA sense strand
aaacuccgcuuccgauugg

SEQ ID NO: 1734011 - RNA, 19 nt, Homo sapiens
  misc_RNA (1)...(19): siRNA sense strand
caauacagaauacuuccua

SEQ ID NO: 1734012 - RNA, 19 nt, Homo sapiens
  misc_RNA (1)...(19): siRNA sense strand
gggaaaaggugauuguaga

SEQ ID NO: 1734013 - RNA, 19 nt, Homo sapiens
  misc_RNA (1)...(19): siRNA sense strand
acagaauacuuccuagaau

SEQ ID NO: 1734014 - RNA, 19 nt, Homo sapiens
  misc_RNA (1)...(19): siRNA sense strand
ggaccuccauuuccagucu

SEQ ID NO: 1734015 - RNA, 19 nt, Homo sapiens
  misc_RNA (1)...(19): siRNA sense strand
ggaacaccuugaacuccuu

SEQ ID NO: 1734016 - RNA, 19 nt, Homo sapiens
  misc_RNA (1)...(19): siRNA sense strand
ugaucgagaugguacaaga

SEQ ID NO: 1734017 - RNA, 19 nt, Homo sapiens
  misc_RNA (1)...(19): siRNA sense strand
caagaggcugguagaguaa

SEQ ID NO: 1734018 - RNA, 19 nt, Homo sapiens
  misc_RNA (1)...(19): siRNA sense strand
ggugauaaaggauaaauac

SEQ ID NO: 1734019 - RNA, 19 nt, Homo sapiens
  misc_RNA (1)...(19): siRNA sense strand
uuaagcauaugcacacugu

SEQ ID NO: 1734020 - RNA, 19 nt, Homo sapiens
  misc_RNA (1)...(19): siRNA sense strand
caaacuccgcuuccgauug

SEQ ID NO: 1734021 - RNA, 19 nt, Homo sapiens
  misc_RNA (1)...(19): siRNA sense strand
gagcaggugguggugauaa

SEQ ID NO: 1734022 - RNA, 19 nt, Homo sapiens
  misc_RNA (1)...(19): siRNA sense strand
gcaaacuccgcuuccgauu

SEQ ID NO: 1734023 - RNA, 19 nt, Homo sapiens
  misc_RNA (1)...(19): siRNA sense strand
uaugagccauguacaucuu

SEQ ID NO: 1734024 - RNA, 19 nt, Homo sapiens
  misc_RNA (1)...(19): siRNA sense strand
cuugaacuccuuaagcaua

SEQ ID NO: 1734025 - RNA, 19 nt, Homo sapiens
  misc_RNA (1)...(19): siRNA sense strand
uacagaauacuuccuagaa

SEQ ID NO: 1734026 - RNA, 19 nt, Homo sapiens
  misc_RNA (1)...(19): siRNA sense strand
aagaacaucucaggaagca

SEQ ID NO: 1734027 - RNA, 19 nt, Homo sapiens
  misc_RNA (1)...(19): siRNA sense strand
ugauucuccuugccuuaaa

SEQ ID NO: 1734028 - RNA, 19 nt, Homo sapiens
  misc_RNA (1)...(19): siRNA sense strand
caaaaugcagguuuacaaa

SEQ ID NO: 1734029 - RNA, 19 nt, Homo sapiens
  misc_RNA (1)...(19): siRNA sense strand
caugugaucagccaggauu

SEQ ID NO: 1734030 - RNA, 19 nt, Homo sapiens
  misc_RNA (1)...(19): siRNA sense strand
gaaaaggugauuguagauu

SEQ ID NO: 1734031 - RNA, 19 nt, Homo sapiens
  misc_RNA (1)...(19): siRNA sense strand
aaggauaaauacccaaagg

SEQ ID NO: 1734032 - RNA, 19 nt, Homo sapiens
  misc_RNA (1)...(19): siRNA sense strand
ugggaugccugagcucuug

SEQ ID NO: 1734033 - RNA, 19 nt, Homo sapiens
  misc_RNA (1)...(19): siRNA sense strand
agaauacuuccuagaauca

SEQ ID NO: 1734034 - RNA, 19 nt, Homo sapiens
  misc_RNA (1)...(19): siRNA sense strand
uugaacuccuuaagcauau

SEQ ID NO: 1734035 - RNA, 19 nt, Homo sapiens
  misc_RNA (1)...(19): siRNA sense strand
ggccagggaacaccuugaa

SEQ ID NO: 1734036 - RNA, 19 nt, Homo sapiens
  misc_RNA (1)...(19): siRNA sense strand
gguacaagaggcugguaga

SEQ ID NO: 1734037 - RNA, 19 nt, Homo sapiens
  misc_RNA (1)...(19): siRNA sense strand
uuccucagcugaaagaaca

SEQ ID NO: 1734038 - RNA, 19 nt, Homo sapiens
  misc_RNA (1)...(19): siRNA sense strand
gaguaugagccauguacau

SEQ ID NO: 1734039 - RNA, 19 nt, Homo sapiens
  misc_RNA (1)...(19): siRNA sense strand
cagcugaaagaacaucuca

SEQ ID NO: 1734040 - RNA, 19 nt, Homo sapiens
  misc_RNA (1)...(19): siRNA sense strand
gugguggugauaaaggaua

SEQ ID NO: 1734041 - RNA, 19 nt, Homo sapiens
  misc_RNA (1)...(19): siRNA sense strand
aaaggcccguuaccauugg

SEQ ID NO: 1734042 - RNA, 19 nt, Homo sapiens
  misc_RNA (1)...(19): siRNA sense strand
ccaaaaugcagguuuacaa

SEQ ID NO: 1734043 - RNA, 19 nt, Homo sapiens
  misc_RNA (1)...(19): siRNA sense strand
aaugcagguuuacaaagau

SEQ ID NO: 1734044 - RNA, 19 nt, Homo sapiens
  misc_RNA (1)...(19): siRNA sense strand
ugguggugauaaaggauaa

SEQ ID NO: 1734045 - RNA, 19 nt, Homo sapiens
  misc_RNA (1)...(19): siRNA sense strand
acaagaggcugguagagua

SEQ ID NO: 1734046 - RNA, 19 nt, Homo sapiens
  misc_RNA (1)...(19): siRNA sense strand
ggaauucuuucaauacaga

SEQ ID NO: 1734047 - RNA, 19 nt, Homo sapiens
  misc_RNA (1)...(19): siRNA sense strand
gagcaacucuggccaaugc

SEQ ID NO: 1734048 - RNA, 19 nt, Homo sapiens
  misc_RNA (1)...(19): siRNA sense strand
aaagaacccuggccuggaa

SEQ ID NO: 1734049 - RNA, 19 nt, Homo sapiens
  misc_RNA (1)...(19): siRNA sense strand
aaaugcagguuuacaaaga

SEQ ID NO: 1734050 - RNA, 19 nt, Homo sapiens
  misc_RNA (1)...(19): siRNA sense strand
ugaaagaacaucucaggaa

SEQ ID NO: 1734051 - RNA, 19 nt, Homo sapiens
  misc_RNA (1)...(19): siRNA sense strand
gaaacacacaggaagagaa

SEQ ID NO: 1734052 - RNA, 19 nt, Homo sapiens
  misc_RNA (1)...(19): siRNA sense strand
cagaauacuuccuagaauc

SEQ ID NO: 1734053 - RNA, 19 nt, Homo sapiens
  misc_RNA (1)...(19): siRNA sense strand
ccaaaggcccguuaccauu

SEQ ID NO: 1734054 - RNA, 19 nt, Homo sapiens
  misc_RNA (1)...(19): siRNA sense strand
uagaguaacuguccgagau

SEQ ID NO: 1734055 - RNA, 19 nt, Homo sapiens
  misc_RNA (1)...(19): siRNA sense strand
caaaggcccguuaccauug

SEQ ID NO: 1734056 - RNA, 19 nt, Homo sapiens
  misc_RNA (1)...(19): siRNA sense strand
gaacaccuugaacuccuua

SEQ ID NO: 1734057 - RNA, 19 nt, Homo sapiens
  misc_RNA (1)...(19): siRNA sense strand
agaaagagaucaggcaaca

SEQ ID NO: 1734058 - RNA, 19 nt, Homo sapiens
  misc_RNA (1)...(19): siRNA sense strand
aggcaacagugauucuaua

SEQ ID NO: 1734059 - RNA, 19 nt, Homo sapiens
  misc_RNA (1)...(19): siRNA sense strand
aaacuccgcuuccgauugg

SEQ ID NO: 1734060 - RNA, 19 nt, Homo sapiens
  misc_RNA (1)...(19): siRNA sense strand
caauacagaauacuuccua

SEQ ID NO: 1734061 - RNA, 19 nt, Homo sapiens
  misc_RNA (1)...(19): siRNA sense strand
gggaaaaggugauuguaga

SEQ ID NO: 1734062 - RNA, 19 nt, Homo sapiens
  misc_RNA (1)...(19): siRNA sense strand
acagaauacuuccuagaau

SEQ ID NO: 1734063 - RNA, 19 nt, Homo sapiens
  misc_RNA (1)...(19): siRNA sense strand
ggaccuccauuuccagucu

SEQ ID NO: 1734064 - RNA, 19 nt, Homo sapiens
  misc_RNA (1)...(19): siRNA sense strand
aaacacacaggaagagaaa

SEQ ID NO: 1734065 - RNA, 19 nt, Homo sapiens
  misc_RNA (1)...(19): siRNA sense strand
ggaacaccuugaacuccuu

SEQ ID NO: 1734066 - RNA, 19 nt, Homo sapiens
  misc_RNA (1)...(19): siRNA sense strand
gcuugaagauuucuaugca

SEQ ID NO: 1734067 - RNA, 19 nt, Homo sapiens
  misc_RNA (1)...(19): siRNA sense strand
ugaucgagaugguacaaga

SEQ ID NO: 1734068 - RNA, 19 nt, Homo sapiens
  misc_RNA (1)...(19): siRNA sense strand
caagaggcugguagaguaa

SEQ ID NO: 1734069 - RNA, 19 nt, Homo sapiens
  misc_RNA (1)...(19): siRNA sense strand
ggugauaaaggauaaauac

SEQ ID NO: 1734070 - RNA, 19 nt, Homo sapiens
  misc_RNA (1)...(19): siRNA sense strand
uuaagcauaugcacacugu

SEQ ID NO: 1734071 - RNA, 19 nt, Homo sapiens
  misc_RNA (1)...(19): siRNA sense strand
gcaacagugauucuauaga

SEQ ID NO: 1734072 - RNA, 19 nt, Homo sapiens
  misc_RNA (1)...(19): siRNA sense strand
caaacuccgcuuccgauug

SEQ ID NO: 1734073 - RNA, 19 nt, Homo sapiens
  misc_RNA (1)...(19): siRNA sense strand
gagcaggugguggugauaa

SEQ ID NO: 1734074 - RNA, 19 nt, Homo sapiens
  misc_RNA (1)...(19): siRNA sense strand
gcaaacuccgcuuccgauu

SEQ ID NO: 1734075 - RNA, 19 nt, Homo sapiens
  misc_RNA (1)...(19): siRNA sense strand
gaaaagaugcaccuaucaa

SEQ ID NO: 1734076 - RNA, 19 nt, Homo sapiens
  misc_RNA (1)...(19): siRNA sense strand
uaugagccauguacaucuu

SEQ ID NO: 1734077 - RNA, 19 nt, Homo sapiens
  misc_RNA (1)...(19): siRNA sense strand
aaagagaucaggcaacagu

SEQ ID NO: 1734078 - RNA, 19 nt, Homo sapiens
  misc_RNA (1)...(19): siRNA sense strand
ggaaacacacaggaagaga

SEQ ID NO: 1734079 - RNA, 19 nt, Homo sapiens
  misc_RNA (1)...(19): siRNA sense strand
gggaaaagaugcaccuauc

SEQ ID NO: 1734080 - RNA, 19 nt, Homo sapiens
  misc_RNA (1)...(19): siRNA sense strand
uacagaauacuuccuagaa

SEQ ID NO: 1734081 - RNA, 19 nt, Homo sapiens
  misc_RNA (1)...(19): siRNA sense strand
cuugaacuccuuaagcaua

SEQ ID NO: 1734082 - RNA, 19 nt, Homo sapiens
  misc_RNA (1)...(19): siRNA sense strand
gggagcaacucuggccaau

SEQ ID NO: 1734083 - RNA, 19 nt, Homo sapiens
  misc_RNA (1)...(19): siRNA sense strand
aagaacaucucaggaagca

SEQ ID NO: 1734084 - RNA, 19 nt, Homo sapiens
  misc_RNA (1)...(19): siRNA sense strand
acacacaggaagagaaaga

SEQ ID NO: 1734085 - RNA, 19 nt, Homo sapiens
  misc_RNA (1)...(19): siRNA sense strand
ugauucuccuugccuuaaa

SEQ ID NO: 1734086 - RNA, 19 nt, Homo sapiens
  misc_RNA (1)...(19): siRNA sense strand
caaaaugcagguuuacaaa

SEQ ID NO: 1734087 - RNA, 19 nt, Homo sapiens
  misc_RNA (1)...(19): siRNA sense strand
caugugaucagccaggauu

SEQ ID NO: 1734088 - RNA, 19 nt, Homo sapiens
  misc_RNA (1)...(19): siRNA sense strand
aagggaugcugcucaggaa

SEQ ID NO: 1734089 - RNA, 19 nt, Homo sapiens
  misc_RNA (1)...(19): siRNA sense strand
gaaaaggugauuguagauu

SEQ ID NO: 1734090 - RNA, 19 nt, Homo sapiens
  misc_RNA (1)...(19): siRNA sense strand
aaggauaaauacccaaagg

SEQ ID NO: 1734091 - RNA, 19 nt, Homo sapiens
  misc_RNA (1)...(19): siRNA sense strand
ugggaugccugagcucuug

SEQ ID NO: 1734092 - RNA, 19 nt, Homo sapiens
  misc_RNA (1)...(19): siRNA sense strand
agaauacuuccuagaauca

SEQ ID NO: 1734093 - RNA, 19 nt, Homo sapiens
  misc_RNA (1)...(19): siRNA sense strand
uugaacuccuuaagcauau

SEQ ID NO: 1734094 - RNA, 19 nt, Homo sapiens
  misc_RNA (1)...(19): siRNA sense strand
ggccagggaacaccuugaa

SEQ ID NO: 1734095 - RNA, 19 nt, Homo sapiens
  misc_RNA (1)...(19): siRNA sense strand
gguacaagaggcugguaga

SEQ ID NO: 1734096 - RNA, 19 nt, Homo sapiens
  misc_RNA (1)...(19): siRNA sense strand
uuccucagcugaaagaaca

SEQ ID NO: 1734097 - RNA, 19 nt, Homo sapiens
  misc_RNA (1)...(19): siRNA sense strand
agagaucaggcaacaguga

SEQ ID NO: 1734098 - RNA, 19 nt, Homo sapiens
  misc_RNA (1)...(19): siRNA sense strand
gaguaugagccauguacau

SEQ ID NO: 1734099 - RNA, 19 nt, Homo sapiens
  misc_RNA (1)...(19): siRNA sense strand
ggaaaagaugcaccuauca

SEQ ID NO: 1734100 - RNA, 19 nt, Homo sapiens
  misc_RNA (1)...(19): siRNA sense strand
cagcugaaagaacaucuca

SEQ ID NO: 1734101 - RNA, 19 nt, Homo sapiens
  misc_RNA (1)...(19): siRNA sense strand
ccaaaaugcagguuuacaa

SEQ ID NO: 1734102 - RNA, 19 nt, Homo sapiens
  misc_RNA (1)...(19): siRNA sense strand
ggcaacagugauucuauag

SEQ ID NO: 1734103 - RNA, 19 nt, Homo sapiens
  misc_RNA (1)...(19): siRNA sense strand
aaaggcccguuaccauugg

SEQ ID NO: 1734104 - RNA, 19 nt, Homo sapiens
  misc_RNA (1)...(19): siRNA sense strand
ugguggugauaaaggauaa

SEQ ID NO: 1734105 - RNA, 19 nt, Homo sapiens
  misc_RNA (1)...(19): siRNA sense strand
gugguggugauaaaggaua

SEQ ID NO: 1734106 - RNA, 19 nt, Homo sapiens
  misc_RNA (1)...(19): siRNA sense strand
aaugcagguuuacaaagau

SEQ ID NO: 1734107 - RNA, 19 nt, Homo sapiens
  misc_RNA (1)...(19): siRNA sense strand
gaaucagacuuccacauuu

SEQ ID NO: 1734108 - RNA, 19 nt, Homo sapiens
  misc_RNA (1)...(19): siRNA sense strand
caagggauaugucaaggua

SEQ ID NO: 1734109 - RNA, 19 nt, Homo sapiens
  misc_RNA (1)...(19): siRNA sense strand
gaaauguucucgacagcaa

SEQ ID NO: 1734110 - RNA, 19 nt, Homo sapiens
  misc_RNA (1)...(19): siRNA sense strand
acaagaggcugguagagua

SEQ ID NO: 1734111 - RNA, 19 nt, Homo sapiens
  misc_RNA (1)...(19): siRNA sense strand
ggaauucuuucaauacaga

SEQ ID NO: 1734112 - RNA, 19 nt, Homo sapiens
  misc_RNA (1)...(19): siRNA sense strand
gagcaacucuggccaaugc

SEQ ID NO: 1734113 - RNA, 19 nt, Homo sapiens
  misc_RNA (1)...(19): siRNA sense strand
aaagaacccuggccuggaa

SEQ ID NO: 1734114 - RNA, 19 nt, Homo sapiens
  misc_RNA (1)...(19): siRNA sense strand
aaaugcagguuuacaaaga

SEQ ID NO: 1734115 - RNA, 19 nt, Homo sapiens
  misc_RNA (1)...(19): siRNA sense strand
ugaaagaacaucucaggaa

SEQ ID NO: 1734116 - RNA, 19 nt, Homo sapiens
  misc_RNA (1)...(19): siRNA sense strand
gaaacacacaggaagagaa

SEQ ID NO: 1734117 - RNA, 19 nt, Homo sapiens
  misc_RNA (1)...(19): siRNA sense strand
cgaaucagacuuccacauu

SEQ ID NO: 1734118 - RNA, 19 nt, Homo sapiens
  misc_RNA (1)...(19): siRNA sense strand
aaucagacuuccacauuug

SEQ ID NO: 1734119 - RNA, 19 nt, Homo sapiens
  misc_RNA (1)...(19): siRNA sense strand
cagaauacuuccuagaauc

SEQ ID NO: 1734120 - RNA, 19 nt, Homo sapiens
  misc_RNA (1)...(19): siRNA sense strand
gaaagcagaguguaacaag

SEQ ID NO: 1734121 - RNA, 19 nt, Homo sapiens
  misc_RNA (1)...(19): siRNA sense strand
ccaaaggcccguuaccauu

SEQ ID NO: 1734122 - RNA, 19 nt, Homo sapiens
  misc_RNA (1)...(19): siRNA sense strand
uagaguaacuguccgagau

SEQ ID NO: 1734123 - RNA, 19 nt, Homo sapiens
  misc_RNA (1)...(19): siRNA sense strand
caaaggcccguuaccauug

SEQ ID NO: 1734124 - RNA, 19 nt, Homo sapiens
  misc_RNA (1)...(19): siRNA sense strand
gaacaccuugaacuccuua

SEQ ID NO: 1734125 - RNA, 19 nt, Homo sapiens
  misc_RNA (1)...(19): siRNA sense strand
agaaagagaucaggcaaca

SEQ ID NO: 1734126 - RNA, 19 nt, Homo sapiens
  misc_RNA (1)...(19): siRNA sense strand
aggcaacagugauucuaua

SEQ ID NO: 1734127 - RNA, 19 nt, Homo sapiens
  misc_RNA (1)...(19): siRNA sense strand
aaacuccgcuuccgauugg

SEQ ID NO: 1734128 - RNA, 19 nt, Homo sapiens
  misc_RNA (1)...(19): siRNA sense strand
caauacagaauacuuccua

SEQ ID NO: 1734129 - RNA, 19 nt, Homo sapiens
  misc_RNA (1)...(19): siRNA sense strand
gggaaaaggugauuguaga

SEQ ID NO: 1734130 - RNA, 19 nt, Homo sapiens
  misc_RNA (1)...(19): siRNA sense strand
acagaauacuuccuagaau

SEQ ID NO: 1734131 - RNA, 19 nt, Homo sapiens
  misc_RNA (1)...(19): siRNA sense strand
ggaccuccauuuccagucu

SEQ ID NO: 1734132 - RNA, 19 nt, Homo sapiens
  misc_RNA (1)...(19): siRNA sense strand
aaacacacaggaagagaaa

SEQ ID NO: 1734133 - RNA, 19 nt, Homo sapiens
  misc_RNA (1)...(19): siRNA sense strand
ggaacaccuugaacuccuu

SEQ ID NO: 1734134 - RNA, 19 nt, Homo sapiens
  misc_RNA (1)...(19): siRNA sense strand
gcuugaagauuucuaugca

SEQ ID NO: 1734135 - RNA, 19 nt, Homo sapiens
  misc_RNA (1)...(19): siRNA sense strand
ugaucgagaugguacaaga

SEQ ID NO: 1734136 - RNA, 19 nt, Homo sapiens
  misc_RNA (1)...(19): siRNA sense strand
uaacaagggauaugucaag

SEQ ID NO: 1734137 - RNA, 19 nt, Homo sapiens
  misc_RNA (1)...(19): siRNA sense strand
caagaggcugguagaguaa

SEQ ID NO: 1734138 - RNA, 19 nt, Homo sapiens
  misc_RNA (1)...(19): siRNA sense strand
agggauaugucaagguaaa

SEQ ID NO: 1734139 - RNA, 19 nt, Homo sapiens
  misc_RNA (1)...(19): siRNA sense strand
uuaagcauaugcacacugu

SEQ ID NO: 1734140 - RNA, 19 nt, Homo sapiens
  misc_RNA (1)...(19): siRNA sense strand
ggugauaaaggauaaauac

SEQ ID NO: 1734141 - RNA, 19 nt, Homo sapiens
  misc_RNA (1)...(19): siRNA sense strand
ucacugauaagaaauguuc

SEQ ID NO: 1734142 - RNA, 19 nt, Homo sapiens
  misc_RNA (1)...(19): siRNA sense strand
gcaacagugauucuauaga

SEQ ID NO: 1734143 - RNA, 19 nt, Homo sapiens
  misc_RNA (1)...(19): siRNA sense strand
caaacuccgcuuccgauug

SEQ ID NO: 1734144 - RNA, 19 nt, Homo sapiens
  misc_RNA (1)...(19): siRNA sense strand
gagcaggugguggugauaa

SEQ ID NO: 1734145 - RNA, 19 nt, Homo sapiens
  misc_RNA (1)...(19): siRNA sense strand
gcaaacuccgcuuccgauu

SEQ ID NO: 1734146 - RNA, 19 nt, Homo sapiens
  misc_RNA (1)...(19): siRNA sense strand
ggaaacacacaggaagaga

SEQ ID NO: 1734147 - RNA, 19 nt, Homo sapiens
  misc_RNA (1)...(19): siRNA sense strand
uaugagccauguacaucuu

SEQ ID NO: 1734148 - RNA, 19 nt, Homo sapiens
  misc_RNA (1)...(19): siRNA sense strand
gaaaagaugcaccuaucaa

SEQ ID NO: 1734149 - RNA, 19 nt, Homo sapiens
  misc_RNA (1)...(19): siRNA sense strand
aaagagaucaggcaacagu

SEQ ID NO: 1734150 - RNA, 19 nt, Homo sapiens
  misc_RNA (1)...(19): siRNA sense strand
gggaaaagaugcaccuauc

SEQ ID NO: 1734151 - RNA, 19 nt, Homo sapiens
  misc_RNA (1)...(19): siRNA sense strand
uacagaauacuuccuagaa

SEQ ID NO: 1734152 - RNA, 19 nt, Homo sapiens
  misc_RNA (1)...(19): siRNA sense strand
cuugaacuccuuaagcaua

SEQ ID NO: 1734153 - RNA, 19 nt, Homo sapiens
  misc_RNA (1)...(19): siRNA sense strand
gggagcaacucuggccaau

SEQ ID NO: 1734154 - RNA, 19 nt, Homo sapiens
  misc_RNA (1)...(19): siRNA sense strand
aagaacaucucaggaagca

SEQ ID NO: 1734155 - RNA, 19 nt, Homo sapiens
  misc_RNA (1)...(19): siRNA sense strand
acacacaggaagagaaaga

SEQ ID NO: 1734156 - RNA, 19 nt, Homo sapiens
  misc_RNA (1)...(19): siRNA sense strand
ugauucuccuugccuuaaa

SEQ ID NO: 1734157 - RNA, 19 nt, Homo sapiens
  misc_RNA (1)...(19): siRNA sense strand
cagaguguaacaagggaua

SEQ ID NO: 1734158 - RNA, 19 nt, Homo sapiens
  misc_RNA (1)...(19): siRNA sense strand
aagggaugcugcucaggaa

SEQ ID NO: 1734159 - RNA, 19 nt, Homo sapiens
  misc_RNA (1)...(19): siRNA sense strand
caugugaucagccaggauu

SEQ ID NO: 1734160 - RNA, 19 nt, Homo sapiens
  misc_RNA (1)...(19): siRNA sense strand
caaaaugcagguuuacaaa

SEQ ID NO: 1734161 - RNA, 19 nt, Homo sapiens
  misc_RNA (1)...(19): siRNA sense strand
gaaaaggugauuguagauu

SEQ ID NO: 1734162 - RNA, 19 nt, Homo sapiens
  misc_RNA (1)...(19): siRNA sense strand
aaggauaaauacccaaagg

SEQ ID NO: 1734163 - RNA, 19 nt, Homo sapiens
  misc_RNA (1)...(19): siRNA sense strand
ugggaugccugagcucuug

SEQ ID NO: 1734164 - RNA, 19 nt, Homo sapiens
  misc_RNA (1)...(19): siRNA sense strand
agaauacuuccuagaauca

SEQ ID NO: 1734165 - RNA, 19 nt, Homo sapiens
  misc_RNA (1)...(19): siRNA sense strand
uggaagcaguugugauugg

SEQ ID NO: 1734166 - RNA, 19 nt, Homo sapiens
  misc_RNA (1)...(19): siRNA sense strand
uugaacuccuuaagcauau

SEQ ID NO: 1734167 - RNA, 19 nt, Homo sapiens
  misc_RNA (1)...(19): siRNA sense strand
ggccagggaacaccuugaa

SEQ ID NO: 1734168 - RNA, 19 nt, Homo sapiens
  misc_RNA (1)...(19): siRNA sense strand
cagagaccaagaucacuga

SEQ ID NO: 1734169 - RNA, 19 nt, Homo sapiens
  misc_RNA (1)...(19): siRNA sense strand
gguacaagaggcugguaga

SEQ ID NO: 1734170 - RNA, 19 nt, Homo sapiens
  misc_RNA (1)...(19): siRNA sense strand
uuuggaagcaguugugauu

SEQ ID NO: 1734171 - RNA, 19 nt, Homo sapiens
  misc_RNA (1)...(19): siRNA sense strand
guaacaagggauaugucaa

SEQ ID NO: 1734172 - RNA, 19 nt, Homo sapiens
  misc_RNA (1)...(19): siRNA sense strand
uuccucagcugaaagaaca

SEQ ID NO: 1734173 - RNA, 19 nt, Homo sapiens
  misc_RNA (1)...(19): siRNA sense strand
agagaucaggcaacaguga

SEQ ID NO: 1734174 - RNA, 19 nt, Homo sapiens
  misc_RNA (1)...(19): siRNA sense strand
gaguaugagccauguacau

SEQ ID NO: 1734175 - RNA, 19 nt, Homo sapiens
  misc_RNA (1)...(19): siRNA sense strand
caccagcgaaucagacuuc

SEQ ID NO: 1734176 - RNA, 19 nt, Homo sapiens
  misc_RNA (1)...(19): siRNA sense strand
ggaaaagaugcaccuauca

SEQ ID NO: 1734177 - RNA, 19 nt, Homo sapiens
  misc_RNA (1)...(19): siRNA sense strand
cagcugaaagaacaucuca

SEQ ID NO: 1734178 - RNA, 19 nt, Homo sapiens
  misc_RNA (1)...(19): siRNA sense strand
ugaaagcagaguguaacaa

SEQ ID NO: 1734179 - RNA, 19 nt, Homo sapiens
  misc_RNA (1)...(19): siRNA sense strand
ggcaacagugauucuauag

SEQ ID NO: 1734180 - RNA, 19 nt, Homo sapiens
  misc_RNA (1)...(19): siRNA sense strand
aaaggcccguuaccauugg

SEQ ID NO: 1734181 - RNA, 19 nt, Homo sapiens
  misc_RNA (1)...(19): siRNA sense strand
ugguggugauaaaggauaa

SEQ ID NO: 1734182 - RNA, 19 nt, Homo sapiens
  misc_RNA (1)...(19): siRNA sense strand
gugguggugauaaaggaua

SEQ ID NO: 1734183 - RNA, 19 nt, Homo sapiens
  misc_RNA (1)...(19): siRNA sense strand
aaugcagguuuacaaagau

SEQ ID NO: 1734184 - RNA, 19 nt, Homo sapiens
  misc_RNA (1)...(19): siRNA sense strand
ccaaaaugcagguuuacaa

SEQ ID NO: 1734185 - RNA, 19 nt, Homo sapiens
  misc_RNA (1)...(19): siRNA sense strand
acaagaggcugguagagua

SEQ ID NO: 1734186 - RNA, 19 nt, Homo sapiens
  misc_RNA (1)...(19): siRNA sense strand
ggaauucuuucaauacaga

SEQ ID NO: 1734187 - RNA, 19 nt, Homo sapiens
  misc_RNA (1)...(19): siRNA sense strand
aaaugcagguuuacaaaga

SEQ ID NO: 1734188 - RNA, 19 nt, Homo sapiens
  misc_RNA (1)...(19): siRNA sense strand
ugaaagaacaucucaggaa

SEQ ID NO: 1734189 - RNA, 19 nt, Homo sapiens
  misc_RNA (1)...(19): siRNA sense strand
cagaauacuuccuagaauc

SEQ ID NO: 1734190 - RNA, 19 nt, Homo sapiens
  misc_RNA (1)...(19): siRNA sense strand
ccaaaggcccguuaccauu

SEQ ID NO: 1734191 - RNA, 19 nt, Homo sapiens
  misc_RNA (1)...(19): siRNA sense strand
uagaguaacuguccgagau

SEQ ID NO: 1734192 - RNA, 19 nt, Homo sapiens
  misc_RNA (1)...(19): siRNA sense strand
caaaggcccguuaccauug

SEQ ID NO: 1734193 - RNA, 19 nt, Homo sapiens
  misc_RNA (1)...(19): siRNA sense strand
gaacaccuugaacuccuua

SEQ ID NO: 1734194 - RNA, 19 nt, Homo sapiens
  misc_RNA (1)...(19): siRNA sense strand
aaacuccgcuuccgauugg

SEQ ID NO: 1734195 - RNA, 19 nt, Homo sapiens
  misc_RNA (1)...(19): siRNA sense strand
caauacagaauacuuccua

SEQ ID NO: 1734196 - RNA, 19 nt, Homo sapiens
  misc_RNA (1)...(19): siRNA sense strand
gggaaaaggugauuguaga

SEQ ID NO: 1734197 - RNA, 19 nt, Homo sapiens
  misc_RNA (1)...(19): siRNA sense strand
acagaauacuuccuagaau

SEQ ID NO: 1734198 - RNA, 19 nt, Homo sapiens
  misc_RNA (1)...(19): siRNA sense strand
ggaccuccauuuccagucu

SEQ ID NO: 1734199 - RNA, 19 nt, Homo sapiens
  misc_RNA (1)...(19): siRNA sense strand
ggaacaccuugaacuccuu

SEQ ID NO: 1734200 - RNA, 19 nt, Homo sapiens
  misc_RNA (1)...(19): siRNA sense strand
ugaucgagaugguacaaga

SEQ ID NO: 1734201 - RNA, 19 nt, Homo sapiens
  misc_RNA (1)...(19): siRNA sense strand
caagaggcugguagaguaa

SEQ ID NO: 1734202 - RNA, 19 nt, Homo sapiens
  misc_RNA (1)...(19): siRNA sense strand
ggugauaaaggauaaauac

SEQ ID NO: 1734203 - RNA, 19 nt, Homo sapiens
  misc_RNA (1)...(19): siRNA sense strand
uuaagcauaugcacacugu

SEQ ID NO: 1734204 - RNA, 19 nt, Homo sapiens
  misc_RNA (1)...(19): siRNA sense strand
caaacuccgcuuccgauug

SEQ ID NO: 1734205 - RNA, 19 nt, Homo sapiens
  misc_RNA (1)...(19): siRNA sense strand
gagcaggugguggugauaa

SEQ ID NO: 1734206 - RNA, 19 nt, Homo sapiens
  misc_RNA (1)...(19): siRNA sense strand
gcaaacuccgcuuccgauu

SEQ ID NO: 1734207 - RNA, 19 nt, Homo sapiens
  misc_RNA (1)...(19): siRNA sense strand
uaugagccauguacaucuu

SEQ ID NO: 1734208 - RNA, 19 nt, Homo sapiens
  misc_RNA (1)...(19): siRNA sense strand
cuugaacuccuuaagcaua

SEQ ID NO: 1734209 - RNA, 19 nt, Homo sapiens
  misc_RNA (1)...(19): siRNA sense strand
uacagaauacuuccuagaa

SEQ ID NO: 1734210 - RNA, 19 nt, Homo sapiens
  misc_RNA (1)...(19): siRNA sense strand
aagaacaucucaggaagca

SEQ ID NO: 1734211 - RNA, 19 nt, Homo sapiens
  misc_RNA (1)...(19): siRNA sense strand
ugauucuccuugccuuaaa

SEQ ID NO: 1734212 - RNA, 19 nt, Homo sapiens
  misc_RNA (1)...(19): siRNA sense strand
caaaaugcagguuuacaaa

SEQ ID NO: 1734213 - RNA, 19 nt, Homo sapiens
  misc_RNA (1)...(19): siRNA sense strand
caugugaucagccaggauu

SEQ ID NO: 1734214 - RNA, 19 nt, Homo sapiens
  misc_RNA (1)...(19): siRNA sense strand
gaaaaggugauuguagauu

SEQ ID NO: 1734215 - RNA, 19 nt, Homo sapiens
  misc_RNA (1)...(19): siRNA sense strand
aaggauaaauacccaaagg

SEQ ID NO: 1734216 - RNA, 19 nt, Homo sapiens
  misc_RNA (1)...(19): siRNA sense strand
ugggaugccugagcucuug

SEQ ID NO: 1734217 - RNA, 19 nt, Homo sapiens
  misc_RNA (1)...(19): siRNA sense strand
agaauacuuccuagaauca

SEQ ID NO: 1734218 - RNA, 19 nt, Homo sapiens
  misc_RNA (1)...(19): siRNA sense strand
uugaacuccuuaagcauau

SEQ ID NO: 1734219 - RNA, 19 nt, Homo sapiens
  misc_RNA (1)...(19): siRNA sense strand
ggccagggaacaccuugaa

SEQ ID NO: 1734220 - RNA, 19 nt, Homo sapiens
  misc_RNA (1)...(19): siRNA sense strand
gguacaagaggcugguaga

SEQ ID NO: 1734221 - RNA, 19 nt, Homo sapiens
  misc_RNA (1)...(19): siRNA sense strand
uuccucagcugaaagaaca

SEQ ID NO: 1734222 - RNA, 19 nt, Homo sapiens
  misc_RNA (1)...(19): siRNA sense strand
gaguaugagccauguacau

SEQ ID NO: 1734223 - RNA, 19 nt, Homo sapiens
  misc_RNA (1)...(19): siRNA sense strand
cagcugaaagaacaucuca

SEQ ID NO: 1734224 - RNA, 19 nt, Homo sapiens
  misc_RNA (1)...(19): siRNA sense strand
gugguggugauaaaggaua

SEQ ID NO: 1734225 - RNA, 19 nt, Homo sapiens
  misc_RNA (1)...(19): siRNA sense strand
aaaggcccguuaccauugg

SEQ ID NO: 1734226 - RNA, 19 nt, Homo sapiens
  misc_RNA (1)...(19): siRNA sense strand
ccaaaaugcagguuuacaa

SEQ ID NO: 1734227 - RNA, 19 nt, Homo sapiens
  misc_RNA (1)...(19): siRNA sense strand
aaugcagguuuacaaagau

SEQ ID NO: 1734228 - RNA, 19 nt, Homo sapiens
  misc_RNA (1)...(19): siRNA sense strand
ugguggugauaaaggauaa

SEQ ID NO: 1734229 - RNA, 19 nt, Homo sapiens
  misc_RNA (1)...(19): siRNA sense strand
gaaucagacuuccacauuu

SEQ ID NO: 1734230 - RNA, 19 nt, Homo sapiens
  misc_RNA (1)...(19): siRNA sense strand
caagggauaugucaaggua

SEQ ID NO: 1734231 - RNA, 19 nt, Homo sapiens
  misc_RNA (1)...(19): siRNA sense strand
gaaauguucucgacagcaa

SEQ ID NO: 1734232 - RNA, 19 nt, Homo sapiens
  misc_RNA (1)...(19): siRNA sense strand
ggaauucuuucaauacaga

SEQ ID NO: 1734233 - RNA, 19 nt, Homo sapiens
  misc_RNA (1)...(19): siRNA sense strand
gagcaacucuggccaaugc

SEQ ID NO: 1734234 - RNA, 19 nt, Homo sapiens
  misc_RNA (1)...(19): siRNA sense strand
aaagaacccuggccuggaa

SEQ ID NO: 1734235 - RNA, 19 nt, Homo sapiens
  misc_RNA (1)...(19): siRNA sense strand
aaaugcagguuuacaaaga

SEQ ID NO: 1734236 - RNA, 19 nt, Homo sapiens
  misc_RNA (1)...(19): siRNA sense strand
gaaacacacaggaagagaa

SEQ ID NO: 1734237 - RNA, 19 nt, Homo sapiens
  misc_RNA (1)...(19): siRNA sense strand
cgaaucagacuuccacauu

SEQ ID NO: 1734238 - RNA, 19 nt, Homo sapiens
  misc_RNA (1)...(19): siRNA sense strand
aaucagacuuccacauuug

SEQ ID NO: 1734239 - RNA, 19 nt, Homo sapiens
  misc_RNA (1)...(19): siRNA sense strand
cagaauacuuccuagaauc

SEQ ID NO: 1734240 - RNA, 19 nt, Homo sapiens
  misc_RNA (1)...(19): siRNA sense strand
gaaagcagaguguaacaag

SEQ ID NO: 1734241 - RNA, 19 nt, Homo sapiens
  misc_RNA (1)...(19): siRNA sense strand
ccaaaggcccguuaccauu

SEQ ID NO: 1734242 - RNA, 19 nt, Homo sapiens
  misc_RNA (1)...(19): siRNA sense strand
caaaggcccguuaccauug

SEQ ID NO: 1734243 - RNA, 19 nt, Homo sapiens
  misc_RNA (1)...(19): siRNA sense strand
gaacaccuugaacuccuua

SEQ ID NO: 1734244 - RNA, 19 nt, Homo sapiens
  misc_RNA (1)...(19): siRNA sense strand
agaaagagaucaggcaaca

SEQ ID NO: 1734245 - RNA, 19 nt, Homo sapiens
  misc_RNA (1)...(19): siRNA sense strand
aggcaacagugauucuaua

SEQ ID NO: 1734246 - RNA, 19 nt, Homo sapiens
  misc_RNA (1)...(19): siRNA sense strand
aaacuccgcuuccgauugg

SEQ ID NO: 1734247 - RNA, 19 nt, Homo sapiens
  misc_RNA (1)...(19): siRNA sense strand
caauacagaauacuuccua

SEQ ID NO: 1734248 - RNA, 19 nt, Homo sapiens
  misc_RNA (1)...(19): siRNA sense strand
gggaaaaggugauuguaga

SEQ ID NO: 1734249 - RNA, 19 nt, Homo sapiens
  misc_RNA (1)...(19): siRNA sense strand
acagaauacuuccuagaau

SEQ ID NO: 1734250 - RNA, 19 nt, Homo sapiens
  misc_RNA (1)...(19): siRNA sense strand
ggaccuccauuuccagucu

SEQ ID NO: 1734251 - RNA, 19 nt, Homo sapiens
  misc_RNA (1)...(19): siRNA sense strand
aaacacacaggaagagaaa

SEQ ID NO: 1734252 - RNA, 19 nt, Homo sapiens
  misc_RNA (1)...(19): siRNA sense strand
ggaacaccuugaacuccuu

SEQ ID NO: 1734253 - RNA, 19 nt, Homo sapiens
  misc_RNA (1)...(19): siRNA sense strand
gcuugaagauuucuaugca

SEQ ID NO: 1734254 - RNA, 19 nt, Homo sapiens
  misc_RNA (1)...(19): siRNA sense strand
uaacaagggauaugucaag

SEQ ID NO: 1734255 - RNA, 19 nt, Homo sapiens
  misc_RNA (1)...(19): siRNA sense strand
agggauaugucaagguaaa

SEQ ID NO: 1734256 - RNA, 19 nt, Homo sapiens
  misc_RNA (1)...(19): siRNA sense strand
uuaagcauaugcacacugu

SEQ ID NO: 1734257 - RNA, 19 nt, Homo sapiens
  misc_RNA (1)...(19): siRNA sense strand
ggugauaaaggauaaauac

SEQ ID NO: 1734258 - RNA, 19 nt, Homo sapiens
  misc_RNA (1)...(19): siRNA sense strand
ucacugauaagaaauguuc

SEQ ID NO: 1734259 - RNA, 19 nt, Homo sapiens
  misc_RNA (1)...(19): siRNA sense strand
gcaacagugauucuauaga

SEQ ID NO: 1734260 - RNA, 19 nt, Homo sapiens
  misc_RNA (1)...(19): siRNA sense strand
caaacuccgcuuccgauug

SEQ ID NO: 1734261 - RNA, 19 nt, Homo sapiens
  misc_RNA (1)...(19): siRNA sense strand
gagcaggugguggugauaa

SEQ ID NO: 1734262 - RNA, 19 nt, Homo sapiens
  misc_RNA (1)...(19): siRNA sense strand
gcaaacuccgcuuccgauu

SEQ ID NO: 1734263 - RNA, 19 nt, Homo sapiens
  misc_RNA (1)...(19): siRNA sense strand
ggaaacacacaggaagaga

SEQ ID NO: 1734264 - RNA, 19 nt, Homo sapiens
  misc_RNA (1)...(19): siRNA sense strand
uaugagccauguacaucuu

SEQ ID NO: 1734265 - RNA, 19 nt, Homo sapiens
  misc_RNA (1)...(19): siRNA sense strand
gaaaagaugcaccuaucaa

SEQ ID NO: 1734266 - RNA, 19 nt, Homo sapiens
  misc_RNA (1)...(19): siRNA sense strand
aaagagaucaggcaacagu

SEQ ID NO: 1734267 - RNA, 19 nt, Homo sapiens
  misc_RNA (1)...(19): siRNA sense strand
gggaaaagaugcaccuauc

SEQ ID NO: 1734268 - RNA, 19 nt, Homo sapiens
  misc_RNA (1)...(19): siRNA sense strand
uacagaauacuuccuagaa

SEQ ID NO: 1734269 - RNA, 19 nt, Homo sapiens
  misc_RNA (1)...(19): siRNA sense strand
cuugaacuccuuaagcaua

SEQ ID NO: 1734270 - RNA, 19 nt, Homo sapiens
  misc_RNA (1)...(19): siRNA sense strand
gggagcaacucuggccaau

SEQ ID NO: 1734271 - RNA, 19 nt, Homo sapiens
  misc_RNA (1)...(19): siRNA sense strand
acacacaggaagagaaaga

SEQ ID NO: 1734272 - RNA, 19 nt, Homo sapiens
  misc_RNA (1)...(19): siRNA sense strand
ugauucuccuugccuuaaa

SEQ ID NO: 1734273 - RNA, 19 nt, Homo sapiens
  misc_RNA (1)...(19): siRNA sense strand
cagaguguaacaagggaua

SEQ ID NO: 1734274 - RNA, 19 nt, Homo sapiens
  misc_RNA (1)...(19): siRNA sense strand
aagggaugcugcucaggaa

SEQ ID NO: 1734275 - RNA, 19 nt, Homo sapiens
  misc_RNA (1)...(19): siRNA sense strand
caugugaucagccaggauu

SEQ ID NO: 1734276 - RNA, 19 nt, Homo sapiens
  misc_RNA (1)...(19): siRNA sense strand
caaaaugcagguuuacaaa

SEQ ID NO: 1734277 - RNA, 19 nt, Homo sapiens
  misc_RNA (1)...(19): siRNA sense strand
gaaaaggugauuguagauu

SEQ ID NO: 1734278 - RNA, 19 nt, Homo sapiens
  misc_RNA (1)...(19): siRNA sense strand
uggaagcaguugugauugg

SEQ ID NO: 1734279 - RNA, 19 nt, Homo sapiens
  misc_RNA (1)...(19): siRNA sense strand
agaauacuuccuagaauca

SEQ ID NO: 1734280 - RNA, 19 nt, Homo sapiens
  misc_RNA (1)...(19): siRNA sense strand
uugaacuccuuaagcauau

SEQ ID NO: 1734281 - RNA, 19 nt, Homo sapiens
  misc_RNA (1)...(19): siRNA sense strand
aaggauaaauacccaaagg

SEQ ID NO: 1734282 - RNA, 19 nt, Homo sapiens
  misc_RNA (1)...(19): siRNA sense strand
uuuggaagcaguugugauu

SEQ ID NO: 1734283 - RNA, 19 nt, Homo sapiens
  misc_RNA (1)...(19): siRNA sense strand
cagagaccaagaucacuga

SEQ ID NO: 1734284 - RNA, 19 nt, Homo sapiens
  misc_RNA (1)...(19): siRNA sense strand
ggccagggaacaccuugaa

SEQ ID NO: 1734285 - RNA, 19 nt, Homo sapiens
  misc_RNA (1)...(19): siRNA sense strand
guaacaagggauaugucaa

SEQ ID NO: 1734286 - RNA, 19 nt, Homo sapiens
  misc_RNA (1)...(19): siRNA sense strand
agagaucaggcaacaguga

SEQ ID NO: 1734287 - RNA, 19 nt, Homo sapiens
  misc_RNA (1)...(19): siRNA sense strand
gaguaugagccauguacau

SEQ ID NO: 1734288 - RNA, 19 nt, Homo sapiens
  misc_RNA (1)...(19): siRNA sense strand
caccagcgaaucagacuuc

SEQ ID NO: 1734289 - RNA, 19 nt, Homo sapiens
  misc_RNA (1)...(19): siRNA sense strand
ugaaagcagaguguaacaa

SEQ ID NO: 1734290 - RNA, 19 nt, Homo sapiens
  misc_RNA (1)...(19): siRNA sense strand
ggaaaagaugcaccuauca

SEQ ID NO: 1734291 - RNA, 19 nt, Homo sapiens
  misc_RNA (1)...(19): siRNA sense strand
ggcaacagugauucuauag

SEQ ID NO: 1734292 - RNA, 19 nt, Homo sapiens
  misc_RNA (1)...(19): siRNA sense strand
aaaggcccguuaccauugg

SEQ ID NO: 1734293 - RNA, 19 nt, Homo sapiens
  misc_RNA (1)...(19): siRNA sense strand
ugguggugauaaaggauaa

SEQ ID NO: 1734294 - RNA, 19 nt, Homo sapiens
  misc_RNA (1)...(19): siRNA sense strand
gugguggugauaaaggaua

SEQ ID NO: 1734295 - RNA, 19 nt, Homo sapiens
  misc_RNA (1)...(19): siRNA sense strand
aaugcagguuuacaaagau

SEQ ID NO: 1734296 - RNA, 19 nt, Homo sapiens
  misc_RNA (1)...(19): siRNA sense strand
ccaaaaugcagguuuacaa

SEQ ID NO: 1734297 - RNA, 19 nt, Homo sapiens
  misc_RNA (1)...(19): siRNA sense strand
acaagaggcugguagagua

SEQ ID NO: 1734298 - RNA, 19 nt, Homo sapiens
  misc_RNA (1)...(19): siRNA sense strand
ggaauucuuucaauacaga

SEQ ID NO: 1734299 - RNA, 19 nt, Homo sapiens
  misc_RNA (1)...(19): siRNA sense strand
aaaugcagguuuacaaaga

SEQ ID NO: 1734300 - RNA, 19 nt, Homo sapiens
  misc_RNA (1)...(19): siRNA sense strand
ugaaagaacaucucaggaa

SEQ ID NO: 1734301 - RNA, 19 nt, Homo sapiens
  misc_RNA (1)...(19): siRNA sense strand
cagaauacuuccuagaauc

SEQ ID NO: 1734302 - RNA, 19 nt, Homo sapiens
  misc_RNA (1)...(19): siRNA sense strand
ccaaaggcccguuaccauu

SEQ ID NO: 1734303 - RNA, 19 nt, Homo sapiens
  misc_RNA (1)...(19): siRNA sense strand
uagaguaacuguccgagau

SEQ ID NO: 1734304 - RNA, 19 nt, Homo sapiens
  misc_RNA (1)...(19): siRNA sense strand
caaaggcccguuaccauug

SEQ ID NO: 1734305 - RNA, 19 nt, Homo sapiens
  misc_RNA (1)...(19): siRNA sense strand
gaacaccuugaacuccuua

SEQ ID NO: 1734306 - RNA, 19 nt, Homo sapiens
  misc_RNA (1)...(19): siRNA sense strand
aaacuccgcuuccgauugg

SEQ ID NO: 1734307 - RNA, 19 nt, Homo sapiens
  misc_RNA (1)...(19): siRNA sense strand
caauacagaauacuuccua

SEQ ID NO: 1734308 - RNA, 19 nt, Homo sapiens
  misc_RNA (1)...(19): siRNA sense strand
gggaaaaggugauuguaga

SEQ ID NO: 1734309 - RNA, 19 nt, Homo sapiens
  misc_RNA (1)...(19): siRNA sense strand
acagaauacuuccuagaau

SEQ ID NO: 1734310 - RNA, 19 nt, Homo sapiens
  misc_RNA (1)...(19): siRNA sense strand
ggaccuccauuuccagucu

SEQ ID NO: 1734311 - RNA, 19 nt, Homo sapiens
  misc_RNA (1)...(19): siRNA sense strand
ggaacaccuugaacuccuu

SEQ ID NO: 1734312 - RNA, 19 nt, Homo sapiens
  misc_RNA (1)...(19): siRNA sense strand
ugaucgagaugguacaaga

SEQ ID NO: 1734313 - RNA, 19 nt, Homo sapiens
  misc_RNA (1)...(19): siRNA sense strand
caagaggcugguagaguaa

SEQ ID NO: 1734314 - RNA, 19 nt, Homo sapiens
  misc_RNA (1)...(19): siRNA sense strand
ggugauaaaggauaaauac

SEQ ID NO: 1734315 - RNA, 19 nt, Homo sapiens
  misc_RNA (1)...(19): siRNA sense strand
uuaagcauaugcacacugu

SEQ ID NO: 1734316 - RNA, 19 nt, Homo sapiens
  misc_RNA (1)...(19): siRNA sense strand
caaacuccgcuuccgauug

SEQ ID NO: 1734317 - RNA, 19 nt, Homo sapiens
  misc_RNA (1)...(19): siRNA sense strand
gagcaggugguggugauaa

SEQ ID NO: 1734318 - RNA, 19 nt, Homo sapiens
  misc_RNA (1)...(19): siRNA sense strand
gcaaacuccgcuuccgauu

SEQ ID NO: 1734319 - RNA, 19 nt, Homo sapiens
  misc_RNA (1)...(19): siRNA sense strand
uaugagccauguacaucuu

SEQ ID NO: 1734320 - RNA, 19 nt, Homo sapiens
  misc_RNA (1)...(19): siRNA sense strand
cuugaacuccuuaagcaua

SEQ ID NO: 1734321 - RNA, 19 nt, Homo sapiens
  misc_RNA (1)...(19): siRNA sense strand
uacagaauacuuccuagaa

SEQ ID NO: 1734322 - RNA, 19 nt, Homo sapiens
  misc_RNA (1)...(19): siRNA sense strand
aagaacaucucaggaagca

SEQ ID NO: 1734323 - RNA, 19 nt, Homo sapiens
  misc_RNA (1)...(19): siRNA sense strand
ugauucuccuugccuuaaa

SEQ ID NO: 1734324 - RNA, 19 nt, Homo sapiens
  misc_RNA (1)...(19): siRNA sense strand
caaaaugcagguuuacaaa

SEQ ID NO: 1734325 - RNA, 19 nt, Homo sapiens
  misc_RNA (1)...(19): siRNA sense strand
caugugaucagccaggauu

SEQ ID NO: 1734326 - RNA, 19 nt, Homo sapiens
  misc_RNA (1)...(19): siRNA sense strand
gaaaaggugauuguagauu

SEQ ID NO: 1734327 - RNA, 19 nt, Homo sapiens
  misc_RNA (1)...(19): siRNA sense strand
aaggauaaauacccaaagg

SEQ ID NO: 1734328 - RNA, 19 nt, Homo sapiens
  misc_RNA (1)...(19): siRNA sense strand
ugggaugccugagcucuug

SEQ ID NO: 1734329 - RNA, 19 nt, Homo sapiens
  misc_RNA (1)...(19): siRNA sense strand
agaauacuuccuagaauca

SEQ ID NO: 1734330 - RNA, 19 nt, Homo sapiens
  misc_RNA (1)...(19): siRNA sense strand
uugaacuccuuaagcauau

SEQ ID NO: 1734331 - RNA, 19 nt, Homo sapiens
  misc_RNA (1)...(19): siRNA sense strand
ggccagggaacaccuugaa

SEQ ID NO: 1734332 - RNA, 19 nt, Homo sapiens
  misc_RNA (1)...(19): siRNA sense strand
gguacaagaggcugguaga

SEQ ID NO: 1734333 - RNA, 19 nt, Homo sapiens
  misc_RNA (1)...(19): siRNA sense strand
uuccucagcugaaagaaca

SEQ ID NO: 1734334 - RNA, 19 nt, Homo sapiens
  misc_RNA (1)...(19): siRNA sense strand
gaguaugagccauguacau

SEQ ID NO: 1734335 - RNA, 19 nt, Homo sapiens
  misc_RNA (1)...(19): siRNA sense strand
cagcugaaagaacaucuca

SEQ ID NO: 1734336 - RNA, 19 nt, Homo sapiens
  misc_RNA (1)...(19): siRNA sense strand
gugguggugauaaaggaua

SEQ ID NO: 1734337 - RNA, 19 nt, Homo sapiens
  misc_RNA (1)...(19): siRNA sense strand
aaaggcccguuaccauugg

SEQ ID NO: 1734338 - RNA, 19 nt, Homo sapiens
  misc_RNA (1)...(19): siRNA sense strand
ccaaaaugcagguuuacaa

SEQ ID NO: 1734339 - RNA, 19 nt, Homo sapiens
  misc_RNA (1)...(19): siRNA sense strand
aaugcagguuuacaaagau

SEQ ID NO: 1734340 - RNA, 19 nt, Homo sapiens
  misc_RNA (1)...(19): siRNA sense strand
ugguggugauaaaggauaa

SEQ ID NO: 1734341 - RNA, 19 nt, Homo sapiens
  misc_RNA (1)...(19): siRNA sense strand
acaagaggcugguagagua

SEQ ID NO: 1734342 - RNA, 19 nt, Homo sapiens
  misc_RNA (1)...(19): siRNA sense strand
ggaauucuuucaauacaga

SEQ ID NO: 1734343 - RNA, 19 nt, Homo sapiens
  misc_RNA (1)...(19): siRNA sense strand
gagcaacucuggccaaugc

SEQ ID NO: 1734344 - RNA, 19 nt, Homo sapiens
  misc_RNA (1)...(19): siRNA sense strand
aaagaacccuggccuggaa

SEQ ID NO: 1734345 - RNA, 19 nt, Homo sapiens
  misc_RNA (1)...(19): siRNA sense strand
aaaugcagguuuacaaaga

SEQ ID NO: 1734346 - RNA, 19 nt, Homo sapiens
  misc_RNA (1)...(19): siRNA sense strand
ugaaagaacaucucaggaa

SEQ ID NO: 1734347 - RNA, 19 nt, Homo sapiens
  misc_RNA (1)...(19): siRNA sense strand
gaaacacacaggaagagaa

SEQ ID NO: 1734348 - RNA, 19 nt, Homo sapiens
  misc_RNA (1)...(19): siRNA sense strand
cagaauacuuccuagaauc

SEQ ID NO: 1734349 - RNA, 19 nt, Homo sapiens
  misc_RNA (1)...(19): siRNA sense strand
ccaaaggcccguuaccauu

SEQ ID NO: 1734350 - RNA, 19 nt, Homo sapiens
  misc_RNA (1)...(19): siRNA sense strand
uagaguaacuguccgagau

SEQ ID NO: 1734351 - RNA, 19 nt, Homo sapiens
  misc_RNA (1)...(19): siRNA sense strand
caaaggcccguuaccauug

SEQ ID NO: 1734352 - RNA, 19 nt, Homo sapiens
  misc_RNA (1)...(19): siRNA sense strand
gaacaccuugaacuccuua

SEQ ID NO: 1734353 - RNA, 19 nt, Homo sapiens
  misc_RNA (1)...(19): siRNA sense strand
agaaagagaucaggcaaca

SEQ ID NO: 1734354 - RNA, 19 nt, Homo sapiens
  misc_RNA (1)...(19): siRNA sense strand
aggcaacagugauucuaua

SEQ ID NO: 1734355 - RNA, 19 nt, Homo sapiens
  misc_RNA (1)...(19): siRNA sense strand
aaacuccgcuuccgauugg

SEQ ID NO: 1734356 - RNA, 19 nt, Homo sapiens
  misc_RNA (1)...(19): siRNA sense strand
caauacagaauacuuccua

SEQ ID NO: 1734357 - RNA, 19 nt, Homo sapiens
  misc_RNA (1)...(19): siRNA sense strand
gggaaaaggugauuguaga

SEQ ID NO: 1734358 - RNA, 19 nt, Homo sapiens
  misc_RNA (1)...(19): siRNA sense strand
acagaauacuuccuagaau

SEQ ID NO: 1734359 - RNA, 19 nt, Homo sapiens
  misc_RNA (1)...(19): siRNA sense strand
ggaccuccauuuccagucu

SEQ ID NO: 1734360 - RNA, 19 nt, Homo sapiens
  misc_RNA (1)...(19): siRNA sense strand
aaacacacaggaagagaaa

SEQ ID NO: 1734361 - RNA, 19 nt, Homo sapiens
  misc_RNA (1)...(19): siRNA sense strand
ggaacaccuugaacuccuu

SEQ ID NO: 1734362 - RNA, 19 nt, Homo sapiens
  misc_RNA (1)...(19): siRNA sense strand
gcuugaagauuucuaugca

SEQ ID NO: 1734363 - RNA, 19 nt, Homo sapiens
  misc_RNA (1)...(19): siRNA sense strand
ugaucgagaugguacaaga

SEQ ID NO: 1734364 - RNA, 19 nt, Homo sapiens
  misc_RNA (1)...(19): siRNA sense strand
caagaggcugguagaguaa

SEQ ID NO: 1734365 - RNA, 19 nt, Homo sapiens
  misc_RNA (1)...(19): siRNA sense strand
ggugauaaaggauaaauac

SEQ ID NO: 1734366 - RNA, 19 nt, Homo sapiens
  misc_RNA (1)...(19): siRNA sense strand
uuaagcauaugcacacugu

SEQ ID NO: 1734367 - RNA, 19 nt, Homo sapiens
  misc_RNA (1)...(19): siRNA sense strand
gcaacagugauucuauaga

SEQ ID NO: 1734368 - RNA, 19 nt, Homo sapiens
  misc_RNA (1)...(19): siRNA sense strand
caaacuccgcuuccgauug

SEQ ID NO: 1734369 - RNA, 19 nt, Homo sapiens
  misc_RNA (1)...(19): siRNA sense strand
gagcaggugguggugauaa

SEQ ID NO: 1734370 - RNA, 19 nt, Homo sapiens
  misc_RNA (1)...(19): siRNA sense strand
gcaaacuccgcuuccgauu

SEQ ID NO: 1734371 - RNA, 19 nt, Homo sapiens
  misc_RNA (1)...(19): siRNA sense strand
gaaaagaugcaccuaucaa

SEQ ID NO: 1734372 - RNA, 19 nt, Homo sapiens
  misc_RNA (1)...(19): siRNA sense strand
uaugagccauguacaucuu

SEQ ID NO: 1734373 - RNA, 19 nt, Homo sapiens
  misc_RNA (1)...(19): siRNA sense strand
aaagagaucaggcaacagu

SEQ ID NO: 1734374 - RNA, 19 nt, Homo sapiens
  misc_RNA (1)...(19): siRNA sense strand
ggaaacacacaggaagaga

SEQ ID NO: 1734375 - RNA, 19 nt, Homo sapiens
  misc_RNA (1)...(19): siRNA sense strand
gggaaaagaugcaccuauc

SEQ ID NO: 1734376 - RNA, 19 nt, Homo sapiens
  misc_RNA (1)...(19): siRNA sense strand
uacagaauacuuccuagaa

SEQ ID NO: 1734377 - RNA, 19 nt, Homo sapiens
  misc_RNA (1)...(19): siRNA sense strand
cuugaacuccuuaagcaua

SEQ ID NO: 1734378 - RNA, 19 nt, Homo sapiens
  misc_RNA (1)...(19): siRNA sense strand
gggagcaacucuggccaau

SEQ ID NO: 1734379 - RNA, 19 nt, Homo sapiens
  misc_RNA (1)...(19): siRNA sense strand
aagaacaucucaggaagca

SEQ ID NO: 1734380 - RNA, 19 nt, Homo sapiens
  misc_RNA (1)...(19): siRNA sense strand
acacacaggaagagaaaga

SEQ ID NO: 1734381 - RNA, 19 nt, Homo sapiens
  misc_RNA (1)...(19): siRNA sense strand
ugauucuccuugccuuaaa

SEQ ID NO: 1734382 - RNA, 19 nt, Homo sapiens
  misc_RNA (1)...(19): siRNA sense strand
caaaaugcagguuuacaaa

SEQ ID NO: 1734383 - RNA, 19 nt, Homo sapiens
  misc_RNA (1)...(19): siRNA sense strand
caugugaucagccaggauu

SEQ ID NO: 1734384 - RNA, 19 nt, Homo sapiens
  misc_RNA (1)...(19): siRNA sense strand
aagggaugcugcucaggaa

SEQ ID NO: 1734385 - RNA, 19 nt, Homo sapiens
  misc_RNA (1)...(19): siRNA sense strand
gaaaaggugauuguagauu

SEQ ID NO: 1734386 - RNA, 19 nt, Homo sapiens
  misc_RNA (1)...(19): siRNA sense strand
aaggauaaauacccaaagg

SEQ ID NO: 1734387 - RNA, 19 nt, Homo sapiens
  misc_RNA (1)...(19): siRNA sense strand
ugggaugccugagcucuug

SEQ ID NO: 1734388 - RNA, 19 nt, Homo sapiens
  misc_RNA (1)...(19): siRNA sense strand
agaauacuuccuagaauca

SEQ ID NO: 1734389 - RNA, 19 nt, Homo sapiens
  misc_RNA (1)...(19): siRNA sense strand
uugaacuccuuaagcauau

SEQ ID NO: 1734390 - RNA, 19 nt, Homo sapiens
  misc_RNA (1)...(19): siRNA sense strand
ggccagggaacaccuugaa

SEQ ID NO: 1734391 - RNA, 19 nt, Homo sapiens
  misc_RNA (1)...(19): siRNA sense strand
gguacaagaggcugguaga

SEQ ID NO: 1734392 - RNA, 19 nt, Homo sapiens
  misc_RNA (1)...(19): siRNA sense strand
uuccucagcugaaagaaca

SEQ ID NO: 1734393 - RNA, 19 nt, Homo sapiens
  misc_RNA (1)...(19): siRNA sense strand
agagaucaggcaacaguga

SEQ ID NO: 1734394 - RNA, 19 nt, Homo sapiens
  misc_RNA (1)...(19): siRNA sense strand
gaguaugagccauguacau

SEQ ID NO: 1734395 - RNA, 19 nt, Homo sapiens
  misc_RNA (1)...(19): siRNA sense strand
ggaaaagaugcaccuauca

SEQ ID NO: 1734396 - RNA, 19 nt, Homo sapiens
  misc_RNA (1)...(19): siRNA sense strand
cagcugaaagaacaucuca

SEQ ID NO: 1734397 - RNA, 19 nt, Homo sapiens
  misc_RNA (1)...(19): siRNA sense strand
ccaaaaugcagguuuacaa

SEQ ID NO: 1734398 - RNA, 19 nt, Homo sapiens
  misc_RNA (1)...(19): siRNA sense strand
ggcaacagugauucuauag

SEQ ID NO: 1734399 - RNA, 19 nt, Homo sapiens
  misc_RNA (1)...(19): siRNA sense strand
aaaggcccguuaccauugg

SEQ ID NO: 1734400 - RNA, 19 nt, Homo sapiens
  misc_RNA (1)...(19): siRNA sense strand
ugguggugauaaaggauaa

SEQ ID NO: 1734401 - RNA, 19 nt, Homo sapiens
  misc_RNA (1)...(19): siRNA sense strand
gugguggugauaaaggaua

SEQ ID NO: 1734402 - RNA, 19 nt, Homo sapiens
  misc_RNA (1)...(19): siRNA sense strand
aaugcagguuuacaaagau

SEQ ID NO: 1734403 - RNA, 19 nt, Homo sapiens
  misc_RNA (1)...(19): siRNA sense strand
gaaucagacuuccacauuu

SEQ ID NO: 1734404 - RNA, 19 nt, Homo sapiens
  misc_RNA (1)...(19): siRNA sense strand
caagggauaugucaaggua

SEQ ID NO: 1734405 - RNA, 19 nt, Homo sapiens
  misc_RNA (1)...(19): siRNA sense strand
gaaauguucucgacagcaa

SEQ ID NO: 1734406 - RNA, 19 nt, Homo sapiens
  misc_RNA (1)...(19): siRNA sense strand
acaagaggcugguagagua

SEQ ID NO: 1734407 - RNA, 19 nt, Homo sapiens
  misc_RNA (1)...(19): siRNA sense strand
ggaauucuuucaauacaga

SEQ ID NO: 1734408 - RNA, 19 nt, Homo sapiens
  misc_RNA (1)...(19): siRNA sense strand
gagcaacucuggccaaugc

SEQ ID NO: 1734409 - RNA, 19 nt, Homo sapiens
  misc_RNA (1)...(19): siRNA sense strand
aaagaacccuggccuggaa

SEQ ID NO: 1734410 - RNA, 19 nt, Homo sapiens
  misc_RNA (1)...(19): siRNA sense strand
aaaugcagguuuacaaaga

SEQ ID NO: 1734411 - RNA, 19 nt, Homo sapiens
  misc_RNA (1)...(19): siRNA sense strand
ugaaagaacaucucaggaa

SEQ ID NO: 1734412 - RNA, 19 nt, Homo sapiens
  misc_RNA (1)...(19): siRNA sense strand
gaaacacacaggaagagaa

SEQ ID NO: 1734413 - RNA, 19 nt, Homo sapiens
  misc_RNA (1)...(19): siRNA sense strand
cgaaucagacuuccacauu

SEQ ID NO: 1734414 - RNA, 19 nt, Homo sapiens
  misc_RNA (1)...(19): siRNA sense strand
aaucagacuuccacauuug

SEQ ID NO: 1734415 - RNA, 19 nt, Homo sapiens
  misc_RNA (1)...(19): siRNA sense strand
cagaauacuuccuagaauc

SEQ ID NO: 1734416 - RNA, 19 nt, Homo sapiens
  misc_RNA (1)...(19): siRNA sense strand
gaaagcagaguguaacaag

SEQ ID NO: 1734417 - RNA, 19 nt, Homo sapiens
  misc_RNA (1)...(19): siRNA sense strand
ccaaaggcccguuaccauu

SEQ ID NO: 1734418 - RNA, 19 nt, Homo sapiens
  misc_RNA (1)...(19): siRNA sense strand
uagaguaacuguccgagau

SEQ ID NO: 1734419 - RNA, 19 nt, Homo sapiens
  misc_RNA (1)...(19): siRNA sense strand
caaaggcccguuaccauug

SEQ ID NO: 1734420 - RNA, 19 nt, Homo sapiens
  misc_RNA (1)...(19): siRNA sense strand
gaacaccuugaacuccuua

SEQ ID NO: 1734421 - RNA, 19 nt, Homo sapiens
  misc_RNA (1)...(19): siRNA sense strand
agaaagagaucaggcaaca

SEQ ID NO: 1734422 - RNA, 19 nt, Homo sapiens
  misc_RNA (1)...(19): siRNA sense strand
aggcaacagugauucuaua

SEQ ID NO: 1734423 - RNA, 19 nt, Homo sapiens
  misc_RNA (1)...(19): siRNA sense strand
aaacuccgcuuccgauugg

SEQ ID NO: 1734424 - RNA, 19 nt, Homo sapiens
  misc_RNA (1)...(19): siRNA sense strand
caauacagaauacuuccua

SEQ ID NO: 1734425 - RNA, 19 nt, Homo sapiens
  misc_RNA (1)...(19): siRNA sense strand
gggaaaaggugauuguaga

SEQ ID NO: 1734426 - RNA, 19 nt, Homo sapiens
  misc_RNA (1)...(19): siRNA sense strand
acagaauacuuccuagaau

SEQ ID NO: 1734427 - RNA, 19 nt, Homo sapiens
  misc_RNA (1)...(19): siRNA sense strand
ggaccuccauuuccagucu

SEQ ID NO: 1734428 - RNA, 19 nt, Homo sapiens
  misc_RNA (1)...(19): siRNA sense strand
aaacacacaggaagagaaa

SEQ ID NO: 1734429 - RNA, 19 nt, Homo sapiens
  misc_RNA (1)...(19): siRNA sense strand
ggaacaccuugaacuccuu

SEQ ID NO: 1734430 - RNA, 19 nt, Homo sapiens
  misc_RNA (1)...(19): siRNA sense strand
gcuugaagauuucuaugca

SEQ ID NO: 1734431 - RNA, 19 nt, Homo sapiens
  misc_RNA (1)...(19): siRNA sense strand
ugaucgagaugguacaaga

SEQ ID NO: 1734432 - RNA, 19 nt, Homo sapiens
  misc_RNA (1)...(19): siRNA sense strand
uaacaagggauaugucaag

SEQ ID NO: 1734433 - RNA, 19 nt, Homo sapiens
  misc_RNA (1)...(19): siRNA sense strand
caagaggcugguagaguaa

SEQ ID NO: 1734434 - RNA, 19 nt, Homo sapiens
  misc_RNA (1)...(19): siRNA sense strand
agggauaugucaagguaaa

SEQ ID NO: 1734435 - RNA, 19 nt, Homo sapiens
  misc_RNA (1)...(19): siRNA sense strand
uuaagcauaugcacacugu

SEQ ID NO: 1734436 - RNA, 19 nt, Homo sapiens
  misc_RNA (1)...(19): siRNA sense strand
ggugauaaaggauaaauac

SEQ ID NO: 1734437 - RNA, 19 nt, Homo sapiens
  misc_RNA (1)...(19): siRNA sense strand
ucacugauaagaaauguuc

SEQ ID NO: 1734438 - RNA, 19 nt, Homo sapiens
  misc_RNA (1)...(19): siRNA sense strand
gcaacagugauucuauaga

SEQ ID NO: 1734439 - RNA, 19 nt, Homo sapiens
  misc_RNA (1)...(19): siRNA sense strand
caaacuccgcuuccgauug

SEQ ID NO: 1734440 - RNA, 19 nt, Homo sapiens
  misc_RNA (1)...(19): siRNA sense strand
gagcaggugguggugauaa

SEQ ID NO: 1734441 - RNA, 19 nt, Homo sapiens
  misc_RNA (1)...(19): siRNA sense strand
gcaaacuccgcuuccgauu

SEQ ID NO: 1734442 - RNA, 19 nt, Homo sapiens
  misc_RNA (1)...(19): siRNA sense strand
ggaaacacacaggaagaga

SEQ ID NO: 1734443 - RNA, 19 nt, Homo sapiens
  misc_RNA (1)...(19): siRNA sense strand
uaugagccauguacaucuu

SEQ ID NO: 1734444 - RNA, 19 nt, Homo sapiens
  misc_RNA (1)...(19): siRNA sense strand
gaaaagaugcaccuaucaa

SEQ ID NO: 1734445 - RNA, 19 nt, Homo sapiens
  misc_RNA (1)...(19): siRNA sense strand
aaagagaucaggcaacagu

SEQ ID NO: 1734446 - RNA, 19 nt, Homo sapiens
  misc_RNA (1)...(19): siRNA sense strand
gggaaaagaugcaccuauc

SEQ ID NO: 1734447 - RNA, 19 nt, Homo sapiens
  misc_RNA (1)...(19): siRNA sense strand
uacagaauacuuccuagaa

SEQ ID NO: 1734448 - RNA, 19 nt, Homo sapiens
  misc_RNA (1)...(19): siRNA sense strand
cuugaacuccuuaagcaua

SEQ ID NO: 1734449 - RNA, 19 nt, Homo sapiens
  misc_RNA (1)...(19): siRNA sense strand
gggagcaacucuggccaau

SEQ ID NO: 1734450 - RNA, 19 nt, Homo sapiens
  misc_RNA (1)...(19): siRNA sense strand
aagaacaucucaggaagca

SEQ ID NO: 1734451 - RNA, 19 nt, Homo sapiens
  misc_RNA (1)...(19): siRNA sense strand
acacacaggaagagaaaga

SEQ ID NO: 1734452 - RNA, 19 nt, Homo sapiens
  misc_RNA (1)...(19): siRNA sense strand
ugauucuccuugccuuaaa

SEQ ID NO: 1734453 - RNA, 19 nt, Homo sapiens
  misc_RNA (1)...(19): siRNA sense strand
cagaguguaacaagggaua

SEQ ID NO: 1734454 - RNA, 19 nt, Homo sapiens
  misc_RNA (1)...(19): siRNA sense strand
aagggaugcugcucaggaa

SEQ ID NO: 1734455 - RNA, 19 nt, Homo sapiens
  misc_RNA (1)...(19): siRNA sense strand
caugugaucagccaggauu

SEQ ID NO: 1734456 - RNA, 19 nt, Homo sapiens
  misc_RNA (1)...(19): siRNA sense strand
caaaaugcagguuuacaaa

SEQ ID NO: 1734457 - RNA, 19 nt, Homo sapiens
  misc_RNA (1)...(19): siRNA sense strand
gaaaaggugauuguagauu

SEQ ID NO: 1734458 - RNA, 19 nt, Homo sapiens
  misc_RNA (1)...(19): siRNA sense strand
aaggauaaauacccaaagg

SEQ ID NO: 1734459 - RNA, 19 nt, Homo sapiens
  misc_RNA (1)...(19): siRNA sense strand
ugggaugccugagcucuug

SEQ ID NO: 1734460 - RNA, 19 nt, Homo sapiens
  misc_RNA (1)...(19): siRNA sense strand
agaauacuuccuagaauca

SEQ ID NO: 1734461 - RNA, 19 nt, Homo sapiens
  misc_RNA (1)...(19): siRNA sense strand
uggaagcaguugugauugg

SEQ ID NO: 1734462 - RNA, 19 nt, Homo sapiens
  misc_RNA (1)...(19): siRNA sense strand
uugaacuccuuaagcauau

SEQ ID NO: 1734463 - RNA, 19 nt, Homo sapiens
  misc_RNA (1)...(19): siRNA sense strand
ggccagggaacaccuugaa

SEQ ID NO: 1734464 - RNA, 19 nt, Homo sapiens
  misc_RNA (1)...(19): siRNA sense strand
cagagaccaagaucacuga

SEQ ID NO: 1734465 - RNA, 19 nt, Homo sapiens
  misc_RNA (1)...(19): siRNA sense strand
gguacaagaggcugguaga

SEQ ID NO: 1734466 - RNA, 19 nt, Homo sapiens
  misc_RNA (1)...(19): siRNA sense strand
uuuggaagcaguugugauu

SEQ ID NO: 1734467 - RNA, 19 nt, Homo sapiens
  misc_RNA (1)...(19): siRNA sense strand
guaacaagggauaugucaa

SEQ ID NO: 1734468 - RNA, 19 nt, Homo sapiens
  misc_RNA (1)...(19): siRNA sense strand
uuccucagcugaaagaaca

SEQ ID NO: 1734469 - RNA, 19 nt, Homo sapiens
  misc_RNA (1)...(19): siRNA sense strand
agagaucaggcaacaguga

SEQ ID NO: 1734470 - RNA, 19 nt, Homo sapiens
  misc_RNA (1)...(19): siRNA sense strand
gaguaugagccauguacau

SEQ ID NO: 1734471 - RNA, 19 nt, Homo sapiens
  misc_RNA (1)...(19): siRNA sense strand
caccagcgaaucagacuuc

SEQ ID NO: 1734472 - RNA, 19 nt, Homo sapiens
  misc_RNA (1)...(19): siRNA sense strand
ggaaaagaugcaccuauca

SEQ ID NO: 1734473 - RNA, 19 nt, Homo sapiens
  misc_RNA (1)...(19): siRNA sense strand
cagcugaaagaacaucuca

SEQ ID NO: 1734474 - RNA, 19 nt, Homo sapiens
  misc_RNA (1)...(19): siRNA sense strand
ugaaagcagaguguaacaa

SEQ ID NO: 1734475 - RNA, 19 nt, Homo sapiens
  misc_RNA (1)...(19): siRNA sense strand
ggcaacagugauucuauag

SEQ ID NO: 1734476 - RNA, 19 nt, Homo sapiens
  misc_RNA (1)...(19): siRNA sense strand
aaaggcccguuaccauugg

SEQ ID NO: 1734477 - RNA, 19 nt, Homo sapiens
  misc_RNA (1)...(19): siRNA sense strand
ugguggugauaaaggauaa

SEQ ID NO: 1734478 - RNA, 19 nt, Homo sapiens
  misc_RNA (1)...(19): siRNA sense strand
gugguggugauaaaggaua

SEQ ID NO: 1734479 - RNA, 19 nt, Homo sapiens
  misc_RNA (1)...(19): siRNA sense strand
aaugcagguuuacaaagau

SEQ ID NO: 1734480 - RNA, 19 nt, Homo sapiens
  misc_RNA (1)...(19): siRNA sense strand
ccaaaaugcagguuuacaa

SEQ ID NO: 1734481 - RNA, 19 nt, Homo sapiens
  misc_RNA (1)...(19): siRNA sense strand
ggaaauaucccucguagua

SEQ ID NO: 1734482 - RNA, 19 nt, Homo sapiens
  misc_RNA (1)...(19): siRNA sense strand
ggaagaagcaguucaagua

SEQ ID NO: 1734483 - RNA, 19 nt, Homo sapiens
  misc_RNA (1)...(19): siRNA sense strand
gaaagaagaugugaaugaa

SEQ ID NO: 1734484 - RNA, 19 nt, Homo sapiens
  misc_RNA (1)...(19): siRNA sense strand
gcacugcucucccgguuug

SEQ ID NO: 1734485 - RNA, 19 nt, Homo sapiens
  misc_RNA (1)...(19): siRNA sense strand
agagggaagugguaaauaa

SEQ ID NO: 1734486 - RNA, 19 nt, Homo sapiens
  misc_RNA (1)...(19): siRNA sense strand
ggagagaacacaaggauug

SEQ ID NO: 1734487 - RNA, 19 nt, Homo sapiens
  misc_RNA (1)...(19): siRNA sense strand
ucaaaggacucucuucuag

SEQ ID NO: 1734488 - RNA, 19 nt, Homo sapiens
  misc_RNA (1)...(19): siRNA sense strand
gaacaagagugaggaugau

SEQ ID NO: 1734489 - RNA, 19 nt, Homo sapiens
  misc_RNA (1)...(19): siRNA sense strand
uaauggagaugucaaagga

SEQ ID NO: 1734490 - RNA, 19 nt, Homo sapiens
  misc_RNA (1)...(19): siRNA sense strand
ggagaaagaagaugugaau

SEQ ID NO: 1734491 - RNA, 19 nt, Homo sapiens
  misc_RNA (1)...(19): siRNA sense strand
guggagaacugaccuuaga

SEQ ID NO: 1734492 - RNA, 19 nt, Homo sapiens
  misc_RNA (1)...(19): siRNA sense strand
agucucagcuccugucaua

SEQ ID NO: 1734493 - RNA, 19 nt, Homo sapiens
  misc_RNA (1)...(19): siRNA sense strand
gaagaagcaguucaaguau

SEQ ID NO: 1734494 - RNA, 19 nt, Homo sapiens
  misc_RNA (1)...(19): siRNA sense strand
gggaagugguaaauaaaga

SEQ ID NO: 1734495 - RNA, 19 nt, Homo sapiens
  misc_RNA (1)...(19): siRNA sense strand
gggaggagcugaggcaaau

SEQ ID NO: 1734496 - RNA, 19 nt, Homo sapiens
  misc_RNA (1)...(19): siRNA sense strand
aaaggacucucuucuagga

SEQ ID NO: 1734497 - RNA, 19 nt, Homo sapiens
  misc_RNA (1)...(19): siRNA sense strand
agaaagaagaugugaauga

SEQ ID NO: 1734498 - RNA, 19 nt, Homo sapiens
  misc_RNA (1)...(19): siRNA sense strand
gcgaagcucuuugcugaug

SEQ ID NO: 1734499 - RNA, 19 nt, Homo sapiens
  misc_RNA (1)...(19): siRNA sense strand
gaaauaucccucguaguau

SEQ ID NO: 1734500 - RNA, 19 nt, Homo sapiens
  misc_RNA (1)...(19): siRNA sense strand
gauccagucucccacuuuc

SEQ ID NO: 1734501 - RNA, 19 nt, Homo sapiens
  misc_RNA (1)...(19): siRNA sense strand
gcuccagauucaucaaauu

SEQ ID NO: 1734502 - RNA, 19 nt, Homo sapiens
  misc_RNA (1)...(19): siRNA sense strand
gguacaggguuuacucuca

SEQ ID NO: 1734503 - RNA, 19 nt, Homo sapiens
  misc_RNA (1)...(19): siRNA sense strand
gcucaugaggcguuacaua

SEQ ID NO: 1734504 - RNA, 19 nt, Homo sapiens
  misc_RNA (1)...(19): siRNA sense strand
cagcagaccaucuccauug

SEQ ID NO: 1734505 - RNA, 19 nt, Homo sapiens
  misc_RNA (1)...(19): siRNA sense strand
gcaugaagaugugaagaag

SEQ ID NO: 1734506 - RNA, 19 nt, Homo sapiens
  misc_RNA (1)...(19): siRNA sense strand
gcaagaacauagugaucag

SEQ ID NO: 1734507 - RNA, 19 nt, Homo sapiens
  misc_RNA (1)...(19): siRNA sense strand
ggugugugcugcauugaug

SEQ ID NO: 1734508 - RNA, 19 nt, Homo sapiens
  misc_RNA (1)...(19): siRNA sense strand
gcagagcagcgcuguguau

SEQ ID NO: 1734509 - RNA, 19 nt, Homo sapiens
  misc_RNA (1)...(19): siRNA sense strand
gagggaagugguaaauaaa

SEQ ID NO: 1734510 - RNA, 19 nt, Homo sapiens
  misc_RNA (1)...(19): siRNA sense strand
gagcagcgcuguguaucuc

SEQ ID NO: 1734511 - RNA, 19 nt, Homo sapiens
  misc_RNA (1)...(19): siRNA sense strand
agaggaggauuucuacgaa

SEQ ID NO: 1734512 - RNA, 19 nt, Homo sapiens
  misc_RNA (1)...(19): siRNA sense strand
guaaggaugccaccuauac

SEQ ID NO: 1734513 - RNA, 19 nt, Homo sapiens
  misc_RNA (1)...(19): siRNA sense strand
gagagggaagugguaaaua

SEQ ID NO: 1734514 - RNA, 19 nt, Homo sapiens
  misc_RNA (1)...(19): siRNA sense strand
gaccuccucuggcugauuc

SEQ ID NO: 1734515 - RNA, 19 nt, Homo sapiens
  misc_RNA (1)...(19): siRNA sense strand
gaagaugcaagaacauagu

SEQ ID NO: 1734516 - RNA, 19 nt, Homo sapiens
  misc_RNA (1)...(19): siRNA sense strand
guacccugcugaacucaug

SEQ ID NO: 1734517 - RNA, 19 nt, Homo sapiens
  misc_RNA (1)...(19): siRNA sense strand
aaauaucccucguaguauc

SEQ ID NO: 1734518 - RNA, 19 nt, Homo sapiens
  misc_RNA (1)...(19): siRNA sense strand
ggacacggaucacuuuugu

SEQ ID NO: 1734519 - RNA, 19 nt, Homo sapiens
  misc_RNA (1)...(19): siRNA sense strand
cgagaggcuugggcuagua

SEQ ID NO: 1734520 - RNA, 19 nt, Homo sapiens
  misc_RNA (1)...(19): siRNA sense strand
cagcauacguggagaugag

SEQ ID NO: 1734521 - RNA, 19 nt, Homo sapiens
  misc_RNA (1)...(19): siRNA sense strand
gaaauauacgggcaugaag

SEQ ID NO: 1734522 - RNA, 19 nt, Homo sapiens
  misc_RNA (1)...(19): siRNA sense strand
gaggagcugaggcaaauug

SEQ ID NO: 1734523 - RNA, 19 nt, Homo sapiens
  misc_RNA (1)...(19): siRNA sense strand
agaagcaguucaaguaugg

SEQ ID NO: 1734524 - RNA, 19 nt, Homo sapiens
  misc_RNA (1)...(19): siRNA sense strand
cagcuccugucauacauug

SEQ ID NO: 1734525 - RNA, 19 nt, Homo sapiens
  misc_RNA (1)...(19): siRNA sense strand
gaagugguaaauaaagaug

SEQ ID NO: 1734526 - RNA, 19 nt, Homo sapiens
  misc_RNA (1)...(19): siRNA sense strand
ugaacaagagugaggauga

SEQ ID NO: 1734527 - RNA, 19 nt, Homo sapiens
  misc_RNA (1)...(19): siRNA sense strand
gacaggugguacaggguuu

SEQ ID NO: 1734528 - RNA, 19 nt, Homo sapiens
  misc_RNA (1)...(19): siRNA sense strand
agaugaagaugcaagaaca

SEQ ID NO: 1734529 - RNA, 19 nt, Homo sapiens
  misc_RNA (1)...(19): siRNA sense strand
gaaccaguacccugcugaa

SEQ ID NO: 1734530 - RNA, 19 nt, Homo sapiens
  misc_RNA (1)...(19): siRNA sense strand
ggagagggaagugguaaau

SEQ ID NO: 1734531 - RNA, 19 nt, Homo sapiens
  misc_RNA (1)...(19): siRNA sense strand
gagugaggaugaugagucu

SEQ ID NO: 1734532 - RNA, 19 nt, Homo sapiens
  misc_RNA (1)...(19): siRNA sense strand
aagaagcaguucaaguaug

SEQ ID NO: 1734533 - RNA, 19 nt, Homo sapiens
  misc_RNA (1)...(19): siRNA sense strand
ccaguacccugcugaacuc

SEQ ID NO: 1734534 - RNA, 19 nt, Homo sapiens
  misc_RNA (1)...(19): siRNA sense strand
cagggugugugcugcauug

SEQ ID NO: 1734535 - RNA, 19 nt, Homo sapiens
  misc_RNA (1)...(19): siRNA sense strand
aagagcugcugccucagua

SEQ ID NO: 1734536 - RNA, 19 nt, Homo sapiens
  misc_RNA (1)...(19): siRNA sense strand
ggaagugguaaauaaagau

SEQ ID NO: 1734537 - RNA, 19 nt, Homo sapiens
  misc_RNA (1)...(19): siRNA sense strand
uaguaaggaugccaccuau

SEQ ID NO: 1734538 - RNA, 19 nt, Homo sapiens
  misc_RNA (1)...(19): siRNA sense strand
gaguggagaacugaccuua

SEQ ID NO: 1734539 - RNA, 19 nt, Homo sapiens
  misc_RNA (1)...(19): siRNA sense strand
caaggagagggaaguggua

SEQ ID NO: 1734540 - RNA, 19 nt, Homo sapiens
  misc_RNA (1)...(19): siRNA sense strand
cgaccgagacaaugaccua

SEQ ID NO: 1734541 - RNA, 19 nt, Homo sapiens
  misc_RNA (1)...(19): siRNA sense strand
gagaggcuugggcuaguaa

SEQ ID NO: 1734542 - RNA, 19 nt, Homo sapiens
  misc_RNA (1)...(19): siRNA sense strand
gucaaaggacucucuucua

SEQ ID NO: 1734543 - RNA, 19 nt, Homo sapiens
  misc_RNA (1)...(19): siRNA sense strand
ccuggaagcccaucggauu

SEQ ID NO: 1734544 - RNA, 19 nt, Homo sapiens
  misc_RNA (1)...(19): siRNA sense strand
uggaugugguggagaaaga

SEQ ID NO: 1734545 - RNA, 19 nt, Homo sapiens
  misc_RNA (1)...(19): siRNA sense strand
ucaaguaugggaaccaguu

SEQ ID NO: 1734546 - RNA, 19 nt, Homo sapiens
  misc_RNA (1)...(19): siRNA sense strand
ggcaugaagaugugaagaa

SEQ ID NO: 1734547 - RNA, 19 nt, Homo sapiens
  misc_RNA (1)...(19): siRNA sense strand
ucgugucucugaagucaaa

SEQ ID NO: 1734548 - RNA, 19 nt, Homo sapiens
  misc_RNA (1)...(19): siRNA sense strand
agaaauauacgggcaugaa

SEQ ID NO: 1734549 - RNA, 19 nt, Homo sapiens
  misc_RNA (1)...(19): siRNA sense strand
ggaagcccaucggauugug

SEQ ID NO: 1734550 - RNA, 19 nt, Homo sapiens
  misc_RNA (1)...(19): siRNA sense strand
gaaggagagaacacaagga

SEQ ID NO: 1734551 - RNA, 19 nt, Homo sapiens
  misc_RNA (1)...(19): siRNA sense strand
ucaaauuccaggagaugaa

SEQ ID NO: 1734552 - RNA, 19 nt, Homo sapiens
  misc_RNA (1)...(19): siRNA sense strand
gguggccacuuacacuugu

SEQ ID NO: 1734553 - RNA, 19 nt, Homo sapiens
  misc_RNA (1)...(19): siRNA sense strand
gcgagaggcuugggcuagu

SEQ ID NO: 1734554 - RNA, 19 nt, Homo sapiens
  misc_RNA (1)...(19): siRNA sense strand
gugcugcauugaugaguuc

SEQ ID NO: 1734555 - RNA, 19 nt, Homo sapiens
  misc_RNA (1)...(19): siRNA sense strand
aaucgucacucgugucucu

SEQ ID NO: 1734556 - RNA, 19 nt, Homo sapiens
  misc_RNA (1)...(19): siRNA sense strand
cuaguaaggaugccaccua

SEQ ID NO: 1734557 - RNA, 19 nt, Homo sapiens
  misc_RNA (1)...(19): siRNA sense strand
uugaaccucuggacaugaa

SEQ ID NO: 1734558 - RNA, 19 nt, Homo sapiens
  misc_RNA (1)...(19): siRNA sense strand
gcagcagaccaucuccauu

SEQ ID NO: 1734559 - RNA, 19 nt, Homo sapiens
  misc_RNA (1)...(19): siRNA sense strand
uugaugaguucgacaagau

SEQ ID NO: 1734560 - RNA, 19 nt, Homo sapiens
  misc_RNA (1)...(19): siRNA sense strand
gcauugaugaguucgacaa

SEQ ID NO: 1734561 - RNA, 19 nt, Homo sapiens
  misc_RNA (1)...(19): siRNA sense strand
ugaagaugaacaagaguga

SEQ ID NO: 1734562 - RNA, 19 nt, Homo sapiens
  misc_RNA (1)...(19): siRNA sense strand
gggaagaagcaguucaagu

SEQ ID NO: 1734563 - RNA, 19 nt, Homo sapiens
  misc_RNA (1)...(19): siRNA sense strand
guaucacggugcugguaga

SEQ ID NO: 1734564 - RNA, 19 nt, Homo sapiens
  misc_RNA (1)...(19): siRNA sense strand
cagaggaggauuucuacga

SEQ ID NO: 1734565 - RNA, 19 nt, Homo sapiens
  misc_RNA (1)...(19): siRNA sense strand
ugaagcucaugaggcguua

SEQ ID NO: 1734566 - RNA, 19 nt, Homo sapiens
  misc_RNA (1)...(19): siRNA sense strand
guuugaaccucuggacaug

SEQ ID NO: 1734567 - RNA, 19 nt, Homo sapiens
  misc_RNA (1)...(19): siRNA sense strand
augaugaacucgggaagaa

SEQ ID NO: 1734568 - RNA, 19 nt, Homo sapiens
  misc_RNA (1)...(19): siRNA sense strand
aaauauacgggcaugaaga

SEQ ID NO: 1734569 - RNA, 19 nt, Homo sapiens
  misc_RNA (1)...(19): siRNA sense strand
ggagaugaagaugcaagaa

SEQ ID NO: 1734570 - RNA, 19 nt, Homo sapiens
  misc_RNA (1)...(19): siRNA sense strand
gaugccaccuauacuucug

SEQ ID NO: 1734571 - RNA, 19 nt, Homo sapiens
  misc_RNA (1)...(19): siRNA sense strand
cuaccaggaugaugaacuc

SEQ ID NO: 1734572 - RNA, 19 nt, Homo sapiens
  misc_RNA (1)...(19): siRNA sense strand
ggaaucgucacucgugucu

SEQ ID NO: 1734573 - RNA, 19 nt, Homo sapiens
  misc_RNA (1)...(19): siRNA sense strand
gaugaugaacucgggaaga

SEQ ID NO: 1734574 - RNA, 19 nt, Homo sapiens
  misc_RNA (1)...(19): siRNA sense strand
gcucuggcacgucugagaa

SEQ ID NO: 1734575 - RNA, 19 nt, Homo sapiens
  misc_RNA (1)...(19): siRNA sense strand
gcgagaagcagcccauggu

SEQ ID NO: 1734576 - RNA, 19 nt, Homo sapiens
  misc_RNA (1)...(19): siRNA sense strand
caagagcugcugccucagu

SEQ ID NO: 1734577 - RNA, 19 nt, Homo sapiens
  misc_RNA (1)...(19): siRNA sense strand
guagaaggagagaacacaa

SEQ ID NO: 1734578 - RNA, 19 nt, Homo sapiens
  misc_RNA (1)...(19): siRNA sense strand
gcgcuacgcgaagcucuuu

SEQ ID NO: 1734579 - RNA, 19 nt, Homo sapiens
  misc_RNA (1)...(19): siRNA sense strand
gagaugaagaugcaagaac

SEQ ID NO: 1734580 - RNA, 19 nt, Homo sapiens
  misc_RNA (1)...(19): siRNA sense strand
ucacucgugucucugaagu

SEQ ID NO: 1734581 - RNA, 19 nt, Homo sapiens
  misc_RNA (1)...(19): siRNA sense strand
ggaaauaucccucguagua

SEQ ID NO: 1734582 - RNA, 19 nt, Homo sapiens
  misc_RNA (1)...(19): siRNA sense strand
gaaagaagaugugaaugaa

SEQ ID NO: 1734583 - RNA, 19 nt, Homo sapiens
  misc_RNA (1)...(19): siRNA sense strand
gcacugcucucccgguuug

SEQ ID NO: 1734584 - RNA, 19 nt, Homo sapiens
  misc_RNA (1)...(19): siRNA sense strand
ggagagaacacaaggauug

SEQ ID NO: 1734585 - RNA, 19 nt, Homo sapiens
  misc_RNA (1)...(19): siRNA sense strand
ucaaaggacucucuucuag

SEQ ID NO: 1734586 - RNA, 19 nt, Homo sapiens
  misc_RNA (1)...(19): siRNA sense strand
gaacaagagugaggaugau

SEQ ID NO: 1734587 - RNA, 19 nt, Homo sapiens
  misc_RNA (1)...(19): siRNA sense strand
uaauggagaugucaaagga

SEQ ID NO: 1734588 - RNA, 19 nt, Homo sapiens
  misc_RNA (1)...(19): siRNA sense strand
ggagaaagaagaugugaau

SEQ ID NO: 1734589 - RNA, 19 nt, Homo sapiens
  misc_RNA (1)...(19): siRNA sense strand
guggagaacugaccuuaga

SEQ ID NO: 1734590 - RNA, 19 nt, Homo sapiens
  misc_RNA (1)...(19): siRNA sense strand
agucucagcuccugucaua

SEQ ID NO: 1734591 - RNA, 19 nt, Homo sapiens
  misc_RNA (1)...(19): siRNA sense strand
gggaggagcugaggcaaau

SEQ ID NO: 1734592 - RNA, 19 nt, Homo sapiens
  misc_RNA (1)...(19): siRNA sense strand
aaaggacucucuucuagga

SEQ ID NO: 1734593 - RNA, 19 nt, Homo sapiens
  misc_RNA (1)...(19): siRNA sense strand
agaaagaagaugugaauga

SEQ ID NO: 1734594 - RNA, 19 nt, Homo sapiens
  misc_RNA (1)...(19): siRNA sense strand
gaaauaucccucguaguau

SEQ ID NO: 1734595 - RNA, 19 nt, Homo sapiens
  misc_RNA (1)...(19): siRNA sense strand
gcuccagauucaucaaauu

SEQ ID NO: 1734596 - RNA, 19 nt, Homo sapiens
  misc_RNA (1)...(19): siRNA sense strand
gauccagucucccacuuuc

SEQ ID NO: 1734597 - RNA, 19 nt, Homo sapiens
  misc_RNA (1)...(19): siRNA sense strand
gguacaggguuuacucuca

SEQ ID NO: 1734598 - RNA, 19 nt, Homo sapiens
  misc_RNA (1)...(19): siRNA sense strand
gcucaugaggcguuacaua

SEQ ID NO: 1734599 - RNA, 19 nt, Homo sapiens
  misc_RNA (1)...(19): siRNA sense strand
cagcagaccaucuccauug

SEQ ID NO: 1734600 - RNA, 19 nt, Homo sapiens
  misc_RNA (1)...(19): siRNA sense strand
gcaugaagaugugaagaag

SEQ ID NO: 1734601 - RNA, 19 nt, Homo sapiens
  misc_RNA (1)...(19): siRNA sense strand
gcaagaacauagugaucag

SEQ ID NO: 1734602 - RNA, 19 nt, Homo sapiens
  misc_RNA (1)...(19): siRNA sense strand
ggugugugcugcauugaug

SEQ ID NO: 1734603 - RNA, 19 nt, Homo sapiens
  misc_RNA (1)...(19): siRNA sense strand
gcagagcagcgcuguguau

SEQ ID NO: 1734604 - RNA, 19 nt, Homo sapiens
  misc_RNA (1)...(19): siRNA sense strand
agaggaggauuucuacgaa

SEQ ID NO: 1734605 - RNA, 19 nt, Homo sapiens
  misc_RNA (1)...(19): siRNA sense strand
gagcagcgcuguguaucuc

SEQ ID NO: 1734606 - RNA, 19 nt, Homo sapiens
  misc_RNA (1)...(19): siRNA sense strand
guaaggaugccaccuauac

SEQ ID NO: 1734607 - RNA, 19 nt, Homo sapiens
  misc_RNA (1)...(19): siRNA sense strand
gaagaugcaagaacauagu

SEQ ID NO: 1734608 - RNA, 19 nt, Homo sapiens
  misc_RNA (1)...(19): siRNA sense strand
gaccuccucuggcugauuc

SEQ ID NO: 1734609 - RNA, 19 nt, Homo sapiens
  misc_RNA (1)...(19): siRNA sense strand
aaauaucccucguaguauc

SEQ ID NO: 1734610 - RNA, 19 nt, Homo sapiens
  misc_RNA (1)...(19): siRNA sense strand
ggacacggaucacuuuugu

SEQ ID NO: 1734611 - RNA, 19 nt, Homo sapiens
  misc_RNA (1)...(19): siRNA sense strand
cgagaggcuugggcuagua

SEQ ID NO: 1734612 - RNA, 19 nt, Homo sapiens
  misc_RNA (1)...(19): siRNA sense strand
cagcauacguggagaugag

SEQ ID NO: 1734613 - RNA, 19 nt, Homo sapiens
  misc_RNA (1)...(19): siRNA sense strand
gaaauauacgggcaugaag

SEQ ID NO: 1734614 - RNA, 19 nt, Homo sapiens
  misc_RNA (1)...(19): siRNA sense strand
gaggagcugaggcaaauug

SEQ ID NO: 1734615 - RNA, 19 nt, Homo sapiens
  misc_RNA (1)...(19): siRNA sense strand
cagcuccugucauacauug

SEQ ID NO: 1734616 - RNA, 19 nt, Homo sapiens
  misc_RNA (1)...(19): siRNA sense strand
agaugaagaugcaagaaca

SEQ ID NO: 1734617 - RNA, 19 nt, Homo sapiens
  misc_RNA (1)...(19): siRNA sense strand
ugaacaagagugaggauga

SEQ ID NO: 1734618 - RNA, 19 nt, Homo sapiens
  misc_RNA (1)...(19): siRNA sense strand
gacaggugguacaggguuu

SEQ ID NO: 1734619 - RNA, 19 nt, Homo sapiens
  misc_RNA (1)...(19): siRNA sense strand
gagugaggaugaugagucu

SEQ ID NO: 1734620 - RNA, 19 nt, Homo sapiens
  misc_RNA (1)...(19): siRNA sense strand
cagggugugugcugcauug

SEQ ID NO: 1734621 - RNA, 19 nt, Homo sapiens
  misc_RNA (1)...(19): siRNA sense strand
gaguggagaacugaccuua

SEQ ID NO: 1734622 - RNA, 19 nt, Homo sapiens
  misc_RNA (1)...(19): siRNA sense strand
uaguaaggaugccaccuau

SEQ ID NO: 1734623 - RNA, 19 nt, Homo sapiens
  misc_RNA (1)...(19): siRNA sense strand
cgaccgagacaaugaccua

SEQ ID NO: 1734624 - RNA, 19 nt, Homo sapiens
  misc_RNA (1)...(19): siRNA sense strand
gagaggcuugggcuaguaa

SEQ ID NO: 1734625 - RNA, 19 nt, Homo sapiens
  misc_RNA (1)...(19): siRNA sense strand
gucaaaggacucucuucua

SEQ ID NO: 1734626 - RNA, 19 nt, Homo sapiens
  misc_RNA (1)...(19): siRNA sense strand
ccuggaagcccaucggauu

SEQ ID NO: 1734627 - RNA, 19 nt, Homo sapiens
  misc_RNA (1)...(19): siRNA sense strand
uggaugugguggagaaaga

SEQ ID NO: 1734628 - RNA, 19 nt, Homo sapiens
  misc_RNA (1)...(19): siRNA sense strand
ggcaugaagaugugaagaa

SEQ ID NO: 1734629 - RNA, 19 nt, Homo sapiens
  misc_RNA (1)...(19): siRNA sense strand
gaaggagagaacacaagga

SEQ ID NO: 1734630 - RNA, 19 nt, Homo sapiens
  misc_RNA (1)...(19): siRNA sense strand
ucaaauuccaggagaugaa

SEQ ID NO: 1734631 - RNA, 19 nt, Homo sapiens
  misc_RNA (1)...(19): siRNA sense strand
agaaauauacgggcaugaa

SEQ ID NO: 1734632 - RNA, 19 nt, Homo sapiens
  misc_RNA (1)...(19): siRNA sense strand
ggaagcccaucggauugug

SEQ ID NO: 1734633 - RNA, 19 nt, Homo sapiens
  misc_RNA (1)...(19): siRNA sense strand
gugcugcauugaugaguuc

SEQ ID NO: 1734634 - RNA, 19 nt, Homo sapiens
  misc_RNA (1)...(19): siRNA sense strand
gguggccacuuacacuugu

SEQ ID NO: 1734635 - RNA, 19 nt, Homo sapiens
  misc_RNA (1)...(19): siRNA sense strand
gcgagaggcuugggcuagu

SEQ ID NO: 1734636 - RNA, 19 nt, Homo sapiens
  misc_RNA (1)...(19): siRNA sense strand
guaucacggugcugguaga

SEQ ID NO: 1734637 - RNA, 19 nt, Homo sapiens
  misc_RNA (1)...(19): siRNA sense strand
cuaguaaggaugccaccua

SEQ ID NO: 1734638 - RNA, 19 nt, Homo sapiens
  misc_RNA (1)...(19): siRNA sense strand
uugaaccucuggacaugaa

SEQ ID NO: 1734639 - RNA, 19 nt, Homo sapiens
  misc_RNA (1)...(19): siRNA sense strand
gcagcagaccaucuccauu

SEQ ID NO: 1734640 - RNA, 19 nt, Homo sapiens
  misc_RNA (1)...(19): siRNA sense strand
uugaugaguucgacaagau

SEQ ID NO: 1734641 - RNA, 19 nt, Homo sapiens
  misc_RNA (1)...(19): siRNA sense strand
gcauugaugaguucgacaa

SEQ ID NO: 1734642 - RNA, 19 nt, Homo sapiens
  misc_RNA (1)...(19): siRNA sense strand
ugaagaugaacaagaguga

SEQ ID NO: 1734643 - RNA, 19 nt, Homo sapiens
  misc_RNA (1)...(19): siRNA sense strand
cagaggaggauuucuacga

SEQ ID NO: 1734644 - RNA, 19 nt, Homo sapiens
  misc_RNA (1)...(19): siRNA sense strand
ugaagcucaugaggcguua

SEQ ID NO: 1734645 - RNA, 19 nt, Homo sapiens
  misc_RNA (1)...(19): siRNA sense strand
guuugaaccucuggacaug

SEQ ID NO: 1734646 - RNA, 19 nt, Homo sapiens
  misc_RNA (1)...(19): siRNA sense strand
aaauauacgggcaugaaga

SEQ ID NO: 1734647 - RNA, 19 nt, Homo sapiens
  misc_RNA (1)...(19): siRNA sense strand
ggagaugaagaugcaagaa

SEQ ID NO: 1734648 - RNA, 19 nt, Homo sapiens
  misc_RNA (1)...(19): siRNA sense strand
gaugccaccuauacuucug

SEQ ID NO: 1734649 - RNA, 19 nt, Homo sapiens
  misc_RNA (1)...(19): siRNA sense strand
guagaaggagagaacacaa

SEQ ID NO: 1734650 - RNA, 19 nt, Homo sapiens
  misc_RNA (1)...(19): siRNA sense strand
gcucuggcacgucugagaa

SEQ ID NO: 1734651 - RNA, 19 nt, Homo sapiens
  misc_RNA (1)...(19): siRNA sense strand
gcgagaagcagcccauggu

SEQ ID NO: 1734652 - RNA, 19 nt, Homo sapiens
  misc_RNA (1)...(19): siRNA sense strand
gagaugaagaugcaagaac

SEQ ID NO: 1734653 - RNA, 19 nt, Homo sapiens
  misc_RNA (1)...(19): siRNA sense strand
gaagcccaucggauuguga

SEQ ID NO: 1734654 - RNA, 19 nt, Homo sapiens
  misc_RNA (1)...(19): siRNA sense strand
ggagcagaacauacagcua

SEQ ID NO: 1734655 - RNA, 19 nt, Homo sapiens
  misc_RNA (1)...(19): siRNA sense strand
ccagauucaucaaauucca

SEQ ID NO: 1734656 - RNA, 19 nt, Homo sapiens
  misc_RNA (1)...(19): siRNA sense strand
ccacuuucaugccucugau

SEQ ID NO: 1734657 - RNA, 19 nt, Homo sapiens
  misc_RNA (1)...(19): siRNA sense strand
cacgucagcgucacuggua

SEQ ID NO: 1734658 - RNA, 19 nt, Homo sapiens
  misc_RNA (1)...(19): siRNA sense strand
cuacaucacagcagcauac

SEQ ID NO: 1734659 - RNA, 19 nt, Homo sapiens
  misc_RNA (1)...(19): siRNA sense strand
acaagagugaggaugauga

SEQ ID NO: 1734660 - RNA, 19 nt, Homo sapiens
  misc_RNA (1)...(19): siRNA sense strand
cagcgucacugguauuuuc

SEQ ID NO: 1734661 - RNA, 19 nt, Homo sapiens
  misc_RNA (1)...(19): siRNA sense strand
uccaggagaugaagaugca

SEQ ID NO: 1734662 - RNA, 19 nt, Homo sapiens
  misc_RNA (1)...(19): siRNA sense strand
acacggggcuccagauuca

SEQ ID NO: 1734663 - RNA, 19 nt, Homo sapiens
  misc_RNA (1)...(19): siRNA sense strand
auacgggcaugaagaugug

SEQ ID NO: 1734664 - RNA, 19 nt, Homo sapiens
  misc_RNA (1)...(19): siRNA sense strand
uugcagaggaggauuucua

SEQ ID NO: 1734665 - RNA, 19 nt, Homo sapiens
  misc_RNA (1)...(19): siRNA sense strand
gagaaagaagaugugaaug

SEQ ID NO: 1734666 - RNA, 19 nt, Homo sapiens
  misc_RNA (1)...(19): siRNA sense strand
cccaucggauugugaagau

SEQ ID NO: 1734667 - RNA, 19 nt, Homo sapiens
  misc_RNA (1)...(19): siRNA sense strand
gaugcaagaacauagugau

SEQ ID NO: 1734668 - RNA, 19 nt, Homo sapiens
  misc_RNA (1)...(19): siRNA sense strand
ggcuccagauucaucaaau

SEQ ID NO: 1734669 - RNA, 19 nt, Homo sapiens
  misc_RNA (1)...(19): siRNA sense strand
gggcuccagauucaucaaa

SEQ ID NO: 1734670 - RNA, 19 nt, Homo sapiens
  misc_RNA (1)...(19): siRNA sense strand
ugaagaugcaagaacauag

SEQ ID NO: 1734671 - RNA, 19 nt, Homo sapiens
  misc_RNA (1)...(19): siRNA sense strand
ggcuugggcuaguaaggau

SEQ ID NO: 1734672 - RNA, 19 nt, Homo sapiens
  misc_RNA (1)...(19): siRNA sense strand
ggcccgaccgagacaauga

SEQ ID NO: 1734673 - RNA, 19 nt, Homo sapiens
  misc_RNA (1)...(19): siRNA sense strand
ucucagcuccugucauaca

SEQ ID NO: 1734674 - RNA, 19 nt, Homo sapiens
  misc_RNA (1)...(19): siRNA sense strand
gguagaaggagagaacaca

SEQ ID NO: 1734675 - RNA, 19 nt, Homo sapiens
  misc_RNA (1)...(19): siRNA sense strand
uauacgggcaugaagaugu

SEQ ID NO: 1734676 - RNA, 19 nt, Homo sapiens
  misc_RNA (1)...(19): siRNA sense strand
ugguggaugugguggagaa

SEQ ID NO: 1734677 - RNA, 19 nt, Homo sapiens
  misc_RNA (1)...(19): siRNA sense strand
cucagaaaccuaccuggaa

SEQ ID NO: 1734678 - RNA, 19 nt, Homo sapiens
  misc_RNA (1)...(19): siRNA sense strand
gaugaagaugcaagaacau

SEQ ID NO: 1734679 - RNA, 19 nt, Homo sapiens
  misc_RNA (1)...(19): siRNA sense strand
aacaucaacaucugucuga

SEQ ID NO: 1734680 - RNA, 19 nt, Homo sapiens
  misc_RNA (1)...(19): siRNA sense strand
gggcaacaucaacaucugu

SEQ ID NO: 1734681 - RNA, 19 nt, Homo sapiens
  misc_RNA (1)...(19): siRNA sense strand
caacaaaugugaagaaugu

SEQ ID NO: 1734682 - RNA, 19 nt, Homo sapiens
  misc_RNA (1)...(19): siRNA sense strand
caacaaaugugaagaaugu

SEQ ID NO: 1734683 - RNA, 19 nt, Homo sapiens
  misc_RNA (1)...(19): siRNA sense strand
gcagagaaauccuauaaau

SEQ ID NO: 1734684 - RNA, 19 nt, Homo sapiens
  misc_RNA (1)...(19): siRNA sense strand
aaacaggccucacaccuua

SEQ ID NO: 1734685 - RNA, 19 nt, Homo sapiens
  misc_RNA (1)...(19): siRNA sense strand
gagggaaacucaacaaaug

SEQ ID NO: 1734686 - RNA, 19 nt, Homo sapiens
  misc_RNA (1)...(19): siRNA sense strand
caaaggaggucauaauaca

SEQ ID NO: 1734687 - RNA, 19 nt, Homo sapiens
  misc_RNA (1)...(19): siRNA sense strand
ggagaaacccuacaaaugu

SEQ ID NO: 1734688 - RNA, 19 nt, Homo sapiens
  misc_RNA (1)...(19): siRNA sense strand
gaaacaaacacuucaaaug

SEQ ID NO: 1734689 - RNA, 19 nt, Homo sapiens
  misc_RNA (1)...(19): siRNA sense strand
agagaaaccuuacaaaugu

SEQ ID NO: 1734690 - RNA, 19 nt, Homo sapiens
  misc_RNA (1)...(19): siRNA sense strand
gcaaauccuuuaaccaguu

SEQ ID NO: 1734691 - RNA, 19 nt, Homo sapiens
  misc_RNA (1)...(19): siRNA sense strand
cuacaaaugugaagaaugu

SEQ ID NO: 1734692 - RNA, 19 nt, Homo sapiens
  misc_RNA (1)...(19): siRNA sense strand
cuacaaaugugaagaaugu

SEQ ID NO: 1734693 - RNA, 19 nt, Homo sapiens
  misc_RNA (1)...(19): siRNA sense strand
gagagaaacccuauaaaug

SEQ ID NO: 1734694 - RNA, 19 nt, Homo sapiens
  misc_RNA (1)...(19): siRNA sense strand
gagagaaaccuuacaaaug

SEQ ID NO: 1734695 - RNA, 19 nt, Homo sapiens
  misc_RNA (1)...(19): siRNA sense strand
gagagaaacccuauaaaug

SEQ ID NO: 1734696 - RNA, 19 nt, Homo sapiens
  misc_RNA (1)...(19): siRNA sense strand
cuacaaaugugaagaaugu

SEQ ID NO: 1734697 - RNA, 19 nt, Homo sapiens
  misc_RNA (1)...(19): siRNA sense strand
cuacaaaugugaagaaugu

SEQ ID NO: 1734698 - RNA, 19 nt, Homo sapiens
  misc_RNA (1)...(19): siRNA sense strand
cuacaaaugugaagaaugu

SEQ ID NO: 1734699 - RNA, 19 nt, Homo sapiens
  misc_RNA (1)...(19): siRNA sense strand
ccucaaaccuuaauaaaca

SEQ ID NO: 1734700 - RNA, 19 nt, Homo sapiens
  misc_RNA (1)...(19): siRNA sense strand
cuacaaauguggagauuau

SEQ ID NO: 1734701 - RNA, 19 nt, Homo sapiens
  misc_RNA (1)...(19): siRNA sense strand
agagaaaccuuaccaaugu

SEQ ID NO: 1734702 - RNA, 19 nt, Homo sapiens
  misc_RNA (1)...(19): siRNA sense strand
uggcagagcuuucaaccua

SEQ ID NO: 1734703 - RNA, 19 nt, Homo sapiens
  misc_RNA (1)...(19): siRNA sense strand
gaagagaaacccaacaaau

SEQ ID NO: 1734704 - RNA, 19 nt, Homo sapiens
  misc_RNA (1)...(19): siRNA sense strand
gagagaaacccuacaaaug

SEQ ID NO: 1734705 - RNA, 19 nt, Homo sapiens
  misc_RNA (1)...(19): siRNA sense strand
gagagaaacccuacaaaug

SEQ ID NO: 1734706 - RNA, 19 nt, Homo sapiens
  misc_RNA (1)...(19): siRNA sense strand
gagaaccucuacaaauuug

SEQ ID NO: 1734707 - RNA, 19 nt, Homo sapiens
  misc_RNA (1)...(19): siRNA sense strand
gagagaaacccuacaaaug

SEQ ID NO: 1734708 - RNA, 19 nt, Homo sapiens
  misc_RNA (1)...(19): siRNA sense strand
gagagaaacccuacaaaug

SEQ ID NO: 1734709 - RNA, 19 nt, Homo sapiens
  misc_RNA (1)...(19): siRNA sense strand
gagagaaacccuacaaaug

SEQ ID NO: 1734710 - RNA, 19 nt, Homo sapiens
  misc_RNA (1)...(19): siRNA sense strand
gaagagaaacccuacaaau

SEQ ID NO: 1734711 - RNA, 19 nt, Homo sapiens
  misc_RNA (1)...(19): siRNA sense strand
cagcauagaagaauucaua

SEQ ID NO: 1734712 - RNA, 19 nt, Homo sapiens
  misc_RNA (1)...(19): siRNA sense strand
ugaagaacauggcaaaguu

SEQ ID NO: 1734713 - RNA, 19 nt, Homo sapiens
  misc_RNA (1)...(19): siRNA sense strand
uaaccaaucuucaaaccuu

SEQ ID NO: 1734714 - RNA, 19 nt, Homo sapiens
  misc_RNA (1)...(19): siRNA sense strand
ggagagaaacccuauaaau

SEQ ID NO: 1734715 - RNA, 19 nt, Homo sapiens
  misc_RNA (1)...(19): siRNA sense strand
ggagagaaacccuauaaau

SEQ ID NO: 1734716 - RNA, 19 nt, Homo sapiens
  misc_RNA (1)...(19): siRNA sense strand
uaacauauccucaaaccuu

SEQ ID NO: 1734717 - RNA, 19 nt, Homo sapiens
  misc_RNA (1)...(19): siRNA sense strand
gagaaacccuauaaaugug

SEQ ID NO: 1734718 - RNA, 19 nt, Homo sapiens
  misc_RNA (1)...(19): siRNA sense strand
aagagaaacucaacaaaug

SEQ ID NO: 1734719 - RNA, 19 nt, Homo sapiens
  misc_RNA (1)...(19): siRNA sense strand
gagaaacccuauaaaugug

SEQ ID NO: 1734720 - RNA, 19 nt, Homo sapiens
  misc_RNA (1)...(19): siRNA sense strand
gcacaaaggaggucauaau

SEQ ID NO: 1734721 - RNA, 19 nt, Homo sapiens
  misc_RNA (1)...(19): siRNA sense strand
gagaaacccuacaaaugug

SEQ ID NO: 1734722 - RNA, 19 nt, Homo sapiens
  misc_RNA (1)...(19): siRNA sense strand
gagaaacccuacaaaugug

SEQ ID NO: 1734723 - RNA, 19 nt, Homo sapiens
  misc_RNA (1)...(19): siRNA sense strand
gagaaacccuacaaaugug

SEQ ID NO: 1734724 - RNA, 19 nt, Homo sapiens
  misc_RNA (1)...(19): siRNA sense strand
gaauguggcaaauccuuua

SEQ ID NO: 1734725 - RNA, 19 nt, Homo sapiens
  misc_RNA (1)...(19): siRNA sense strand
gagaaacccuacaaaugug

SEQ ID NO: 1734726 - RNA, 19 nt, Homo sapiens
  misc_RNA (1)...(19): siRNA sense strand
gagagaaaccuuaccaaug

SEQ ID NO: 1734727 - RNA, 19 nt, Homo sapiens
  misc_RNA (1)...(19): siRNA sense strand
gagaaacccuacaaaugug

SEQ ID NO: 1734728 - RNA, 19 nt, Homo sapiens
  misc_RNA (1)...(19): siRNA sense strand
gagaaacccuacaaaugug

SEQ ID NO: 1734729 - RNA, 19 nt, Homo sapiens
  misc_RNA (1)...(19): siRNA sense strand
gagagaaaccauacaaaug

SEQ ID NO: 1734730 - RNA, 19 nt, Homo sapiens
  misc_RNA (1)...(19): siRNA sense strand
ccucaaaucuuacuacaca

SEQ ID NO: 1734731 - RNA, 19 nt, Homo sapiens
  misc_RNA (1)...(19): siRNA sense strand
ggagagaaaccauacaaau

SEQ ID NO: 1734732 - RNA, 19 nt, Homo sapiens
  misc_RNA (1)...(19): siRNA sense strand
ggagagaaaccuuacaaau

SEQ ID NO: 1734733 - RNA, 19 nt, Homo sapiens
  misc_RNA (1)...(19): siRNA sense strand
guucucaacucuuacuaaa

SEQ ID NO: 1734734 - RNA, 19 nt, Homo sapiens
  misc_RNA (1)...(19): siRNA sense strand
ccucaaaccuuacuacaca

SEQ ID NO: 1734735 - RNA, 19 nt, Homo sapiens
  misc_RNA (1)...(19): siRNA sense strand
gaagaacauggcaaaguuu

SEQ ID NO: 1734736 - RNA, 19 nt, Homo sapiens
  misc_RNA (1)...(19): siRNA sense strand
uggcagagcuuuuaacaua

SEQ ID NO: 1734737 - RNA, 19 nt, Homo sapiens
  misc_RNA (1)...(19): siRNA sense strand
gggagaaacccuacaaaug

SEQ ID NO: 1734738 - RNA, 19 nt, Homo sapiens
  misc_RNA (1)...(19): siRNA sense strand
ggagagaaacccuacaaau

SEQ ID NO: 1734739 - RNA, 19 nt, Homo sapiens
  misc_RNA (1)...(19): siRNA sense strand
ggagagaaacccuacaaau

SEQ ID NO: 1734740 - RNA, 19 nt, Homo sapiens
  misc_RNA (1)...(19): siRNA sense strand
ggagagaaacccuacaaau

SEQ ID NO: 1734741 - RNA, 19 nt, Homo sapiens
  misc_RNA (1)...(19): siRNA sense strand
ggagagaaacccuacaaau

SEQ ID NO: 1734742 - RNA, 19 nt, Homo sapiens
  misc_RNA (1)...(19): siRNA sense strand
ggagagaaacccuacaaau

SEQ ID NO: 1734743 - RNA, 19 nt, Homo sapiens
  misc_RNA (1)...(19): siRNA sense strand
gagaaauccuauaaaugug

SEQ ID NO: 1734744 - RNA, 19 nt, Homo sapiens
  misc_RNA (1)...(19): siRNA sense strand
aaccaguucucaucucuua

SEQ ID NO: 1734745 - RNA, 19 nt, Homo sapiens
  misc_RNA (1)...(19): siRNA sense strand
gagaaaagcccuacaaaug

SEQ ID NO: 1734746 - RNA, 19 nt, Homo sapiens
  misc_RNA (1)...(19): siRNA sense strand
gacauaagauaguucauac

SEQ ID NO: 1734747 - RNA, 19 nt, Homo sapiens
  misc_RNA (1)...(19): siRNA sense strand
ggccagagcagaacauaaa

SEQ ID NO: 1734748 - RNA, 19 nt, Homo sapiens
  misc_RNA (1)...(19): siRNA sense strand
gagaaaccauacaaaugug

SEQ ID NO: 1734749 - RNA, 19 nt, Homo sapiens
  misc_RNA (1)...(19): siRNA sense strand
ucucaacucuuacuaaaca

SEQ ID NO: 1734750 - RNA, 19 nt, Homo sapiens
  misc_RNA (1)...(19): siRNA sense strand
cagagaaacccuacaaaug

SEQ ID NO: 1734751 - RNA, 19 nt, Homo sapiens
  misc_RNA (1)...(19): siRNA sense strand
agagaaacccuauaaaugu

SEQ ID NO: 1734752 - RNA, 19 nt, Homo sapiens
  misc_RNA (1)...(19): siRNA sense strand
agagaaacccuauaaaugu

SEQ ID NO: 1734753 - RNA, 19 nt, Homo sapiens
  misc_RNA (1)...(19): siRNA sense strand
aaccaguccucacaacuua

SEQ ID NO: 1734754 - RNA, 19 nt, Homo sapiens
  misc_RNA (1)...(19): siRNA sense strand
aaccaacacucaaaccuaa

SEQ ID NO: 1734755 - RNA, 19 nt, Homo sapiens
  misc_RNA (1)...(19): siRNA sense strand
gagaagacauacaggaaac

SEQ ID NO: 1734756 - RNA, 19 nt, Homo sapiens
  misc_RNA (1)...(19): siRNA sense strand
aaccuauccucaaaucuua

SEQ ID NO: 1734757 - RNA, 19 nt, Homo sapiens
  misc_RNA (1)...(19): siRNA sense strand
ggagagaaaccuuaccaau

SEQ ID NO: 1734758 - RNA, 19 nt, Homo sapiens
  misc_RNA (1)...(19): siRNA sense strand
cacaaaggaggucauaaua

SEQ ID NO: 1734759 - RNA, 19 nt, Homo sapiens
  misc_RNA (1)...(19): siRNA sense strand
ugaagaauguggcaaaguc

SEQ ID NO: 1734760 - RNA, 19 nt, Homo sapiens
  misc_RNA (1)...(19): siRNA sense strand
ugaagaauguggcaaaguc

SEQ ID NO: 1734761 - RNA, 19 nt, Homo sapiens
  misc_RNA (1)...(19): siRNA sense strand
uagagugaauuccuacaaa

SEQ ID NO: 1734762 - RNA, 19 nt, Homo sapiens
  misc_RNA (1)...(19): siRNA sense strand
ggaaacaaacacuucaaau

SEQ ID NO: 1734763 - RNA, 19 nt, Homo sapiens
  misc_RNA (1)...(19): siRNA sense strand
gagaauucauacuggagaa

SEQ ID NO: 1734764 - RNA, 19 nt, Homo sapiens
  misc_RNA (1)...(19): siRNA sense strand
agagaaacccuacaaaugu

SEQ ID NO: 1734765 - RNA, 19 nt, Homo sapiens
  misc_RNA (1)...(19): siRNA sense strand
caaccuauccucaaaucuu

SEQ ID NO: 1734766 - RNA, 19 nt, Homo sapiens
  misc_RNA (1)...(19): siRNA sense strand
agagaaacccuacaaaugu

SEQ ID NO: 1734767 - RNA, 19 nt, Homo sapiens
  misc_RNA (1)...(19): siRNA sense strand
agagaaacccuacaaaugu

SEQ ID NO: 1734768 - RNA, 19 nt, Homo sapiens
  misc_RNA (1)...(19): siRNA sense strand
aaccaauccucaaaccuua

SEQ ID NO: 1734769 - RNA, 19 nt, Homo sapiens
  misc_RNA (1)...(19): siRNA sense strand
uaaagaauguggcaaagcu

SEQ ID NO: 1734770 - RNA, 19 nt, Homo sapiens
  misc_RNA (1)...(19): siRNA sense strand
agagaaacccuacaaaugu

SEQ ID NO: 1734771 - RNA, 19 nt, Homo sapiens
  misc_RNA (1)...(19): siRNA sense strand
gagaauucauacuggagaa

SEQ ID NO: 1734772 - RNA, 19 nt, Homo sapiens
  misc_RNA (1)...(19): siRNA sense strand
ucucaacccuuacuaaaca

SEQ ID NO: 1734773 - RNA, 19 nt, Homo sapiens
  misc_RNA (1)...(19): siRNA sense strand
agagaaacccuacaaaugu

SEQ ID NO: 1734774 - RNA, 19 nt, Homo sapiens
  misc_RNA (1)...(19): siRNA sense strand
uaaagaauguggcaaagcu

SEQ ID NO: 1734775 - RNA, 19 nt, Homo sapiens
  misc_RNA (1)...(19): siRNA sense strand
agagaaacccuacaaaugu

SEQ ID NO: 1734776 - RNA, 19 nt, Homo sapiens
  misc_RNA (1)...(19): siRNA sense strand
agagaaacccuacaaaugu

SEQ ID NO: 1734777 - RNA, 19 nt, Homo sapiens
  misc_RNA (1)...(19): siRNA sense strand
ucucaaaucuuacuaacca

SEQ ID NO: 1734778 - RNA, 19 nt, Homo sapiens
  misc_RNA (1)...(19): siRNA sense strand
gaaaagcccuacaaaugug

SEQ ID NO: 1734779 - RNA, 19 nt, Homo sapiens
  misc_RNA (1)...(19): siRNA sense strand
guucucaacucuuacuaga

SEQ ID NO: 1734780 - RNA, 19 nt, Homo sapiens
  misc_RNA (1)...(19): siRNA sense strand
aaucgauccucaacccuua

SEQ ID NO: 1734781 - RNA, 19 nt, Homo sapiens
  misc_RNA (1)...(19): siRNA sense strand
gaaauaagagccagcguua

SEQ ID NO: 1734782 - RNA, 19 nt, Homo sapiens
  misc_RNA (1)...(19): siRNA sense strand
gcaaagcccugucaaacaa

SEQ ID NO: 1734783 - RNA, 19 nt, Homo sapiens
  misc_RNA (1)...(19): siRNA sense strand
ggaugaggaugcagauaua

SEQ ID NO: 1734784 - RNA, 19 nt, Homo sapiens
  misc_RNA (1)...(19): siRNA sense strand
ggaggaagaggaagaggaa

SEQ ID NO: 1734785 - RNA, 19 nt, Homo sapiens
  misc_RNA (1)...(19): siRNA sense strand
gaagccaggauucaagaaa

SEQ ID NO: 1734786 - RNA, 19 nt, Homo sapiens
  misc_RNA (1)...(19): siRNA sense strand
ggaacguuaugaagcauca

SEQ ID NO: 1734787 - RNA, 19 nt, Homo sapiens
  misc_RNA (1)...(19): siRNA sense strand
agaagaagaggaaauaaga

SEQ ID NO: 1734788 - RNA, 19 nt, Homo sapiens
  misc_RNA (1)...(19): siRNA sense strand
ccaggaacguuaugaagca

SEQ ID NO: 1734789 - RNA, 19 nt, Homo sapiens
  misc_RNA (1)...(19): siRNA sense strand
ggaggaggaggaagaagaa

SEQ ID NO: 1734790 - RNA, 19 nt, Homo sapiens
  misc_RNA (1)...(19): siRNA sense strand
ggagcaaagcccugucaaa

SEQ ID NO: 1734791 - RNA, 19 nt, Homo sapiens
  misc_RNA (1)...(19): siRNA sense strand
agaggaagaugaugaggau

SEQ ID NO: 1734792 - RNA, 19 nt, Homo sapiens
  misc_RNA (1)...(19): siRNA sense strand
gagcaaagcccugucaaac

SEQ ID NO: 1734793 - RNA, 19 nt, Homo sapiens
  misc_RNA (1)...(19): siRNA sense strand
aauaagagccagcguuaga

SEQ ID NO: 1734794 - RNA, 19 nt, Homo sapiens
  misc_RNA (1)...(19): siRNA sense strand
caaaccaggaggacaagaa

SEQ ID NO: 1734795 - RNA, 19 nt, Homo sapiens
  misc_RNA (1)...(19): siRNA sense strand
gcugcaggcuguugcuuca

SEQ ID NO: 1734796 - RNA, 19 nt, Homo sapiens
  misc_RNA (1)...(19): siRNA sense strand
ggaggaggaggaagaggaa

SEQ ID NO: 1734797 - RNA, 19 nt, Homo sapiens
  misc_RNA (1)...(19): siRNA sense strand
gcuguugcuucauacgauu

SEQ ID NO: 1734798 - RNA, 19 nt, Homo sapiens
  misc_RNA (1)...(19): siRNA sense strand
gagccaagaagccaggauu

SEQ ID NO: 1734799 - RNA, 19 nt, Homo sapiens
  misc_RNA (1)...(19): siRNA sense strand
agacaagagcccugugaaa

SEQ ID NO: 1734800 - RNA, 19 nt, Homo sapiens
  misc_RNA (1)...(19): siRNA sense strand
uaugaagcaucagaccuaa

SEQ ID NO: 1734801 - RNA, 19 nt, Homo sapiens
  misc_RNA (1)...(19): siRNA sense strand
ucaguggccaggaacguua

SEQ ID NO: 1734802 - RNA, 19 nt, Homo sapiens
  misc_RNA (1)...(19): siRNA sense strand
cagcaaaccaggaggacaa

SEQ ID NO: 1734803 - RNA, 19 nt, Homo sapiens
  misc_RNA (1)...(19): siRNA sense strand
gaagaagaggaaauaagag

SEQ ID NO: 1734804 - RNA, 19 nt, Homo sapiens
  misc_RNA (1)...(19): siRNA sense strand
ugcaggcuguugcuucaua

SEQ ID NO: 1734805 - RNA, 19 nt, Homo sapiens
  misc_RNA (1)...(19): siRNA sense strand
ggaagaugaugaggaugag

SEQ ID NO: 1734806 - RNA, 19 nt, Homo sapiens
  misc_RNA (1)...(19): siRNA sense strand
caagaagccaggauucaag

SEQ ID NO: 1734807 - RNA, 19 nt, Homo sapiens
  misc_RNA (1)...(19): siRNA sense strand
gggaggaggaggaggaaga

SEQ ID NO: 1734808 - RNA, 19 nt, Homo sapiens
  misc_RNA (1)...(19): siRNA sense strand
ccaagaagccaggauucaa

SEQ ID NO: 1734809 - RNA, 19 nt, Homo sapiens
  misc_RNA (1)...(19): siRNA sense strand
ggaagaggaagaugaugag

SEQ ID NO: 1734810 - RNA, 19 nt, Homo sapiens
  misc_RNA (1)...(19): siRNA sense strand
ggaagaggaagaggaagau

SEQ ID NO: 1734811 - RNA, 19 nt, Homo sapiens
  misc_RNA (1)...(19): siRNA sense strand
aagccaggauucaagaaau

SEQ ID NO: 1734812 - RNA, 19 nt, Homo sapiens
  misc_RNA (1)...(19): siRNA sense strand
gagacaagagcccugugaa

SEQ ID NO: 1734813 - RNA, 19 nt, Homo sapiens
  misc_RNA (1)...(19): siRNA sense strand
gacaagagcccugugaaaa

SEQ ID NO: 1734814 - RNA, 19 nt, Homo sapiens
  misc_RNA (1)...(19): siRNA sense strand
uuaugaagcaucagaccua

SEQ ID NO: 1734815 - RNA, 19 nt, Homo sapiens
  misc_RNA (1)...(19): siRNA sense strand
ggaggaggaggaggaagaa

SEQ ID NO: 1734816 - RNA, 19 nt, Homo sapiens
  misc_RNA (1)...(19): siRNA sense strand
caggagaggcggacuugga

SEQ ID NO: 1734817 - RNA, 19 nt, Homo sapiens
  misc_RNA (1)...(19): siRNA sense strand
uaagagccagcguuagaga

SEQ ID NO: 1734818 - RNA, 19 nt, Homo sapiens
  misc_RNA (1)...(19): siRNA sense strand
gaagaggaagaggaagaug

SEQ ID NO: 1734819 - RNA, 19 nt, Homo sapiens
  misc_RNA (1)...(19): siRNA sense strand
gcaggcuguugcuucauac

SEQ ID NO: 1734820 - RNA, 19 nt, Homo sapiens
  misc_RNA (1)...(19): siRNA sense strand
ccacagccagagccaagaa

SEQ ID NO: 1734821 - RNA, 19 nt, Homo sapiens
  misc_RNA (1)...(19): siRNA sense strand
gagccagcguuagagacaa

SEQ ID NO: 1734822 - RNA, 19 nt, Homo sapiens
  misc_RNA (1)...(19): siRNA sense strand
gaaagccaaagaggagaug

SEQ ID NO: 1734823 - RNA, 19 nt, Homo sapiens
  misc_RNA (1)...(19): siRNA sense strand
gaggaugaggaugcagaua

SEQ ID NO: 1734824 - RNA, 19 nt, Homo sapiens
  misc_RNA (1)...(19): siRNA sense strand
aagaggaagaggaagauga

SEQ ID NO: 1734825 - RNA, 19 nt, Homo sapiens
  misc_RNA (1)...(19): siRNA sense strand
gccaguagcacggaggaaa

SEQ ID NO: 1734826 - RNA, 19 nt, Homo sapiens
  misc_RNA (1)...(19): siRNA sense strand
aggcgagcguggcuaagaa

SEQ ID NO: 1734827 - RNA, 19 nt, Homo sapiens
  misc_RNA (1)...(19): siRNA sense strand
gaggagcaaagcccuguca

SEQ ID NO: 1734828 - RNA, 19 nt, Homo sapiens
  misc_RNA (1)...(19): siRNA sense strand
gaugaggaugcagauauau

SEQ ID NO: 1734829 - RNA, 19 nt, Homo sapiens
  misc_RNA (1)...(19): siRNA sense strand
aggaagaugaugaggauga

SEQ ID NO: 1734830 - RNA, 19 nt, Homo sapiens
  misc_RNA (1)...(19): siRNA sense strand
aggaagaggaagaugauga

SEQ ID NO: 1734831 - RNA, 19 nt, Homo sapiens
  misc_RNA (1)...(19): siRNA sense strand
gccaagaagccaggauuca

SEQ ID NO: 1734832 - RNA, 19 nt, Homo sapiens
  misc_RNA (1)...(19): siRNA sense strand
agccaggauucaagaaaug

SEQ ID NO: 1734833 - RNA, 19 nt, Homo sapiens
  misc_RNA (1)...(19): siRNA sense strand
ggcuguugcuucauacgau

SEQ ID NO: 1734834 - RNA, 19 nt, Homo sapiens
  misc_RNA (1)...(19): siRNA sense strand
aggaugaggaugcagauau

SEQ ID NO: 1734835 - RNA, 19 nt, Homo sapiens
  misc_RNA (1)...(19): siRNA sense strand
gaugcagccggucaccauu

SEQ ID NO: 1734836 - RNA, 19 nt, Homo sapiens
  misc_RNA (1)...(19): siRNA sense strand
aagaagaagaggaaauaag

SEQ ID NO: 1734837 - RNA, 19 nt, Homo sapiens
  misc_RNA (1)...(19): siRNA sense strand
agagacaagagcccuguga

SEQ ID NO: 1734838 - RNA, 19 nt, Homo sapiens
  misc_RNA (1)...(19): siRNA sense strand
caaaguggauggugagaua

SEQ ID NO: 1734839 - RNA, 19 nt, Homo sapiens
  misc_RNA (1)...(19): siRNA sense strand
gaaaugagaauuccaaaga

SEQ ID NO: 1734840 - RNA, 19 nt, Homo sapiens
  misc_RNA (1)...(19): siRNA sense strand
ggugaaaucuacaaccaua

SEQ ID NO: 1734841 - RNA, 19 nt, Homo sapiens
  misc_RNA (1)...(19): siRNA sense strand
cuaaaggucuuguuacauu

SEQ ID NO: 1734842 - RNA, 19 nt, Homo sapiens
  misc_RNA (1)...(19): siRNA sense strand
guuaagaauuccugguuua

SEQ ID NO: 1734843 - RNA, 19 nt, Homo sapiens
  misc_RNA (1)...(19): siRNA sense strand
guaaagaaacguuugauga

SEQ ID NO: 1734844 - RNA, 19 nt, Homo sapiens
  misc_RNA (1)...(19): siRNA sense strand
gaagcuaaaggucuuguua

SEQ ID NO: 1734845 - RNA, 19 nt, Homo sapiens
  misc_RNA (1)...(19): siRNA sense strand
ggagucagaccuuuguuua

SEQ ID NO: 1734846 - RNA, 19 nt, Homo sapiens
  misc_RNA (1)...(19): siRNA sense strand
gaacugagagucccauuuc

SEQ ID NO: 1734847 - RNA, 19 nt, Homo sapiens
  misc_RNA (1)...(19): siRNA sense strand
caauucgagugaagaaaua

SEQ ID NO: 1734848 - RNA, 19 nt, Homo sapiens
  misc_RNA (1)...(19): siRNA sense strand
ugagggaacucuauuuguu

SEQ ID NO: 1734849 - RNA, 19 nt, Homo sapiens
  misc_RNA (1)...(19): siRNA sense strand
ccaaguauauucggaagaa

SEQ ID NO: 1734850 - RNA, 19 nt, Homo sapiens
  misc_RNA (1)...(19): siRNA sense strand
cuagaaagguggcagauca

SEQ ID NO: 1734851 - RNA, 19 nt, Homo sapiens
  misc_RNA (1)...(19): siRNA sense strand
gaagugaacauuaugaagu

SEQ ID NO: 1734852 - RNA, 19 nt, Homo sapiens
  misc_RNA (1)...(19): siRNA sense strand
caacugcugcuuuggauuu

SEQ ID NO: 1734853 - RNA, 19 nt, Homo sapiens
  misc_RNA (1)...(19): siRNA sense strand
gagagacguuugaggauuc

SEQ ID NO: 1734854 - RNA, 19 nt, Homo sapiens
  misc_RNA (1)...(19): siRNA sense strand
caaaugcagcccagaaauu

SEQ ID NO: 1734855 - RNA, 19 nt, Homo sapiens
  misc_RNA (1)...(19): siRNA sense strand
gcaacagcauuuugaauuu

SEQ ID NO: 1734856 - RNA, 19 nt, Homo sapiens
  misc_RNA (1)...(19): siRNA sense strand
ccagaaauuucccuucaau

SEQ ID NO: 1734857 - RNA, 19 nt, Homo sapiens
  misc_RNA (1)...(19): siRNA sense strand
gguuaaauaucaucacugu

SEQ ID NO: 1734858 - RNA, 19 nt, Homo sapiens
  misc_RNA (1)...(19): siRNA sense strand
ccguggaaaugguuaaaua

SEQ ID NO: 1734859 - RNA, 19 nt, Homo sapiens
  misc_RNA (1)...(19): siRNA sense strand
uauguuggaugguguguuu

SEQ ID NO: 1734860 - RNA, 19 nt, Homo sapiens
  misc_RNA (1)...(19): siRNA sense strand
gauagaaacugugaagaac

SEQ ID NO: 1734861 - RNA, 19 nt, Homo sapiens
  misc_RNA (1)...(19): siRNA sense strand
uuacuaccgucaagucuuu

SEQ ID NO: 1734862 - RNA, 19 nt, Homo sapiens
  misc_RNA (1)...(19): siRNA sense strand
gaacucuauuuguuugaug

SEQ ID NO: 1734863 - RNA, 19 nt, Homo sapiens
  misc_RNA (1)...(19): siRNA sense strand
ggaaacuuaugacauuaca

SEQ ID NO: 1734864 - RNA, 19 nt, Homo sapiens
  misc_RNA (1)...(19): siRNA sense strand
uuaaagcaaugacagaaga

SEQ ID NO: 1734865 - RNA, 19 nt, Homo sapiens
  misc_RNA (1)...(19): siRNA sense strand
ccaaagaaggauauuacua

SEQ ID NO: 1734866 - RNA, 19 nt, Homo sapiens
  misc_RNA (1)...(19): siRNA sense strand
aagaauuccugguuuaaga

SEQ ID NO: 1734867 - RNA, 19 nt, Homo sapiens
  misc_RNA (1)...(19): siRNA sense strand
uagaaacugugaagaacaa

SEQ ID NO: 1734868 - RNA, 19 nt, Homo sapiens
  misc_RNA (1)...(19): siRNA sense strand
gcacacagagguccagaug

SEQ ID NO: 1734869 - RNA, 19 nt, Homo sapiens
  misc_RNA (1)...(19): siRNA sense strand
cuuggaaacuuaugacauu

SEQ ID NO: 1734870 - RNA, 19 nt, Homo sapiens
  misc_RNA (1)...(19): siRNA sense strand
agucagaccuuuguuuaaa

SEQ ID NO: 1734871 - RNA, 19 nt, Homo sapiens
  misc_RNA (1)...(19): siRNA sense strand
gagggaacucuauuuguuu

SEQ ID NO: 1734872 - RNA, 19 nt, Homo sapiens
  misc_RNA (1)...(19): siRNA sense strand
caaagaaggauauuacuac

SEQ ID NO: 1734873 - RNA, 19 nt, Homo sapiens
  misc_RNA (1)...(19): siRNA sense strand
gaaagguggcagaucauau

SEQ ID NO: 1734874 - RNA, 19 nt, Homo sapiens
  misc_RNA (1)...(19): siRNA sense strand
gaugauugccuuucuguuc

SEQ ID NO: 1734875 - RNA, 19 nt, Homo sapiens
  misc_RNA (1)...(19): siRNA sense strand
gcccagaaauuucccuuca

SEQ ID NO: 1734876 - RNA, 19 nt, Homo sapiens
  misc_RNA (1)...(19): siRNA sense strand
uaaaggucuuguuacauug

SEQ ID NO: 1734877 - RNA, 19 nt, Homo sapiens
  misc_RNA (1)...(19): siRNA sense strand
acacagagguccagaugca

SEQ ID NO: 1734878 - RNA, 19 nt, Homo sapiens
  misc_RNA (1)...(19): siRNA sense strand
ccaaagaaugggauagaaa

SEQ ID NO: 1734879 - RNA, 19 nt, Homo sapiens
  misc_RNA (1)...(19): siRNA sense strand
ggaauacguugaacaucag

SEQ ID NO: 1734880 - RNA, 19 nt, Homo sapiens
  misc_RNA (1)...(19): siRNA sense strand
ggguagagauacauaugga

SEQ ID NO: 1734881 - RNA, 19 nt, Homo sapiens
  misc_RNA (1)...(19): siRNA sense strand
ggagaaggaucagaugaac

SEQ ID NO: 1734882 - RNA, 19 nt, Homo sapiens
  misc_RNA (1)...(19): siRNA sense strand
gaugguguguuugcauuug

SEQ ID NO: 1734883 - RNA, 19 nt, Homo sapiens
  misc_RNA (1)...(19): siRNA sense strand
gaaauuucccuucaauacu

SEQ ID NO: 1734884 - RNA, 19 nt, Homo sapiens
  misc_RNA (1)...(19): siRNA sense strand
gcaaaugcagcccagaaau

SEQ ID NO: 1734885 - RNA, 19 nt, Homo sapiens
  misc_RNA (1)...(19): siRNA sense strand
aggaauacguugaacauca

SEQ ID NO: 1734886 - RNA, 19 nt, Homo sapiens
  misc_RNA (1)...(19): siRNA sense strand
gcauucaggcucuggauga

SEQ ID NO: 1734887 - RNA, 19 nt, Homo sapiens
  misc_RNA (1)...(19): siRNA sense strand
gguggcagaucauauugga

SEQ ID NO: 1734888 - RNA, 19 nt, Homo sapiens
  misc_RNA (1)...(19): siRNA sense strand
aaagaaacguuugaugaca

SEQ ID NO: 1734889 - RNA, 19 nt, Homo sapiens
  misc_RNA (1)...(19): siRNA sense strand
gaaaucuacaaccauaaga

SEQ ID NO: 1734890 - RNA, 19 nt, Homo sapiens
  misc_RNA (1)...(19): siRNA sense strand
cuacaagucagcugucaaa

SEQ ID NO: 1734891 - RNA, 19 nt, Homo sapiens
  misc_RNA (1)...(19): siRNA sense strand
cagaucauauuggaaguga

SEQ ID NO: 1734892 - RNA, 19 nt, Homo sapiens
  misc_RNA (1)...(19): siRNA sense strand
aaagguggcagaucauauu

SEQ ID NO: 1734893 - RNA, 19 nt, Homo sapiens
  misc_RNA (1)...(19): siRNA sense strand
caaaguugcauccguggaa

SEQ ID NO: 1734894 - RNA, 19 nt, Homo sapiens
  misc_RNA (1)...(19): siRNA sense strand
ggaacucuauuuguuugau

SEQ ID NO: 1734895 - RNA, 19 nt, Homo sapiens
  misc_RNA (1)...(19): siRNA sense strand
gagucagaccuuuguuuaa

SEQ ID NO: 1734896 - RNA, 19 nt, Homo sapiens
  misc_RNA (1)...(19): siRNA sense strand
gaugacagacagaaggauu

SEQ ID NO: 1734897 - RNA, 19 nt, Homo sapiens
  misc_RNA (1)...(19): siRNA sense strand
ggauacugccaauaagaaa

SEQ ID NO: 1734898 - RNA, 19 nt, Homo sapiens
  misc_RNA (1)...(19): siRNA sense strand
ggauauuacuaccgucaag

SEQ ID NO: 1734899 - RNA, 19 nt, Homo sapiens
  misc_RNA (1)...(19): siRNA sense strand
ccaaucugauacccaaaga

SEQ ID NO: 1734900 - RNA, 19 nt, Homo sapiens
  misc_RNA (1)...(19): siRNA sense strand
gagagucccauuucuagau

SEQ ID NO: 1734901 - RNA, 19 nt, Homo sapiens
  misc_RNA (1)...(19): siRNA sense strand
uuacaauggugaaaucuac

SEQ ID NO: 1734902 - RNA, 19 nt, Homo sapiens
  misc_RNA (1)...(19): siRNA sense strand
agagagacguuugaggauu

SEQ ID NO: 1734903 - RNA, 19 nt, Homo sapiens
  misc_RNA (1)...(19): siRNA sense strand
uuacgcaggguuacauaua

SEQ ID NO: 1734904 - RNA, 19 nt, Homo sapiens
  misc_RNA (1)...(19): siRNA sense strand
ggaagacagccccgauuua

SEQ ID NO: 1734905 - RNA, 19 nt, Homo sapiens
  misc_RNA (1)...(19): siRNA sense strand
gcacuccgcgacucccuuu

SEQ ID NO: 1734906 - RNA, 19 nt, Homo sapiens
  misc_RNA (1)...(19): siRNA sense strand
cauauggagucagaccuuu

SEQ ID NO: 1734907 - RNA, 19 nt, Homo sapiens
  misc_RNA (1)...(19): siRNA sense strand
caaaggaggaauugagcaa

SEQ ID NO: 1734908 - RNA, 19 nt, Homo sapiens
  misc_RNA (1)...(19): siRNA sense strand
gcaauuggcauggaagaca

SEQ ID NO: 1734909 - RNA, 19 nt, Homo sapiens
  misc_RNA (1)...(19): siRNA sense strand
ucagguugaugaugcaaug

SEQ ID NO: 1734910 - RNA, 19 nt, Homo sapiens
  misc_RNA (1)...(19): siRNA sense strand
agaaggaucagaugaacuu

SEQ ID NO: 1734911 - RNA, 19 nt, Homo sapiens
  misc_RNA (1)...(19): siRNA sense strand
guaguugacccgcuguuug

SEQ ID NO: 1734912 - RNA, 19 nt, Homo sapiens
  misc_RNA (1)...(19): siRNA sense strand
ccaauucgagugaagaaau

SEQ ID NO: 1734913 - RNA, 19 nt, Homo sapiens
  misc_RNA (1)...(19): siRNA sense strand
cagaaauuucccuucaaua

SEQ ID NO: 1734914 - RNA, 19 nt, Homo sapiens
  misc_RNA (1)...(19): siRNA sense strand
agauagaaacugugaagaa

SEQ ID NO: 1734915 - RNA, 19 nt, Homo sapiens
  misc_RNA (1)...(19): siRNA sense strand
agauacauauggagucaga

SEQ ID NO: 1734916 - RNA, 19 nt, Homo sapiens
  misc_RNA (1)...(19): siRNA sense strand
agaaacguuugaugacaga

SEQ ID NO: 1734917 - RNA, 19 nt, Homo sapiens
  misc_RNA (1)...(19): siRNA sense strand
aaauuucccuucaauacuc

SEQ ID NO: 1734918 - RNA, 19 nt, Homo sapiens
  misc_RNA (1)...(19): siRNA sense strand
gaauuccugguuuaagauu

SEQ ID NO: 1734919 - RNA, 19 nt, Homo sapiens
  misc_RNA (1)...(19): siRNA sense strand
ggaagugaacauuaugaag

SEQ ID NO: 1734920 - RNA, 19 nt, Homo sapiens
  misc_RNA (1)...(19): siRNA sense strand
ccagaaaugagaauuccaa

SEQ ID NO: 1734921 - RNA, 19 nt, Homo sapiens
  misc_RNA (1)...(19): siRNA sense strand
gagagugagaggcuucuga

SEQ ID NO: 1734922 - RNA, 19 nt, Homo sapiens
  misc_RNA (1)...(19): siRNA sense strand
gaaggaucagaugaacuua

SEQ ID NO: 1734923 - RNA, 19 nt, Homo sapiens
  misc_RNA (1)...(19): siRNA sense strand
caauguggagaaacucuuu

SEQ ID NO: 1734924 - RNA, 19 nt, Homo sapiens
  misc_RNA (1)...(19): siRNA sense strand
uaugaagauugcacacaga

SEQ ID NO: 1734925 - RNA, 19 nt, Homo sapiens
  misc_RNA (1)...(19): siRNA sense strand
gaacuuacgcaggguuaca

SEQ ID NO: 1734926 - RNA, 19 nt, Homo sapiens
  misc_RNA (1)...(19): siRNA sense strand
cuccagacauuugcaauug

SEQ ID NO: 1734927 - RNA, 19 nt, Homo sapiens
  misc_RNA (1)...(19): siRNA sense strand
aaugacagaagauggauuu

SEQ ID NO: 1734928 - RNA, 19 nt, Homo sapiens
  misc_RNA (1)...(19): siRNA sense strand
agaaauuucccuucaauac

SEQ ID NO: 1734929 - RNA, 19 nt, Homo sapiens
  misc_RNA (1)...(19): siRNA sense strand
cuuaugacauuacaacagu

SEQ ID NO: 1734930 - RNA, 19 nt, Homo sapiens
  misc_RNA (1)...(19): siRNA sense strand
uaaagaaacguuugaugac

SEQ ID NO: 1734931 - RNA, 19 nt, Homo sapiens
  misc_RNA (1)...(19): siRNA sense strand
aguauccucuccagacauu

SEQ ID NO: 1734932 - RNA, 19 nt, Homo sapiens
  misc_RNA (1)...(19): siRNA sense strand
ggcaaaugcagcccagaaa

SEQ ID NO: 1734933 - RNA, 19 nt, Homo sapiens
  misc_RNA (1)...(19): siRNA sense strand
gguugaugaugcaaugaug

SEQ ID NO: 1734934 - RNA, 19 nt, Homo sapiens
  misc_RNA (1)...(19): siRNA sense strand
agccuucagugauggaaua

SEQ ID NO: 1734935 - RNA, 19 nt, Homo sapiens
  misc_RNA (1)...(19): siRNA sense strand
ucugauacccaaagagauu

SEQ ID NO: 1734936 - RNA, 19 nt, Homo sapiens
  misc_RNA (1)...(19): siRNA sense strand
gagagagacguuugaggau

SEQ ID NO: 1734937 - RNA, 19 nt, Homo sapiens
  misc_RNA (1)...(19): siRNA sense strand
uacgcaggguuacauauau

SEQ ID NO: 1734938 - RNA, 19 nt, Homo sapiens
  misc_RNA (1)...(19): siRNA sense strand
caaaguggauggugagaua

SEQ ID NO: 1734939 - RNA, 19 nt, Homo sapiens
  misc_RNA (1)...(19): siRNA sense strand
gaaaugagaauuccaaaga

SEQ ID NO: 1734940 - RNA, 19 nt, Homo sapiens
  misc_RNA (1)...(19): siRNA sense strand
ggugaaaucuacaaccaua

SEQ ID NO: 1734941 - RNA, 19 nt, Homo sapiens
  misc_RNA (1)...(19): siRNA sense strand
cuaaaggucuuguuacauu

SEQ ID NO: 1734942 - RNA, 19 nt, Homo sapiens
  misc_RNA (1)...(19): siRNA sense strand
guuaagaauuccugguuua

SEQ ID NO: 1734943 - RNA, 19 nt, Homo sapiens
  misc_RNA (1)...(19): siRNA sense strand
guaaagaaacguuugauga

SEQ ID NO: 1734944 - RNA, 19 nt, Homo sapiens
  misc_RNA (1)...(19): siRNA sense strand
gaagcuaaaggucuuguua

SEQ ID NO: 1734945 - RNA, 19 nt, Homo sapiens
  misc_RNA (1)...(19): siRNA sense strand
ggagucagaccuuuguuua

SEQ ID NO: 1734946 - RNA, 19 nt, Homo sapiens
  misc_RNA (1)...(19): siRNA sense strand
gaacugagagucccauuuc

SEQ ID NO: 1734947 - RNA, 19 nt, Homo sapiens
  misc_RNA (1)...(19): siRNA sense strand
caauucgagugaagaaaua

SEQ ID NO: 1734948 - RNA, 19 nt, Homo sapiens
  misc_RNA (1)...(19): siRNA sense strand
ugagggaacucuauuuguu

SEQ ID NO: 1734949 - RNA, 19 nt, Homo sapiens
  misc_RNA (1)...(19): siRNA sense strand
ccaaguauauucggaagaa

SEQ ID NO: 1734950 - RNA, 19 nt, Homo sapiens
  misc_RNA (1)...(19): siRNA sense strand
cuagaaagguggcagauca

SEQ ID NO: 1734951 - RNA, 19 nt, Homo sapiens
  misc_RNA (1)...(19): siRNA sense strand
gaagugaacauuaugaagu

SEQ ID NO: 1734952 - RNA, 19 nt, Homo sapiens
  misc_RNA (1)...(19): siRNA sense strand
caacugcugcuuuggauuu

SEQ ID NO: 1734953 - RNA, 19 nt, Homo sapiens
  misc_RNA (1)...(19): siRNA sense strand
gagagacguuugaggauuc

SEQ ID NO: 1734954 - RNA, 19 nt, Homo sapiens
  misc_RNA (1)...(19): siRNA sense strand
caaaugcagcccagaaauu

SEQ ID NO: 1734955 - RNA, 19 nt, Homo sapiens
  misc_RNA (1)...(19): siRNA sense strand
gcaacagcauuuugaauuu

SEQ ID NO: 1734956 - RNA, 19 nt, Homo sapiens
  misc_RNA (1)...(19): siRNA sense strand
ccagaaauuucccuucaau

SEQ ID NO: 1734957 - RNA, 19 nt, Homo sapiens
  misc_RNA (1)...(19): siRNA sense strand
gguuaaauaucaucacugu

SEQ ID NO: 1734958 - RNA, 19 nt, Homo sapiens
  misc_RNA (1)...(19): siRNA sense strand
ccguggaaaugguuaaaua

SEQ ID NO: 1734959 - RNA, 19 nt, Homo sapiens
  misc_RNA (1)...(19): siRNA sense strand
uauguuggaugguguguuu

SEQ ID NO: 1734960 - RNA, 19 nt, Homo sapiens
  misc_RNA (1)...(19): siRNA sense strand
gauagaaacugugaagaac

SEQ ID NO: 1734961 - RNA, 19 nt, Homo sapiens
  misc_RNA (1)...(19): siRNA sense strand
uuacuaccgucaagucuuu

SEQ ID NO: 1734962 - RNA, 19 nt, Homo sapiens
  misc_RNA (1)...(19): siRNA sense strand
gaacucuauuuguuugaug

SEQ ID NO: 1734963 - RNA, 19 nt, Homo sapiens
  misc_RNA (1)...(19): siRNA sense strand
ggaaacuuaugacauuaca

SEQ ID NO: 1734964 - RNA, 19 nt, Homo sapiens
  misc_RNA (1)...(19): siRNA sense strand
uuaaagcaaugacagaaga

SEQ ID NO: 1734965 - RNA, 19 nt, Homo sapiens
  misc_RNA (1)...(19): siRNA sense strand
ccaaagaaggauauuacua

SEQ ID NO: 1734966 - RNA, 19 nt, Homo sapiens
  misc_RNA (1)...(19): siRNA sense strand
aagaauuccugguuuaaga

SEQ ID NO: 1734967 - RNA, 19 nt, Homo sapiens
  misc_RNA (1)...(19): siRNA sense strand
uagaaacugugaagaacaa

SEQ ID NO: 1734968 - RNA, 19 nt, Homo sapiens
  misc_RNA (1)...(19): siRNA sense strand
gcacacagagguccagaug

SEQ ID NO: 1734969 - RNA, 19 nt, Homo sapiens
  misc_RNA (1)...(19): siRNA sense strand
cuuggaaacuuaugacauu

SEQ ID NO: 1734970 - RNA, 19 nt, Homo sapiens
  misc_RNA (1)...(19): siRNA sense strand
agucagaccuuuguuuaaa

SEQ ID NO: 1734971 - RNA, 19 nt, Homo sapiens
  misc_RNA (1)...(19): siRNA sense strand
gagggaacucuauuuguuu

SEQ ID NO: 1734972 - RNA, 19 nt, Homo sapiens
  misc_RNA (1)...(19): siRNA sense strand
caaagaaggauauuacuac

SEQ ID NO: 1734973 - RNA, 19 nt, Homo sapiens
  misc_RNA (1)...(19): siRNA sense strand
gaaagguggcagaucauau

SEQ ID NO: 1734974 - RNA, 19 nt, Homo sapiens
  misc_RNA (1)...(19): siRNA sense strand
gaugauugccuuucuguuc

SEQ ID NO: 1734975 - RNA, 19 nt, Homo sapiens
  misc_RNA (1)...(19): siRNA sense strand
gcccagaaauuucccuuca

SEQ ID NO: 1734976 - RNA, 19 nt, Homo sapiens
  misc_RNA (1)...(19): siRNA sense strand
uaaaggucuuguuacauug

SEQ ID NO: 1734977 - RNA, 19 nt, Homo sapiens
  misc_RNA (1)...(19): siRNA sense strand
acacagagguccagaugca

SEQ ID NO: 1734978 - RNA, 19 nt, Homo sapiens
  misc_RNA (1)...(19): siRNA sense strand
ccaaagaaugggauagaaa

SEQ ID NO: 1734979 - RNA, 19 nt, Homo sapiens
  misc_RNA (1)...(19): siRNA sense strand
ggaauacguugaacaucag

SEQ ID NO: 1734980 - RNA, 19 nt, Homo sapiens
  misc_RNA (1)...(19): siRNA sense strand
ggguagagauacauaugga

SEQ ID NO: 1734981 - RNA, 19 nt, Homo sapiens
  misc_RNA (1)...(19): siRNA sense strand
ggagaaggaucagaugaac

SEQ ID NO: 1734982 - RNA, 19 nt, Homo sapiens
  misc_RNA (1)...(19): siRNA sense strand
gaugguguguuugcauuug

SEQ ID NO: 1734983 - RNA, 19 nt, Homo sapiens
  misc_RNA (1)...(19): siRNA sense strand
gaaauuucccuucaauacu

SEQ ID NO: 1734984 - RNA, 19 nt, Homo sapiens
  misc_RNA (1)...(19): siRNA sense strand
gcaaaugcagcccagaaau

SEQ ID NO: 1734985 - RNA, 19 nt, Homo sapiens
  misc_RNA (1)...(19): siRNA sense strand
aggaauacguugaacauca

SEQ ID NO: 1734986 - RNA, 19 nt, Homo sapiens
  misc_RNA (1)...(19): siRNA sense strand
gcauucaggcucuggauga

SEQ ID NO: 1734987 - RNA, 19 nt, Homo sapiens
  misc_RNA (1)...(19): siRNA sense strand
gguggcagaucauauugga

SEQ ID NO: 1734988 - RNA, 19 nt, Homo sapiens
  misc_RNA (1)...(19): siRNA sense strand
aaagaaacguuugaugaca

SEQ ID NO: 1734989 - RNA, 19 nt, Homo sapiens
  misc_RNA (1)...(19): siRNA sense strand
gaaaucuacaaccauaaga

SEQ ID NO: 1734990 - RNA, 19 nt, Homo sapiens
  misc_RNA (1)...(19): siRNA sense strand
cuacaagucagcugucaaa

SEQ ID NO: 1734991 - RNA, 19 nt, Homo sapiens
  misc_RNA (1)...(19): siRNA sense strand
cagaucauauuggaaguga

SEQ ID NO: 1734992 - RNA, 19 nt, Homo sapiens
  misc_RNA (1)...(19): siRNA sense strand
aaagguggcagaucauauu

SEQ ID NO: 1734993 - RNA, 19 nt, Homo sapiens
  misc_RNA (1)...(19): siRNA sense strand
caaaguugcauccguggaa

SEQ ID NO: 1734994 - RNA, 19 nt, Homo sapiens
  misc_RNA (1)...(19): siRNA sense strand
ggaacucuauuuguuugau

SEQ ID NO: 1734995 - RNA, 19 nt, Homo sapiens
  misc_RNA (1)...(19): siRNA sense strand
gagucagaccuuuguuuaa

SEQ ID NO: 1734996 - RNA, 19 nt, Homo sapiens
  misc_RNA (1)...(19): siRNA sense strand
gaugacagacagaaggauu

SEQ ID NO: 1734997 - RNA, 19 nt, Homo sapiens
  misc_RNA (1)...(19): siRNA sense strand
ggauacugccaauaagaaa

SEQ ID NO: 1734998 - RNA, 19 nt, Homo sapiens
  misc_RNA (1)...(19): siRNA sense strand
ggauauuacuaccgucaag

SEQ ID NO: 1734999 - RNA, 19 nt, Homo sapiens
  misc_RNA (1)...(19): siRNA sense strand
ccaaucugauacccaaaga

SEQ ID NO: 1735000 - RNA, 19 nt, Homo sapiens
  misc_RNA (1)...(19): siRNA sense strand
gagagucccauuucuagau

SEQ ID NO: 1735001 - RNA, 19 nt, Homo sapiens
  misc_RNA (1)...(19): siRNA sense strand
uuacaauggugaaaucuac

SEQ ID NO: 1735002 - RNA, 19 nt, Homo sapiens
  misc_RNA (1)...(19): siRNA sense strand
agagagacguuugaggauu

SEQ ID NO: 1735003 - RNA, 19 nt, Homo sapiens
  misc_RNA (1)...(19): siRNA sense strand
uuacgcaggguuacauaua

SEQ ID NO: 1735004 - RNA, 19 nt, Homo sapiens
  misc_RNA (1)...(19): siRNA sense strand
ggaagacagccccgauuua

SEQ ID NO: 1735005 - RNA, 19 nt, Homo sapiens
  misc_RNA (1)...(19): siRNA sense strand
gcacuccgcgacucccuuu

SEQ ID NO: 1735006 - RNA, 19 nt, Homo sapiens
  misc_RNA (1)...(19): siRNA sense strand
cauauggagucagaccuuu

SEQ ID NO: 1735007 - RNA, 19 nt, Homo sapiens
  misc_RNA (1)...(19): siRNA sense strand
caaaggaggaauugagcaa

SEQ ID NO: 1735008 - RNA, 19 nt, Homo sapiens
  misc_RNA (1)...(19): siRNA sense strand
gcaauuggcauggaagaca

SEQ ID NO: 1735009 - RNA, 19 nt, Homo sapiens
  misc_RNA (1)...(19): siRNA sense strand
ucagguugaugaugcaaug

SEQ ID NO: 1735010 - RNA, 19 nt, Homo sapiens
  misc_RNA (1)...(19): siRNA sense strand
agaaggaucagaugaacuu

SEQ ID NO: 1735011 - RNA, 19 nt, Homo sapiens
  misc_RNA (1)...(19): siRNA sense strand
guaguugacccgcuguuug

SEQ ID NO: 1735012 - RNA, 19 nt, Homo sapiens
  misc_RNA (1)...(19): siRNA sense strand
ccaauucgagugaagaaau

SEQ ID NO: 1735013 - RNA, 19 nt, Homo sapiens
  misc_RNA (1)...(19): siRNA sense strand
cagaaauuucccuucaaua

SEQ ID NO: 1735014 - RNA, 19 nt, Homo sapiens
  misc_RNA (1)...(19): siRNA sense strand
agauagaaacugugaagaa

SEQ ID NO: 1735015 - RNA, 19 nt, Homo sapiens
  misc_RNA (1)...(19): siRNA sense strand
agauacauauggagucaga

SEQ ID NO: 1735016 - RNA, 19 nt, Homo sapiens
  misc_RNA (1)...(19): siRNA sense strand
agaaacguuugaugacaga

SEQ ID NO: 1735017 - RNA, 19 nt, Homo sapiens
  misc_RNA (1)...(19): siRNA sense strand
aaauuucccuucaauacuc

SEQ ID NO: 1735018 - RNA, 19 nt, Homo sapiens
  misc_RNA (1)...(19): siRNA sense strand
gaauuccugguuuaagauu

SEQ ID NO: 1735019 - RNA, 19 nt, Homo sapiens
  misc_RNA (1)...(19): siRNA sense strand
ggaagugaacauuaugaag

SEQ ID NO: 1735020 - RNA, 19 nt, Homo sapiens
  misc_RNA (1)...(19): siRNA sense strand
ccagaaaugagaauuccaa

SEQ ID NO: 1735021 - RNA, 19 nt, Homo sapiens
  misc_RNA (1)...(19): siRNA sense strand
gagagugagaggcuucuga

SEQ ID NO: 1735022 - RNA, 19 nt, Homo sapiens
  misc_RNA (1)...(19): siRNA sense strand
gaaggaucagaugaacuua

SEQ ID NO: 1735023 - RNA, 19 nt, Homo sapiens
  misc_RNA (1)...(19): siRNA sense strand
caauguggagaaacucuuu

SEQ ID NO: 1735024 - RNA, 19 nt, Homo sapiens
  misc_RNA (1)...(19): siRNA sense strand
uaugaagauugcacacaga

SEQ ID NO: 1735025 - RNA, 19 nt, Homo sapiens
  misc_RNA (1)...(19): siRNA sense strand
gaacuuacgcaggguuaca

SEQ ID NO: 1735026 - RNA, 19 nt, Homo sapiens
  misc_RNA (1)...(19): siRNA sense strand
cuccagacauuugcaauug

SEQ ID NO: 1735027 - RNA, 19 nt, Homo sapiens
  misc_RNA (1)...(19): siRNA sense strand
aaugacagaagauggauuu

SEQ ID NO: 1735028 - RNA, 19 nt, Homo sapiens
  misc_RNA (1)...(19): siRNA sense strand
agaaauuucccuucaauac

SEQ ID NO: 1735029 - RNA, 19 nt, Homo sapiens
  misc_RNA (1)...(19): siRNA sense strand
cuuaugacauuacaacagu

SEQ ID NO: 1735030 - RNA, 19 nt, Homo sapiens
  misc_RNA (1)...(19): siRNA sense strand
uaaagaaacguuugaugac

SEQ ID NO: 1735031 - RNA, 19 nt, Homo sapiens
  misc_RNA (1)...(19): siRNA sense strand
aguauccucuccagacauu

SEQ ID NO: 1735032 - RNA, 19 nt, Homo sapiens
  misc_RNA (1)...(19): siRNA sense strand
ggcaaaugcagcccagaaa

SEQ ID NO: 1735033 - RNA, 19 nt, Homo sapiens
  misc_RNA (1)...(19): siRNA sense strand
gguugaugaugcaaugaug

SEQ ID NO: 1735034 - RNA, 19 nt, Homo sapiens
  misc_RNA (1)...(19): siRNA sense strand
agccuucagugauggaaua

SEQ ID NO: 1735035 - RNA, 19 nt, Homo sapiens
  misc_RNA (1)...(19): siRNA sense strand
ucugauacccaaagagauu

SEQ ID NO: 1735036 - RNA, 19 nt, Homo sapiens
  misc_RNA (1)...(19): siRNA sense strand
gagagagacguuugaggau

SEQ ID NO: 1735037 - RNA, 19 nt, Homo sapiens
  misc_RNA (1)...(19): siRNA sense strand
uacgcaggguuacauauau

SEQ ID NO: 1735038 - RNA, 19 nt, Homo sapiens
  misc_RNA (1)...(19): siRNA sense strand
caaaguggauggugagaua

SEQ ID NO: 1735039 - RNA, 19 nt, Homo sapiens
  misc_RNA (1)...(19): siRNA sense strand
gaaaugagaauuccaaaga

SEQ ID NO: 1735040 - RNA, 19 nt, Homo sapiens
  misc_RNA (1)...(19): siRNA sense strand
ggugaaaucuacaaccaua

SEQ ID NO: 1735041 - RNA, 19 nt, Homo sapiens
  misc_RNA (1)...(19): siRNA sense strand
cuaaaggucuuguuacauu

SEQ ID NO: 1735042 - RNA, 19 nt, Homo sapiens
  misc_RNA (1)...(19): siRNA sense strand
guuaagaauuccugguuua

SEQ ID NO: 1735043 - RNA, 19 nt, Homo sapiens
  misc_RNA (1)...(19): siRNA sense strand
guaaagaaacguuugauga

SEQ ID NO: 1735044 - RNA, 19 nt, Homo sapiens
  misc_RNA (1)...(19): siRNA sense strand
gaagcuaaaggucuuguua

SEQ ID NO: 1735045 - RNA, 19 nt, Homo sapiens
  misc_RNA (1)...(19): siRNA sense strand
ggagucagaccuuuguuua

SEQ ID NO: 1735046 - RNA, 19 nt, Homo sapiens
  misc_RNA (1)...(19): siRNA sense strand
gaacugagagucccauuuc

SEQ ID NO: 1735047 - RNA, 19 nt, Homo sapiens
  misc_RNA (1)...(19): siRNA sense strand
caauucgagugaagaaaua

SEQ ID NO: 1735048 - RNA, 19 nt, Homo sapiens
  misc_RNA (1)...(19): siRNA sense strand
ugagggaacucuauuuguu

SEQ ID NO: 1735049 - RNA, 19 nt, Homo sapiens
  misc_RNA (1)...(19): siRNA sense strand
ccaaguauauucggaagaa

SEQ ID NO: 1735050 - RNA, 19 nt, Homo sapiens
  misc_RNA (1)...(19): siRNA sense strand
cuagaaagguggcagauca

SEQ ID NO: 1735051 - RNA, 19 nt, Homo sapiens
  misc_RNA (1)...(19): siRNA sense strand
gaagugaacauuaugaagu

SEQ ID NO: 1735052 - RNA, 19 nt, Homo sapiens
  misc_RNA (1)...(19): siRNA sense strand
caacugcugcuuuggauuu

SEQ ID NO: 1735053 - RNA, 19 nt, Homo sapiens
  misc_RNA (1)...(19): siRNA sense strand
gagagacguuugaggauuc

SEQ ID NO: 1735054 - RNA, 19 nt, Homo sapiens
  misc_RNA (1)...(19): siRNA sense strand
caaaugcagcccagaaauu

SEQ ID NO: 1735055 - RNA, 19 nt, Homo sapiens
  misc_RNA (1)...(19): siRNA sense strand
gcaacagcauuuugaauuu

SEQ ID NO: 1735056 - RNA, 19 nt, Homo sapiens
  misc_RNA (1)...(19): siRNA sense strand
ccagaaauuucccuucaau

SEQ ID NO: 1735057 - RNA, 19 nt, Homo sapiens
  misc_RNA (1)...(19): siRNA sense strand
gguuaaauaucaucacugu

SEQ ID NO: 1735058 - RNA, 19 nt, Homo sapiens
  misc_RNA (1)...(19): siRNA sense strand
ccguggaaaugguuaaaua

SEQ ID NO: 1735059 - RNA, 19 nt, Homo sapiens
  misc_RNA (1)...(19): siRNA sense strand
uauguuggaugguguguuu

SEQ ID NO: 1735060 - RNA, 19 nt, Homo sapiens
  misc_RNA (1)...(19): siRNA sense strand
gauagaaacugugaagaac

SEQ ID NO: 1735061 - RNA, 19 nt, Homo sapiens
  misc_RNA (1)...(19): siRNA sense strand
uuacuaccgucaagucuuu

SEQ ID NO: 1735062 - RNA, 19 nt, Homo sapiens
  misc_RNA (1)...(19): siRNA sense strand
gaacucuauuuguuugaug

SEQ ID NO: 1735063 - RNA, 19 nt, Homo sapiens
  misc_RNA (1)...(19): siRNA sense strand
ggaaacuuaugacauuaca

SEQ ID NO: 1735064 - RNA, 19 nt, Homo sapiens
  misc_RNA (1)...(19): siRNA sense strand
uuaaagcaaugacagaaga

SEQ ID NO: 1735065 - RNA, 19 nt, Homo sapiens
  misc_RNA (1)...(19): siRNA sense strand
ccaaagaaggauauuacua

SEQ ID NO: 1735066 - RNA, 19 nt, Homo sapiens
  misc_RNA (1)...(19): siRNA sense strand
aagaauuccugguuuaaga

SEQ ID NO: 1735067 - RNA, 19 nt, Homo sapiens
  misc_RNA (1)...(19): siRNA sense strand
uagaaacugugaagaacaa

SEQ ID NO: 1735068 - RNA, 19 nt, Homo sapiens
  misc_RNA (1)...(19): siRNA sense strand
gcacacagagguccagaug

SEQ ID NO: 1735069 - RNA, 19 nt, Homo sapiens
  misc_RNA (1)...(19): siRNA sense strand
cuuggaaacuuaugacauu

SEQ ID NO: 1735070 - RNA, 19 nt, Homo sapiens
  misc_RNA (1)...(19): siRNA sense strand
agucagaccuuuguuuaaa

SEQ ID NO: 1735071 - RNA, 19 nt, Homo sapiens
  misc_RNA (1)...(19): siRNA sense strand
gagggaacucuauuuguuu

SEQ ID NO: 1735072 - RNA, 19 nt, Homo sapiens
  misc_RNA (1)...(19): siRNA sense strand
caaagaaggauauuacuac

SEQ ID NO: 1735073 - RNA, 19 nt, Homo sapiens
  misc_RNA (1)...(19): siRNA sense strand
gaaagguggcagaucauau

SEQ ID NO: 1735074 - RNA, 19 nt, Homo sapiens
  misc_RNA (1)...(19): siRNA sense strand
gaugauugccuuucuguuc

SEQ ID NO: 1735075 - RNA, 19 nt, Homo sapiens
  misc_RNA (1)...(19): siRNA sense strand
gcccagaaauuucccuuca

SEQ ID NO: 1735076 - RNA, 19 nt, Homo sapiens
  misc_RNA (1)...(19): siRNA sense strand
uaaaggucuuguuacauug

SEQ ID NO: 1735077 - RNA, 19 nt, Homo sapiens
  misc_RNA (1)...(19): siRNA sense strand
acacagagguccagaugca

SEQ ID NO: 1735078 - RNA, 19 nt, Homo sapiens
  misc_RNA (1)...(19): siRNA sense strand
ccaaagaaugggauagaaa

SEQ ID NO: 1735079 - RNA, 19 nt, Homo sapiens
  misc_RNA (1)...(19): siRNA sense strand
ggaauacguugaacaucag

SEQ ID NO: 1735080 - RNA, 19 nt, Homo sapiens
  misc_RNA (1)...(19): siRNA sense strand
ggguagagauacauaugga

SEQ ID NO: 1735081 - RNA, 19 nt, Homo sapiens
  misc_RNA (1)...(19): siRNA sense strand
ggagaaggaucagaugaac

SEQ ID NO: 1735082 - RNA, 19 nt, Homo sapiens
  misc_RNA (1)...(19): siRNA sense strand
gaugguguguuugcauuug

SEQ ID NO: 1735083 - RNA, 19 nt, Homo sapiens
  misc_RNA (1)...(19): siRNA sense strand
gaaauuucccuucaauacu

SEQ ID NO: 1735084 - RNA, 19 nt, Homo sapiens
  misc_RNA (1)...(19): siRNA sense strand
gcaaaugcagcccagaaau

SEQ ID NO: 1735085 - RNA, 19 nt, Homo sapiens
  misc_RNA (1)...(19): siRNA sense strand
aggaauacguugaacauca

SEQ ID NO: 1735086 - RNA, 19 nt, Homo sapiens
  misc_RNA (1)...(19): siRNA sense strand
gcauucaggcucuggauga

SEQ ID NO: 1735087 - RNA, 19 nt, Homo sapiens
  misc_RNA (1)...(19): siRNA sense strand
gguggcagaucauauugga

SEQ ID NO: 1735088 - RNA, 19 nt, Homo sapiens
  misc_RNA (1)...(19): siRNA sense strand
aaagaaacguuugaugaca

SEQ ID NO: 1735089 - RNA, 19 nt, Homo sapiens
  misc_RNA (1)...(19): siRNA sense strand
gaaaucuacaaccauaaga

SEQ ID NO: 1735090 - RNA, 19 nt, Homo sapiens
  misc_RNA (1)...(19): siRNA sense strand
cuacaagucagcugucaaa

SEQ ID NO: 1735091 - RNA, 19 nt, Homo sapiens
  misc_RNA (1)...(19): siRNA sense strand
cagaucauauuggaaguga

SEQ ID NO: 1735092 - RNA, 19 nt, Homo sapiens
  misc_RNA (1)...(19): siRNA sense strand
aaagguggcagaucauauu

SEQ ID NO: 1735093 - RNA, 19 nt, Homo sapiens
  misc_RNA (1)...(19): siRNA sense strand
caaaguugcauccguggaa

SEQ ID NO: 1735094 - RNA, 19 nt, Homo sapiens
  misc_RNA (1)...(19): siRNA sense strand
ggaacucuauuuguuugau

SEQ ID NO: 1735095 - RNA, 19 nt, Homo sapiens
  misc_RNA (1)...(19): siRNA sense strand
gagucagaccuuuguuuaa

SEQ ID NO: 1735096 - RNA, 19 nt, Homo sapiens
  misc_RNA (1)...(19): siRNA sense strand
gaugacagacagaaggauu

SEQ ID NO: 1735097 - RNA, 19 nt, Homo sapiens
  misc_RNA (1)...(19): siRNA sense strand
ggauacugccaauaagaaa

SEQ ID NO: 1735098 - RNA, 19 nt, Homo sapiens
  misc_RNA (1)...(19): siRNA sense strand
ggauauuacuaccgucaag

SEQ ID NO: 1735099 - RNA, 19 nt, Homo sapiens
  misc_RNA (1)...(19): siRNA sense strand
ccaaucugauacccaaaga

SEQ ID NO: 1735100 - RNA, 19 nt, Homo sapiens
  misc_RNA (1)...(19): siRNA sense strand
gagagucccauuucuagau

SEQ ID NO: 1735101 - RNA, 19 nt, Homo sapiens
  misc_RNA (1)...(19): siRNA sense strand
uuacaauggugaaaucuac

SEQ ID NO: 1735102 - RNA, 19 nt, Homo sapiens
  misc_RNA (1)...(19): siRNA sense strand
agagagacguuugaggauu

SEQ ID NO: 1735103 - RNA, 19 nt, Homo sapiens
  misc_RNA (1)...(19): siRNA sense strand
uuacgcaggguuacauaua

SEQ ID NO: 1735104 - RNA, 19 nt, Homo sapiens
  misc_RNA (1)...(19): siRNA sense strand
ggaagacagccccgauuua

SEQ ID NO: 1735105 - RNA, 19 nt, Homo sapiens
  misc_RNA (1)...(19): siRNA sense strand
gcacuccgcgacucccuuu

SEQ ID NO: 1735106 - RNA, 19 nt, Homo sapiens
  misc_RNA (1)...(19): siRNA sense strand
cauauggagucagaccuuu

SEQ ID NO: 1735107 - RNA, 19 nt, Homo sapiens
  misc_RNA (1)...(19): siRNA sense strand
caaaggaggaauugagcaa

SEQ ID NO: 1735108 - RNA, 19 nt, Homo sapiens
  misc_RNA (1)...(19): siRNA sense strand
gcaauuggcauggaagaca

SEQ ID NO: 1735109 - RNA, 19 nt, Homo sapiens
  misc_RNA (1)...(19): siRNA sense strand
ucagguugaugaugcaaug

SEQ ID NO: 1735110 - RNA, 19 nt, Homo sapiens
  misc_RNA (1)...(19): siRNA sense strand
agaaggaucagaugaacuu

SEQ ID NO: 1735111 - RNA, 19 nt, Homo sapiens
  misc_RNA (1)...(19): siRNA sense strand
guaguugacccgcuguuug

SEQ ID NO: 1735112 - RNA, 19 nt, Homo sapiens
  misc_RNA (1)...(19): siRNA sense strand
ccaauucgagugaagaaau

SEQ ID NO: 1735113 - RNA, 19 nt, Homo sapiens
  misc_RNA (1)...(19): siRNA sense strand
cagaaauuucccuucaaua

SEQ ID NO: 1735114 - RNA, 19 nt, Homo sapiens
  misc_RNA (1)...(19): siRNA sense strand
agauagaaacugugaagaa

SEQ ID NO: 1735115 - RNA, 19 nt, Homo sapiens
  misc_RNA (1)...(19): siRNA sense strand
agauacauauggagucaga

SEQ ID NO: 1735116 - RNA, 19 nt, Homo sapiens
  misc_RNA (1)...(19): siRNA sense strand
agaaacguuugaugacaga

SEQ ID NO: 1735117 - RNA, 19 nt, Homo sapiens
  misc_RNA (1)...(19): siRNA sense strand
aaauuucccuucaauacuc

SEQ ID NO: 1735118 - RNA, 19 nt, Homo sapiens
  misc_RNA (1)...(19): siRNA sense strand
gaauuccugguuuaagauu

SEQ ID NO: 1735119 - RNA, 19 nt, Homo sapiens
  misc_RNA (1)...(19): siRNA sense strand
ggaagugaacauuaugaag

SEQ ID NO: 1735120 - RNA, 19 nt, Homo sapiens
  misc_RNA (1)...(19): siRNA sense strand
ccagaaaugagaauuccaa

SEQ ID NO: 1735121 - RNA, 19 nt, Homo sapiens
  misc_RNA (1)...(19): siRNA sense strand
gagagugagaggcuucuga

SEQ ID NO: 1735122 - RNA, 19 nt, Homo sapiens
  misc_RNA (1)...(19): siRNA sense strand
gaaggaucagaugaacuua

SEQ ID NO: 1735123 - RNA, 19 nt, Homo sapiens
  misc_RNA (1)...(19): siRNA sense strand
caauguggagaaacucuuu

SEQ ID NO: 1735124 - RNA, 19 nt, Homo sapiens
  misc_RNA (1)...(19): siRNA sense strand
uaugaagauugcacacaga

SEQ ID NO: 1735125 - RNA, 19 nt, Homo sapiens
  misc_RNA (1)...(19): siRNA sense strand
gaacuuacgcaggguuaca

SEQ ID NO: 1735126 - RNA, 19 nt, Homo sapiens
  misc_RNA (1)...(19): siRNA sense strand
cuccagacauuugcaauug

SEQ ID NO: 1735127 - RNA, 19 nt, Homo sapiens
  misc_RNA (1)...(19): siRNA sense strand
aaugacagaagauggauuu

SEQ ID NO: 1735128 - RNA, 19 nt, Homo sapiens
  misc_RNA (1)...(19): siRNA sense strand
agaaauuucccuucaauac

SEQ ID NO: 1735129 - RNA, 19 nt, Homo sapiens
  misc_RNA (1)...(19): siRNA sense strand
cuuaugacauuacaacagu

SEQ ID NO: 1735130 - RNA, 19 nt, Homo sapiens
  misc_RNA (1)...(19): siRNA sense strand
uaaagaaacguuugaugac

SEQ ID NO: 1735131 - RNA, 19 nt, Homo sapiens
  misc_RNA (1)...(19): siRNA sense strand
aguauccucuccagacauu

SEQ ID NO: 1735132 - RNA, 19 nt, Homo sapiens
  misc_RNA (1)...(19): siRNA sense strand
ggcaaaugcagcccagaaa

SEQ ID NO: 1735133 - RNA, 19 nt, Homo sapiens
  misc_RNA (1)...(19): siRNA sense strand
gguugaugaugcaaugaug

SEQ ID NO: 1735134 - RNA, 19 nt, Homo sapiens
  misc_RNA (1)...(19): siRNA sense strand
agccuucagugauggaaua

SEQ ID NO: 1735135 - RNA, 19 nt, Homo sapiens
  misc_RNA (1)...(19): siRNA sense strand
ucugauacccaaagagauu

SEQ ID NO: 1735136 - RNA, 19 nt, Homo sapiens
  misc_RNA (1)...(19): siRNA sense strand
gagagagacguuugaggau

SEQ ID NO: 1735137 - RNA, 19 nt, Homo sapiens
  misc_RNA (1)...(19): siRNA sense strand
uacgcaggguuacauauau

SEQ ID NO: 1735138 - RNA, 19 nt, Homo sapiens
  misc_RNA (1)...(19): siRNA sense strand
gagaaucacuguuuacgua

SEQ ID NO: 1735139 - RNA, 19 nt, Homo sapiens
  misc_RNA (1)...(19): siRNA sense strand
gaacaugcgugugggaauu

SEQ ID NO: 1735140 - RNA, 19 nt, Homo sapiens
  misc_RNA (1)...(19): siRNA sense strand
gcagguagacgaccgauuu

SEQ ID NO: 1735141 - RNA, 19 nt, Homo sapiens
  misc_RNA (1)...(19): siRNA sense strand
caaccaagguggcauugaa

SEQ ID NO: 1735142 - RNA, 19 nt, Homo sapiens
  misc_RNA (1)...(19): siRNA sense strand
gcaaugaugagcucuacua

SEQ ID NO: 1735143 - RNA, 19 nt, Homo sapiens
  misc_RNA (1)...(19): siRNA sense strand
gcaaccagguguccaagga

SEQ ID NO: 1735144 - RNA, 19 nt, Homo sapiens
  misc_RNA (1)...(19): siRNA sense strand
gcaaguuccuccugaccuu

SEQ ID NO: 1735145 - RNA, 19 nt, Homo sapiens
  misc_RNA (1)...(19): siRNA sense strand
gaaucacuguuuacguauu

SEQ ID NO: 1735146 - RNA, 19 nt, Homo sapiens
  misc_RNA (1)...(19): siRNA sense strand
cagcuugucuccaauguuc

SEQ ID NO: 1735147 - RNA, 19 nt, Homo sapiens
  misc_RNA (1)...(19): siRNA sense strand
gaugagcucuacuaucagu

SEQ ID NO: 1735148 - RNA, 19 nt, Homo sapiens
  misc_RNA (1)...(19): siRNA sense strand
ccauagacuucuucaacaa

SEQ ID NO: 1735149 - RNA, 19 nt, Homo sapiens
  misc_RNA (1)...(19): siRNA sense strand
ggaccguguucuucaucua

SEQ ID NO: 1735150 - RNA, 19 nt, Homo sapiens
  misc_RNA (1)...(19): siRNA sense strand
ggaugaaguggaugaguuu

SEQ ID NO: 1735151 - RNA, 19 nt, Homo sapiens
  misc_RNA (1)...(19): siRNA sense strand
gcacaggaacuggucauga

SEQ ID NO: 1735152 - RNA, 19 nt, Homo sapiens
  misc_RNA (1)...(19): siRNA sense strand
gaagaucgggcucaacauc

SEQ ID NO: 1735153 - RNA, 19 nt, Homo sapiens
  misc_RNA (1)...(19): siRNA sense strand
ccgcagagaaucacuguuu

SEQ ID NO: 1735154 - RNA, 19 nt, Homo sapiens
  misc_RNA (1)...(19): siRNA sense strand
gaaguacuccaagcaggua

SEQ ID NO: 1735155 - RNA, 19 nt, Homo sapiens
  misc_RNA (1)...(19): siRNA sense strand
gagccugacuuagagaaga

SEQ ID NO: 1735156 - RNA, 19 nt, Homo sapiens
  misc_RNA (1)...(19): siRNA sense strand
gcgagaugaugaccuacuu

SEQ ID NO: 1735157 - RNA, 19 nt, Homo sapiens
  misc_RNA (1)...(19): siRNA sense strand
gccauagacuucuucaaca

SEQ ID NO: 1735158 - RNA, 19 nt, Homo sapiens
  misc_RNA (1)...(19): siRNA sense strand
gaucuacuccugcguaaag

SEQ ID NO: 1735159 - RNA, 19 nt, Homo sapiens
  misc_RNA (1)...(19): siRNA sense strand
gcaggaggauaugauguuc

SEQ ID NO: 1735160 - RNA, 19 nt, Homo sapiens
  misc_RNA (1)...(19): siRNA sense strand
gcaggacgcauccacauca

SEQ ID NO: 1735161 - RNA, 19 nt, Homo sapiens
  misc_RNA (1)...(19): siRNA sense strand
cgcagagaaucacuguuua

SEQ ID NO: 1735162 - RNA, 19 nt, Homo sapiens
  misc_RNA (1)...(19): siRNA sense strand
caacgugagcauccuguuu

SEQ ID NO: 1735163 - RNA, 19 nt, Homo sapiens
  misc_RNA (1)...(19): siRNA sense strand
acacucaacuaccugaaug

SEQ ID NO: 1735164 - RNA, 19 nt, Homo sapiens
  misc_RNA (1)...(19): siRNA sense strand
gcauccaggucaccacaga

SEQ ID NO: 1735165 - RNA, 19 nt, Homo sapiens
  misc_RNA (1)...(19): siRNA sense strand
ucaaugagcacuccuucaa

SEQ ID NO: 1735166 - RNA, 19 nt, Homo sapiens
  misc_RNA (1)...(19): siRNA sense strand
ucaaggcacuggccgacuu

SEQ ID NO: 1735167 - RNA, 19 nt, Homo sapiens
  misc_RNA (1)...(19): siRNA sense strand
gugcgaacccugaggauga

SEQ ID NO: 1735168 - RNA, 19 nt, Homo sapiens
  misc_RNA (1)...(19): siRNA sense strand
ucaacaacuuccagaugaa

SEQ ID NO: 1735169 - RNA, 19 nt, Homo sapiens
  misc_RNA (1)...(19): siRNA sense strand
gcacaggagcacaacauca

SEQ ID NO: 1735170 - RNA, 19 nt, Homo sapiens
  misc_RNA (1)...(19): siRNA sense strand
gaaguucccgucggacaaa

SEQ ID NO: 1735171 - RNA, 19 nt, Homo sapiens
  misc_RNA (1)...(19): siRNA sense strand
caucaucaucucagucuuu

SEQ ID NO: 1735172 - RNA, 19 nt, Homo sapiens
  misc_RNA (1)...(19): siRNA sense strand
ggucaccgccaacgccaua

SEQ ID NO: 1735173 - RNA, 19 nt, Homo sapiens
  misc_RNA (1)...(19): siRNA sense strand
ugauggaccagaugaagua

SEQ ID NO: 1735174 - RNA, 19 nt, Homo sapiens
  misc_RNA (1)...(19): siRNA sense strand
ggaaacugcaggccacaga

SEQ ID NO: 1735175 - RNA, 19 nt, Homo sapiens
  misc_RNA (1)...(19): siRNA sense strand
gcgcaacgccuaccucaag

SEQ ID NO: 1735176 - RNA, 19 nt, Homo sapiens
  misc_RNA (1)...(19): siRNA sense strand
uucaacaacuuccagauga

SEQ ID NO: 1735177 - RNA, 19 nt, Homo sapiens
  misc_RNA (1)...(19): siRNA sense strand
gcuucuaccugaccuguuc

SEQ ID NO: 1735178 - RNA, 19 nt, Homo sapiens
  misc_RNA (1)...(19): siRNA sense strand
caagaugaaccgccagaga

SEQ ID NO: 1735179 - RNA, 19 nt, Homo sapiens
  misc_RNA (1)...(19): siRNA sense strand
agauuuacauccagaaaca

SEQ ID NO: 1735180 - RNA, 19 nt, Homo sapiens
  misc_RNA (1)...(19): siRNA sense strand
gccaugaucgccaagauga

SEQ ID NO: 1735181 - RNA, 19 nt, Homo sapiens
  misc_RNA (1)...(19): siRNA sense strand
cgaccgauuuggugccuau

SEQ ID NO: 1735182 - RNA, 19 nt, Homo sapiens
  misc_RNA (1)...(19): siRNA sense strand
gggcaaaggcgagaugaug

SEQ ID NO: 1735183 - RNA, 19 nt, Homo sapiens
  misc_RNA (1)...(19): siRNA sense strand
caucauggcugugcuuugc

SEQ ID NO: 1735184 - RNA, 19 nt, Homo sapiens
  misc_RNA (1)...(19): siRNA sense strand
gugaucuacuccugcguaa

SEQ ID NO: 1735185 - RNA, 19 nt, Homo sapiens
  misc_RNA (1)...(19): siRNA sense strand
ggcaaaggcgagaugauga

SEQ ID NO: 1735186 - RNA, 19 nt, Homo sapiens
  misc_RNA (1)...(19): siRNA sense strand
gagcacuccuucaacaacu

SEQ ID NO: 1735187 - RNA, 19 nt, Homo sapiens
  misc_RNA (1)...(19): siRNA sense strand
aaugagcacuccuucaaca

SEQ ID NO: 1735188 - RNA, 19 nt, Homo sapiens
  misc_RNA (1)...(19): siRNA sense strand
aggaugaaguggaugaguu

SEQ ID NO: 1735189 - RNA, 19 nt, Homo sapiens
  misc_RNA (1)...(19): siRNA sense strand
aaggcgagaugaugaccua

SEQ ID NO: 1735190 - RNA, 19 nt, Homo sapiens
  misc_RNA (1)...(19): siRNA sense strand
cacgaaagccucaguacga

SEQ ID NO: 1735191 - RNA, 19 nt, Homo sapiens
  misc_RNA (1)...(19): siRNA sense strand
ccaucgagcucaucuacgu

SEQ ID NO: 1735192 - RNA, 19 nt, Homo sapiens
  misc_RNA (1)...(19): siRNA sense strand
caagcuggccgcagagaau

SEQ ID NO: 1735193 - RNA, 19 nt, Homo sapiens
  misc_RNA (1)...(19): siRNA sense strand
ugaccuacuuccucaaugg

SEQ ID NO: 1735194 - RNA, 19 nt, Homo sapiens
  misc_RNA (1)...(19): siRNA sense strand
gggcaagacccacaucaag

SEQ ID NO: 1735195 - RNA, 19 nt, Homo sapiens
  misc_RNA (1)...(19): siRNA sense strand
ugagaucaucgcugacuuu

SEQ ID NO: 1735196 - RNA, 19 nt, Homo sapiens
  misc_RNA (1)...(19): siRNA sense strand
ccaaggcuacacucaacua

SEQ ID NO: 1735197 - RNA, 19 nt, Homo sapiens
  misc_RNA (1)...(19): siRNA sense strand
aagaugaaccgccagagaa

SEQ ID NO: 1735198 - RNA, 19 nt, Homo sapiens
  misc_RNA (1)...(19): siRNA sense strand
uggagaagaucaagaccau

SEQ ID NO: 1735199 - RNA, 19 nt, Homo sapiens
  misc_RNA (1)...(19): siRNA sense strand
gcagagaaucacuguuuac

SEQ ID NO: 1735200 - RNA, 19 nt, Homo sapiens
  misc_RNA (1)...(19): siRNA sense strand
gaaagccucaguacgacau

SEQ ID NO: 1735201 - RNA, 19 nt, Homo sapiens
  misc_RNA (1)...(19): siRNA sense strand
ggagucggccgucaacuac

SEQ ID NO: 1735202 - RNA, 19 nt, Homo sapiens
  misc_RNA (1)...(19): siRNA sense strand
caagaacgcccaggagagu

SEQ ID NO: 1735203 - RNA, 19 nt, Homo sapiens
  misc_RNA (1)...(19): siRNA sense strand
caccaaggcuacacucaac

SEQ ID NO: 1735204 - RNA, 19 nt, Homo sapiens
  misc_RNA (1)...(19): siRNA sense strand
uugauaggcuucggucuga

SEQ ID NO: 1735205 - RNA, 19 nt, Homo sapiens
  misc_RNA (1)...(19): siRNA sense strand
ugaaguggaugaguuucug

SEQ ID NO: 1735206 - RNA, 19 nt, Homo sapiens
  misc_RNA (1)...(19): siRNA sense strand
gccugcggcuacucaauga

SEQ ID NO: 1735207 - RNA, 19 nt, Homo sapiens
  misc_RNA (1)...(19): siRNA sense strand
caucaucucagucuuugug

SEQ ID NO: 1735208 - RNA, 19 nt, Homo sapiens
  misc_RNA (1)...(19): siRNA sense strand
gcccugagcaugcaaccaa

SEQ ID NO: 1735209 - RNA, 19 nt, Homo sapiens
  misc_RNA (1)...(19): siRNA sense strand
ggaagaucgugcgguccaa

SEQ ID NO: 1735210 - RNA, 19 nt, Homo sapiens
  misc_RNA (1)...(19): siRNA sense strand
gauauuccgcuccaagaag

SEQ ID NO: 1735211 - RNA, 19 nt, Homo sapiens
  misc_RNA (1)...(19): siRNA sense strand
ucuccgaguucuacguuga

SEQ ID NO: 1735212 - RNA, 19 nt, Homo sapiens
  misc_RNA (1)...(19): siRNA sense strand
cagacccucuccaggaaga

SEQ ID NO: 1735213 - RNA, 19 nt, Homo sapiens
  misc_RNA (1)...(19): siRNA sense strand
ugaccuuggugguguuugu

SEQ ID NO: 1735214 - RNA, 19 nt, Homo sapiens
  misc_RNA (1)...(19): siRNA sense strand
gcgcaaugaugagcucuac

SEQ ID NO: 1735215 - RNA, 19 nt, Homo sapiens
  misc_RNA (1)...(19): siRNA sense strand
gaugaccuacuuccucaau

SEQ ID NO: 1735216 - RNA, 19 nt, Homo sapiens
  misc_RNA (1)...(19): siRNA sense strand
gagaucaucgcugacuuug

SEQ ID NO: 1735217 - RNA, 19 nt, Homo sapiens
  misc_RNA (1)...(19): siRNA sense strand
cacaggaacuggucaugac

SEQ ID NO: 1735218 - RNA, 19 nt, Homo sapiens
  misc_RNA (1)...(19): siRNA sense strand
ccauauucaugcucagcuu

SEQ ID NO: 1735219 - RNA, 19 nt, Homo sapiens
  misc_RNA (1)...(19): siRNA sense strand
uagagaagaaguacuccaa

SEQ ID NO: 1735220 - RNA, 19 nt, Homo sapiens
  misc_RNA (1)...(19): siRNA sense strand
gcacccagaagcggaaaga

SEQ ID NO: 1735221 - RNA, 19 nt, Homo sapiens
  misc_RNA (1)...(19): siRNA sense strand
cggagucggccgucaacua

SEQ ID NO: 1735222 - RNA, 19 nt, Homo sapiens
  misc_RNA (1)...(19): siRNA sense strand
gaugaacagcacccugguu

SEQ ID NO: 1735223 - RNA, 19 nt, Homo sapiens
  misc_RNA (1)...(19): siRNA sense strand
cccagaagcggaaagaaga

SEQ ID NO: 1735224 - RNA, 19 nt, Homo sapiens
  misc_RNA (1)...(19): siRNA sense strand
caagcaggaggauaugaug

SEQ ID NO: 1735225 - RNA, 19 nt, Homo sapiens
  misc_RNA (1)...(19): siRNA sense strand
gggcacgaaagccucagua

SEQ ID NO: 1735226 - RNA, 19 nt, Homo sapiens
  misc_RNA (1)...(19): siRNA sense strand
guaccagcgcuacuucuuc

SEQ ID NO: 1735227 - RNA, 19 nt, Homo sapiens
  misc_RNA (1)...(19): siRNA sense strand
ccaacgccauagacuucuu

SEQ ID NO: 1735228 - RNA, 19 nt, Homo sapiens
  misc_RNA (1)...(19): siRNA sense strand
gaucgugcgguccaagaug

SEQ ID NO: 1735229 - RNA, 19 nt, Homo sapiens
  misc_RNA (1)...(19): siRNA sense strand
gacgccaggagcauugaua

SEQ ID NO: 1735230 - RNA, 19 nt, Homo sapiens
  misc_RNA (1)...(19): siRNA sense strand
gauguuccauaagauuuac

SEQ ID NO: 1735231 - RNA, 19 nt, Homo sapiens
  misc_RNA (1)...(19): siRNA sense strand
caaggcacuggccgacuuu

SEQ ID NO: 1735232 - RNA, 19 nt, Homo sapiens
  misc_RNA (1)...(19): siRNA sense strand
ugcagacccucuccaggaa

SEQ ID NO: 1735233 - RNA, 19 nt, Homo sapiens
  misc_RNA (1)...(19): siRNA sense strand
ugacaggggugaacgugaa

SEQ ID NO: 1735234 - RNA, 19 nt, Homo sapiens
  misc_RNA (1)...(19): siRNA sense strand
uccauaagauuuacaucca

SEQ ID NO: 1735235 - RNA, 19 nt, Homo sapiens
  misc_RNA (1)...(19): siRNA sense strand
gaacccugaggaugaagug

SEQ ID NO: 1735236 - RNA, 19 nt, Homo sapiens
  misc_RNA (1)...(19): siRNA sense strand
ugaagcugauggaccagau

SEQ ID NO: 1735237 - RNA, 19 nt, Homo sapiens
  misc_RNA (1)...(19): siRNA sense strand
ggaagcuggugcucaugcu

SEQ ID NO: 1735238 - RNA, 19 nt, Homo sapiens
  misc_RNA (1)...(19): siRNA sense strand
gagaaucacuguuuacgua

SEQ ID NO: 1735239 - RNA, 19 nt, Homo sapiens
  misc_RNA (1)...(19): siRNA sense strand
gaacaugcgugugggaauu

SEQ ID NO: 1735240 - RNA, 19 nt, Homo sapiens
  misc_RNA (1)...(19): siRNA sense strand
gcagguagacgaccgauuu

SEQ ID NO: 1735241 - RNA, 19 nt, Homo sapiens
  misc_RNA (1)...(19): siRNA sense strand
caaccaagguggcauugaa

SEQ ID NO: 1735242 - RNA, 19 nt, Homo sapiens
  misc_RNA (1)...(19): siRNA sense strand
gcaaugaugagcucuacua

SEQ ID NO: 1735243 - RNA, 19 nt, Homo sapiens
  misc_RNA (1)...(19): siRNA sense strand
gcaaccagguguccaagga

SEQ ID NO: 1735244 - RNA, 19 nt, Homo sapiens
  misc_RNA (1)...(19): siRNA sense strand
gcaaguuccuccugaccuu

SEQ ID NO: 1735245 - RNA, 19 nt, Homo sapiens
  misc_RNA (1)...(19): siRNA sense strand
gaaucacuguuuacguauu

SEQ ID NO: 1735246 - RNA, 19 nt, Homo sapiens
  misc_RNA (1)...(19): siRNA sense strand
cagcuugucuccaauguuc

SEQ ID NO: 1735247 - RNA, 19 nt, Homo sapiens
  misc_RNA (1)...(19): siRNA sense strand
gaugagcucuacuaucagu

SEQ ID NO: 1735248 - RNA, 19 nt, Homo sapiens
  misc_RNA (1)...(19): siRNA sense strand
ccauagacuucuucaacaa

SEQ ID NO: 1735249 - RNA, 19 nt, Homo sapiens
  misc_RNA (1)...(19): siRNA sense strand
ggaccguguucuucaucua

SEQ ID NO: 1735250 - RNA, 19 nt, Homo sapiens
  misc_RNA (1)...(19): siRNA sense strand
ggaugaaguggaugaguuu

SEQ ID NO: 1735251 - RNA, 19 nt, Homo sapiens
  misc_RNA (1)...(19): siRNA sense strand
gcacaggaacuggucauga

SEQ ID NO: 1735252 - RNA, 19 nt, Homo sapiens
  misc_RNA (1)...(19): siRNA sense strand
gaagaucgggcucaacauc

SEQ ID NO: 1735253 - RNA, 19 nt, Homo sapiens
  misc_RNA (1)...(19): siRNA sense strand
ccgcagagaaucacuguuu

SEQ ID NO: 1735254 - RNA, 19 nt, Homo sapiens
  misc_RNA (1)...(19): siRNA sense strand
gaaguacuccaagcaggua

SEQ ID NO: 1735255 - RNA, 19 nt, Homo sapiens
  misc_RNA (1)...(19): siRNA sense strand
gagccugacuuagagaaga

SEQ ID NO: 1735256 - RNA, 19 nt, Homo sapiens
  misc_RNA (1)...(19): siRNA sense strand
gcgagaugaugaccuacuu

SEQ ID NO: 1735257 - RNA, 19 nt, Homo sapiens
  misc_RNA (1)...(19): siRNA sense strand
gccauagacuucuucaaca

SEQ ID NO: 1735258 - RNA, 19 nt, Homo sapiens
  misc_RNA (1)...(19): siRNA sense strand
gaucuacuccugcguaaag

SEQ ID NO: 1735259 - RNA, 19 nt, Homo sapiens
  misc_RNA (1)...(19): siRNA sense strand
gcaggaggauaugauguuc

SEQ ID NO: 1735260 - RNA, 19 nt, Homo sapiens
  misc_RNA (1)...(19): siRNA sense strand
gcaggacgcauccacauca

SEQ ID NO: 1735261 - RNA, 19 nt, Homo sapiens
  misc_RNA (1)...(19): siRNA sense strand
cgcagagaaucacuguuua

SEQ ID NO: 1735262 - RNA, 19 nt, Homo sapiens
  misc_RNA (1)...(19): siRNA sense strand
caacgugagcauccuguuu

SEQ ID NO: 1735263 - RNA, 19 nt, Homo sapiens
  misc_RNA (1)...(19): siRNA sense strand
acacucaacuaccugaaug

SEQ ID NO: 1735264 - RNA, 19 nt, Homo sapiens
  misc_RNA (1)...(19): siRNA sense strand
gcauccaggucaccacaga

SEQ ID NO: 1735265 - RNA, 19 nt, Homo sapiens
  misc_RNA (1)...(19): siRNA sense strand
ucaaugagcacuccuucaa

SEQ ID NO: 1735266 - RNA, 19 nt, Homo sapiens
  misc_RNA (1)...(19): siRNA sense strand
ucaaggcacuggccgacuu

SEQ ID NO: 1735267 - RNA, 19 nt, Homo sapiens
  misc_RNA (1)...(19): siRNA sense strand
gugcgaacccugaggauga

SEQ ID NO: 1735268 - RNA, 19 nt, Homo sapiens
  misc_RNA (1)...(19): siRNA sense strand
ucaacaacuuccagaugaa

SEQ ID NO: 1735269 - RNA, 19 nt, Homo sapiens
  misc_RNA (1)...(19): siRNA sense strand
gcacaggagcacaacauca

SEQ ID NO: 1735270 - RNA, 19 nt, Homo sapiens
  misc_RNA (1)...(19): siRNA sense strand
gaaguucccgucggacaaa

SEQ ID NO: 1735271 - RNA, 19 nt, Homo sapiens
  misc_RNA (1)...(19): siRNA sense strand
caucaucaucucagucuuu

SEQ ID NO: 1735272 - RNA, 19 nt, Homo sapiens
  misc_RNA (1)...(19): siRNA sense strand
ggucaccgccaacgccaua

SEQ ID NO: 1735273 - RNA, 19 nt, Homo sapiens
  misc_RNA (1)...(19): siRNA sense strand
ugauggaccagaugaagua

SEQ ID NO: 1735274 - RNA, 19 nt, Homo sapiens
  misc_RNA (1)...(19): siRNA sense strand
ggaaacugcaggccacaga

SEQ ID NO: 1735275 - RNA, 19 nt, Homo sapiens
  misc_RNA (1)...(19): siRNA sense strand
gcgcaacgccuaccucaag

SEQ ID NO: 1735276 - RNA, 19 nt, Homo sapiens
  misc_RNA (1)...(19): siRNA sense strand
uucaacaacuuccagauga

SEQ ID NO: 1735277 - RNA, 19 nt, Homo sapiens
  misc_RNA (1)...(19): siRNA sense strand
gcuucuaccugaccuguuc

SEQ ID NO: 1735278 - RNA, 19 nt, Homo sapiens
  misc_RNA (1)...(19): siRNA sense strand
caagaugaaccgccagaga

SEQ ID NO: 1735279 - RNA, 19 nt, Homo sapiens
  misc_RNA (1)...(19): siRNA sense strand
agauuuacauccagaaaca

SEQ ID NO: 1735280 - RNA, 19 nt, Homo sapiens
  misc_RNA (1)...(19): siRNA sense strand
gccaugaucgccaagauga

SEQ ID NO: 1735281 - RNA, 19 nt, Homo sapiens
  misc_RNA (1)...(19): siRNA sense strand
cgaccgauuuggugccuau

SEQ ID NO: 1735282 - RNA, 19 nt, Homo sapiens
  misc_RNA (1)...(19): siRNA sense strand
gggcaaaggcgagaugaug

SEQ ID NO: 1735283 - RNA, 19 nt, Homo sapiens
  misc_RNA (1)...(19): siRNA sense strand
caucauggcugugcuuugc

SEQ ID NO: 1735284 - RNA, 19 nt, Homo sapiens
  misc_RNA (1)...(19): siRNA sense strand
gugaucuacuccugcguaa

SEQ ID NO: 1735285 - RNA, 19 nt, Homo sapiens
  misc_RNA (1)...(19): siRNA sense strand
ggcaaaggcgagaugauga

SEQ ID NO: 1735286 - RNA, 19 nt, Homo sapiens
  misc_RNA (1)...(19): siRNA sense strand
gagcacuccuucaacaacu

SEQ ID NO: 1735287 - RNA, 19 nt, Homo sapiens
  misc_RNA (1)...(19): siRNA sense strand
aaugagcacuccuucaaca

SEQ ID NO: 1735288 - RNA, 19 nt, Homo sapiens
  misc_RNA (1)...(19): siRNA sense strand
aggaugaaguggaugaguu

SEQ ID NO: 1735289 - RNA, 19 nt, Homo sapiens
  misc_RNA (1)...(19): siRNA sense strand
aaggcgagaugaugaccua

SEQ ID NO: 1735290 - RNA, 19 nt, Homo sapiens
  misc_RNA (1)...(19): siRNA sense strand
cacgaaagccucaguacga

SEQ ID NO: 1735291 - RNA, 19 nt, Homo sapiens
  misc_RNA (1)...(19): siRNA sense strand
ccaucgagcucaucuacgu

SEQ ID NO: 1735292 - RNA, 19 nt, Homo sapiens
  misc_RNA (1)...(19): siRNA sense strand
caagcuggccgcagagaau

SEQ ID NO: 1735293 - RNA, 19 nt, Homo sapiens
  misc_RNA (1)...(19): siRNA sense strand
ugaccuacuuccucaaugg

SEQ ID NO: 1735294 - RNA, 19 nt, Homo sapiens
  misc_RNA (1)...(19): siRNA sense strand
gggcaagacccacaucaag

SEQ ID NO: 1735295 - RNA, 19 nt, Homo sapiens
  misc_RNA (1)...(19): siRNA sense strand
ugagaucaucgcugacuuu

SEQ ID NO: 1735296 - RNA, 19 nt, Homo sapiens
  misc_RNA (1)...(19): siRNA sense strand
ccaaggcuacacucaacua

SEQ ID NO: 1735297 - RNA, 19 nt, Homo sapiens
  misc_RNA (1)...(19): siRNA sense strand
aagaugaaccgccagagaa

SEQ ID NO: 1735298 - RNA, 19 nt, Homo sapiens
  misc_RNA (1)...(19): siRNA sense strand
uggagaagaucaagaccau

SEQ ID NO: 1735299 - RNA, 19 nt, Homo sapiens
  misc_RNA (1)...(19): siRNA sense strand
gcagagaaucacuguuuac

SEQ ID NO: 1735300 - RNA, 19 nt, Homo sapiens
  misc_RNA (1)...(19): siRNA sense strand
gaaagccucaguacgacau

SEQ ID NO: 1735301 - RNA, 19 nt, Homo sapiens
  misc_RNA (1)...(19): siRNA sense strand
ggagucggccgucaacuac

SEQ ID NO: 1735302 - RNA, 19 nt, Homo sapiens
  misc_RNA (1)...(19): siRNA sense strand
caagaacgcccaggagagu

SEQ ID NO: 1735303 - RNA, 19 nt, Homo sapiens
  misc_RNA (1)...(19): siRNA sense strand
caccaaggcuacacucaac

SEQ ID NO: 1735304 - RNA, 19 nt, Homo sapiens
  misc_RNA (1)...(19): siRNA sense strand
uugauaggcuucggucuga

SEQ ID NO: 1735305 - RNA, 19 nt, Homo sapiens
  misc_RNA (1)...(19): siRNA sense strand
ugaaguggaugaguuucug

SEQ ID NO: 1735306 - RNA, 19 nt, Homo sapiens
  misc_RNA (1)...(19): siRNA sense strand
gccugcggcuacucaauga

SEQ ID NO: 1735307 - RNA, 19 nt, Homo sapiens
  misc_RNA (1)...(19): siRNA sense strand
caucaucucagucuuugug

SEQ ID NO: 1735308 - RNA, 19 nt, Homo sapiens
  misc_RNA (1)...(19): siRNA sense strand
gcccugagcaugcaaccaa

SEQ ID NO: 1735309 - RNA, 19 nt, Homo sapiens
  misc_RNA (1)...(19): siRNA sense strand
ggaagaucgugcgguccaa

SEQ ID NO: 1735310 - RNA, 19 nt, Homo sapiens
  misc_RNA (1)...(19): siRNA sense strand
gauauuccgcuccaagaag

SEQ ID NO: 1735311 - RNA, 19 nt, Homo sapiens
  misc_RNA (1)...(19): siRNA sense strand
ucuccgaguucuacguuga

SEQ ID NO: 1735312 - RNA, 19 nt, Homo sapiens
  misc_RNA (1)...(19): siRNA sense strand
cagacccucuccaggaaga

SEQ ID NO: 1735313 - RNA, 19 nt, Homo sapiens
  misc_RNA (1)...(19): siRNA sense strand
ugaccuuggugguguuugu

SEQ ID NO: 1735314 - RNA, 19 nt, Homo sapiens
  misc_RNA (1)...(19): siRNA sense strand
gcgcaaugaugagcucuac

SEQ ID NO: 1735315 - RNA, 19 nt, Homo sapiens
  misc_RNA (1)...(19): siRNA sense strand
gaugaccuacuuccucaau

SEQ ID NO: 1735316 - RNA, 19 nt, Homo sapiens
  misc_RNA (1)...(19): siRNA sense strand
gagaucaucgcugacuuug

SEQ ID NO: 1735317 - RNA, 19 nt, Homo sapiens
  misc_RNA (1)...(19): siRNA sense strand
cacaggaacuggucaugac

SEQ ID NO: 1735318 - RNA, 19 nt, Homo sapiens
  misc_RNA (1)...(19): siRNA sense strand
ccauauucaugcucagcuu

SEQ ID NO: 1735319 - RNA, 19 nt, Homo sapiens
  misc_RNA (1)...(19): siRNA sense strand
uagagaagaaguacuccaa

SEQ ID NO: 1735320 - RNA, 19 nt, Homo sapiens
  misc_RNA (1)...(19): siRNA sense strand
gcacccagaagcggaaaga

SEQ ID NO: 1735321 - RNA, 19 nt, Homo sapiens
  misc_RNA (1)...(19): siRNA sense strand
cggagucggccgucaacua

SEQ ID NO: 1735322 - RNA, 19 nt, Homo sapiens
  misc_RNA (1)...(19): siRNA sense strand
gaugaacagcacccugguu

SEQ ID NO: 1735323 - RNA, 19 nt, Homo sapiens
  misc_RNA (1)...(19): siRNA sense strand
cccagaagcggaaagaaga

SEQ ID NO: 1735324 - RNA, 19 nt, Homo sapiens
  misc_RNA (1)...(19): siRNA sense strand
caagcaggaggauaugaug

SEQ ID NO: 1735325 - RNA, 19 nt, Homo sapiens
  misc_RNA (1)...(19): siRNA sense strand
gggcacgaaagccucagua

SEQ ID NO: 1735326 - RNA, 19 nt, Homo sapiens
  misc_RNA (1)...(19): siRNA sense strand
guaccagcgcuacuucuuc

SEQ ID NO: 1735327 - RNA, 19 nt, Homo sapiens
  misc_RNA (1)...(19): siRNA sense strand
ccaacgccauagacuucuu

SEQ ID NO: 1735328 - RNA, 19 nt, Homo sapiens
  misc_RNA (1)...(19): siRNA sense strand
gaucgugcgguccaagaug

SEQ ID NO: 1735329 - RNA, 19 nt, Homo sapiens
  misc_RNA (1)...(19): siRNA sense strand
gacgccaggagcauugaua

SEQ ID NO: 1735330 - RNA, 19 nt, Homo sapiens
  misc_RNA (1)...(19): siRNA sense strand
gauguuccauaagauuuac

SEQ ID NO: 1735331 - RNA, 19 nt, Homo sapiens
  misc_RNA (1)...(19): siRNA sense strand
caaggcacuggccgacuuu

SEQ ID NO: 1735332 - RNA, 19 nt, Homo sapiens
  misc_RNA (1)...(19): siRNA sense strand
ugcagacccucuccaggaa

SEQ ID NO: 1735333 - RNA, 19 nt, Homo sapiens
  misc_RNA (1)...(19): siRNA sense strand
ugacaggggugaacgugaa

SEQ ID NO: 1735334 - RNA, 19 nt, Homo sapiens
  misc_RNA (1)...(19): siRNA sense strand
uccauaagauuuacaucca

SEQ ID NO: 1735335 - RNA, 19 nt, Homo sapiens
  misc_RNA (1)...(19): siRNA sense strand
gaacccugaggaugaagug

SEQ ID NO: 1735336 - RNA, 19 nt, Homo sapiens
  misc_RNA (1)...(19): siRNA sense strand
ugaagcugauggaccagau

SEQ ID NO: 1735337 - RNA, 19 nt, Homo sapiens
  misc_RNA (1)...(19): siRNA sense strand
ggaagcuggugcucaugcu

SEQ ID NO: 1735338 - RNA, 19 nt, Homo sapiens
  misc_RNA (1)...(19): siRNA sense strand
gcgaugagcuggagaugau

SEQ ID NO: 1735339 - RNA, 19 nt, Homo sapiens
  misc_RNA (1)...(19): siRNA sense strand
gcaagguggugucccugua

SEQ ID NO: 1735340 - RNA, 19 nt, Homo sapiens
  misc_RNA (1)...(19): siRNA sense strand
gcacaucucccugcagucu

SEQ ID NO: 1735341 - RNA, 19 nt, Homo sapiens
  misc_RNA (1)...(19): siRNA sense strand
gaucauggacgccuuugac

SEQ ID NO: 1735342 - RNA, 19 nt, Homo sapiens
  misc_RNA (1)...(19): siRNA sense strand
acaucucccugcagucuga

SEQ ID NO: 1735343 - RNA, 19 nt, Homo sapiens
  misc_RNA (1)...(19): siRNA sense strand
caagguggugucccuguau

SEQ ID NO: 1735344 - RNA, 19 nt, Homo sapiens
  misc_RNA (1)...(19): siRNA sense strand
cgagaucauggacgccuuu

SEQ ID NO: 1735345 - RNA, 19 nt, Homo sapiens
  misc_RNA (1)...(19): siRNA sense strand
cugauguccucaagugugu

SEQ ID NO: 1735346 - RNA, 19 nt, Homo sapiens
  misc_RNA (1)...(19): siRNA sense strand
aaagagagaugcagaacua

SEQ ID NO: 1735347 - RNA, 19 nt, Homo sapiens
  misc_RNA (1)...(19): siRNA sense strand
ggaagaggaucaaggagaa

SEQ ID NO: 1735348 - RNA, 19 nt, Homo sapiens
  misc_RNA (1)...(19): siRNA sense strand
gcacaaguuugaaauguca

SEQ ID NO: 1735349 - RNA, 19 nt, Homo sapiens
  misc_RNA (1)...(19): siRNA sense strand
ugucagaaauggauaauga

SEQ ID NO: 1735350 - RNA, 19 nt, Homo sapiens
  misc_RNA (1)...(19): siRNA sense strand
gaugauggcuucagcauac

SEQ ID NO: 1735351 - RNA, 19 nt, Homo sapiens
  misc_RNA (1)...(19): siRNA sense strand
gaaggcuacuugucagaaa

SEQ ID NO: 1735352 - RNA, 19 nt, Homo sapiens
  misc_RNA (1)...(19): siRNA sense strand
gcagcgagaugucuuggaa

SEQ ID NO: 1735353 - RNA, 19 nt, Homo sapiens
  misc_RNA (1)...(19): siRNA sense strand
ggacuuagaugaggaacug

SEQ ID NO: 1735354 - RNA, 19 nt, Homo sapiens
  misc_RNA (1)...(19): siRNA sense strand
gaacagauccagcaauucu

SEQ ID NO: 1735355 - RNA, 19 nt, Homo sapiens
  misc_RNA (1)...(19): siRNA sense strand
ggaggaagauggugucagu

SEQ ID NO: 1735356 - RNA, 19 nt, Homo sapiens
  misc_RNA (1)...(19): siRNA sense strand
aauaguagcuggaguuguu

SEQ ID NO: 1735357 - RNA, 19 nt, Homo sapiens
  misc_RNA (1)...(19): siRNA sense strand
uuacaaaugugaagacaga

SEQ ID NO: 1735358 - RNA, 19 nt, Homo sapiens
  misc_RNA (1)...(19): siRNA sense strand
gguggaaacuguugaagau

SEQ ID NO: 1735359 - RNA, 19 nt, Homo sapiens
  misc_RNA (1)...(19): siRNA sense strand
gaagaaucagggacuauuu

SEQ ID NO: 1735360 - RNA, 19 nt, Homo sapiens
  misc_RNA (1)...(19): siRNA sense strand
gaaagcauguugucuccau

SEQ ID NO: 1735361 - RNA, 19 nt, Homo sapiens
  misc_RNA (1)...(19): siRNA sense strand
uggaugagcuuugcaauga

SEQ ID NO: 1735362 - RNA, 19 nt, Homo sapiens
  misc_RNA (1)...(19): siRNA sense strand
gagaagugguggaaacugu

SEQ ID NO: 1735363 - RNA, 19 nt, Homo sapiens
  misc_RNA (1)...(19): siRNA sense strand
ggaaacuguugaagauguu

SEQ ID NO: 1735364 - RNA, 19 nt, Homo sapiens
  misc_RNA (1)...(19): siRNA sense strand
ggaagauggugucagugaa

SEQ ID NO: 1735365 - RNA, 19 nt, Homo sapiens
  misc_RNA (1)...(19): siRNA sense strand
ggaagcagcacugucauuu

SEQ ID NO: 1735366 - RNA, 19 nt, Homo sapiens
  misc_RNA (1)...(19): siRNA sense strand
ugaagcagauguugccauu

SEQ ID NO: 1735367 - RNA, 19 nt, Homo sapiens
  misc_RNA (1)...(19): siRNA sense strand
gcaaacaggaugcuucaga

SEQ ID NO: 1735368 - RNA, 19 nt, Homo sapiens
  misc_RNA (1)...(19): siRNA sense strand
gcagaggccuauggauuug

SEQ ID NO: 1735369 - RNA, 19 nt, Homo sapiens
  misc_RNA (1)...(19): siRNA sense strand
gauaaugaaccuccuguga

SEQ ID NO: 1735370 - RNA, 19 nt, Homo sapiens
  misc_RNA (1)...(19): siRNA sense strand
gaaaguguagcuccaguga

SEQ ID NO: 1735371 - RNA, 19 nt, Homo sapiens
  misc_RNA (1)...(19): siRNA sense strand
gugaagagcuggauuuuga

SEQ ID NO: 1735372 - RNA, 19 nt, Homo sapiens
  misc_RNA (1)...(19): siRNA sense strand
cagcauagaugggaaggaa

SEQ ID NO: 1735373 - RNA, 19 nt, Homo sapiens
  misc_RNA (1)...(19): siRNA sense strand
ggacagcagugaaauaucc

SEQ ID NO: 1735374 - RNA, 19 nt, Homo sapiens
  misc_RNA (1)...(19): siRNA sense strand
gagagaugcagaacuaauu

SEQ ID NO: 1735375 - RNA, 19 nt, Homo sapiens
  misc_RNA (1)...(19): siRNA sense strand
gaagaacuaaagaaaguga

SEQ ID NO: 1735376 - RNA, 19 nt, Homo sapiens
  misc_RNA (1)...(19): siRNA sense strand
gaauuucagcgugacauua

SEQ ID NO: 1735377 - RNA, 19 nt, Homo sapiens
  misc_RNA (1)...(19): siRNA sense strand
gcagugaaauauccaugau

SEQ ID NO: 1735378 - RNA, 19 nt, Homo sapiens
  misc_RNA (1)...(19): siRNA sense strand
gaaggaagaauuagaucug

SEQ ID NO: 1735379 - RNA, 19 nt, Homo sapiens
  misc_RNA (1)...(19): siRNA sense strand
cgagaugucuuggaacaga

SEQ ID NO: 1735380 - RNA, 19 nt, Homo sapiens
  misc_RNA (1)...(19): siRNA sense strand
aagagagacuggacuuuga

SEQ ID NO: 1735381 - RNA, 19 nt, Homo sapiens
  misc_RNA (1)...(19): siRNA sense strand
agacaucauugccaucauu

SEQ ID NO: 1735382 - RNA, 19 nt, Homo sapiens
  misc_RNA (1)...(19): siRNA sense strand
agacuccacuuacaaaugu

SEQ ID NO: 1735383 - RNA, 19 nt, Homo sapiens
  misc_RNA (1)...(19): siRNA sense strand
ucagaaugcuguaauguac

SEQ ID NO: 1735384 - RNA, 19 nt, Homo sapiens
  misc_RNA (1)...(19): siRNA sense strand
gaagaggaggcugaaguaa

SEQ ID NO: 1735385 - RNA, 19 nt, Homo sapiens
  misc_RNA (1)...(19): siRNA sense strand
agaggaggcugaaguaaag

SEQ ID NO: 1735386 - RNA, 19 nt, Homo sapiens
  misc_RNA (1)...(19): siRNA sense strand
gagagauucuacccgcaaa

SEQ ID NO: 1735387 - RNA, 19 nt, Homo sapiens
  misc_RNA (1)...(19): siRNA sense strand
uagaggagccuaaggaaga

SEQ ID NO: 1735388 - RNA, 19 nt, Homo sapiens
  misc_RNA (1)...(19): siRNA sense strand
aauuagaucuggcugagaa

SEQ ID NO: 1735389 - RNA, 19 nt, Homo sapiens
  misc_RNA (1)...(19): siRNA sense strand
ggaggugauuauccacuug

SEQ ID NO: 1735390 - RNA, 19 nt, Homo sapiens
  misc_RNA (1)...(19): siRNA sense strand
caagagagacuggacuuug

SEQ ID NO: 1735391 - RNA, 19 nt, Homo sapiens
  misc_RNA (1)...(19): siRNA sense strand
gaucaaaggcucccagcau

SEQ ID NO: 1735392 - RNA, 19 nt, Homo sapiens
  misc_RNA (1)...(19): siRNA sense strand
caugagaaguggcgaucaa

SEQ ID NO: 1735393 - RNA, 19 nt, Homo sapiens
  misc_RNA (1)...(19): siRNA sense strand
cagcacaaguuugaaaugu

SEQ ID NO: 1735394 - RNA, 19 nt, Homo sapiens
  misc_RNA (1)...(19): siRNA sense strand
cgaaauaguagcuggaguu

SEQ ID NO: 1735395 - RNA, 19 nt, Homo sapiens
  misc_RNA (1)...(19): siRNA sense strand
gaaccagagccagucauuu

SEQ ID NO: 1735396 - RNA, 19 nt, Homo sapiens
  misc_RNA (1)...(19): siRNA sense strand
gaaauaguagcuggaguug

SEQ ID NO: 1735397 - RNA, 19 nt, Homo sapiens
  misc_RNA (1)...(19): siRNA sense strand
ccgaagcacagcugaauuu

SEQ ID NO: 1735398 - RNA, 19 nt, Homo sapiens
  misc_RNA (1)...(19): siRNA sense strand
gaugagcuuugcaaugaca

SEQ ID NO: 1735399 - RNA, 19 nt, Homo sapiens
  misc_RNA (1)...(19): siRNA sense strand
gugcagaggccuauggauu

SEQ ID NO: 1735400 - RNA, 19 nt, Homo sapiens
  misc_RNA (1)...(19): siRNA sense strand
aaagaagaaucagggacua

SEQ ID NO: 1735401 - RNA, 19 nt, Homo sapiens
  misc_RNA (1)...(19): siRNA sense strand
cgagagaagcuauguuuag

SEQ ID NO: 1735402 - RNA, 19 nt, Homo sapiens
  misc_RNA (1)...(19): siRNA sense strand
gaugagacuccacuuacaa

SEQ ID NO: 1735403 - RNA, 19 nt, Homo sapiens
  misc_RNA (1)...(19): siRNA sense strand
agauauagacggcuaaaga

SEQ ID NO: 1735404 - RNA, 19 nt, Homo sapiens
  misc_RNA (1)...(19): siRNA sense strand
caaaauuggguaucaguua

SEQ ID NO: 1735405 - RNA, 19 nt, Homo sapiens
  misc_RNA (1)...(19): siRNA sense strand
ccuauggauuugucaacua

SEQ ID NO: 1735406 - RNA, 19 nt, Homo sapiens
  misc_RNA (1)...(19): siRNA sense strand
uaaggaagaggaucaagga

SEQ ID NO: 1735407 - RNA, 19 nt, Homo sapiens
  misc_RNA (1)...(19): siRNA sense strand
agacucagcacaaguuuga

SEQ ID NO: 1735408 - RNA, 19 nt, Homo sapiens
  misc_RNA (1)...(19): siRNA sense strand
gaugaggaacugggaagua

SEQ ID NO: 1735409 - RNA, 19 nt, Homo sapiens
  misc_RNA (1)...(19): siRNA sense strand
gguggaaccugcagaacca

SEQ ID NO: 1735410 - RNA, 19 nt, Homo sapiens
  misc_RNA (1)...(19): siRNA sense strand
gcauagaugggaaggaaga

SEQ ID NO: 1735411 - RNA, 19 nt, Homo sapiens
  misc_RNA (1)...(19): siRNA sense strand
ugaaauggcuguggcuucu

SEQ ID NO: 1735412 - RNA, 19 nt, Homo sapiens
  misc_RNA (1)...(19): siRNA sense strand
agacuggacuuugaggaaa

SEQ ID NO: 1735413 - RNA, 19 nt, Homo sapiens
  misc_RNA (1)...(19): siRNA sense strand
agugaaauauccaugauca

SEQ ID NO: 1735414 - RNA, 19 nt, Homo sapiens
  misc_RNA (1)...(19): siRNA sense strand
cauugaagauccuuuagag

SEQ ID NO: 1735415 - RNA, 19 nt, Homo sapiens
  misc_RNA (1)...(19): siRNA sense strand
aucaaaggcucccagcaua

SEQ ID NO: 1735416 - RNA, 19 nt, Homo sapiens
  misc_RNA (1)...(19): siRNA sense strand
uggaaacuguugaagaugu

SEQ ID NO: 1735417 - RNA, 19 nt, Homo sapiens
  misc_RNA (1)...(19): siRNA sense strand
gaagauggugucagugaag

SEQ ID NO: 1735418 - RNA, 19 nt, Homo sapiens
  misc_RNA (1)...(19): siRNA sense strand
gagacuggacuuugaggaa

SEQ ID NO: 1735419 - RNA, 19 nt, Homo sapiens
  misc_RNA (1)...(19): siRNA sense strand
gcaagagagacuggacuuu

SEQ ID NO: 1735420 - RNA, 19 nt, Homo sapiens
  misc_RNA (1)...(19): siRNA sense strand
gagguuacccacugugaug

SEQ ID NO: 1735421 - RNA, 19 nt, Homo sapiens
  misc_RNA (1)...(19): siRNA sense strand
gaggaaggcuacagaugcu

SEQ ID NO: 1735422 - RNA, 19 nt, Homo sapiens
  misc_RNA (1)...(19): siRNA sense strand
uaaagaggaaggcuacaga

SEQ ID NO: 1735423 - RNA, 19 nt, Homo sapiens
  misc_RNA (1)...(19): siRNA sense strand
agaagaggaggcugaagua

SEQ ID NO: 1735424 - RNA, 19 nt, Homo sapiens
  misc_RNA (1)...(19): siRNA sense strand
gaaacuguugaagauguua

SEQ ID NO: 1735425 - RNA, 19 nt, Homo sapiens
  misc_RNA (1)...(19): siRNA sense strand
gaagugguggaaacuguug

SEQ ID NO: 1735426 - RNA, 19 nt, Homo sapiens
  misc_RNA (1)...(19): siRNA sense strand
ccacgcaguugauuaugca

SEQ ID NO: 1735427 - RNA, 19 nt, Homo sapiens
  misc_RNA (1)...(19): siRNA sense strand
gagacuccacuuacaaaug

SEQ ID NO: 1735428 - RNA, 19 nt, Homo sapiens
  misc_RNA (1)...(19): siRNA sense strand
aagcagauguugccauugg

SEQ ID NO: 1735429 - RNA, 19 nt, Homo sapiens
  misc_RNA (1)...(19): siRNA sense strand
uucaggagccgaaauagua

SEQ ID NO: 1735430 - RNA, 19 nt, Homo sapiens
  misc_RNA (1)...(19): siRNA sense strand
ggauauugcugugucuuac

SEQ ID NO: 1735431 - RNA, 19 nt, Homo sapiens
  misc_RNA (1)...(19): siRNA sense strand
gaaacccaggagagauaua

SEQ ID NO: 1735432 - RNA, 19 nt, Homo sapiens
  misc_RNA (1)...(19): siRNA sense strand
ggaagaagaggaggcugaa

SEQ ID NO: 1735433 - RNA, 19 nt, Homo sapiens
  misc_RNA (1)...(19): siRNA sense strand
cuauggauuugucaacuau

SEQ ID NO: 1735434 - RNA, 19 nt, Homo sapiens
  misc_RNA (1)...(19): siRNA sense strand
cgaugagacuccacuuaca

SEQ ID NO: 1735435 - RNA, 19 nt, Homo sapiens
  misc_RNA (1)...(19): siRNA sense strand
ggauguggcagcaguggaa

SEQ ID NO: 1735436 - RNA, 19 nt, Homo sapiens
  misc_RNA (1)...(19): siRNA sense strand
caaaggcucccagcauaga

SEQ ID NO: 1735437 - RNA, 19 nt, Homo sapiens
  misc_RNA (1)...(19): siRNA sense strand
aaacaagggaauacaugaa

SEQ ID NO: 1735438 - RNA, 19 nt, Homo sapiens
  misc_RNA (1)...(19): siRNA sense strand
ggagacaucauugccauca

SEQ ID NO: 1735439 - RNA, 19 nt, Homo sapiens
  misc_RNA (1)...(19): siRNA sense strand
gauauagacggcuaaagag

SEQ ID NO: 1735440 - RNA, 19 nt, Homo sapiens
  misc_RNA (1)...(19): siRNA sense strand
gcacagaaaauuuggaaga

SEQ ID NO: 1735441 - RNA, 19 nt, Homo sapiens
  misc_RNA (1)...(19): siRNA sense strand
caucauugaggacaaggua

SEQ ID NO: 1735442 - RNA, 19 nt, Homo sapiens
  misc_RNA (1)...(19): siRNA sense strand
aaacggaaacgaggugaaa

SEQ ID NO: 1735443 - RNA, 19 nt, Homo sapiens
  misc_RNA (1)...(19): siRNA sense strand
cagcaaacacccaauacug

SEQ ID NO: 1735444 - RNA, 19 nt, Homo sapiens
  misc_RNA (1)...(19): siRNA sense strand
aauucaagcuggacacaug

SEQ ID NO: 1735445 - RNA, 19 nt, Homo sapiens
  misc_RNA (1)...(19): siRNA sense strand
uacugcagcuggagagauu

SEQ ID NO: 1735446 - RNA, 19 nt, Homo sapiens
  misc_RNA (1)...(19): siRNA sense strand
aaagagagaugcagaacua

SEQ ID NO: 1735447 - RNA, 19 nt, Homo sapiens
  misc_RNA (1)...(19): siRNA sense strand
ggaagaggaucaaggagaa

SEQ ID NO: 1735448 - RNA, 19 nt, Homo sapiens
  misc_RNA (1)...(19): siRNA sense strand
gcacaaguuugaaauguca

SEQ ID NO: 1735449 - RNA, 19 nt, Homo sapiens
  misc_RNA (1)...(19): siRNA sense strand
ugucagaaauggauaauga

SEQ ID NO: 1735450 - RNA, 19 nt, Homo sapiens
  misc_RNA (1)...(19): siRNA sense strand
gaugauggcuucagcauac

SEQ ID NO: 1735451 - RNA, 19 nt, Homo sapiens
  misc_RNA (1)...(19): siRNA sense strand
gaaggcuacuugucagaaa

SEQ ID NO: 1735452 - RNA, 19 nt, Homo sapiens
  misc_RNA (1)...(19): siRNA sense strand
gcagcgagaugucuuggaa

SEQ ID NO: 1735453 - RNA, 19 nt, Homo sapiens
  misc_RNA (1)...(19): siRNA sense strand
ggacuuagaugaggaacug

SEQ ID NO: 1735454 - RNA, 19 nt, Homo sapiens
  misc_RNA (1)...(19): siRNA sense strand
gaacagauccagcaauucu

SEQ ID NO: 1735455 - RNA, 19 nt, Homo sapiens
  misc_RNA (1)...(19): siRNA sense strand
ggaggaagauggugucagu

SEQ ID NO: 1735456 - RNA, 19 nt, Homo sapiens
  misc_RNA (1)...(19): siRNA sense strand
aauaguagcuggaguuguu

SEQ ID NO: 1735457 - RNA, 19 nt, Homo sapiens
  misc_RNA (1)...(19): siRNA sense strand
uuacaaaugugaagacaga

SEQ ID NO: 1735458 - RNA, 19 nt, Homo sapiens
  misc_RNA (1)...(19): siRNA sense strand
gguggaaacuguugaagau

SEQ ID NO: 1735459 - RNA, 19 nt, Homo sapiens
  misc_RNA (1)...(19): siRNA sense strand
gaagaaucagggacuauuu

SEQ ID NO: 1735460 - RNA, 19 nt, Homo sapiens
  misc_RNA (1)...(19): siRNA sense strand
gaaagcauguugucuccau

SEQ ID NO: 1735461 - RNA, 19 nt, Homo sapiens
  misc_RNA (1)...(19): siRNA sense strand
uggaugagcuuugcaauga

SEQ ID NO: 1735462 - RNA, 19 nt, Homo sapiens
  misc_RNA (1)...(19): siRNA sense strand
gagaagugguggaaacugu

SEQ ID NO: 1735463 - RNA, 19 nt, Homo sapiens
  misc_RNA (1)...(19): siRNA sense strand
ggaaacuguugaagauguu

SEQ ID NO: 1735464 - RNA, 19 nt, Homo sapiens
  misc_RNA (1)...(19): siRNA sense strand
ggaagauggugucagugaa

SEQ ID NO: 1735465 - RNA, 19 nt, Homo sapiens
  misc_RNA (1)...(19): siRNA sense strand
ggaagcagcacugucauuu

SEQ ID NO: 1735466 - RNA, 19 nt, Homo sapiens
  misc_RNA (1)...(19): siRNA sense strand
ugaagcagauguugccauu

SEQ ID NO: 1735467 - RNA, 19 nt, Homo sapiens
  misc_RNA (1)...(19): siRNA sense strand
gcaaacaggaugcuucaga

SEQ ID NO: 1735468 - RNA, 19 nt, Homo sapiens
  misc_RNA (1)...(19): siRNA sense strand
gcagaggccuauggauuug

SEQ ID NO: 1735469 - RNA, 19 nt, Homo sapiens
  misc_RNA (1)...(19): siRNA sense strand
gauaaugaaccuccuguga

SEQ ID NO: 1735470 - RNA, 19 nt, Homo sapiens
  misc_RNA (1)...(19): siRNA sense strand
gaaaguguagcuccaguga

SEQ ID NO: 1735471 - RNA, 19 nt, Homo sapiens
  misc_RNA (1)...(19): siRNA sense strand
gugaagagcuggauuuuga

SEQ ID NO: 1735472 - RNA, 19 nt, Homo sapiens
  misc_RNA (1)...(19): siRNA sense strand
cagcauagaugggaaggaa

SEQ ID NO: 1735473 - RNA, 19 nt, Homo sapiens
  misc_RNA (1)...(19): siRNA sense strand
ggacagcagugaaauaucc

SEQ ID NO: 1735474 - RNA, 19 nt, Homo sapiens
  misc_RNA (1)...(19): siRNA sense strand
gagagaugcagaacuaauu

SEQ ID NO: 1735475 - RNA, 19 nt, Homo sapiens
  misc_RNA (1)...(19): siRNA sense strand
gaagaacuaaagaaaguga

SEQ ID NO: 1735476 - RNA, 19 nt, Homo sapiens
  misc_RNA (1)...(19): siRNA sense strand
gaauuucagcgugacauua

SEQ ID NO: 1735477 - RNA, 19 nt, Homo sapiens
  misc_RNA (1)...(19): siRNA sense strand
gcagugaaauauccaugau

SEQ ID NO: 1735478 - RNA, 19 nt, Homo sapiens
  misc_RNA (1)...(19): siRNA sense strand
gaaggaagaauuagaucug

SEQ ID NO: 1735479 - RNA, 19 nt, Homo sapiens
  misc_RNA (1)...(19): siRNA sense strand
cgagaugucuuggaacaga

SEQ ID NO: 1735480 - RNA, 19 nt, Homo sapiens
  misc_RNA (1)...(19): siRNA sense strand
aagagagacuggacuuuga

SEQ ID NO: 1735481 - RNA, 19 nt, Homo sapiens
  misc_RNA (1)...(19): siRNA sense strand
agacaucauugccaucauu

SEQ ID NO: 1735482 - RNA, 19 nt, Homo sapiens
  misc_RNA (1)...(19): siRNA sense strand
agacuccacuuacaaaugu

SEQ ID NO: 1735483 - RNA, 19 nt, Homo sapiens
  misc_RNA (1)...(19): siRNA sense strand
ucagaaugcuguaauguac

SEQ ID NO: 1735484 - RNA, 19 nt, Homo sapiens
  misc_RNA (1)...(19): siRNA sense strand
gaagaggaggcugaaguaa

SEQ ID NO: 1735485 - RNA, 19 nt, Homo sapiens
  misc_RNA (1)...(19): siRNA sense strand
agaggaggcugaaguaaag

SEQ ID NO: 1735486 - RNA, 19 nt, Homo sapiens
  misc_RNA (1)...(19): siRNA sense strand
gagagauucuacccgcaaa

SEQ ID NO: 1735487 - RNA, 19 nt, Homo sapiens
  misc_RNA (1)...(19): siRNA sense strand
uagaggagccuaaggaaga

SEQ ID NO: 1735488 - RNA, 19 nt, Homo sapiens
  misc_RNA (1)...(19): siRNA sense strand
aauuagaucuggcugagaa

SEQ ID NO: 1735489 - RNA, 19 nt, Homo sapiens
  misc_RNA (1)...(19): siRNA sense strand
ggaggugauuauccacuug

SEQ ID NO: 1735490 - RNA, 19 nt, Homo sapiens
  misc_RNA (1)...(19): siRNA sense strand
caagagagacuggacuuug

SEQ ID NO: 1735491 - RNA, 19 nt, Homo sapiens
  misc_RNA (1)...(19): siRNA sense strand
gaucaaaggcucccagcau

SEQ ID NO: 1735492 - RNA, 19 nt, Homo sapiens
  misc_RNA (1)...(19): siRNA sense strand
caugagaaguggcgaucaa

SEQ ID NO: 1735493 - RNA, 19 nt, Homo sapiens
  misc_RNA (1)...(19): siRNA sense strand
cagcacaaguuugaaaugu

SEQ ID NO: 1735494 - RNA, 19 nt, Homo sapiens
  misc_RNA (1)...(19): siRNA sense strand
cgaaauaguagcuggaguu

SEQ ID NO: 1735495 - RNA, 19 nt, Homo sapiens
  misc_RNA (1)...(19): siRNA sense strand
gaaccagagccagucauuu

SEQ ID NO: 1735496 - RNA, 19 nt, Homo sapiens
  misc_RNA (1)...(19): siRNA sense strand
gaaauaguagcuggaguug

SEQ ID NO: 1735497 - RNA, 19 nt, Homo sapiens
  misc_RNA (1)...(19): siRNA sense strand
ccgaagcacagcugaauuu

SEQ ID NO: 1735498 - RNA, 19 nt, Homo sapiens
  misc_RNA (1)...(19): siRNA sense strand
gaugagcuuugcaaugaca

SEQ ID NO: 1735499 - RNA, 19 nt, Homo sapiens
  misc_RNA (1)...(19): siRNA sense strand
gugcagaggccuauggauu

SEQ ID NO: 1735500 - RNA, 19 nt, Homo sapiens
  misc_RNA (1)...(19): siRNA sense strand
aaagaagaaucagggacua

SEQ ID NO: 1735501 - RNA, 19 nt, Homo sapiens
  misc_RNA (1)...(19): siRNA sense strand
cgagagaagcuauguuuag

SEQ ID NO: 1735502 - RNA, 19 nt, Homo sapiens
  misc_RNA (1)...(19): siRNA sense strand
gaugagacuccacuuacaa

SEQ ID NO: 1735503 - RNA, 19 nt, Homo sapiens
  misc_RNA (1)...(19): siRNA sense strand
agauauagacggcuaaaga

SEQ ID NO: 1735504 - RNA, 19 nt, Homo sapiens
  misc_RNA (1)...(19): siRNA sense strand
caaaauuggguaucaguua

SEQ ID NO: 1735505 - RNA, 19 nt, Homo sapiens
  misc_RNA (1)...(19): siRNA sense strand
ccuauggauuugucaacua

SEQ ID NO: 1735506 - RNA, 19 nt, Homo sapiens
  misc_RNA (1)...(19): siRNA sense strand
uaaggaagaggaucaagga

SEQ ID NO: 1735507 - RNA, 19 nt, Homo sapiens
  misc_RNA (1)...(19): siRNA sense strand
agacucagcacaaguuuga

SEQ ID NO: 1735508 - RNA, 19 nt, Homo sapiens
  misc_RNA (1)...(19): siRNA sense strand
gaugaggaacugggaagua

SEQ ID NO: 1735509 - RNA, 19 nt, Homo sapiens
  misc_RNA (1)...(19): siRNA sense strand
gguggaaccugcagaacca

SEQ ID NO: 1735510 - RNA, 19 nt, Homo sapiens
  misc_RNA (1)...(19): siRNA sense strand
gcauagaugggaaggaaga

SEQ ID NO: 1735511 - RNA, 19 nt, Homo sapiens
  misc_RNA (1)...(19): siRNA sense strand
ugaaauggcuguggcuucu

SEQ ID NO: 1735512 - RNA, 19 nt, Homo sapiens
  misc_RNA (1)...(19): siRNA sense strand
agacuggacuuugaggaaa

SEQ ID NO: 1735513 - RNA, 19 nt, Homo sapiens
  misc_RNA (1)...(19): siRNA sense strand
agugaaauauccaugauca

SEQ ID NO: 1735514 - RNA, 19 nt, Homo sapiens
  misc_RNA (1)...(19): siRNA sense strand
cauugaagauccuuuagag

SEQ ID NO: 1735515 - RNA, 19 nt, Homo sapiens
  misc_RNA (1)...(19): siRNA sense strand
aucaaaggcucccagcaua

SEQ ID NO: 1735516 - RNA, 19 nt, Homo sapiens
  misc_RNA (1)...(19): siRNA sense strand
uggaaacuguugaagaugu

SEQ ID NO: 1735517 - RNA, 19 nt, Homo sapiens
  misc_RNA (1)...(19): siRNA sense strand
gaagauggugucagugaag

SEQ ID NO: 1735518 - RNA, 19 nt, Homo sapiens
  misc_RNA (1)...(19): siRNA sense strand
gagacuggacuuugaggaa

SEQ ID NO: 1735519 - RNA, 19 nt, Homo sapiens
  misc_RNA (1)...(19): siRNA sense strand
gcaagagagacuggacuuu

SEQ ID NO: 1735520 - RNA, 19 nt, Homo sapiens
  misc_RNA (1)...(19): siRNA sense strand
gagguuacccacugugaug

SEQ ID NO: 1735521 - RNA, 19 nt, Homo sapiens
  misc_RNA (1)...(19): siRNA sense strand
gaggaaggcuacagaugcu

SEQ ID NO: 1735522 - RNA, 19 nt, Homo sapiens
  misc_RNA (1)...(19): siRNA sense strand
uaaagaggaaggcuacaga

SEQ ID NO: 1735523 - RNA, 19 nt, Homo sapiens
  misc_RNA (1)...(19): siRNA sense strand
agaagaggaggcugaagua

SEQ ID NO: 1735524 - RNA, 19 nt, Homo sapiens
  misc_RNA (1)...(19): siRNA sense strand
gaaacuguugaagauguua

SEQ ID NO: 1735525 - RNA, 19 nt, Homo sapiens
  misc_RNA (1)...(19): siRNA sense strand
gaagugguggaaacuguug

SEQ ID NO: 1735526 - RNA, 19 nt, Homo sapiens
  misc_RNA (1)...(19): siRNA sense strand
ccacgcaguugauuaugca

SEQ ID NO: 1735527 - RNA, 19 nt, Homo sapiens
  misc_RNA (1)...(19): siRNA sense strand
gagacuccacuuacaaaug

SEQ ID NO: 1735528 - RNA, 19 nt, Homo sapiens
  misc_RNA (1)...(19): siRNA sense strand
aagcagauguugccauugg

SEQ ID NO: 1735529 - RNA, 19 nt, Homo sapiens
  misc_RNA (1)...(19): siRNA sense strand
uucaggagccgaaauagua

SEQ ID NO: 1735530 - RNA, 19 nt, Homo sapiens
  misc_RNA (1)...(19): siRNA sense strand
ggauauugcugugucuuac

SEQ ID NO: 1735531 - RNA, 19 nt, Homo sapiens
  misc_RNA (1)...(19): siRNA sense strand
gaaacccaggagagauaua

SEQ ID NO: 1735532 - RNA, 19 nt, Homo sapiens
  misc_RNA (1)...(19): siRNA sense strand
ggaagaagaggaggcugaa

SEQ ID NO: 1735533 - RNA, 19 nt, Homo sapiens
  misc_RNA (1)...(19): siRNA sense strand
cuauggauuugucaacuau

SEQ ID NO: 1735534 - RNA, 19 nt, Homo sapiens
  misc_RNA (1)...(19): siRNA sense strand
cgaugagacuccacuuaca

SEQ ID NO: 1735535 - RNA, 19 nt, Homo sapiens
  misc_RNA (1)...(19): siRNA sense strand
ggauguggcagcaguggaa

SEQ ID NO: 1735536 - RNA, 19 nt, Homo sapiens
  misc_RNA (1)...(19): siRNA sense strand
caaaggcucccagcauaga

SEQ ID NO: 1735537 - RNA, 19 nt, Homo sapiens
  misc_RNA (1)...(19): siRNA sense strand
aaacaagggaauacaugaa

SEQ ID NO: 1735538 - RNA, 19 nt, Homo sapiens
  misc_RNA (1)...(19): siRNA sense strand
ggagacaucauugccauca

SEQ ID NO: 1735539 - RNA, 19 nt, Homo sapiens
  misc_RNA (1)...(19): siRNA sense strand
gauauagacggcuaaagag

SEQ ID NO: 1735540 - RNA, 19 nt, Homo sapiens
  misc_RNA (1)...(19): siRNA sense strand
gcacagaaaauuuggaaga

SEQ ID NO: 1735541 - RNA, 19 nt, Homo sapiens
  misc_RNA (1)...(19): siRNA sense strand
caucauugaggacaaggua

SEQ ID NO: 1735542 - RNA, 19 nt, Homo sapiens
  misc_RNA (1)...(19): siRNA sense strand
aaacggaaacgaggugaaa

SEQ ID NO: 1735543 - RNA, 19 nt, Homo sapiens
  misc_RNA (1)...(19): siRNA sense strand
cagcaaacacccaauacug

SEQ ID NO: 1735544 - RNA, 19 nt, Homo sapiens
  misc_RNA (1)...(19): siRNA sense strand
aauucaagcuggacacaug

SEQ ID NO: 1735545 - RNA, 19 nt, Homo sapiens
  misc_RNA (1)...(19): siRNA sense strand
uacugcagcuggagagauu

SEQ ID NO: 1735546 - RNA, 19 nt, Homo sapiens
  misc_RNA (1)...(19): siRNA sense strand
ggaagaggaucaaggagaa

SEQ ID NO: 1735547 - RNA, 19 nt, Homo sapiens
  misc_RNA (1)...(19): siRNA sense strand
gcacaaguuugaaauguca

SEQ ID NO: 1735548 - RNA, 19 nt, Homo sapiens
  misc_RNA (1)...(19): siRNA sense strand
ugucagaaauggauaauga

SEQ ID NO: 1735549 - RNA, 19 nt, Homo sapiens
  misc_RNA (1)...(19): siRNA sense strand
gaugauggcuucagcauac

SEQ ID NO: 1735550 - RNA, 19 nt, Homo sapiens
  misc_RNA (1)...(19): siRNA sense strand
gaaggcuacuugucagaaa

SEQ ID NO: 1735551 - RNA, 19 nt, Homo sapiens
  misc_RNA (1)...(19): siRNA sense strand
gcagcgagaugucuuggaa

SEQ ID NO: 1735552 - RNA, 19 nt, Homo sapiens
  misc_RNA (1)...(19): siRNA sense strand
ggacuuagaugaggaacug

SEQ ID NO: 1735553 - RNA, 19 nt, Homo sapiens
  misc_RNA (1)...(19): siRNA sense strand
gaacagauccagcaauucu

SEQ ID NO: 1735554 - RNA, 19 nt, Homo sapiens
  misc_RNA (1)...(19): siRNA sense strand
ggaggaagauggugucagu

SEQ ID NO: 1735555 - RNA, 19 nt, Homo sapiens
  misc_RNA (1)...(19): siRNA sense strand
aauaguagcuggaguuguu

SEQ ID NO: 1735556 - RNA, 19 nt, Homo sapiens
  misc_RNA (1)...(19): siRNA sense strand
uuacaaaugugaagacaga

SEQ ID NO: 1735557 - RNA, 19 nt, Homo sapiens
  misc_RNA (1)...(19): siRNA sense strand
gaaagcauguugucuccau

SEQ ID NO: 1735558 - RNA, 19 nt, Homo sapiens
  misc_RNA (1)...(19): siRNA sense strand
gaagaaucagggacuauuu

SEQ ID NO: 1735559 - RNA, 19 nt, Homo sapiens
  misc_RNA (1)...(19): siRNA sense strand
ggaagcagcacugucauuu

SEQ ID NO: 1735560 - RNA, 19 nt, Homo sapiens
  misc_RNA (1)...(19): siRNA sense strand
ggaagauggugucagugaa

SEQ ID NO: 1735561 - RNA, 19 nt, Homo sapiens
  misc_RNA (1)...(19): siRNA sense strand
ugaagcagauguugccauu

SEQ ID NO: 1735562 - RNA, 19 nt, Homo sapiens
  misc_RNA (1)...(19): siRNA sense strand
gcaaacaggaugcuucaga

SEQ ID NO: 1735563 - RNA, 19 nt, Homo sapiens
  misc_RNA (1)...(19): siRNA sense strand
gcagaggccuauggauuug

SEQ ID NO: 1735564 - RNA, 19 nt, Homo sapiens
  misc_RNA (1)...(19): siRNA sense strand
gauaaugaaccuccuguga

SEQ ID NO: 1735565 - RNA, 19 nt, Homo sapiens
  misc_RNA (1)...(19): siRNA sense strand
gaaaguguagcuccaguga

SEQ ID NO: 1735566 - RNA, 19 nt, Homo sapiens
  misc_RNA (1)...(19): siRNA sense strand
gugaagagcuggauuuuga

SEQ ID NO: 1735567 - RNA, 19 nt, Homo sapiens
  misc_RNA (1)...(19): siRNA sense strand
cagcauagaugggaaggaa

SEQ ID NO: 1735568 - RNA, 19 nt, Homo sapiens
  misc_RNA (1)...(19): siRNA sense strand
ggacagcagugaaauaucc

SEQ ID NO: 1735569 - RNA, 19 nt, Homo sapiens
  misc_RNA (1)...(19): siRNA sense strand
gcagugaaauauccaugau

SEQ ID NO: 1735570 - RNA, 19 nt, Homo sapiens
  misc_RNA (1)...(19): siRNA sense strand
gaauuucagcgugacauua

SEQ ID NO: 1735571 - RNA, 19 nt, Homo sapiens
  misc_RNA (1)...(19): siRNA sense strand
gaaggaagaauuagaucug

SEQ ID NO: 1735572 - RNA, 19 nt, Homo sapiens
  misc_RNA (1)...(19): siRNA sense strand
cgagaugucuuggaacaga

SEQ ID NO: 1735573 - RNA, 19 nt, Homo sapiens
  misc_RNA (1)...(19): siRNA sense strand
aagagagacuggacuuuga

SEQ ID NO: 1735574 - RNA, 19 nt, Homo sapiens
  misc_RNA (1)...(19): siRNA sense strand
agacaucauugccaucauu

SEQ ID NO: 1735575 - RNA, 19 nt, Homo sapiens
  misc_RNA (1)...(19): siRNA sense strand
agacuccacuuacaaaugu

SEQ ID NO: 1735576 - RNA, 19 nt, Homo sapiens
  misc_RNA (1)...(19): siRNA sense strand
ucagaaugcuguaauguac

SEQ ID NO: 1735577 - RNA, 19 nt, Homo sapiens
  misc_RNA (1)...(19): siRNA sense strand
gaagaggaggcugaaguaa

SEQ ID NO: 1735578 - RNA, 19 nt, Homo sapiens
  misc_RNA (1)...(19): siRNA sense strand
ggaggugauuauccacuug

SEQ ID NO: 1735579 - RNA, 19 nt, Homo sapiens
  misc_RNA (1)...(19): siRNA sense strand
gagagauucuacccgcaaa

SEQ ID NO: 1735580 - RNA, 19 nt, Homo sapiens
  misc_RNA (1)...(19): siRNA sense strand
uagaggagccuaaggaaga

SEQ ID NO: 1735581 - RNA, 19 nt, Homo sapiens
  misc_RNA (1)...(19): siRNA sense strand
agaggaggcugaaguaaag

SEQ ID NO: 1735582 - RNA, 19 nt, Homo sapiens
  misc_RNA (1)...(19): siRNA sense strand
aauuagaucuggcugagaa

SEQ ID NO: 1735583 - RNA, 19 nt, Homo sapiens
  misc_RNA (1)...(19): siRNA sense strand
caagagagacuggacuuug

SEQ ID NO: 1735584 - RNA, 19 nt, Homo sapiens
  misc_RNA (1)...(19): siRNA sense strand
gaucaaaggcucccagcau

SEQ ID NO: 1735585 - RNA, 19 nt, Homo sapiens
  misc_RNA (1)...(19): siRNA sense strand
cagcacaaguuugaaaugu

SEQ ID NO: 1735586 - RNA, 19 nt, Homo sapiens
  misc_RNA (1)...(19): siRNA sense strand
cgaaauaguagcuggaguu

SEQ ID NO: 1735587 - RNA, 19 nt, Homo sapiens
  misc_RNA (1)...(19): siRNA sense strand
gaaccagagccagucauuu

SEQ ID NO: 1735588 - RNA, 19 nt, Homo sapiens
  misc_RNA (1)...(19): siRNA sense strand
gaaauaguagcuggaguug

SEQ ID NO: 1735589 - RNA, 19 nt, Homo sapiens
  misc_RNA (1)...(19): siRNA sense strand
ccgaagcacagcugaauuu

SEQ ID NO: 1735590 - RNA, 19 nt, Homo sapiens
  misc_RNA (1)...(19): siRNA sense strand
aaagaagaaucagggacua

SEQ ID NO: 1735591 - RNA, 19 nt, Homo sapiens
  misc_RNA (1)...(19): siRNA sense strand
gugcagaggccuauggauu

SEQ ID NO: 1735592 - RNA, 19 nt, Homo sapiens
  misc_RNA (1)...(19): siRNA sense strand
gaugagacuccacuuacaa

SEQ ID NO: 1735593 - RNA, 19 nt, Homo sapiens
  misc_RNA (1)...(19): siRNA sense strand
gcauagaugggaaggaaga

SEQ ID NO: 1735594 - RNA, 19 nt, Homo sapiens
  misc_RNA (1)...(19): siRNA sense strand
ccuauggauuugucaacua

SEQ ID NO: 1735595 - RNA, 19 nt, Homo sapiens
  misc_RNA (1)...(19): siRNA sense strand
uaaggaagaggaucaagga

SEQ ID NO: 1735596 - RNA, 19 nt, Homo sapiens
  misc_RNA (1)...(19): siRNA sense strand
agacucagcacaaguuuga

SEQ ID NO: 1735597 - RNA, 19 nt, Homo sapiens
  misc_RNA (1)...(19): siRNA sense strand
gaugaggaacugggaagua

SEQ ID NO: 1735598 - RNA, 19 nt, Homo sapiens
  misc_RNA (1)...(19): siRNA sense strand
gguggaaccugcagaacca

SEQ ID NO: 1735599 - RNA, 19 nt, Homo sapiens
  misc_RNA (1)...(19): siRNA sense strand
ugaaauggcuguggcuucu

SEQ ID NO: 1735600 - RNA, 19 nt, Homo sapiens
  misc_RNA (1)...(19): siRNA sense strand
agacuggacuuugaggaaa

SEQ ID NO: 1735601 - RNA, 19 nt, Homo sapiens
  misc_RNA (1)...(19): siRNA sense strand
agugaaauauccaugauca

SEQ ID NO: 1735602 - RNA, 19 nt, Homo sapiens
  misc_RNA (1)...(19): siRNA sense strand
cauugaagauccuuuagag

SEQ ID NO: 1735603 - RNA, 19 nt, Homo sapiens
  misc_RNA (1)...(19): siRNA sense strand
aucaaaggcucccagcaua

SEQ ID NO: 1735604 - RNA, 19 nt, Homo sapiens
  misc_RNA (1)...(19): siRNA sense strand
gagguuacccacugugaug

SEQ ID NO: 1735605 - RNA, 19 nt, Homo sapiens
  misc_RNA (1)...(19): siRNA sense strand
agaagaggaggcugaagua

SEQ ID NO: 1735606 - RNA, 19 nt, Homo sapiens
  misc_RNA (1)...(19): siRNA sense strand
gaggaaggcuacagaugcu

SEQ ID NO: 1735607 - RNA, 19 nt, Homo sapiens
  misc_RNA (1)...(19): siRNA sense strand
gaagauggugucagugaag

SEQ ID NO: 1735608 - RNA, 19 nt, Homo sapiens
  misc_RNA (1)...(19): siRNA sense strand
uaaagaggaaggcuacaga

SEQ ID NO: 1735609 - RNA, 19 nt, Homo sapiens
  misc_RNA (1)...(19): siRNA sense strand
gagacuggacuuugaggaa

SEQ ID NO: 1735610 - RNA, 19 nt, Homo sapiens
  misc_RNA (1)...(19): siRNA sense strand
gcaagagagacuggacuuu

SEQ ID NO: 1735611 - RNA, 19 nt, Homo sapiens
  misc_RNA (1)...(19): siRNA sense strand
ggauauugcugugucuuac

SEQ ID NO: 1735612 - RNA, 19 nt, Homo sapiens
  misc_RNA (1)...(19): siRNA sense strand
ccacgcaguugauuaugca

SEQ ID NO: 1735613 - RNA, 19 nt, Homo sapiens
  misc_RNA (1)...(19): siRNA sense strand
gagacuccacuuacaaaug

SEQ ID NO: 1735614 - RNA, 19 nt, Homo sapiens
  misc_RNA (1)...(19): siRNA sense strand
aagcagauguugccauugg

SEQ ID NO: 1735615 - RNA, 19 nt, Homo sapiens
  misc_RNA (1)...(19): siRNA sense strand
uucaggagccgaaauagua

SEQ ID NO: 1735616 - RNA, 19 nt, Homo sapiens
  misc_RNA (1)...(19): siRNA sense strand
ggauguggcagcaguggaa

SEQ ID NO: 1735617 - RNA, 19 nt, Homo sapiens
  misc_RNA (1)...(19): siRNA sense strand
cuauggauuugucaacuau

SEQ ID NO: 1735618 - RNA, 19 nt, Homo sapiens
  misc_RNA (1)...(19): siRNA sense strand
ggaagaagaggaggcugaa

SEQ ID NO: 1735619 - RNA, 19 nt, Homo sapiens
  misc_RNA (1)...(19): siRNA sense strand
cgaugagacuccacuuaca

SEQ ID NO: 1735620 - RNA, 19 nt, Homo sapiens
  misc_RNA (1)...(19): siRNA sense strand
caaaggcucccagcauaga

SEQ ID NO: 1735621 - RNA, 19 nt, Homo sapiens
  misc_RNA (1)...(19): siRNA sense strand
aaacaagggaauacaugaa

SEQ ID NO: 1735622 - RNA, 19 nt, Homo sapiens
  misc_RNA (1)...(19): siRNA sense strand
ggagacaucauugccauca

SEQ ID NO: 1735623 - RNA, 19 nt, Homo sapiens
  misc_RNA (1)...(19): siRNA sense strand
cagcaaacacccaauacug

SEQ ID NO: 1735624 - RNA, 19 nt, Homo sapiens
  misc_RNA (1)...(19): siRNA sense strand
gcacagaaaauuuggaaga

SEQ ID NO: 1735625 - RNA, 19 nt, Homo sapiens
  misc_RNA (1)...(19): siRNA sense strand
caucauugaggacaaggua

SEQ ID NO: 1735626 - RNA, 19 nt, Homo sapiens
  misc_RNA (1)...(19): siRNA sense strand
ugaaauauccaugaucauc

SEQ ID NO: 1735627 - RNA, 19 nt, Homo sapiens
  misc_RNA (1)...(19): siRNA sense strand
uacugcagcuggagagauu

SEQ ID NO: 1735628 - RNA, 19 nt, Homo sapiens
  misc_RNA (1)...(19): siRNA sense strand
gcugagaagauggauauug

SEQ ID NO: 1735629 - RNA, 19 nt, Homo sapiens
  misc_RNA (1)...(19): siRNA sense strand
ggaaggaagaauuagaucu

SEQ ID NO: 1735630 - RNA, 19 nt, Homo sapiens
  misc_RNA (1)...(19): siRNA sense strand
caagcuaccauugucauga

SEQ ID NO: 1735631 - RNA, 19 nt, Homo sapiens
  misc_RNA (1)...(19): siRNA sense strand
aagaggaggcugaaguaaa

SEQ ID NO: 1735632 - RNA, 19 nt, Homo sapiens
  misc_RNA (1)...(19): siRNA sense strand
ggaagaaagccaucaugcu

SEQ ID NO: 1735633 - RNA, 19 nt, Homo sapiens
  misc_RNA (1)...(19): siRNA sense strand
ggcgaugagacuccacuua

SEQ ID NO: 1735634 - RNA, 19 nt, Homo sapiens
  misc_RNA (1)...(19): siRNA sense strand
uacaugaacugguggacau

SEQ ID NO: 1735635 - RNA, 19 nt, Homo sapiens
  misc_RNA (1)...(19): siRNA sense strand
gaaaacaagggaauacaug

SEQ ID NO: 1735636 - RNA, 19 nt, Homo sapiens
  misc_RNA (1)...(19): siRNA sense strand
ggacaagguagaugaucau

SEQ ID NO: 1735637 - RNA, 19 nt, Homo sapiens
  misc_RNA (1)...(19): siRNA sense strand
aaguguagcuccagugagu

SEQ ID NO: 1735638 - RNA, 19 nt, Homo sapiens
  misc_RNA (1)...(19): siRNA sense strand
auacagcaaacacccaaua

SEQ ID NO: 1735639 - RNA, 19 nt, Homo sapiens
  misc_RNA (1)...(19): siRNA sense strand
ugcagaggccuauggauuu

SEQ ID NO: 1735640 - RNA, 19 nt, Homo sapiens
  misc_RNA (1)...(19): siRNA sense strand
cagagacucagcacaaguu

SEQ ID NO: 1735641 - RNA, 19 nt, Homo sapiens
  misc_RNA (1)...(19): siRNA sense strand
cauggacagcagugaaaua

SEQ ID NO: 1735642 - RNA, 19 nt, Homo sapiens
  misc_RNA (1)...(19): siRNA sense strand
agaugggaaggaagaauua

SEQ ID NO: 1735643 - RNA, 19 nt, Homo sapiens
  misc_RNA (1)...(19): siRNA sense strand
gcaguugauuaugcaaaca

SEQ ID NO: 1735644 - RNA, 19 nt, Homo sapiens
  misc_RNA (1)...(19): siRNA sense strand
gagucugugucccaagcua

SEQ ID NO: 1735645 - RNA, 19 nt, Homo sapiens
  misc_RNA (1)...(19): siRNA sense strand
cagacucauugaaagaaga

SEQ ID NO: 1735646 - RNA, 19 nt, Homo sapiens
  misc_RNA (1)...(19): siRNA sense strand
aaagagagaugcagaacua

SEQ ID NO: 1735647 - RNA, 19 nt, Homo sapiens
  misc_RNA (1)...(19): siRNA sense strand
ggaagaggaucaaggagaa

SEQ ID NO: 1735648 - RNA, 19 nt, Homo sapiens
  misc_RNA (1)...(19): siRNA sense strand
gcacaaguuugaaauguca

SEQ ID NO: 1735649 - RNA, 19 nt, Homo sapiens
  misc_RNA (1)...(19): siRNA sense strand
ugucagaaauggauaauga

SEQ ID NO: 1735650 - RNA, 19 nt, Homo sapiens
  misc_RNA (1)...(19): siRNA sense strand
gaugauggcuucagcauac

SEQ ID NO: 1735651 - RNA, 19 nt, Homo sapiens
  misc_RNA (1)...(19): siRNA sense strand
gaaggcuacuugucagaaa

SEQ ID NO: 1735652 - RNA, 19 nt, Homo sapiens
  misc_RNA (1)...(19): siRNA sense strand
gcagcgagaugucuuggaa

SEQ ID NO: 1735653 - RNA, 19 nt, Homo sapiens
  misc_RNA (1)...(19): siRNA sense strand
ggacuuagaugaggaacug

SEQ ID NO: 1735654 - RNA, 19 nt, Homo sapiens
  misc_RNA (1)...(19): siRNA sense strand
gaacagauccagcaauucu

SEQ ID NO: 1735655 - RNA, 19 nt, Homo sapiens
  misc_RNA (1)...(19): siRNA sense strand
ggaggaagauggugucagu

SEQ ID NO: 1735656 - RNA, 19 nt, Homo sapiens
  misc_RNA (1)...(19): siRNA sense strand
aauaguagcuggaguuguu

SEQ ID NO: 1735657 - RNA, 19 nt, Homo sapiens
  misc_RNA (1)...(19): siRNA sense strand
uuacaaaugugaagacaga

SEQ ID NO: 1735658 - RNA, 19 nt, Homo sapiens
  misc_RNA (1)...(19): siRNA sense strand
gguggaaacuguugaagau

SEQ ID NO: 1735659 - RNA, 19 nt, Homo sapiens
  misc_RNA (1)...(19): siRNA sense strand
gaagaaucagggacuauuu

SEQ ID NO: 1735660 - RNA, 19 nt, Homo sapiens
  misc_RNA (1)...(19): siRNA sense strand
gaaagcauguugucuccau

SEQ ID NO: 1735661 - RNA, 19 nt, Homo sapiens
  misc_RNA (1)...(19): siRNA sense strand
uggaugagcuuugcaauga

SEQ ID NO: 1735662 - RNA, 19 nt, Homo sapiens
  misc_RNA (1)...(19): siRNA sense strand
gagaagugguggaaacugu

SEQ ID NO: 1735663 - RNA, 19 nt, Homo sapiens
  misc_RNA (1)...(19): siRNA sense strand
ggaaacuguugaagauguu

SEQ ID NO: 1735664 - RNA, 19 nt, Homo sapiens
  misc_RNA (1)...(19): siRNA sense strand
ggaagauggugucagugaa

SEQ ID NO: 1735665 - RNA, 19 nt, Homo sapiens
  misc_RNA (1)...(19): siRNA sense strand
ggaagcagcacugucauuu

SEQ ID NO: 1735666 - RNA, 19 nt, Homo sapiens
  misc_RNA (1)...(19): siRNA sense strand
ugaagcagauguugccauu

SEQ ID NO: 1735667 - RNA, 19 nt, Homo sapiens
  misc_RNA (1)...(19): siRNA sense strand
gcaaacaggaugcuucaga

SEQ ID NO: 1735668 - RNA, 19 nt, Homo sapiens
  misc_RNA (1)...(19): siRNA sense strand
gcagaggccuauggauuug

SEQ ID NO: 1735669 - RNA, 19 nt, Homo sapiens
  misc_RNA (1)...(19): siRNA sense strand
gauaaugaaccuccuguga

SEQ ID NO: 1735670 - RNA, 19 nt, Homo sapiens
  misc_RNA (1)...(19): siRNA sense strand
gaaaguguagcuccaguga

SEQ ID NO: 1735671 - RNA, 19 nt, Homo sapiens
  misc_RNA (1)...(19): siRNA sense strand
gugaagagcuggauuuuga

SEQ ID NO: 1735672 - RNA, 19 nt, Homo sapiens
  misc_RNA (1)...(19): siRNA sense strand
cagcauagaugggaaggaa

SEQ ID NO: 1735673 - RNA, 19 nt, Homo sapiens
  misc_RNA (1)...(19): siRNA sense strand
ggacagcagugaaauaucc

SEQ ID NO: 1735674 - RNA, 19 nt, Homo sapiens
  misc_RNA (1)...(19): siRNA sense strand
gagagaugcagaacuaauu

SEQ ID NO: 1735675 - RNA, 19 nt, Homo sapiens
  misc_RNA (1)...(19): siRNA sense strand
gaagaacuaaagaaaguga

SEQ ID NO: 1735676 - RNA, 19 nt, Homo sapiens
  misc_RNA (1)...(19): siRNA sense strand
gaauuucagcgugacauua

SEQ ID NO: 1735677 - RNA, 19 nt, Homo sapiens
  misc_RNA (1)...(19): siRNA sense strand
gcagugaaauauccaugau

SEQ ID NO: 1735678 - RNA, 19 nt, Homo sapiens
  misc_RNA (1)...(19): siRNA sense strand
gaaggaagaauuagaucug

SEQ ID NO: 1735679 - RNA, 19 nt, Homo sapiens
  misc_RNA (1)...(19): siRNA sense strand
cgagaugucuuggaacaga

SEQ ID NO: 1735680 - RNA, 19 nt, Homo sapiens
  misc_RNA (1)...(19): siRNA sense strand
aagagagacuggacuuuga

SEQ ID NO: 1735681 - RNA, 19 nt, Homo sapiens
  misc_RNA (1)...(19): siRNA sense strand
agacaucauugccaucauu

SEQ ID NO: 1735682 - RNA, 19 nt, Homo sapiens
  misc_RNA (1)...(19): siRNA sense strand
agacuccacuuacaaaugu

SEQ ID NO: 1735683 - RNA, 19 nt, Homo sapiens
  misc_RNA (1)...(19): siRNA sense strand
ucagaaugcuguaauguac

SEQ ID NO: 1735684 - RNA, 19 nt, Homo sapiens
  misc_RNA (1)...(19): siRNA sense strand
gaagaggaggcugaaguaa

SEQ ID NO: 1735685 - RNA, 19 nt, Homo sapiens
  misc_RNA (1)...(19): siRNA sense strand
agaggaggcugaaguaaag

SEQ ID NO: 1735686 - RNA, 19 nt, Homo sapiens
  misc_RNA (1)...(19): siRNA sense strand
gagagauucuacccgcaaa

SEQ ID NO: 1735687 - RNA, 19 nt, Homo sapiens
  misc_RNA (1)...(19): siRNA sense strand
uagaggagccuaaggaaga

SEQ ID NO: 1735688 - RNA, 19 nt, Homo sapiens
  misc_RNA (1)...(19): siRNA sense strand
aauuagaucuggcugagaa

SEQ ID NO: 1735689 - RNA, 19 nt, Homo sapiens
  misc_RNA (1)...(19): siRNA sense strand
ggaggugauuauccacuug

SEQ ID NO: 1735690 - RNA, 19 nt, Homo sapiens
  misc_RNA (1)...(19): siRNA sense strand
caagagagacuggacuuug

SEQ ID NO: 1735691 - RNA, 19 nt, Homo sapiens
  misc_RNA (1)...(19): siRNA sense strand
gaucaaaggcucccagcau

SEQ ID NO: 1735692 - RNA, 19 nt, Homo sapiens
  misc_RNA (1)...(19): siRNA sense strand
caugagaaguggcgaucaa

SEQ ID NO: 1735693 - RNA, 19 nt, Homo sapiens
  misc_RNA (1)...(19): siRNA sense strand
cagcacaaguuugaaaugu

SEQ ID NO: 1735694 - RNA, 19 nt, Homo sapiens
  misc_RNA (1)...(19): siRNA sense strand
cgaaauaguagcuggaguu

SEQ ID NO: 1735695 - RNA, 19 nt, Homo sapiens
  misc_RNA (1)...(19): siRNA sense strand
gaaccagagccagucauuu

SEQ ID NO: 1735696 - RNA, 19 nt, Homo sapiens
  misc_RNA (1)...(19): siRNA sense strand
gaaauaguagcuggaguug

SEQ ID NO: 1735697 - RNA, 19 nt, Homo sapiens
  misc_RNA (1)...(19): siRNA sense strand
ccgaagcacagcugaauuu

SEQ ID NO: 1735698 - RNA, 19 nt, Homo sapiens
  misc_RNA (1)...(19): siRNA sense strand
gaugagcuuugcaaugaca

SEQ ID NO: 1735699 - RNA, 19 nt, Homo sapiens
  misc_RNA (1)...(19): siRNA sense strand
gugcagaggccuauggauu

SEQ ID NO: 1735700 - RNA, 19 nt, Homo sapiens
  misc_RNA (1)...(19): siRNA sense strand
aaagaagaaucagggacua

SEQ ID NO: 1735701 - RNA, 19 nt, Homo sapiens
  misc_RNA (1)...(19): siRNA sense strand
cgagagaagcuauguuuag

SEQ ID NO: 1735702 - RNA, 19 nt, Homo sapiens
  misc_RNA (1)...(19): siRNA sense strand
gaugagacuccacuuacaa

SEQ ID NO: 1735703 - RNA, 19 nt, Homo sapiens
  misc_RNA (1)...(19): siRNA sense strand
agauauagacggcuaaaga

SEQ ID NO: 1735704 - RNA, 19 nt, Homo sapiens
  misc_RNA (1)...(19): siRNA sense strand
caaaauuggguaucaguua

SEQ ID NO: 1735705 - RNA, 19 nt, Homo sapiens
  misc_RNA (1)...(19): siRNA sense strand
ccuauggauuugucaacua

SEQ ID NO: 1735706 - RNA, 19 nt, Homo sapiens
  misc_RNA (1)...(19): siRNA sense strand
uaaggaagaggaucaagga

SEQ ID NO: 1735707 - RNA, 19 nt, Homo sapiens
  misc_RNA (1)...(19): siRNA sense strand
agacucagcacaaguuuga

SEQ ID NO: 1735708 - RNA, 19 nt, Homo sapiens
  misc_RNA (1)...(19): siRNA sense strand
gaugaggaacugggaagua

SEQ ID NO: 1735709 - RNA, 19 nt, Homo sapiens
  misc_RNA (1)...(19): siRNA sense strand
gguggaaccugcagaacca

SEQ ID NO: 1735710 - RNA, 19 nt, Homo sapiens
  misc_RNA (1)...(19): siRNA sense strand
gcauagaugggaaggaaga

SEQ ID NO: 1735711 - RNA, 19 nt, Homo sapiens
  misc_RNA (1)...(19): siRNA sense strand
ugaaauggcuguggcuucu

SEQ ID NO: 1735712 - RNA, 19 nt, Homo sapiens
  misc_RNA (1)...(19): siRNA sense strand
agacuggacuuugaggaaa

SEQ ID NO: 1735713 - RNA, 19 nt, Homo sapiens
  misc_RNA (1)...(19): siRNA sense strand
agugaaauauccaugauca

SEQ ID NO: 1735714 - RNA, 19 nt, Homo sapiens
  misc_RNA (1)...(19): siRNA sense strand
cauugaagauccuuuagag

SEQ ID NO: 1735715 - RNA, 19 nt, Homo sapiens
  misc_RNA (1)...(19): siRNA sense strand
aucaaaggcucccagcaua

SEQ ID NO: 1735716 - RNA, 19 nt, Homo sapiens
  misc_RNA (1)...(19): siRNA sense strand
uggaaacuguugaagaugu

SEQ ID NO: 1735717 - RNA, 19 nt, Homo sapiens
  misc_RNA (1)...(19): siRNA sense strand
gaagauggugucagugaag

SEQ ID NO: 1735718 - RNA, 19 nt, Homo sapiens
  misc_RNA (1)...(19): siRNA sense strand
gagacuggacuuugaggaa

SEQ ID NO: 1735719 - RNA, 19 nt, Homo sapiens
  misc_RNA (1)...(19): siRNA sense strand
gcaagagagacuggacuuu

SEQ ID NO: 1735720 - RNA, 19 nt, Homo sapiens
  misc_RNA (1)...(19): siRNA sense strand
gagguuacccacugugaug

SEQ ID NO: 1735721 - RNA, 19 nt, Homo sapiens
  misc_RNA (1)...(19): siRNA sense strand
gaggaaggcuacagaugcu

SEQ ID NO: 1735722 - RNA, 19 nt, Homo sapiens
  misc_RNA (1)...(19): siRNA sense strand
uaaagaggaaggcuacaga

SEQ ID NO: 1735723 - RNA, 19 nt, Homo sapiens
  misc_RNA (1)...(19): siRNA sense strand
agaagaggaggcugaagua

SEQ ID NO: 1735724 - RNA, 19 nt, Homo sapiens
  misc_RNA (1)...(19): siRNA sense strand
gaaacuguugaagauguua

SEQ ID NO: 1735725 - RNA, 19 nt, Homo sapiens
  misc_RNA (1)...(19): siRNA sense strand
gaagugguggaaacuguug

SEQ ID NO: 1735726 - RNA, 19 nt, Homo sapiens
  misc_RNA (1)...(19): siRNA sense strand
ccacgcaguugauuaugca

SEQ ID NO: 1735727 - RNA, 19 nt, Homo sapiens
  misc_RNA (1)...(19): siRNA sense strand
gagacuccacuuacaaaug

SEQ ID NO: 1735728 - RNA, 19 nt, Homo sapiens
  misc_RNA (1)...(19): siRNA sense strand
aagcagauguugccauugg

SEQ ID NO: 1735729 - RNA, 19 nt, Homo sapiens
  misc_RNA (1)...(19): siRNA sense strand
uucaggagccgaaauagua

SEQ ID NO: 1735730 - RNA, 19 nt, Homo sapiens
  misc_RNA (1)...(19): siRNA sense strand
ggauauugcugugucuuac

SEQ ID NO: 1735731 - RNA, 19 nt, Homo sapiens
  misc_RNA (1)...(19): siRNA sense strand
gaaacccaggagagauaua

SEQ ID NO: 1735732 - RNA, 19 nt, Homo sapiens
  misc_RNA (1)...(19): siRNA sense strand
ggaagaagaggaggcugaa

SEQ ID NO: 1735733 - RNA, 19 nt, Homo sapiens
  misc_RNA (1)...(19): siRNA sense strand
cuauggauuugucaacuau

SEQ ID NO: 1735734 - RNA, 19 nt, Homo sapiens
  misc_RNA (1)...(19): siRNA sense strand
cgaugagacuccacuuaca

SEQ ID NO: 1735735 - RNA, 19 nt, Homo sapiens
  misc_RNA (1)...(19): siRNA sense strand
ggauguggcagcaguggaa

SEQ ID NO: 1735736 - RNA, 19 nt, Homo sapiens
  misc_RNA (1)...(19): siRNA sense strand
caaaggcucccagcauaga

SEQ ID NO: 1735737 - RNA, 19 nt, Homo sapiens
  misc_RNA (1)...(19): siRNA sense strand
aaacaagggaauacaugaa

SEQ ID NO: 1735738 - RNA, 19 nt, Homo sapiens
  misc_RNA (1)...(19): siRNA sense strand
ggagacaucauugccauca

SEQ ID NO: 1735739 - RNA, 19 nt, Homo sapiens
  misc_RNA (1)...(19): siRNA sense strand
gauauagacggcuaaagag

SEQ ID NO: 1735740 - RNA, 19 nt, Homo sapiens
  misc_RNA (1)...(19): siRNA sense strand
gcacagaaaauuuggaaga

SEQ ID NO: 1735741 - RNA, 19 nt, Homo sapiens
  misc_RNA (1)...(19): siRNA sense strand
caucauugaggacaaggua

SEQ ID NO: 1735742 - RNA, 19 nt, Homo sapiens
  misc_RNA (1)...(19): siRNA sense strand
aaacggaaacgaggugaaa

SEQ ID NO: 1735743 - RNA, 19 nt, Homo sapiens
  misc_RNA (1)...(19): siRNA sense strand
cagcaaacacccaauacug

SEQ ID NO: 1735744 - RNA, 19 nt, Homo sapiens
  misc_RNA (1)...(19): siRNA sense strand
aauucaagcuggacacaug

SEQ ID NO: 1735745 - RNA, 19 nt, Homo sapiens
  misc_RNA (1)...(19): siRNA sense strand
uacugcagcuggagagauu

SEQ ID NO: 1735746 - RNA, 19 nt, Homo sapiens
  misc_RNA (1)...(19): siRNA sense strand
aaagagagaugcagaacua

SEQ ID NO: 1735747 - RNA, 19 nt, Homo sapiens
  misc_RNA (1)...(19): siRNA sense strand
ggaagaggaucaaggagaa

SEQ ID NO: 1735748 - RNA, 19 nt, Homo sapiens
  misc_RNA (1)...(19): siRNA sense strand
gcacaaguuugaaauguca

SEQ ID NO: 1735749 - RNA, 19 nt, Homo sapiens
  misc_RNA (1)...(19): siRNA sense strand
ugucagaaauggauaauga

SEQ ID NO: 1735750 - RNA, 19 nt, Homo sapiens
  misc_RNA (1)...(19): siRNA sense strand
gaugauggcuucagcauac

SEQ ID NO: 1735751 - RNA, 19 nt, Homo sapiens
  misc_RNA (1)...(19): siRNA sense strand
gaaggcuacuugucagaaa

SEQ ID NO: 1735752 - RNA, 19 nt, Homo sapiens
  misc_RNA (1)...(19): siRNA sense strand
gcagcgagaugucuuggaa

SEQ ID NO: 1735753 - RNA, 19 nt, Homo sapiens
  misc_RNA (1)...(19): siRNA sense strand
ggacuuagaugaggaacug

SEQ ID NO: 1735754 - RNA, 19 nt, Homo sapiens
  misc_RNA (1)...(19): siRNA sense strand
gaacagauccagcaauucu

SEQ ID NO: 1735755 - RNA, 19 nt, Homo sapiens
  misc_RNA (1)...(19): siRNA sense strand
ggaggaagauggugucagu

SEQ ID NO: 1735756 - RNA, 19 nt, Homo sapiens
  misc_RNA (1)...(19): siRNA sense strand
aauaguagcuggaguuguu

SEQ ID NO: 1735757 - RNA, 19 nt, Homo sapiens
  misc_RNA (1)...(19): siRNA sense strand
uuacaaaugugaagacaga

SEQ ID NO: 1735758 - RNA, 19 nt, Homo sapiens
  misc_RNA (1)...(19): siRNA sense strand
gguggaaacuguugaagau

SEQ ID NO: 1735759 - RNA, 19 nt, Homo sapiens
  misc_RNA (1)...(19): siRNA sense strand
gaagaaucagggacuauuu

SEQ ID NO: 1735760 - RNA, 19 nt, Homo sapiens
  misc_RNA (1)...(19): siRNA sense strand
gaaagcauguugucuccau

SEQ ID NO: 1735761 - RNA, 19 nt, Homo sapiens
  misc_RNA (1)...(19): siRNA sense strand
uggaugagcuuugcaauga

SEQ ID NO: 1735762 - RNA, 19 nt, Homo sapiens
  misc_RNA (1)...(19): siRNA sense strand
gagaagugguggaaacugu

SEQ ID NO: 1735763 - RNA, 19 nt, Homo sapiens
  misc_RNA (1)...(19): siRNA sense strand
ggaaacuguugaagauguu

SEQ ID NO: 1735764 - RNA, 19 nt, Homo sapiens
  misc_RNA (1)...(19): siRNA sense strand
ggaagauggugucagugaa

SEQ ID NO: 1735765 - RNA, 19 nt, Homo sapiens
  misc_RNA (1)...(19): siRNA sense strand
ggaagcagcacugucauuu

SEQ ID NO: 1735766 - RNA, 19 nt, Homo sapiens
  misc_RNA (1)...(19): siRNA sense strand
ugaagcagauguugccauu

SEQ ID NO: 1735767 - RNA, 19 nt, Homo sapiens
  misc_RNA (1)...(19): siRNA sense strand
gcaaacaggaugcuucaga

SEQ ID NO: 1735768 - RNA, 19 nt, Homo sapiens
  misc_RNA (1)...(19): siRNA sense strand
gcagaggccuauggauuug

SEQ ID NO: 1735769 - RNA, 19 nt, Homo sapiens
  misc_RNA (1)...(19): siRNA sense strand
gauaaugaaccuccuguga

SEQ ID NO: 1735770 - RNA, 19 nt, Homo sapiens
  misc_RNA (1)...(19): siRNA sense strand
gaaaguguagcuccaguga

SEQ ID NO: 1735771 - RNA, 19 nt, Homo sapiens
  misc_RNA (1)...(19): siRNA sense strand
gugaagagcuggauuuuga

SEQ ID NO: 1735772 - RNA, 19 nt, Homo sapiens
  misc_RNA (1)...(19): siRNA sense strand
cagcauagaugggaaggaa

SEQ ID NO: 1735773 - RNA, 19 nt, Homo sapiens
  misc_RNA (1)...(19): siRNA sense strand
ggacagcagugaaauaucc

SEQ ID NO: 1735774 - RNA, 19 nt, Homo sapiens
  misc_RNA (1)...(19): siRNA sense strand
gagagaugcagaacuaauu

SEQ ID NO: 1735775 - RNA, 19 nt, Homo sapiens
  misc_RNA (1)...(19): siRNA sense strand
gaagaacuaaagaaaguga

SEQ ID NO: 1735776 - RNA, 19 nt, Homo sapiens
  misc_RNA (1)...(19): siRNA sense strand
gaauuucagcgugacauua

SEQ ID NO: 1735777 - RNA, 19 nt, Homo sapiens
  misc_RNA (1)...(19): siRNA sense strand
gcagugaaauauccaugau

SEQ ID NO: 1735778 - RNA, 19 nt, Homo sapiens
  misc_RNA (1)...(19): siRNA sense strand
gaaggaagaauuagaucug

SEQ ID NO: 1735779 - RNA, 19 nt, Homo sapiens
  misc_RNA (1)...(19): siRNA sense strand
cgagaugucuuggaacaga

SEQ ID NO: 1735780 - RNA, 19 nt, Homo sapiens
  misc_RNA (1)...(19): siRNA sense strand
aagagagacuggacuuuga

SEQ ID NO: 1735781 - RNA, 19 nt, Homo sapiens
  misc_RNA (1)...(19): siRNA sense strand
agacaucauugccaucauu

SEQ ID NO: 1735782 - RNA, 19 nt, Homo sapiens
  misc_RNA (1)...(19): siRNA sense strand
agacuccacuuacaaaugu

SEQ ID NO: 1735783 - RNA, 19 nt, Homo sapiens
  misc_RNA (1)...(19): siRNA sense strand
ucagaaugcuguaauguac

SEQ ID NO: 1735784 - RNA, 19 nt, Homo sapiens
  misc_RNA (1)...(19): siRNA sense strand
gaagaggaggcugaaguaa

SEQ ID NO: 1735785 - RNA, 19 nt, Homo sapiens
  misc_RNA (1)...(19): siRNA sense strand
agaggaggcugaaguaaag

SEQ ID NO: 1735786 - RNA, 19 nt, Homo sapiens
  misc_RNA (1)...(19): siRNA sense strand
gagagauucuacccgcaaa

SEQ ID NO: 1735787 - RNA, 19 nt, Homo sapiens
  misc_RNA (1)...(19): siRNA sense strand
uagaggagccuaaggaaga

SEQ ID NO: 1735788 - RNA, 19 nt, Homo sapiens
  misc_RNA (1)...(19): siRNA sense strand
aauuagaucuggcugagaa

SEQ ID NO: 1735789 - RNA, 19 nt, Homo sapiens
  misc_RNA (1)...(19): siRNA sense strand
ggaggugauuauccacuug

SEQ ID NO: 1735790 - RNA, 19 nt, Homo sapiens
  misc_RNA (1)...(19): siRNA sense strand
caagagagacuggacuuug

SEQ ID NO: 1735791 - RNA, 19 nt, Homo sapiens
  misc_RNA (1)...(19): siRNA sense strand
gaucaaaggcucccagcau

SEQ ID NO: 1735792 - RNA, 19 nt, Homo sapiens
  misc_RNA (1)...(19): siRNA sense strand
caugagaaguggcgaucaa

SEQ ID NO: 1735793 - RNA, 19 nt, Homo sapiens
  misc_RNA (1)...(19): siRNA sense strand
cagcacaaguuugaaaugu

SEQ ID NO: 1735794 - RNA, 19 nt, Homo sapiens
  misc_RNA (1)...(19): siRNA sense strand
cgaaauaguagcuggaguu

SEQ ID NO: 1735795 - RNA, 19 nt, Homo sapiens
  misc_RNA (1)...(19): siRNA sense strand
gaaccagagccagucauuu

SEQ ID NO: 1735796 - RNA, 19 nt, Homo sapiens
  misc_RNA (1)...(19): siRNA sense strand
gaaauaguagcuggaguug

SEQ ID NO: 1735797 - RNA, 19 nt, Homo sapiens
  misc_RNA (1)...(19): siRNA sense strand
ccgaagcacagcugaauuu

SEQ ID NO: 1735798 - RNA, 19 nt, Homo sapiens
  misc_RNA (1)...(19): siRNA sense strand
gaugagcuuugcaaugaca

SEQ ID NO: 1735799 - RNA, 19 nt, Homo sapiens
  misc_RNA (1)...(19): siRNA sense strand
gugcagaggccuauggauu

SEQ ID NO: 1735800 - RNA, 19 nt, Homo sapiens
  misc_RNA (1)...(19): siRNA sense strand
aaagaagaaucagggacua

SEQ ID NO: 1735801 - RNA, 19 nt, Homo sapiens
  misc_RNA (1)...(19): siRNA sense strand
cgagagaagcuauguuuag

SEQ ID NO: 1735802 - RNA, 19 nt, Homo sapiens
  misc_RNA (1)...(19): siRNA sense strand
gaugagacuccacuuacaa

SEQ ID NO: 1735803 - RNA, 19 nt, Homo sapiens
  misc_RNA (1)...(19): siRNA sense strand
agauauagacggcuaaaga

SEQ ID NO: 1735804 - RNA, 19 nt, Homo sapiens
  misc_RNA (1)...(19): siRNA sense strand
caaaauuggguaucaguua

SEQ ID NO: 1735805 - RNA, 19 nt, Homo sapiens
  misc_RNA (1)...(19): siRNA sense strand
ccuauggauuugucaacua

SEQ ID NO: 1735806 - RNA, 19 nt, Homo sapiens
  misc_RNA (1)...(19): siRNA sense strand
uaaggaagaggaucaagga

SEQ ID NO: 1735807 - RNA, 19 nt, Homo sapiens
  misc_RNA (1)...(19): siRNA sense strand
agacucagcacaaguuuga

SEQ ID NO: 1735808 - RNA, 19 nt, Homo sapiens
  misc_RNA (1)...(19): siRNA sense strand
gaugaggaacugggaagua

SEQ ID NO: 1735809 - RNA, 19 nt, Homo sapiens
  misc_RNA (1)...(19): siRNA sense strand
gguggaaccugcagaacca

SEQ ID NO: 1735810 - RNA, 19 nt, Homo sapiens
  misc_RNA (1)...(19): siRNA sense strand
gcauagaugggaaggaaga

SEQ ID NO: 1735811 - RNA, 19 nt, Homo sapiens
  misc_RNA (1)...(19): siRNA sense strand
ugaaauggcuguggcuucu

SEQ ID NO: 1735812 - RNA, 19 nt, Homo sapiens
  misc_RNA (1)...(19): siRNA sense strand
agacuggacuuugaggaaa

SEQ ID NO: 1735813 - RNA, 19 nt, Homo sapiens
  misc_RNA (1)...(19): siRNA sense strand
agugaaauauccaugauca

SEQ ID NO: 1735814 - RNA, 19 nt, Homo sapiens
  misc_RNA (1)...(19): siRNA sense strand
cauugaagauccuuuagag

SEQ ID NO: 1735815 - RNA, 19 nt, Homo sapiens
  misc_RNA (1)...(19): siRNA sense strand
aucaaaggcucccagcaua

SEQ ID NO: 1735816 - RNA, 19 nt, Homo sapiens
  misc_RNA (1)...(19): siRNA sense strand
uggaaacuguugaagaugu

SEQ ID NO: 1735817 - RNA, 19 nt, Homo sapiens
  misc_RNA (1)...(19): siRNA sense strand
gaagauggugucagugaag

SEQ ID NO: 1735818 - RNA, 19 nt, Homo sapiens
  misc_RNA (1)...(19): siRNA sense strand
gagacuggacuuugaggaa

SEQ ID NO: 1735819 - RNA, 19 nt, Homo sapiens
  misc_RNA (1)...(19): siRNA sense strand
gcaagagagacuggacuuu

SEQ ID NO: 1735820 - RNA, 19 nt, Homo sapiens
  misc_RNA (1)...(19): siRNA sense strand
gagguuacccacugugaug

SEQ ID NO: 1735821 - RNA, 19 nt, Homo sapiens
  misc_RNA (1)...(19): siRNA sense strand
gaggaaggcuacagaugcu

SEQ ID NO: 1735822 - RNA, 19 nt, Homo sapiens
  misc_RNA (1)...(19): siRNA sense strand
uaaagaggaaggcuacaga

SEQ ID NO: 1735823 - RNA, 19 nt, Homo sapiens
  misc_RNA (1)...(19): siRNA sense strand
agaagaggaggcugaagua

SEQ ID NO: 1735824 - RNA, 19 nt, Homo sapiens
  misc_RNA (1)...(19): siRNA sense strand
gaaacuguugaagauguua

SEQ ID NO: 1735825 - RNA, 19 nt, Homo sapiens
  misc_RNA (1)...(19): siRNA sense strand
gaagugguggaaacuguug

SEQ ID NO: 1735826 - RNA, 19 nt, Homo sapiens
  misc_RNA (1)...(19): siRNA sense strand
ccacgcaguugauuaugca

SEQ ID NO: 1735827 - RNA, 19 nt, Homo sapiens
  misc_RNA (1)...(19): siRNA sense strand
gagacuccacuuacaaaug

SEQ ID NO: 1735828 - RNA, 19 nt, Homo sapiens
  misc_RNA (1)...(19): siRNA sense strand
aagcagauguugccauugg

SEQ ID NO: 1735829 - RNA, 19 nt, Homo sapiens
  misc_RNA (1)...(19): siRNA sense strand
uucaggagccgaaauagua

SEQ ID NO: 1735830 - RNA, 19 nt, Homo sapiens
  misc_RNA (1)...(19): siRNA sense strand
ggauauugcugugucuuac

SEQ ID NO: 1735831 - RNA, 19 nt, Homo sapiens
  misc_RNA (1)...(19): siRNA sense strand
gaaacccaggagagauaua

SEQ ID NO: 1735832 - RNA, 19 nt, Homo sapiens
  misc_RNA (1)...(19): siRNA sense strand
ggaagaagaggaggcugaa

SEQ ID NO: 1735833 - RNA, 19 nt, Homo sapiens
  misc_RNA (1)...(19): siRNA sense strand
cuauggauuugucaacuau

SEQ ID NO: 1735834 - RNA, 19 nt, Homo sapiens
  misc_RNA (1)...(19): siRNA sense strand
cgaugagacuccacuuaca

SEQ ID NO: 1735835 - RNA, 19 nt, Homo sapiens
  misc_RNA (1)...(19): siRNA sense strand
ggauguggcagcaguggaa

SEQ ID NO: 1735836 - RNA, 19 nt, Homo sapiens
  misc_RNA (1)...(19): siRNA sense strand
caaaggcucccagcauaga

SEQ ID NO: 1735837 - RNA, 19 nt, Homo sapiens
  misc_RNA (1)...(19): siRNA sense strand
aaacaagggaauacaugaa

SEQ ID NO: 1735838 - RNA, 19 nt, Homo sapiens
  misc_RNA (1)...(19): siRNA sense strand
ggagacaucauugccauca

SEQ ID NO: 1735839 - RNA, 19 nt, Homo sapiens
  misc_RNA (1)...(19): siRNA sense strand
gauauagacggcuaaagag

SEQ ID NO: 1735840 - RNA, 19 nt, Homo sapiens
  misc_RNA (1)...(19): siRNA sense strand
gcacagaaaauuuggaaga

SEQ ID NO: 1735841 - RNA, 19 nt, Homo sapiens
  misc_RNA (1)...(19): siRNA sense strand
caucauugaggacaaggua

SEQ ID NO: 1735842 - RNA, 19 nt, Homo sapiens
  misc_RNA (1)...(19): siRNA sense strand
aaacggaaacgaggugaaa

SEQ ID NO: 1735843 - RNA, 19 nt, Homo sapiens
  misc_RNA (1)...(19): siRNA sense strand
cagcaaacacccaauacug

SEQ ID NO: 1735844 - RNA, 19 nt, Homo sapiens
  misc_RNA (1)...(19): siRNA sense strand
aauucaagcuggacacaug

SEQ ID NO: 1735845 - RNA, 19 nt, Homo sapiens
  misc_RNA (1)...(19): siRNA sense strand
uacugcagcuggagagauu

SEQ ID NO: 1735846 - RNA, 19 nt, Homo sapiens
  misc_RNA (1)...(19): siRNA sense strand
ggaagaggaucaaggagaa

SEQ ID NO: 1735847 - RNA, 19 nt, Homo sapiens
  misc_RNA (1)...(19): siRNA sense strand
gcacaaguuugaaauguca

SEQ ID NO: 1735848 - RNA, 19 nt, Homo sapiens
  misc_RNA (1)...(19): siRNA sense strand
ugucagaaauggauaauga

SEQ ID NO: 1735849 - RNA, 19 nt, Homo sapiens
  misc_RNA (1)...(19): siRNA sense strand
gaugauggcuucagcauac

SEQ ID NO: 1735850 - RNA, 19 nt, Homo sapiens
  misc_RNA (1)...(19): siRNA sense strand
gaaggcuacuugucagaaa

SEQ ID NO: 1735851 - RNA, 19 nt, Homo sapiens
  misc_RNA (1)...(19): siRNA sense strand
gcagcgagaugucuuggaa

SEQ ID NO: 1735852 - RNA, 19 nt, Homo sapiens
  misc_RNA (1)...(19): siRNA sense strand
ggacuuagaugaggaacug

SEQ ID NO: 1735853 - RNA, 19 nt, Homo sapiens
  misc_RNA (1)...(19): siRNA sense strand
gaacagauccagcaauucu

SEQ ID NO: 1735854 - RNA, 19 nt, Homo sapiens
  misc_RNA (1)...(19): siRNA sense strand
ggaggaagauggugucagu

SEQ ID NO: 1735855 - RNA, 19 nt, Homo sapiens
  misc_RNA (1)...(19): siRNA sense strand
aauaguagcuggaguuguu

SEQ ID NO: 1735856 - RNA, 19 nt, Homo sapiens
  misc_RNA (1)...(19): siRNA sense strand
uuacaaaugugaagacaga

SEQ ID NO: 1735857 - RNA, 19 nt, Homo sapiens
  misc_RNA (1)...(19): siRNA sense strand
gaaagcauguugucuccau

SEQ ID NO: 1735858 - RNA, 19 nt, Homo sapiens
  misc_RNA (1)...(19): siRNA sense strand
gaagaaucagggacuauuu

SEQ ID NO: 1735859 - RNA, 19 nt, Homo sapiens
  misc_RNA (1)...(19): siRNA sense strand
ggaagcagcacugucauuu

SEQ ID NO: 1735860 - RNA, 19 nt, Homo sapiens
  misc_RNA (1)...(19): siRNA sense strand
ggaagauggugucagugaa

SEQ ID NO: 1735861 - RNA, 19 nt, Homo sapiens
  misc_RNA (1)...(19): siRNA sense strand
ugaagcagauguugccauu

SEQ ID NO: 1735862 - RNA, 19 nt, Homo sapiens
  misc_RNA (1)...(19): siRNA sense strand
gcaaacaggaugcuucaga

SEQ ID NO: 1735863 - RNA, 19 nt, Homo sapiens
  misc_RNA (1)...(19): siRNA sense strand
gcagaggccuauggauuug

SEQ ID NO: 1735864 - RNA, 19 nt, Homo sapiens
  misc_RNA (1)...(19): siRNA sense strand
gauaaugaaccuccuguga

SEQ ID NO: 1735865 - RNA, 19 nt, Homo sapiens
  misc_RNA (1)...(19): siRNA sense strand
gaaaguguagcuccaguga

SEQ ID NO: 1735866 - RNA, 19 nt, Homo sapiens
  misc_RNA (1)...(19): siRNA sense strand
gugaagagcuggauuuuga

SEQ ID NO: 1735867 - RNA, 19 nt, Homo sapiens
  misc_RNA (1)...(19): siRNA sense strand
cagcauagaugggaaggaa

SEQ ID NO: 1735868 - RNA, 19 nt, Homo sapiens
  misc_RNA (1)...(19): siRNA sense strand
ggacagcagugaaauaucc

SEQ ID NO: 1735869 - RNA, 19 nt, Homo sapiens
  misc_RNA (1)...(19): siRNA sense strand
gcagugaaauauccaugau

SEQ ID NO: 1735870 - RNA, 19 nt, Homo sapiens
  misc_RNA (1)...(19): siRNA sense strand
gaauuucagcgugacauua

SEQ ID NO: 1735871 - RNA, 19 nt, Homo sapiens
  misc_RNA (1)...(19): siRNA sense strand
gaaggaagaauuagaucug

SEQ ID NO: 1735872 - RNA, 19 nt, Homo sapiens
  misc_RNA (1)...(19): siRNA sense strand
cgagaugucuuggaacaga

SEQ ID NO: 1735873 - RNA, 19 nt, Homo sapiens
  misc_RNA (1)...(19): siRNA sense strand
aagagagacuggacuuuga

SEQ ID NO: 1735874 - RNA, 19 nt, Homo sapiens
  misc_RNA (1)...(19): siRNA sense strand
agacaucauugccaucauu

SEQ ID NO: 1735875 - RNA, 19 nt, Homo sapiens
  misc_RNA (1)...(19): siRNA sense strand
agacuccacuuacaaaugu

SEQ ID NO: 1735876 - RNA, 19 nt, Homo sapiens
  misc_RNA (1)...(19): siRNA sense strand
ucagaaugcuguaauguac

SEQ ID NO: 1735877 - RNA, 19 nt, Homo sapiens
  misc_RNA (1)...(19): siRNA sense strand
gaagaggaggcugaaguaa

SEQ ID NO: 1735878 - RNA, 19 nt, Homo sapiens
  misc_RNA (1)...(19): siRNA sense strand
ggaggugauuauccacuug

SEQ ID NO: 1735879 - RNA, 19 nt, Homo sapiens
  misc_RNA (1)...(19): siRNA sense strand
gagagauucuacccgcaaa

SEQ ID NO: 1735880 - RNA, 19 nt, Homo sapiens
  misc_RNA (1)...(19): siRNA sense strand
uagaggagccuaaggaaga

SEQ ID NO: 1735881 - RNA, 19 nt, Homo sapiens
  misc_RNA (1)...(19): siRNA sense strand
agaggaggcugaaguaaag

SEQ ID NO: 1735882 - RNA, 19 nt, Homo sapiens
  misc_RNA (1)...(19): siRNA sense strand
aauuagaucuggcugagaa

SEQ ID NO: 1735883 - RNA, 19 nt, Homo sapiens
  misc_RNA (1)...(19): siRNA sense strand
caagagagacuggacuuug

SEQ ID NO: 1735884 - RNA, 19 nt, Homo sapiens
  misc_RNA (1)...(19): siRNA sense strand
gaucaaaggcucccagcau

SEQ ID NO: 1735885 - RNA, 19 nt, Homo sapiens
  misc_RNA (1)...(19): siRNA sense strand
cagcacaaguuugaaaugu

SEQ ID NO: 1735886 - RNA, 19 nt, Homo sapiens
  misc_RNA (1)...(19): siRNA sense strand
cgaaauaguagcuggaguu

SEQ ID NO: 1735887 - RNA, 19 nt, Homo sapiens
  misc_RNA (1)...(19): siRNA sense strand
gaaccagagccagucauuu

SEQ ID NO: 1735888 - RNA, 19 nt, Homo sapiens
  misc_RNA (1)...(19): siRNA sense strand
gaaauaguagcuggaguug

SEQ ID NO: 1735889 - RNA, 19 nt, Homo sapiens
  misc_RNA (1)...(19): siRNA sense strand
ccgaagcacagcugaauuu

SEQ ID NO: 1735890 - RNA, 19 nt, Homo sapiens
  misc_RNA (1)...(19): siRNA sense strand
aaagaagaaucagggacua

SEQ ID NO: 1735891 - RNA, 19 nt, Homo sapiens
  misc_RNA (1)...(19): siRNA sense strand
gugcagaggccuauggauu

SEQ ID NO: 1735892 - RNA, 19 nt, Homo sapiens
  misc_RNA (1)...(19): siRNA sense strand
gaugagacuccacuuacaa

SEQ ID NO: 1735893 - RNA, 19 nt, Homo sapiens
  misc_RNA (1)...(19): siRNA sense strand
gcauagaugggaaggaaga

SEQ ID NO: 1735894 - RNA, 19 nt, Homo sapiens
  misc_RNA (1)...(19): siRNA sense strand
ccuauggauuugucaacua

SEQ ID NO: 1735895 - RNA, 19 nt, Homo sapiens
  misc_RNA (1)...(19): siRNA sense strand
uaaggaagaggaucaagga

SEQ ID NO: 1735896 - RNA, 19 nt, Homo sapiens
  misc_RNA (1)...(19): siRNA sense strand
agacucagcacaaguuuga

SEQ ID NO: 1735897 - RNA, 19 nt, Homo sapiens
  misc_RNA (1)...(19): siRNA sense strand
gaugaggaacugggaagua

SEQ ID NO: 1735898 - RNA, 19 nt, Homo sapiens
  misc_RNA (1)...(19): siRNA sense strand
gguggaaccugcagaacca

SEQ ID NO: 1735899 - RNA, 19 nt, Homo sapiens
  misc_RNA (1)...(19): siRNA sense strand
ugaaauggcuguggcuucu

SEQ ID NO: 1735900 - RNA, 19 nt, Homo sapiens
  misc_RNA (1)...(19): siRNA sense strand
agacuggacuuugaggaaa

SEQ ID NO: 1735901 - RNA, 19 nt, Homo sapiens
  misc_RNA (1)...(19): siRNA sense strand
agugaaauauccaugauca

SEQ ID NO: 1735902 - RNA, 19 nt, Homo sapiens
  misc_RNA (1)...(19): siRNA sense strand
cauugaagauccuuuagag

SEQ ID NO: 1735903 - RNA, 19 nt, Homo sapiens
  misc_RNA (1)...(19): siRNA sense strand
aucaaaggcucccagcaua

SEQ ID NO: 1735904 - RNA, 19 nt, Homo sapiens
  misc_RNA (1)...(19): siRNA sense strand
gagguuacccacugugaug

SEQ ID NO: 1735905 - RNA, 19 nt, Homo sapiens
  misc_RNA (1)...(19): siRNA sense strand
agaagaggaggcugaagua

SEQ ID NO: 1735906 - RNA, 19 nt, Homo sapiens
  misc_RNA (1)...(19): siRNA sense strand
gaggaaggcuacagaugcu

SEQ ID NO: 1735907 - RNA, 19 nt, Homo sapiens
  misc_RNA (1)...(19): siRNA sense strand
gaagauggugucagugaag

SEQ ID NO: 1735908 - RNA, 19 nt, Homo sapiens
  misc_RNA (1)...(19): siRNA sense strand
uaaagaggaaggcuacaga

SEQ ID NO: 1735909 - RNA, 19 nt, Homo sapiens
  misc_RNA (1)...(19): siRNA sense strand
gagacuggacuuugaggaa

SEQ ID NO: 1735910 - RNA, 19 nt, Homo sapiens
  misc_RNA (1)...(19): siRNA sense strand
gcaagagagacuggacuuu

SEQ ID NO: 1735911 - RNA, 19 nt, Homo sapiens
  misc_RNA (1)...(19): siRNA sense strand
ggauauugcugugucuuac

SEQ ID NO: 1735912 - RNA, 19 nt, Homo sapiens
  misc_RNA (1)...(19): siRNA sense strand
ccacgcaguugauuaugca

SEQ ID NO: 1735913 - RNA, 19 nt, Homo sapiens
  misc_RNA (1)...(19): siRNA sense strand
gagacuccacuuacaaaug

SEQ ID NO: 1735914 - RNA, 19 nt, Homo sapiens
  misc_RNA (1)...(19): siRNA sense strand
aagcagauguugccauugg

SEQ ID NO: 1735915 - RNA, 19 nt, Homo sapiens
  misc_RNA (1)...(19): siRNA sense strand
uucaggagccgaaauagua

SEQ ID NO: 1735916 - RNA, 19 nt, Homo sapiens
  misc_RNA (1)...(19): siRNA sense strand
ggauguggcagcaguggaa

SEQ ID NO: 1735917 - RNA, 19 nt, Homo sapiens
  misc_RNA (1)...(19): siRNA sense strand
cuauggauuugucaacuau

SEQ ID NO: 1735918 - RNA, 19 nt, Homo sapiens
  misc_RNA (1)...(19): siRNA sense strand
ggaagaagaggaggcugaa

SEQ ID NO: 1735919 - RNA, 19 nt, Homo sapiens
  misc_RNA (1)...(19): siRNA sense strand
cgaugagacuccacuuaca

SEQ ID NO: 1735920 - RNA, 19 nt, Homo sapiens
  misc_RNA (1)...(19): siRNA sense strand
caaaggcucccagcauaga

SEQ ID NO: 1735921 - RNA, 19 nt, Homo sapiens
  misc_RNA (1)...(19): siRNA sense strand
aaacaagggaauacaugaa

SEQ ID NO: 1735922 - RNA, 19 nt, Homo sapiens
  misc_RNA (1)...(19): siRNA sense strand
ggagacaucauugccauca

SEQ ID NO: 1735923 - RNA, 19 nt, Homo sapiens
  misc_RNA (1)...(19): siRNA sense strand
cagcaaacacccaauacug

SEQ ID NO: 1735924 - RNA, 19 nt, Homo sapiens
  misc_RNA (1)...(19): siRNA sense strand
gcacagaaaauuuggaaga

SEQ ID NO: 1735925 - RNA, 19 nt, Homo sapiens
  misc_RNA (1)...(19): siRNA sense strand
caucauugaggacaaggua

SEQ ID NO: 1735926 - RNA, 19 nt, Homo sapiens
  misc_RNA (1)...(19): siRNA sense strand
ugaaauauccaugaucauc

SEQ ID NO: 1735927 - RNA, 19 nt, Homo sapiens
  misc_RNA (1)...(19): siRNA sense strand
uacugcagcuggagagauu

SEQ ID NO: 1735928 - RNA, 19 nt, Homo sapiens
  misc_RNA (1)...(19): siRNA sense strand
gcugagaagauggauauug

SEQ ID NO: 1735929 - RNA, 19 nt, Homo sapiens
  misc_RNA (1)...(19): siRNA sense strand
ggaaggaagaauuagaucu

SEQ ID NO: 1735930 - RNA, 19 nt, Homo sapiens
  misc_RNA (1)...(19): siRNA sense strand
caagcuaccauugucauga

SEQ ID NO: 1735931 - RNA, 19 nt, Homo sapiens
  misc_RNA (1)...(19): siRNA sense strand
aagaggaggcugaaguaaa

SEQ ID NO: 1735932 - RNA, 19 nt, Homo sapiens
  misc_RNA (1)...(19): siRNA sense strand
ggaagaaagccaucaugcu

SEQ ID NO: 1735933 - RNA, 19 nt, Homo sapiens
  misc_RNA (1)...(19): siRNA sense strand
ggcgaugagacuccacuua

SEQ ID NO: 1735934 - RNA, 19 nt, Homo sapiens
  misc_RNA (1)...(19): siRNA sense strand
uacaugaacugguggacau

SEQ ID NO: 1735935 - RNA, 19 nt, Homo sapiens
  misc_RNA (1)...(19): siRNA sense strand
gaaaacaagggaauacaug

SEQ ID NO: 1735936 - RNA, 19 nt, Homo sapiens
  misc_RNA (1)...(19): siRNA sense strand
ggacaagguagaugaucau

SEQ ID NO: 1735937 - RNA, 19 nt, Homo sapiens
  misc_RNA (1)...(19): siRNA sense strand
aaguguagcuccagugagu

SEQ ID NO: 1735938 - RNA, 19 nt, Homo sapiens
  misc_RNA (1)...(19): siRNA sense strand
auacagcaaacacccaaua

SEQ ID NO: 1735939 - RNA, 19 nt, Homo sapiens
  misc_RNA (1)...(19): siRNA sense strand
ugcagaggccuauggauuu

SEQ ID NO: 1735940 - RNA, 19 nt, Homo sapiens
  misc_RNA (1)...(19): siRNA sense strand
cagagacucagcacaaguu

SEQ ID NO: 1735941 - RNA, 19 nt, Homo sapiens
  misc_RNA (1)...(19): siRNA sense strand
cauggacagcagugaaaua

SEQ ID NO: 1735942 - RNA, 19 nt, Homo sapiens
  misc_RNA (1)...(19): siRNA sense strand
agaugggaaggaagaauua

SEQ ID NO: 1735943 - RNA, 19 nt, Homo sapiens
  misc_RNA (1)...(19): siRNA sense strand
gcaguugauuaugcaaaca

SEQ ID NO: 1735944 - RNA, 19 nt, Homo sapiens
  misc_RNA (1)...(19): siRNA sense strand
gagucugugucccaagcua

SEQ ID NO: 1735945 - RNA, 19 nt, Homo sapiens
  misc_RNA (1)...(19): siRNA sense strand
cagacucauugaaagaaga

SEQ ID NO: 1735946 - RNA, 19 nt, Homo sapiens
  misc_RNA (1)...(19): siRNA sense strand
aaagagagaugcagaacua

SEQ ID NO: 1735947 - RNA, 19 nt, Homo sapiens
  misc_RNA (1)...(19): siRNA sense strand
ggaagaggaucaaggagaa

SEQ ID NO: 1735948 - RNA, 19 nt, Homo sapiens
  misc_RNA (1)...(19): siRNA sense strand
gcacaaguuugaaauguca

SEQ ID NO: 1735949 - RNA, 19 nt, Homo sapiens
  misc_RNA (1)...(19): siRNA sense strand
ugucagaaauggauaauga

SEQ ID NO: 1735950 - RNA, 19 nt, Homo sapiens
  misc_RNA (1)...(19): siRNA sense strand
gaugauggcuucagcauac

SEQ ID NO: 1735951 - RNA, 19 nt, Homo sapiens
  misc_RNA (1)...(19): siRNA sense strand
gaaggcuacuugucagaaa

SEQ ID NO: 1735952 - RNA, 19 nt, Homo sapiens
  misc_RNA (1)...(19): siRNA sense strand
gcagcgagaugucuuggaa

SEQ ID NO: 1735953 - RNA, 19 nt, Homo sapiens
  misc_RNA (1)...(19): siRNA sense strand
ggacuuagaugaggaacug

SEQ ID NO: 1735954 - RNA, 19 nt, Homo sapiens
  misc_RNA (1)...(19): siRNA sense strand
gaacagauccagcaauucu

SEQ ID NO: 1735955 - RNA, 19 nt, Homo sapiens
  misc_RNA (1)...(19): siRNA sense strand
ggaggaagauggugucagu

SEQ ID NO: 1735956 - RNA, 19 nt, Homo sapiens
  misc_RNA (1)...(19): siRNA sense strand
aauaguagcuggaguuguu

SEQ ID NO: 1735957 - RNA, 19 nt, Homo sapiens
  misc_RNA (1)...(19): siRNA sense strand
uuacaaaugugaagacaga

SEQ ID NO: 1735958 - RNA, 19 nt, Homo sapiens
  misc_RNA (1)...(19): siRNA sense strand
gguggaaacuguugaagau

SEQ ID NO: 1735959 - RNA, 19 nt, Homo sapiens
  misc_RNA (1)...(19): siRNA sense strand
gaagaaucagggacuauuu

SEQ ID NO: 1735960 - RNA, 19 nt, Homo sapiens
  misc_RNA (1)...(19): siRNA sense strand
gaaagcauguugucuccau

SEQ ID NO: 1735961 - RNA, 19 nt, Homo sapiens
  misc_RNA (1)...(19): siRNA sense strand
uggaugagcuuugcaauga

SEQ ID NO: 1735962 - RNA, 19 nt, Homo sapiens
  misc_RNA (1)...(19): siRNA sense strand
gagaagugguggaaacugu

SEQ ID NO: 1735963 - RNA, 19 nt, Homo sapiens
  misc_RNA (1)...(19): siRNA sense strand
ggaaacuguugaagauguu

SEQ ID NO: 1735964 - RNA, 19 nt, Homo sapiens
  misc_RNA (1)...(19): siRNA sense strand
ggaagauggugucagugaa

SEQ ID NO: 1735965 - RNA, 19 nt, Homo sapiens
  misc_RNA (1)...(19): siRNA sense strand
ggaagcagcacugucauuu

SEQ ID NO: 1735966 - RNA, 19 nt, Homo sapiens
  misc_RNA (1)...(19): siRNA sense strand
ugaagcagauguugccauu

SEQ ID NO: 1735967 - RNA, 19 nt, Homo sapiens
  misc_RNA (1)...(19): siRNA sense strand
gcaaacaggaugcuucaga

SEQ ID NO: 1735968 - RNA, 19 nt, Homo sapiens
  misc_RNA (1)...(19): siRNA sense strand
gcagaggccuauggauuug

SEQ ID NO: 1735969 - RNA, 19 nt, Homo sapiens
  misc_RNA (1)...(19): siRNA sense strand
gauaaugaaccuccuguga

SEQ ID NO: 1735970 - RNA, 19 nt, Homo sapiens
  misc_RNA (1)...(19): siRNA sense strand
gaaaguguagcuccaguga

SEQ ID NO: 1735971 - RNA, 19 nt, Homo sapiens
  misc_RNA (1)...(19): siRNA sense strand
gugaagagcuggauuuuga

SEQ ID NO: 1735972 - RNA, 19 nt, Homo sapiens
  misc_RNA (1)...(19): siRNA sense strand
cagcauagaugggaaggaa

SEQ ID NO: 1735973 - RNA, 19 nt, Homo sapiens
  misc_RNA (1)...(19): siRNA sense strand
ggacagcagugaaauaucc

SEQ ID NO: 1735974 - RNA, 19 nt, Homo sapiens
  misc_RNA (1)...(19): siRNA sense strand
gagagaugcagaacuaauu

SEQ ID NO: 1735975 - RNA, 19 nt, Homo sapiens
  misc_RNA (1)...(19): siRNA sense strand
gaagaacuaaagaaaguga

SEQ ID NO: 1735976 - RNA, 19 nt, Homo sapiens
  misc_RNA (1)...(19): siRNA sense strand
gaauuucagcgugacauua

SEQ ID NO: 1735977 - RNA, 19 nt, Homo sapiens
  misc_RNA (1)...(19): siRNA sense strand
gcagugaaauauccaugau

SEQ ID NO: 1735978 - RNA, 19 nt, Homo sapiens
  misc_RNA (1)...(19): siRNA sense strand
gaaggaagaauuagaucug

SEQ ID NO: 1735979 - RNA, 19 nt, Homo sapiens
  misc_RNA (1)...(19): siRNA sense strand
cgagaugucuuggaacaga

SEQ ID NO: 1735980 - RNA, 19 nt, Homo sapiens
  misc_RNA (1)...(19): siRNA sense strand
aagagagacuggacuuuga

SEQ ID NO: 1735981 - RNA, 19 nt, Homo sapiens
  misc_RNA (1)...(19): siRNA sense strand
agacaucauugccaucauu

SEQ ID NO: 1735982 - RNA, 19 nt, Homo sapiens
  misc_RNA (1)...(19): siRNA sense strand
agacuccacuuacaaaugu

SEQ ID NO: 1735983 - RNA, 19 nt, Homo sapiens
  misc_RNA (1)...(19): siRNA sense strand
ucagaaugcuguaauguac

SEQ ID NO: 1735984 - RNA, 19 nt, Homo sapiens
  misc_RNA (1)...(19): siRNA sense strand
gaagaggaggcugaaguaa

SEQ ID NO: 1735985 - RNA, 19 nt, Homo sapiens
  misc_RNA (1)...(19): siRNA sense strand
agaggaggcugaaguaaag

SEQ ID NO: 1735986 - RNA, 19 nt, Homo sapiens
  misc_RNA (1)...(19): siRNA sense strand
gagagauucuacccgcaaa

SEQ ID NO: 1735987 - RNA, 19 nt, Homo sapiens
  misc_RNA (1)...(19): siRNA sense strand
uagaggagccuaaggaaga

SEQ ID NO: 1735988 - RNA, 19 nt, Homo sapiens
  misc_RNA (1)...(19): siRNA sense strand
aauuagaucuggcugagaa

SEQ ID NO: 1735989 - RNA, 19 nt, Homo sapiens
  misc_RNA (1)...(19): siRNA sense strand
ggaggugauuauccacuug

SEQ ID NO: 1735990 - RNA, 19 nt, Homo sapiens
  misc_RNA (1)...(19): siRNA sense strand
caagagagacuggacuuug

SEQ ID NO: 1735991 - RNA, 19 nt, Homo sapiens
  misc_RNA (1)...(19): siRNA sense strand
gaucaaaggcucccagcau

SEQ ID NO: 1735992 - RNA, 19 nt, Homo sapiens
  misc_RNA (1)...(19): siRNA sense strand
caugagaaguggcgaucaa

SEQ ID NO: 1735993 - RNA, 19 nt, Homo sapiens
  misc_RNA (1)...(19): siRNA sense strand
cagcacaaguuugaaaugu

SEQ ID NO: 1735994 - RNA, 19 nt, Homo sapiens
  misc_RNA (1)...(19): siRNA sense strand
cgaaauaguagcuggaguu

SEQ ID NO: 1735995 - RNA, 19 nt, Homo sapiens
  misc_RNA (1)...(19): siRNA sense strand
gaaccagagccagucauuu

SEQ ID NO: 1735996 - RNA, 19 nt, Homo sapiens
  misc_RNA (1)...(19): siRNA sense strand
gaaauaguagcuggaguug

SEQ ID NO: 1735997 - RNA, 19 nt, Homo sapiens
  misc_RNA (1)...(19): siRNA sense strand
ccgaagcacagcugaauuu

SEQ ID NO: 1735998 - RNA, 19 nt, Homo sapiens
  misc_RNA (1)...(19): siRNA sense strand
gaugagcuuugcaaugaca

SEQ ID NO: 1735999 - RNA, 19 nt, Homo sapiens
  misc_RNA (1)...(19): siRNA sense strand
gugcagaggccuauggauu

SEQ ID NO: 1736000 - RNA, 19 nt, Homo sapiens
  misc_RNA (1)...(19): siRNA sense strand
aaagaagaaucagggacua

SEQ ID NO: 1736001 - RNA, 19 nt, Homo sapiens
  misc_RNA (1)...(19): siRNA sense strand
cgagagaagcuauguuuag

SEQ ID NO: 1736002 - RNA, 19 nt, Homo sapiens
  misc_RNA (1)...(19): siRNA sense strand
gaugagacuccacuuacaa

SEQ ID NO: 1736003 - RNA, 19 nt, Homo sapiens
  misc_RNA (1)...(19): siRNA sense strand
agauauagacggcuaaaga

SEQ ID NO: 1736004 - RNA, 19 nt, Homo sapiens
  misc_RNA (1)...(19): siRNA sense strand
caaaauuggguaucaguua

SEQ ID NO: 1736005 - RNA, 19 nt, Homo sapiens
  misc_RNA (1)...(19): siRNA sense strand
ccuauggauuugucaacua

SEQ ID NO: 1736006 - RNA, 19 nt, Homo sapiens
  misc_RNA (1)...(19): siRNA sense strand
uaaggaagaggaucaagga

SEQ ID NO: 1736007 - RNA, 19 nt, Homo sapiens
  misc_RNA (1)...(19): siRNA sense strand
agacucagcacaaguuuga

SEQ ID NO: 1736008 - RNA, 19 nt, Homo sapiens
  misc_RNA (1)...(19): siRNA sense strand
gaugaggaacugggaagua

SEQ ID NO: 1736009 - RNA, 19 nt, Homo sapiens
  misc_RNA (1)...(19): siRNA sense strand
gguggaaccugcagaacca

SEQ ID NO: 1736010 - RNA, 19 nt, Homo sapiens
  misc_RNA (1)...(19): siRNA sense strand
gcauagaugggaaggaaga

SEQ ID NO: 1736011 - RNA, 19 nt, Homo sapiens
  misc_RNA (1)...(19): siRNA sense strand
ugaaauggcuguggcuucu

SEQ ID NO: 1736012 - RNA, 19 nt, Homo sapiens
  misc_RNA (1)...(19): siRNA sense strand
agacuggacuuugaggaaa

SEQ ID NO: 1736013 - RNA, 19 nt, Homo sapiens
  misc_RNA (1)...(19): siRNA sense strand
agugaaauauccaugauca

SEQ ID NO: 1736014 - RNA, 19 nt, Homo sapiens
  misc_RNA (1)...(19): siRNA sense strand
cauugaagauccuuuagag

SEQ ID NO: 1736015 - RNA, 19 nt, Homo sapiens
  misc_RNA (1)...(19): siRNA sense strand
aucaaaggcucccagcaua

SEQ ID NO: 1736016 - RNA, 19 nt, Homo sapiens
  misc_RNA (1)...(19): siRNA sense strand
uggaaacuguugaagaugu

SEQ ID NO: 1736017 - RNA, 19 nt, Homo sapiens
  misc_RNA (1)...(19): siRNA sense strand
gaagauggugucagugaag

SEQ ID NO: 1736018 - RNA, 19 nt, Homo sapiens
  misc_RNA (1)...(19): siRNA sense strand
gagacuggacuuugaggaa

SEQ ID NO: 1736019 - RNA, 19 nt, Homo sapiens
  misc_RNA (1)...(19): siRNA sense strand
gcaagagagacuggacuuu

SEQ ID NO: 1736020 - RNA, 19 nt, Homo sapiens
  misc_RNA (1)...(19): siRNA sense strand
gagguuacccacugugaug

SEQ ID NO: 1736021 - RNA, 19 nt, Homo sapiens
  misc_RNA (1)...(19): siRNA sense strand
gaggaaggcuacagaugcu

SEQ ID NO: 1736022 - RNA, 19 nt, Homo sapiens
  misc_RNA (1)...(19): siRNA sense strand
uaaagaggaaggcuacaga

SEQ ID NO: 1736023 - RNA, 19 nt, Homo sapiens
  misc_RNA (1)...(19): siRNA sense strand
agaagaggaggcugaagua

SEQ ID NO: 1736024 - RNA, 19 nt, Homo sapiens
  misc_RNA (1)...(19): siRNA sense strand
gaaacuguugaagauguua

SEQ ID NO: 1736025 - RNA, 19 nt, Homo sapiens
  misc_RNA (1)...(19): siRNA sense strand
gaagugguggaaacuguug

SEQ ID NO: 1736026 - RNA, 19 nt, Homo sapiens
  misc_RNA (1)...(19): siRNA sense strand
ccacgcaguugauuaugca

SEQ ID NO: 1736027 - RNA, 19 nt, Homo sapiens
  misc_RNA (1)...(19): siRNA sense strand
gagacuccacuuacaaaug

SEQ ID NO: 1736028 - RNA, 19 nt, Homo sapiens
  misc_RNA (1)...(19): siRNA sense strand
aagcagauguugccauugg

SEQ ID NO: 1736029 - RNA, 19 nt, Homo sapiens
  misc_RNA (1)...(19): siRNA sense strand
uucaggagccgaaauagua

SEQ ID NO: 1736030 - RNA, 19 nt, Homo sapiens
  misc_RNA (1)...(19): siRNA sense strand
ggauauugcugugucuuac

SEQ ID NO: 1736031 - RNA, 19 nt, Homo sapiens
  misc_RNA (1)...(19): siRNA sense strand
gaaacccaggagagauaua

SEQ ID NO: 1736032 - RNA, 19 nt, Homo sapiens
  misc_RNA (1)...(19): siRNA sense strand
ggaagaagaggaggcugaa

SEQ ID NO: 1736033 - RNA, 19 nt, Homo sapiens
  misc_RNA (1)...(19): siRNA sense strand
cuauggauuugucaacuau

SEQ ID NO: 1736034 - RNA, 19 nt, Homo sapiens
  misc_RNA (1)...(19): siRNA sense strand
cgaugagacuccacuuaca

SEQ ID NO: 1736035 - RNA, 19 nt, Homo sapiens
  misc_RNA (1)...(19): siRNA sense strand
ggauguggcagcaguggaa

SEQ ID NO: 1736036 - RNA, 19 nt, Homo sapiens
  misc_RNA (1)...(19): siRNA sense strand
caaaggcucccagcauaga

SEQ ID NO: 1736037 - RNA, 19 nt, Homo sapiens
  misc_RNA (1)...(19): siRNA sense strand
aaacaagggaauacaugaa

SEQ ID NO: 1736038 - RNA, 19 nt, Homo sapiens
  misc_RNA (1)...(19): siRNA sense strand
ggagacaucauugccauca

SEQ ID NO: 1736039 - RNA, 19 nt, Homo sapiens
  misc_RNA (1)...(19): siRNA sense strand
gauauagacggcuaaagag

SEQ ID NO: 1736040 - RNA, 19 nt, Homo sapiens
  misc_RNA (1)...(19): siRNA sense strand
gcacagaaaauuuggaaga

SEQ ID NO: 1736041 - RNA, 19 nt, Homo sapiens
  misc_RNA (1)...(19): siRNA sense strand
caucauugaggacaaggua

SEQ ID NO: 1736042 - RNA, 19 nt, Homo sapiens
  misc_RNA (1)...(19): siRNA sense strand
aaacggaaacgaggugaaa

SEQ ID NO: 1736043 - RNA, 19 nt, Homo sapiens
  misc_RNA (1)...(19): siRNA sense strand
cagcaaacacccaauacug

SEQ ID NO: 1736044 - RNA, 19 nt, Homo sapiens
  misc_RNA (1)...(19): siRNA sense strand
aauucaagcuggacacaug

SEQ ID NO: 1736045 - RNA, 19 nt, Homo sapiens
  misc_RNA (1)...(19): siRNA sense strand
uacugcagcuggagagauu

SEQ ID NO: 1736046 - RNA, 19 nt, Homo sapiens
  misc_RNA (1)...(19): siRNA sense strand
aaagagagaugcagaacua

SEQ ID NO: 1736047 - RNA, 19 nt, Homo sapiens
  misc_RNA (1)...(19): siRNA sense strand
ggaagaggaucaaggagaa

SEQ ID NO: 1736048 - RNA, 19 nt, Homo sapiens
  misc_RNA (1)...(19): siRNA sense strand
gcacaaguuugaaauguca

SEQ ID NO: 1736049 - RNA, 19 nt, Homo sapiens
  misc_RNA (1)...(19): siRNA sense strand
ugucagaaauggauaauga

SEQ ID NO: 1736050 - RNA, 19 nt, Homo sapiens
  misc_RNA (1)...(19): siRNA sense strand
gaugauggcuucagcauac

SEQ ID NO: 1736051 - RNA, 19 nt, Homo sapiens
  misc_RNA (1)...(19): siRNA sense strand
gaaggcuacuugucagaaa

SEQ ID NO: 1736052 - RNA, 19 nt, Homo sapiens
  misc_RNA (1)...(19): siRNA sense strand
gcagcgagaugucuuggaa

SEQ ID NO: 1736053 - RNA, 19 nt, Homo sapiens
  misc_RNA (1)...(19): siRNA sense strand
ggacuuagaugaggaacug

SEQ ID NO: 1736054 - RNA, 19 nt, Homo sapiens
  misc_RNA (1)...(19): siRNA sense strand
gaacagauccagcaauucu

SEQ ID NO: 1736055 - RNA, 19 nt, Homo sapiens
  misc_RNA (1)...(19): siRNA sense strand
ggaggaagauggugucagu

SEQ ID NO: 1736056 - RNA, 19 nt, Homo sapiens
  misc_RNA (1)...(19): siRNA sense strand
aauaguagcuggaguuguu

SEQ ID NO: 1736057 - RNA, 19 nt, Homo sapiens
  misc_RNA (1)...(19): siRNA sense strand
uuacaaaugugaagacaga

SEQ ID NO: 1736058 - RNA, 19 nt, Homo sapiens
  misc_RNA (1)...(19): siRNA sense strand
gguggaaacuguugaagau

SEQ ID NO: 1736059 - RNA, 19 nt, Homo sapiens
  misc_RNA (1)...(19): siRNA sense strand
gaagaaucagggacuauuu

SEQ ID NO: 1736060 - RNA, 19 nt, Homo sapiens
  misc_RNA (1)...(19): siRNA sense strand
gaaagcauguugucuccau

SEQ ID NO: 1736061 - RNA, 19 nt, Homo sapiens
  misc_RNA (1)...(19): siRNA sense strand
uggaugagcuuugcaauga

SEQ ID NO: 1736062 - RNA, 19 nt, Homo sapiens
  misc_RNA (1)...(19): siRNA sense strand
gagaagugguggaaacugu

SEQ ID NO: 1736063 - RNA, 19 nt, Homo sapiens
  misc_RNA (1)...(19): siRNA sense strand
ggaaacuguugaagauguu

SEQ ID NO: 1736064 - RNA, 19 nt, Homo sapiens
  misc_RNA (1)...(19): siRNA sense strand
ggaagauggugucagugaa

SEQ ID NO: 1736065 - RNA, 19 nt, Homo sapiens
  misc_RNA (1)...(19): siRNA sense strand
ggaagcagcacugucauuu

SEQ ID NO: 1736066 - RNA, 19 nt, Homo sapiens
  misc_RNA (1)...(19): siRNA sense strand
ugaagcagauguugccauu

SEQ ID NO: 1736067 - RNA, 19 nt, Homo sapiens
  misc_RNA (1)...(19): siRNA sense strand
gcaaacaggaugcuucaga

SEQ ID NO: 1736068 - RNA, 19 nt, Homo sapiens
  misc_RNA (1)...(19): siRNA sense strand
gcagaggccuauggauuug

SEQ ID NO: 1736069 - RNA, 19 nt, Homo sapiens
  misc_RNA (1)...(19): siRNA sense strand
gauaaugaaccuccuguga

SEQ ID NO: 1736070 - RNA, 19 nt, Homo sapiens
  misc_RNA (1)...(19): siRNA sense strand
gaaaguguagcuccaguga

SEQ ID NO: 1736071 - RNA, 19 nt, Homo sapiens
  misc_RNA (1)...(19): siRNA sense strand
gugaagagcuggauuuuga

SEQ ID NO: 1736072 - RNA, 19 nt, Homo sapiens
  misc_RNA (1)...(19): siRNA sense strand
cagcauagaugggaaggaa

SEQ ID NO: 1736073 - RNA, 19 nt, Homo sapiens
  misc_RNA (1)...(19): siRNA sense strand
ggacagcagugaaauaucc

SEQ ID NO: 1736074 - RNA, 19 nt, Homo sapiens
  misc_RNA (1)...(19): siRNA sense strand
gagagaugcagaacuaauu

SEQ ID NO: 1736075 - RNA, 19 nt, Homo sapiens
  misc_RNA (1)...(19): siRNA sense strand
gaagaacuaaagaaaguga

SEQ ID NO: 1736076 - RNA, 19 nt, Homo sapiens
  misc_RNA (1)...(19): siRNA sense strand
gaauuucagcgugacauua

SEQ ID NO: 1736077 - RNA, 19 nt, Homo sapiens
  misc_RNA (1)...(19): siRNA sense strand
gcagugaaauauccaugau

SEQ ID NO: 1736078 - RNA, 19 nt, Homo sapiens
  misc_RNA (1)...(19): siRNA sense strand
gaaggaagaauuagaucug

SEQ ID NO: 1736079 - RNA, 19 nt, Homo sapiens
  misc_RNA (1)...(19): siRNA sense strand
cgagaugucuuggaacaga

SEQ ID NO: 1736080 - RNA, 19 nt, Homo sapiens
  misc_RNA (1)...(19): siRNA sense strand
aagagagacuggacuuuga

SEQ ID NO: 1736081 - RNA, 19 nt, Homo sapiens
  misc_RNA (1)...(19): siRNA sense strand
agacaucauugccaucauu

SEQ ID NO: 1736082 - RNA, 19 nt, Homo sapiens
  misc_RNA (1)...(19): siRNA sense strand
agacuccacuuacaaaugu

SEQ ID NO: 1736083 - RNA, 19 nt, Homo sapiens
  misc_RNA (1)...(19): siRNA sense strand
ucagaaugcuguaauguac

SEQ ID NO: 1736084 - RNA, 19 nt, Homo sapiens
  misc_RNA (1)...(19): siRNA sense strand
gaagaggaggcugaaguaa

SEQ ID NO: 1736085 - RNA, 19 nt, Homo sapiens
  misc_RNA (1)...(19): siRNA sense strand
agaggaggcugaaguaaag

SEQ ID NO: 1736086 - RNA, 19 nt, Homo sapiens
  misc_RNA (1)...(19): siRNA sense strand
gagagauucuacccgcaaa

SEQ ID NO: 1736087 - RNA, 19 nt, Homo sapiens
  misc_RNA (1)...(19): siRNA sense strand
uagaggagccuaaggaaga

SEQ ID NO: 1736088 - RNA, 19 nt, Homo sapiens
  misc_RNA (1)...(19): siRNA sense strand
aauuagaucuggcugagaa

SEQ ID NO: 1736089 - RNA, 19 nt, Homo sapiens
  misc_RNA (1)...(19): siRNA sense strand
ggaggugauuauccacuug

SEQ ID NO: 1736090 - RNA, 19 nt, Homo sapiens
  misc_RNA (1)...(19): siRNA sense strand
caagagagacuggacuuug

SEQ ID NO: 1736091 - RNA, 19 nt, Homo sapiens
  misc_RNA (1)...(19): siRNA sense strand
gaucaaaggcucccagcau

SEQ ID NO: 1736092 - RNA, 19 nt, Homo sapiens
  misc_RNA (1)...(19): siRNA sense strand
caugagaaguggcgaucaa

SEQ ID NO: 1736093 - RNA, 19 nt, Homo sapiens
  misc_RNA (1)...(19): siRNA sense strand
cagcacaaguuugaaaugu

SEQ ID NO: 1736094 - RNA, 19 nt, Homo sapiens
  misc_RNA (1)...(19): siRNA sense strand
cgaaauaguagcuggaguu

SEQ ID NO: 1736095 - RNA, 19 nt, Homo sapiens
  misc_RNA (1)...(19): siRNA sense strand
gaaccagagccagucauuu

SEQ ID NO: 1736096 - RNA, 19 nt, Homo sapiens
  misc_RNA (1)...(19): siRNA sense strand
gaaauaguagcuggaguug

SEQ ID NO: 1736097 - RNA, 19 nt, Homo sapiens
  misc_RNA (1)...(19): siRNA sense strand
ccgaagcacagcugaauuu

SEQ ID NO: 1736098 - RNA, 19 nt, Homo sapiens
  misc_RNA (1)...(19): siRNA sense strand
gaugagcuuugcaaugaca

SEQ ID NO: 1736099 - RNA, 19 nt, Homo sapiens
  misc_RNA (1)...(19): siRNA sense strand
gugcagaggccuauggauu

SEQ ID NO: 1736100 - RNA, 19 nt, Homo sapiens
  misc_RNA (1)...(19): siRNA sense strand
aaagaagaaucagggacua

SEQ ID NO: 1736101 - RNA, 19 nt, Homo sapiens
  misc_RNA (1)...(19): siRNA sense strand
cgagagaagcuauguuuag

SEQ ID NO: 1736102 - RNA, 19 nt, Homo sapiens
  misc_RNA (1)...(19): siRNA sense strand
gaugagacuccacuuacaa

SEQ ID NO: 1736103 - RNA, 19 nt, Homo sapiens
  misc_RNA (1)...(19): siRNA sense strand
agauauagacggcuaaaga

SEQ ID NO: 1736104 - RNA, 19 nt, Homo sapiens
  misc_RNA (1)...(19): siRNA sense strand
caaaauuggguaucaguua

SEQ ID NO: 1736105 - RNA, 19 nt, Homo sapiens
  misc_RNA (1)...(19): siRNA sense strand
ccuauggauuugucaacua

SEQ ID NO: 1736106 - RNA, 19 nt, Homo sapiens
  misc_RNA (1)...(19): siRNA sense strand
uaaggaagaggaucaagga

SEQ ID NO: 1736107 - RNA, 19 nt, Homo sapiens
  misc_RNA (1)...(19): siRNA sense strand
agacucagcacaaguuuga

SEQ ID NO: 1736108 - RNA, 19 nt, Homo sapiens
  misc_RNA (1)...(19): siRNA sense strand
gaugaggaacugggaagua

SEQ ID NO: 1736109 - RNA, 19 nt, Homo sapiens
  misc_RNA (1)...(19): siRNA sense strand
gguggaaccugcagaacca

SEQ ID NO: 1736110 - RNA, 19 nt, Homo sapiens
  misc_RNA (1)...(19): siRNA sense strand
gcauagaugggaaggaaga

SEQ ID NO: 1736111 - RNA, 19 nt, Homo sapiens
  misc_RNA (1)...(19): siRNA sense strand
ugaaauggcuguggcuucu

SEQ ID NO: 1736112 - RNA, 19 nt, Homo sapiens
  misc_RNA (1)...(19): siRNA sense strand
agacuggacuuugaggaaa

SEQ ID NO: 1736113 - RNA, 19 nt, Homo sapiens
  misc_RNA (1)...(19): siRNA sense strand
agugaaauauccaugauca

SEQ ID NO: 1736114 - RNA, 19 nt, Homo sapiens
  misc_RNA (1)...(19): siRNA sense strand
cauugaagauccuuuagag

SEQ ID NO: 1736115 - RNA, 19 nt, Homo sapiens
  misc_RNA (1)...(19): siRNA sense strand
aucaaaggcucccagcaua

SEQ ID NO: 1736116 - RNA, 19 nt, Homo sapiens
  misc_RNA (1)...(19): siRNA sense strand
uggaaacuguugaagaugu

SEQ ID NO: 1736117 - RNA, 19 nt, Homo sapiens
  misc_RNA (1)...(19): siRNA sense strand
gaagauggugucagugaag

SEQ ID NO: 1736118 - RNA, 19 nt, Homo sapiens
  misc_RNA (1)...(19): siRNA sense strand
gagacuggacuuugaggaa

SEQ ID NO: 1736119 - RNA, 19 nt, Homo sapiens
  misc_RNA (1)...(19): siRNA sense strand
gcaagagagacuggacuuu

SEQ ID NO: 1736120 - RNA, 19 nt, Homo sapiens
  misc_RNA (1)...(19): siRNA sense strand
gagguuacccacugugaug

SEQ ID NO: 1736121 - RNA, 19 nt, Homo sapiens
  misc_RNA (1)...(19): siRNA sense strand
gaggaaggcuacagaugcu

SEQ ID NO: 1736122 - RNA, 19 nt, Homo sapiens
  misc_RNA (1)...(19): siRNA sense strand
uaaagaggaaggcuacaga

SEQ ID NO: 1736123 - RNA, 19 nt, Homo sapiens
  misc_RNA (1)...(19): siRNA sense strand
agaagaggaggcugaagua

SEQ ID NO: 1736124 - RNA, 19 nt, Homo sapiens
  misc_RNA (1)...(19): siRNA sense strand
gaaacuguugaagauguua

SEQ ID NO: 1736125 - RNA, 19 nt, Homo sapiens
  misc_RNA (1)...(19): siRNA sense strand
gaagugguggaaacuguug

SEQ ID NO: 1736126 - RNA, 19 nt, Homo sapiens
  misc_RNA (1)...(19): siRNA sense strand
ccacgcaguugauuaugca

SEQ ID NO: 1736127 - RNA, 19 nt, Homo sapiens
  misc_RNA (1)...(19): siRNA sense strand
gagacuccacuuacaaaug

SEQ ID NO: 1736128 - RNA, 19 nt, Homo sapiens
  misc_RNA (1)...(19): siRNA sense strand
aagcagauguugccauugg

SEQ ID NO: 1736129 - RNA, 19 nt, Homo sapiens
  misc_RNA (1)...(19): siRNA sense strand
uucaggagccgaaauagua

SEQ ID NO: 1736130 - RNA, 19 nt, Homo sapiens
  misc_RNA (1)...(19): siRNA sense strand
ggauauugcugugucuuac

SEQ ID NO: 1736131 - RNA, 19 nt, Homo sapiens
  misc_RNA (1)...(19): siRNA sense strand
gaaacccaggagagauaua

SEQ ID NO: 1736132 - RNA, 19 nt, Homo sapiens
  misc_RNA (1)...(19): siRNA sense strand
ggaagaagaggaggcugaa

SEQ ID NO: 1736133 - RNA, 19 nt, Homo sapiens
  misc_RNA (1)...(19): siRNA sense strand
cuauggauuugucaacuau

SEQ ID NO: 1736134 - RNA, 19 nt, Homo sapiens
  misc_RNA (1)...(19): siRNA sense strand
cgaugagacuccacuuaca

SEQ ID NO: 1736135 - RNA, 19 nt, Homo sapiens
  misc_RNA (1)...(19): siRNA sense strand
ggauguggcagcaguggaa

SEQ ID NO: 1736136 - RNA, 19 nt, Homo sapiens
  misc_RNA (1)...(19): siRNA sense strand
caaaggcucccagcauaga

SEQ ID NO: 1736137 - RNA, 19 nt, Homo sapiens
  misc_RNA (1)...(19): siRNA sense strand
aaacaagggaauacaugaa

SEQ ID NO: 1736138 - RNA, 19 nt, Homo sapiens
  misc_RNA (1)...(19): siRNA sense strand
ggagacaucauugccauca

SEQ ID NO: 1736139 - RNA, 19 nt, Homo sapiens
  misc_RNA (1)...(19): siRNA sense strand
gauauagacggcuaaagag

SEQ ID NO: 1736140 - RNA, 19 nt, Homo sapiens
  misc_RNA (1)...(19): siRNA sense strand
gcacagaaaauuuggaaga

SEQ ID NO: 1736141 - RNA, 19 nt, Homo sapiens
  misc_RNA (1)...(19): siRNA sense strand
caucauugaggacaaggua

SEQ ID NO: 1736142 - RNA, 19 nt, Homo sapiens
  misc_RNA (1)...(19): siRNA sense strand
aaacggaaacgaggugaaa

SEQ ID NO: 1736143 - RNA, 19 nt, Homo sapiens
  misc_RNA (1)...(19): siRNA sense strand
cagcaaacacccaauacug

SEQ ID NO: 1736144 - RNA, 19 nt, Homo sapiens
  misc_RNA (1)...(19): siRNA sense strand
aauucaagcuggacacaug

SEQ ID NO: 1736145 - RNA, 19 nt, Homo sapiens
  misc_RNA (1)...(19): siRNA sense strand
uacugcagcuggagagauu

SEQ ID NO: 1736146 - RNA, 19 nt, Homo sapiens
  misc_RNA (1)...(19): siRNA sense strand
ggaagaggaucaaggagaa

SEQ ID NO: 1736147 - RNA, 19 nt, Homo sapiens
  misc_RNA (1)...(19): siRNA sense strand
gcacaaguuugaaauguca

SEQ ID NO: 1736148 - RNA, 19 nt, Homo sapiens
  misc_RNA (1)...(19): siRNA sense strand
ugucagaaauggauaauga

SEQ ID NO: 1736149 - RNA, 19 nt, Homo sapiens
  misc_RNA (1)...(19): siRNA sense strand
gaugauggcuucagcauac

SEQ ID NO: 1736150 - RNA, 19 nt, Homo sapiens
  misc_RNA (1)...(19): siRNA sense strand
gaaggcuacuugucagaaa

SEQ ID NO: 1736151 - RNA, 19 nt, Homo sapiens
  misc_RNA (1)...(19): siRNA sense strand
gcagcgagaugucuuggaa

SEQ ID NO: 1736152 - RNA, 19 nt, Homo sapiens
  misc_RNA (1)...(19): siRNA sense strand
ggacuuagaugaggaacug

SEQ ID NO: 1736153 - RNA, 19 nt, Homo sapiens
  misc_RNA (1)...(19): siRNA sense strand
gaacagauccagcaauucu

SEQ ID NO: 1736154 - RNA, 19 nt, Homo sapiens
  misc_RNA (1)...(19): siRNA sense strand
ggaggaagauggugucagu

SEQ ID NO: 1736155 - RNA, 19 nt, Homo sapiens
  misc_RNA (1)...(19): siRNA sense strand
aauaguagcuggaguuguu

SEQ ID NO: 1736156 - RNA, 19 nt, Homo sapiens
  misc_RNA (1)...(19): siRNA sense strand
uuacaaaugugaagacaga

SEQ ID NO: 1736157 - RNA, 19 nt, Homo sapiens
  misc_RNA (1)...(19): siRNA sense strand
gaaagcauguugucuccau

SEQ ID NO: 1736158 - RNA, 19 nt, Homo sapiens
  misc_RNA (1)...(19): siRNA sense strand
gaagaaucagggacuauuu

SEQ ID NO: 1736159 - RNA, 19 nt, Homo sapiens
  misc_RNA (1)...(19): siRNA sense strand
ggaagcagcacugucauuu

SEQ ID NO: 1736160 - RNA, 19 nt, Homo sapiens
  misc_RNA (1)...(19): siRNA sense strand
ggaagauggugucagugaa

SEQ ID NO: 1736161 - RNA, 19 nt, Homo sapiens
  misc_RNA (1)...(19): siRNA sense strand
ugaagcagauguugccauu

SEQ ID NO: 1736162 - RNA, 19 nt, Homo sapiens
  misc_RNA (1)...(19): siRNA sense strand
gcaaacaggaugcuucaga

SEQ ID NO: 1736163 - RNA, 19 nt, Homo sapiens
  misc_RNA (1)...(19): siRNA sense strand
gcagaggccuauggauuug

SEQ ID NO: 1736164 - RNA, 19 nt, Homo sapiens
  misc_RNA (1)...(19): siRNA sense strand
gauaaugaaccuccuguga

SEQ ID NO: 1736165 - RNA, 19 nt, Homo sapiens
  misc_RNA (1)...(19): siRNA sense strand
gaaaguguagcuccaguga

SEQ ID NO: 1736166 - RNA, 19 nt, Homo sapiens
  misc_RNA (1)...(19): siRNA sense strand
gugaagagcuggauuuuga

SEQ ID NO: 1736167 - RNA, 19 nt, Homo sapiens
  misc_RNA (1)...(19): siRNA sense strand
cagcauagaugggaaggaa

SEQ ID NO: 1736168 - RNA, 19 nt, Homo sapiens
  misc_RNA (1)...(19): siRNA sense strand
ggacagcagugaaauaucc

SEQ ID NO: 1736169 - RNA, 19 nt, Homo sapiens
  misc_RNA (1)...(19): siRNA sense strand
gcagugaaauauccaugau

SEQ ID NO: 1736170 - RNA, 19 nt, Homo sapiens
  misc_RNA (1)...(19): siRNA sense strand
gaauuucagcgugacauua

SEQ ID NO: 1736171 - RNA, 19 nt, Homo sapiens
  misc_RNA (1)...(19): siRNA sense strand
gaaggaagaauuagaucug

SEQ ID NO: 1736172 - RNA, 19 nt, Homo sapiens
  misc_RNA (1)...(19): siRNA sense strand
cgagaugucuuggaacaga

SEQ ID NO: 1736173 - RNA, 19 nt, Homo sapiens
  misc_RNA (1)...(19): siRNA sense strand
aagagagacuggacuuuga

SEQ ID NO: 1736174 - RNA, 19 nt, Homo sapiens
  misc_RNA (1)...(19): siRNA sense strand
agacaucauugccaucauu

SEQ ID NO: 1736175 - RNA, 19 nt, Homo sapiens
  misc_RNA (1)...(19): siRNA sense strand
agacuccacuuacaaaugu

SEQ ID NO: 1736176 - RNA, 19 nt, Homo sapiens
  misc_RNA (1)...(19): siRNA sense strand
ucagaaugcuguaauguac

SEQ ID NO: 1736177 - RNA, 19 nt, Homo sapiens
  misc_RNA (1)...(19): siRNA sense strand
gaagaggaggcugaaguaa

SEQ ID NO: 1736178 - RNA, 19 nt, Homo sapiens
  misc_RNA (1)...(19): siRNA sense strand
ggaggugauuauccacuug

SEQ ID NO: 1736179 - RNA, 19 nt, Homo sapiens
  misc_RNA (1)...(19): siRNA sense strand
gagagauucuacccgcaaa

SEQ ID NO: 1736180 - RNA, 19 nt, Homo sapiens
  misc_RNA (1)...(19): siRNA sense strand
uagaggagccuaaggaaga

SEQ ID NO: 1736181 - RNA, 19 nt, Homo sapiens
  misc_RNA (1)...(19): siRNA sense strand
agaggaggcugaaguaaag

SEQ ID NO: 1736182 - RNA, 19 nt, Homo sapiens
  misc_RNA (1)...(19): siRNA sense strand
aauuagaucuggcugagaa

SEQ ID NO: 1736183 - RNA, 19 nt, Homo sapiens
  misc_RNA (1)...(19): siRNA sense strand
caagagagacuggacuuug

SEQ ID NO: 1736184 - RNA, 19 nt, Homo sapiens
  misc_RNA (1)...(19): siRNA sense strand
gaucaaaggcucccagcau

SEQ ID NO: 1736185 - RNA, 19 nt, Homo sapiens
  misc_RNA (1)...(19): siRNA sense strand
cagcacaaguuugaaaugu

SEQ ID NO: 1736186 - RNA, 19 nt, Homo sapiens
  misc_RNA (1)...(19): siRNA sense strand
cgaaauaguagcuggaguu

SEQ ID NO: 1736187 - RNA, 19 nt, Homo sapiens
  misc_RNA (1)...(19): siRNA sense strand
gaaccagagccagucauuu

SEQ ID NO: 1736188 - RNA, 19 nt, Homo sapiens
  misc_RNA (1)...(19): siRNA sense strand
gaaauaguagcuggaguug

SEQ ID NO: 1736189 - RNA, 19 nt, Homo sapiens
  misc_RNA (1)...(19): siRNA sense strand
ccgaagcacagcugaauuu

SEQ ID NO: 1736190 - RNA, 19 nt, Homo sapiens
  misc_RNA (1)...(19): siRNA sense strand
aaagaagaaucagggacua

SEQ ID NO: 1736191 - RNA, 19 nt, Homo sapiens
  misc_RNA (1)...(19): siRNA sense strand
gugcagaggccuauggauu

SEQ ID NO: 1736192 - RNA, 19 nt, Homo sapiens
  misc_RNA (1)...(19): siRNA sense strand
gaugagacuccacuuacaa

SEQ ID NO: 1736193 - RNA, 19 nt, Homo sapiens
  misc_RNA (1)...(19): siRNA sense strand
gcauagaugggaaggaaga

SEQ ID NO: 1736194 - RNA, 19 nt, Homo sapiens
  misc_RNA (1)...(19): siRNA sense strand
ccuauggauuugucaacua

SEQ ID NO: 1736195 - RNA, 19 nt, Homo sapiens
  misc_RNA (1)...(19): siRNA sense strand
uaaggaagaggaucaagga

SEQ ID NO: 1736196 - RNA, 19 nt, Homo sapiens
  misc_RNA (1)...(19): siRNA sense strand
agacucagcacaaguuuga

SEQ ID NO: 1736197 - RNA, 19 nt, Homo sapiens
  misc_RNA (1)...(19): siRNA sense strand
gaugaggaacugggaagua

SEQ ID NO: 1736198 - RNA, 19 nt, Homo sapiens
  misc_RNA (1)...(19): siRNA sense strand
gguggaaccugcagaacca

SEQ ID NO: 1736199 - RNA, 19 nt, Homo sapiens
  misc_RNA (1)...(19): siRNA sense strand
ugaaauggcuguggcuucu

SEQ ID NO: 1736200 - RNA, 19 nt, Homo sapiens
  misc_RNA (1)...(19): siRNA sense strand
agacuggacuuugaggaaa

SEQ ID NO: 1736201 - RNA, 19 nt, Homo sapiens
  misc_RNA (1)...(19): siRNA sense strand
agugaaauauccaugauca

SEQ ID NO: 1736202 - RNA, 19 nt, Homo sapiens
  misc_RNA (1)...(19): siRNA sense strand
cauugaagauccuuuagag

SEQ ID NO: 1736203 - RNA, 19 nt, Homo sapiens
  misc_RNA (1)...(19): siRNA sense strand
aucaaaggcucccagcaua

SEQ ID NO: 1736204 - RNA, 19 nt, Homo sapiens
  misc_RNA (1)...(19): siRNA sense strand
gagguuacccacugugaug

SEQ ID NO: 1736205 - RNA, 19 nt, Homo sapiens
  misc_RNA (1)...(19): siRNA sense strand
agaagaggaggcugaagua

SEQ ID NO: 1736206 - RNA, 19 nt, Homo sapiens
  misc_RNA (1)...(19): siRNA sense strand
gaggaaggcuacagaugcu

SEQ ID NO: 1736207 - RNA, 19 nt, Homo sapiens
  misc_RNA (1)...(19): siRNA sense strand
gaagauggugucagugaag

SEQ ID NO: 1736208 - RNA, 19 nt, Homo sapiens
  misc_RNA (1)...(19): siRNA sense strand
uaaagaggaaggcuacaga

SEQ ID NO: 1736209 - RNA, 19 nt, Homo sapiens
  misc_RNA (1)...(19): siRNA sense strand
gagacuggacuuugaggaa

SEQ ID NO: 1736210 - RNA, 19 nt, Homo sapiens
  misc_RNA (1)...(19): siRNA sense strand
gcaagagagacuggacuuu

SEQ ID NO: 1736211 - RNA, 19 nt, Homo sapiens
  misc_RNA (1)...(19): siRNA sense strand
ggauauugcugugucuuac

SEQ ID NO: 1736212 - RNA, 19 nt, Homo sapiens
  misc_RNA (1)...(19): siRNA sense strand
ccacgcaguugauuaugca

SEQ ID NO: 1736213 - RNA, 19 nt, Homo sapiens
  misc_RNA (1)...(19): siRNA sense strand
gagacuccacuuacaaaug

SEQ ID NO: 1736214 - RNA, 19 nt, Homo sapiens
  misc_RNA (1)...(19): siRNA sense strand
aagcagauguugccauugg

SEQ ID NO: 1736215 - RNA, 19 nt, Homo sapiens
  misc_RNA (1)...(19): siRNA sense strand
uucaggagccgaaauagua

SEQ ID NO: 1736216 - RNA, 19 nt, Homo sapiens
  misc_RNA (1)...(19): siRNA sense strand
ggauguggcagcaguggaa

SEQ ID NO: 1736217 - RNA, 19 nt, Homo sapiens
  misc_RNA (1)...(19): siRNA sense strand
cuauggauuugucaacuau

SEQ ID NO: 1736218 - RNA, 19 nt, Homo sapiens
  misc_RNA (1)...(19): siRNA sense strand
ggaagaagaggaggcugaa

SEQ ID NO: 1736219 - RNA, 19 nt, Homo sapiens
  misc_RNA (1)...(19): siRNA sense strand
cgaugagacuccacuuaca

SEQ ID NO: 1736220 - RNA, 19 nt, Homo sapiens
  misc_RNA (1)...(19): siRNA sense strand
caaaggcucccagcauaga

SEQ ID NO: 1736221 - RNA, 19 nt, Homo sapiens
  misc_RNA (1)...(19): siRNA sense strand
aaacaagggaauacaugaa

SEQ ID NO: 1736222 - RNA, 19 nt, Homo sapiens
  misc_RNA (1)...(19): siRNA sense strand
ggagacaucauugccauca

SEQ ID NO: 1736223 - RNA, 19 nt, Homo sapiens
  misc_RNA (1)...(19): siRNA sense strand
cagcaaacacccaauacug

SEQ ID NO: 1736224 - RNA, 19 nt, Homo sapiens
  misc_RNA (1)...(19): siRNA sense strand
gcacagaaaauuuggaaga

SEQ ID NO: 1736225 - RNA, 19 nt, Homo sapiens
  misc_RNA (1)...(19): siRNA sense strand
caucauugaggacaaggua

SEQ ID NO: 1736226 - RNA, 19 nt, Homo sapiens
  misc_RNA (1)...(19): siRNA sense strand
ugaaauauccaugaucauc

SEQ ID NO: 1736227 - RNA, 19 nt, Homo sapiens
  misc_RNA (1)...(19): siRNA sense strand
uacugcagcuggagagauu

SEQ ID NO: 1736228 - RNA, 19 nt, Homo sapiens
  misc_RNA (1)...(19): siRNA sense strand
gcugagaagauggauauug

SEQ ID NO: 1736229 - RNA, 19 nt, Homo sapiens
  misc_RNA (1)...(19): siRNA sense strand
ggaaggaagaauuagaucu

SEQ ID NO: 1736230 - RNA, 19 nt, Homo sapiens
  misc_RNA (1)...(19): siRNA sense strand
caagcuaccauugucauga

SEQ ID NO: 1736231 - RNA, 19 nt, Homo sapiens
  misc_RNA (1)...(19): siRNA sense strand
aagaggaggcugaaguaaa

SEQ ID NO: 1736232 - RNA, 19 nt, Homo sapiens
  misc_RNA (1)...(19): siRNA sense strand
ggaagaaagccaucaugcu

SEQ ID NO: 1736233 - RNA, 19 nt, Homo sapiens
  misc_RNA (1)...(19): siRNA sense strand
ggcgaugagacuccacuua

SEQ ID NO: 1736234 - RNA, 19 nt, Homo sapiens
  misc_RNA (1)...(19): siRNA sense strand
uacaugaacugguggacau

SEQ ID NO: 1736235 - RNA, 19 nt, Homo sapiens
  misc_RNA (1)...(19): siRNA sense strand
gaaaacaagggaauacaug

SEQ ID NO: 1736236 - RNA, 19 nt, Homo sapiens
  misc_RNA (1)...(19): siRNA sense strand
ggacaagguagaugaucau

SEQ ID NO: 1736237 - RNA, 19 nt, Homo sapiens
  misc_RNA (1)...(19): siRNA sense strand
aaguguagcuccagugagu

SEQ ID NO: 1736238 - RNA, 19 nt, Homo sapiens
  misc_RNA (1)...(19): siRNA sense strand
auacagcaaacacccaaua

SEQ ID NO: 1736239 - RNA, 19 nt, Homo sapiens
  misc_RNA (1)...(19): siRNA sense strand
ugcagaggccuauggauuu

SEQ ID NO: 1736240 - RNA, 19 nt, Homo sapiens
  misc_RNA (1)...(19): siRNA sense strand
cagagacucagcacaaguu

SEQ ID NO: 1736241 - RNA, 19 nt, Homo sapiens
  misc_RNA (1)...(19): siRNA sense strand
cauggacagcagugaaaua

SEQ ID NO: 1736242 - RNA, 19 nt, Homo sapiens
  misc_RNA (1)...(19): siRNA sense strand
agaugggaaggaagaauua

SEQ ID NO: 1736243 - RNA, 19 nt, Homo sapiens
  misc_RNA (1)...(19): siRNA sense strand
gcaguugauuaugcaaaca

SEQ ID NO: 1736244 - RNA, 19 nt, Homo sapiens
  misc_RNA (1)...(19): siRNA sense strand
gagucugugucccaagcua

SEQ ID NO: 1736245 - RNA, 19 nt, Homo sapiens
  misc_RNA (1)...(19): siRNA sense strand
cagacucauugaaagaaga

SEQ ID NO: 1736246 - RNA, 19 nt, Homo sapiens
  misc_RNA (1)...(19): siRNA sense strand
uacuagagcucuuugauua

SEQ ID NO: 1736247 - RNA, 19 nt, Homo sapiens
  misc_RNA (1)...(19): siRNA sense strand
gaagaaggcguaugaaguu

SEQ ID NO: 1736248 - RNA, 19 nt, Homo sapiens
  misc_RNA (1)...(19): siRNA sense strand
gaucaaagagaagcuauua

SEQ ID NO: 1736249 - RNA, 19 nt, Homo sapiens
  misc_RNA (1)...(19): siRNA sense strand
guaugaaguugcugccuua

SEQ ID NO: 1736250 - RNA, 19 nt, Homo sapiens
  misc_RNA (1)...(19): siRNA sense strand
cuagagcucuuugauuaua

SEQ ID NO: 1736251 - RNA, 19 nt, Homo sapiens
  misc_RNA (1)...(19): siRNA sense strand
uuuaugagcugaucaaaga

SEQ ID NO: 1736252 - RNA, 19 nt, Homo sapiens
  misc_RNA (1)...(19): siRNA sense strand
cagaugggauuguucauug

SEQ ID NO: 1736253 - RNA, 19 nt, Homo sapiens
  misc_RNA (1)...(19): siRNA sense strand
acaaagagcucuccauggu

SEQ ID NO: 1736254 - RNA, 19 nt, Homo sapiens
  misc_RNA (1)...(19): siRNA sense strand
gggaaguguuacauguuua

SEQ ID NO: 1736255 - RNA, 19 nt, Homo sapiens
  misc_RNA (1)...(19): siRNA sense strand
caaaauaugggaaguguua

SEQ ID NO: 1736256 - RNA, 19 nt, Homo sapiens
  misc_RNA (1)...(19): siRNA sense strand
gcaacgggcuggagaucau

SEQ ID NO: 1736257 - RNA, 19 nt, Homo sapiens
  misc_RNA (1)...(19): siRNA sense strand
ucaaagagaagcuauuaga

SEQ ID NO: 1736258 - RNA, 19 nt, Homo sapiens
  misc_RNA (1)...(19): siRNA sense strand
ggaaguguuacauguuuaa

SEQ ID NO: 1736259 - RNA, 19 nt, Homo sapiens
  misc_RNA (1)...(19): siRNA sense strand
gaagggagccacgaugaga

SEQ ID NO: 1736260 - RNA, 19 nt, Homo sapiens
  misc_RNA (1)...(19): siRNA sense strand
gcaagacaucagccaagua

SEQ ID NO: 1736261 - RNA, 19 nt, Homo sapiens
  misc_RNA (1)...(19): siRNA sense strand
ugggaaguguuacauguuu

SEQ ID NO: 1736262 - RNA, 19 nt, Homo sapiens
  misc_RNA (1)...(19): siRNA sense strand
cagaggaaacgacauuuga

SEQ ID NO: 1736263 - RNA, 19 nt, Homo sapiens
  misc_RNA (1)...(19): siRNA sense strand
ccuguaggauugacuguga

SEQ ID NO: 1736264 - RNA, 19 nt, Homo sapiens
  misc_RNA (1)...(19): siRNA sense strand
ggaaacgacauuugaagca

SEQ ID NO: 1736265 - RNA, 19 nt, Homo sapiens
  misc_RNA (1)...(19): siRNA sense strand
uaugggaaguguuacaugu

SEQ ID NO: 1736266 - RNA, 19 nt, Homo sapiens
  misc_RNA (1)...(19): siRNA sense strand
gugcuaguauccuuacaau

SEQ ID NO: 1736267 - RNA, 19 nt, Homo sapiens
  misc_RNA (1)...(19): siRNA sense strand
gaagcaggagugaaaguuc

SEQ ID NO: 1736268 - RNA, 19 nt, Homo sapiens
  misc_RNA (1)...(19): siRNA sense strand
agagaugggccucgacuuu

SEQ ID NO: 1736269 - RNA, 19 nt, Homo sapiens
  misc_RNA (1)...(19): siRNA sense strand
caucaccgccuguaggauu

SEQ ID NO: 1736270 - RNA, 19 nt, Homo sapiens
  misc_RNA (1)...(19): siRNA sense strand
agacagaggaaacgacauu

SEQ ID NO: 1736271 - RNA, 19 nt, Homo sapiens
  misc_RNA (1)...(19): siRNA sense strand
gaugagaaugugaguacuu

SEQ ID NO: 1736272 - RNA, 19 nt, Homo sapiens
  misc_RNA (1)...(19): siRNA sense strand
ugauauugguggucagaug

SEQ ID NO: 1736273 - RNA, 19 nt, Homo sapiens
  misc_RNA (1)...(19): siRNA sense strand
gaacagaagaaggcguaug

SEQ ID NO: 1736274 - RNA, 19 nt, Homo sapiens
  misc_RNA (1)...(19): siRNA sense strand
gagugccgauccucagaga

SEQ ID NO: 1736275 - RNA, 19 nt, Homo sapiens
  misc_RNA (1)...(19): siRNA sense strand
gagaaugugaguacuugug

SEQ ID NO: 1736276 - RNA, 19 nt, Homo sapiens
  misc_RNA (1)...(19): siRNA sense strand
caagacaucagccaaguac

SEQ ID NO: 1736277 - RNA, 19 nt, Homo sapiens
  misc_RNA (1)...(19): siRNA sense strand
ugugagacccgcuacauug

SEQ ID NO: 1736278 - RNA, 19 nt, Homo sapiens
  misc_RNA (1)...(19): siRNA sense strand
gaggaaacgacauuugaag

SEQ ID NO: 1736279 - RNA, 19 nt, Homo sapiens
  misc_RNA (1)...(19): siRNA sense strand
ccaaaccacucugaaacca

SEQ ID NO: 1736280 - RNA, 19 nt, Homo sapiens
  misc_RNA (1)...(19): siRNA sense strand
gagccacgaugagaaugug

SEQ ID NO: 1736281 - RNA, 19 nt, Homo sapiens
  misc_RNA (1)...(19): siRNA sense strand
guucauuggugcuaguauc

SEQ ID NO: 1736282 - RNA, 19 nt, Homo sapiens
  misc_RNA (1)...(19): siRNA sense strand
ggucagaugggauuguuca

SEQ ID NO: 1736283 - RNA, 19 nt, Homo sapiens
  misc_RNA (1)...(19): siRNA sense strand
agaagaaggcguaugaagu

SEQ ID NO: 1736284 - RNA, 19 nt, Homo sapiens
  misc_RNA (1)...(19): siRNA sense strand
ugagacaauugaacagaag

SEQ ID NO: 1736285 - RNA, 19 nt, Homo sapiens
  misc_RNA (1)...(19): siRNA sense strand
caaccuaacccgcuacaac

SEQ ID NO: 1736286 - RNA, 19 nt, Homo sapiens
  misc_RNA (1)...(19): siRNA sense strand
ugagccaccuuucauccaa

SEQ ID NO: 1736287 - RNA, 19 nt, Homo sapiens
  misc_RNA (1)...(19): siRNA sense strand
gaaggcguaugaaguugcu

SEQ ID NO: 1736288 - RNA, 19 nt, Homo sapiens
  misc_RNA (1)...(19): siRNA sense strand
ggacgaagggagccacgau

SEQ ID NO: 1736289 - RNA, 19 nt, Homo sapiens
  misc_RNA (1)...(19): siRNA sense strand
ugccuuacuuggugauauu

SEQ ID NO: 1736290 - RNA, 19 nt, Homo sapiens
  misc_RNA (1)...(19): siRNA sense strand
guucagauccacagucagu

SEQ ID NO: 1736291 - RNA, 19 nt, Homo sapiens
  misc_RNA (1)...(19): siRNA sense strand
gcaacugccgcaugguuca

SEQ ID NO: 1736292 - RNA, 19 nt, Homo sapiens
  misc_RNA (1)...(19): siRNA sense strand
acauucagcaggaugagua

SEQ ID NO: 1736293 - RNA, 19 nt, Homo sapiens
  misc_RNA (1)...(19): siRNA sense strand
aacagaagaaggcguauga

SEQ ID NO: 1736294 - RNA, 19 nt, Homo sapiens
  misc_RNA (1)...(19): siRNA sense strand
aggacacccugcaaccuaa

SEQ ID NO: 1736295 - RNA, 19 nt, Homo sapiens
  misc_RNA (1)...(19): siRNA sense strand
uuacaauacuagagcucuu

SEQ ID NO: 1736296 - RNA, 19 nt, Homo sapiens
  misc_RNA (1)...(19): siRNA sense strand
gugccgauccucagagaug

SEQ ID NO: 1736297 - RNA, 19 nt, Homo sapiens
  misc_RNA (1)...(19): siRNA sense strand
gagaucaugcuggacauuc

SEQ ID NO: 1736298 - RNA, 19 nt, Homo sapiens
  misc_RNA (1)...(19): siRNA sense strand
auacuagagcucuuugauu

SEQ ID NO: 1736299 - RNA, 19 nt, Homo sapiens
  misc_RNA (1)...(19): siRNA sense strand
ucagaugggauuguucauu

SEQ ID NO: 1736300 - RNA, 19 nt, Homo sapiens
  misc_RNA (1)...(19): siRNA sense strand
guggucagaugggauuguu

SEQ ID NO: 1736301 - RNA, 19 nt, Homo sapiens
  misc_RNA (1)...(19): siRNA sense strand
ggagaucaugcuggacauu

SEQ ID NO: 1736302 - RNA, 19 nt, Homo sapiens
  misc_RNA (1)...(19): siRNA sense strand
agaaugugaguacuuguga

SEQ ID NO: 1736303 - RNA, 19 nt, Homo sapiens
  misc_RNA (1)...(19): siRNA sense strand
aagaaggcguaugaaguug

SEQ ID NO: 1736304 - RNA, 19 nt, Homo sapiens
  misc_RNA (1)...(19): siRNA sense strand
cagaagaaggcguaugaag

SEQ ID NO: 1736305 - RNA, 19 nt, Homo sapiens
  misc_RNA (1)...(19): siRNA sense strand
cggaaaaggacagcaauua

SEQ ID NO: 1736306 - RNA, 19 nt, Homo sapiens
  misc_RNA (1)...(19): siRNA sense strand
caaagagaagcuauuagac

SEQ ID NO: 1736307 - RNA, 19 nt, Homo sapiens
  misc_RNA (1)...(19): siRNA sense strand
aaguucagauccacaguca

SEQ ID NO: 1736308 - RNA, 19 nt, Homo sapiens
  misc_RNA (1)...(19): siRNA sense strand
gaaaaggacagcaauuacu

SEQ ID NO: 1736309 - RNA, 19 nt, Homo sapiens
  misc_RNA (1)...(19): siRNA sense strand
agaggaaacgacauuugaa

SEQ ID NO: 1736310 - RNA, 19 nt, Homo sapiens
  misc_RNA (1)...(19): siRNA sense strand
ggagccacgaugagaaugu

SEQ ID NO: 1736311 - RNA, 19 nt, Homo sapiens
  misc_RNA (1)...(19): siRNA sense strand
ugaagcaggagugaaaguu

SEQ ID NO: 1736312 - RNA, 19 nt, Homo sapiens
  misc_RNA (1)...(19): siRNA sense strand
cuaacccgcuacaacaaag

SEQ ID NO: 1736313 - RNA, 19 nt, Homo sapiens
  misc_RNA (1)...(19): siRNA sense strand
ccuaacccgcuacaacaaa

SEQ ID NO: 1736314 - RNA, 19 nt, Homo sapiens
  misc_RNA (1)...(19): siRNA sense strand
gacagaggaaacgacauuu

SEQ ID NO: 1736315 - RNA, 19 nt, Homo sapiens
  misc_RNA (1)...(19): siRNA sense strand
acagaggaaacgacauuug

SEQ ID NO: 1736316 - RNA, 19 nt, Homo sapiens
  misc_RNA (1)...(19): siRNA sense strand
augagacaauugaacagaa

SEQ ID NO: 1736317 - RNA, 19 nt, Homo sapiens
  misc_RNA (1)...(19): siRNA sense strand
guaccuugagaagaaauuu

SEQ ID NO: 1736318 - RNA, 19 nt, Homo sapiens
  misc_RNA (1)...(19): siRNA sense strand
agaucaugcuggacauuca

SEQ ID NO: 1736319 - RNA, 19 nt, Homo sapiens
  misc_RNA (1)...(19): siRNA sense strand
gaaaguucagauccacagu

SEQ ID NO: 1736320 - RNA, 19 nt, Homo sapiens
  misc_RNA (1)...(19): siRNA sense strand
augagaaugugaguacuug

SEQ ID NO: 1736321 - RNA, 19 nt, Homo sapiens
  misc_RNA (1)...(19): siRNA sense strand
gagacaauugaacagaaga

SEQ ID NO: 1736322 - RNA, 19 nt, Homo sapiens
  misc_RNA (1)...(19): siRNA sense strand
cauuggugcuaguauccuu

SEQ ID NO: 1736323 - RNA, 19 nt, Homo sapiens
  misc_RNA (1)...(19): siRNA sense strand
gagaugggccucgacuuuu

SEQ ID NO: 1736324 - RNA, 19 nt, Homo sapiens
  misc_RNA (1)...(19): siRNA sense strand
ggagagacagaggaaacga

SEQ ID NO: 1736325 - RNA, 19 nt, Homo sapiens
  misc_RNA (1)...(19): siRNA sense strand
gacaucagccaaguaccuu

SEQ ID NO: 1736326 - RNA, 19 nt, Homo sapiens
  misc_RNA (1)...(19): siRNA sense strand
ggaaaaggacagcaauuac

SEQ ID NO: 1736327 - RNA, 19 nt, Homo sapiens
  misc_RNA (1)...(19): siRNA sense strand
cuaggucuguuggcggaaa

SEQ ID NO: 1736328 - RNA, 19 nt, Homo sapiens
  misc_RNA (1)...(19): siRNA sense strand
gugaagauccccagcaaga

SEQ ID NO: 1736329 - RNA, 19 nt, Homo sapiens
  misc_RNA (1)...(19): siRNA sense strand
uagaccugcuuggcaaaga

SEQ ID NO: 1736330 - RNA, 19 nt, Homo sapiens
  misc_RNA (1)...(19): siRNA sense strand
ggugcuaguauccuuacaa

SEQ ID NO: 1736331 - RNA, 19 nt, Homo sapiens
  misc_RNA (1)...(19): siRNA sense strand
gaagauccccagcaagaca

SEQ ID NO: 1736332 - RNA, 19 nt, Homo sapiens
  misc_RNA (1)...(19): siRNA sense strand
uacuagagcucuuugauua

SEQ ID NO: 1736333 - RNA, 19 nt, Homo sapiens
  misc_RNA (1)...(19): siRNA sense strand
gaagaaggcguaugaaguu

SEQ ID NO: 1736334 - RNA, 19 nt, Homo sapiens
  misc_RNA (1)...(19): siRNA sense strand
gaucaaagagaagcuauua

SEQ ID NO: 1736335 - RNA, 19 nt, Homo sapiens
  misc_RNA (1)...(19): siRNA sense strand
guaugaaguugcugccuua

SEQ ID NO: 1736336 - RNA, 19 nt, Homo sapiens
  misc_RNA (1)...(19): siRNA sense strand
cuagagcucuuugauuaua

SEQ ID NO: 1736337 - RNA, 19 nt, Homo sapiens
  misc_RNA (1)...(19): siRNA sense strand
uuuaugagcugaucaaaga

SEQ ID NO: 1736338 - RNA, 19 nt, Homo sapiens
  misc_RNA (1)...(19): siRNA sense strand
cagaugggauuguucauug

SEQ ID NO: 1736339 - RNA, 19 nt, Homo sapiens
  misc_RNA (1)...(19): siRNA sense strand
acaaagagcucuccauggu

SEQ ID NO: 1736340 - RNA, 19 nt, Homo sapiens
  misc_RNA (1)...(19): siRNA sense strand
gggaaguguuacauguuua

SEQ ID NO: 1736341 - RNA, 19 nt, Homo sapiens
  misc_RNA (1)...(19): siRNA sense strand
caaaauaugggaaguguua

SEQ ID NO: 1736342 - RNA, 19 nt, Homo sapiens
  misc_RNA (1)...(19): siRNA sense strand
gcaacgggcuggagaucau

SEQ ID NO: 1736343 - RNA, 19 nt, Homo sapiens
  misc_RNA (1)...(19): siRNA sense strand
ucaaagagaagcuauuaga

SEQ ID NO: 1736344 - RNA, 19 nt, Homo sapiens
  misc_RNA (1)...(19): siRNA sense strand
ggaaguguuacauguuuaa

SEQ ID NO: 1736345 - RNA, 19 nt, Homo sapiens
  misc_RNA (1)...(19): siRNA sense strand
gaagggagccacgaugaga

SEQ ID NO: 1736346 - RNA, 19 nt, Homo sapiens
  misc_RNA (1)...(19): siRNA sense strand
gcaagacaucagccaagua

SEQ ID NO: 1736347 - RNA, 19 nt, Homo sapiens
  misc_RNA (1)...(19): siRNA sense strand
ugggaaguguuacauguuu

SEQ ID NO: 1736348 - RNA, 19 nt, Homo sapiens
  misc_RNA (1)...(19): siRNA sense strand
cagaggaaacgacauuuga

SEQ ID NO: 1736349 - RNA, 19 nt, Homo sapiens
  misc_RNA (1)...(19): siRNA sense strand
ccuguaggauugacuguga

SEQ ID NO: 1736350 - RNA, 19 nt, Homo sapiens
  misc_RNA (1)...(19): siRNA sense strand
ggaaacgacauuugaagca

SEQ ID NO: 1736351 - RNA, 19 nt, Homo sapiens
  misc_RNA (1)...(19): siRNA sense strand
uaugggaaguguuacaugu

SEQ ID NO: 1736352 - RNA, 19 nt, Homo sapiens
  misc_RNA (1)...(19): siRNA sense strand
gugcuaguauccuuacaau

SEQ ID NO: 1736353 - RNA, 19 nt, Homo sapiens
  misc_RNA (1)...(19): siRNA sense strand
gaagcaggagugaaaguuc

SEQ ID NO: 1736354 - RNA, 19 nt, Homo sapiens
  misc_RNA (1)...(19): siRNA sense strand
agagaugggccucgacuuu

SEQ ID NO: 1736355 - RNA, 19 nt, Homo sapiens
  misc_RNA (1)...(19): siRNA sense strand
caucaccgccuguaggauu

SEQ ID NO: 1736356 - RNA, 19 nt, Homo sapiens
  misc_RNA (1)...(19): siRNA sense strand
agacagaggaaacgacauu

SEQ ID NO: 1736357 - RNA, 19 nt, Homo sapiens
  misc_RNA (1)...(19): siRNA sense strand
gaugagaaugugaguacuu

SEQ ID NO: 1736358 - RNA, 19 nt, Homo sapiens
  misc_RNA (1)...(19): siRNA sense strand
ugauauugguggucagaug

SEQ ID NO: 1736359 - RNA, 19 nt, Homo sapiens
  misc_RNA (1)...(19): siRNA sense strand
gaacagaagaaggcguaug

SEQ ID NO: 1736360 - RNA, 19 nt, Homo sapiens
  misc_RNA (1)...(19): siRNA sense strand
gagugccgauccucagaga

SEQ ID NO: 1736361 - RNA, 19 nt, Homo sapiens
  misc_RNA (1)...(19): siRNA sense strand
gagaaugugaguacuugug

SEQ ID NO: 1736362 - RNA, 19 nt, Homo sapiens
  misc_RNA (1)...(19): siRNA sense strand
caagacaucagccaaguac

SEQ ID NO: 1736363 - RNA, 19 nt, Homo sapiens
  misc_RNA (1)...(19): siRNA sense strand
ugugagacccgcuacauug

SEQ ID NO: 1736364 - RNA, 19 nt, Homo sapiens
  misc_RNA (1)...(19): siRNA sense strand
gaggaaacgacauuugaag

SEQ ID NO: 1736365 - RNA, 19 nt, Homo sapiens
  misc_RNA (1)...(19): siRNA sense strand
ccaaaccacucugaaacca

SEQ ID NO: 1736366 - RNA, 19 nt, Homo sapiens
  misc_RNA (1)...(19): siRNA sense strand
gagccacgaugagaaugug

SEQ ID NO: 1736367 - RNA, 19 nt, Homo sapiens
  misc_RNA (1)...(19): siRNA sense strand
guucauuggugcuaguauc

SEQ ID NO: 1736368 - RNA, 19 nt, Homo sapiens
  misc_RNA (1)...(19): siRNA sense strand
ggucagaugggauuguuca

SEQ ID NO: 1736369 - RNA, 19 nt, Homo sapiens
  misc_RNA (1)...(19): siRNA sense strand
agaagaaggcguaugaagu

SEQ ID NO: 1736370 - RNA, 19 nt, Homo sapiens
  misc_RNA (1)...(19): siRNA sense strand
ugagacaauugaacagaag

SEQ ID NO: 1736371 - RNA, 19 nt, Homo sapiens
  misc_RNA (1)...(19): siRNA sense strand
caaccuaacccgcuacaac

SEQ ID NO: 1736372 - RNA, 19 nt, Homo sapiens
  misc_RNA (1)...(19): siRNA sense strand
ugagccaccuuucauccaa

SEQ ID NO: 1736373 - RNA, 19 nt, Homo sapiens
  misc_RNA (1)...(19): siRNA sense strand
gaaggcguaugaaguugcu

SEQ ID NO: 1736374 - RNA, 19 nt, Homo sapiens
  misc_RNA (1)...(19): siRNA sense strand
ggacgaagggagccacgau

SEQ ID NO: 1736375 - RNA, 19 nt, Homo sapiens
  misc_RNA (1)...(19): siRNA sense strand
ugccuuacuuggugauauu

SEQ ID NO: 1736376 - RNA, 19 nt, Homo sapiens
  misc_RNA (1)...(19): siRNA sense strand
guucagauccacagucagu

SEQ ID NO: 1736377 - RNA, 19 nt, Homo sapiens
  misc_RNA (1)...(19): siRNA sense strand
gcaacugccgcaugguuca

SEQ ID NO: 1736378 - RNA, 19 nt, Homo sapiens
  misc_RNA (1)...(19): siRNA sense strand
acauucagcaggaugagua

SEQ ID NO: 1736379 - RNA, 19 nt, Homo sapiens
  misc_RNA (1)...(19): siRNA sense strand
aacagaagaaggcguauga

SEQ ID NO: 1736380 - RNA, 19 nt, Homo sapiens
  misc_RNA (1)...(19): siRNA sense strand
aggacacccugcaaccuaa

SEQ ID NO: 1736381 - RNA, 19 nt, Homo sapiens
  misc_RNA (1)...(19): siRNA sense strand
uuacaauacuagagcucuu

SEQ ID NO: 1736382 - RNA, 19 nt, Homo sapiens
  misc_RNA (1)...(19): siRNA sense strand
gugccgauccucagagaug

SEQ ID NO: 1736383 - RNA, 19 nt, Homo sapiens
  misc_RNA (1)...(19): siRNA sense strand
gagaucaugcuggacauuc

SEQ ID NO: 1736384 - RNA, 19 nt, Homo sapiens
  misc_RNA (1)...(19): siRNA sense strand
auacuagagcucuuugauu

SEQ ID NO: 1736385 - RNA, 19 nt, Homo sapiens
  misc_RNA (1)...(19): siRNA sense strand
ucagaugggauuguucauu

SEQ ID NO: 1736386 - RNA, 19 nt, Homo sapiens
  misc_RNA (1)...(19): siRNA sense strand
guggucagaugggauuguu

SEQ ID NO: 1736387 - RNA, 19 nt, Homo sapiens
  misc_RNA (1)...(19): siRNA sense strand
ggagaucaugcuggacauu

SEQ ID NO: 1736388 - RNA, 19 nt, Homo sapiens
  misc_RNA (1)...(19): siRNA sense strand
agaaugugaguacuuguga

SEQ ID NO: 1736389 - RNA, 19 nt, Homo sapiens
  misc_RNA (1)...(19): siRNA sense strand
aagaaggcguaugaaguug

SEQ ID NO: 1736390 - RNA, 19 nt, Homo sapiens
  misc_RNA (1)...(19): siRNA sense strand
cagaagaaggcguaugaag

SEQ ID NO: 1736391 - RNA, 19 nt, Homo sapiens
  misc_RNA (1)...(19): siRNA sense strand
cggaaaaggacagcaauua

SEQ ID NO: 1736392 - RNA, 19 nt, Homo sapiens
  misc_RNA (1)...(19): siRNA sense strand
caaagagaagcuauuagac

SEQ ID NO: 1736393 - RNA, 19 nt, Homo sapiens
  misc_RNA (1)...(19): siRNA sense strand
aaguucagauccacaguca

SEQ ID NO: 1736394 - RNA, 19 nt, Homo sapiens
  misc_RNA (1)...(19): siRNA sense strand
gaaaaggacagcaauuacu

SEQ ID NO: 1736395 - RNA, 19 nt, Homo sapiens
  misc_RNA (1)...(19): siRNA sense strand
agaggaaacgacauuugaa

SEQ ID NO: 1736396 - RNA, 19 nt, Homo sapiens
  misc_RNA (1)...(19): siRNA sense strand
ggagccacgaugagaaugu

SEQ ID NO: 1736397 - RNA, 19 nt, Homo sapiens
  misc_RNA (1)...(19): siRNA sense strand
ugaagcaggagugaaaguu

SEQ ID NO: 1736398 - RNA, 19 nt, Homo sapiens
  misc_RNA (1)...(19): siRNA sense strand
cuaacccgcuacaacaaag

SEQ ID NO: 1736399 - RNA, 19 nt, Homo sapiens
  misc_RNA (1)...(19): siRNA sense strand
ccuaacccgcuacaacaaa

SEQ ID NO: 1736400 - RNA, 19 nt, Homo sapiens
  misc_RNA (1)...(19): siRNA sense strand
gacagaggaaacgacauuu

SEQ ID NO: 1736401 - RNA, 19 nt, Homo sapiens
  misc_RNA (1)...(19): siRNA sense strand
acagaggaaacgacauuug

SEQ ID NO: 1736402 - RNA, 19 nt, Homo sapiens
  misc_RNA (1)...(19): siRNA sense strand
augagacaauugaacagaa

SEQ ID NO: 1736403 - RNA, 19 nt, Homo sapiens
  misc_RNA (1)...(19): siRNA sense strand
guaccuugagaagaaauuu

SEQ ID NO: 1736404 - RNA, 19 nt, Homo sapiens
  misc_RNA (1)...(19): siRNA sense strand
agaucaugcuggacauuca

SEQ ID NO: 1736405 - RNA, 19 nt, Homo sapiens
  misc_RNA (1)...(19): siRNA sense strand
gaaaguucagauccacagu

SEQ ID NO: 1736406 - RNA, 19 nt, Homo sapiens
  misc_RNA (1)...(19): siRNA sense strand
augagaaugugaguacuug

SEQ ID NO: 1736407 - RNA, 19 nt, Homo sapiens
  misc_RNA (1)...(19): siRNA sense strand
gagacaauugaacagaaga

SEQ ID NO: 1736408 - RNA, 19 nt, Homo sapiens
  misc_RNA (1)...(19): siRNA sense strand
cauuggugcuaguauccuu

SEQ ID NO: 1736409 - RNA, 19 nt, Homo sapiens
  misc_RNA (1)...(19): siRNA sense strand
gagaugggccucgacuuuu

SEQ ID NO: 1736410 - RNA, 19 nt, Homo sapiens
  misc_RNA (1)...(19): siRNA sense strand
ggagagacagaggaaacga

SEQ ID NO: 1736411 - RNA, 19 nt, Homo sapiens
  misc_RNA (1)...(19): siRNA sense strand
gacaucagccaaguaccuu

SEQ ID NO: 1736412 - RNA, 19 nt, Homo sapiens
  misc_RNA (1)...(19): siRNA sense strand
ggaaaaggacagcaauuac

SEQ ID NO: 1736413 - RNA, 19 nt, Homo sapiens
  misc_RNA (1)...(19): siRNA sense strand
cuaggucuguuggcggaaa

SEQ ID NO: 1736414 - RNA, 19 nt, Homo sapiens
  misc_RNA (1)...(19): siRNA sense strand
gugaagauccccagcaaga

SEQ ID NO: 1736415 - RNA, 19 nt, Homo sapiens
  misc_RNA (1)...(19): siRNA sense strand
uagaccugcuuggcaaaga

SEQ ID NO: 1736416 - RNA, 19 nt, Homo sapiens
  misc_RNA (1)...(19): siRNA sense strand
ggugcuaguauccuuacaa

SEQ ID NO: 1736417 - RNA, 19 nt, Homo sapiens
  misc_RNA (1)...(19): siRNA sense strand
gaagauccccagcaagaca

SEQ ID NO: 1736418 - RNA, 19 nt, Homo sapiens
  misc_RNA (1)...(19): siRNA sense strand
gcaaaucacugaaguacua

SEQ ID NO: 1736419 - RNA, 19 nt, Homo sapiens
  misc_RNA (1)...(19): siRNA sense strand
gaaaguguguucagaauca

SEQ ID NO: 1736420 - RNA, 19 nt, Homo sapiens
  misc_RNA (1)...(19): siRNA sense strand
gaacuuauuugguugaaug

SEQ ID NO: 1736421 - RNA, 19 nt, Homo sapiens
  misc_RNA (1)...(19): siRNA sense strand
ggaaagagaugauuugcau

SEQ ID NO: 1736422 - RNA, 19 nt, Homo sapiens
  misc_RNA (1)...(19): siRNA sense strand
ccaaagaagcuacugauua

SEQ ID NO: 1736423 - RNA, 19 nt, Homo sapiens
  misc_RNA (1)...(19): siRNA sense strand
gaaggacuaugaauuacaa

SEQ ID NO: 1736424 - RNA, 19 nt, Homo sapiens
  misc_RNA (1)...(19): siRNA sense strand
agacaaagcucaugauauc

SEQ ID NO: 1736425 - RNA, 19 nt, Homo sapiens
  misc_RNA (1)...(19): siRNA sense strand
cagcagaucucauuauuca

SEQ ID NO: 1736426 - RNA, 19 nt, Homo sapiens
  misc_RNA (1)...(19): siRNA sense strand
caaagaagcuacugauuac

SEQ ID NO: 1736427 - RNA, 19 nt, Homo sapiens
  misc_RNA (1)...(19): siRNA sense strand
gaacaugaaccaagucuau

SEQ ID NO: 1736428 - RNA, 19 nt, Homo sapiens
  misc_RNA (1)...(19): siRNA sense strand
caagaggaaucaguuuaua

SEQ ID NO: 1736429 - RNA, 19 nt, Homo sapiens
  misc_RNA (1)...(19): siRNA sense strand
caaaugacagcaccucuua

SEQ ID NO: 1736430 - RNA, 19 nt, Homo sapiens
  misc_RNA (1)...(19): siRNA sense strand
caaagacgaugaauguguu

SEQ ID NO: 1736431 - RNA, 19 nt, Homo sapiens
  misc_RNA (1)...(19): siRNA sense strand
uaaauuugcuggugauuca

SEQ ID NO: 1736432 - RNA, 19 nt, Homo sapiens
  misc_RNA (1)...(19): siRNA sense strand
agaaauugcuggguauaua

SEQ ID NO: 1736433 - RNA, 19 nt, Homo sapiens
  misc_RNA (1)...(19): siRNA sense strand
aggaaucacucaaaguuua

SEQ ID NO: 1736434 - RNA, 19 nt, Homo sapiens
  misc_RNA (1)...(19): siRNA sense strand
gaacagacaaagcucauga

SEQ ID NO: 1736435 - RNA, 19 nt, Homo sapiens
  misc_RNA (1)...(19): siRNA sense strand
gguauauacuugaauguga

SEQ ID NO: 1736436 - RNA, 19 nt, Homo sapiens
  misc_RNA (1)...(19): siRNA sense strand
uaaaucaguucaggagaua

SEQ ID NO: 1736437 - RNA, 19 nt, Homo sapiens
  misc_RNA (1)...(19): siRNA sense strand
gaauuugaaucuagucuca

SEQ ID NO: 1736438 - RNA, 19 nt, Homo sapiens
  misc_RNA (1)...(19): siRNA sense strand
gaaauuauggccuuaagga

SEQ ID NO: 1736439 - RNA, 19 nt, Homo sapiens
  misc_RNA (1)...(19): siRNA sense strand
ccaggcagaucaauuggua

SEQ ID NO: 1736440 - RNA, 19 nt, Homo sapiens
  misc_RNA (1)...(19): siRNA sense strand
aaacuaaacugugugaaga

SEQ ID NO: 1736441 - RNA, 19 nt, Homo sapiens
  misc_RNA (1)...(19): siRNA sense strand
caauguggcuucaauaaag

SEQ ID NO: 1736442 - RNA, 19 nt, Homo sapiens
  misc_RNA (1)...(19): siRNA sense strand
uaaacugacuuaugcagaa

SEQ ID NO: 1736443 - RNA, 19 nt, Homo sapiens
  misc_RNA (1)...(19): siRNA sense strand
agaagcuacugauuacuua

SEQ ID NO: 1736444 - RNA, 19 nt, Homo sapiens
  misc_RNA (1)...(19): siRNA sense strand
gcagaacaguacucagcua

SEQ ID NO: 1736445 - RNA, 19 nt, Homo sapiens
  misc_RNA (1)...(19): siRNA sense strand
ugaagaagaagcaguuaua

SEQ ID NO: 1736446 - RNA, 19 nt, Homo sapiens
  misc_RNA (1)...(19): siRNA sense strand
uagcaaaccuaaugggaaa

SEQ ID NO: 1736447 - RNA, 19 nt, Homo sapiens
  misc_RNA (1)...(19): siRNA sense strand
gaguagagccaaauucauu

SEQ ID NO: 1736448 - RNA, 19 nt, Homo sapiens
  misc_RNA (1)...(19): siRNA sense strand
gaauugagcaacaguauca

SEQ ID NO: 1736449 - RNA, 19 nt, Homo sapiens
  misc_RNA (1)...(19): siRNA sense strand
caacugaagccaaggaauu

SEQ ID NO: 1736450 - RNA, 19 nt, Homo sapiens
  misc_RNA (1)...(19): siRNA sense strand
gaauuggguugaugagaug

SEQ ID NO: 1736451 - RNA, 19 nt, Homo sapiens
  misc_RNA (1)...(19): siRNA sense strand
ggagugcaguuucagaaug

SEQ ID NO: 1736452 - RNA, 19 nt, Homo sapiens
  misc_RNA (1)...(19): siRNA sense strand
caugguagauucacaacaa

SEQ ID NO: 1736453 - RNA, 19 nt, Homo sapiens
  misc_RNA (1)...(19): siRNA sense strand
gcaauggagaucugaagua

SEQ ID NO: 1736454 - RNA, 19 nt, Homo sapiens
  misc_RNA (1)...(19): siRNA sense strand
uaaacugugugaagaagaa

SEQ ID NO: 1736455 - RNA, 19 nt, Homo sapiens
  misc_RNA (1)...(19): siRNA sense strand
ccaggaaucccaagucuuu

SEQ ID NO: 1736456 - RNA, 19 nt, Homo sapiens
  misc_RNA (1)...(19): siRNA sense strand
ucccuaaccucuucuagua

SEQ ID NO: 1736457 - RNA, 19 nt, Homo sapiens
  misc_RNA (1)...(19): siRNA sense strand
gaacaggagaaacuaaaga

SEQ ID NO: 1736458 - RNA, 19 nt, Homo sapiens
  misc_RNA (1)...(19): siRNA sense strand
cagaauguccugacucuuu

SEQ ID NO: 1736459 - RNA, 19 nt, Homo sapiens
  misc_RNA (1)...(19): siRNA sense strand
gagcaacaguaucagaaug

SEQ ID NO: 1736460 - RNA, 19 nt, Homo sapiens
  misc_RNA (1)...(19): siRNA sense strand
caggauuaguuccaaauuu

SEQ ID NO: 1736461 - RNA, 19 nt, Homo sapiens
  misc_RNA (1)...(19): siRNA sense strand
gcagaucaauugguacaga

SEQ ID NO: 1736462 - RNA, 19 nt, Homo sapiens
  misc_RNA (1)...(19): siRNA sense strand
gaccuaaggacucgauaua

SEQ ID NO: 1736463 - RNA, 19 nt, Homo sapiens
  misc_RNA (1)...(19): siRNA sense strand
gcaauguggcuucaauaaa

SEQ ID NO: 1736464 - RNA, 19 nt, Homo sapiens
  misc_RNA (1)...(19): siRNA sense strand
ccaaauucauugcaaacuu

SEQ ID NO: 1736465 - RNA, 19 nt, Homo sapiens
  misc_RNA (1)...(19): siRNA sense strand
guacucagcuacagugaag

SEQ ID NO: 1736466 - RNA, 19 nt, Homo sapiens
  misc_RNA (1)...(19): siRNA sense strand
gcagauugacaacagguua

SEQ ID NO: 1736467 - RNA, 19 nt, Homo sapiens
  misc_RNA (1)...(19): siRNA sense strand
ugggaacaaucacaaauaa

SEQ ID NO: 1736468 - RNA, 19 nt, Homo sapiens
  misc_RNA (1)...(19): siRNA sense strand
gcaagaggaaucaguuuau

SEQ ID NO: 1736469 - RNA, 19 nt, Homo sapiens
  misc_RNA (1)...(19): siRNA sense strand
gagugcaguuucagaauga

SEQ ID NO: 1736470 - RNA, 19 nt, Homo sapiens
  misc_RNA (1)...(19): siRNA sense strand
gagcagcuacuucuagaaa

SEQ ID NO: 1736471 - RNA, 19 nt, Homo sapiens
  misc_RNA (1)...(19): siRNA sense strand
guacagauucuuauugaug

SEQ ID NO: 1736472 - RNA, 19 nt, Homo sapiens
  misc_RNA (1)...(19): siRNA sense strand
gaaccaagucuauucuaug

SEQ ID NO: 1736473 - RNA, 19 nt, Homo sapiens
  misc_RNA (1)...(19): siRNA sense strand
ggaacaaucacaaauaagu

SEQ ID NO: 1736474 - RNA, 19 nt, Homo sapiens
  misc_RNA (1)...(19): siRNA sense strand
ggaaucaguuuauaaucuc

SEQ ID NO: 1736475 - RNA, 19 nt, Homo sapiens
  misc_RNA (1)...(19): siRNA sense strand
gcaguauuaucaagaacuu

SEQ ID NO: 1736476 - RNA, 19 nt, Homo sapiens
  misc_RNA (1)...(19): siRNA sense strand
guugaaagccauuuagaaa

SEQ ID NO: 1736477 - RNA, 19 nt, Homo sapiens
  misc_RNA (1)...(19): siRNA sense strand
gcucagauuugccaagugu

SEQ ID NO: 1736478 - RNA, 19 nt, Homo sapiens
  misc_RNA (1)...(19): siRNA sense strand
gagccaaauucauugcaaa

SEQ ID NO: 1736479 - RNA, 19 nt, Homo sapiens
  misc_RNA (1)...(19): siRNA sense strand
gcaaaacucuugaauacau

SEQ ID NO: 1736480 - RNA, 19 nt, Homo sapiens
  misc_RNA (1)...(19): siRNA sense strand
gagaugauuugcaugaaag

SEQ ID NO: 1736481 - RNA, 19 nt, Homo sapiens
  misc_RNA (1)...(19): siRNA sense strand
uuacaaagacgaugaaugu

SEQ ID NO: 1736482 - RNA, 19 nt, Homo sapiens
  misc_RNA (1)...(19): siRNA sense strand
ugagagaacuugaucaaaa

SEQ ID NO: 1736483 - RNA, 19 nt, Homo sapiens
  misc_RNA (1)...(19): siRNA sense strand
gaaacuaaacugugugaag

SEQ ID NO: 1736484 - RNA, 19 nt, Homo sapiens
  misc_RNA (1)...(19): siRNA sense strand
ggaaucacucaaaguuuaa

SEQ ID NO: 1736485 - RNA, 19 nt, Homo sapiens
  misc_RNA (1)...(19): siRNA sense strand
gaacaguacucagcuacag

SEQ ID NO: 1736486 - RNA, 19 nt, Homo sapiens
  misc_RNA (1)...(19): siRNA sense strand
gaacaaucacaaauaagug

SEQ ID NO: 1736487 - RNA, 19 nt, Homo sapiens
  misc_RNA (1)...(19): siRNA sense strand
gaaguacagcugugauaga

SEQ ID NO: 1736488 - RNA, 19 nt, Homo sapiens
  misc_RNA (1)...(19): siRNA sense strand
gcuuaugacuggagugaga

SEQ ID NO: 1736489 - RNA, 19 nt, Homo sapiens
  misc_RNA (1)...(19): siRNA sense strand
gacagcaccucuuaaacug

SEQ ID NO: 1736490 - RNA, 19 nt, Homo sapiens
  misc_RNA (1)...(19): siRNA sense strand
gggcugacccagaguuuaa

SEQ ID NO: 1736491 - RNA, 19 nt, Homo sapiens
  misc_RNA (1)...(19): siRNA sense strand
gaaaaccccuucuaaaguc

SEQ ID NO: 1736492 - RNA, 19 nt, Homo sapiens
  misc_RNA (1)...(19): siRNA sense strand
agugaaggacuaugaauua

SEQ ID NO: 1736493 - RNA, 19 nt, Homo sapiens
  misc_RNA (1)...(19): siRNA sense strand
gaaacuacucagagaaaga

SEQ ID NO: 1736494 - RNA, 19 nt, Homo sapiens
  misc_RNA (1)...(19): siRNA sense strand
uggaacgacuuaaagauga

SEQ ID NO: 1736495 - RNA, 19 nt, Homo sapiens
  misc_RNA (1)...(19): siRNA sense strand
cuacaucucugaaguucga

SEQ ID NO: 1736496 - RNA, 19 nt, Homo sapiens
  misc_RNA (1)...(19): siRNA sense strand
gagagaaacaccaacauag

SEQ ID NO: 1736497 - RNA, 19 nt, Homo sapiens
  misc_RNA (1)...(19): siRNA sense strand
ugaauuggguugaugagau

SEQ ID NO: 1736498 - RNA, 19 nt, Homo sapiens
  misc_RNA (1)...(19): siRNA sense strand
gaaauuuguucaggaucuu

SEQ ID NO: 1736499 - RNA, 19 nt, Homo sapiens
  misc_RNA (1)...(19): siRNA sense strand
aaauuucaguucaggagua

SEQ ID NO: 1736500 - RNA, 19 nt, Homo sapiens
  misc_RNA (1)...(19): siRNA sense strand
caaauaagugugaggaguu

SEQ ID NO: 1736501 - RNA, 19 nt, Homo sapiens
  misc_RNA (1)...(19): siRNA sense strand
uaacacaacuggaaaagga

SEQ ID NO: 1736502 - RNA, 19 nt, Homo sapiens
  misc_RNA (1)...(19): siRNA sense strand
gagauaaccauuuacaaag

SEQ ID NO: 1736503 - RNA, 19 nt, Homo sapiens
  misc_RNA (1)...(19): siRNA sense strand
ucaaagcuaucugugacua

SEQ ID NO: 1736504 - RNA, 19 nt, Homo sapiens
  misc_RNA (1)...(19): siRNA sense strand
aaacuucuauuccgaucaa

SEQ ID NO: 1736505 - RNA, 19 nt, Homo sapiens
  misc_RNA (1)...(19): siRNA sense strand
ugagagaaacaccaacaua

SEQ ID NO: 1736506 - RNA, 19 nt, Homo sapiens
  misc_RNA (1)...(19): siRNA sense strand
caaagaagcuaaaaucagu

SEQ ID NO: 1736507 - RNA, 19 nt, Homo sapiens
  misc_RNA (1)...(19): siRNA sense strand
aggaggaaguugcuuauga

SEQ ID NO: 1736508 - RNA, 19 nt, Homo sapiens
  misc_RNA (1)...(19): siRNA sense strand
aggagaaacuaaagaaaga

SEQ ID NO: 1736509 - RNA, 19 nt, Homo sapiens
  misc_RNA (1)...(19): siRNA sense strand
gaagaucggcugauuagac

SEQ ID NO: 1736510 - RNA, 19 nt, Homo sapiens
  misc_RNA (1)...(19): siRNA sense strand
gauauaacacaacuggaaa

SEQ ID NO: 1736511 - RNA, 19 nt, Homo sapiens
  misc_RNA (1)...(19): siRNA sense strand
guacagcaaaggacgcaua

SEQ ID NO: 1736512 - RNA, 19 nt, Homo sapiens
  misc_RNA (1)...(19): siRNA sense strand
gaggaugaguugcagaaag

SEQ ID NO: 1736513 - RNA, 19 nt, Homo sapiens
  misc_RNA (1)...(19): siRNA sense strand
caauggagaucugaaguag

SEQ ID NO: 1736514 - RNA, 19 nt, Homo sapiens
  misc_RNA (1)...(19): siRNA sense strand
ugaaccaagucuauucuau

SEQ ID NO: 1736515 - RNA, 19 nt, Homo sapiens
  misc_RNA (1)...(19): siRNA sense strand
cuacagacaaauugagaua

SEQ ID NO: 1736516 - RNA, 19 nt, Homo sapiens
  misc_RNA (1)...(19): siRNA sense strand
gcaguggagcuggaucuua

SEQ ID NO: 1736517 - RNA, 19 nt, Homo sapiens
  misc_RNA (1)...(19): siRNA sense strand
ucacucucaugacacaaua

SEQ ID NO: 1736518 - RNA, 19 nt, Homo sapiens
  misc_RNA (1)...(19): siRNA sense strand
gcaaaucacugaaguacua

SEQ ID NO: 1736519 - RNA, 19 nt, Homo sapiens
  misc_RNA (1)...(19): siRNA sense strand
gaaaguguguucagaauca

SEQ ID NO: 1736520 - RNA, 19 nt, Homo sapiens
  misc_RNA (1)...(19): siRNA sense strand
gaacuuauuugguugaaug

SEQ ID NO: 1736521 - RNA, 19 nt, Homo sapiens
  misc_RNA (1)...(19): siRNA sense strand
ggaaagagaugauuugcau

SEQ ID NO: 1736522 - RNA, 19 nt, Homo sapiens
  misc_RNA (1)...(19): siRNA sense strand
ccaaagaagcuacugauua

SEQ ID NO: 1736523 - RNA, 19 nt, Homo sapiens
  misc_RNA (1)...(19): siRNA sense strand
gaaggacuaugaauuacaa

SEQ ID NO: 1736524 - RNA, 19 nt, Homo sapiens
  misc_RNA (1)...(19): siRNA sense strand
agacaaagcucaugauauc

SEQ ID NO: 1736525 - RNA, 19 nt, Homo sapiens
  misc_RNA (1)...(19): siRNA sense strand
cagcagaucucauuauuca

SEQ ID NO: 1736526 - RNA, 19 nt, Homo sapiens
  misc_RNA (1)...(19): siRNA sense strand
caaagaagcuacugauuac

SEQ ID NO: 1736527 - RNA, 19 nt, Homo sapiens
  misc_RNA (1)...(19): siRNA sense strand
gaacaugaaccaagucuau

SEQ ID NO: 1736528 - RNA, 19 nt, Homo sapiens
  misc_RNA (1)...(19): siRNA sense strand
caagaggaaucaguuuaua

SEQ ID NO: 1736529 - RNA, 19 nt, Homo sapiens
  misc_RNA (1)...(19): siRNA sense strand
caaaugacagcaccucuua

SEQ ID NO: 1736530 - RNA, 19 nt, Homo sapiens
  misc_RNA (1)...(19): siRNA sense strand
caaagacgaugaauguguu

SEQ ID NO: 1736531 - RNA, 19 nt, Homo sapiens
  misc_RNA (1)...(19): siRNA sense strand
uaaauuugcuggugauuca

SEQ ID NO: 1736532 - RNA, 19 nt, Homo sapiens
  misc_RNA (1)...(19): siRNA sense strand
agaaauugcuggguauaua

SEQ ID NO: 1736533 - RNA, 19 nt, Homo sapiens
  misc_RNA (1)...(19): siRNA sense strand
aggaaucacucaaaguuua

SEQ ID NO: 1736534 - RNA, 19 nt, Homo sapiens
  misc_RNA (1)...(19): siRNA sense strand
gaacagacaaagcucauga

SEQ ID NO: 1736535 - RNA, 19 nt, Homo sapiens
  misc_RNA (1)...(19): siRNA sense strand
gguauauacuugaauguga

SEQ ID NO: 1736536 - RNA, 19 nt, Homo sapiens
  misc_RNA (1)...(19): siRNA sense strand
uaaaucaguucaggagaua

SEQ ID NO: 1736537 - RNA, 19 nt, Homo sapiens
  misc_RNA (1)...(19): siRNA sense strand
gaauuugaaucuagucuca

SEQ ID NO: 1736538 - RNA, 19 nt, Homo sapiens
  misc_RNA (1)...(19): siRNA sense strand
gaaauuauggccuuaagga

SEQ ID NO: 1736539 - RNA, 19 nt, Homo sapiens
  misc_RNA (1)...(19): siRNA sense strand
ccaggcagaucaauuggua

SEQ ID NO: 1736540 - RNA, 19 nt, Homo sapiens
  misc_RNA (1)...(19): siRNA sense strand
aaacuaaacugugugaaga

SEQ ID NO: 1736541 - RNA, 19 nt, Homo sapiens
  misc_RNA (1)...(19): siRNA sense strand
caauguggcuucaauaaag

SEQ ID NO: 1736542 - RNA, 19 nt, Homo sapiens
  misc_RNA (1)...(19): siRNA sense strand
uaaacugacuuaugcagaa

SEQ ID NO: 1736543 - RNA, 19 nt, Homo sapiens
  misc_RNA (1)...(19): siRNA sense strand
agaagcuacugauuacuua

SEQ ID NO: 1736544 - RNA, 19 nt, Homo sapiens
  misc_RNA (1)...(19): siRNA sense strand
gcagaacaguacucagcua

SEQ ID NO: 1736545 - RNA, 19 nt, Homo sapiens
  misc_RNA (1)...(19): siRNA sense strand
ugaagaagaagcaguuaua

SEQ ID NO: 1736546 - RNA, 19 nt, Homo sapiens
  misc_RNA (1)...(19): siRNA sense strand
uagcaaaccuaaugggaaa

SEQ ID NO: 1736547 - RNA, 19 nt, Homo sapiens
  misc_RNA (1)...(19): siRNA sense strand
gaguagagccaaauucauu

SEQ ID NO: 1736548 - RNA, 19 nt, Homo sapiens
  misc_RNA (1)...(19): siRNA sense strand
gaauugagcaacaguauca

SEQ ID NO: 1736549 - RNA, 19 nt, Homo sapiens
  misc_RNA (1)...(19): siRNA sense strand
caacugaagccaaggaauu

SEQ ID NO: 1736550 - RNA, 19 nt, Homo sapiens
  misc_RNA (1)...(19): siRNA sense strand
gaauuggguugaugagaug

SEQ ID NO: 1736551 - RNA, 19 nt, Homo sapiens
  misc_RNA (1)...(19): siRNA sense strand
ggagugcaguuucagaaug

SEQ ID NO: 1736552 - RNA, 19 nt, Homo sapiens
  misc_RNA (1)...(19): siRNA sense strand
caugguagauucacaacaa

SEQ ID NO: 1736553 - RNA, 19 nt, Homo sapiens
  misc_RNA (1)...(19): siRNA sense strand
gcaauggagaucugaagua

SEQ ID NO: 1736554 - RNA, 19 nt, Homo sapiens
  misc_RNA (1)...(19): siRNA sense strand
uaaacugugugaagaagaa

SEQ ID NO: 1736555 - RNA, 19 nt, Homo sapiens
  misc_RNA (1)...(19): siRNA sense strand
ccaggaaucccaagucuuu

SEQ ID NO: 1736556 - RNA, 19 nt, Homo sapiens
  misc_RNA (1)...(19): siRNA sense strand
ucccuaaccucuucuagua

SEQ ID NO: 1736557 - RNA, 19 nt, Homo sapiens
  misc_RNA (1)...(19): siRNA sense strand
gaacaggagaaacuaaaga

SEQ ID NO: 1736558 - RNA, 19 nt, Homo sapiens
  misc_RNA (1)...(19): siRNA sense strand
cagaauguccugacucuuu

SEQ ID NO: 1736559 - RNA, 19 nt, Homo sapiens
  misc_RNA (1)...(19): siRNA sense strand
gagcaacaguaucagaaug

SEQ ID NO: 1736560 - RNA, 19 nt, Homo sapiens
  misc_RNA (1)...(19): siRNA sense strand
caggauuaguuccaaauuu

SEQ ID NO: 1736561 - RNA, 19 nt, Homo sapiens
  misc_RNA (1)...(19): siRNA sense strand
gcagaucaauugguacaga

SEQ ID NO: 1736562 - RNA, 19 nt, Homo sapiens
  misc_RNA (1)...(19): siRNA sense strand
gaccuaaggacucgauaua

SEQ ID NO: 1736563 - RNA, 19 nt, Homo sapiens
  misc_RNA (1)...(19): siRNA sense strand
gcaauguggcuucaauaaa

SEQ ID NO: 1736564 - RNA, 19 nt, Homo sapiens
  misc_RNA (1)...(19): siRNA sense strand
ccaaauucauugcaaacuu

SEQ ID NO: 1736565 - RNA, 19 nt, Homo sapiens
  misc_RNA (1)...(19): siRNA sense strand
guacucagcuacagugaag

SEQ ID NO: 1736566 - RNA, 19 nt, Homo sapiens
  misc_RNA (1)...(19): siRNA sense strand
gcagauugacaacagguua

SEQ ID NO: 1736567 - RNA, 19 nt, Homo sapiens
  misc_RNA (1)...(19): siRNA sense strand
ugggaacaaucacaaauaa

SEQ ID NO: 1736568 - RNA, 19 nt, Homo sapiens
  misc_RNA (1)...(19): siRNA sense strand
gcaagaggaaucaguuuau

SEQ ID NO: 1736569 - RNA, 19 nt, Homo sapiens
  misc_RNA (1)...(19): siRNA sense strand
gagugcaguuucagaauga

SEQ ID NO: 1736570 - RNA, 19 nt, Homo sapiens
  misc_RNA (1)...(19): siRNA sense strand
gagcagcuacuucuagaaa

SEQ ID NO: 1736571 - RNA, 19 nt, Homo sapiens
  misc_RNA (1)...(19): siRNA sense strand
guacagauucuuauugaug

SEQ ID NO: 1736572 - RNA, 19 nt, Homo sapiens
  misc_RNA (1)...(19): siRNA sense strand
gaaccaagucuauucuaug

SEQ ID NO: 1736573 - RNA, 19 nt, Homo sapiens
  misc_RNA (1)...(19): siRNA sense strand
ggaacaaucacaaauaagu

SEQ ID NO: 1736574 - RNA, 19 nt, Homo sapiens
  misc_RNA (1)...(19): siRNA sense strand
ggaaucaguuuauaaucuc

SEQ ID NO: 1736575 - RNA, 19 nt, Homo sapiens
  misc_RNA (1)...(19): siRNA sense strand
gcaguauuaucaagaacuu

SEQ ID NO: 1736576 - RNA, 19 nt, Homo sapiens
  misc_RNA (1)...(19): siRNA sense strand
guugaaagccauuuagaaa

SEQ ID NO: 1736577 - RNA, 19 nt, Homo sapiens
  misc_RNA (1)...(19): siRNA sense strand
gcucagauuugccaagugu

SEQ ID NO: 1736578 - RNA, 19 nt, Homo sapiens
  misc_RNA (1)...(19): siRNA sense strand
gagccaaauucauugcaaa

SEQ ID NO: 1736579 - RNA, 19 nt, Homo sapiens
  misc_RNA (1)...(19): siRNA sense strand
gcaaaacucuugaauacau

SEQ ID NO: 1736580 - RNA, 19 nt, Homo sapiens
  misc_RNA (1)...(19): siRNA sense strand
gagaugauuugcaugaaag

SEQ ID NO: 1736581 - RNA, 19 nt, Homo sapiens
  misc_RNA (1)...(19): siRNA sense strand
uuacaaagacgaugaaugu

SEQ ID NO: 1736582 - RNA, 19 nt, Homo sapiens
  misc_RNA (1)...(19): siRNA sense strand
ugagagaacuugaucaaaa

SEQ ID NO: 1736583 - RNA, 19 nt, Homo sapiens
  misc_RNA (1)...(19): siRNA sense strand
gaaacuaaacugugugaag

SEQ ID NO: 1736584 - RNA, 19 nt, Homo sapiens
  misc_RNA (1)...(19): siRNA sense strand
ggaaucacucaaaguuuaa

SEQ ID NO: 1736585 - RNA, 19 nt, Homo sapiens
  misc_RNA (1)...(19): siRNA sense strand
gaacaguacucagcuacag

SEQ ID NO: 1736586 - RNA, 19 nt, Homo sapiens
  misc_RNA (1)...(19): siRNA sense strand
gaacaaucacaaauaagug

SEQ ID NO: 1736587 - RNA, 19 nt, Homo sapiens
  misc_RNA (1)...(19): siRNA sense strand
gaaguacagcugugauaga

SEQ ID NO: 1736588 - RNA, 19 nt, Homo sapiens
  misc_RNA (1)...(19): siRNA sense strand
gcuuaugacuggagugaga

SEQ ID NO: 1736589 - RNA, 19 nt, Homo sapiens
  misc_RNA (1)...(19): siRNA sense strand
gacagcaccucuuaaacug

SEQ ID NO: 1736590 - RNA, 19 nt, Homo sapiens
  misc_RNA (1)...(19): siRNA sense strand
gggcugacccagaguuuaa

SEQ ID NO: 1736591 - RNA, 19 nt, Homo sapiens
  misc_RNA (1)...(19): siRNA sense strand
gaaaaccccuucuaaaguc

SEQ ID NO: 1736592 - RNA, 19 nt, Homo sapiens
  misc_RNA (1)...(19): siRNA sense strand
agugaaggacuaugaauua

SEQ ID NO: 1736593 - RNA, 19 nt, Homo sapiens
  misc_RNA (1)...(19): siRNA sense strand
gaaacuacucagagaaaga

SEQ ID NO: 1736594 - RNA, 19 nt, Homo sapiens
  misc_RNA (1)...(19): siRNA sense strand
uggaacgacuuaaagauga

SEQ ID NO: 1736595 - RNA, 19 nt, Homo sapiens
  misc_RNA (1)...(19): siRNA sense strand
cuacaucucugaaguucga

SEQ ID NO: 1736596 - RNA, 19 nt, Homo sapiens
  misc_RNA (1)...(19): siRNA sense strand
gagagaaacaccaacauag

SEQ ID NO: 1736597 - RNA, 19 nt, Homo sapiens
  misc_RNA (1)...(19): siRNA sense strand
ugaauuggguugaugagau

SEQ ID NO: 1736598 - RNA, 19 nt, Homo sapiens
  misc_RNA (1)...(19): siRNA sense strand
gaaauuuguucaggaucuu

SEQ ID NO: 1736599 - RNA, 19 nt, Homo sapiens
  misc_RNA (1)...(19): siRNA sense strand
aaauuucaguucaggagua

SEQ ID NO: 1736600 - RNA, 19 nt, Homo sapiens
  misc_RNA (1)...(19): siRNA sense strand
caaauaagugugaggaguu

SEQ ID NO: 1736601 - RNA, 19 nt, Homo sapiens
  misc_RNA (1)...(19): siRNA sense strand
uaacacaacuggaaaagga

SEQ ID NO: 1736602 - RNA, 19 nt, Homo sapiens
  misc_RNA (1)...(19): siRNA sense strand
gagauaaccauuuacaaag

SEQ ID NO: 1736603 - RNA, 19 nt, Homo sapiens
  misc_RNA (1)...(19): siRNA sense strand
ucaaagcuaucugugacua

SEQ ID NO: 1736604 - RNA, 19 nt, Homo sapiens
  misc_RNA (1)...(19): siRNA sense strand
aaacuucuauuccgaucaa

SEQ ID NO: 1736605 - RNA, 19 nt, Homo sapiens
  misc_RNA (1)...(19): siRNA sense strand
ugagagaaacaccaacaua

SEQ ID NO: 1736606 - RNA, 19 nt, Homo sapiens
  misc_RNA (1)...(19): siRNA sense strand
caaagaagcuaaaaucagu

SEQ ID NO: 1736607 - RNA, 19 nt, Homo sapiens
  misc_RNA (1)...(19): siRNA sense strand
aggaggaaguugcuuauga

SEQ ID NO: 1736608 - RNA, 19 nt, Homo sapiens
  misc_RNA (1)...(19): siRNA sense strand
aggagaaacuaaagaaaga

SEQ ID NO: 1736609 - RNA, 19 nt, Homo sapiens
  misc_RNA (1)...(19): siRNA sense strand
gaagaucggcugauuagac

SEQ ID NO: 1736610 - RNA, 19 nt, Homo sapiens
  misc_RNA (1)...(19): siRNA sense strand
gauauaacacaacuggaaa

SEQ ID NO: 1736611 - RNA, 19 nt, Homo sapiens
  misc_RNA (1)...(19): siRNA sense strand
guacagcaaaggacgcaua

SEQ ID NO: 1736612 - RNA, 19 nt, Homo sapiens
  misc_RNA (1)...(19): siRNA sense strand
gaggaugaguugcagaaag

SEQ ID NO: 1736613 - RNA, 19 nt, Homo sapiens
  misc_RNA (1)...(19): siRNA sense strand
caauggagaucugaaguag

SEQ ID NO: 1736614 - RNA, 19 nt, Homo sapiens
  misc_RNA (1)...(19): siRNA sense strand
ugaaccaagucuauucuau

SEQ ID NO: 1736615 - RNA, 19 nt, Homo sapiens
  misc_RNA (1)...(19): siRNA sense strand
cuacagacaaauugagaua

SEQ ID NO: 1736616 - RNA, 19 nt, Homo sapiens
  misc_RNA (1)...(19): siRNA sense strand
gcaguggagcuggaucuua

SEQ ID NO: 1736617 - RNA, 19 nt, Homo sapiens
  misc_RNA (1)...(19): siRNA sense strand
ucacucucaugacacaaua

SEQ ID NO: 1736618 - RNA, 19 nt, Homo sapiens
  misc_RNA (1)...(19): siRNA sense strand
gcaaaucacugaaguacua

SEQ ID NO: 1736619 - RNA, 19 nt, Homo sapiens
  misc_RNA (1)...(19): siRNA sense strand
gaaaguguguucagaauca

SEQ ID NO: 1736620 - RNA, 19 nt, Homo sapiens
  misc_RNA (1)...(19): siRNA sense strand
gaacuuauuugguugaaug

SEQ ID NO: 1736621 - RNA, 19 nt, Homo sapiens
  misc_RNA (1)...(19): siRNA sense strand
ggaaagagaugauuugcau

SEQ ID NO: 1736622 - RNA, 19 nt, Homo sapiens
  misc_RNA (1)...(19): siRNA sense strand
ccaaagaagcuacugauua

SEQ ID NO: 1736623 - RNA, 19 nt, Homo sapiens
  misc_RNA (1)...(19): siRNA sense strand
gaaggacuaugaauuacaa

SEQ ID NO: 1736624 - RNA, 19 nt, Homo sapiens
  misc_RNA (1)...(19): siRNA sense strand
agacaaagcucaugauauc

SEQ ID NO: 1736625 - RNA, 19 nt, Homo sapiens
  misc_RNA (1)...(19): siRNA sense strand
cagcagaucucauuauuca

SEQ ID NO: 1736626 - RNA, 19 nt, Homo sapiens
  misc_RNA (1)...(19): siRNA sense strand
caaagaagcuacugauuac

SEQ ID NO: 1736627 - RNA, 19 nt, Homo sapiens
  misc_RNA (1)...(19): siRNA sense strand
gaacaugaaccaagucuau

SEQ ID NO: 1736628 - RNA, 19 nt, Homo sapiens
  misc_RNA (1)...(19): siRNA sense strand
caagaggaaucaguuuaua

SEQ ID NO: 1736629 - RNA, 19 nt, Homo sapiens
  misc_RNA (1)...(19): siRNA sense strand
caaaugacagcaccucuua

SEQ ID NO: 1736630 - RNA, 19 nt, Homo sapiens
  misc_RNA (1)...(19): siRNA sense strand
caaagacgaugaauguguu

SEQ ID NO: 1736631 - RNA, 19 nt, Homo sapiens
  misc_RNA (1)...(19): siRNA sense strand
uaaauuugcuggugauuca

SEQ ID NO: 1736632 - RNA, 19 nt, Homo sapiens
  misc_RNA (1)...(19): siRNA sense strand
agaaauugcuggguauaua

SEQ ID NO: 1736633 - RNA, 19 nt, Homo sapiens
  misc_RNA (1)...(19): siRNA sense strand
aggaaucacucaaaguuua

SEQ ID NO: 1736634 - RNA, 19 nt, Homo sapiens
  misc_RNA (1)...(19): siRNA sense strand
gaacagacaaagcucauga

SEQ ID NO: 1736635 - RNA, 19 nt, Homo sapiens
  misc_RNA (1)...(19): siRNA sense strand
gguauauacuugaauguga

SEQ ID NO: 1736636 - RNA, 19 nt, Homo sapiens
  misc_RNA (1)...(19): siRNA sense strand
uaaaucaguucaggagaua

SEQ ID NO: 1736637 - RNA, 19 nt, Homo sapiens
  misc_RNA (1)...(19): siRNA sense strand
gaauuugaaucuagucuca

SEQ ID NO: 1736638 - RNA, 19 nt, Homo sapiens
  misc_RNA (1)...(19): siRNA sense strand
gaaauuauggccuuaagga

SEQ ID NO: 1736639 - RNA, 19 nt, Homo sapiens
  misc_RNA (1)...(19): siRNA sense strand
ccaggcagaucaauuggua

SEQ ID NO: 1736640 - RNA, 19 nt, Homo sapiens
  misc_RNA (1)...(19): siRNA sense strand
aaacuaaacugugugaaga

SEQ ID NO: 1736641 - RNA, 19 nt, Homo sapiens
  misc_RNA (1)...(19): siRNA sense strand
caauguggcuucaauaaag

SEQ ID NO: 1736642 - RNA, 19 nt, Homo sapiens
  misc_RNA (1)...(19): siRNA sense strand
uaaacugacuuaugcagaa

SEQ ID NO: 1736643 - RNA, 19 nt, Homo sapiens
  misc_RNA (1)...(19): siRNA sense strand
agaagcuacugauuacuua

SEQ ID NO: 1736644 - RNA, 19 nt, Homo sapiens
  misc_RNA (1)...(19): siRNA sense strand
gcagaacaguacucagcua

SEQ ID NO: 1736645 - RNA, 19 nt, Homo sapiens
  misc_RNA (1)...(19): siRNA sense strand
ugaagaagaagcaguuaua

SEQ ID NO: 1736646 - RNA, 19 nt, Homo sapiens
  misc_RNA (1)...(19): siRNA sense strand
uagcaaaccuaaugggaaa

SEQ ID NO: 1736647 - RNA, 19 nt, Homo sapiens
  misc_RNA (1)...(19): siRNA sense strand
gaguagagccaaauucauu

SEQ ID NO: 1736648 - RNA, 19 nt, Homo sapiens
  misc_RNA (1)...(19): siRNA sense strand
gaauugagcaacaguauca

SEQ ID NO: 1736649 - RNA, 19 nt, Homo sapiens
  misc_RNA (1)...(19): siRNA sense strand
caacugaagccaaggaauu

SEQ ID NO: 1736650 - RNA, 19 nt, Homo sapiens
  misc_RNA (1)...(19): siRNA sense strand
gaauuggguugaugagaug

SEQ ID NO: 1736651 - RNA, 19 nt, Homo sapiens
  misc_RNA (1)...(19): siRNA sense strand
ggagugcaguuucagaaug

SEQ ID NO: 1736652 - RNA, 19 nt, Homo sapiens
  misc_RNA (1)...(19): siRNA sense strand
caugguagauucacaacaa

SEQ ID NO: 1736653 - RNA, 19 nt, Homo sapiens
  misc_RNA (1)...(19): siRNA sense strand
gcaauggagaucugaagua

SEQ ID NO: 1736654 - RNA, 19 nt, Homo sapiens
  misc_RNA (1)...(19): siRNA sense strand
uaaacugugugaagaagaa

SEQ ID NO: 1736655 - RNA, 19 nt, Homo sapiens
  misc_RNA (1)...(19): siRNA sense strand
ccaggaaucccaagucuuu

SEQ ID NO: 1736656 - RNA, 19 nt, Homo sapiens
  misc_RNA (1)...(19): siRNA sense strand
ucccuaaccucuucuagua

SEQ ID NO: 1736657 - RNA, 19 nt, Homo sapiens
  misc_RNA (1)...(19): siRNA sense strand
gaacaggagaaacuaaaga

SEQ ID NO: 1736658 - RNA, 19 nt, Homo sapiens
  misc_RNA (1)...(19): siRNA sense strand
cagaauguccugacucuuu

SEQ ID NO: 1736659 - RNA, 19 nt, Homo sapiens
  misc_RNA (1)...(19): siRNA sense strand
gagcaacaguaucagaaug

SEQ ID NO: 1736660 - RNA, 19 nt, Homo sapiens
  misc_RNA (1)...(19): siRNA sense strand
caggauuaguuccaaauuu

SEQ ID NO: 1736661 - RNA, 19 nt, Homo sapiens
  misc_RNA (1)...(19): siRNA sense strand
gcagaucaauugguacaga

SEQ ID NO: 1736662 - RNA, 19 nt, Homo sapiens
  misc_RNA (1)...(19): siRNA sense strand
gaccuaaggacucgauaua

SEQ ID NO: 1736663 - RNA, 19 nt, Homo sapiens
  misc_RNA (1)...(19): siRNA sense strand
gcaauguggcuucaauaaa

SEQ ID NO: 1736664 - RNA, 19 nt, Homo sapiens
  misc_RNA (1)...(19): siRNA sense strand
ccaaauucauugcaaacuu

SEQ ID NO: 1736665 - RNA, 19 nt, Homo sapiens
  misc_RNA (1)...(19): siRNA sense strand
guacucagcuacagugaag

SEQ ID NO: 1736666 - RNA, 19 nt, Homo sapiens
  misc_RNA (1)...(19): siRNA sense strand
gcagauugacaacagguua

SEQ ID NO: 1736667 - RNA, 19 nt, Homo sapiens
  misc_RNA (1)...(19): siRNA sense strand
ugggaacaaucacaaauaa

SEQ ID NO: 1736668 - RNA, 19 nt, Homo sapiens
  misc_RNA (1)...(19): siRNA sense strand
gcaagaggaaucaguuuau

SEQ ID NO: 1736669 - RNA, 19 nt, Homo sapiens
  misc_RNA (1)...(19): siRNA sense strand
gagugcaguuucagaauga

SEQ ID NO: 1736670 - RNA, 19 nt, Homo sapiens
  misc_RNA (1)...(19): siRNA sense strand
gagcagcuacuucuagaaa

SEQ ID NO: 1736671 - RNA, 19 nt, Homo sapiens
  misc_RNA (1)...(19): siRNA sense strand
guacagauucuuauugaug

SEQ ID NO: 1736672 - RNA, 19 nt, Homo sapiens
  misc_RNA (1)...(19): siRNA sense strand
gaaccaagucuauucuaug

SEQ ID NO: 1736673 - RNA, 19 nt, Homo sapiens
  misc_RNA (1)...(19): siRNA sense strand
ggaacaaucacaaauaagu

SEQ ID NO: 1736674 - RNA, 19 nt, Homo sapiens
  misc_RNA (1)...(19): siRNA sense strand
ggaaucaguuuauaaucuc

SEQ ID NO: 1736675 - RNA, 19 nt, Homo sapiens
  misc_RNA (1)...(19): siRNA sense strand
gcaguauuaucaagaacuu

SEQ ID NO: 1736676 - RNA, 19 nt, Homo sapiens
  misc_RNA (1)...(19): siRNA sense strand
guugaaagccauuuagaaa

SEQ ID NO: 1736677 - RNA, 19 nt, Homo sapiens
  misc_RNA (1)...(19): siRNA sense strand
gcucagauuugccaagugu

SEQ ID NO: 1736678 - RNA, 19 nt, Homo sapiens
  misc_RNA (1)...(19): siRNA sense strand
gagccaaauucauugcaaa

SEQ ID NO: 1736679 - RNA, 19 nt, Homo sapiens
  misc_RNA (1)...(19): siRNA sense strand
gcaaaacucuugaauacau

SEQ ID NO: 1736680 - RNA, 19 nt, Homo sapiens
  misc_RNA (1)...(19): siRNA sense strand
gagaugauuugcaugaaag

SEQ ID NO: 1736681 - RNA, 19 nt, Homo sapiens
  misc_RNA (1)...(19): siRNA sense strand
uuacaaagacgaugaaugu

SEQ ID NO: 1736682 - RNA, 19 nt, Homo sapiens
  misc_RNA (1)...(19): siRNA sense strand
ugagagaacuugaucaaaa

SEQ ID NO: 1736683 - RNA, 19 nt, Homo sapiens
  misc_RNA (1)...(19): siRNA sense strand
gaaacuaaacugugugaag

SEQ ID NO: 1736684 - RNA, 19 nt, Homo sapiens
  misc_RNA (1)...(19): siRNA sense strand
ggaaucacucaaaguuuaa

SEQ ID NO: 1736685 - RNA, 19 nt, Homo sapiens
  misc_RNA (1)...(19): siRNA sense strand
gaacaguacucagcuacag

SEQ ID NO: 1736686 - RNA, 19 nt, Homo sapiens
  misc_RNA (1)...(19): siRNA sense strand
gaacaaucacaaauaagug

SEQ ID NO: 1736687 - RNA, 19 nt, Homo sapiens
  misc_RNA (1)...(19): siRNA sense strand
gaaguacagcugugauaga

SEQ ID NO: 1736688 - RNA, 19 nt, Homo sapiens
  misc_RNA (1)...(19): siRNA sense strand
gcuuaugacuggagugaga

SEQ ID NO: 1736689 - RNA, 19 nt, Homo sapiens
  misc_RNA (1)...(19): siRNA sense strand
gacagcaccucuuaaacug

SEQ ID NO: 1736690 - RNA, 19 nt, Homo sapiens
  misc_RNA (1)...(19): siRNA sense strand
gggcugacccagaguuuaa

SEQ ID NO: 1736691 - RNA, 19 nt, Homo sapiens
  misc_RNA (1)...(19): siRNA sense strand
gaaaaccccuucuaaaguc

SEQ ID NO: 1736692 - RNA, 19 nt, Homo sapiens
  misc_RNA (1)...(19): siRNA sense strand
agugaaggacuaugaauua

SEQ ID NO: 1736693 - RNA, 19 nt, Homo sapiens
  misc_RNA (1)...(19): siRNA sense strand
gaaacuacucagagaaaga

SEQ ID NO: 1736694 - RNA, 19 nt, Homo sapiens
  misc_RNA (1)...(19): siRNA sense strand
uggaacgacuuaaagauga

SEQ ID NO: 1736695 - RNA, 19 nt, Homo sapiens
  misc_RNA (1)...(19): siRNA sense strand
cuacaucucugaaguucga

SEQ ID NO: 1736696 - RNA, 19 nt, Homo sapiens
  misc_RNA (1)...(19): siRNA sense strand
gagagaaacaccaacauag

SEQ ID NO: 1736697 - RNA, 19 nt, Homo sapiens
  misc_RNA (1)...(19): siRNA sense strand
ugaauuggguugaugagau

SEQ ID NO: 1736698 - RNA, 19 nt, Homo sapiens
  misc_RNA (1)...(19): siRNA sense strand
gaaauuuguucaggaucuu

SEQ ID NO: 1736699 - RNA, 19 nt, Homo sapiens
  misc_RNA (1)...(19): siRNA sense strand
aaauuucaguucaggagua

SEQ ID NO: 1736700 - RNA, 19 nt, Homo sapiens
  misc_RNA (1)...(19): siRNA sense strand
caaauaagugugaggaguu

SEQ ID NO: 1736701 - RNA, 19 nt, Homo sapiens
  misc_RNA (1)...(19): siRNA sense strand
uaacacaacuggaaaagga

SEQ ID NO: 1736702 - RNA, 19 nt, Homo sapiens
  misc_RNA (1)...(19): siRNA sense strand
gagauaaccauuuacaaag

SEQ ID NO: 1736703 - RNA, 19 nt, Homo sapiens
  misc_RNA (1)...(19): siRNA sense strand
ucaaagcuaucugugacua

SEQ ID NO: 1736704 - RNA, 19 nt, Homo sapiens
  misc_RNA (1)...(19): siRNA sense strand
aaacuucuauuccgaucaa

SEQ ID NO: 1736705 - RNA, 19 nt, Homo sapiens
  misc_RNA (1)...(19): siRNA sense strand
ugagagaaacaccaacaua

SEQ ID NO: 1736706 - RNA, 19 nt, Homo sapiens
  misc_RNA (1)...(19): siRNA sense strand
caaagaagcuaaaaucagu

SEQ ID NO: 1736707 - RNA, 19 nt, Homo sapiens
  misc_RNA (1)...(19): siRNA sense strand
aggaggaaguugcuuauga

SEQ ID NO: 1736708 - RNA, 19 nt, Homo sapiens
  misc_RNA (1)...(19): siRNA sense strand
aggagaaacuaaagaaaga

SEQ ID NO: 1736709 - RNA, 19 nt, Homo sapiens
  misc_RNA (1)...(19): siRNA sense strand
gaagaucggcugauuagac

SEQ ID NO: 1736710 - RNA, 19 nt, Homo sapiens
  misc_RNA (1)...(19): siRNA sense strand
gauauaacacaacuggaaa

SEQ ID NO: 1736711 - RNA, 19 nt, Homo sapiens
  misc_RNA (1)...(19): siRNA sense strand
guacagcaaaggacgcaua

SEQ ID NO: 1736712 - RNA, 19 nt, Homo sapiens
  misc_RNA (1)...(19): siRNA sense strand
gaggaugaguugcagaaag

SEQ ID NO: 1736713 - RNA, 19 nt, Homo sapiens
  misc_RNA (1)...(19): siRNA sense strand
caauggagaucugaaguag

SEQ ID NO: 1736714 - RNA, 19 nt, Homo sapiens
  misc_RNA (1)...(19): siRNA sense strand
ugaaccaagucuauucuau

SEQ ID NO: 1736715 - RNA, 19 nt, Homo sapiens
  misc_RNA (1)...(19): siRNA sense strand
cuacagacaaauugagaua

SEQ ID NO: 1736716 - RNA, 19 nt, Homo sapiens
  misc_RNA (1)...(19): siRNA sense strand
gcaguggagcuggaucuua

SEQ ID NO: 1736717 - RNA, 19 nt, Homo sapiens
  misc_RNA (1)...(19): siRNA sense strand
ucacucucaugacacaaua

SEQ ID NO: 1736718 - RNA, 19 nt, Homo sapiens
  misc_RNA (1)...(19): siRNA sense strand
gcaaaucacugaaguacua

SEQ ID NO: 1736719 - RNA, 19 nt, Homo sapiens
  misc_RNA (1)...(19): siRNA sense strand
gaaaguguguucagaauca

SEQ ID NO: 1736720 - RNA, 19 nt, Homo sapiens
  misc_RNA (1)...(19): siRNA sense strand
gaacuuauuugguugaaug

SEQ ID NO: 1736721 - RNA, 19 nt, Homo sapiens
  misc_RNA (1)...(19): siRNA sense strand
ggaaagagaugauuugcau

SEQ ID NO: 1736722 - RNA, 19 nt, Homo sapiens
  misc_RNA (1)...(19): siRNA sense strand
ccaaagaagcuacugauua

SEQ ID NO: 1736723 - RNA, 19 nt, Homo sapiens
  misc_RNA (1)...(19): siRNA sense strand
gaaggacuaugaauuacaa

SEQ ID NO: 1736724 - RNA, 19 nt, Homo sapiens
  misc_RNA (1)...(19): siRNA sense strand
agacaaagcucaugauauc

SEQ ID NO: 1736725 - RNA, 19 nt, Homo sapiens
  misc_RNA (1)...(19): siRNA sense strand
cagcagaucucauuauuca

SEQ ID NO: 1736726 - RNA, 19 nt, Homo sapiens
  misc_RNA (1)...(19): siRNA sense strand
caaagaagcuacugauuac

SEQ ID NO: 1736727 - RNA, 19 nt, Homo sapiens
  misc_RNA (1)...(19): siRNA sense strand
gaacaugaaccaagucuau

SEQ ID NO: 1736728 - RNA, 19 nt, Homo sapiens
  misc_RNA (1)...(19): siRNA sense strand
caagaggaaucaguuuaua

SEQ ID NO: 1736729 - RNA, 19 nt, Homo sapiens
  misc_RNA (1)...(19): siRNA sense strand
caaaugacagcaccucuua

SEQ ID NO: 1736730 - RNA, 19 nt, Homo sapiens
  misc_RNA (1)...(19): siRNA sense strand
caaagacgaugaauguguu

SEQ ID NO: 1736731 - RNA, 19 nt, Homo sapiens
  misc_RNA (1)...(19): siRNA sense strand
uaaauuugcuggugauuca

SEQ ID NO: 1736732 - RNA, 19 nt, Homo sapiens
  misc_RNA (1)...(19): siRNA sense strand
agaaauugcuggguauaua

SEQ ID NO: 1736733 - RNA, 19 nt, Homo sapiens
  misc_RNA (1)...(19): siRNA sense strand
aggaaucacucaaaguuua

SEQ ID NO: 1736734 - RNA, 19 nt, Homo sapiens
  misc_RNA (1)...(19): siRNA sense strand
gaacagacaaagcucauga

SEQ ID NO: 1736735 - RNA, 19 nt, Homo sapiens
  misc_RNA (1)...(19): siRNA sense strand
gguauauacuugaauguga

SEQ ID NO: 1736736 - RNA, 19 nt, Homo sapiens
  misc_RNA (1)...(19): siRNA sense strand
uaaaucaguucaggagaua

SEQ ID NO: 1736737 - RNA, 19 nt, Homo sapiens
  misc_RNA (1)...(19): siRNA sense strand
gaauuugaaucuagucuca

SEQ ID NO: 1736738 - RNA, 19 nt, Homo sapiens
  misc_RNA (1)...(19): siRNA sense strand
gaaauuauggccuuaagga

SEQ ID NO: 1736739 - RNA, 19 nt, Homo sapiens
  misc_RNA (1)...(19): siRNA sense strand
ccaggcagaucaauuggua

SEQ ID NO: 1736740 - RNA, 19 nt, Homo sapiens
  misc_RNA (1)...(19): siRNA sense strand
aaacuaaacugugugaaga

SEQ ID NO: 1736741 - RNA, 19 nt, Homo sapiens
  misc_RNA (1)...(19): siRNA sense strand
caauguggcuucaauaaag

SEQ ID NO: 1736742 - RNA, 19 nt, Homo sapiens
  misc_RNA (1)...(19): siRNA sense strand
uaaacugacuuaugcagaa

SEQ ID NO: 1736743 - RNA, 19 nt, Homo sapiens
  misc_RNA (1)...(19): siRNA sense strand
agaagcuacugauuacuua

SEQ ID NO: 1736744 - RNA, 19 nt, Homo sapiens
  misc_RNA (1)...(19): siRNA sense strand
gcagaacaguacucagcua

SEQ ID NO: 1736745 - RNA, 19 nt, Homo sapiens
  misc_RNA (1)...(19): siRNA sense strand
ugaagaagaagcaguuaua

SEQ ID NO: 1736746 - RNA, 19 nt, Homo sapiens
  misc_RNA (1)...(19): siRNA sense strand
uagcaaaccuaaugggaaa

SEQ ID NO: 1736747 - RNA, 19 nt, Homo sapiens
  misc_RNA (1)...(19): siRNA sense strand
gaguagagccaaauucauu

SEQ ID NO: 1736748 - RNA, 19 nt, Homo sapiens
  misc_RNA (1)...(19): siRNA sense strand
gaauugagcaacaguauca

SEQ ID NO: 1736749 - RNA, 19 nt, Homo sapiens
  misc_RNA (1)...(19): siRNA sense strand
caacugaagccaaggaauu

SEQ ID NO: 1736750 - RNA, 19 nt, Homo sapiens
  misc_RNA (1)...(19): siRNA sense strand
gaauuggguugaugagaug

SEQ ID NO: 1736751 - RNA, 19 nt, Homo sapiens
  misc_RNA (1)...(19): siRNA sense strand
ggagugcaguuucagaaug

SEQ ID NO: 1736752 - RNA, 19 nt, Homo sapiens
  misc_RNA (1)...(19): siRNA sense strand
caugguagauucacaacaa

SEQ ID NO: 1736753 - RNA, 19 nt, Homo sapiens
  misc_RNA (1)...(19): siRNA sense strand
gcaauggagaucugaagua

SEQ ID NO: 1736754 - RNA, 19 nt, Homo sapiens
  misc_RNA (1)...(19): siRNA sense strand
uaaacugugugaagaagaa

SEQ ID NO: 1736755 - RNA, 19 nt, Homo sapiens
  misc_RNA (1)...(19): siRNA sense strand
ccaggaaucccaagucuuu

SEQ ID NO: 1736756 - RNA, 19 nt, Homo sapiens
  misc_RNA (1)...(19): siRNA sense strand
ucccuaaccucuucuagua

SEQ ID NO: 1736757 - RNA, 19 nt, Homo sapiens
  misc_RNA (1)...(19): siRNA sense strand
gaacaggagaaacuaaaga

SEQ ID NO: 1736758 - RNA, 19 nt, Homo sapiens
  misc_RNA (1)...(19): siRNA sense strand
cagaauguccugacucuuu

SEQ ID NO: 1736759 - RNA, 19 nt, Homo sapiens
  misc_RNA (1)...(19): siRNA sense strand
gagcaacaguaucagaaug

SEQ ID NO: 1736760 - RNA, 19 nt, Homo sapiens
  misc_RNA (1)...(19): siRNA sense strand
caggauuaguuccaaauuu

SEQ ID NO: 1736761 - RNA, 19 nt, Homo sapiens
  misc_RNA (1)...(19): siRNA sense strand
gcagaucaauugguacaga

SEQ ID NO: 1736762 - RNA, 19 nt, Homo sapiens
  misc_RNA (1)...(19): siRNA sense strand
gaccuaaggacucgauaua

SEQ ID NO: 1736763 - RNA, 19 nt, Homo sapiens
  misc_RNA (1)...(19): siRNA sense strand
gcaauguggcuucaauaaa

SEQ ID NO: 1736764 - RNA, 19 nt, Homo sapiens
  misc_RNA (1)...(19): siRNA sense strand
ccaaauucauugcaaacuu

SEQ ID NO: 1736765 - RNA, 19 nt, Homo sapiens
  misc_RNA (1)...(19): siRNA sense strand
guacucagcuacagugaag

SEQ ID NO: 1736766 - RNA, 19 nt, Homo sapiens
  misc_RNA (1)...(19): siRNA sense strand
gcagauugacaacagguua

SEQ ID NO: 1736767 - RNA, 19 nt, Homo sapiens
  misc_RNA (1)...(19): siRNA sense strand
ugggaacaaucacaaauaa

SEQ ID NO: 1736768 - RNA, 19 nt, Homo sapiens
  misc_RNA (1)...(19): siRNA sense strand
gcaagaggaaucaguuuau

SEQ ID NO: 1736769 - RNA, 19 nt, Homo sapiens
  misc_RNA (1)...(19): siRNA sense strand
gagugcaguuucagaauga

SEQ ID NO: 1736770 - RNA, 19 nt, Homo sapiens
  misc_RNA (1)...(19): siRNA sense strand
gagcagcuacuucuagaaa

SEQ ID NO: 1736771 - RNA, 19 nt, Homo sapiens
  misc_RNA (1)...(19): siRNA sense strand
guacagauucuuauugaug

SEQ ID NO: 1736772 - RNA, 19 nt, Homo sapiens
  misc_RNA (1)...(19): siRNA sense strand
gaaccaagucuauucuaug

SEQ ID NO: 1736773 - RNA, 19 nt, Homo sapiens
  misc_RNA (1)...(19): siRNA sense strand
ggaacaaucacaaauaagu

SEQ ID NO: 1736774 - RNA, 19 nt, Homo sapiens
  misc_RNA (1)...(19): siRNA sense strand
ggaaucaguuuauaaucuc

SEQ ID NO: 1736775 - RNA, 19 nt, Homo sapiens
  misc_RNA (1)...(19): siRNA sense strand
gcaguauuaucaagaacuu

SEQ ID NO: 1736776 - RNA, 19 nt, Homo sapiens
  misc_RNA (1)...(19): siRNA sense strand
guugaaagccauuuagaaa

SEQ ID NO: 1736777 - RNA, 19 nt, Homo sapiens
  misc_RNA (1)...(19): siRNA sense strand
gcucagauuugccaagugu

SEQ ID NO: 1736778 - RNA, 19 nt, Homo sapiens
  misc_RNA (1)...(19): siRNA sense strand
gagccaaauucauugcaaa

SEQ ID NO: 1736779 - RNA, 19 nt, Homo sapiens
  misc_RNA (1)...(19): siRNA sense strand
gcaaaacucuugaauacau

SEQ ID NO: 1736780 - RNA, 19 nt, Homo sapiens
  misc_RNA (1)...(19): siRNA sense strand
gagaugauuugcaugaaag

SEQ ID NO: 1736781 - RNA, 19 nt, Homo sapiens
  misc_RNA (1)...(19): siRNA sense strand
uuacaaagacgaugaaugu

SEQ ID NO: 1736782 - RNA, 19 nt, Homo sapiens
  misc_RNA (1)...(19): siRNA sense strand
ugagagaacuugaucaaaa

SEQ ID NO: 1736783 - RNA, 19 nt, Homo sapiens
  misc_RNA (1)...(19): siRNA sense strand
gaaacuaaacugugugaag

SEQ ID NO: 1736784 - RNA, 19 nt, Homo sapiens
  misc_RNA (1)...(19): siRNA sense strand
ggaaucacucaaaguuuaa

SEQ ID NO: 1736785 - RNA, 19 nt, Homo sapiens
  misc_RNA (1)...(19): siRNA sense strand
gaacaguacucagcuacag

SEQ ID NO: 1736786 - RNA, 19 nt, Homo sapiens
  misc_RNA (1)...(19): siRNA sense strand
gaacaaucacaaauaagug

SEQ ID NO: 1736787 - RNA, 19 nt, Homo sapiens
  misc_RNA (1)...(19): siRNA sense strand
gaaguacagcugugauaga

SEQ ID NO: 1736788 - RNA, 19 nt, Homo sapiens
  misc_RNA (1)...(19): siRNA sense strand
gcuuaugacuggagugaga

SEQ ID NO: 1736789 - RNA, 19 nt, Homo sapiens
  misc_RNA (1)...(19): siRNA sense strand
gacagcaccucuuaaacug

SEQ ID NO: 1736790 - RNA, 19 nt, Homo sapiens
  misc_RNA (1)...(19): siRNA sense strand
gggcugacccagaguuuaa

SEQ ID NO: 1736791 - RNA, 19 nt, Homo sapiens
  misc_RNA (1)...(19): siRNA sense strand
gaaaaccccuucuaaaguc

SEQ ID NO: 1736792 - RNA, 19 nt, Homo sapiens
  misc_RNA (1)...(19): siRNA sense strand
agugaaggacuaugaauua

SEQ ID NO: 1736793 - RNA, 19 nt, Homo sapiens
  misc_RNA (1)...(19): siRNA sense strand
gaaacuacucagagaaaga

SEQ ID NO: 1736794 - RNA, 19 nt, Homo sapiens
  misc_RNA (1)...(19): siRNA sense strand
uggaacgacuuaaagauga

SEQ ID NO: 1736795 - RNA, 19 nt, Homo sapiens
  misc_RNA (1)...(19): siRNA sense strand
cuacaucucugaaguucga

SEQ ID NO: 1736796 - RNA, 19 nt, Homo sapiens
  misc_RNA (1)...(19): siRNA sense strand
gagagaaacaccaacauag

SEQ ID NO: 1736797 - RNA, 19 nt, Homo sapiens
  misc_RNA (1)...(19): siRNA sense strand
ugaauuggguugaugagau

SEQ ID NO: 1736798 - RNA, 19 nt, Homo sapiens
  misc_RNA (1)...(19): siRNA sense strand
gaaauuuguucaggaucuu

SEQ ID NO: 1736799 - RNA, 19 nt, Homo sapiens
  misc_RNA (1)...(19): siRNA sense strand
aaauuucaguucaggagua

SEQ ID NO: 1736800 - RNA, 19 nt, Homo sapiens
  misc_RNA (1)...(19): siRNA sense strand
caaauaagugugaggaguu

SEQ ID NO: 1736801 - RNA, 19 nt, Homo sapiens
  misc_RNA (1)...(19): siRNA sense strand
uaacacaacuggaaaagga

SEQ ID NO: 1736802 - RNA, 19 nt, Homo sapiens
  misc_RNA (1)...(19): siRNA sense strand
gagauaaccauuuacaaag

SEQ ID NO: 1736803 - RNA, 19 nt, Homo sapiens
  misc_RNA (1)...(19): siRNA sense strand
ucaaagcuaucugugacua

SEQ ID NO: 1736804 - RNA, 19 nt, Homo sapiens
  misc_RNA (1)...(19): siRNA sense strand
aaacuucuauuccgaucaa

SEQ ID NO: 1736805 - RNA, 19 nt, Homo sapiens
  misc_RNA (1)...(19): siRNA sense strand
ugagagaaacaccaacaua

SEQ ID NO: 1736806 - RNA, 19 nt, Homo sapiens
  misc_RNA (1)...(19): siRNA sense strand
caaagaagcuaaaaucagu

SEQ ID NO: 1736807 - RNA, 19 nt, Homo sapiens
  misc_RNA (1)...(19): siRNA sense strand
aggaggaaguugcuuauga

SEQ ID NO: 1736808 - RNA, 19 nt, Homo sapiens
  misc_RNA (1)...(19): siRNA sense strand
aggagaaacuaaagaaaga

SEQ ID NO: 1736809 - RNA, 19 nt, Homo sapiens
  misc_RNA (1)...(19): siRNA sense strand
gaagaucggcugauuagac

SEQ ID NO: 1736810 - RNA, 19 nt, Homo sapiens
  misc_RNA (1)...(19): siRNA sense strand
gauauaacacaacuggaaa

SEQ ID NO: 1736811 - RNA, 19 nt, Homo sapiens
  misc_RNA (1)...(19): siRNA sense strand
guacagcaaaggacgcaua

SEQ ID NO: 1736812 - RNA, 19 nt, Homo sapiens
  misc_RNA (1)...(19): siRNA sense strand
gaggaugaguugcagaaag

SEQ ID NO: 1736813 - RNA, 19 nt, Homo sapiens
  misc_RNA (1)...(19): siRNA sense strand
caauggagaucugaaguag

SEQ ID NO: 1736814 - RNA, 19 nt, Homo sapiens
  misc_RNA (1)...(19): siRNA sense strand
ugaaccaagucuauucuau

SEQ ID NO: 1736815 - RNA, 19 nt, Homo sapiens
  misc_RNA (1)...(19): siRNA sense strand
cuacagacaaauugagaua

SEQ ID NO: 1736816 - RNA, 19 nt, Homo sapiens
  misc_RNA (1)...(19): siRNA sense strand
gcaguggagcuggaucuua

SEQ ID NO: 1736817 - RNA, 19 nt, Homo sapiens
  misc_RNA (1)...(19): siRNA sense strand
ucacucucaugacacaaua

SEQ ID NO: 1736818 - RNA, 19 nt, Homo sapiens
  misc_RNA (1)...(19): siRNA sense strand
gaaacuuccuguacauaaa

SEQ ID NO: 1736819 - RNA, 19 nt, Homo sapiens
  misc_RNA (1)...(19): siRNA sense strand
gacagaaucuucagacuau

SEQ ID NO: 1736820 - RNA, 19 nt, Homo sapiens
  misc_RNA (1)...(19): siRNA sense strand
gaaacagacuucguaaaga

SEQ ID NO: 1736821 - RNA, 19 nt, Homo sapiens
  misc_RNA (1)...(19): siRNA sense strand
gaaaggagaugaguaugau

SEQ ID NO: 1736822 - RNA, 19 nt, Homo sapiens
  misc_RNA (1)...(19): siRNA sense strand
guaugaagauggagacaaa

SEQ ID NO: 1736823 - RNA, 19 nt, Homo sapiens
  misc_RNA (1)...(19): siRNA sense strand
cuaauucucugaaagauga

SEQ ID NO: 1736824 - RNA, 19 nt, Homo sapiens
  misc_RNA (1)...(19): siRNA sense strand
ugaacgggauuacaacaua

SEQ ID NO: 1736825 - RNA, 19 nt, Homo sapiens
  misc_RNA (1)...(19): siRNA sense strand
gaacauaccccuuuacuga

SEQ ID NO: 1736826 - RNA, 19 nt, Homo sapiens
  misc_RNA (1)...(19): siRNA sense strand
gaacaugacagaaucuuca

SEQ ID NO: 1736827 - RNA, 19 nt, Homo sapiens
  misc_RNA (1)...(19): siRNA sense strand
cuaauucccuuccuuauca

SEQ ID NO: 1736828 - RNA, 19 nt, Homo sapiens
  misc_RNA (1)...(19): siRNA sense strand
cauagugccuccaccagua

SEQ ID NO: 1736829 - RNA, 19 nt, Homo sapiens
  misc_RNA (1)...(19): siRNA sense strand
aaacagacuucguaaagau

SEQ ID NO: 1736830 - RNA, 19 nt, Homo sapiens
  misc_RNA (1)...(19): siRNA sense strand
gggcaucugucucaucuug

SEQ ID NO: 1736831 - RNA, 19 nt, Homo sapiens
  misc_RNA (1)...(19): siRNA sense strand
caagaaaggagaugaguau

SEQ ID NO: 1736832 - RNA, 19 nt, Homo sapiens
  misc_RNA (1)...(19): siRNA sense strand
gaaugccugugaacccaua

SEQ ID NO: 1736833 - RNA, 19 nt, Homo sapiens
  misc_RNA (1)...(19): siRNA sense strand
gcacuuucaucguguuaau

SEQ ID NO: 1736834 - RNA, 19 nt, Homo sapiens
  misc_RNA (1)...(19): siRNA sense strand
gaacgggauuacaacauag

SEQ ID NO: 1736835 - RNA, 19 nt, Homo sapiens
  misc_RNA (1)...(19): siRNA sense strand
gaaucccgcucacaucaga

SEQ ID NO: 1736836 - RNA, 19 nt, Homo sapiens
  misc_RNA (1)...(19): siRNA sense strand
ggauagacauagagcuaga

SEQ ID NO: 1736837 - RNA, 19 nt, Homo sapiens
  misc_RNA (1)...(19): siRNA sense strand
agacauagagcuagaagaa

SEQ ID NO: 1736838 - RNA, 19 nt, Homo sapiens
  misc_RNA (1)...(19): siRNA sense strand
ggagaugaguaugauguau

SEQ ID NO: 1736839 - RNA, 19 nt, Homo sapiens
  misc_RNA (1)...(19): siRNA sense strand
uaagaaacuuccuguacau

SEQ ID NO: 1736840 - RNA, 19 nt, Homo sapiens
  misc_RNA (1)...(19): siRNA sense strand
caauucaucuggcacuuuc

SEQ ID NO: 1736841 - RNA, 19 nt, Homo sapiens
  misc_RNA (1)...(19): siRNA sense strand
uuaagaaacuuccuguaca

SEQ ID NO: 1736842 - RNA, 19 nt, Homo sapiens
  misc_RNA (1)...(19): siRNA sense strand
agacaguagucaagaagaa

SEQ ID NO: 1736843 - RNA, 19 nt, Homo sapiens
  misc_RNA (1)...(19): siRNA sense strand
guagacccuuggcuaacua

SEQ ID NO: 1736844 - RNA, 19 nt, Homo sapiens
  misc_RNA (1)...(19): siRNA sense strand
gaagacgacaaugaagaua

SEQ ID NO: 1736845 - RNA, 19 nt, Homo sapiens
  misc_RNA (1)...(19): siRNA sense strand
ggaugaguaugaagaugga

SEQ ID NO: 1736846 - RNA, 19 nt, Homo sapiens
  misc_RNA (1)...(19): siRNA sense strand
ggaagacgacaaugaagau

SEQ ID NO: 1736847 - RNA, 19 nt, Homo sapiens
  misc_RNA (1)...(19): siRNA sense strand
aaauugacauuccaucugu

SEQ ID NO: 1736848 - RNA, 19 nt, Homo sapiens
  misc_RNA (1)...(19): siRNA sense strand
ugacaguagugaugcagaa

SEQ ID NO: 1736849 - RNA, 19 nt, Homo sapiens
  misc_RNA (1)...(19): siRNA sense strand
ugacagaaucuucagacua

SEQ ID NO: 1736850 - RNA, 19 nt, Homo sapiens
  misc_RNA (1)...(19): siRNA sense strand
caucagaacaugacagaau

SEQ ID NO: 1736851 - RNA, 19 nt, Homo sapiens
  misc_RNA (1)...(19): siRNA sense strand
gaauuuagucuuccuuugg

SEQ ID NO: 1736852 - RNA, 19 nt, Homo sapiens
  misc_RNA (1)...(19): siRNA sense strand
ugucucaucuugauaguca

SEQ ID NO: 1736853 - RNA, 19 nt, Homo sapiens
  misc_RNA (1)...(19): siRNA sense strand
uaugauguaugugccauuu

SEQ ID NO: 1736854 - RNA, 19 nt, Homo sapiens
  misc_RNA (1)...(19): siRNA sense strand
gcaucugucucaucuugau

SEQ ID NO: 1736855 - RNA, 19 nt, Homo sapiens
  misc_RNA (1)...(19): siRNA sense strand
ucaaggcgauucagacucu

SEQ ID NO: 1736856 - RNA, 19 nt, Homo sapiens
  misc_RNA (1)...(19): siRNA sense strand
ccauuuguuuggaugagua

SEQ ID NO: 1736857 - RNA, 19 nt, Homo sapiens
  misc_RNA (1)...(19): siRNA sense strand
gcacagagagcaggauaca

SEQ ID NO: 1736858 - RNA, 19 nt, Homo sapiens
  misc_RNA (1)...(19): siRNA sense strand
ggugaaucaucagcuaauu

SEQ ID NO: 1736859 - RNA, 19 nt, Homo sapiens
  misc_RNA (1)...(19): siRNA sense strand
agaaacuuccuguacauaa

SEQ ID NO: 1736860 - RNA, 19 nt, Homo sapiens
  misc_RNA (1)...(19): siRNA sense strand
ugaggaagacgacaaugaa

SEQ ID NO: 1736861 - RNA, 19 nt, Homo sapiens
  misc_RNA (1)...(19): siRNA sense strand
cauuccaucugucuuuauu

SEQ ID NO: 1736862 - RNA, 19 nt, Homo sapiens
  misc_RNA (1)...(19): siRNA sense strand
ugauguaugugccauuugu

SEQ ID NO: 1736863 - RNA, 19 nt, Homo sapiens
  misc_RNA (1)...(19): siRNA sense strand
agaaaggagaugaguauga

SEQ ID NO: 1736864 - RNA, 19 nt, Homo sapiens
  misc_RNA (1)...(19): siRNA sense strand
agaaacagacuucguaaag

SEQ ID NO: 1736865 - RNA, 19 nt, Homo sapiens
  misc_RNA (1)...(19): siRNA sense strand
caggauagacauagagcua

SEQ ID NO: 1736866 - RNA, 19 nt, Homo sapiens
  misc_RNA (1)...(19): siRNA sense strand
acauagagcuagaagaaac

SEQ ID NO: 1736867 - RNA, 19 nt, Homo sapiens
  misc_RNA (1)...(19): siRNA sense strand
gggauuacaacauagcaaa

SEQ ID NO: 1736868 - RNA, 19 nt, Homo sapiens
  misc_RNA (1)...(19): siRNA sense strand
gagaugaguaugauguaug

SEQ ID NO: 1736869 - RNA, 19 nt, Homo sapiens
  misc_RNA (1)...(19): siRNA sense strand
auacaaggcagccauaguu

SEQ ID NO: 1736870 - RNA, 19 nt, Homo sapiens
  misc_RNA (1)...(19): siRNA sense strand
gacagaacauaccccuuua

SEQ ID NO: 1736871 - RNA, 19 nt, Homo sapiens
  misc_RNA (1)...(19): siRNA sense strand
cagcuaauucucugaaaga

SEQ ID NO: 1736872 - RNA, 19 nt, Homo sapiens
  misc_RNA (1)...(19): siRNA sense strand
agaauuuagucuuccuuug

SEQ ID NO: 1736873 - RNA, 19 nt, Homo sapiens
  misc_RNA (1)...(19): siRNA sense strand
ucaagaaaggagaugagua

SEQ ID NO: 1736874 - RNA, 19 nt, Homo sapiens
  misc_RNA (1)...(19): siRNA sense strand
agccauaguucacaauguu

SEQ ID NO: 1736875 - RNA, 19 nt, Homo sapiens
  misc_RNA (1)...(19): siRNA sense strand
ucguaaagaucaacuuaag

SEQ ID NO: 1736876 - RNA, 19 nt, Homo sapiens
  misc_RNA (1)...(19): siRNA sense strand
guuccagaauuuagucuuc

SEQ ID NO: 1736877 - RNA, 19 nt, Homo sapiens
  misc_RNA (1)...(19): siRNA sense strand
ucacaauguugauucugau

SEQ ID NO: 1736878 - RNA, 19 nt, Homo sapiens
  misc_RNA (1)...(19): siRNA sense strand
uuacugagaccuuuagcuu

SEQ ID NO: 1736879 - RNA, 19 nt, Homo sapiens
  misc_RNA (1)...(19): siRNA sense strand
agaugaguaugauguaugu

SEQ ID NO: 1736880 - RNA, 19 nt, Homo sapiens
  misc_RNA (1)...(19): siRNA sense strand
cacagacaguagucaagaa

SEQ ID NO: 1736881 - RNA, 19 nt, Homo sapiens
  misc_RNA (1)...(19): siRNA sense strand
cagaaucuucagacuauga

SEQ ID NO: 1736882 - RNA, 19 nt, Homo sapiens
  misc_RNA (1)...(19): siRNA sense strand
acagagagcaggauacaag

SEQ ID NO: 1736883 - RNA, 19 nt, Homo sapiens
  misc_RNA (1)...(19): siRNA sense strand
uaccuaauucccuuccuua

SEQ ID NO: 1736884 - RNA, 19 nt, Homo sapiens
  misc_RNA (1)...(19): siRNA sense strand
cuucguaaagaucaacuua

SEQ ID NO: 1736885 - RNA, 19 nt, Homo sapiens
  misc_RNA (1)...(19): siRNA sense strand
cuaccuaauucccuuccuu

SEQ ID NO: 1736886 - RNA, 19 nt, Homo sapiens
  misc_RNA (1)...(19): siRNA sense strand
aaaaugaagugacagaaca

SEQ ID NO: 1736887 - RNA, 19 nt, Homo sapiens
  misc_RNA (1)...(19): siRNA sense strand
cagaauuuagucuuccuuu

SEQ ID NO: 1736888 - RNA, 19 nt, Homo sapiens
  misc_RNA (1)...(19): siRNA sense strand
gacaguagucaagaagaaa

SEQ ID NO: 1736889 - RNA, 19 nt, Homo sapiens
  misc_RNA (1)...(19): siRNA sense strand
gaucaacuuaagaaacuuc

SEQ ID NO: 1736890 - RNA, 19 nt, Homo sapiens
  misc_RNA (1)...(19): siRNA sense strand
gacauagagcuagaagaaa

SEQ ID NO: 1736891 - RNA, 19 nt, Homo sapiens
  misc_RNA (1)...(19): siRNA sense strand
aaccagagaaugccuguga

SEQ ID NO: 1736892 - RNA, 19 nt, Homo sapiens
  misc_RNA (1)...(19): siRNA sense strand
acugagaccuuuagcuucu

SEQ ID NO: 1736893 - RNA, 19 nt, Homo sapiens
  misc_RNA (1)...(19): siRNA sense strand
ugacagaacauaccccuuu

SEQ ID NO: 1736894 - RNA, 19 nt, Homo sapiens
  misc_RNA (1)...(19): siRNA sense strand
cagccauaguucacaaugu

SEQ ID NO: 1736895 - RNA, 19 nt, Homo sapiens
  misc_RNA (1)...(19): siRNA sense strand
gugggcaucugucucaucu

SEQ ID NO: 1736896 - RNA, 19 nt, Homo sapiens
  misc_RNA (1)...(19): siRNA sense strand
uaucauagugggcaucugu

SEQ ID NO: 1736897 - RNA, 19 nt, Homo sapiens
  misc_RNA (1)...(19): siRNA sense strand
gauacaaggcagccauagu

SEQ ID NO: 1736898 - RNA, 19 nt, Homo sapiens
  misc_RNA (1)...(19): siRNA sense strand
gggccaccuuaucuuaguu

SEQ ID NO: 1736899 - RNA, 19 nt, Homo sapiens
  misc_RNA (1)...(19): siRNA sense strand
aauuuagucuuccuuugga

SEQ ID NO: 1736900 - RNA, 19 nt, Homo sapiens
  misc_RNA (1)...(19): siRNA sense strand
ggauuacaacauagcaaau

SEQ ID NO: 1736901 - RNA, 19 nt, Homo sapiens
  misc_RNA (1)...(19): siRNA sense strand
agacgacaaugaagauacu

SEQ ID NO: 1736902 - RNA, 19 nt, Homo sapiens
  misc_RNA (1)...(19): siRNA sense strand
gacaauucaucuggcacuu

SEQ ID NO: 1736903 - RNA, 19 nt, Homo sapiens
  misc_RNA (1)...(19): siRNA sense strand
gcuaauucucugaaagaug

SEQ ID NO: 1736904 - RNA, 19 nt, Homo sapiens
  misc_RNA (1)...(19): siRNA sense strand
ugucagugcccagucauuu

SEQ ID NO: 1736905 - RNA, 19 nt, Homo sapiens
  misc_RNA (1)...(19): siRNA sense strand
uucacaauguugauucuga

SEQ ID NO: 1736906 - RNA, 19 nt, Homo sapiens
  misc_RNA (1)...(19): siRNA sense strand
gcagccauaguucacaaug

SEQ ID NO: 1736907 - RNA, 19 nt, Homo sapiens
  misc_RNA (1)...(19): siRNA sense strand
caauguugauucugaugac

SEQ ID NO: 1736908 - RNA, 19 nt, Homo sapiens
  misc_RNA (1)...(19): siRNA sense strand
gaggaagacgacaaugaag

SEQ ID NO: 1736909 - RNA, 19 nt, Homo sapiens
  misc_RNA (1)...(19): siRNA sense strand
aagaaacuuccuguacaua

SEQ ID NO: 1736910 - RNA, 19 nt, Homo sapiens
  misc_RNA (1)...(19): siRNA sense strand
ccuuuggaauacuaccuaa

SEQ ID NO: 1736911 - RNA, 19 nt, Homo sapiens
  misc_RNA (1)...(19): siRNA sense strand
agaagaaaaugaagugaca

SEQ ID NO: 1736912 - RNA, 19 nt, Homo sapiens
  misc_RNA (1)...(19): siRNA sense strand
ccauaguucacaauguuga

SEQ ID NO: 1736913 - RNA, 19 nt, Homo sapiens
  misc_RNA (1)...(19): siRNA sense strand
acacagacaguagucaaga

SEQ ID NO: 1736914 - RNA, 19 nt, Homo sapiens
  misc_RNA (1)...(19): siRNA sense strand
cguaaagaucaacuuaaga

SEQ ID NO: 1736915 - RNA, 19 nt, Homo sapiens
  misc_RNA (1)...(19): siRNA sense strand
ugucuuuauuggugaauca

SEQ ID NO: 1736916 - RNA, 19 nt, Homo sapiens
  misc_RNA (1)...(19): siRNA sense strand
cggaaucccgcucacauca

SEQ ID NO: 1736917 - RNA, 19 nt, Homo sapiens
  misc_RNA (1)...(19): siRNA sense strand
guagugaugcagaaaauga

SEQ ID NO: 1736918 - RNA, 19 nt, Homo sapiens
  misc_RNA (1)...(19): siRNA sense strand
gaaacuuccuguacauaaa

SEQ ID NO: 1736919 - RNA, 19 nt, Homo sapiens
  misc_RNA (1)...(19): siRNA sense strand
gacagaaucuucagacuau

SEQ ID NO: 1736920 - RNA, 19 nt, Homo sapiens
  misc_RNA (1)...(19): siRNA sense strand
gaaacagacuucguaaaga

SEQ ID NO: 1736921 - RNA, 19 nt, Homo sapiens
  misc_RNA (1)...(19): siRNA sense strand
gaaaggagaugaguaugau

SEQ ID NO: 1736922 - RNA, 19 nt, Homo sapiens
  misc_RNA (1)...(19): siRNA sense strand
guaugaagauggagacaaa

SEQ ID NO: 1736923 - RNA, 19 nt, Homo sapiens
  misc_RNA (1)...(19): siRNA sense strand
cuaauucucugaaagauga

SEQ ID NO: 1736924 - RNA, 19 nt, Homo sapiens
  misc_RNA (1)...(19): siRNA sense strand
ugaacgggauuacaacaua

SEQ ID NO: 1736925 - RNA, 19 nt, Homo sapiens
  misc_RNA (1)...(19): siRNA sense strand
gaacauaccccuuuacuga

SEQ ID NO: 1736926 - RNA, 19 nt, Homo sapiens
  misc_RNA (1)...(19): siRNA sense strand
gaacaugacagaaucuuca

SEQ ID NO: 1736927 - RNA, 19 nt, Homo sapiens
  misc_RNA (1)...(19): siRNA sense strand
cuaauucccuuccuuauca

SEQ ID NO: 1736928 - RNA, 19 nt, Homo sapiens
  misc_RNA (1)...(19): siRNA sense strand
cauagugccuccaccagua

SEQ ID NO: 1736929 - RNA, 19 nt, Homo sapiens
  misc_RNA (1)...(19): siRNA sense strand
aaacagacuucguaaagau

SEQ ID NO: 1736930 - RNA, 19 nt, Homo sapiens
  misc_RNA (1)...(19): siRNA sense strand
gggcaucugucucaucuug

SEQ ID NO: 1736931 - RNA, 19 nt, Homo sapiens
  misc_RNA (1)...(19): siRNA sense strand
caagaaaggagaugaguau

SEQ ID NO: 1736932 - RNA, 19 nt, Homo sapiens
  misc_RNA (1)...(19): siRNA sense strand
gaaugccugugaacccaua

SEQ ID NO: 1736933 - RNA, 19 nt, Homo sapiens
  misc_RNA (1)...(19): siRNA sense strand
gcacuuucaucguguuaau

SEQ ID NO: 1736934 - RNA, 19 nt, Homo sapiens
  misc_RNA (1)...(19): siRNA sense strand
gaacgggauuacaacauag

SEQ ID NO: 1736935 - RNA, 19 nt, Homo sapiens
  misc_RNA (1)...(19): siRNA sense strand
gaaucccgcucacaucaga

SEQ ID NO: 1736936 - RNA, 19 nt, Homo sapiens
  misc_RNA (1)...(19): siRNA sense strand
ggauagacauagagcuaga

SEQ ID NO: 1736937 - RNA, 19 nt, Homo sapiens
  misc_RNA (1)...(19): siRNA sense strand
agacauagagcuagaagaa

SEQ ID NO: 1736938 - RNA, 19 nt, Homo sapiens
  misc_RNA (1)...(19): siRNA sense strand
ggagaugaguaugauguau

SEQ ID NO: 1736939 - RNA, 19 nt, Homo sapiens
  misc_RNA (1)...(19): siRNA sense strand
uaagaaacuuccuguacau

SEQ ID NO: 1736940 - RNA, 19 nt, Homo sapiens
  misc_RNA (1)...(19): siRNA sense strand
caauucaucuggcacuuuc

SEQ ID NO: 1736941 - RNA, 19 nt, Homo sapiens
  misc_RNA (1)...(19): siRNA sense strand
uuaagaaacuuccuguaca

SEQ ID NO: 1736942 - RNA, 19 nt, Homo sapiens
  misc_RNA (1)...(19): siRNA sense strand
agacaguagucaagaagaa

SEQ ID NO: 1736943 - RNA, 19 nt, Homo sapiens
  misc_RNA (1)...(19): siRNA sense strand
guagacccuuggcuaacua

SEQ ID NO: 1736944 - RNA, 19 nt, Homo sapiens
  misc_RNA (1)...(19): siRNA sense strand
gaagacgacaaugaagaua

SEQ ID NO: 1736945 - RNA, 19 nt, Homo sapiens
  misc_RNA (1)...(19): siRNA sense strand
ggaugaguaugaagaugga

SEQ ID NO: 1736946 - RNA, 19 nt, Homo sapiens
  misc_RNA (1)...(19): siRNA sense strand
ggaagacgacaaugaagau

SEQ ID NO: 1736947 - RNA, 19 nt, Homo sapiens
  misc_RNA (1)...(19): siRNA sense strand
aaauugacauuccaucugu

SEQ ID NO: 1736948 - RNA, 19 nt, Homo sapiens
  misc_RNA (1)...(19): siRNA sense strand
ugacaguagugaugcagaa

SEQ ID NO: 1736949 - RNA, 19 nt, Homo sapiens
  misc_RNA (1)...(19): siRNA sense strand
ugacagaaucuucagacua

SEQ ID NO: 1736950 - RNA, 19 nt, Homo sapiens
  misc_RNA (1)...(19): siRNA sense strand
caucagaacaugacagaau

SEQ ID NO: 1736951 - RNA, 19 nt, Homo sapiens
  misc_RNA (1)...(19): siRNA sense strand
gaauuuagucuuccuuugg

SEQ ID NO: 1736952 - RNA, 19 nt, Homo sapiens
  misc_RNA (1)...(19): siRNA sense strand
ugucucaucuugauaguca

SEQ ID NO: 1736953 - RNA, 19 nt, Homo sapiens
  misc_RNA (1)...(19): siRNA sense strand
uaugauguaugugccauuu

SEQ ID NO: 1736954 - RNA, 19 nt, Homo sapiens
  misc_RNA (1)...(19): siRNA sense strand
gcaucugucucaucuugau

SEQ ID NO: 1736955 - RNA, 19 nt, Homo sapiens
  misc_RNA (1)...(19): siRNA sense strand
ucaaggcgauucagacucu

SEQ ID NO: 1736956 - RNA, 19 nt, Homo sapiens
  misc_RNA (1)...(19): siRNA sense strand
ccauuuguuuggaugagua

SEQ ID NO: 1736957 - RNA, 19 nt, Homo sapiens
  misc_RNA (1)...(19): siRNA sense strand
gcacagagagcaggauaca

SEQ ID NO: 1736958 - RNA, 19 nt, Homo sapiens
  misc_RNA (1)...(19): siRNA sense strand
ggugaaucaucagcuaauu

SEQ ID NO: 1736959 - RNA, 19 nt, Homo sapiens
  misc_RNA (1)...(19): siRNA sense strand
agaaacuuccuguacauaa

SEQ ID NO: 1736960 - RNA, 19 nt, Homo sapiens
  misc_RNA (1)...(19): siRNA sense strand
ugaggaagacgacaaugaa

SEQ ID NO: 1736961 - RNA, 19 nt, Homo sapiens
  misc_RNA (1)...(19): siRNA sense strand
cauuccaucugucuuuauu

SEQ ID NO: 1736962 - RNA, 19 nt, Homo sapiens
  misc_RNA (1)...(19): siRNA sense strand
ugauguaugugccauuugu

SEQ ID NO: 1736963 - RNA, 19 nt, Homo sapiens
  misc_RNA (1)...(19): siRNA sense strand
agaaaggagaugaguauga

SEQ ID NO: 1736964 - RNA, 19 nt, Homo sapiens
  misc_RNA (1)...(19): siRNA sense strand
agaaacagacuucguaaag

SEQ ID NO: 1736965 - RNA, 19 nt, Homo sapiens
  misc_RNA (1)...(19): siRNA sense strand
caggauagacauagagcua

SEQ ID NO: 1736966 - RNA, 19 nt, Homo sapiens
  misc_RNA (1)...(19): siRNA sense strand
acauagagcuagaagaaac

SEQ ID NO: 1736967 - RNA, 19 nt, Homo sapiens
  misc_RNA (1)...(19): siRNA sense strand
gggauuacaacauagcaaa

SEQ ID NO: 1736968 - RNA, 19 nt, Homo sapiens
  misc_RNA (1)...(19): siRNA sense strand
gagaugaguaugauguaug

SEQ ID NO: 1736969 - RNA, 19 nt, Homo sapiens
  misc_RNA (1)...(19): siRNA sense strand
auacaaggcagccauaguu

SEQ ID NO: 1736970 - RNA, 19 nt, Homo sapiens
  misc_RNA (1)...(19): siRNA sense strand
gacagaacauaccccuuua

SEQ ID NO: 1736971 - RNA, 19 nt, Homo sapiens
  misc_RNA (1)...(19): siRNA sense strand
cagcuaauucucugaaaga

SEQ ID NO: 1736972 - RNA, 19 nt, Homo sapiens
  misc_RNA (1)...(19): siRNA sense strand
agaauuuagucuuccuuug

SEQ ID NO: 1736973 - RNA, 19 nt, Homo sapiens
  misc_RNA (1)...(19): siRNA sense strand
ucaagaaaggagaugagua

SEQ ID NO: 1736974 - RNA, 19 nt, Homo sapiens
  misc_RNA (1)...(19): siRNA sense strand
agccauaguucacaauguu

SEQ ID NO: 1736975 - RNA, 19 nt, Homo sapiens
  misc_RNA (1)...(19): siRNA sense strand
ucguaaagaucaacuuaag

SEQ ID NO: 1736976 - RNA, 19 nt, Homo sapiens
  misc_RNA (1)...(19): siRNA sense strand
guuccagaauuuagucuuc

SEQ ID NO: 1736977 - RNA, 19 nt, Homo sapiens
  misc_RNA (1)...(19): siRNA sense strand
ucacaauguugauucugau

SEQ ID NO: 1736978 - RNA, 19 nt, Homo sapiens
  misc_RNA (1)...(19): siRNA sense strand
uuacugagaccuuuagcuu

SEQ ID NO: 1736979 - RNA, 19 nt, Homo sapiens
  misc_RNA (1)...(19): siRNA sense strand
agaugaguaugauguaugu

SEQ ID NO: 1736980 - RNA, 19 nt, Homo sapiens
  misc_RNA (1)...(19): siRNA sense strand
cacagacaguagucaagaa

SEQ ID NO: 1736981 - RNA, 19 nt, Homo sapiens
  misc_RNA (1)...(19): siRNA sense strand
cagaaucuucagacuauga

SEQ ID NO: 1736982 - RNA, 19 nt, Homo sapiens
  misc_RNA (1)...(19): siRNA sense strand
acagagagcaggauacaag

SEQ ID NO: 1736983 - RNA, 19 nt, Homo sapiens
  misc_RNA (1)...(19): siRNA sense strand
uaccuaauucccuuccuua

SEQ ID NO: 1736984 - RNA, 19 nt, Homo sapiens
  misc_RNA (1)...(19): siRNA sense strand
cuucguaaagaucaacuua

SEQ ID NO: 1736985 - RNA, 19 nt, Homo sapiens
  misc_RNA (1)...(19): siRNA sense strand
cuaccuaauucccuuccuu

SEQ ID NO: 1736986 - RNA, 19 nt, Homo sapiens
  misc_RNA (1)...(19): siRNA sense strand
aaaaugaagugacagaaca

SEQ ID NO: 1736987 - RNA, 19 nt, Homo sapiens
  misc_RNA (1)...(19): siRNA sense strand
cagaauuuagucuuccuuu

SEQ ID NO: 1736988 - RNA, 19 nt, Homo sapiens
  misc_RNA (1)...(19): siRNA sense strand
gacaguagucaagaagaaa

SEQ ID NO: 1736989 - RNA, 19 nt, Homo sapiens
  misc_RNA (1)...(19): siRNA sense strand
gaucaacuuaagaaacuuc

SEQ ID NO: 1736990 - RNA, 19 nt, Homo sapiens
  misc_RNA (1)...(19): siRNA sense strand
gacauagagcuagaagaaa

SEQ ID NO: 1736991 - RNA, 19 nt, Homo sapiens
  misc_RNA (1)...(19): siRNA sense strand
aaccagagaaugccuguga

SEQ ID NO: 1736992 - RNA, 19 nt, Homo sapiens
  misc_RNA (1)...(19): siRNA sense strand
acugagaccuuuagcuucu

SEQ ID NO: 1736993 - RNA, 19 nt, Homo sapiens
  misc_RNA (1)...(19): siRNA sense strand
ugacagaacauaccccuuu

SEQ ID NO: 1736994 - RNA, 19 nt, Homo sapiens
  misc_RNA (1)...(19): siRNA sense strand
cagccauaguucacaaugu

SEQ ID NO: 1736995 - RNA, 19 nt, Homo sapiens
  misc_RNA (1)...(19): siRNA sense strand
gugggcaucugucucaucu

SEQ ID NO: 1736996 - RNA, 19 nt, Homo sapiens
  misc_RNA (1)...(19): siRNA sense strand
uaucauagugggcaucugu

SEQ ID NO: 1736997 - RNA, 19 nt, Homo sapiens
  misc_RNA (1)...(19): siRNA sense strand
gauacaaggcagccauagu

SEQ ID NO: 1736998 - RNA, 19 nt, Homo sapiens
  misc_RNA (1)...(19): siRNA sense strand
gggccaccuuaucuuaguu

SEQ ID NO: 1736999 - RNA, 19 nt, Homo sapiens
  misc_RNA (1)...(19): siRNA sense strand
aauuuagucuuccuuugga

SEQ ID NO: 1737000 - RNA, 19 nt, Homo sapiens
  misc_RNA (1)...(19): siRNA sense strand
ggauuacaacauagcaaau

SEQ ID NO: 1737001 - RNA, 19 nt, Homo sapiens
  misc_RNA (1)...(19): siRNA sense strand
agacgacaaugaagauacu

SEQ ID NO: 1737002 - RNA, 19 nt, Homo sapiens
  misc_RNA (1)...(19): siRNA sense strand
gacaauucaucuggcacuu

SEQ ID NO: 1737003 - RNA, 19 nt, Homo sapiens
  misc_RNA (1)...(19): siRNA sense strand
gcuaauucucugaaagaug

SEQ ID NO: 1737004 - RNA, 19 nt, Homo sapiens
  misc_RNA (1)...(19): siRNA sense strand
ugucagugcccagucauuu

SEQ ID NO: 1737005 - RNA, 19 nt, Homo sapiens
  misc_RNA (1)...(19): siRNA sense strand
uucacaauguugauucuga

SEQ ID NO: 1737006 - RNA, 19 nt, Homo sapiens
  misc_RNA (1)...(19): siRNA sense strand
gcagccauaguucacaaug

SEQ ID NO: 1737007 - RNA, 19 nt, Homo sapiens
  misc_RNA (1)...(19): siRNA sense strand
caauguugauucugaugac

SEQ ID NO: 1737008 - RNA, 19 nt, Homo sapiens
  misc_RNA (1)...(19): siRNA sense strand
gaggaagacgacaaugaag

SEQ ID NO: 1737009 - RNA, 19 nt, Homo sapiens
  misc_RNA (1)...(19): siRNA sense strand
aagaaacuuccuguacaua

SEQ ID NO: 1737010 - RNA, 19 nt, Homo sapiens
  misc_RNA (1)...(19): siRNA sense strand
ccuuuggaauacuaccuaa

SEQ ID NO: 1737011 - RNA, 19 nt, Homo sapiens
  misc_RNA (1)...(19): siRNA sense strand
agaagaaaaugaagugaca

SEQ ID NO: 1737012 - RNA, 19 nt, Homo sapiens
  misc_RNA (1)...(19): siRNA sense strand
ccauaguucacaauguuga

SEQ ID NO: 1737013 - RNA, 19 nt, Homo sapiens
  misc_RNA (1)...(19): siRNA sense strand
acacagacaguagucaaga

SEQ ID NO: 1737014 - RNA, 19 nt, Homo sapiens
  misc_RNA (1)...(19): siRNA sense strand
cguaaagaucaacuuaaga

SEQ ID NO: 1737015 - RNA, 19 nt, Homo sapiens
  misc_RNA (1)...(19): siRNA sense strand
ugucuuuauuggugaauca

SEQ ID NO: 1737016 - RNA, 19 nt, Homo sapiens
  misc_RNA (1)...(19): siRNA sense strand
cggaaucccgcucacauca

SEQ ID NO: 1737017 - RNA, 19 nt, Homo sapiens
  misc_RNA (1)...(19): siRNA sense strand
guagugaugcagaaaauga

SEQ ID NO: 1737018 - RNA, 19 nt, Homo sapiens
  misc_RNA (1)...(19): siRNA sense strand
cauagugccuccaccagua

SEQ ID NO: 1737019 - RNA, 19 nt, Homo sapiens
  misc_RNA (1)...(19): siRNA sense strand
gaaugccugugaacccaua

SEQ ID NO: 1737020 - RNA, 19 nt, Homo sapiens
  misc_RNA (1)...(19): siRNA sense strand
gcacuuucaucguguuaau

SEQ ID NO: 1737021 - RNA, 19 nt, Homo sapiens
  misc_RNA (1)...(19): siRNA sense strand
caauucaucuggcacuuuc

SEQ ID NO: 1737022 - RNA, 19 nt, Homo sapiens
  misc_RNA (1)...(19): siRNA sense strand
gcacagagagcaggauaca

SEQ ID NO: 1737023 - RNA, 19 nt, Homo sapiens
  misc_RNA (1)...(19): siRNA sense strand
auacaaggcagccauaguu

SEQ ID NO: 1737024 - RNA, 19 nt, Homo sapiens
  misc_RNA (1)...(19): siRNA sense strand
agccauaguucacaauguu

SEQ ID NO: 1737025 - RNA, 19 nt, Homo sapiens
  misc_RNA (1)...(19): siRNA sense strand
ucacaauguugauucugau

SEQ ID NO: 1737026 - RNA, 19 nt, Homo sapiens
  misc_RNA (1)...(19): siRNA sense strand
acagagagcaggauacaag

SEQ ID NO: 1737027 - RNA, 19 nt, Homo sapiens
  misc_RNA (1)...(19): siRNA sense strand
gauacaaggcagccauagu

SEQ ID NO: 1737028 - RNA, 19 nt, Homo sapiens
  misc_RNA (1)...(19): siRNA sense strand
cagccauaguucacaaugu

SEQ ID NO: 1737029 - RNA, 19 nt, Homo sapiens
  misc_RNA (1)...(19): siRNA sense strand
aaccagagaaugccuguga

SEQ ID NO: 1737030 - RNA, 19 nt, Homo sapiens
  misc_RNA (1)...(19): siRNA sense strand
gacaauucaucuggcacuu

SEQ ID NO: 1737031 - RNA, 19 nt, Homo sapiens
  misc_RNA (1)...(19): siRNA sense strand
uucacaauguugauucuga

SEQ ID NO: 1737032 - RNA, 19 nt, Homo sapiens
  misc_RNA (1)...(19): siRNA sense strand
gcagccauaguucacaaug

SEQ ID NO: 1737033 - RNA, 19 nt, Homo sapiens
  misc_RNA (1)...(19): siRNA sense strand
caauguugauucugaugac

SEQ ID NO: 1737034 - RNA, 19 nt, Homo sapiens
  misc_RNA (1)...(19): siRNA sense strand
ccauaguucacaauguuga

SEQ ID NO: 1737035 - RNA, 19 nt, Homo sapiens
  misc_RNA (1)...(19): siRNA sense strand
cguguuaauuagaagacuu

SEQ ID NO: 1737036 - RNA, 19 nt, Homo sapiens
  misc_RNA (1)...(19): siRNA sense strand
gguuuuaaaugcacagaga

SEQ ID NO: 1737037 - RNA, 19 nt, Homo sapiens
  misc_RNA (1)...(19): siRNA sense strand
acaauucaucuggcacuuu

SEQ ID NO: 1737038 - RNA, 19 nt, Homo sapiens
  misc_RNA (1)...(19): siRNA sense strand
acaauguugauucugauga

SEQ ID NO: 1737039 - RNA, 19 nt, Homo sapiens
  misc_RNA (1)...(19): siRNA sense strand
gaaacuuccuguacauaaa

SEQ ID NO: 1737040 - RNA, 19 nt, Homo sapiens
  misc_RNA (1)...(19): siRNA sense strand
gacagaaucuucagacuau

SEQ ID NO: 1737041 - RNA, 19 nt, Homo sapiens
  misc_RNA (1)...(19): siRNA sense strand
gaaacagacuucguaaaga

SEQ ID NO: 1737042 - RNA, 19 nt, Homo sapiens
  misc_RNA (1)...(19): siRNA sense strand
gaaaggagaugaguaugau

SEQ ID NO: 1737043 - RNA, 19 nt, Homo sapiens
  misc_RNA (1)...(19): siRNA sense strand
guaugaagauggagacaaa

SEQ ID NO: 1737044 - RNA, 19 nt, Homo sapiens
  misc_RNA (1)...(19): siRNA sense strand
ugaacgggauuacaacaua

SEQ ID NO: 1737045 - RNA, 19 nt, Homo sapiens
  misc_RNA (1)...(19): siRNA sense strand
gaacauaccccuuuacuga

SEQ ID NO: 1737046 - RNA, 19 nt, Homo sapiens
  misc_RNA (1)...(19): siRNA sense strand
gaacaugacagaaucuuca

SEQ ID NO: 1737047 - RNA, 19 nt, Homo sapiens
  misc_RNA (1)...(19): siRNA sense strand
aaacagacuucguaaagau

SEQ ID NO: 1737048 - RNA, 19 nt, Homo sapiens
  misc_RNA (1)...(19): siRNA sense strand
caagaaaggagaugaguau

SEQ ID NO: 1737049 - RNA, 19 nt, Homo sapiens
  misc_RNA (1)...(19): siRNA sense strand
gaacgggauuacaacauag

SEQ ID NO: 1737050 - RNA, 19 nt, Homo sapiens
  misc_RNA (1)...(19): siRNA sense strand
gaaucccgcucacaucaga

SEQ ID NO: 1737051 - RNA, 19 nt, Homo sapiens
  misc_RNA (1)...(19): siRNA sense strand
ggauagacauagagcuaga

SEQ ID NO: 1737052 - RNA, 19 nt, Homo sapiens
  misc_RNA (1)...(19): siRNA sense strand
agacauagagcuagaagaa

SEQ ID NO: 1737053 - RNA, 19 nt, Homo sapiens
  misc_RNA (1)...(19): siRNA sense strand
ggagaugaguaugauguau

SEQ ID NO: 1737054 - RNA, 19 nt, Homo sapiens
  misc_RNA (1)...(19): siRNA sense strand
uaagaaacuuccuguacau

SEQ ID NO: 1737055 - RNA, 19 nt, Homo sapiens
  misc_RNA (1)...(19): siRNA sense strand
uuaagaaacuuccuguaca

SEQ ID NO: 1737056 - RNA, 19 nt, Homo sapiens
  misc_RNA (1)...(19): siRNA sense strand
agacaguagucaagaagaa

SEQ ID NO: 1737057 - RNA, 19 nt, Homo sapiens
  misc_RNA (1)...(19): siRNA sense strand
guagacccuuggcuaacua

SEQ ID NO: 1737058 - RNA, 19 nt, Homo sapiens
  misc_RNA (1)...(19): siRNA sense strand
gaagacgacaaugaagaua

SEQ ID NO: 1737059 - RNA, 19 nt, Homo sapiens
  misc_RNA (1)...(19): siRNA sense strand
ggaugaguaugaagaugga

SEQ ID NO: 1737060 - RNA, 19 nt, Homo sapiens
  misc_RNA (1)...(19): siRNA sense strand
ggaagacgacaaugaagau

SEQ ID NO: 1737061 - RNA, 19 nt, Homo sapiens
  misc_RNA (1)...(19): siRNA sense strand
caucagaacaugacagaau

SEQ ID NO: 1737062 - RNA, 19 nt, Homo sapiens
  misc_RNA (1)...(19): siRNA sense strand
ugacaguagugaugcagaa

SEQ ID NO: 1737063 - RNA, 19 nt, Homo sapiens
  misc_RNA (1)...(19): siRNA sense strand
ugacagaaucuucagacua

SEQ ID NO: 1737064 - RNA, 19 nt, Homo sapiens
  misc_RNA (1)...(19): siRNA sense strand
uaugauguaugugccauuu

SEQ ID NO: 1737065 - RNA, 19 nt, Homo sapiens
  misc_RNA (1)...(19): siRNA sense strand
ccauuuguuuggaugagua

SEQ ID NO: 1737066 - RNA, 19 nt, Homo sapiens
  misc_RNA (1)...(19): siRNA sense strand
ucaaggcgauucagacucu

SEQ ID NO: 1737067 - RNA, 19 nt, Homo sapiens
  misc_RNA (1)...(19): siRNA sense strand
agaaacuuccuguacauaa

SEQ ID NO: 1737068 - RNA, 19 nt, Homo sapiens
  misc_RNA (1)...(19): siRNA sense strand
ugaggaagacgacaaugaa

SEQ ID NO: 1737069 - RNA, 19 nt, Homo sapiens
  misc_RNA (1)...(19): siRNA sense strand
agaaaggagaugaguauga

SEQ ID NO: 1737070 - RNA, 19 nt, Homo sapiens
  misc_RNA (1)...(19): siRNA sense strand
caggauagacauagagcua

SEQ ID NO: 1737071 - RNA, 19 nt, Homo sapiens
  misc_RNA (1)...(19): siRNA sense strand
agaaacagacuucguaaag

SEQ ID NO: 1737072 - RNA, 19 nt, Homo sapiens
  misc_RNA (1)...(19): siRNA sense strand
ugauguaugugccauuugu

SEQ ID NO: 1737073 - RNA, 19 nt, Homo sapiens
  misc_RNA (1)...(19): siRNA sense strand
gagaugaguaugauguaug

SEQ ID NO: 1737074 - RNA, 19 nt, Homo sapiens
  misc_RNA (1)...(19): siRNA sense strand
gggauuacaacauagcaaa

SEQ ID NO: 1737075 - RNA, 19 nt, Homo sapiens
  misc_RNA (1)...(19): siRNA sense strand
acauagagcuagaagaaac

SEQ ID NO: 1737076 - RNA, 19 nt, Homo sapiens
  misc_RNA (1)...(19): siRNA sense strand
gacagaacauaccccuuua

SEQ ID NO: 1737077 - RNA, 19 nt, Homo sapiens
  misc_RNA (1)...(19): siRNA sense strand
ucaagaaaggagaugagua

SEQ ID NO: 1737078 - RNA, 19 nt, Homo sapiens
  misc_RNA (1)...(19): siRNA sense strand
ucguaaagaucaacuuaag

SEQ ID NO: 1737079 - RNA, 19 nt, Homo sapiens
  misc_RNA (1)...(19): siRNA sense strand
agaugaguaugauguaugu

SEQ ID NO: 1737080 - RNA, 19 nt, Homo sapiens
  misc_RNA (1)...(19): siRNA sense strand
uuacugagaccuuuagcuu

SEQ ID NO: 1737081 - RNA, 19 nt, Homo sapiens
  misc_RNA (1)...(19): siRNA sense strand
cacagacaguagucaagaa

SEQ ID NO: 1737082 - RNA, 19 nt, Homo sapiens
  misc_RNA (1)...(19): siRNA sense strand
cagaaucuucagacuauga

SEQ ID NO: 1737083 - RNA, 19 nt, Homo sapiens
  misc_RNA (1)...(19): siRNA sense strand
cuucguaaagaucaacuua

SEQ ID NO: 1737084 - RNA, 19 nt, Homo sapiens
  misc_RNA (1)...(19): siRNA sense strand
aaaaugaagugacagaaca

SEQ ID NO: 1737085 - RNA, 19 nt, Homo sapiens
  misc_RNA (1)...(19): siRNA sense strand
gacauagagcuagaagaaa

SEQ ID NO: 1737086 - RNA, 19 nt, Homo sapiens
  misc_RNA (1)...(19): siRNA sense strand
gacaguagucaagaagaaa

SEQ ID NO: 1737087 - RNA, 19 nt, Homo sapiens
  misc_RNA (1)...(19): siRNA sense strand
gaucaacuuaagaaacuuc

SEQ ID NO: 1737088 - RNA, 19 nt, Homo sapiens
  misc_RNA (1)...(19): siRNA sense strand
ugacagaacauaccccuuu

SEQ ID NO: 1737089 - RNA, 19 nt, Homo sapiens
  misc_RNA (1)...(19): siRNA sense strand
acugagaccuuuagcuucu

SEQ ID NO: 1737090 - RNA, 19 nt, Homo sapiens
  misc_RNA (1)...(19): siRNA sense strand
agacgacaaugaagauacu

SEQ ID NO: 1737091 - RNA, 19 nt, Homo sapiens
  misc_RNA (1)...(19): siRNA sense strand
ggauuacaacauagcaaau

SEQ ID NO: 1737092 - RNA, 19 nt, Homo sapiens
  misc_RNA (1)...(19): siRNA sense strand
ugucagugcccagucauuu

SEQ ID NO: 1737093 - RNA, 19 nt, Homo sapiens
  misc_RNA (1)...(19): siRNA sense strand
gaggaagacgacaaugaag

SEQ ID NO: 1737094 - RNA, 19 nt, Homo sapiens
  misc_RNA (1)...(19): siRNA sense strand
aagaaacuuccuguacaua

SEQ ID NO: 1737095 - RNA, 19 nt, Homo sapiens
  misc_RNA (1)...(19): siRNA sense strand
acacagacaguagucaaga

SEQ ID NO: 1737096 - RNA, 19 nt, Homo sapiens
  misc_RNA (1)...(19): siRNA sense strand
cguaaagaucaacuuaaga

SEQ ID NO: 1737097 - RNA, 19 nt, Homo sapiens
  misc_RNA (1)...(19): siRNA sense strand
agaagaaaaugaagugaca

SEQ ID NO: 1737098 - RNA, 19 nt, Homo sapiens
  misc_RNA (1)...(19): siRNA sense strand
guucccaugcuuaucauug

SEQ ID NO: 1737099 - RNA, 19 nt, Homo sapiens
  misc_RNA (1)...(19): siRNA sense strand
gauagacauagagcuagaa

SEQ ID NO: 1737100 - RNA, 19 nt, Homo sapiens
  misc_RNA (1)...(19): siRNA sense strand
guagugaugcagaaaauga

SEQ ID NO: 1737101 - RNA, 19 nt, Homo sapiens
  misc_RNA (1)...(19): siRNA sense strand
cggaaucccgcucacauca

SEQ ID NO: 1737102 - RNA, 19 nt, Homo sapiens
  misc_RNA (1)...(19): siRNA sense strand
uguguagacccuuggcuaa

SEQ ID NO: 1737103 - RNA, 19 nt, Homo sapiens
  misc_RNA (1)...(19): siRNA sense strand
uguccagugugcaagcaaa

SEQ ID NO: 1737104 - RNA, 19 nt, Homo sapiens
  misc_RNA (1)...(19): siRNA sense strand
cuuaagaaacuuccuguac

SEQ ID NO: 1737105 - RNA, 19 nt, Homo sapiens
  misc_RNA (1)...(19): siRNA sense strand
aagaaacagacuucguaaa

SEQ ID NO: 1737106 - RNA, 19 nt, Homo sapiens
  misc_RNA (1)...(19): siRNA sense strand
ccgcucacaucagaacaug

SEQ ID NO: 1737107 - RNA, 19 nt, Homo sapiens
  misc_RNA (1)...(19): siRNA sense strand
cacaucagaacaugacaga

SEQ ID NO: 1737108 - RNA, 19 nt, Homo sapiens
  misc_RNA (1)...(19): siRNA sense strand
uaucauugcaaguguguag

SEQ ID NO: 1737109 - RNA, 19 nt, Homo sapiens
  misc_RNA (1)...(19): siRNA sense strand
gacaguagugaugcagaaa

SEQ ID NO: 1737110 - RNA, 19 nt, Homo sapiens
  misc_RNA (1)...(19): siRNA sense strand
gacaaugaagauacugaca

SEQ ID NO: 1737111 - RNA, 19 nt, Homo sapiens
  misc_RNA (1)...(19): siRNA sense strand
gcucacaucagaacaugac

SEQ ID NO: 1737112 - RNA, 19 nt, Homo sapiens
  misc_RNA (1)...(19): siRNA sense strand
accuuuagcuucugucagu

SEQ ID NO: 1737113 - RNA, 19 nt, Homo sapiens
  misc_RNA (1)...(19): siRNA sense strand
ugagaccuuuagcuucugu

SEQ ID NO: 1737114 - RNA, 19 nt, Homo sapiens
  misc_RNA (1)...(19): siRNA sense strand
gaaacuuccuguacauaaa

SEQ ID NO: 1737115 - RNA, 19 nt, Homo sapiens
  misc_RNA (1)...(19): siRNA sense strand
gacagaaucuucagacuau

SEQ ID NO: 1737116 - RNA, 19 nt, Homo sapiens
  misc_RNA (1)...(19): siRNA sense strand
gaaacagacuucguaaaga

SEQ ID NO: 1737117 - RNA, 19 nt, Homo sapiens
  misc_RNA (1)...(19): siRNA sense strand
gaaaggagaugaguaugau

SEQ ID NO: 1737118 - RNA, 19 nt, Homo sapiens
  misc_RNA (1)...(19): siRNA sense strand
guaugaagauggagacaaa

SEQ ID NO: 1737119 - RNA, 19 nt, Homo sapiens
  misc_RNA (1)...(19): siRNA sense strand
ugaacgggauuacaacaua

SEQ ID NO: 1737120 - RNA, 19 nt, Homo sapiens
  misc_RNA (1)...(19): siRNA sense strand
gaacauaccccuuuacuga

SEQ ID NO: 1737121 - RNA, 19 nt, Homo sapiens
  misc_RNA (1)...(19): siRNA sense strand
gaacaugacagaaucuuca

SEQ ID NO: 1737122 - RNA, 19 nt, Homo sapiens
  misc_RNA (1)...(19): siRNA sense strand
aaacagacuucguaaagau

SEQ ID NO: 1737123 - RNA, 19 nt, Homo sapiens
  misc_RNA (1)...(19): siRNA sense strand
caagaaaggagaugaguau

SEQ ID NO: 1737124 - RNA, 19 nt, Homo sapiens
  misc_RNA (1)...(19): siRNA sense strand
gaacgggauuacaacauag

SEQ ID NO: 1737125 - RNA, 19 nt, Homo sapiens
  misc_RNA (1)...(19): siRNA sense strand
gaaucccgcucacaucaga

SEQ ID NO: 1737126 - RNA, 19 nt, Homo sapiens
  misc_RNA (1)...(19): siRNA sense strand
ggauagacauagagcuaga

SEQ ID NO: 1737127 - RNA, 19 nt, Homo sapiens
  misc_RNA (1)...(19): siRNA sense strand
agacauagagcuagaagaa

SEQ ID NO: 1737128 - RNA, 19 nt, Homo sapiens
  misc_RNA (1)...(19): siRNA sense strand
ggagaugaguaugauguau

SEQ ID NO: 1737129 - RNA, 19 nt, Homo sapiens
  misc_RNA (1)...(19): siRNA sense strand
uaagaaacuuccuguacau

SEQ ID NO: 1737130 - RNA, 19 nt, Homo sapiens
  misc_RNA (1)...(19): siRNA sense strand
uuaagaaacuuccuguaca

SEQ ID NO: 1737131 - RNA, 19 nt, Homo sapiens
  misc_RNA (1)...(19): siRNA sense strand
agacaguagucaagaagaa

SEQ ID NO: 1737132 - RNA, 19 nt, Homo sapiens
  misc_RNA (1)...(19): siRNA sense strand
guagacccuuggcuaacua

SEQ ID NO: 1737133 - RNA, 19 nt, Homo sapiens
  misc_RNA (1)...(19): siRNA sense strand
gaagacgacaaugaagaua

SEQ ID NO: 1737134 - RNA, 19 nt, Homo sapiens
  misc_RNA (1)...(19): siRNA sense strand
ggaugaguaugaagaugga

SEQ ID NO: 1737135 - RNA, 19 nt, Homo sapiens
  misc_RNA (1)...(19): siRNA sense strand
ggaagacgacaaugaagau

SEQ ID NO: 1737136 - RNA, 19 nt, Homo sapiens
  misc_RNA (1)...(19): siRNA sense strand
caucagaacaugacagaau

SEQ ID NO: 1737137 - RNA, 19 nt, Homo sapiens
  misc_RNA (1)...(19): siRNA sense strand
ugacaguagugaugcagaa

SEQ ID NO: 1737138 - RNA, 19 nt, Homo sapiens
  misc_RNA (1)...(19): siRNA sense strand
ugacagaaucuucagacua

SEQ ID NO: 1737139 - RNA, 19 nt, Homo sapiens
  misc_RNA (1)...(19): siRNA sense strand
uaugauguaugugccauuu

SEQ ID NO: 1737140 - RNA, 19 nt, Homo sapiens
  misc_RNA (1)...(19): siRNA sense strand
ccauuuguuuggaugagua

SEQ ID NO: 1737141 - RNA, 19 nt, Homo sapiens
  misc_RNA (1)...(19): siRNA sense strand
ucaaggcgauucagacucu

SEQ ID NO: 1737142 - RNA, 19 nt, Homo sapiens
  misc_RNA (1)...(19): siRNA sense strand
agaaacuuccuguacauaa

SEQ ID NO: 1737143 - RNA, 19 nt, Homo sapiens
  misc_RNA (1)...(19): siRNA sense strand
ugaggaagacgacaaugaa

SEQ ID NO: 1737144 - RNA, 19 nt, Homo sapiens
  misc_RNA (1)...(19): siRNA sense strand
agaaaggagaugaguauga

SEQ ID NO: 1737145 - RNA, 19 nt, Homo sapiens
  misc_RNA (1)...(19): siRNA sense strand
caggauagacauagagcua

SEQ ID NO: 1737146 - RNA, 19 nt, Homo sapiens
  misc_RNA (1)...(19): siRNA sense strand
agaaacagacuucguaaag

SEQ ID NO: 1737147 - RNA, 19 nt, Homo sapiens
  misc_RNA (1)...(19): siRNA sense strand
ugauguaugugccauuugu

SEQ ID NO: 1737148 - RNA, 19 nt, Homo sapiens
  misc_RNA (1)...(19): siRNA sense strand
gagaugaguaugauguaug

SEQ ID NO: 1737149 - RNA, 19 nt, Homo sapiens
  misc_RNA (1)...(19): siRNA sense strand
gggauuacaacauagcaaa

SEQ ID NO: 1737150 - RNA, 19 nt, Homo sapiens
  misc_RNA (1)...(19): siRNA sense strand
acauagagcuagaagaaac

SEQ ID NO: 1737151 - RNA, 19 nt, Homo sapiens
  misc_RNA (1)...(19): siRNA sense strand
gacagaacauaccccuuua

SEQ ID NO: 1737152 - RNA, 19 nt, Homo sapiens
  misc_RNA (1)...(19): siRNA sense strand
ucaagaaaggagaugagua

SEQ ID NO: 1737153 - RNA, 19 nt, Homo sapiens
  misc_RNA (1)...(19): siRNA sense strand
ucguaaagaucaacuuaag

SEQ ID NO: 1737154 - RNA, 19 nt, Homo sapiens
  misc_RNA (1)...(19): siRNA sense strand
agaugaguaugauguaugu

SEQ ID NO: 1737155 - RNA, 19 nt, Homo sapiens
  misc_RNA (1)...(19): siRNA sense strand
uuacugagaccuuuagcuu

SEQ ID NO: 1737156 - RNA, 19 nt, Homo sapiens
  misc_RNA (1)...(19): siRNA sense strand
cacagacaguagucaagaa

SEQ ID NO: 1737157 - RNA, 19 nt, Homo sapiens
  misc_RNA (1)...(19): siRNA sense strand
cagaaucuucagacuauga

SEQ ID NO: 1737158 - RNA, 19 nt, Homo sapiens
  misc_RNA (1)...(19): siRNA sense strand
cuucguaaagaucaacuua

SEQ ID NO: 1737159 - RNA, 19 nt, Homo sapiens
  misc_RNA (1)...(19): siRNA sense strand
aaaaugaagugacagaaca

SEQ ID NO: 1737160 - RNA, 19 nt, Homo sapiens
  misc_RNA (1)...(19): siRNA sense strand
gacauagagcuagaagaaa

SEQ ID NO: 1737161 - RNA, 19 nt, Homo sapiens
  misc_RNA (1)...(19): siRNA sense strand
gacaguagucaagaagaaa

SEQ ID NO: 1737162 - RNA, 19 nt, Homo sapiens
  misc_RNA (1)...(19): siRNA sense strand
gaucaacuuaagaaacuuc

SEQ ID NO: 1737163 - RNA, 19 nt, Homo sapiens
  misc_RNA (1)...(19): siRNA sense strand
ugacagaacauaccccuuu

SEQ ID NO: 1737164 - RNA, 19 nt, Homo sapiens
  misc_RNA (1)...(19): siRNA sense strand
acugagaccuuuagcuucu

SEQ ID NO: 1737165 - RNA, 19 nt, Homo sapiens
  misc_RNA (1)...(19): siRNA sense strand
agacgacaaugaagauacu

SEQ ID NO: 1737166 - RNA, 19 nt, Homo sapiens
  misc_RNA (1)...(19): siRNA sense strand
ggauuacaacauagcaaau

SEQ ID NO: 1737167 - RNA, 19 nt, Homo sapiens
  misc_RNA (1)...(19): siRNA sense strand
ugucagugcccagucauuu

SEQ ID NO: 1737168 - RNA, 19 nt, Homo sapiens
  misc_RNA (1)...(19): siRNA sense strand
gaggaagacgacaaugaag

SEQ ID NO: 1737169 - RNA, 19 nt, Homo sapiens
  misc_RNA (1)...(19): siRNA sense strand
aagaaacuuccuguacaua

SEQ ID NO: 1737170 - RNA, 19 nt, Homo sapiens
  misc_RNA (1)...(19): siRNA sense strand
acacagacaguagucaaga

SEQ ID NO: 1737171 - RNA, 19 nt, Homo sapiens
  misc_RNA (1)...(19): siRNA sense strand
cguaaagaucaacuuaaga

SEQ ID NO: 1737172 - RNA, 19 nt, Homo sapiens
  misc_RNA (1)...(19): siRNA sense strand
agaagaaaaugaagugaca

SEQ ID NO: 1737173 - RNA, 19 nt, Homo sapiens
  misc_RNA (1)...(19): siRNA sense strand
guucccaugcuuaucauug

SEQ ID NO: 1737174 - RNA, 19 nt, Homo sapiens
  misc_RNA (1)...(19): siRNA sense strand
gauagacauagagcuagaa

SEQ ID NO: 1737175 - RNA, 19 nt, Homo sapiens
  misc_RNA (1)...(19): siRNA sense strand
guagugaugcagaaaauga

SEQ ID NO: 1737176 - RNA, 19 nt, Homo sapiens
  misc_RNA (1)...(19): siRNA sense strand
cggaaucccgcucacauca

SEQ ID NO: 1737177 - RNA, 19 nt, Homo sapiens
  misc_RNA (1)...(19): siRNA sense strand
uguguagacccuuggcuaa

SEQ ID NO: 1737178 - RNA, 19 nt, Homo sapiens
  misc_RNA (1)...(19): siRNA sense strand
uguccagugugcaagcaaa

SEQ ID NO: 1737179 - RNA, 19 nt, Homo sapiens
  misc_RNA (1)...(19): siRNA sense strand
cuuaagaaacuuccuguac

SEQ ID NO: 1737180 - RNA, 19 nt, Homo sapiens
  misc_RNA (1)...(19): siRNA sense strand
aagaaacagacuucguaaa

SEQ ID NO: 1737181 - RNA, 19 nt, Homo sapiens
  misc_RNA (1)...(19): siRNA sense strand
ccgcucacaucagaacaug

SEQ ID NO: 1737182 - RNA, 19 nt, Homo sapiens
  misc_RNA (1)...(19): siRNA sense strand
cacaucagaacaugacaga

SEQ ID NO: 1737183 - RNA, 19 nt, Homo sapiens
  misc_RNA (1)...(19): siRNA sense strand
uaucauugcaaguguguag

SEQ ID NO: 1737184 - RNA, 19 nt, Homo sapiens
  misc_RNA (1)...(19): siRNA sense strand
gacaguagugaugcagaaa

SEQ ID NO: 1737185 - RNA, 19 nt, Homo sapiens
  misc_RNA (1)...(19): siRNA sense strand
gacaaugaagauacugaca

SEQ ID NO: 1737186 - RNA, 19 nt, Homo sapiens
  misc_RNA (1)...(19): siRNA sense strand
gcucacaucagaacaugac

SEQ ID NO: 1737187 - RNA, 19 nt, Homo sapiens
  misc_RNA (1)...(19): siRNA sense strand
accuuuagcuucugucagu

SEQ ID NO: 1737188 - RNA, 19 nt, Homo sapiens
  misc_RNA (1)...(19): siRNA sense strand
ugagaccuuuagcuucugu

SEQ ID NO: 1737189 - RNA, 19 nt, Homo sapiens
  misc_RNA (1)...(19): siRNA sense strand
gaagaaccgcucucacaua

SEQ ID NO: 1737190 - RNA, 19 nt, Homo sapiens
  misc_RNA (1)...(19): siRNA sense strand
gaagaaccgcucucagaua

SEQ ID NO: 1737191 - RNA, 19 nt, Homo sapiens
  misc_RNA (1)...(19): siRNA sense strand
gacgaggacuccaaacaaa

SEQ ID NO: 1737192 - RNA, 19 nt, Homo sapiens
  misc_RNA (1)...(19): siRNA sense strand
gaagaaccgcucucgcaua

SEQ ID NO: 1737193 - RNA, 19 nt, Homo sapiens
  misc_RNA (1)...(19): siRNA sense strand
acaguggccugguuucuuu

SEQ ID NO: 1737194 - RNA, 19 nt, Homo sapiens
  misc_RNA (1)...(19): siRNA sense strand
gaaccgcucucagauaguc

SEQ ID NO: 1737195 - RNA, 19 nt, Homo sapiens
  misc_RNA (1)...(19): siRNA sense strand
ugaggauccugucauuaaa

SEQ ID NO: 1737196 - RNA, 19 nt, Homo sapiens
  misc_RNA (1)...(19): siRNA sense strand
ggaagaaccgcucucagau

SEQ ID NO: 1737197 - RNA, 19 nt, Homo sapiens
  misc_RNA (1)...(19): siRNA sense strand
agaugaagcugaagcaaca

SEQ ID NO: 1737198 - RNA, 19 nt, Homo sapiens
  misc_RNA (1)...(19): siRNA sense strand
gcuugaggauccugucauu

SEQ ID NO: 1737199 - RNA, 19 nt, Homo sapiens
  misc_RNA (1)...(19): siRNA sense strand
ggacgacgaggacuccaaa

SEQ ID NO: 1737200 - RNA, 19 nt, Homo sapiens
  misc_RNA (1)...(19): siRNA sense strand
aagaaccgcucucagauag

SEQ ID NO: 1737201 - RNA, 19 nt, Homo sapiens
  misc_RNA (1)...(19): siRNA sense strand
gcauacccuugcuccguaa

SEQ ID NO: 1737202 - RNA, 19 nt, Homo sapiens
  misc_RNA (1)...(19): siRNA sense strand
ggaagaaccgcucucacau

SEQ ID NO: 1737203 - RNA, 19 nt, Homo sapiens
  misc_RNA (1)...(19): siRNA sense strand
gcucucagauaguccuguu

SEQ ID NO: 1737204 - RNA, 19 nt, Homo sapiens
  misc_RNA (1)...(19): siRNA sense strand
ccacaaggacuucaacagu

SEQ ID NO: 1737205 - RNA, 19 nt, Homo sapiens
  misc_RNA (1)...(19): siRNA sense strand
guaggucccuuggcuggaa

SEQ ID NO: 1737206 - RNA, 19 nt, Homo sapiens
  misc_RNA (1)...(19): siRNA sense strand
ugugugggcucaagaugaa

SEQ ID NO: 1737207 - RNA, 19 nt, Homo sapiens
  misc_RNA (1)...(19): siRNA sense strand
cagaggaguuggaggagau

SEQ ID NO: 1737208 - RNA, 19 nt, Homo sapiens
  misc_RNA (1)...(19): siRNA sense strand
cgacgaggacuccaaacaa

SEQ ID NO: 1737209 - RNA, 19 nt, Homo sapiens
  misc_RNA (1)...(19): siRNA sense strand
uugaggauccugucauuaa

SEQ ID NO: 1737210 - RNA, 19 nt, Homo sapiens
  misc_RNA (1)...(19): siRNA sense strand
aaacgucgguuccacuucu

SEQ ID NO: 1737211 - RNA, 19 nt, Homo sapiens
  misc_RNA (1)...(19): siRNA sense strand
aagaaccgcucucacauac

SEQ ID NO: 1737212 - RNA, 19 nt, Homo sapiens
  misc_RNA (1)...(19): siRNA sense strand
gaagcaacagcgaguguca

SEQ ID NO: 1737213 - RNA, 19 nt, Homo sapiens
  misc_RNA (1)...(19): siRNA sense strand
aagaaccgcucucgcauac

SEQ ID NO: 1737214 - RNA, 19 nt, Homo sapiens
  misc_RNA (1)...(19): siRNA sense strand
aagcgucgguuccaguuau

SEQ ID NO: 1737215 - RNA, 19 nt, Homo sapiens
  misc_RNA (1)...(19): siRNA sense strand
ccaacgccuucauuucuuc

SEQ ID NO: 1737216 - RNA, 19 nt, Homo sapiens
  misc_RNA (1)...(19): siRNA sense strand
agauaguccuguuccagaa

SEQ ID NO: 1737217 - RNA, 19 nt, Homo sapiens
  misc_RNA (1)...(19): siRNA sense strand
gauaguccuguuccagaaa

SEQ ID NO: 1737218 - RNA, 19 nt, Homo sapiens
  misc_RNA (1)...(19): siRNA sense strand
gaggagauccaggcuuaug

SEQ ID NO: 1737219 - RNA, 19 nt, Homo sapiens
  misc_RNA (1)...(19): siRNA sense strand
uguguggccucaagaugaa

SEQ ID NO: 1737220 - RNA, 19 nt, Homo sapiens
  misc_RNA (1)...(19): siRNA sense strand
caguuacgccguugcauga

SEQ ID NO: 1737221 - RNA, 19 nt, Homo sapiens
  misc_RNA (1)...(19): siRNA sense strand
gaagagggaguggucagau

SEQ ID NO: 1737222 - RNA, 19 nt, Homo sapiens
  misc_RNA (1)...(19): siRNA sense strand
caauaccaacgccuucauu

SEQ ID NO: 1737223 - RNA, 19 nt, Homo sapiens
  misc_RNA (1)...(19): siRNA sense strand
caucuuccacuuccuguau

SEQ ID NO: 1737224 - RNA, 19 nt, Homo sapiens
  misc_RNA (1)...(19): siRNA sense strand
ggaagagggaguggucaga

SEQ ID NO: 1737225 - RNA, 19 nt, Homo sapiens
  misc_RNA (1)...(19): siRNA sense strand
ggccugguuucuuuacuca

SEQ ID NO: 1737226 - RNA, 19 nt, Homo sapiens
  misc_RNA (1)...(19): siRNA sense strand
aggaagaaccgcucucaga

SEQ ID NO: 1737227 - RNA, 19 nt, Homo sapiens
  misc_RNA (1)...(19): siRNA sense strand
guaagcgucgguuccaguu

SEQ ID NO: 1737228 - RNA, 19 nt, Homo sapiens
  misc_RNA (1)...(19): siRNA sense strand
guaagcgucgguuccaguu

SEQ ID NO: 1737229 - RNA, 19 nt, Homo sapiens
  misc_RNA (1)...(19): siRNA sense strand
aagagggaguggucagaug

SEQ ID NO: 1737230 - RNA, 19 nt, Homo sapiens
  misc_RNA (1)...(19): siRNA sense strand
gccucaagaugaagcugaa

SEQ ID NO: 1737231 - RNA, 19 nt, Homo sapiens
  misc_RNA (1)...(19): siRNA sense strand
ggcucaagaugaagcugaa

SEQ ID NO: 1737232 - RNA, 19 nt, Homo sapiens
  misc_RNA (1)...(19): siRNA sense strand
aggaggagccggagaagga

SEQ ID NO: 1737233 - RNA, 19 nt, Homo sapiens
  misc_RNA (1)...(19): siRNA sense strand
uaccaacgccuucauuucu

SEQ ID NO: 1737234 - RNA, 19 nt, Homo sapiens
  misc_RNA (1)...(19): siRNA sense strand
ugucacccauccuccuuga

SEQ ID NO: 1737235 - RNA, 19 nt, Homo sapiens
  misc_RNA (1)...(19): siRNA sense strand
gaaacgucgguuccacuuc

SEQ ID NO: 1737236 - RNA, 19 nt, Homo sapiens
  misc_RNA (1)...(19): siRNA sense strand
gaugcuguguggccucaag

SEQ ID NO: 1737237 - RNA, 19 nt, Homo sapiens
  misc_RNA (1)...(19): siRNA sense strand
ggaguggugggacaaaucu

SEQ ID NO: 1737238 - RNA, 19 nt, Homo sapiens
  misc_RNA (1)...(19): siRNA sense strand
aauaccaacgccuucauuu

SEQ ID NO: 1737239 - RNA, 19 nt, Homo sapiens
  misc_RNA (1)...(19): siRNA sense strand
uuacacaguggccugguuu

SEQ ID NO: 1737240 - RNA, 19 nt, Homo sapiens
  misc_RNA (1)...(19): siRNA sense strand
gcaauaccaacgccuucau

SEQ ID NO: 1737241 - RNA, 19 nt, Homo sapiens
  misc_RNA (1)...(19): siRNA sense strand
uaagcgucgguuccaguua

SEQ ID NO: 1737242 - RNA, 19 nt, Homo sapiens
  misc_RNA (1)...(19): siRNA sense strand
uaagcgucgguuccaguua

SEQ ID NO: 1737243 - RNA, 19 nt, Homo sapiens
  misc_RNA (1)...(19): siRNA sense strand
aggaagaaccgcucucaca

SEQ ID NO: 1737244 - RNA, 19 nt, Homo sapiens
  misc_RNA (1)...(19): siRNA sense strand
caacaggcugcuugaggau

SEQ ID NO: 1737245 - RNA, 19 nt, Homo sapiens
  misc_RNA (1)...(19): siRNA sense strand
agagggaguggucagauga

SEQ ID NO: 1737246 - RNA, 19 nt, Homo sapiens
  misc_RNA (1)...(19): siRNA sense strand
gcucucacauacccuuggu

SEQ ID NO: 1737247 - RNA, 19 nt, Homo sapiens
  misc_RNA (1)...(19): siRNA sense strand
gagggaguggucagaugaa

SEQ ID NO: 1737248 - RNA, 19 nt, Homo sapiens
  misc_RNA (1)...(19): siRNA sense strand
cuaccuggccaaugacaug

SEQ ID NO: 1737249 - RNA, 19 nt, Homo sapiens
  misc_RNA (1)...(19): siRNA sense strand
acauacccuugguccguaa

SEQ ID NO: 1737250 - RNA, 19 nt, Homo sapiens
  misc_RNA (1)...(19): siRNA sense strand
aagcgucgguuccaguuac

SEQ ID NO: 1737251 - RNA, 19 nt, Homo sapiens
  misc_RNA (1)...(19): siRNA sense strand
cucucuaccuggccaauga

SEQ ID NO: 1737252 - RNA, 19 nt, Homo sapiens
  misc_RNA (1)...(19): siRNA sense strand
caagaugaagcugaagcaa

SEQ ID NO: 1737253 - RNA, 19 nt, Homo sapiens
  misc_RNA (1)...(19): siRNA sense strand
acgaagagcucaacaaguu

SEQ ID NO: 1737254 - RNA, 19 nt, Homo sapiens
  misc_RNA (1)...(19): siRNA sense strand
ucacaagccuggcaagaac

SEQ ID NO: 1737255 - RNA, 19 nt, Homo sapiens
  misc_RNA (1)...(19): siRNA sense strand
caucaucccucgccaucug

SEQ ID NO: 1737256 - RNA, 19 nt, Homo sapiens
  misc_RNA (1)...(19): siRNA sense strand
cgaagagcucaacaaguua

SEQ ID NO: 1737257 - RNA, 19 nt, Homo sapiens
  misc_RNA (1)...(19): siRNA sense strand
caacuagccgugaggaaug

SEQ ID NO: 1737258 - RNA, 19 nt, Homo sapiens
  misc_RNA (1)...(19): siRNA sense strand
gcaacuagccgugaggaau

SEQ ID NO: 1737259 - RNA, 19 nt, Homo sapiens
  misc_RNA (1)...(19): siRNA sense strand
caagaagacgcgcaucauc

SEQ ID NO: 1737260 - RNA, 19 nt, Homo sapiens
  misc_RNA (1)...(19): siRNA sense strand
gaagagcucaacaaguuac

SEQ ID NO: 1737261 - RNA, 19 nt, Homo sapiens
  misc_RNA (1)...(19): siRNA sense strand
guaccugaccgcggaaauu

SEQ ID NO: 1737262 - RNA, 19 nt, Homo sapiens
  misc_RNA (1)...(19): siRNA sense strand
ugacgaagagcucaacaag

SEQ ID NO: 1737263 - RNA, 19 nt, Homo sapiens
  misc_RNA (1)...(19): siRNA sense strand
ggaaugacgaagagcucaa

SEQ ID NO: 1737264 - RNA, 19 nt, Homo sapiens
  misc_RNA (1)...(19): siRNA sense strand
gcuguccuguugcccaaga

SEQ ID NO: 1737265 - RNA, 19 nt, Homo sapiens
  misc_RNA (1)...(19): siRNA sense strand
cgugaggaaugacgaagag

SEQ ID NO: 1737266 - RNA, 19 nt, Homo sapiens
  misc_RNA (1)...(19): siRNA sense strand
gcucgggacaacaagaaga

SEQ ID NO: 1737267 - RNA, 19 nt, Homo sapiens
  misc_RNA (1)...(19): siRNA sense strand
gucacaagccuggcaagaa

SEQ ID NO: 1737268 - RNA, 19 nt, Homo sapiens
  misc_RNA (1)...(19): siRNA sense strand
gacgaagagcucaacaagu

SEQ ID NO: 1737269 - RNA, 19 nt, Homo sapiens
  misc_RNA (1)...(19): siRNA sense strand
gcagaaaacuucacucuuu

SEQ ID NO: 1737270 - RNA, 19 nt, Homo sapiens
  misc_RNA (1)...(19): siRNA sense strand
caucugguaucccaaauuu

SEQ ID NO: 1737271 - RNA, 19 nt, Homo sapiens
  misc_RNA (1)...(19): siRNA sense strand
gcagggaaauuugacauca

SEQ ID NO: 1737272 - RNA, 19 nt, Homo sapiens
  misc_RNA (1)...(19): siRNA sense strand
gaauauccuucccaacauc

SEQ ID NO: 1737273 - RNA, 19 nt, Homo sapiens
  misc_RNA (1)...(19): siRNA sense strand
ggaaggcagggaaauuuga

SEQ ID NO: 1737274 - RNA, 19 nt, Homo sapiens
  misc_RNA (1)...(19): siRNA sense strand
cauauuccgucuuggcaaa

SEQ ID NO: 1737275 - RNA, 19 nt, Homo sapiens
  misc_RNA (1)...(19): siRNA sense strand
caacaucugguaucccaaa

SEQ ID NO: 1737276 - RNA, 19 nt, Homo sapiens
  misc_RNA (1)...(19): siRNA sense strand
ucugguaucccaaauuuaa

SEQ ID NO: 1737277 - RNA, 19 nt, Homo sapiens
  misc_RNA (1)...(19): siRNA sense strand
uaccucaagucgugcauuu

SEQ ID NO: 1737278 - RNA, 19 nt, Homo sapiens
  misc_RNA (1)...(19): siRNA sense strand
uggcuacaauuucagguuu

SEQ ID NO: 1737279 - RNA, 19 nt, Homo sapiens
  misc_RNA (1)...(19): siRNA sense strand
gaagaaaagacucuacuau

SEQ ID NO: 1737280 - RNA, 19 nt, Homo sapiens
  misc_RNA (1)...(19): siRNA sense strand
ccaacaucaccacuacuua

SEQ ID NO: 1737281 - RNA, 19 nt, Homo sapiens
  misc_RNA (1)...(19): siRNA sense strand
ucaagucgugcauuuauga

SEQ ID NO: 1737282 - RNA, 19 nt, Homo sapiens
  misc_RNA (1)...(19): siRNA sense strand
aaacuucacucuuuugguu

SEQ ID NO: 1737283 - RNA, 19 nt, Homo sapiens
  misc_RNA (1)...(19): siRNA sense strand
uuaagaacaacaucuggua

SEQ ID NO: 1737284 - RNA, 19 nt, Homo sapiens
  misc_RNA (1)...(19): siRNA sense strand
caacaucaccacuacuuac

SEQ ID NO: 1737285 - RNA, 19 nt, Homo sapiens
  misc_RNA (1)...(19): siRNA sense strand
gggaaggcagggaaauuug

SEQ ID NO: 1737286 - RNA, 19 nt, Homo sapiens
  misc_RNA (1)...(19): siRNA sense strand
cgugcugugugacaucaua

SEQ ID NO: 1737287 - RNA, 19 nt, Homo sapiens
  misc_RNA (1)...(19): siRNA sense strand
ccucaagucgugcauuuau

SEQ ID NO: 1737288 - RNA, 19 nt, Homo sapiens
  misc_RNA (1)...(19): siRNA sense strand
uaagaacaacaucugguau

SEQ ID NO: 1737289 - RNA, 19 nt, Homo sapiens
  misc_RNA (1)...(19): siRNA sense strand
ggacugcaaccuggacaga

SEQ ID NO: 1737290 - RNA, 19 nt, Homo sapiens
  misc_RNA (1)...(19): siRNA sense strand
cggccuuccuguucgagua

SEQ ID NO: 1737291 - RNA, 19 nt, Homo sapiens
  misc_RNA (1)...(19): siRNA sense strand
ggcauccgcuucgacauca

SEQ ID NO: 1737292 - RNA, 19 nt, Homo sapiens
  misc_RNA (1)...(19): siRNA sense strand
ucuccuggcuacaauuuca

SEQ ID NO: 1737293 - RNA, 19 nt, Homo sapiens
  misc_RNA (1)...(19): siRNA sense strand
gcuucgacaucauuguguu

SEQ ID NO: 1737294 - RNA, 19 nt, Homo sapiens
  misc_RNA (1)...(19): siRNA sense strand
uggcgaccgugcuguguga

SEQ ID NO: 1737295 - RNA, 19 nt, Homo sapiens
  misc_RNA (1)...(19): siRNA sense strand
ugggaaggcagggaaauuu

SEQ ID NO: 1737296 - RNA, 19 nt, Homo sapiens
  misc_RNA (1)...(19): siRNA sense strand
uaucuccuggcuacaauuu

SEQ ID NO: 1737297 - RNA, 19 nt, Homo sapiens
  misc_RNA (1)...(19): siRNA sense strand
cagggaaauuugacaucau

SEQ ID NO: 1737298 - RNA, 19 nt, Homo sapiens
  misc_RNA (1)...(19): siRNA sense strand
ggcuacaauuucagguuug

SEQ ID NO: 1737299 - RNA, 19 nt, Homo sapiens
  misc_RNA (1)...(19): siRNA sense strand
cacgggacguugagcacaa

SEQ ID NO: 1737300 - RNA, 19 nt, Homo sapiens
  misc_RNA (1)...(19): siRNA sense strand
uaucgggagaagaaauaua

SEQ ID NO: 1737301 - RNA, 19 nt, Homo sapiens
  misc_RNA (1)...(19): siRNA sense strand
agaaaagacucuacuaucg

SEQ ID NO: 1737302 - RNA, 19 nt, Homo sapiens
  misc_RNA (1)...(19): siRNA sense strand
auaguccucuacugcauga

SEQ ID NO: 1737303 - RNA, 19 nt, Homo sapiens
  misc_RNA (1)...(19): siRNA sense strand
agggaaauuugacaucauc

SEQ ID NO: 1737304 - RNA, 19 nt, Homo sapiens
  misc_RNA (1)...(19): siRNA sense strand
acuaucgggagaagaaaua

SEQ ID NO: 1737305 - RNA, 19 nt, Homo sapiens
  misc_RNA (1)...(19): siRNA sense strand
ucuacuaucgggagaagaa

SEQ ID NO: 1737306 - RNA, 19 nt, Homo sapiens
  misc_RNA (1)...(19): siRNA sense strand
gcucauccgcagccgcaaa

SEQ ID NO: 1737307 - RNA, 19 nt, Homo sapiens
  misc_RNA (1)...(19): siRNA sense strand
ucauaguccucuacugcau

SEQ ID NO: 1737308 - RNA, 19 nt, Homo sapiens
  misc_RNA (1)...(19): siRNA sense strand
cauccuggccuacgucauc

SEQ ID NO: 1737309 - RNA, 19 nt, Homo sapiens
  misc_RNA (1)...(19): siRNA sense strand
aauuucagcaagaggaaua

SEQ ID NO: 1737310 - RNA, 19 nt, Homo sapiens
  misc_RNA (1)...(19): siRNA sense strand
ucagguuugccaaguacua

SEQ ID NO: 1737311 - RNA, 19 nt, Homo sapiens
  misc_RNA (1)...(19): siRNA sense strand
cguaucuccuggcuacaau

SEQ ID NO: 1737312 - RNA, 19 nt, Homo sapiens
  misc_RNA (1)...(19): siRNA sense strand
caccacuacuuaccucaag

SEQ ID NO: 1737313 - RNA, 19 nt, Homo sapiens
  misc_RNA (1)...(19): siRNA sense strand
ucagaugccagcuguacug

SEQ ID NO: 1737314 - RNA, 19 nt, Homo sapiens
  misc_RNA (1)...(19): siRNA sense strand
guccucuacugcaugaaga

SEQ ID NO: 1737315 - RNA, 19 nt, Homo sapiens
  misc_RNA (1)...(19): siRNA sense strand
cgggagaagaaauauaaau

SEQ ID NO: 1737316 - RNA, 19 nt, Homo sapiens
  misc_RNA (1)...(19): siRNA sense strand
cggccuuccuguucgagua

SEQ ID NO: 1737317 - RNA, 19 nt, Homo sapiens
  misc_RNA (1)...(19): siRNA sense strand
gcucauccgcagccgcaaa

SEQ ID NO: 1737318 - RNA, 19 nt, Homo sapiens
  misc_RNA (1)...(19): siRNA sense strand
cauccuggccuacgucauc

SEQ ID NO: 1737319 - RNA, 19 nt, Homo sapiens
  misc_RNA (1)...(19): siRNA sense strand
cggccuuccuguucgagua

SEQ ID NO: 1737320 - RNA, 19 nt, Homo sapiens
  misc_RNA (1)...(19): siRNA sense strand
cgaccacuguguguaaauc

SEQ ID NO: 1737321 - RNA, 19 nt, Homo sapiens
  misc_RNA (1)...(19): siRNA sense strand
gcucauccgcagccgcaaa

SEQ ID NO: 1737322 - RNA, 19 nt, Homo sapiens
  misc_RNA (1)...(19): siRNA sense strand
cauccuggccuacgucauc

SEQ ID NO: 1737323 - RNA, 19 nt, Homo sapiens
  misc_RNA (1)...(19): siRNA sense strand
gaugcgaccacugugugua

SEQ ID NO: 1737324 - RNA, 19 nt, Homo sapiens
  misc_RNA (1)...(19): siRNA sense strand
ucagaugccagcuguacug

SEQ ID NO: 1737325 - RNA, 19 nt, Homo sapiens
  misc_RNA (1)...(19): siRNA sense strand
ccacuguguguaaaucaga

SEQ ID NO: 1737326 - RNA, 19 nt, Homo sapiens
  misc_RNA (1)...(19): siRNA sense strand
gacaauauccaaggcauua

SEQ ID NO: 1737327 - RNA, 19 nt, Homo sapiens
  misc_RNA (1)...(19): siRNA sense strand
ggaaggugcugcgggacaa

SEQ ID NO: 1737328 - RNA, 19 nt, Homo sapiens
  misc_RNA (1)...(19): siRNA sense strand
gcgcauuucuggucucauc

SEQ ID NO: 1737329 - RNA, 19 nt, Homo sapiens
  misc_RNA (1)...(19): siRNA sense strand
ggacaauauccaaggcauu

SEQ ID NO: 1737330 - RNA, 19 nt, Homo sapiens
  misc_RNA (1)...(19): siRNA sense strand
ggucgcacccuuuaugguu

SEQ ID NO: 1737331 - RNA, 19 nt, Homo sapiens
  misc_RNA (1)...(19): siRNA sense strand
ucaaagucuuccuggagaa

SEQ ID NO: 1737332 - RNA, 19 nt, Homo sapiens
  misc_RNA (1)...(19): siRNA sense strand
gcauuucuggucucaucua

SEQ ID NO: 1737333 - RNA, 19 nt, Homo sapiens
  misc_RNA (1)...(19): siRNA sense strand
gucgcacccuuuaugguuu

SEQ ID NO: 1737334 - RNA, 19 nt, Homo sapiens
  misc_RNA (1)...(19): siRNA sense strand
ggccauggaugugguguac

SEQ ID NO: 1737335 - RNA, 19 nt, Homo sapiens
  misc_RNA (1)...(19): siRNA sense strand
uuucuggucucaucuacga

SEQ ID NO: 1737336 - RNA, 19 nt, Homo sapiens
  misc_RNA (1)...(19): siRNA sense strand
gagcacgccaagcgcaaga

SEQ ID NO: 1737337 - RNA, 19 nt, Homo sapiens
  misc_RNA (1)...(19): siRNA sense strand
caauauccaaggcauuaca

SEQ ID NO: 1737338 - RNA, 19 nt, Homo sapiens
  misc_RNA (1)...(19): siRNA sense strand
uccgugacgcggugacuua

SEQ ID NO: 1737339 - RNA, 19 nt, Homo sapiens
  misc_RNA (1)...(19): siRNA sense strand
gacaaacggucuuucauua

SEQ ID NO: 1737340 - RNA, 19 nt, Homo sapiens
  misc_RNA (1)...(19): siRNA sense strand
gaaguuaacaucccuaaua

SEQ ID NO: 1737341 - RNA, 19 nt, Homo sapiens
  misc_RNA (1)...(19): siRNA sense strand
gacaagagauggagacaaa

SEQ ID NO: 1737342 - RNA, 19 nt, Homo sapiens
  misc_RNA (1)...(19): siRNA sense strand
gcaaugaacagaugacuaa

SEQ ID NO: 1737343 - RNA, 19 nt, Homo sapiens
  misc_RNA (1)...(19): siRNA sense strand
gaaauggcaugugcaauug

SEQ ID NO: 1737344 - RNA, 19 nt, Homo sapiens
  misc_RNA (1)...(19): siRNA sense strand
gaugcugccucucaacuua

SEQ ID NO: 1737345 - RNA, 19 nt, Homo sapiens
  misc_RNA (1)...(19): siRNA sense strand
uggcagagcuguacacaaa

SEQ ID NO: 1737346 - RNA, 19 nt, Homo sapiens
  misc_RNA (1)...(19): siRNA sense strand
gagaagaccagauguugua

SEQ ID NO: 1737347 - RNA, 19 nt, Homo sapiens
  misc_RNA (1)...(19): siRNA sense strand
gaaagugcugugacuguua

SEQ ID NO: 1737348 - RNA, 19 nt, Homo sapiens
  misc_RNA (1)...(19): siRNA sense strand
gcauuucucaucuacauua

SEQ ID NO: 1737349 - RNA, 19 nt, Homo sapiens
  misc_RNA (1)...(19): siRNA sense strand
gcagagcuguacacaaaga

SEQ ID NO: 1737350 - RNA, 19 nt, Homo sapiens
  misc_RNA (1)...(19): siRNA sense strand
gaacagaugacuaaguaug

SEQ ID NO: 1737351 - RNA, 19 nt, Homo sapiens
  misc_RNA (1)...(19): siRNA sense strand
gaacaaauccaccuuacag

SEQ ID NO: 1737352 - RNA, 19 nt, Homo sapiens
  misc_RNA (1)...(19): siRNA sense strand
gcaguuggcugugguuuca

SEQ ID NO: 1737353 - RNA, 19 nt, Homo sapiens
  misc_RNA (1)...(19): siRNA sense strand
ucaaagauguggccacugu

SEQ ID NO: 1737354 - RNA, 19 nt, Homo sapiens
  misc_RNA (1)...(19): siRNA sense strand
gagcauuucucaucuacau

SEQ ID NO: 1737355 - RNA, 19 nt, Homo sapiens
  misc_RNA (1)...(19): siRNA sense strand
gaauuggaaucaaagaauc

SEQ ID NO: 1737356 - RNA, 19 nt, Homo sapiens
  misc_RNA (1)...(19): siRNA sense strand
gcacaacguccgagaaaug

SEQ ID NO: 1737357 - RNA, 19 nt, Homo sapiens
  misc_RNA (1)...(19): siRNA sense strand
acaaagaauuucagcagaa

SEQ ID NO: 1737358 - RNA, 19 nt, Homo sapiens
  misc_RNA (1)...(19): siRNA sense strand
uuacagagaggaagacaua

SEQ ID NO: 1737359 - RNA, 19 nt, Homo sapiens
  misc_RNA (1)...(19): siRNA sense strand
ugaaauggcaugugcaauu

SEQ ID NO: 1737360 - RNA, 19 nt, Homo sapiens
  misc_RNA (1)...(19): siRNA sense strand
ucacuggucuggcaaugaa

SEQ ID NO: 1737361 - RNA, 19 nt, Homo sapiens
  misc_RNA (1)...(19): siRNA sense strand
gcagagagaagaccagaug

SEQ ID NO: 1737362 - RNA, 19 nt, Homo sapiens
  misc_RNA (1)...(19): siRNA sense strand
caacaagucagcaaacaug

SEQ ID NO: 1737363 - RNA, 19 nt, Homo sapiens
  misc_RNA (1)...(19): siRNA sense strand
augaacagaugacuaagua

SEQ ID NO: 1737364 - RNA, 19 nt, Homo sapiens
  misc_RNA (1)...(19): siRNA sense strand
gagcacaacguccgagaaa

SEQ ID NO: 1737365 - RNA, 19 nt, Homo sapiens
  misc_RNA (1)...(19): siRNA sense strand
caaagaauuucagcagaau

SEQ ID NO: 1737366 - RNA, 19 nt, Homo sapiens
  misc_RNA (1)...(19): siRNA sense strand
gagagaagaccagauguug

SEQ ID NO: 1737367 - RNA, 19 nt, Homo sapiens
  misc_RNA (1)...(19): siRNA sense strand
ggaugcuucugggaauuua

SEQ ID NO: 1737368 - RNA, 19 nt, Homo sapiens
  misc_RNA (1)...(19): siRNA sense strand
uacauuagcucagauuaug

SEQ ID NO: 1737369 - RNA, 19 nt, Homo sapiens
  misc_RNA (1)...(19): siRNA sense strand
cagcuugacugcuccaaau

SEQ ID NO: 1737370 - RNA, 19 nt, Homo sapiens
  misc_RNA (1)...(19): siRNA sense strand
gaccagauguuguagaaaa

SEQ ID NO: 1737371 - RNA, 19 nt, Homo sapiens
  misc_RNA (1)...(19): siRNA sense strand
aagaaucacuuuggccuuu

SEQ ID NO: 1737372 - RNA, 19 nt, Homo sapiens
  misc_RNA (1)...(19): siRNA sense strand
gcucagauuauguauuuga

SEQ ID NO: 1737373 - RNA, 19 nt, Homo sapiens
  misc_RNA (1)...(19): siRNA sense strand
caaauccaccuuacagaga

SEQ ID NO: 1737374 - RNA, 19 nt, Homo sapiens
  misc_RNA (1)...(19): siRNA sense strand
cgagaaaugcucagcuuga

SEQ ID NO: 1737375 - RNA, 19 nt, Homo sapiens
  misc_RNA (1)...(19): siRNA sense strand
cgaagaaagugcugugacu

SEQ ID NO: 1737376 - RNA, 19 nt, Homo sapiens
  misc_RNA (1)...(19): siRNA sense strand
gaacaccauuucgaauugg

SEQ ID NO: 1737377 - RNA, 19 nt, Homo sapiens
  misc_RNA (1)...(19): siRNA sense strand
aauaggaggguucugguua

SEQ ID NO: 1737378 - RNA, 19 nt, Homo sapiens
  misc_RNA (1)...(19): siRNA sense strand
aagaccagauguuguagaa

SEQ ID NO: 1737379 - RNA, 19 nt, Homo sapiens
  misc_RNA (1)...(19): siRNA sense strand
aaagugcugugacuguuau

SEQ ID NO: 1737380 - RNA, 19 nt, Homo sapiens
  misc_RNA (1)...(19): siRNA sense strand
gagcuguacacaaagaauu

SEQ ID NO: 1737381 - RNA, 19 nt, Homo sapiens
  misc_RNA (1)...(19): siRNA sense strand
ggauuccuauucuguaugg

SEQ ID NO: 1737382 - RNA, 19 nt, Homo sapiens
  misc_RNA (1)...(19): siRNA sense strand
cgaauuggaaucaaagaau

SEQ ID NO: 1737383 - RNA, 19 nt, Homo sapiens
  misc_RNA (1)...(19): siRNA sense strand
agaaagugcugugacuguu

SEQ ID NO: 1737384 - RNA, 19 nt, Homo sapiens
  misc_RNA (1)...(19): siRNA sense strand
guucaucacaucauucaug

SEQ ID NO: 1737385 - RNA, 19 nt, Homo sapiens
  misc_RNA (1)...(19): siRNA sense strand
gagaaaugcucagcuugac

SEQ ID NO: 1737386 - RNA, 19 nt, Homo sapiens
  misc_RNA (1)...(19): siRNA sense strand
acagaugacuaaguaugaa

SEQ ID NO: 1737387 - RNA, 19 nt, Homo sapiens
  misc_RNA (1)...(19): siRNA sense strand
gcagcuagcagagaagaga

SEQ ID NO: 1737388 - RNA, 19 nt, Homo sapiens
  misc_RNA (1)...(19): siRNA sense strand
uaaugcaguucaucacauc

SEQ ID NO: 1737389 - RNA, 19 nt, Homo sapiens
  misc_RNA (1)...(19): siRNA sense strand
aaagugcaguucagcaaca

SEQ ID NO: 1737390 - RNA, 19 nt, Homo sapiens
  misc_RNA (1)...(19): siRNA sense strand
cauuagcucagauuaugua

SEQ ID NO: 1737391 - RNA, 19 nt, Homo sapiens
  misc_RNA (1)...(19): siRNA sense strand
gaagaccagauguuguaga

SEQ ID NO: 1737392 - RNA, 19 nt, Homo sapiens
  misc_RNA (1)...(19): siRNA sense strand
gaauuuagcaaaggaagca

SEQ ID NO: 1737393 - RNA, 19 nt, Homo sapiens
  misc_RNA (1)...(19): siRNA sense strand
aaguuaacaucccuaauag

SEQ ID NO: 1737394 - RNA, 19 nt, Homo sapiens
  misc_RNA (1)...(19): siRNA sense strand
gccggcagcuagcagagaa

SEQ ID NO: 1737395 - RNA, 19 nt, Homo sapiens
  misc_RNA (1)...(19): siRNA sense strand
ucuaggagcugcuguuuug

SEQ ID NO: 1737396 - RNA, 19 nt, Homo sapiens
  misc_RNA (1)...(19): siRNA sense strand
ggaacaaauccaccuuaca

SEQ ID NO: 1737397 - RNA, 19 nt, Homo sapiens
  misc_RNA (1)...(19): siRNA sense strand
aaugcuggauccaucaauu

SEQ ID NO: 1737398 - RNA, 19 nt, Homo sapiens
  misc_RNA (1)...(19): siRNA sense strand
ggccuuuccucauugacaa

SEQ ID NO: 1737399 - RNA, 19 nt, Homo sapiens
  misc_RNA (1)...(19): siRNA sense strand
gaauaauuggcaugcaguu

SEQ ID NO: 1737400 - RNA, 19 nt, Homo sapiens
  misc_RNA (1)...(19): siRNA sense strand
cuaaugcaguucaucacau

SEQ ID NO: 1737401 - RNA, 19 nt, Homo sapiens
  misc_RNA (1)...(19): siRNA sense strand
gcaacaagucagcaaacau

SEQ ID NO: 1737402 - RNA, 19 nt, Homo sapiens
  misc_RNA (1)...(19): siRNA sense strand
gcagaauaauuggcaugca

SEQ ID NO: 1737403 - RNA, 19 nt, Homo sapiens
  misc_RNA (1)...(19): siRNA sense strand
agcagucacuuaagaccua

SEQ ID NO: 1737404 - RNA, 19 nt, Homo sapiens
  misc_RNA (1)...(19): siRNA sense strand
gcaguucagcaacaaguca

SEQ ID NO: 1737405 - RNA, 19 nt, Homo sapiens
  misc_RNA (1)...(19): siRNA sense strand
ugcugugacuguuauguuu

SEQ ID NO: 1737406 - RNA, 19 nt, Homo sapiens
  misc_RNA (1)...(19): siRNA sense strand
cuacauuagcucagauuau

SEQ ID NO: 1737407 - RNA, 19 nt, Homo sapiens
  misc_RNA (1)...(19): siRNA sense strand
gccagaugcugccucucaa

SEQ ID NO: 1737408 - RNA, 19 nt, Homo sapiens
  misc_RNA (1)...(19): siRNA sense strand
gagaaugcuggauccauca

SEQ ID NO: 1737409 - RNA, 19 nt, Homo sapiens
  misc_RNA (1)...(19): siRNA sense strand
caagucagcaaacauggau

SEQ ID NO: 1737410 - RNA, 19 nt, Homo sapiens
  misc_RNA (1)...(19): siRNA sense strand
uuggagaccuugggcauug

SEQ ID NO: 1737411 - RNA, 19 nt, Homo sapiens
  misc_RNA (1)...(19): siRNA sense strand
gaagagcaagaccaaaauu

SEQ ID NO: 1737412 - RNA, 19 nt, Homo sapiens
  misc_RNA (1)...(19): siRNA sense strand
gcagucacuuaagaccuau

SEQ ID NO: 1737413 - RNA, 19 nt, Homo sapiens
  misc_RNA (1)...(19): siRNA sense strand
guuggauucuaaugcaguu

SEQ ID NO: 1737414 - RNA, 19 nt, Homo sapiens
  misc_RNA (1)...(19): siRNA sense strand
gcuugacugcuccaaauug

SEQ ID NO: 1737415 - RNA, 19 nt, Homo sapiens
  misc_RNA (1)...(19): siRNA sense strand
ggagcacaacguccgagaa

SEQ ID NO: 1737416 - RNA, 19 nt, Homo sapiens
  misc_RNA (1)...(19): siRNA sense strand
ggcaaugaacagaugacua

SEQ ID NO: 1737417 - RNA, 19 nt, Homo sapiens
  misc_RNA (1)...(19): siRNA sense strand
uggcugugguuucagaaga

SEQ ID NO: 1737418 - RNA, 19 nt, Homo sapiens
  misc_RNA (1)...(19): siRNA sense strand
gcaguucaucacaucauuc

SEQ ID NO: 1737419 - RNA, 19 nt, Homo sapiens
  misc_RNA (1)...(19): siRNA sense strand
ggccaacgaacaccauuuc

SEQ ID NO: 1737420 - RNA, 19 nt, Homo sapiens
  misc_RNA (1)...(19): siRNA sense strand
cauaccagcuccccuaaau

SEQ ID NO: 1737421 - RNA, 19 nt, Homo sapiens
  misc_RNA (1)...(19): siRNA sense strand
agagagaagaccagauguu

SEQ ID NO: 1737422 - RNA, 19 nt, Homo sapiens
  misc_RNA (1)...(19): siRNA sense strand
acuuuggccuuuccucauu

SEQ ID NO: 1737423 - RNA, 19 nt, Homo sapiens
  misc_RNA (1)...(19): siRNA sense strand
gaugacuaaguaugaaaug

SEQ ID NO: 1737424 - RNA, 19 nt, Homo sapiens
  misc_RNA (1)...(19): siRNA sense strand
gcuguuggagcauuucuca

SEQ ID NO: 1737425 - RNA, 19 nt, Homo sapiens
  misc_RNA (1)...(19): siRNA sense strand
cagaagagcaagaccaaaa

SEQ ID NO: 1737426 - RNA, 19 nt, Homo sapiens
  misc_RNA (1)...(19): siRNA sense strand
guggaugcuucugggaauu

SEQ ID NO: 1737427 - RNA, 19 nt, Homo sapiens
  misc_RNA (1)...(19): siRNA sense strand
ggaaguuaacaucccuaau

SEQ ID NO: 1737428 - RNA, 19 nt, Homo sapiens
  misc_RNA (1)...(19): siRNA sense strand
gggcauuggccaacgaaca

SEQ ID NO: 1737429 - RNA, 19 nt, Homo sapiens
  misc_RNA (1)...(19): siRNA sense strand
cagaugacuaaguaugaaa

SEQ ID NO: 1737430 - RNA, 19 nt, Homo sapiens
  misc_RNA (1)...(19): siRNA sense strand
guuggagcauuucucaucu

SEQ ID NO: 1737431 - RNA, 19 nt, Homo sapiens
  misc_RNA (1)...(19): siRNA sense strand
ucaucuacauuagcucaga

SEQ ID NO: 1737432 - RNA, 19 nt, Homo sapiens
  misc_RNA (1)...(19): siRNA sense strand
acaaacggucuuucauuag

SEQ ID NO: 1737433 - RNA, 19 nt, Homo sapiens
  misc_RNA (1)...(19): siRNA sense strand
uccgagaaaugcucagcuu

SEQ ID NO: 1737434 - RNA, 19 nt, Homo sapiens
  misc_RNA (1)...(19): siRNA sense strand
acuuaagaccuauuacuga

SEQ ID NO: 1737435 - RNA, 19 nt, Homo sapiens
  misc_RNA (1)...(19): siRNA sense strand
aacagaugacuaaguauga

SEQ ID NO: 1737436 - RNA, 19 nt, Homo sapiens
  misc_RNA (1)...(19): siRNA sense strand
uugaaaagcucgaagaaag

SEQ ID NO: 1737437 - RNA, 19 nt, Homo sapiens
  misc_RNA (1)...(19): siRNA sense strand
ucuguuggauucuaaugca

SEQ ID NO: 1737438 - RNA, 19 nt, Homo sapiens
  misc_RNA (1)...(19): siRNA sense strand
uaauaggaggguucugguu

SEQ ID NO: 1737439 - RNA, 19 nt, Homo sapiens
  misc_RNA (1)...(19): siRNA sense strand
gacaaacggucuuucauua

SEQ ID NO: 1737440 - RNA, 19 nt, Homo sapiens
  misc_RNA (1)...(19): siRNA sense strand
gaaguuaacaucccuaaua

SEQ ID NO: 1737441 - RNA, 19 nt, Homo sapiens
  misc_RNA (1)...(19): siRNA sense strand
gacaagagauggagacaaa

SEQ ID NO: 1737442 - RNA, 19 nt, Homo sapiens
  misc_RNA (1)...(19): siRNA sense strand
gcaaugaacagaugacuaa

SEQ ID NO: 1737443 - RNA, 19 nt, Homo sapiens
  misc_RNA (1)...(19): siRNA sense strand
gaaauggcaugugcaauug

SEQ ID NO: 1737444 - RNA, 19 nt, Homo sapiens
  misc_RNA (1)...(19): siRNA sense strand
gaugcugccucucaacuua

SEQ ID NO: 1737445 - RNA, 19 nt, Homo sapiens
  misc_RNA (1)...(19): siRNA sense strand
uggcagagcuguacacaaa

SEQ ID NO: 1737446 - RNA, 19 nt, Homo sapiens
  misc_RNA (1)...(19): siRNA sense strand
gagaagaccagauguugua

SEQ ID NO: 1737447 - RNA, 19 nt, Homo sapiens
  misc_RNA (1)...(19): siRNA sense strand
gaaagugcugugacuguua

SEQ ID NO: 1737448 - RNA, 19 nt, Homo sapiens
  misc_RNA (1)...(19): siRNA sense strand
gcauuucucaucuacauua

SEQ ID NO: 1737449 - RNA, 19 nt, Homo sapiens
  misc_RNA (1)...(19): siRNA sense strand
gcagagcuguacacaaaga

SEQ ID NO: 1737450 - RNA, 19 nt, Homo sapiens
  misc_RNA (1)...(19): siRNA sense strand
gaacagaugacuaaguaug

SEQ ID NO: 1737451 - RNA, 19 nt, Homo sapiens
  misc_RNA (1)...(19): siRNA sense strand
gaacaaauccaccuuacag

SEQ ID NO: 1737452 - RNA, 19 nt, Homo sapiens
  misc_RNA (1)...(19): siRNA sense strand
gcaguuggcugugguuuca

SEQ ID NO: 1737453 - RNA, 19 nt, Homo sapiens
  misc_RNA (1)...(19): siRNA sense strand
ucaaagauguggccacugu

SEQ ID NO: 1737454 - RNA, 19 nt, Homo sapiens
  misc_RNA (1)...(19): siRNA sense strand
gagcauuucucaucuacau

SEQ ID NO: 1737455 - RNA, 19 nt, Homo sapiens
  misc_RNA (1)...(19): siRNA sense strand
gaauuggaaucaaagaauc

SEQ ID NO: 1737456 - RNA, 19 nt, Homo sapiens
  misc_RNA (1)...(19): siRNA sense strand
gcacaacguccgagaaaug

SEQ ID NO: 1737457 - RNA, 19 nt, Homo sapiens
  misc_RNA (1)...(19): siRNA sense strand
acaaagaauuucagcagaa

SEQ ID NO: 1737458 - RNA, 19 nt, Homo sapiens
  misc_RNA (1)...(19): siRNA sense strand
uuacagagaggaagacaua

SEQ ID NO: 1737459 - RNA, 19 nt, Homo sapiens
  misc_RNA (1)...(19): siRNA sense strand
ugaaauggcaugugcaauu

SEQ ID NO: 1737460 - RNA, 19 nt, Homo sapiens
  misc_RNA (1)...(19): siRNA sense strand
ucacuggucuggcaaugaa

SEQ ID NO: 1737461 - RNA, 19 nt, Homo sapiens
  misc_RNA (1)...(19): siRNA sense strand
gcagagagaagaccagaug

SEQ ID NO: 1737462 - RNA, 19 nt, Homo sapiens
  misc_RNA (1)...(19): siRNA sense strand
caacaagucagcaaacaug

SEQ ID NO: 1737463 - RNA, 19 nt, Homo sapiens
  misc_RNA (1)...(19): siRNA sense strand
augaacagaugacuaagua

SEQ ID NO: 1737464 - RNA, 19 nt, Homo sapiens
  misc_RNA (1)...(19): siRNA sense strand
gagcacaacguccgagaaa

SEQ ID NO: 1737465 - RNA, 19 nt, Homo sapiens
  misc_RNA (1)...(19): siRNA sense strand
caaagaauuucagcagaau

SEQ ID NO: 1737466 - RNA, 19 nt, Homo sapiens
  misc_RNA (1)...(19): siRNA sense strand
gagagaagaccagauguug

SEQ ID NO: 1737467 - RNA, 19 nt, Homo sapiens
  misc_RNA (1)...(19): siRNA sense strand
ggaugcuucugggaauuua

SEQ ID NO: 1737468 - RNA, 19 nt, Homo sapiens
  misc_RNA (1)...(19): siRNA sense strand
uacauuagcucagauuaug

SEQ ID NO: 1737469 - RNA, 19 nt, Homo sapiens
  misc_RNA (1)...(19): siRNA sense strand
cagcuugacugcuccaaau

SEQ ID NO: 1737470 - RNA, 19 nt, Homo sapiens
  misc_RNA (1)...(19): siRNA sense strand
gaccagauguuguagaaaa

SEQ ID NO: 1737471 - RNA, 19 nt, Homo sapiens
  misc_RNA (1)...(19): siRNA sense strand
aagaaucacuuuggccuuu

SEQ ID NO: 1737472 - RNA, 19 nt, Homo sapiens
  misc_RNA (1)...(19): siRNA sense strand
gcucagauuauguauuuga

SEQ ID NO: 1737473 - RNA, 19 nt, Homo sapiens
  misc_RNA (1)...(19): siRNA sense strand
caaauccaccuuacagaga

SEQ ID NO: 1737474 - RNA, 19 nt, Homo sapiens
  misc_RNA (1)...(19): siRNA sense strand
cgagaaaugcucagcuuga

SEQ ID NO: 1737475 - RNA, 19 nt, Homo sapiens
  misc_RNA (1)...(19): siRNA sense strand
cgaagaaagugcugugacu

SEQ ID NO: 1737476 - RNA, 19 nt, Homo sapiens
  misc_RNA (1)...(19): siRNA sense strand
gaacaccauuucgaauugg

SEQ ID NO: 1737477 - RNA, 19 nt, Homo sapiens
  misc_RNA (1)...(19): siRNA sense strand
aauaggaggguucugguua

SEQ ID NO: 1737478 - RNA, 19 nt, Homo sapiens
  misc_RNA (1)...(19): siRNA sense strand
aagaccagauguuguagaa

SEQ ID NO: 1737479 - RNA, 19 nt, Homo sapiens
  misc_RNA (1)...(19): siRNA sense strand
aaagugcugugacuguuau

SEQ ID NO: 1737480 - RNA, 19 nt, Homo sapiens
  misc_RNA (1)...(19): siRNA sense strand
gagcuguacacaaagaauu

SEQ ID NO: 1737481 - RNA, 19 nt, Homo sapiens
  misc_RNA (1)...(19): siRNA sense strand
ggauuccuauucuguaugg

SEQ ID NO: 1737482 - RNA, 19 nt, Homo sapiens
  misc_RNA (1)...(19): siRNA sense strand
cgaauuggaaucaaagaau

SEQ ID NO: 1737483 - RNA, 19 nt, Homo sapiens
  misc_RNA (1)...(19): siRNA sense strand
agaaagugcugugacuguu

SEQ ID NO: 1737484 - RNA, 19 nt, Homo sapiens
  misc_RNA (1)...(19): siRNA sense strand
guucaucacaucauucaug

SEQ ID NO: 1737485 - RNA, 19 nt, Homo sapiens
  misc_RNA (1)...(19): siRNA sense strand
gagaaaugcucagcuugac

SEQ ID NO: 1737486 - RNA, 19 nt, Homo sapiens
  misc_RNA (1)...(19): siRNA sense strand
acagaugacuaaguaugaa

SEQ ID NO: 1737487 - RNA, 19 nt, Homo sapiens
  misc_RNA (1)...(19): siRNA sense strand
gcagcuagcagagaagaga

SEQ ID NO: 1737488 - RNA, 19 nt, Homo sapiens
  misc_RNA (1)...(19): siRNA sense strand
uaaugcaguucaucacauc

SEQ ID NO: 1737489 - RNA, 19 nt, Homo sapiens
  misc_RNA (1)...(19): siRNA sense strand
aaagugcaguucagcaaca

SEQ ID NO: 1737490 - RNA, 19 nt, Homo sapiens
  misc_RNA (1)...(19): siRNA sense strand
cauuagcucagauuaugua

SEQ ID NO: 1737491 - RNA, 19 nt, Homo sapiens
  misc_RNA (1)...(19): siRNA sense strand
gaagaccagauguuguaga

SEQ ID NO: 1737492 - RNA, 19 nt, Homo sapiens
  misc_RNA (1)...(19): siRNA sense strand
gaauuuagcaaaggaagca

SEQ ID NO: 1737493 - RNA, 19 nt, Homo sapiens
  misc_RNA (1)...(19): siRNA sense strand
aaguuaacaucccuaauag

SEQ ID NO: 1737494 - RNA, 19 nt, Homo sapiens
  misc_RNA (1)...(19): siRNA sense strand
gccggcagcuagcagagaa

SEQ ID NO: 1737495 - RNA, 19 nt, Homo sapiens
  misc_RNA (1)...(19): siRNA sense strand
ucuaggagcugcuguuuug

SEQ ID NO: 1737496 - RNA, 19 nt, Homo sapiens
  misc_RNA (1)...(19): siRNA sense strand
ggaacaaauccaccuuaca

SEQ ID NO: 1737497 - RNA, 19 nt, Homo sapiens
  misc_RNA (1)...(19): siRNA sense strand
aaugcuggauccaucaauu

SEQ ID NO: 1737498 - RNA, 19 nt, Homo sapiens
  misc_RNA (1)...(19): siRNA sense strand
ggccuuuccucauugacaa

SEQ ID NO: 1737499 - RNA, 19 nt, Homo sapiens
  misc_RNA (1)...(19): siRNA sense strand
gaauaauuggcaugcaguu

SEQ ID NO: 1737500 - RNA, 19 nt, Homo sapiens
  misc_RNA (1)...(19): siRNA sense strand
cuaaugcaguucaucacau

SEQ ID NO: 1737501 - RNA, 19 nt, Homo sapiens
  misc_RNA (1)...(19): siRNA sense strand
gcaacaagucagcaaacau

SEQ ID NO: 1737502 - RNA, 19 nt, Homo sapiens
  misc_RNA (1)...(19): siRNA sense strand
gcagaauaauuggcaugca

SEQ ID NO: 1737503 - RNA, 19 nt, Homo sapiens
  misc_RNA (1)...(19): siRNA sense strand
agcagucacuuaagaccua

SEQ ID NO: 1737504 - RNA, 19 nt, Homo sapiens
  misc_RNA (1)...(19): siRNA sense strand
gcaguucagcaacaaguca

SEQ ID NO: 1737505 - RNA, 19 nt, Homo sapiens
  misc_RNA (1)...(19): siRNA sense strand
ugcugugacuguuauguuu

SEQ ID NO: 1737506 - RNA, 19 nt, Homo sapiens
  misc_RNA (1)...(19): siRNA sense strand
cuacauuagcucagauuau

SEQ ID NO: 1737507 - RNA, 19 nt, Homo sapiens
  misc_RNA (1)...(19): siRNA sense strand
gccagaugcugccucucaa

SEQ ID NO: 1737508 - RNA, 19 nt, Homo sapiens
  misc_RNA (1)...(19): siRNA sense strand
gagaaugcuggauccauca

SEQ ID NO: 1737509 - RNA, 19 nt, Homo sapiens
  misc_RNA (1)...(19): siRNA sense strand
caagucagcaaacauggau

SEQ ID NO: 1737510 - RNA, 19 nt, Homo sapiens
  misc_RNA (1)...(19): siRNA sense strand
uuggagaccuugggcauug

SEQ ID NO: 1737511 - RNA, 19 nt, Homo sapiens
  misc_RNA (1)...(19): siRNA sense strand
gaagagcaagaccaaaauu

SEQ ID NO: 1737512 - RNA, 19 nt, Homo sapiens
  misc_RNA (1)...(19): siRNA sense strand
gcagucacuuaagaccuau

SEQ ID NO: 1737513 - RNA, 19 nt, Homo sapiens
  misc_RNA (1)...(19): siRNA sense strand
guuggauucuaaugcaguu

SEQ ID NO: 1737514 - RNA, 19 nt, Homo sapiens
  misc_RNA (1)...(19): siRNA sense strand
gcuugacugcuccaaauug

SEQ ID NO: 1737515 - RNA, 19 nt, Homo sapiens
  misc_RNA (1)...(19): siRNA sense strand
ggagcacaacguccgagaa

SEQ ID NO: 1737516 - RNA, 19 nt, Homo sapiens
  misc_RNA (1)...(19): siRNA sense strand
ggcaaugaacagaugacua

SEQ ID NO: 1737517 - RNA, 19 nt, Homo sapiens
  misc_RNA (1)...(19): siRNA sense strand
uggcugugguuucagaaga

SEQ ID NO: 1737518 - RNA, 19 nt, Homo sapiens
  misc_RNA (1)...(19): siRNA sense strand
gcaguucaucacaucauuc

SEQ ID NO: 1737519 - RNA, 19 nt, Homo sapiens
  misc_RNA (1)...(19): siRNA sense strand
ggccaacgaacaccauuuc

SEQ ID NO: 1737520 - RNA, 19 nt, Homo sapiens
  misc_RNA (1)...(19): siRNA sense strand
cauaccagcuccccuaaau

SEQ ID NO: 1737521 - RNA, 19 nt, Homo sapiens
  misc_RNA (1)...(19): siRNA sense strand
agagagaagaccagauguu

SEQ ID NO: 1737522 - RNA, 19 nt, Homo sapiens
  misc_RNA (1)...(19): siRNA sense strand
acuuuggccuuuccucauu

SEQ ID NO: 1737523 - RNA, 19 nt, Homo sapiens
  misc_RNA (1)...(19): siRNA sense strand
gaugacuaaguaugaaaug

SEQ ID NO: 1737524 - RNA, 19 nt, Homo sapiens
  misc_RNA (1)...(19): siRNA sense strand
gcuguuggagcauuucuca

SEQ ID NO: 1737525 - RNA, 19 nt, Homo sapiens
  misc_RNA (1)...(19): siRNA sense strand
cagaagagcaagaccaaaa

SEQ ID NO: 1737526 - RNA, 19 nt, Homo sapiens
  misc_RNA (1)...(19): siRNA sense strand
guggaugcuucugggaauu

SEQ ID NO: 1737527 - RNA, 19 nt, Homo sapiens
  misc_RNA (1)...(19): siRNA sense strand
ggaaguuaacaucccuaau

SEQ ID NO: 1737528 - RNA, 19 nt, Homo sapiens
  misc_RNA (1)...(19): siRNA sense strand
gggcauuggccaacgaaca

SEQ ID NO: 1737529 - RNA, 19 nt, Homo sapiens
  misc_RNA (1)...(19): siRNA sense strand
cagaugacuaaguaugaaa

SEQ ID NO: 1737530 - RNA, 19 nt, Homo sapiens
  misc_RNA (1)...(19): siRNA sense strand
guuggagcauuucucaucu

SEQ ID NO: 1737531 - RNA, 19 nt, Homo sapiens
  misc_RNA (1)...(19): siRNA sense strand
ucaucuacauuagcucaga

SEQ ID NO: 1737532 - RNA, 19 nt, Homo sapiens
  misc_RNA (1)...(19): siRNA sense strand
acaaacggucuuucauuag

SEQ ID NO: 1737533 - RNA, 19 nt, Homo sapiens
  misc_RNA (1)...(19): siRNA sense strand
uccgagaaaugcucagcuu

SEQ ID NO: 1737534 - RNA, 19 nt, Homo sapiens
  misc_RNA (1)...(19): siRNA sense strand
acuuaagaccuauuacuga

SEQ ID NO: 1737535 - RNA, 19 nt, Homo sapiens
  misc_RNA (1)...(19): siRNA sense strand
aacagaugacuaaguauga

SEQ ID NO: 1737536 - RNA, 19 nt, Homo sapiens
  misc_RNA (1)...(19): siRNA sense strand
uugaaaagcucgaagaaag

SEQ ID NO: 1737537 - RNA, 19 nt, Homo sapiens
  misc_RNA (1)...(19): siRNA sense strand
ucuguuggauucuaaugca

SEQ ID NO: 1737538 - RNA, 19 nt, Homo sapiens
  misc_RNA (1)...(19): siRNA sense strand
uaauaggaggguucugguu

SEQ ID NO: 1737539 - RNA, 19 nt, Homo sapiens
  misc_RNA (1)...(19): siRNA sense strand
ggccaaaccuuaugaauuu

SEQ ID NO: 1737540 - RNA, 19 nt, Homo sapiens
  misc_RNA (1)...(19): siRNA sense strand
gaagaaacaugcaaaggaa

SEQ ID NO: 1737541 - RNA, 19 nt, Homo sapiens
  misc_RNA (1)...(19): siRNA sense strand
gaaagagacuugccaugaa

SEQ ID NO: 1737542 - RNA, 19 nt, Homo sapiens
  misc_RNA (1)...(19): siRNA sense strand
guaauucucuccuuugaaa

SEQ ID NO: 1737543 - RNA, 19 nt, Homo sapiens
  misc_RNA (1)...(19): siRNA sense strand
caaggaagcuguugcaaau

SEQ ID NO: 1737544 - RNA, 19 nt, Homo sapiens
  misc_RNA (1)...(19): siRNA sense strand
gaagacacaugcaauugaa

SEQ ID NO: 1737545 - RNA, 19 nt, Homo sapiens
  misc_RNA (1)...(19): siRNA sense strand
ccacuaauauccauccaua

SEQ ID NO: 1737546 - RNA, 19 nt, Homo sapiens
  misc_RNA (1)...(19): siRNA sense strand
gaauagcuguguaugauga

SEQ ID NO: 1737547 - RNA, 19 nt, Homo sapiens
  misc_RNA (1)...(19): siRNA sense strand
gcacagaucuagugaacau

SEQ ID NO: 1737548 - RNA, 19 nt, Homo sapiens
  misc_RNA (1)...(19): siRNA sense strand
gaagucgacucaugagaaa

SEQ ID NO: 1737549 - RNA, 19 nt, Homo sapiens
  misc_RNA (1)...(19): siRNA sense strand
caagaaagguauugaacuu

SEQ ID NO: 1737550 - RNA, 19 nt, Homo sapiens
  misc_RNA (1)...(19): siRNA sense strand
gagaauagcuguguaugau

SEQ ID NO: 1737551 - RNA, 19 nt, Homo sapiens
  misc_RNA (1)...(19): siRNA sense strand
ccaaagaaauggaucaguu

SEQ ID NO: 1737552 - RNA, 19 nt, Homo sapiens
  misc_RNA (1)...(19): siRNA sense strand
guaauugucucgaaaugaa

SEQ ID NO: 1737553 - RNA, 19 nt, Homo sapiens
  misc_RNA (1)...(19): siRNA sense strand
ggaaguaauugucucgaaa

SEQ ID NO: 1737554 - RNA, 19 nt, Homo sapiens
  misc_RNA (1)...(19): siRNA sense strand
gcugaaaccugaaguugaa

SEQ ID NO: 1737555 - RNA, 19 nt, Homo sapiens
  misc_RNA (1)...(19): siRNA sense strand
gauggaagcuggagaaucu

SEQ ID NO: 1737556 - RNA, 19 nt, Homo sapiens
  misc_RNA (1)...(19): siRNA sense strand
gaagaacgcaauauucauu

SEQ ID NO: 1737557 - RNA, 19 nt, Homo sapiens
  misc_RNA (1)...(19): siRNA sense strand
ggaccuggcugucuugaga

SEQ ID NO: 1737558 - RNA, 19 nt, Homo sapiens
  misc_RNA (1)...(19): siRNA sense strand
gcagauguguugaacuuga

SEQ ID NO: 1737559 - RNA, 19 nt, Homo sapiens
  misc_RNA (1)...(19): siRNA sense strand
gaguuuggcuucuuucuga

SEQ ID NO: 1737560 - RNA, 19 nt, Homo sapiens
  misc_RNA (1)...(19): siRNA sense strand
gaugaaggcuuacuugaag

SEQ ID NO: 1737561 - RNA, 19 nt, Homo sapiens
  misc_RNA (1)...(19): siRNA sense strand
ugagggaaauaaaccauua

SEQ ID NO: 1737562 - RNA, 19 nt, Homo sapiens
  misc_RNA (1)...(19): siRNA sense strand
gauccucgauugaaugaaa

SEQ ID NO: 1737563 - RNA, 19 nt, Homo sapiens
  misc_RNA (1)...(19): siRNA sense strand
gaagaaagaaagagacuug

SEQ ID NO: 1737564 - RNA, 19 nt, Homo sapiens
  misc_RNA (1)...(19): siRNA sense strand
ggucagaaaugaucaauac

SEQ ID NO: 1737565 - RNA, 19 nt, Homo sapiens
  misc_RNA (1)...(19): siRNA sense strand
gaacucgcaugguuaugaa

SEQ ID NO: 1737566 - RNA, 19 nt, Homo sapiens
  misc_RNA (1)...(19): siRNA sense strand
gcaaauaucaacaguacaa

SEQ ID NO: 1737567 - RNA, 19 nt, Homo sapiens
  misc_RNA (1)...(19): siRNA sense strand
gaaaaucacugcagcaaau

SEQ ID NO: 1737568 - RNA, 19 nt, Homo sapiens
  misc_RNA (1)...(19): siRNA sense strand
ucacaaaucuaaggucaaa

SEQ ID NO: 1737569 - RNA, 19 nt, Homo sapiens
  misc_RNA (1)...(19): siRNA sense strand
ugacaugccucaagaaaca

SEQ ID NO: 1737570 - RNA, 19 nt, Homo sapiens
  misc_RNA (1)...(19): siRNA sense strand
gaacccaacugccucuuca

SEQ ID NO: 1737571 - RNA, 19 nt, Homo sapiens
  misc_RNA (1)...(19): siRNA sense strand
aaagcaauguguacagaua

SEQ ID NO: 1737572 - RNA, 19 nt, Homo sapiens
  misc_RNA (1)...(19): siRNA sense strand
gaccaagaaccaauaauaa

SEQ ID NO: 1737573 - RNA, 19 nt, Homo sapiens
  misc_RNA (1)...(19): siRNA sense strand
ccaaugacaugccucaaga

SEQ ID NO: 1737574 - RNA, 19 nt, Homo sapiens
  misc_RNA (1)...(19): siRNA sense strand
caaggaaacugcauuuguc

SEQ ID NO: 1737575 - RNA, 19 nt, Homo sapiens
  misc_RNA (1)...(19): siRNA sense strand
guaauuacaugccucagau

SEQ ID NO: 1737576 - RNA, 19 nt, Homo sapiens
  misc_RNA (1)...(19): siRNA sense strand
aguacaagauguccaaaua

SEQ ID NO: 1737577 - RNA, 19 nt, Homo sapiens
  misc_RNA (1)...(19): siRNA sense strand
guaugaaccugaugaagau

SEQ ID NO: 1737578 - RNA, 19 nt, Homo sapiens
  misc_RNA (1)...(19): siRNA sense strand
gaucgaaagugcugaccaa

SEQ ID NO: 1737579 - RNA, 19 nt, Homo sapiens
  misc_RNA (1)...(19): siRNA sense strand
aaagagaagucgacucaug

SEQ ID NO: 1737580 - RNA, 19 nt, Homo sapiens
  misc_RNA (1)...(19): siRNA sense strand
acaaaggaauggucagaaa

SEQ ID NO: 1737581 - RNA, 19 nt, Homo sapiens
  misc_RNA (1)...(19): siRNA sense strand
guuuagaacuuuaccaaga

SEQ ID NO: 1737582 - RNA, 19 nt, Homo sapiens
  misc_RNA (1)...(19): siRNA sense strand
gcaaagccaucagccaaga

SEQ ID NO: 1737583 - RNA, 19 nt, Homo sapiens
  misc_RNA (1)...(19): siRNA sense strand
ucaauccaguuuacaauga

SEQ ID NO: 1737584 - RNA, 19 nt, Homo sapiens
  misc_RNA (1)...(19): siRNA sense strand
cgaaggagaugcagcagau

SEQ ID NO: 1737585 - RNA, 19 nt, Homo sapiens
  misc_RNA (1)...(19): siRNA sense strand
agaaauggaucaguugaaa

SEQ ID NO: 1737586 - RNA, 19 nt, Homo sapiens
  misc_RNA (1)...(19): siRNA sense strand
aaagagagcagaccaaaug

SEQ ID NO: 1737587 - RNA, 19 nt, Homo sapiens
  misc_RNA (1)...(19): siRNA sense strand
gcagaagaacgcaauauuc

SEQ ID NO: 1737588 - RNA, 19 nt, Homo sapiens
  misc_RNA (1)...(19): siRNA sense strand
gaaccaauaauaacucaug

SEQ ID NO: 1737589 - RNA, 19 nt, Homo sapiens
  misc_RNA (1)...(19): siRNA sense strand
gaaauuggaagccgagaug

SEQ ID NO: 1737590 - RNA, 19 nt, Homo sapiens
  misc_RNA (1)...(19): siRNA sense strand
ggaugaguuuggcuucuuu

SEQ ID NO: 1737591 - RNA, 19 nt, Homo sapiens
  misc_RNA (1)...(19): siRNA sense strand
ccaaugaccucaaaagaaa

SEQ ID NO: 1737592 - RNA, 19 nt, Homo sapiens
  misc_RNA (1)...(19): siRNA sense strand
cagcaaauaucaacaguac

SEQ ID NO: 1737593 - RNA, 19 nt, Homo sapiens
  misc_RNA (1)...(19): siRNA sense strand
cgaaagugcugaccaagag

SEQ ID NO: 1737594 - RNA, 19 nt, Homo sapiens
  misc_RNA (1)...(19): siRNA sense strand
gaaagguauugaacuuauc

SEQ ID NO: 1737595 - RNA, 19 nt, Homo sapiens
  misc_RNA (1)...(19): siRNA sense strand
uaucguggaugcuuuauca

SEQ ID NO: 1737596 - RNA, 19 nt, Homo sapiens
  misc_RNA (1)...(19): siRNA sense strand
gagauaucguggaugcuuu

SEQ ID NO: 1737597 - RNA, 19 nt, Homo sapiens
  misc_RNA (1)...(19): siRNA sense strand
aagaaacacuggaugaaau

SEQ ID NO: 1737598 - RNA, 19 nt, Homo sapiens
  misc_RNA (1)...(19): siRNA sense strand
cagcaacaguaguaugaaa

SEQ ID NO: 1737599 - RNA, 19 nt, Homo sapiens
  misc_RNA (1)...(19): siRNA sense strand
gcuugaacaucuagaauuc

SEQ ID NO: 1737600 - RNA, 19 nt, Homo sapiens
  misc_RNA (1)...(19): siRNA sense strand
uaaagaaacagcagaagga

SEQ ID NO: 1737601 - RNA, 19 nt, Homo sapiens
  misc_RNA (1)...(19): siRNA sense strand
gcagaucauugagauguau

SEQ ID NO: 1737602 - RNA, 19 nt, Homo sapiens
  misc_RNA (1)...(19): siRNA sense strand
aaucuuggcugcucuugaa

SEQ ID NO: 1737603 - RNA, 19 nt, Homo sapiens
  misc_RNA (1)...(19): siRNA sense strand
agaaggcaaugaagaagaa

SEQ ID NO: 1737604 - RNA, 19 nt, Homo sapiens
  misc_RNA (1)...(19): siRNA sense strand
cgacacauuucccuucgaa

SEQ ID NO: 1737605 - RNA, 19 nt, Homo sapiens
  misc_RNA (1)...(19): siRNA sense strand
gaucaaucauacacaacuu

SEQ ID NO: 1737606 - RNA, 19 nt, Homo sapiens
  misc_RNA (1)...(19): siRNA sense strand
gcacaccaggcuaagauuu

SEQ ID NO: 1737607 - RNA, 19 nt, Homo sapiens
  misc_RNA (1)...(19): siRNA sense strand
gauaacaacaagcugauug

SEQ ID NO: 1737608 - RNA, 19 nt, Homo sapiens
  misc_RNA (1)...(19): siRNA sense strand
ccacugacaccauacguaa

SEQ ID NO: 1737609 - RNA, 19 nt, Homo sapiens
  misc_RNA (1)...(19): siRNA sense strand
guucuucccauaacacuua

SEQ ID NO: 1737610 - RNA, 19 nt, Homo sapiens
  misc_RNA (1)...(19): siRNA sense strand
guagaaggccugagaucaa

SEQ ID NO: 1737611 - RNA, 19 nt, Homo sapiens
  misc_RNA (1)...(19): siRNA sense strand
caagaaacacuggaugaaa

SEQ ID NO: 1737612 - RNA, 19 nt, Homo sapiens
  misc_RNA (1)...(19): siRNA sense strand
ccaacugccucuucaaagu

SEQ ID NO: 1737613 - RNA, 19 nt, Homo sapiens
  misc_RNA (1)...(19): siRNA sense strand
gggaaguaauugucucgaa

SEQ ID NO: 1737614 - RNA, 19 nt, Homo sapiens
  misc_RNA (1)...(19): siRNA sense strand
ccugauggauuuggagaua

SEQ ID NO: 1737615 - RNA, 19 nt, Homo sapiens
  misc_RNA (1)...(19): siRNA sense strand
gcucacuacuucaucaguu

SEQ ID NO: 1737616 - RNA, 19 nt, Homo sapiens
  misc_RNA (1)...(19): siRNA sense strand
cuagaucguuuagaacuuu

SEQ ID NO: 1737617 - RNA, 19 nt, Homo sapiens
  misc_RNA (1)...(19): siRNA sense strand
ggccugagaucaaucauac

SEQ ID NO: 1737618 - RNA, 19 nt, Homo sapiens
  misc_RNA (1)...(19): siRNA sense strand
cuagaaugcucccucauca

SEQ ID NO: 1737619 - RNA, 19 nt, Homo sapiens
  misc_RNA (1)...(19): siRNA sense strand
gaagcaguccaaagaaaug

SEQ ID NO: 1737620 - RNA, 19 nt, Homo sapiens
  misc_RNA (1)...(19): siRNA sense strand
gcacagcacacaaaggaau

SEQ ID NO: 1737621 - RNA, 19 nt, Homo sapiens
  misc_RNA (1)...(19): siRNA sense strand
gagagcagaccaaaugaga

SEQ ID NO: 1737622 - RNA, 19 nt, Homo sapiens
  misc_RNA (1)...(19): siRNA sense strand
cagaagaacgcaauauuca

SEQ ID NO: 1737623 - RNA, 19 nt, Homo sapiens
  misc_RNA (1)...(19): siRNA sense strand
guccaaauauugcgaagau

SEQ ID NO: 1737624 - RNA, 19 nt, Homo sapiens
  misc_RNA (1)...(19): siRNA sense strand
gaacugacacaaaagauuu

SEQ ID NO: 1737625 - RNA, 19 nt, Homo sapiens
  misc_RNA (1)...(19): siRNA sense strand
ugagaucaaucauacacaa

SEQ ID NO: 1737626 - RNA, 19 nt, Homo sapiens
  misc_RNA (1)...(19): siRNA sense strand
ggaaagaaugaugaaauug

SEQ ID NO: 1737627 - RNA, 19 nt, Homo sapiens
  misc_RNA (1)...(19): siRNA sense strand
caaagaaauggaucaguug

SEQ ID NO: 1737628 - RNA, 19 nt, Homo sapiens
  misc_RNA (1)...(19): siRNA sense strand
gcagaugaaggcuuacuug

SEQ ID NO: 1737629 - RNA, 19 nt, Homo sapiens
  misc_RNA (1)...(19): siRNA sense strand
uauaacaaacggcaaauga

SEQ ID NO: 1737630 - RNA, 19 nt, Homo sapiens
  misc_RNA (1)...(19): siRNA sense strand
gaacauuugcaucgggaaa

SEQ ID NO: 1737631 - RNA, 19 nt, Homo sapiens
  misc_RNA (1)...(19): siRNA sense strand
ggaauggucagaaaugauc

SEQ ID NO: 1737632 - RNA, 19 nt, Homo sapiens
  misc_RNA (1)...(19): siRNA sense strand
gaaguaauugucucgaaau

SEQ ID NO: 1737633 - RNA, 19 nt, Homo sapiens
  misc_RNA (1)...(19): siRNA sense strand
gccaaaccuuaugaauuua

SEQ ID NO: 1737634 - RNA, 19 nt, Homo sapiens
  misc_RNA (1)...(19): siRNA sense strand
guacaagauguccaaauau

SEQ ID NO: 1737635 - RNA, 19 nt, Homo sapiens
  misc_RNA (1)...(19): siRNA sense strand
gaaaagcaauguguacaga

SEQ ID NO: 1737636 - RNA, 19 nt, Homo sapiens
  misc_RNA (1)...(19): siRNA sense strand
cuuccuagaucguuuagaa

SEQ ID NO: 1737637 - RNA, 19 nt, Homo sapiens
  misc_RNA (1)...(19): siRNA sense strand
caacaccgccaaagcaaau

SEQ ID NO: 1737638 - RNA, 19 nt, Homo sapiens
  misc_RNA (1)...(19): siRNA sense strand
caacuacgcccagccugua

SEQ ID NO: 1737639 - RNA, 19 nt, Homo sapiens
  misc_RNA (1)...(19): siRNA sense strand
ggccaaaccuuaugaauuu

SEQ ID NO: 1737640 - RNA, 19 nt, Homo sapiens
  misc_RNA (1)...(19): siRNA sense strand
gaagaaacaugcaaaggaa

SEQ ID NO: 1737641 - RNA, 19 nt, Homo sapiens
  misc_RNA (1)...(19): siRNA sense strand
gaaagagacuugccaugaa

SEQ ID NO: 1737642 - RNA, 19 nt, Homo sapiens
  misc_RNA (1)...(19): siRNA sense strand
guaauucucuccuuugaaa

SEQ ID NO: 1737643 - RNA, 19 nt, Homo sapiens
  misc_RNA (1)...(19): siRNA sense strand
caaggaagcuguugcaaau

SEQ ID NO: 1737644 - RNA, 19 nt, Homo sapiens
  misc_RNA (1)...(19): siRNA sense strand
gaagacacaugcaauugaa

SEQ ID NO: 1737645 - RNA, 19 nt, Homo sapiens
  misc_RNA (1)...(19): siRNA sense strand
ccacuaauauccauccaua

SEQ ID NO: 1737646 - RNA, 19 nt, Homo sapiens
  misc_RNA (1)...(19): siRNA sense strand
gaauagcuguguaugauga

SEQ ID NO: 1737647 - RNA, 19 nt, Homo sapiens
  misc_RNA (1)...(19): siRNA sense strand
gcacagaucuagugaacau

SEQ ID NO: 1737648 - RNA, 19 nt, Homo sapiens
  misc_RNA (1)...(19): siRNA sense strand
gaagucgacucaugagaaa

SEQ ID NO: 1737649 - RNA, 19 nt, Homo sapiens
  misc_RNA (1)...(19): siRNA sense strand
caagaaagguauugaacuu

SEQ ID NO: 1737650 - RNA, 19 nt, Homo sapiens
  misc_RNA (1)...(19): siRNA sense strand
gagaauagcuguguaugau

SEQ ID NO: 1737651 - RNA, 19 nt, Homo sapiens
  misc_RNA (1)...(19): siRNA sense strand
ccaaagaaauggaucaguu

SEQ ID NO: 1737652 - RNA, 19 nt, Homo sapiens
  misc_RNA (1)...(19): siRNA sense strand
guaauugucucgaaaugaa

SEQ ID NO: 1737653 - RNA, 19 nt, Homo sapiens
  misc_RNA (1)...(19): siRNA sense strand
ggaaguaauugucucgaaa

SEQ ID NO: 1737654 - RNA, 19 nt, Homo sapiens
  misc_RNA (1)...(19): siRNA sense strand
gcugaaaccugaaguugaa

SEQ ID NO: 1737655 - RNA, 19 nt, Homo sapiens
  misc_RNA (1)...(19): siRNA sense strand
gauggaagcuggagaaucu

SEQ ID NO: 1737656 - RNA, 19 nt, Homo sapiens
  misc_RNA (1)...(19): siRNA sense strand
gaagaacgcaauauucauu

SEQ ID NO: 1737657 - RNA, 19 nt, Homo sapiens
  misc_RNA (1)...(19): siRNA sense strand
ggaccuggcugucuugaga

SEQ ID NO: 1737658 - RNA, 19 nt, Homo sapiens
  misc_RNA (1)...(19): siRNA sense strand
gcagauguguugaacuuga

SEQ ID NO: 1737659 - RNA, 19 nt, Homo sapiens
  misc_RNA (1)...(19): siRNA sense strand
gaguuuggcuucuuucuga

SEQ ID NO: 1737660 - RNA, 19 nt, Homo sapiens
  misc_RNA (1)...(19): siRNA sense strand
gaugaaggcuuacuugaag

SEQ ID NO: 1737661 - RNA, 19 nt, Homo sapiens
  misc_RNA (1)...(19): siRNA sense strand
ugagggaaauaaaccauua

SEQ ID NO: 1737662 - RNA, 19 nt, Homo sapiens
  misc_RNA (1)...(19): siRNA sense strand
gauccucgauugaaugaaa

SEQ ID NO: 1737663 - RNA, 19 nt, Homo sapiens
  misc_RNA (1)...(19): siRNA sense strand
gaagaaagaaagagacuug

SEQ ID NO: 1737664 - RNA, 19 nt, Homo sapiens
  misc_RNA (1)...(19): siRNA sense strand
ggucagaaaugaucaauac

SEQ ID NO: 1737665 - RNA, 19 nt, Homo sapiens
  misc_RNA (1)...(19): siRNA sense strand
gaacucgcaugguuaugaa

SEQ ID NO: 1737666 - RNA, 19 nt, Homo sapiens
  misc_RNA (1)...(19): siRNA sense strand
gcaaauaucaacaguacaa

SEQ ID NO: 1737667 - RNA, 19 nt, Homo sapiens
  misc_RNA (1)...(19): siRNA sense strand
gaaaaucacugcagcaaau

SEQ ID NO: 1737668 - RNA, 19 nt, Homo sapiens
  misc_RNA (1)...(19): siRNA sense strand
ucacaaaucuaaggucaaa

SEQ ID NO: 1737669 - RNA, 19 nt, Homo sapiens
  misc_RNA (1)...(19): siRNA sense strand
ugacaugccucaagaaaca

SEQ ID NO: 1737670 - RNA, 19 nt, Homo sapiens
  misc_RNA (1)...(19): siRNA sense strand
gaacccaacugccucuuca

SEQ ID NO: 1737671 - RNA, 19 nt, Homo sapiens
  misc_RNA (1)...(19): siRNA sense strand
aaagcaauguguacagaua

SEQ ID NO: 1737672 - RNA, 19 nt, Homo sapiens
  misc_RNA (1)...(19): siRNA sense strand
gaccaagaaccaauaauaa

SEQ ID NO: 1737673 - RNA, 19 nt, Homo sapiens
  misc_RNA (1)...(19): siRNA sense strand
ccaaugacaugccucaaga

SEQ ID NO: 1737674 - RNA, 19 nt, Homo sapiens
  misc_RNA (1)...(19): siRNA sense strand
caaggaaacugcauuuguc

SEQ ID NO: 1737675 - RNA, 19 nt, Homo sapiens
  misc_RNA (1)...(19): siRNA sense strand
guaauuacaugccucagau

SEQ ID NO: 1737676 - RNA, 19 nt, Homo sapiens
  misc_RNA (1)...(19): siRNA sense strand
aguacaagauguccaaaua

SEQ ID NO: 1737677 - RNA, 19 nt, Homo sapiens
  misc_RNA (1)...(19): siRNA sense strand
guaugaaccugaugaagau

SEQ ID NO: 1737678 - RNA, 19 nt, Homo sapiens
  misc_RNA (1)...(19): siRNA sense strand
gaucgaaagugcugaccaa

SEQ ID NO: 1737679 - RNA, 19 nt, Homo sapiens
  misc_RNA (1)...(19): siRNA sense strand
aaagagaagucgacucaug

SEQ ID NO: 1737680 - RNA, 19 nt, Homo sapiens
  misc_RNA (1)...(19): siRNA sense strand
acaaaggaauggucagaaa

SEQ ID NO: 1737681 - RNA, 19 nt, Homo sapiens
  misc_RNA (1)...(19): siRNA sense strand
guuuagaacuuuaccaaga

SEQ ID NO: 1737682 - RNA, 19 nt, Homo sapiens
  misc_RNA (1)...(19): siRNA sense strand
gcaaagccaucagccaaga

SEQ ID NO: 1737683 - RNA, 19 nt, Homo sapiens
  misc_RNA (1)...(19): siRNA sense strand
ucaauccaguuuacaauga

SEQ ID NO: 1737684 - RNA, 19 nt, Homo sapiens
  misc_RNA (1)...(19): siRNA sense strand
cgaaggagaugcagcagau

SEQ ID NO: 1737685 - RNA, 19 nt, Homo sapiens
  misc_RNA (1)...(19): siRNA sense strand
agaaauggaucaguugaaa

SEQ ID NO: 1737686 - RNA, 19 nt, Homo sapiens
  misc_RNA (1)...(19): siRNA sense strand
aaagagagcagaccaaaug

SEQ ID NO: 1737687 - RNA, 19 nt, Homo sapiens
  misc_RNA (1)...(19): siRNA sense strand
gcagaagaacgcaauauuc

SEQ ID NO: 1737688 - RNA, 19 nt, Homo sapiens
  misc_RNA (1)...(19): siRNA sense strand
gaaccaauaauaacucaug

SEQ ID NO: 1737689 - RNA, 19 nt, Homo sapiens
  misc_RNA (1)...(19): siRNA sense strand
gaaauuggaagccgagaug

SEQ ID NO: 1737690 - RNA, 19 nt, Homo sapiens
  misc_RNA (1)...(19): siRNA sense strand
ggaugaguuuggcuucuuu

SEQ ID NO: 1737691 - RNA, 19 nt, Homo sapiens
  misc_RNA (1)...(19): siRNA sense strand
ccaaugaccucaaaagaaa

SEQ ID NO: 1737692 - RNA, 19 nt, Homo sapiens
  misc_RNA (1)...(19): siRNA sense strand
cagcaaauaucaacaguac

SEQ ID NO: 1737693 - RNA, 19 nt, Homo sapiens
  misc_RNA (1)...(19): siRNA sense strand
cgaaagugcugaccaagag

SEQ ID NO: 1737694 - RNA, 19 nt, Homo sapiens
  misc_RNA (1)...(19): siRNA sense strand
gaaagguauugaacuuauc

SEQ ID NO: 1737695 - RNA, 19 nt, Homo sapiens
  misc_RNA (1)...(19): siRNA sense strand
uaucguggaugcuuuauca

SEQ ID NO: 1737696 - RNA, 19 nt, Homo sapiens
  misc_RNA (1)...(19): siRNA sense strand
gagauaucguggaugcuuu

SEQ ID NO: 1737697 - RNA, 19 nt, Homo sapiens
  misc_RNA (1)...(19): siRNA sense strand
aagaaacacuggaugaaau

SEQ ID NO: 1737698 - RNA, 19 nt, Homo sapiens
  misc_RNA (1)...(19): siRNA sense strand
gcuugaacaucuagaauuc

SEQ ID NO: 1737699 - RNA, 19 nt, Homo sapiens
  misc_RNA (1)...(19): siRNA sense strand
uaaagaaacagcagaagga

SEQ ID NO: 1737700 - RNA, 19 nt, Homo sapiens
  misc_RNA (1)...(19): siRNA sense strand
gcagaucauugagauguau

SEQ ID NO: 1737701 - RNA, 19 nt, Homo sapiens
  misc_RNA (1)...(19): siRNA sense strand
aaucuuggcugcucuugaa

SEQ ID NO: 1737702 - RNA, 19 nt, Homo sapiens
  misc_RNA (1)...(19): siRNA sense strand
agaaggcaaugaagaagaa

SEQ ID NO: 1737703 - RNA, 19 nt, Homo sapiens
  misc_RNA (1)...(19): siRNA sense strand
cgacacauuucccuucgaa

SEQ ID NO: 1737704 - RNA, 19 nt, Homo sapiens
  misc_RNA (1)...(19): siRNA sense strand
gaucaaucauacacaacuu

SEQ ID NO: 1737705 - RNA, 19 nt, Homo sapiens
  misc_RNA (1)...(19): siRNA sense strand
gcacaccaggcuaagauuu

SEQ ID NO: 1737706 - RNA, 19 nt, Homo sapiens
  misc_RNA (1)...(19): siRNA sense strand
gauaacaacaagcugauug

SEQ ID NO: 1737707 - RNA, 19 nt, Homo sapiens
  misc_RNA (1)...(19): siRNA sense strand
ccacugacaccauacguaa

SEQ ID NO: 1737708 - RNA, 19 nt, Homo sapiens
  misc_RNA (1)...(19): siRNA sense strand
guucuucccauaacacuua

SEQ ID NO: 1737709 - RNA, 19 nt, Homo sapiens
  misc_RNA (1)...(19): siRNA sense strand
guagaaggccugagaucaa

SEQ ID NO: 1737710 - RNA, 19 nt, Homo sapiens
  misc_RNA (1)...(19): siRNA sense strand
caagaaacacuggaugaaa

SEQ ID NO: 1737711 - RNA, 19 nt, Homo sapiens
  misc_RNA (1)...(19): siRNA sense strand
ccaacugccucuucaaagu

SEQ ID NO: 1737712 - RNA, 19 nt, Homo sapiens
  misc_RNA (1)...(19): siRNA sense strand
gggaaguaauugucucgaa

SEQ ID NO: 1737713 - RNA, 19 nt, Homo sapiens
  misc_RNA (1)...(19): siRNA sense strand
ccugauggauuuggagaua

SEQ ID NO: 1737714 - RNA, 19 nt, Homo sapiens
  misc_RNA (1)...(19): siRNA sense strand
gcucacuacuucaucaguu

SEQ ID NO: 1737715 - RNA, 19 nt, Homo sapiens
  misc_RNA (1)...(19): siRNA sense strand
cuagaucguuuagaacuuu

SEQ ID NO: 1737716 - RNA, 19 nt, Homo sapiens
  misc_RNA (1)...(19): siRNA sense strand
ggccugagaucaaucauac

SEQ ID NO: 1737717 - RNA, 19 nt, Homo sapiens
  misc_RNA (1)...(19): siRNA sense strand
cuagaaugcucccucauca

SEQ ID NO: 1737718 - RNA, 19 nt, Homo sapiens
  misc_RNA (1)...(19): siRNA sense strand
gaagcaguccaaagaaaug

SEQ ID NO: 1737719 - RNA, 19 nt, Homo sapiens
  misc_RNA (1)...(19): siRNA sense strand
gcacagcacacaaaggaau

SEQ ID NO: 1737720 - RNA, 19 nt, Homo sapiens
  misc_RNA (1)...(19): siRNA sense strand
gagagcagaccaaaugaga

SEQ ID NO: 1737721 - RNA, 19 nt, Homo sapiens
  misc_RNA (1)...(19): siRNA sense strand
cagaagaacgcaauauuca

SEQ ID NO: 1737722 - RNA, 19 nt, Homo sapiens
  misc_RNA (1)...(19): siRNA sense strand
guccaaauauugcgaagau

SEQ ID NO: 1737723 - RNA, 19 nt, Homo sapiens
  misc_RNA (1)...(19): siRNA sense strand
gaacugacacaaaagauuu

SEQ ID NO: 1737724 - RNA, 19 nt, Homo sapiens
  misc_RNA (1)...(19): siRNA sense strand
ugagaucaaucauacacaa

SEQ ID NO: 1737725 - RNA, 19 nt, Homo sapiens
  misc_RNA (1)...(19): siRNA sense strand
ggaaagaaugaugaaauug

SEQ ID NO: 1737726 - RNA, 19 nt, Homo sapiens
  misc_RNA (1)...(19): siRNA sense strand
caaagaaauggaucaguug

SEQ ID NO: 1737727 - RNA, 19 nt, Homo sapiens
  misc_RNA (1)...(19): siRNA sense strand
gcagaugaaggcuuacuug

SEQ ID NO: 1737728 - RNA, 19 nt, Homo sapiens
  misc_RNA (1)...(19): siRNA sense strand
uauaacaaacggcaaauga

SEQ ID NO: 1737729 - RNA, 19 nt, Homo sapiens
  misc_RNA (1)...(19): siRNA sense strand
gaacauuugcaucgggaaa

SEQ ID NO: 1737730 - RNA, 19 nt, Homo sapiens
  misc_RNA (1)...(19): siRNA sense strand
ggaauggucagaaaugauc

SEQ ID NO: 1737731 - RNA, 19 nt, Homo sapiens
  misc_RNA (1)...(19): siRNA sense strand
gaaguaauugucucgaaau

SEQ ID NO: 1737732 - RNA, 19 nt, Homo sapiens
  misc_RNA (1)...(19): siRNA sense strand
gccaaaccuuaugaauuua

SEQ ID NO: 1737733 - RNA, 19 nt, Homo sapiens
  misc_RNA (1)...(19): siRNA sense strand
guacaagauguccaaauau

SEQ ID NO: 1737734 - RNA, 19 nt, Homo sapiens
  misc_RNA (1)...(19): siRNA sense strand
gaaaagcaauguguacaga

SEQ ID NO: 1737735 - RNA, 19 nt, Homo sapiens
  misc_RNA (1)...(19): siRNA sense strand
acagaucuagugaacauua

SEQ ID NO: 1737736 - RNA, 19 nt, Homo sapiens
  misc_RNA (1)...(19): siRNA sense strand
caacaccgccaaagcaaau

SEQ ID NO: 1737737 - RNA, 19 nt, Homo sapiens
  misc_RNA (1)...(19): siRNA sense strand
caacuacgcccagccugua

SEQ ID NO: 1737738 - RNA, 19 nt, Homo sapiens
  misc_RNA (1)...(19): siRNA sense strand
cuuccuagaucguuuagaa

SEQ ID NO: 1737739 - RNA, 19 nt, Homo sapiens
  misc_RNA (1)...(19): siRNA sense strand
uaggauagcucaaagaaua

SEQ ID NO: 1737740 - RNA, 19 nt, Homo sapiens
  misc_RNA (1)...(19): siRNA sense strand
gaauaggucuuauacaaca

SEQ ID NO: 1737741 - RNA, 19 nt, Homo sapiens
  misc_RNA (1)...(19): siRNA sense strand
uggaagagauggaucagaa

SEQ ID NO: 1737742 - RNA, 19 nt, Homo sapiens
  misc_RNA (1)...(19): siRNA sense strand
gaagaggaacaaauuagga

SEQ ID NO: 1737743 - RNA, 19 nt, Homo sapiens
  misc_RNA (1)...(19): siRNA sense strand
auagaugacugguugauga

SEQ ID NO: 1737744 - RNA, 19 nt, Homo sapiens
  misc_RNA (1)...(19): siRNA sense strand
caaauuaggauagcucaaa

SEQ ID NO: 1737745 - RNA, 19 nt, Homo sapiens
  misc_RNA (1)...(19): siRNA sense strand
gggagugugugaucuguau

SEQ ID NO: 1737746 - RNA, 19 nt, Homo sapiens
  misc_RNA (1)...(19): siRNA sense strand
gcacugcuuucauccuaug

SEQ ID NO: 1737747 - RNA, 19 nt, Homo sapiens
  misc_RNA (1)...(19): siRNA sense strand
ucuaucaccuggacuguau

SEQ ID NO: 1737748 - RNA, 19 nt, Homo sapiens
  misc_RNA (1)...(19): siRNA sense strand
caccuggacuguauagaug

SEQ ID NO: 1737749 - RNA, 19 nt, Homo sapiens
  misc_RNA (1)...(19): siRNA sense strand
ggaagagauggaucagaaa

SEQ ID NO: 1737750 - RNA, 19 nt, Homo sapiens
  misc_RNA (1)...(19): siRNA sense strand
gacugaagaggaacaaauu

SEQ ID NO: 1737751 - RNA, 19 nt, Homo sapiens
  misc_RNA (1)...(19): siRNA sense strand
uacaacaucugccuaaagg

SEQ ID NO: 1737752 - RNA, 19 nt, Homo sapiens
  misc_RNA (1)...(19): siRNA sense strand
gaugacugguugaugagau

SEQ ID NO: 1737753 - RNA, 19 nt, Homo sapiens
  misc_RNA (1)...(19): siRNA sense strand
agacucggcuagcaacuca

SEQ ID NO: 1737754 - RNA, 19 nt, Homo sapiens
  misc_RNA (1)...(19): siRNA sense strand
ggacccaauucgauuucug

SEQ ID NO: 1737755 - RNA, 19 nt, Homo sapiens
  misc_RNA (1)...(19): siRNA sense strand
guaugauggacuuuguuua

SEQ ID NO: 1737756 - RNA, 19 nt, Homo sapiens
  misc_RNA (1)...(19): siRNA sense strand
cauccuaugagacuaauug

SEQ ID NO: 1737757 - RNA, 19 nt, Homo sapiens
  misc_RNA (1)...(19): siRNA sense strand
gaggaacaaauuaggauag

SEQ ID NO: 1737758 - RNA, 19 nt, Homo sapiens
  misc_RNA (1)...(19): siRNA sense strand
gaagagauggaucagaaaa

SEQ ID NO: 1737759 - RNA, 19 nt, Homo sapiens
  misc_RNA (1)...(19): siRNA sense strand
ugauggacuuuguuuaugg

SEQ ID NO: 1737760 - RNA, 19 nt, Homo sapiens
  misc_RNA (1)...(19): siRNA sense strand
uauacaacaucugccuaaa

SEQ ID NO: 1737761 - RNA, 19 nt, Homo sapiens
  misc_RNA (1)...(19): siRNA sense strand
ugacugaagaggaacaaau

SEQ ID NO: 1737762 - RNA, 19 nt, Homo sapiens
  misc_RNA (1)...(19): siRNA sense strand
gagugugugaucuguauga

SEQ ID NO: 1737763 - RNA, 19 nt, Homo sapiens
  misc_RNA (1)...(19): siRNA sense strand
aaauuaggauagcucaaag

SEQ ID NO: 1737764 - RNA, 19 nt, Homo sapiens
  misc_RNA (1)...(19): siRNA sense strand
gcuagcaacucagcugacu

SEQ ID NO: 1737765 - RNA, 19 nt, Homo sapiens
  misc_RNA (1)...(19): siRNA sense strand
ucaccuggacuguauagau

SEQ ID NO: 1737766 - RNA, 19 nt, Homo sapiens
  misc_RNA (1)...(19): siRNA sense strand
uuauacaacaucugccuaa

SEQ ID NO: 1737767 - RNA, 19 nt, Homo sapiens
  misc_RNA (1)...(19): siRNA sense strand
acugaagaggaacaaauua

SEQ ID NO: 1737768 - RNA, 19 nt, Homo sapiens
  misc_RNA (1)...(19): siRNA sense strand
agaggaacaaauuaggaua

SEQ ID NO: 1737769 - RNA, 19 nt, Homo sapiens
  misc_RNA (1)...(19): siRNA sense strand
uguaugauggacuuuguuu

SEQ ID NO: 1737770 - RNA, 19 nt, Homo sapiens
  misc_RNA (1)...(19): siRNA sense strand
ggaacaaauuaggauagcu

SEQ ID NO: 1737771 - RNA, 19 nt, Homo sapiens
  misc_RNA (1)...(19): siRNA sense strand
uuaugacccuggaagagau

SEQ ID NO: 1737772 - RNA, 19 nt, Homo sapiens
  misc_RNA (1)...(19): siRNA sense strand
ucuguaugauggacuuugu

SEQ ID NO: 1737773 - RNA, 19 nt, Homo sapiens
  misc_RNA (1)...(19): siRNA sense strand
ugaucuguaugauggacuu

SEQ ID NO: 1737774 - RNA, 19 nt, Homo sapiens
  misc_RNA (1)...(19): siRNA sense strand
ugacaucgcugacaaguga

SEQ ID NO: 1737775 - RNA, 19 nt, Homo sapiens
  misc_RNA (1)...(19): siRNA sense strand
aaagagaccuccauuaaau

SEQ ID NO: 1737776 - RNA, 19 nt, Homo sapiens
  misc_RNA (1)...(19): siRNA sense strand
gcaaggcgcucaagguguu

SEQ ID NO: 1737777 - RNA, 19 nt, Homo sapiens
  misc_RNA (1)...(19): siRNA sense strand
gaagguggcauucagauga

SEQ ID NO: 1737778 - RNA, 19 nt, Homo sapiens
  misc_RNA (1)...(19): siRNA sense strand
gauaaagagaccuccauua

SEQ ID NO: 1737779 - RNA, 19 nt, Homo sapiens
  misc_RNA (1)...(19): siRNA sense strand
uaaagagaccuccauuaaa

SEQ ID NO: 1737780 - RNA, 19 nt, Homo sapiens
  misc_RNA (1)...(19): siRNA sense strand
auaaagagaccuccauuaa

SEQ ID NO: 1737781 - RNA, 19 nt, Homo sapiens
  misc_RNA (1)...(19): siRNA sense strand
gaccggaucuaccucauca

SEQ ID NO: 1737782 - RNA, 19 nt, Homo sapiens
  misc_RNA (1)...(19): siRNA sense strand
ggaucuaccucaucaacuc

SEQ ID NO: 1737783 - RNA, 19 nt, Homo sapiens
  misc_RNA (1)...(19): siRNA sense strand
gcagggcacccgggauaua

SEQ ID NO: 1737784 - RNA, 19 nt, Homo sapiens
  misc_RNA (1)...(19): siRNA sense strand
gagcagcacggcuuugugu

SEQ ID NO: 1737785 - RNA, 19 nt, Homo sapiens
  misc_RNA (1)...(19): siRNA sense strand
cgggauauaucagccauga

SEQ ID NO: 1737786 - RNA, 19 nt, Homo sapiens
  misc_RNA (1)...(19): siRNA sense strand
cagcacggcuuuguguuca

SEQ ID NO: 1737787 - RNA, 19 nt, Homo sapiens
  misc_RNA (1)...(19): siRNA sense strand
acacagccuucacgccauu

SEQ ID NO: 1737788 - RNA, 19 nt, Homo sapiens
  misc_RNA (1)...(19): siRNA sense strand
aagagaccuccauuaaaua

SEQ ID NO: 1737789 - RNA, 19 nt, Homo sapiens
  misc_RNA (1)...(19): siRNA sense strand
gcagcacggcuuuguguuc

SEQ ID NO: 1737790 - RNA, 19 nt, Homo sapiens
  misc_RNA (1)...(19): siRNA sense strand
ggaagguggcauucagaug

SEQ ID NO: 1737791 - RNA, 19 nt, Homo sapiens
  misc_RNA (1)...(19): siRNA sense strand
gcugacaagugaugacaac

SEQ ID NO: 1737792 - RNA, 19 nt, Homo sapiens
  misc_RNA (1)...(19): siRNA sense strand
gaagaggaagguggcauuc

SEQ ID NO: 1737793 - RNA, 19 nt, Homo sapiens
  misc_RNA (1)...(19): siRNA sense strand
agccacaccuucuucauca

SEQ ID NO: 1737794 - RNA, 19 nt, Homo sapiens
  misc_RNA (1)...(19): siRNA sense strand
gaggaagguggcauucaga

SEQ ID NO: 1737795 - RNA, 19 nt, Homo sapiens
  misc_RNA (1)...(19): siRNA sense strand
ucgcugacaucgcugacaa

SEQ ID NO: 1737796 - RNA, 19 nt, Homo sapiens
  misc_RNA (1)...(19): siRNA sense strand
gcaggcggaagaagaggaa

SEQ ID NO: 1737797 - RNA, 19 nt, Homo sapiens
  misc_RNA (1)...(19): siRNA sense strand
ugauaaagagaccuccauu

SEQ ID NO: 1737798 - RNA, 19 nt, Homo sapiens
  misc_RNA (1)...(19): siRNA sense strand
agaggaagguggcauucag

SEQ ID NO: 1737799 - RNA, 19 nt, Homo sapiens
  misc_RNA (1)...(19): siRNA sense strand
gugagcaggcggaagaaga

SEQ ID NO: 1737800 - RNA, 19 nt, Homo sapiens
  misc_RNA (1)...(19): siRNA sense strand
ggaugggaaugaggacagu

SEQ ID NO: 1737801 - RNA, 19 nt, Homo sapiens
  misc_RNA (1)...(19): siRNA sense strand
gguacagcaucaucaccau

SEQ ID NO: 1737802 - RNA, 19 nt, Homo sapiens
  misc_RNA (1)...(19): siRNA sense strand
agaagaggaagguggcauu

SEQ ID NO: 1737803 - RNA, 19 nt, Homo sapiens
  misc_RNA (1)...(19): siRNA sense strand
gggcacccgggauauauca

SEQ ID NO: 1737804 - RNA, 19 nt, Homo sapiens
  misc_RNA (1)...(19): siRNA sense strand
agaccuccauuaaauacgu

SEQ ID NO: 1737805 - RNA, 19 nt, Homo sapiens
  misc_RNA (1)...(19): siRNA sense strand
ggaccggaucuaccucauc

SEQ ID NO: 1737806 - RNA, 19 nt, Homo sapiens
  misc_RNA (1)...(19): siRNA sense strand
ugacaucgcugacaaguga

SEQ ID NO: 1737807 - RNA, 19 nt, Homo sapiens
  misc_RNA (1)...(19): siRNA sense strand
aaagagaccuccauuaaau

SEQ ID NO: 1737808 - RNA, 19 nt, Homo sapiens
  misc_RNA (1)...(19): siRNA sense strand
gcaaggcgcucaagguguu

SEQ ID NO: 1737809 - RNA, 19 nt, Homo sapiens
  misc_RNA (1)...(19): siRNA sense strand
gaagguggcauucagauga

SEQ ID NO: 1737810 - RNA, 19 nt, Homo sapiens
  misc_RNA (1)...(19): siRNA sense strand
gauaaagagaccuccauua

SEQ ID NO: 1737811 - RNA, 19 nt, Homo sapiens
  misc_RNA (1)...(19): siRNA sense strand
uaaagagaccuccauuaaa

SEQ ID NO: 1737812 - RNA, 19 nt, Homo sapiens
  misc_RNA (1)...(19): siRNA sense strand
auaaagagaccuccauuaa

SEQ ID NO: 1737813 - RNA, 19 nt, Homo sapiens
  misc_RNA (1)...(19): siRNA sense strand
gaccggaucuaccucauca

SEQ ID NO: 1737814 - RNA, 19 nt, Homo sapiens
  misc_RNA (1)...(19): siRNA sense strand
ggaucuaccucaucaacuc

SEQ ID NO: 1737815 - RNA, 19 nt, Homo sapiens
  misc_RNA (1)...(19): siRNA sense strand
gcagggcacccgggauaua

SEQ ID NO: 1737816 - RNA, 19 nt, Homo sapiens
  misc_RNA (1)...(19): siRNA sense strand
gagcagcacggcuuugugu

SEQ ID NO: 1737817 - RNA, 19 nt, Homo sapiens
  misc_RNA (1)...(19): siRNA sense strand
cgggauauaucagccauga

SEQ ID NO: 1737818 - RNA, 19 nt, Homo sapiens
  misc_RNA (1)...(19): siRNA sense strand
cagcacggcuuuguguuca

SEQ ID NO: 1737819 - RNA, 19 nt, Homo sapiens
  misc_RNA (1)...(19): siRNA sense strand
acacagccuucacgccauu

SEQ ID NO: 1737820 - RNA, 19 nt, Homo sapiens
  misc_RNA (1)...(19): siRNA sense strand
aagagaccuccauuaaaua

SEQ ID NO: 1737821 - RNA, 19 nt, Homo sapiens
  misc_RNA (1)...(19): siRNA sense strand
gcagcacggcuuuguguuc

SEQ ID NO: 1737822 - RNA, 19 nt, Homo sapiens
  misc_RNA (1)...(19): siRNA sense strand
ggaagguggcauucagaug

SEQ ID NO: 1737823 - RNA, 19 nt, Homo sapiens
  misc_RNA (1)...(19): siRNA sense strand
gcugacaagugaugacaac

SEQ ID NO: 1737824 - RNA, 19 nt, Homo sapiens
  misc_RNA (1)...(19): siRNA sense strand
gaagaggaagguggcauuc

SEQ ID NO: 1737825 - RNA, 19 nt, Homo sapiens
  misc_RNA (1)...(19): siRNA sense strand
agccacaccuucuucauca

SEQ ID NO: 1737826 - RNA, 19 nt, Homo sapiens
  misc_RNA (1)...(19): siRNA sense strand
gaggaagguggcauucaga

SEQ ID NO: 1737827 - RNA, 19 nt, Homo sapiens
  misc_RNA (1)...(19): siRNA sense strand
ucgcugacaucgcugacaa

SEQ ID NO: 1737828 - RNA, 19 nt, Homo sapiens
  misc_RNA (1)...(19): siRNA sense strand
gcaggcggaagaagaggaa

SEQ ID NO: 1737829 - RNA, 19 nt, Homo sapiens
  misc_RNA (1)...(19): siRNA sense strand
ugauaaagagaccuccauu

SEQ ID NO: 1737830 - RNA, 19 nt, Homo sapiens
  misc_RNA (1)...(19): siRNA sense strand
agaggaagguggcauucag

SEQ ID NO: 1737831 - RNA, 19 nt, Homo sapiens
  misc_RNA (1)...(19): siRNA sense strand
gugagcaggcggaagaaga

SEQ ID NO: 1737832 - RNA, 19 nt, Homo sapiens
  misc_RNA (1)...(19): siRNA sense strand
ggaugggaaugaggacagu

SEQ ID NO: 1737833 - RNA, 19 nt, Homo sapiens
  misc_RNA (1)...(19): siRNA sense strand
gguacagcaucaucaccau

SEQ ID NO: 1737834 - RNA, 19 nt, Homo sapiens
  misc_RNA (1)...(19): siRNA sense strand
agaagaggaagguggcauu

SEQ ID NO: 1737835 - RNA, 19 nt, Homo sapiens
  misc_RNA (1)...(19): siRNA sense strand
gggcacccgggauauauca

SEQ ID NO: 1737836 - RNA, 19 nt, Homo sapiens
  misc_RNA (1)...(19): siRNA sense strand
agaccuccauuaaauacgu

SEQ ID NO: 1737837 - RNA, 19 nt, Homo sapiens
  misc_RNA (1)...(19): siRNA sense strand
ggaccggaucuaccucauc

SEQ ID NO: 1737838 - RNA, 19 nt, Homo sapiens
  misc_RNA (1)...(19): siRNA sense strand
caagguuccugaagucuga

SEQ ID NO: 1737839 - RNA, 19 nt, Homo sapiens
  misc_RNA (1)...(19): siRNA sense strand
ggacccugguggauuauga

SEQ ID NO: 1737840 - RNA, 19 nt, Homo sapiens
  misc_RNA (1)...(19): siRNA sense strand
gaccaagagugcagauuuc

SEQ ID NO: 1737841 - RNA, 19 nt, Homo sapiens
  misc_RNA (1)...(19): siRNA sense strand
ccaucuaccuggccaagaa

SEQ ID NO: 1737842 - RNA, 19 nt, Homo sapiens
  misc_RNA (1)...(19): siRNA sense strand
gugaggagcuucgauaugg

SEQ ID NO: 1737843 - RNA, 19 nt, Homo sapiens
  misc_RNA (1)...(19): siRNA sense strand
ccaagaagaacauccgaaa

SEQ ID NO: 1737844 - RNA, 19 nt, Homo sapiens
  misc_RNA (1)...(19): siRNA sense strand
cugcagagcuggacuaugc

SEQ ID NO: 1737845 - RNA, 19 nt, Homo sapiens
  misc_RNA (1)...(19): siRNA sense strand
acgcccagcugcacauaua

SEQ ID NO: 1737846 - RNA, 19 nt, Homo sapiens
  misc_RNA (1)...(19): siRNA sense strand
ugaccaagagugcagauuu

SEQ ID NO: 1737847 - RNA, 19 nt, Homo sapiens
  misc_RNA (1)...(19): siRNA sense strand
agacgcguguucccguuua

SEQ ID NO: 1737848 - RNA, 19 nt, Homo sapiens
  misc_RNA (1)...(19): siRNA sense strand
ggaucccgcuggagaugaa

SEQ ID NO: 1737849 - RNA, 19 nt, Homo sapiens
  misc_RNA (1)...(19): siRNA sense strand
gaucgaguacuucaggaaa

SEQ ID NO: 1737850 - RNA, 19 nt, Homo sapiens
  misc_RNA (1)...(19): siRNA sense strand
gagugcagauuuccauaag

SEQ ID NO: 1737851 - RNA, 19 nt, Homo sapiens
  misc_RNA (1)...(19): siRNA sense strand
caugugaggagcuucgaua

SEQ ID NO: 1737852 - RNA, 19 nt, Homo sapiens
  misc_RNA (1)...(19): siRNA sense strand
ccugaagucugacauguac

SEQ ID NO: 1737853 - RNA, 19 nt, Homo sapiens
  misc_RNA (1)...(19): siRNA sense strand
gcuaugaccggcuacacaa

SEQ ID NO: 1737854 - RNA, 19 nt, Homo sapiens
  misc_RNA (1)...(19): siRNA sense strand
gggacaggcuggucauugc

SEQ ID NO: 1737855 - RNA, 19 nt, Homo sapiens
  misc_RNA (1)...(19): siRNA sense strand
caugggaccuggugcugau

SEQ ID NO: 1737856 - RNA, 19 nt, Homo sapiens
  misc_RNA (1)...(19): siRNA sense strand
ggaggcaugugaggagcuu

SEQ ID NO: 1737857 - RNA, 19 nt, Homo sapiens
  misc_RNA (1)...(19): siRNA sense strand
gagcuggacuaugccaucu

SEQ ID NO: 1737858 - RNA, 19 nt, Homo sapiens
  misc_RNA (1)...(19): siRNA sense strand
gcuggacuaugccaucuac

SEQ ID NO: 1737859 - RNA, 19 nt, Homo sapiens
  misc_RNA (1)...(19): siRNA sense strand
gccgugugcucaugaccaa

SEQ ID NO: 1737860 - RNA, 19 nt, Homo sapiens
  misc_RNA (1)...(19): siRNA sense strand
caagagugcagauuuccau

SEQ ID NO: 1737861 - RNA, 19 nt, Homo sapiens
  misc_RNA (1)...(19): siRNA sense strand
gaugaagagacgcguguuc

SEQ ID NO: 1737862 - RNA, 19 nt, Homo sapiens
  misc_RNA (1)...(19): siRNA sense strand
ccaccgcuauguccuggau

SEQ ID NO: 1737863 - RNA, 19 nt, Homo sapiens
  misc_RNA (1)...(19): siRNA sense strand
ccugguggauuaugagaag

SEQ ID NO: 1737864 - RNA, 19 nt, Homo sapiens
  misc_RNA (1)...(19): siRNA sense strand
gccaggagcagaccuacug

SEQ ID NO: 1737865 - RNA, 19 nt, Homo sapiens
  misc_RNA (1)...(19): siRNA sense strand
uacccaagguuccugaagu

SEQ ID NO: 1737866 - RNA, 19 nt, Homo sapiens
  misc_RNA (1)...(19): siRNA sense strand
agagugcagauuuccauaa

SEQ ID NO: 1737867 - RNA, 19 nt, Homo sapiens
  misc_RNA (1)...(19): siRNA sense strand
ugaagucugacauguacaa

SEQ ID NO: 1737868 - RNA, 19 nt, Homo sapiens
  misc_RNA (1)...(19): siRNA sense strand
ugaggagcuucgauaugga

SEQ ID NO: 1737869 - RNA, 19 nt, Homo sapiens
  misc_RNA (1)...(19): siRNA sense strand
ccuacuggcuggugaacag

SEQ ID NO: 1737870 - RNA, 19 nt, Homo sapiens
  misc_RNA (1)...(19): siRNA sense strand
gagacgcguguucccguuu

SEQ ID NO: 1737871 - RNA, 19 nt, Homo sapiens
  misc_RNA (1)...(19): siRNA sense strand
ccuacugggucaugaaugc

SEQ ID NO: 1737872 - RNA, 19 nt, Homo sapiens
  misc_RNA (1)...(19): siRNA sense strand
agcgggagaucgaguacuu

SEQ ID NO: 1737873 - RNA, 19 nt, Homo sapiens
  misc_RNA (1)...(19): siRNA sense strand
gcgacgucgugcagugguu

SEQ ID NO: 1737874 - RNA, 19 nt, Homo sapiens
  misc_RNA (1)...(19): siRNA sense strand
ggugcagcauggcuacauc

SEQ ID NO: 1737875 - RNA, 19 nt, Homo sapiens
  misc_RNA (1)...(19): siRNA sense strand
ggaguucaguggagaaaac

SEQ ID NO: 1737876 - RNA, 19 nt, Homo sapiens
  misc_RNA (1)...(19): siRNA sense strand
gcaggacccgagugaaguc

SEQ ID NO: 1737877 - RNA, 19 nt, Homo sapiens
  misc_RNA (1)...(19): siRNA sense strand
gggcccacuucauggacuu

SEQ ID NO: 1737878 - RNA, 19 nt, Homo sapiens
  misc_RNA (1)...(19): siRNA sense strand
uaugaccggcuacacaaga

SEQ ID NO: 1737879 - RNA, 19 nt, Homo sapiens
  misc_RNA (1)...(19): siRNA sense strand
acgagacgcccuacagguu

SEQ ID NO: 1737880 - RNA, 19 nt, Homo sapiens
  misc_RNA (1)...(19): siRNA sense strand
ccugguggaugccguguac

SEQ ID NO: 1737881 - RNA, 19 nt, Homo sapiens
  misc_RNA (1)...(19): siRNA sense strand
gaccggcuacacaagaaga

SEQ ID NO: 1737882 - RNA, 19 nt, Homo sapiens
  misc_RNA (1)...(19): siRNA sense strand
caagguuccugaagucuga

SEQ ID NO: 1737883 - RNA, 19 nt, Homo sapiens
  misc_RNA (1)...(19): siRNA sense strand
ggacccugguggauuauga

SEQ ID NO: 1737884 - RNA, 19 nt, Homo sapiens
  misc_RNA (1)...(19): siRNA sense strand
gaccaagagugcagauuuc

SEQ ID NO: 1737885 - RNA, 19 nt, Homo sapiens
  misc_RNA (1)...(19): siRNA sense strand
ccaucuaccuggccaagaa

SEQ ID NO: 1737886 - RNA, 19 nt, Homo sapiens
  misc_RNA (1)...(19): siRNA sense strand
gugaggagcuucgauaugg

SEQ ID NO: 1737887 - RNA, 19 nt, Homo sapiens
  misc_RNA (1)...(19): siRNA sense strand
ccaagaagaacauccgaaa

SEQ ID NO: 1737888 - RNA, 19 nt, Homo sapiens
  misc_RNA (1)...(19): siRNA sense strand
cugcagagcuggacuaugc

SEQ ID NO: 1737889 - RNA, 19 nt, Homo sapiens
  misc_RNA (1)...(19): siRNA sense strand
acgcccagcugcacauaua

SEQ ID NO: 1737890 - RNA, 19 nt, Homo sapiens
  misc_RNA (1)...(19): siRNA sense strand
ugaccaagagugcagauuu

SEQ ID NO: 1737891 - RNA, 19 nt, Homo sapiens
  misc_RNA (1)...(19): siRNA sense strand
agacgcguguucccguuua

SEQ ID NO: 1737892 - RNA, 19 nt, Homo sapiens
  misc_RNA (1)...(19): siRNA sense strand
ggaucccgcuggagaugaa

SEQ ID NO: 1737893 - RNA, 19 nt, Homo sapiens
  misc_RNA (1)...(19): siRNA sense strand
gaucgaguacuucaggaaa

SEQ ID NO: 1737894 - RNA, 19 nt, Homo sapiens
  misc_RNA (1)...(19): siRNA sense strand
gagugcagauuuccauaag

SEQ ID NO: 1737895 - RNA, 19 nt, Homo sapiens
  misc_RNA (1)...(19): siRNA sense strand
caugugaggagcuucgaua

SEQ ID NO: 1737896 - RNA, 19 nt, Homo sapiens
  misc_RNA (1)...(19): siRNA sense strand
ccugaagucugacauguac

SEQ ID NO: 1737897 - RNA, 19 nt, Homo sapiens
  misc_RNA (1)...(19): siRNA sense strand
gcuaugaccggcuacacaa

SEQ ID NO: 1737898 - RNA, 19 nt, Homo sapiens
  misc_RNA (1)...(19): siRNA sense strand
gggacaggcuggucauugc

SEQ ID NO: 1737899 - RNA, 19 nt, Homo sapiens
  misc_RNA (1)...(19): siRNA sense strand
caugggaccuggugcugau

SEQ ID NO: 1737900 - RNA, 19 nt, Homo sapiens
  misc_RNA (1)...(19): siRNA sense strand
ggaggcaugugaggagcuu

SEQ ID NO: 1737901 - RNA, 19 nt, Homo sapiens
  misc_RNA (1)...(19): siRNA sense strand
gagcuggacuaugccaucu

SEQ ID NO: 1737902 - RNA, 19 nt, Homo sapiens
  misc_RNA (1)...(19): siRNA sense strand
gcuggacuaugccaucuac

SEQ ID NO: 1737903 - RNA, 19 nt, Homo sapiens
  misc_RNA (1)...(19): siRNA sense strand
gccgugugcucaugaccaa

SEQ ID NO: 1737904 - RNA, 19 nt, Homo sapiens
  misc_RNA (1)...(19): siRNA sense strand
caagagugcagauuuccau

SEQ ID NO: 1737905 - RNA, 19 nt, Homo sapiens
  misc_RNA (1)...(19): siRNA sense strand
gaugaagagacgcguguuc

SEQ ID NO: 1737906 - RNA, 19 nt, Homo sapiens
  misc_RNA (1)...(19): siRNA sense strand
ccaccgcuauguccuggau

SEQ ID NO: 1737907 - RNA, 19 nt, Homo sapiens
  misc_RNA (1)...(19): siRNA sense strand
ccugguggauuaugagaag

SEQ ID NO: 1737908 - RNA, 19 nt, Homo sapiens
  misc_RNA (1)...(19): siRNA sense strand
gccaggagcagaccuacug

SEQ ID NO: 1737909 - RNA, 19 nt, Homo sapiens
  misc_RNA (1)...(19): siRNA sense strand
uacccaagguuccugaagu

SEQ ID NO: 1737910 - RNA, 19 nt, Homo sapiens
  misc_RNA (1)...(19): siRNA sense strand
agagugcagauuuccauaa

SEQ ID NO: 1737911 - RNA, 19 nt, Homo sapiens
  misc_RNA (1)...(19): siRNA sense strand
ugaagucugacauguacaa

SEQ ID NO: 1737912 - RNA, 19 nt, Homo sapiens
  misc_RNA (1)...(19): siRNA sense strand
ugaggagcuucgauaugga

SEQ ID NO: 1737913 - RNA, 19 nt, Homo sapiens
  misc_RNA (1)...(19): siRNA sense strand
ccuacuggcuggugaacag

SEQ ID NO: 1737914 - RNA, 19 nt, Homo sapiens
  misc_RNA (1)...(19): siRNA sense strand
gagacgcguguucccguuu

SEQ ID NO: 1737915 - RNA, 19 nt, Homo sapiens
  misc_RNA (1)...(19): siRNA sense strand
ccuacugggucaugaaugc

SEQ ID NO: 1737916 - RNA, 19 nt, Homo sapiens
  misc_RNA (1)...(19): siRNA sense strand
agcgggagaucgaguacuu

SEQ ID NO: 1737917 - RNA, 19 nt, Homo sapiens
  misc_RNA (1)...(19): siRNA sense strand
gcgacgucgugcagugguu

SEQ ID NO: 1737918 - RNA, 19 nt, Homo sapiens
  misc_RNA (1)...(19): siRNA sense strand
ggugcagcauggcuacauc

SEQ ID NO: 1737919 - RNA, 19 nt, Homo sapiens
  misc_RNA (1)...(19): siRNA sense strand
ggaguucaguggagaaaac

SEQ ID NO: 1737920 - RNA, 19 nt, Homo sapiens
  misc_RNA (1)...(19): siRNA sense strand
gcaggacccgagugaaguc

SEQ ID NO: 1737921 - RNA, 19 nt, Homo sapiens
  misc_RNA (1)...(19): siRNA sense strand
gggcccacuucauggacuu

SEQ ID NO: 1737922 - RNA, 19 nt, Homo sapiens
  misc_RNA (1)...(19): siRNA sense strand
uaugaccggcuacacaaga

SEQ ID NO: 1737923 - RNA, 19 nt, Homo sapiens
  misc_RNA (1)...(19): siRNA sense strand
acgagacgcccuacagguu

SEQ ID NO: 1737924 - RNA, 19 nt, Homo sapiens
  misc_RNA (1)...(19): siRNA sense strand
ccugguggaugccguguac

SEQ ID NO: 1737925 - RNA, 19 nt, Homo sapiens
  misc_RNA (1)...(19): siRNA sense strand
gaccggcuacacaagaaga

SEQ ID NO: 1737926 - RNA, 19 nt, Homo sapiens
  misc_RNA (1)...(19): siRNA sense strand
gaaacuagcucagauuuau

SEQ ID NO: 1737927 - RNA, 19 nt, Homo sapiens
  misc_RNA (1)...(19): siRNA sense strand
ccacgaagaucucaucaua

SEQ ID NO: 1737928 - RNA, 19 nt, Homo sapiens
  misc_RNA (1)...(19): siRNA sense strand
caacaaacuucguaaacua

SEQ ID NO: 1737929 - RNA, 19 nt, Homo sapiens
  misc_RNA (1)...(19): siRNA sense strand
gaagaagauuauaggcuua

SEQ ID NO: 1737930 - RNA, 19 nt, Homo sapiens
  misc_RNA (1)...(19): siRNA sense strand
gaagucagauggaccgauu

SEQ ID NO: 1737931 - RNA, 19 nt, Homo sapiens
  misc_RNA (1)...(19): siRNA sense strand
gaaggaagcucaucaucag

SEQ ID NO: 1737932 - RNA, 19 nt, Homo sapiens
  misc_RNA (1)...(19): siRNA sense strand
gaacauccuuugguaaaug

SEQ ID NO: 1737933 - RNA, 19 nt, Homo sapiens
  misc_RNA (1)...(19): siRNA sense strand
cagagaaaguguuguguaa

SEQ ID NO: 1737934 - RNA, 19 nt, Homo sapiens
  misc_RNA (1)...(19): siRNA sense strand
acagagaccuccaaccaua

SEQ ID NO: 1737935 - RNA, 19 nt, Homo sapiens
  misc_RNA (1)...(19): siRNA sense strand
uaaauaaccugagugaaga

SEQ ID NO: 1737936 - RNA, 19 nt, Homo sapiens
  misc_RNA (1)...(19): siRNA sense strand
cauaguaucucaucucaga

SEQ ID NO: 1737937 - RNA, 19 nt, Homo sapiens
  misc_RNA (1)...(19): siRNA sense strand
gaagaucucaucauaguau

SEQ ID NO: 1737938 - RNA, 19 nt, Homo sapiens
  misc_RNA (1)...(19): siRNA sense strand
aaacaacacugucaccuau

SEQ ID NO: 1737939 - RNA, 19 nt, Homo sapiens
  misc_RNA (1)...(19): siRNA sense strand
cagauucaguuuagagaua

SEQ ID NO: 1737940 - RNA, 19 nt, Homo sapiens
  misc_RNA (1)...(19): siRNA sense strand
ggaggagacucuucagaug

SEQ ID NO: 1737941 - RNA, 19 nt, Homo sapiens
  misc_RNA (1)...(19): siRNA sense strand
ggaaauacaacaagaagug

SEQ ID NO: 1737942 - RNA, 19 nt, Homo sapiens
  misc_RNA (1)...(19): siRNA sense strand
gcacagcgcagaagucaga

SEQ ID NO: 1737943 - RNA, 19 nt, Homo sapiens
  misc_RNA (1)...(19): siRNA sense strand
guaaauaaccugagugaag

SEQ ID NO: 1737944 - RNA, 19 nt, Homo sapiens
  misc_RNA (1)...(19): siRNA sense strand
gaagcuuucuaucaauuug

SEQ ID NO: 1737945 - RNA, 19 nt, Homo sapiens
  misc_RNA (1)...(19): siRNA sense strand
uaaaugaggaugaugauga

SEQ ID NO: 1737946 - RNA, 19 nt, Homo sapiens
  misc_RNA (1)...(19): siRNA sense strand
gagaauaucggcagagaga

SEQ ID NO: 1737947 - RNA, 19 nt, Homo sapiens
  misc_RNA (1)...(19): siRNA sense strand
gacuacaucuguugcaauu

SEQ ID NO: 1737948 - RNA, 19 nt, Homo sapiens
  misc_RNA (1)...(19): siRNA sense strand
aaacaguggugauuucaga

SEQ ID NO: 1737949 - RNA, 19 nt, Homo sapiens
  misc_RNA (1)...(19): siRNA sense strand
cuagaggacucaccaaaga

SEQ ID NO: 1737950 - RNA, 19 nt, Homo sapiens
  misc_RNA (1)...(19): siRNA sense strand
cguagaaucuuaaauacug

SEQ ID NO: 1737951 - RNA, 19 nt, Homo sapiens
  misc_RNA (1)...(19): siRNA sense strand
gcaacaaacuucguaaacu

SEQ ID NO: 1737952 - RNA, 19 nt, Homo sapiens
  misc_RNA (1)...(19): siRNA sense strand
caacugaagcguuaacaga

SEQ ID NO: 1737953 - RNA, 19 nt, Homo sapiens
  misc_RNA (1)...(19): siRNA sense strand
cugcaucgaucgcugguua

SEQ ID NO: 1737954 - RNA, 19 nt, Homo sapiens
  misc_RNA (1)...(19): siRNA sense strand
gagaaaauguggaaaacaa

SEQ ID NO: 1737955 - RNA, 19 nt, Homo sapiens
  misc_RNA (1)...(19): siRNA sense strand
aagaacagauugacaacuu

SEQ ID NO: 1737956 - RNA, 19 nt, Homo sapiens
  misc_RNA (1)...(19): siRNA sense strand
ggacagagaccuccaacca

SEQ ID NO: 1737957 - RNA, 19 nt, Homo sapiens
  misc_RNA (1)...(19): siRNA sense strand
gcaaagaggaaaccaaucu

SEQ ID NO: 1737958 - RNA, 19 nt, Homo sapiens
  misc_RNA (1)...(19): siRNA sense strand
ccaaagaacagauugacaa

SEQ ID NO: 1737959 - RNA, 19 nt, Homo sapiens
  misc_RNA (1)...(19): siRNA sense strand
cuacaucuguugcaauuca

SEQ ID NO: 1737960 - RNA, 19 nt, Homo sapiens
  misc_RNA (1)...(19): siRNA sense strand
gggccugaguugcuaagua

SEQ ID NO: 1737961 - RNA, 19 nt, Homo sapiens
  misc_RNA (1)...(19): siRNA sense strand
gauuucagauucaguuuag

SEQ ID NO: 1737962 - RNA, 19 nt, Homo sapiens
  misc_RNA (1)...(19): siRNA sense strand
cagaugaugugucuaaugg

SEQ ID NO: 1737963 - RNA, 19 nt, Homo sapiens
  misc_RNA (1)...(19): siRNA sense strand
gcaauucagaccauguuaa

SEQ ID NO: 1737964 - RNA, 19 nt, Homo sapiens
  misc_RNA (1)...(19): siRNA sense strand
cagacaaacuggaaauaca

SEQ ID NO: 1737965 - RNA, 19 nt, Homo sapiens
  misc_RNA (1)...(19): siRNA sense strand
aauucuaccuguccuauuu

SEQ ID NO: 1737966 - RNA, 19 nt, Homo sapiens
  misc_RNA (1)...(19): siRNA sense strand
guacagugauagcgacuca

SEQ ID NO: 1737967 - RNA, 19 nt, Homo sapiens
  misc_RNA (1)...(19): siRNA sense strand
gaagauuauaggcuuauga

SEQ ID NO: 1737968 - RNA, 19 nt, Homo sapiens
  misc_RNA (1)...(19): siRNA sense strand
gugagaaccuaugucagua

SEQ ID NO: 1737969 - RNA, 19 nt, Homo sapiens
  misc_RNA (1)...(19): siRNA sense strand
caaacaacacugucaccua

SEQ ID NO: 1737970 - RNA, 19 nt, Homo sapiens
  misc_RNA (1)...(19): siRNA sense strand
uaagugagacuacaucugu

SEQ ID NO: 1737971 - RNA, 19 nt, Homo sapiens
  misc_RNA (1)...(19): siRNA sense strand
gaggagacucuucagauga

SEQ ID NO: 1737972 - RNA, 19 nt, Homo sapiens
  misc_RNA (1)...(19): siRNA sense strand
gaaccuaugucaguaccau

SEQ ID NO: 1737973 - RNA, 19 nt, Homo sapiens
  misc_RNA (1)...(19): siRNA sense strand
agacgacuacagcaaauua

SEQ ID NO: 1737974 - RNA, 19 nt, Homo sapiens
  misc_RNA (1)...(19): siRNA sense strand
guguuugcauuacagaaua

SEQ ID NO: 1737975 - RNA, 19 nt, Homo sapiens
  misc_RNA (1)...(19): siRNA sense strand
acaacacugucaccuauga

SEQ ID NO: 1737976 - RNA, 19 nt, Homo sapiens
  misc_RNA (1)...(19): siRNA sense strand
caaaggaaguggugaucag

SEQ ID NO: 1737977 - RNA, 19 nt, Homo sapiens
  misc_RNA (1)...(19): siRNA sense strand
uagacuggcuuaacucugu

SEQ ID NO: 1737978 - RNA, 19 nt, Homo sapiens
  misc_RNA (1)...(19): siRNA sense strand
gaucgcugguuaucugaga

SEQ ID NO: 1737979 - RNA, 19 nt, Homo sapiens
  misc_RNA (1)...(19): siRNA sense strand
acgaagaucucaucauagu

SEQ ID NO: 1737980 - RNA, 19 nt, Homo sapiens
  misc_RNA (1)...(19): siRNA sense strand
ggucaccucugcauccaau

SEQ ID NO: 1737981 - RNA, 19 nt, Homo sapiens
  misc_RNA (1)...(19): siRNA sense strand
uaaccugagugaagaagau

SEQ ID NO: 1737982 - RNA, 19 nt, Homo sapiens
  misc_RNA (1)...(19): siRNA sense strand
gagugaaauuccacgaaga

SEQ ID NO: 1737983 - RNA, 19 nt, Homo sapiens
  misc_RNA (1)...(19): siRNA sense strand
ggccugaguugcuaaguag

SEQ ID NO: 1737984 - RNA, 19 nt, Homo sapiens
  misc_RNA (1)...(19): siRNA sense strand
ccagucacauuugaugaaa

SEQ ID NO: 1737985 - RNA, 19 nt, Homo sapiens
  misc_RNA (1)...(19): siRNA sense strand
agcaagagcugaaagaagu

SEQ ID NO: 1737986 - RNA, 19 nt, Homo sapiens
  misc_RNA (1)...(19): siRNA sense strand
cagaaacuagcucagauuu

SEQ ID NO: 1737987 - RNA, 19 nt, Homo sapiens
  misc_RNA (1)...(19): siRNA sense strand
gaaagugaacgaggagguu

SEQ ID NO: 1737988 - RNA, 19 nt, Homo sapiens
  misc_RNA (1)...(19): siRNA sense strand
gcaagagcugaaagaagua

SEQ ID NO: 1737989 - RNA, 19 nt, Homo sapiens
  misc_RNA (1)...(19): siRNA sense strand
gcaaggccaucuagaucag

SEQ ID NO: 1737990 - RNA, 19 nt, Homo sapiens
  misc_RNA (1)...(19): siRNA sense strand
gagacuacaucuguugcaa

SEQ ID NO: 1737991 - RNA, 19 nt, Homo sapiens
  misc_RNA (1)...(19): siRNA sense strand
auuauaggcuuaugagaga

SEQ ID NO: 1737992 - RNA, 19 nt, Homo sapiens
  misc_RNA (1)...(19): siRNA sense strand
gcaaaacucagaugaaaau

SEQ ID NO: 1737993 - RNA, 19 nt, Homo sapiens
  misc_RNA (1)...(19): siRNA sense strand
ugaaggcaguaaugaagga

SEQ ID NO: 1737994 - RNA, 19 nt, Homo sapiens
  misc_RNA (1)...(19): siRNA sense strand
ucaaggagcagguucuuca

SEQ ID NO: 1737995 - RNA, 19 nt, Homo sapiens
  misc_RNA (1)...(19): siRNA sense strand
gggcaaagaggaaaccaau

SEQ ID NO: 1737996 - RNA, 19 nt, Homo sapiens
  misc_RNA (1)...(19): siRNA sense strand
gaucagaacgaaauucaac

SEQ ID NO: 1737997 - RNA, 19 nt, Homo sapiens
  misc_RNA (1)...(19): siRNA sense strand
aaacucagauuccaaugac

SEQ ID NO: 1737998 - RNA, 19 nt, Homo sapiens
  misc_RNA (1)...(19): siRNA sense strand
ugaaggaagcucaucauca

SEQ ID NO: 1737999 - RNA, 19 nt, Homo sapiens
  misc_RNA (1)...(19): siRNA sense strand
agaaacuagcucagauuua

SEQ ID NO: 1738000 - RNA, 19 nt, Homo sapiens
  misc_RNA (1)...(19): siRNA sense strand
ggagcagguucuucagaca

SEQ ID NO: 1738001 - RNA, 19 nt, Homo sapiens
  misc_RNA (1)...(19): siRNA sense strand
gaaauuccacgaagaucuc

SEQ ID NO: 1738002 - RNA, 19 nt, Homo sapiens
  misc_RNA (1)...(19): siRNA sense strand
ggcagauaaugacagguuu

SEQ ID NO: 1738003 - RNA, 19 nt, Homo sapiens
  misc_RNA (1)...(19): siRNA sense strand
gaagugggcaaagaggaaa

SEQ ID NO: 1738004 - RNA, 19 nt, Homo sapiens
  misc_RNA (1)...(19): siRNA sense strand
ccauaguccuugaucuuca

SEQ ID NO: 1738005 - RNA, 19 nt, Homo sapiens
  misc_RNA (1)...(19): siRNA sense strand
gagcaagagcugaaagaag

SEQ ID NO: 1738006 - RNA, 19 nt, Homo sapiens
  misc_RNA (1)...(19): siRNA sense strand
auaauagacuggcuuaacu

SEQ ID NO: 1738007 - RNA, 19 nt, Homo sapiens
  misc_RNA (1)...(19): siRNA sense strand
ugagacgacuacagcaaau

SEQ ID NO: 1738008 - RNA, 19 nt, Homo sapiens
  misc_RNA (1)...(19): siRNA sense strand
ggucagaggagggcaagaa

SEQ ID NO: 1738009 - RNA, 19 nt, Homo sapiens
  misc_RNA (1)...(19): siRNA sense strand
gacuacagcaaauuaaaga

SEQ ID NO: 1738010 - RNA, 19 nt, Homo sapiens
  misc_RNA (1)...(19): siRNA sense strand
cuucagaugaugugucuaa

SEQ ID NO: 1738011 - RNA, 19 nt, Homo sapiens
  misc_RNA (1)...(19): siRNA sense strand
agaacagauugacaacuug

SEQ ID NO: 1738012 - RNA, 19 nt, Homo sapiens
  misc_RNA (1)...(19): siRNA sense strand
ccaucuagaucagaacgaa

SEQ ID NO: 1738013 - RNA, 19 nt, Homo sapiens
  misc_RNA (1)...(19): siRNA sense strand
aacaagaagugggcaaaga

SEQ ID NO: 1738014 - RNA, 19 nt, Homo sapiens
  misc_RNA (1)...(19): siRNA sense strand
gacauugaggcagcaaaua

SEQ ID NO: 1738015 - RNA, 19 nt, Homo sapiens
  misc_RNA (1)...(19): siRNA sense strand
acagagaaaguguugugua

SEQ ID NO: 1738016 - RNA, 19 nt, Homo sapiens
  misc_RNA (1)...(19): siRNA sense strand
gaauucuaccuguccuauu

SEQ ID NO: 1738017 - RNA, 19 nt, Homo sapiens
  misc_RNA (1)...(19): siRNA sense strand
gcgagagggucgacauagg

SEQ ID NO: 1738018 - RNA, 19 nt, Homo sapiens
  misc_RNA (1)...(19): siRNA sense strand
gaaaaugagccaucugcaa

SEQ ID NO: 1738019 - RNA, 19 nt, Homo sapiens
  misc_RNA (1)...(19): siRNA sense strand
ugaggaugaugaugaccaa

SEQ ID NO: 1738020 - RNA, 19 nt, Homo sapiens
  misc_RNA (1)...(19): siRNA sense strand
gcagagucacggaguggaa

SEQ ID NO: 1738021 - RNA, 19 nt, Homo sapiens
  misc_RNA (1)...(19): siRNA sense strand
ggugugagaaccuauguca

SEQ ID NO: 1738022 - RNA, 19 nt, Homo sapiens
  misc_RNA (1)...(19): siRNA sense strand
gauagcauagccagcagaa

SEQ ID NO: 1738023 - RNA, 19 nt, Homo sapiens
  misc_RNA (1)...(19): siRNA sense strand
ugaacauccuuugguaaau

SEQ ID NO: 1738024 - RNA, 19 nt, Homo sapiens
  misc_RNA (1)...(19): siRNA sense strand
ugaaaguacugaggaagag

SEQ ID NO: 1738025 - RNA, 19 nt, Homo sapiens
  misc_RNA (1)...(19): siRNA sense strand
gugaaaguacugaggaaga

SEQ ID NO: 1738026 - RNA, 19 nt, Homo sapiens
  misc_RNA (1)...(19): siRNA sense strand
gaaacuagcucagauuuau

SEQ ID NO: 1738027 - RNA, 19 nt, Homo sapiens
  misc_RNA (1)...(19): siRNA sense strand
ccacgaagaucucaucaua

SEQ ID NO: 1738028 - RNA, 19 nt, Homo sapiens
  misc_RNA (1)...(19): siRNA sense strand
caacaaacuucguaaacua

SEQ ID NO: 1738029 - RNA, 19 nt, Homo sapiens
  misc_RNA (1)...(19): siRNA sense strand
gaagaagauuauaggcuua

SEQ ID NO: 1738030 - RNA, 19 nt, Homo sapiens
  misc_RNA (1)...(19): siRNA sense strand
gaagucagauggaccgauu

SEQ ID NO: 1738031 - RNA, 19 nt, Homo sapiens
  misc_RNA (1)...(19): siRNA sense strand
gaaggaagcucaucaucag

SEQ ID NO: 1738032 - RNA, 19 nt, Homo sapiens
  misc_RNA (1)...(19): siRNA sense strand
gaacauccuuugguaaaug

SEQ ID NO: 1738033 - RNA, 19 nt, Homo sapiens
  misc_RNA (1)...(19): siRNA sense strand
cagagaaaguguuguguaa

SEQ ID NO: 1738034 - RNA, 19 nt, Homo sapiens
  misc_RNA (1)...(19): siRNA sense strand
acagagaccuccaaccaua

SEQ ID NO: 1738035 - RNA, 19 nt, Homo sapiens
  misc_RNA (1)...(19): siRNA sense strand
uaaauaaccugagugaaga

SEQ ID NO: 1738036 - RNA, 19 nt, Homo sapiens
  misc_RNA (1)...(19): siRNA sense strand
cauaguaucucaucucaga

SEQ ID NO: 1738037 - RNA, 19 nt, Homo sapiens
  misc_RNA (1)...(19): siRNA sense strand
gaagaucucaucauaguau

SEQ ID NO: 1738038 - RNA, 19 nt, Homo sapiens
  misc_RNA (1)...(19): siRNA sense strand
aaacaacacugucaccuau

SEQ ID NO: 1738039 - RNA, 19 nt, Homo sapiens
  misc_RNA (1)...(19): siRNA sense strand
cagauucaguuuagagaua

SEQ ID NO: 1738040 - RNA, 19 nt, Homo sapiens
  misc_RNA (1)...(19): siRNA sense strand
ggaggagacucuucagaug

SEQ ID NO: 1738041 - RNA, 19 nt, Homo sapiens
  misc_RNA (1)...(19): siRNA sense strand
ggaaauacaacaagaagug

SEQ ID NO: 1738042 - RNA, 19 nt, Homo sapiens
  misc_RNA (1)...(19): siRNA sense strand
gcacagcgcagaagucaga

SEQ ID NO: 1738043 - RNA, 19 nt, Homo sapiens
  misc_RNA (1)...(19): siRNA sense strand
guaaauaaccugagugaag

SEQ ID NO: 1738044 - RNA, 19 nt, Homo sapiens
  misc_RNA (1)...(19): siRNA sense strand
gaagcuuucuaucaauuug

SEQ ID NO: 1738045 - RNA, 19 nt, Homo sapiens
  misc_RNA (1)...(19): siRNA sense strand
uaaaugaggaugaugauga

SEQ ID NO: 1738046 - RNA, 19 nt, Homo sapiens
  misc_RNA (1)...(19): siRNA sense strand
gagaauaucggcagagaga

SEQ ID NO: 1738047 - RNA, 19 nt, Homo sapiens
  misc_RNA (1)...(19): siRNA sense strand
gacuacaucuguugcaauu

SEQ ID NO: 1738048 - RNA, 19 nt, Homo sapiens
  misc_RNA (1)...(19): siRNA sense strand
aaacaguggugauuucaga

SEQ ID NO: 1738049 - RNA, 19 nt, Homo sapiens
  misc_RNA (1)...(19): siRNA sense strand
cuagaggacucaccaaaga

SEQ ID NO: 1738050 - RNA, 19 nt, Homo sapiens
  misc_RNA (1)...(19): siRNA sense strand
cguagaaucuuaaauacug

SEQ ID NO: 1738051 - RNA, 19 nt, Homo sapiens
  misc_RNA (1)...(19): siRNA sense strand
gcaacaaacuucguaaacu

SEQ ID NO: 1738052 - RNA, 19 nt, Homo sapiens
  misc_RNA (1)...(19): siRNA sense strand
caacugaagcguuaacaga

SEQ ID NO: 1738053 - RNA, 19 nt, Homo sapiens
  misc_RNA (1)...(19): siRNA sense strand
cugcaucgaucgcugguua

SEQ ID NO: 1738054 - RNA, 19 nt, Homo sapiens
  misc_RNA (1)...(19): siRNA sense strand
gagaaaauguggaaaacaa

SEQ ID NO: 1738055 - RNA, 19 nt, Homo sapiens
  misc_RNA (1)...(19): siRNA sense strand
aagaacagauugacaacuu

SEQ ID NO: 1738056 - RNA, 19 nt, Homo sapiens
  misc_RNA (1)...(19): siRNA sense strand
ggacagagaccuccaacca

SEQ ID NO: 1738057 - RNA, 19 nt, Homo sapiens
  misc_RNA (1)...(19): siRNA sense strand
gcaaagaggaaaccaaucu

SEQ ID NO: 1738058 - RNA, 19 nt, Homo sapiens
  misc_RNA (1)...(19): siRNA sense strand
ccaaagaacagauugacaa

SEQ ID NO: 1738059 - RNA, 19 nt, Homo sapiens
  misc_RNA (1)...(19): siRNA sense strand
cuacaucuguugcaauuca

SEQ ID NO: 1738060 - RNA, 19 nt, Homo sapiens
  misc_RNA (1)...(19): siRNA sense strand
gggccugaguugcuaagua

SEQ ID NO: 1738061 - RNA, 19 nt, Homo sapiens
  misc_RNA (1)...(19): siRNA sense strand
gauuucagauucaguuuag

SEQ ID NO: 1738062 - RNA, 19 nt, Homo sapiens
  misc_RNA (1)...(19): siRNA sense strand
cagaugaugugucuaaugg

SEQ ID NO: 1738063 - RNA, 19 nt, Homo sapiens
  misc_RNA (1)...(19): siRNA sense strand
gcaauucagaccauguuaa

SEQ ID NO: 1738064 - RNA, 19 nt, Homo sapiens
  misc_RNA (1)...(19): siRNA sense strand
cagacaaacuggaaauaca

SEQ ID NO: 1738065 - RNA, 19 nt, Homo sapiens
  misc_RNA (1)...(19): siRNA sense strand
aauucuaccuguccuauuu

SEQ ID NO: 1738066 - RNA, 19 nt, Homo sapiens
  misc_RNA (1)...(19): siRNA sense strand
guacagugauagcgacuca

SEQ ID NO: 1738067 - RNA, 19 nt, Homo sapiens
  misc_RNA (1)...(19): siRNA sense strand
gaagauuauaggcuuauga

SEQ ID NO: 1738068 - RNA, 19 nt, Homo sapiens
  misc_RNA (1)...(19): siRNA sense strand
gugagaaccuaugucagua

SEQ ID NO: 1738069 - RNA, 19 nt, Homo sapiens
  misc_RNA (1)...(19): siRNA sense strand
caaacaacacugucaccua

SEQ ID NO: 1738070 - RNA, 19 nt, Homo sapiens
  misc_RNA (1)...(19): siRNA sense strand
uaagugagacuacaucugu

SEQ ID NO: 1738071 - RNA, 19 nt, Homo sapiens
  misc_RNA (1)...(19): siRNA sense strand
gaggagacucuucagauga

SEQ ID NO: 1738072 - RNA, 19 nt, Homo sapiens
  misc_RNA (1)...(19): siRNA sense strand
gaaccuaugucaguaccau

SEQ ID NO: 1738073 - RNA, 19 nt, Homo sapiens
  misc_RNA (1)...(19): siRNA sense strand
agacgacuacagcaaauua

SEQ ID NO: 1738074 - RNA, 19 nt, Homo sapiens
  misc_RNA (1)...(19): siRNA sense strand
guguuugcauuacagaaua

SEQ ID NO: 1738075 - RNA, 19 nt, Homo sapiens
  misc_RNA (1)...(19): siRNA sense strand
acaacacugucaccuauga

SEQ ID NO: 1738076 - RNA, 19 nt, Homo sapiens
  misc_RNA (1)...(19): siRNA sense strand
caaaggaaguggugaucag

SEQ ID NO: 1738077 - RNA, 19 nt, Homo sapiens
  misc_RNA (1)...(19): siRNA sense strand
uagacuggcuuaacucugu

SEQ ID NO: 1738078 - RNA, 19 nt, Homo sapiens
  misc_RNA (1)...(19): siRNA sense strand
gaucgcugguuaucugaga

SEQ ID NO: 1738079 - RNA, 19 nt, Homo sapiens
  misc_RNA (1)...(19): siRNA sense strand
acgaagaucucaucauagu

SEQ ID NO: 1738080 - RNA, 19 nt, Homo sapiens
  misc_RNA (1)...(19): siRNA sense strand
ggucaccucugcauccaau

SEQ ID NO: 1738081 - RNA, 19 nt, Homo sapiens
  misc_RNA (1)...(19): siRNA sense strand
uaaccugagugaagaagau

SEQ ID NO: 1738082 - RNA, 19 nt, Homo sapiens
  misc_RNA (1)...(19): siRNA sense strand
gagugaaauuccacgaaga

SEQ ID NO: 1738083 - RNA, 19 nt, Homo sapiens
  misc_RNA (1)...(19): siRNA sense strand
ggccugaguugcuaaguag

SEQ ID NO: 1738084 - RNA, 19 nt, Homo sapiens
  misc_RNA (1)...(19): siRNA sense strand
ccagucacauuugaugaaa

SEQ ID NO: 1738085 - RNA, 19 nt, Homo sapiens
  misc_RNA (1)...(19): siRNA sense strand
agcaagagcugaaagaagu

SEQ ID NO: 1738086 - RNA, 19 nt, Homo sapiens
  misc_RNA (1)...(19): siRNA sense strand
cagaaacuagcucagauuu

SEQ ID NO: 1738087 - RNA, 19 nt, Homo sapiens
  misc_RNA (1)...(19): siRNA sense strand
gaaagugaacgaggagguu

SEQ ID NO: 1738088 - RNA, 19 nt, Homo sapiens
  misc_RNA (1)...(19): siRNA sense strand
gcaagagcugaaagaagua

SEQ ID NO: 1738089 - RNA, 19 nt, Homo sapiens
  misc_RNA (1)...(19): siRNA sense strand
gcaaggccaucuagaucag

SEQ ID NO: 1738090 - RNA, 19 nt, Homo sapiens
  misc_RNA (1)...(19): siRNA sense strand
gagacuacaucuguugcaa

SEQ ID NO: 1738091 - RNA, 19 nt, Homo sapiens
  misc_RNA (1)...(19): siRNA sense strand
auuauaggcuuaugagaga

SEQ ID NO: 1738092 - RNA, 19 nt, Homo sapiens
  misc_RNA (1)...(19): siRNA sense strand
gcaaaacucagaugaaaau

SEQ ID NO: 1738093 - RNA, 19 nt, Homo sapiens
  misc_RNA (1)...(19): siRNA sense strand
ugaaggcaguaaugaagga

SEQ ID NO: 1738094 - RNA, 19 nt, Homo sapiens
  misc_RNA (1)...(19): siRNA sense strand
ucaaggagcagguucuuca

SEQ ID NO: 1738095 - RNA, 19 nt, Homo sapiens
  misc_RNA (1)...(19): siRNA sense strand
gggcaaagaggaaaccaau

SEQ ID NO: 1738096 - RNA, 19 nt, Homo sapiens
  misc_RNA (1)...(19): siRNA sense strand
gaucagaacgaaauucaac

SEQ ID NO: 1738097 - RNA, 19 nt, Homo sapiens
  misc_RNA (1)...(19): siRNA sense strand
aaacucagauuccaaugac

SEQ ID NO: 1738098 - RNA, 19 nt, Homo sapiens
  misc_RNA (1)...(19): siRNA sense strand
ugaaggaagcucaucauca

SEQ ID NO: 1738099 - RNA, 19 nt, Homo sapiens
  misc_RNA (1)...(19): siRNA sense strand
agaaacuagcucagauuua

SEQ ID NO: 1738100 - RNA, 19 nt, Homo sapiens
  misc_RNA (1)...(19): siRNA sense strand
ggagcagguucuucagaca

SEQ ID NO: 1738101 - RNA, 19 nt, Homo sapiens
  misc_RNA (1)...(19): siRNA sense strand
gaaauuccacgaagaucuc

SEQ ID NO: 1738102 - RNA, 19 nt, Homo sapiens
  misc_RNA (1)...(19): siRNA sense strand
ggcagauaaugacagguuu

SEQ ID NO: 1738103 - RNA, 19 nt, Homo sapiens
  misc_RNA (1)...(19): siRNA sense strand
gaagugggcaaagaggaaa

SEQ ID NO: 1738104 - RNA, 19 nt, Homo sapiens
  misc_RNA (1)...(19): siRNA sense strand
ccauaguccuugaucuuca

SEQ ID NO: 1738105 - RNA, 19 nt, Homo sapiens
  misc_RNA (1)...(19): siRNA sense strand
gagcaagagcugaaagaag

SEQ ID NO: 1738106 - RNA, 19 nt, Homo sapiens
  misc_RNA (1)...(19): siRNA sense strand
auaauagacuggcuuaacu

SEQ ID NO: 1738107 - RNA, 19 nt, Homo sapiens
  misc_RNA (1)...(19): siRNA sense strand
ugagacgacuacagcaaau

SEQ ID NO: 1738108 - RNA, 19 nt, Homo sapiens
  misc_RNA (1)...(19): siRNA sense strand
ggucagaggagggcaagaa

SEQ ID NO: 1738109 - RNA, 19 nt, Homo sapiens
  misc_RNA (1)...(19): siRNA sense strand
gacuacagcaaauuaaaga

SEQ ID NO: 1738110 - RNA, 19 nt, Homo sapiens
  misc_RNA (1)...(19): siRNA sense strand
cuucagaugaugugucuaa

SEQ ID NO: 1738111 - RNA, 19 nt, Homo sapiens
  misc_RNA (1)...(19): siRNA sense strand
agaacagauugacaacuug

SEQ ID NO: 1738112 - RNA, 19 nt, Homo sapiens
  misc_RNA (1)...(19): siRNA sense strand
ccaucuagaucagaacgaa

SEQ ID NO: 1738113 - RNA, 19 nt, Homo sapiens
  misc_RNA (1)...(19): siRNA sense strand
aacaagaagugggcaaaga

SEQ ID NO: 1738114 - RNA, 19 nt, Homo sapiens
  misc_RNA (1)...(19): siRNA sense strand
gacauugaggcagcaaaua

SEQ ID NO: 1738115 - RNA, 19 nt, Homo sapiens
  misc_RNA (1)...(19): siRNA sense strand
acagagaaaguguugugua

SEQ ID NO: 1738116 - RNA, 19 nt, Homo sapiens
  misc_RNA (1)...(19): siRNA sense strand
gaauucuaccuguccuauu

SEQ ID NO: 1738117 - RNA, 19 nt, Homo sapiens
  misc_RNA (1)...(19): siRNA sense strand
gcgagagggucgacauagg

SEQ ID NO: 1738118 - RNA, 19 nt, Homo sapiens
  misc_RNA (1)...(19): siRNA sense strand
gaaaaugagccaucugcaa

SEQ ID NO: 1738119 - RNA, 19 nt, Homo sapiens
  misc_RNA (1)...(19): siRNA sense strand
ugaggaugaugaugaccaa

SEQ ID NO: 1738120 - RNA, 19 nt, Homo sapiens
  misc_RNA (1)...(19): siRNA sense strand
gcagagucacggaguggaa

SEQ ID NO: 1738121 - RNA, 19 nt, Homo sapiens
  misc_RNA (1)...(19): siRNA sense strand
ggugugagaaccuauguca

SEQ ID NO: 1738122 - RNA, 19 nt, Homo sapiens
  misc_RNA (1)...(19): siRNA sense strand
gauagcauagccagcagaa

SEQ ID NO: 1738123 - RNA, 19 nt, Homo sapiens
  misc_RNA (1)...(19): siRNA sense strand
ugaacauccuuugguaaau

SEQ ID NO: 1738124 - RNA, 19 nt, Homo sapiens
  misc_RNA (1)...(19): siRNA sense strand
ugaaaguacugaggaagag

SEQ ID NO: 1738125 - RNA, 19 nt, Homo sapiens
  misc_RNA (1)...(19): siRNA sense strand
gugaaaguacugaggaaga

SEQ ID NO: 1738126 - RNA, 19 nt, Homo sapiens
  misc_RNA (1)...(19): siRNA sense strand
caacaacgcucacaccauu

SEQ ID NO: 1738127 - RNA, 19 nt, Homo sapiens
  misc_RNA (1)...(19): siRNA sense strand
gaugaugccucaagcaaua

SEQ ID NO: 1738128 - RNA, 19 nt, Homo sapiens
  misc_RNA (1)...(19): siRNA sense strand
ggacacgacuccucaguga

SEQ ID NO: 1738129 - RNA, 19 nt, Homo sapiens
  misc_RNA (1)...(19): siRNA sense strand
ccaauuacaucaagagguu

SEQ ID NO: 1738130 - RNA, 19 nt, Homo sapiens
  misc_RNA (1)...(19): siRNA sense strand
caugugagcugguccauca

SEQ ID NO: 1738131 - RNA, 19 nt, Homo sapiens
  misc_RNA (1)...(19): siRNA sense strand
gaaggccaaugggaaguaa

SEQ ID NO: 1738132 - RNA, 19 nt, Homo sapiens
  misc_RNA (1)...(19): siRNA sense strand
ccaucucccugcugacuua

SEQ ID NO: 1738133 - RNA, 19 nt, Homo sapiens
  misc_RNA (1)...(19): siRNA sense strand
guaauuaacacuguggaua

SEQ ID NO: 1738134 - RNA, 19 nt, Homo sapiens
  misc_RNA (1)...(19): siRNA sense strand
gcagaaacccaauuacauc

SEQ ID NO: 1738135 - RNA, 19 nt, Homo sapiens
  misc_RNA (1)...(19): siRNA sense strand
gaugugguguggcauguga

SEQ ID NO: 1738136 - RNA, 19 nt, Homo sapiens
  misc_RNA (1)...(19): siRNA sense strand
gaaacccaauuacaucaag

SEQ ID NO: 1738137 - RNA, 19 nt, Homo sapiens
  misc_RNA (1)...(19): siRNA sense strand
gcaaccugcucaucagaca

SEQ ID NO: 1738138 - RNA, 19 nt, Homo sapiens
  misc_RNA (1)...(19): siRNA sense strand
ggucguguguucauuugga

SEQ ID NO: 1738139 - RNA, 19 nt, Homo sapiens
  misc_RNA (1)...(19): siRNA sense strand
gaaguaaagaagaucaaca

SEQ ID NO: 1738140 - RNA, 19 nt, Homo sapiens
  misc_RNA (1)...(19): siRNA sense strand
ugacagagggccagcagaa

SEQ ID NO: 1738141 - RNA, 19 nt, Homo sapiens
  misc_RNA (1)...(19): siRNA sense strand
ggaaggccaaugggaagua

SEQ ID NO: 1738142 - RNA, 19 nt, Homo sapiens
  misc_RNA (1)...(19): siRNA sense strand
gggcagaaacccaauuaca

SEQ ID NO: 1738143 - RNA, 19 nt, Homo sapiens
  misc_RNA (1)...(19): siRNA sense strand
gauggucguguguucauuu

SEQ ID NO: 1738144 - RNA, 19 nt, Homo sapiens
  misc_RNA (1)...(19): siRNA sense strand
gaaggaggagcagaagcua

SEQ ID NO: 1738145 - RNA, 19 nt, Homo sapiens
  misc_RNA (1)...(19): siRNA sense strand
ugacuggguucgagaugug

SEQ ID NO: 1738146 - RNA, 19 nt, Homo sapiens
  misc_RNA (1)...(19): siRNA sense strand
ccaggauggucguguguuc

SEQ ID NO: 1738147 - RNA, 19 nt, Homo sapiens
  misc_RNA (1)...(19): siRNA sense strand
ucaucaagcuguggaagga

SEQ ID NO: 1738148 - RNA, 19 nt, Homo sapiens
  misc_RNA (1)...(19): siRNA sense strand
ggcagaaacccaauuacau

SEQ ID NO: 1738149 - RNA, 19 nt, Homo sapiens
  misc_RNA (1)...(19): siRNA sense strand
ggaaggaggagcagaagcu

SEQ ID NO: 1738150 - RNA, 19 nt, Homo sapiens
  misc_RNA (1)...(19): siRNA sense strand
gugacaaccucaucaagcu

SEQ ID NO: 1738151 - RNA, 19 nt, Homo sapiens
  misc_RNA (1)...(19): siRNA sense strand
ggauggucguguguucauu

SEQ ID NO: 1738152 - RNA, 19 nt, Homo sapiens
  misc_RNA (1)...(19): siRNA sense strand
gccaaugggaaguaaagaa

SEQ ID NO: 1738153 - RNA, 19 nt, Homo sapiens
  misc_RNA (1)...(19): siRNA sense strand
aaacccaauuacaucaaga

SEQ ID NO: 1738154 - RNA, 19 nt, Homo sapiens
  misc_RNA (1)...(19): siRNA sense strand
cagaaacccaauuacauca

SEQ ID NO: 1738155 - RNA, 19 nt, Homo sapiens
  misc_RNA (1)...(19): siRNA sense strand
gaccggaaagucauuaucu

SEQ ID NO: 1738156 - RNA, 19 nt, Homo sapiens
  misc_RNA (1)...(19): siRNA sense strand
acgcccagauggacuacua

SEQ ID NO: 1738157 - RNA, 19 nt, Homo sapiens
  misc_RNA (1)...(19): siRNA sense strand
gugcuccuaugaccggaaa

SEQ ID NO: 1738158 - RNA, 19 nt, Homo sapiens
  misc_RNA (1)...(19): siRNA sense strand
aaugggaaguaaagaagau

SEQ ID NO: 1738159 - RNA, 19 nt, Homo sapiens
  misc_RNA (1)...(19): siRNA sense strand
ccaaugggaaguaaagaag

SEQ ID NO: 1738160 - RNA, 19 nt, Homo sapiens
  misc_RNA (1)...(19): siRNA sense strand
ggagaagagccacgagcau

SEQ ID NO: 1738161 - RNA, 19 nt, Homo sapiens
  misc_RNA (1)...(19): siRNA sense strand
caucaagagguuugcauca

SEQ ID NO: 1738162 - RNA, 19 nt, Homo sapiens
  misc_RNA (1)...(19): siRNA sense strand
uaauuaacacuguggauac

SEQ ID NO: 1738163 - RNA, 19 nt, Homo sapiens
  misc_RNA (1)...(19): siRNA sense strand
gugaugaugccucaagcaa

SEQ ID NO: 1738164 - RNA, 19 nt, Homo sapiens
  misc_RNA (1)...(19): siRNA sense strand
caaugggaaguaaagaaga

SEQ ID NO: 1738165 - RNA, 19 nt, Homo sapiens
  misc_RNA (1)...(19): siRNA sense strand
ggucaugaggguccugugu

SEQ ID NO: 1738166 - RNA, 19 nt, Homo sapiens
  misc_RNA (1)...(19): siRNA sense strand
uggaaggagucaguugaug

SEQ ID NO: 1738167 - RNA, 19 nt, Homo sapiens
  misc_RNA (1)...(19): siRNA sense strand
gaagcuagaagcgcacagu

SEQ ID NO: 1738168 - RNA, 19 nt, Homo sapiens
  misc_RNA (1)...(19): siRNA sense strand
guaccuggaagccucauag

SEQ ID NO: 1738169 - RNA, 19 nt, Homo sapiens
  misc_RNA (1)...(19): siRNA sense strand
uggcaucgugcuccuauga

SEQ ID NO: 1738170 - RNA, 19 nt, Homo sapiens
  misc_RNA (1)...(19): siRNA sense strand
aauggagggcagauccuua

SEQ ID NO: 1738171 - RNA, 19 nt, Homo sapiens
  misc_RNA (1)...(19): siRNA sense strand
cguaucagcaucagugaca

SEQ ID NO: 1738172 - RNA, 19 nt, Homo sapiens
  misc_RNA (1)...(19): siRNA sense strand
ucagacagguccgucaaaa

SEQ ID NO: 1738173 - RNA, 19 nt, Homo sapiens
  misc_RNA (1)...(19): siRNA sense strand
gggcagugggugugcauca

SEQ ID NO: 1738174 - RNA, 19 nt, Homo sapiens
  misc_RNA (1)...(19): siRNA sense strand
caacauccuggcugucucu

SEQ ID NO: 1738175 - RNA, 19 nt, Homo sapiens
  misc_RNA (1)...(19): siRNA sense strand
ugcacaaguucaacgaugu

SEQ ID NO: 1738176 - RNA, 19 nt, Homo sapiens
  misc_RNA (1)...(19): siRNA sense strand
gugacuggguucgagaugu

SEQ ID NO: 1738177 - RNA, 19 nt, Homo sapiens
  misc_RNA (1)...(19): siRNA sense strand
caucagacagguccgucaa

SEQ ID NO: 1738178 - RNA, 19 nt, Homo sapiens
  misc_RNA (1)...(19): siRNA sense strand
gggaaguaaagaagaucaa

SEQ ID NO: 1738179 - RNA, 19 nt, Homo sapiens
  misc_RNA (1)...(19): siRNA sense strand
gcagugggugugcaucagu

SEQ ID NO: 1738180 - RNA, 19 nt, Homo sapiens
  misc_RNA (1)...(19): siRNA sense strand
gcugugacaaccucaucaa

SEQ ID NO: 1738181 - RNA, 19 nt, Homo sapiens
  misc_RNA (1)...(19): siRNA sense strand
caacaacgcucacaccauu

SEQ ID NO: 1738182 - RNA, 19 nt, Homo sapiens
  misc_RNA (1)...(19): siRNA sense strand
gaugaugccucaagcaaua

SEQ ID NO: 1738183 - RNA, 19 nt, Homo sapiens
  misc_RNA (1)...(19): siRNA sense strand
ggacacgacuccucaguga

SEQ ID NO: 1738184 - RNA, 19 nt, Homo sapiens
  misc_RNA (1)...(19): siRNA sense strand
ccaauuacaucaagagguu

SEQ ID NO: 1738185 - RNA, 19 nt, Homo sapiens
  misc_RNA (1)...(19): siRNA sense strand
caugugagcugguccauca

SEQ ID NO: 1738186 - RNA, 19 nt, Homo sapiens
  misc_RNA (1)...(19): siRNA sense strand
gaaggccaaugggaaguaa

SEQ ID NO: 1738187 - RNA, 19 nt, Homo sapiens
  misc_RNA (1)...(19): siRNA sense strand
ccaucucccugcugacuua

SEQ ID NO: 1738188 - RNA, 19 nt, Homo sapiens
  misc_RNA (1)...(19): siRNA sense strand
guaauuaacacuguggaua

SEQ ID NO: 1738189 - RNA, 19 nt, Homo sapiens
  misc_RNA (1)...(19): siRNA sense strand
gcagaaacccaauuacauc

SEQ ID NO: 1738190 - RNA, 19 nt, Homo sapiens
  misc_RNA (1)...(19): siRNA sense strand
gaugugguguggcauguga

SEQ ID NO: 1738191 - RNA, 19 nt, Homo sapiens
  misc_RNA (1)...(19): siRNA sense strand
gaaacccaauuacaucaag

SEQ ID NO: 1738192 - RNA, 19 nt, Homo sapiens
  misc_RNA (1)...(19): siRNA sense strand
gcaaccugcucaucagaca

SEQ ID NO: 1738193 - RNA, 19 nt, Homo sapiens
  misc_RNA (1)...(19): siRNA sense strand
ggucguguguucauuugga

SEQ ID NO: 1738194 - RNA, 19 nt, Homo sapiens
  misc_RNA (1)...(19): siRNA sense strand
gaaguaaagaagaucaaca

SEQ ID NO: 1738195 - RNA, 19 nt, Homo sapiens
  misc_RNA (1)...(19): siRNA sense strand
ugacagagggccagcagaa

SEQ ID NO: 1738196 - RNA, 19 nt, Homo sapiens
  misc_RNA (1)...(19): siRNA sense strand
ggaaggccaaugggaagua

SEQ ID NO: 1738197 - RNA, 19 nt, Homo sapiens
  misc_RNA (1)...(19): siRNA sense strand
gggcagaaacccaauuaca

SEQ ID NO: 1738198 - RNA, 19 nt, Homo sapiens
  misc_RNA (1)...(19): siRNA sense strand
gauggucguguguucauuu

SEQ ID NO: 1738199 - RNA, 19 nt, Homo sapiens
  misc_RNA (1)...(19): siRNA sense strand
gaaggaggagcagaagcua

SEQ ID NO: 1738200 - RNA, 19 nt, Homo sapiens
  misc_RNA (1)...(19): siRNA sense strand
ugacuggguucgagaugug

SEQ ID NO: 1738201 - RNA, 19 nt, Homo sapiens
  misc_RNA (1)...(19): siRNA sense strand
ccaggauggucguguguuc

SEQ ID NO: 1738202 - RNA, 19 nt, Homo sapiens
  misc_RNA (1)...(19): siRNA sense strand
ucaucaagcuguggaagga

SEQ ID NO: 1738203 - RNA, 19 nt, Homo sapiens
  misc_RNA (1)...(19): siRNA sense strand
ggcagaaacccaauuacau

SEQ ID NO: 1738204 - RNA, 19 nt, Homo sapiens
  misc_RNA (1)...(19): siRNA sense strand
ggaaggaggagcagaagcu

SEQ ID NO: 1738205 - RNA, 19 nt, Homo sapiens
  misc_RNA (1)...(19): siRNA sense strand
gugacaaccucaucaagcu

SEQ ID NO: 1738206 - RNA, 19 nt, Homo sapiens
  misc_RNA (1)...(19): siRNA sense strand
ggauggucguguguucauu

SEQ ID NO: 1738207 - RNA, 19 nt, Homo sapiens
  misc_RNA (1)...(19): siRNA sense strand
gccaaugggaaguaaagaa

SEQ ID NO: 1738208 - RNA, 19 nt, Homo sapiens
  misc_RNA (1)...(19): siRNA sense strand
aaacccaauuacaucaaga

SEQ ID NO: 1738209 - RNA, 19 nt, Homo sapiens
  misc_RNA (1)...(19): siRNA sense strand
cagaaacccaauuacauca

SEQ ID NO: 1738210 - RNA, 19 nt, Homo sapiens
  misc_RNA (1)...(19): siRNA sense strand
gaccggaaagucauuaucu

SEQ ID NO: 1738211 - RNA, 19 nt, Homo sapiens
  misc_RNA (1)...(19): siRNA sense strand
acgcccagauggacuacua

SEQ ID NO: 1738212 - RNA, 19 nt, Homo sapiens
  misc_RNA (1)...(19): siRNA sense strand
gugcuccuaugaccggaaa

SEQ ID NO: 1738213 - RNA, 19 nt, Homo sapiens
  misc_RNA (1)...(19): siRNA sense strand
aaugggaaguaaagaagau

SEQ ID NO: 1738214 - RNA, 19 nt, Homo sapiens
  misc_RNA (1)...(19): siRNA sense strand
ccaaugggaaguaaagaag

SEQ ID NO: 1738215 - RNA, 19 nt, Homo sapiens
  misc_RNA (1)...(19): siRNA sense strand
ggagaagagccacgagcau

SEQ ID NO: 1738216 - RNA, 19 nt, Homo sapiens
  misc_RNA (1)...(19): siRNA sense strand
caucaagagguuugcauca

SEQ ID NO: 1738217 - RNA, 19 nt, Homo sapiens
  misc_RNA (1)...(19): siRNA sense strand
uaauuaacacuguggauac

SEQ ID NO: 1738218 - RNA, 19 nt, Homo sapiens
  misc_RNA (1)...(19): siRNA sense strand
gugaugaugccucaagcaa

SEQ ID NO: 1738219 - RNA, 19 nt, Homo sapiens
  misc_RNA (1)...(19): siRNA sense strand
caaugggaaguaaagaaga

SEQ ID NO: 1738220 - RNA, 19 nt, Homo sapiens
  misc_RNA (1)...(19): siRNA sense strand
ggucaugaggguccugugu

SEQ ID NO: 1738221 - RNA, 19 nt, Homo sapiens
  misc_RNA (1)...(19): siRNA sense strand
uggaaggagucaguugaug

SEQ ID NO: 1738222 - RNA, 19 nt, Homo sapiens
  misc_RNA (1)...(19): siRNA sense strand
gaagcuagaagcgcacagu

SEQ ID NO: 1738223 - RNA, 19 nt, Homo sapiens
  misc_RNA (1)...(19): siRNA sense strand
guaccuggaagccucauag

SEQ ID NO: 1738224 - RNA, 19 nt, Homo sapiens
  misc_RNA (1)...(19): siRNA sense strand
uggcaucgugcuccuauga

SEQ ID NO: 1738225 - RNA, 19 nt, Homo sapiens
  misc_RNA (1)...(19): siRNA sense strand
aauggagggcagauccuua

SEQ ID NO: 1738226 - RNA, 19 nt, Homo sapiens
  misc_RNA (1)...(19): siRNA sense strand
cguaucagcaucagugaca

SEQ ID NO: 1738227 - RNA, 19 nt, Homo sapiens
  misc_RNA (1)...(19): siRNA sense strand
ucagacagguccgucaaaa

SEQ ID NO: 1738228 - RNA, 19 nt, Homo sapiens
  misc_RNA (1)...(19): siRNA sense strand
gggcagugggugugcauca

SEQ ID NO: 1738229 - RNA, 19 nt, Homo sapiens
  misc_RNA (1)...(19): siRNA sense strand
caacauccuggcugucucu

SEQ ID NO: 1738230 - RNA, 19 nt, Homo sapiens
  misc_RNA (1)...(19): siRNA sense strand
ugcacaaguucaacgaugu

SEQ ID NO: 1738231 - RNA, 19 nt, Homo sapiens
  misc_RNA (1)...(19): siRNA sense strand
gugacuggguucgagaugu

SEQ ID NO: 1738232 - RNA, 19 nt, Homo sapiens
  misc_RNA (1)...(19): siRNA sense strand
caucagacagguccgucaa

SEQ ID NO: 1738233 - RNA, 19 nt, Homo sapiens
  misc_RNA (1)...(19): siRNA sense strand
gggaaguaaagaagaucaa

SEQ ID NO: 1738234 - RNA, 19 nt, Homo sapiens
  misc_RNA (1)...(19): siRNA sense strand
gcagugggugugcaucagu

SEQ ID NO: 1738235 - RNA, 19 nt, Homo sapiens
  misc_RNA (1)...(19): siRNA sense strand
gcugugacaaccucaucaa

SEQ ID NO: 1738236 - RNA, 19 nt, Homo sapiens
  misc_RNA (1)...(19): siRNA sense strand
gaaacuagcucagauuuau

SEQ ID NO: 1738237 - RNA, 19 nt, Homo sapiens
  misc_RNA (1)...(19): siRNA sense strand
ccacgaagaucucaucaua

SEQ ID NO: 1738238 - RNA, 19 nt, Homo sapiens
  misc_RNA (1)...(19): siRNA sense strand
caacaaacuucguaaacua

SEQ ID NO: 1738239 - RNA, 19 nt, Homo sapiens
  misc_RNA (1)...(19): siRNA sense strand
gaagaagauuauaggcuua

SEQ ID NO: 1738240 - RNA, 19 nt, Homo sapiens
  misc_RNA (1)...(19): siRNA sense strand
gaagucagauggaccgauu

SEQ ID NO: 1738241 - RNA, 19 nt, Homo sapiens
  misc_RNA (1)...(19): siRNA sense strand
gaaggaagcucaucaucag

SEQ ID NO: 1738242 - RNA, 19 nt, Homo sapiens
  misc_RNA (1)...(19): siRNA sense strand
gaacauccuuugguaaaug

SEQ ID NO: 1738243 - RNA, 19 nt, Homo sapiens
  misc_RNA (1)...(19): siRNA sense strand
cagagaaaguguuguguaa

SEQ ID NO: 1738244 - RNA, 19 nt, Homo sapiens
  misc_RNA (1)...(19): siRNA sense strand
acagagaccuccaaccaua

SEQ ID NO: 1738245 - RNA, 19 nt, Homo sapiens
  misc_RNA (1)...(19): siRNA sense strand
uaaauaaccugagugaaga

SEQ ID NO: 1738246 - RNA, 19 nt, Homo sapiens
  misc_RNA (1)...(19): siRNA sense strand
cauaguaucucaucucaga

SEQ ID NO: 1738247 - RNA, 19 nt, Homo sapiens
  misc_RNA (1)...(19): siRNA sense strand
gaagaucucaucauaguau

SEQ ID NO: 1738248 - RNA, 19 nt, Homo sapiens
  misc_RNA (1)...(19): siRNA sense strand
aaacaacacugucaccuau

SEQ ID NO: 1738249 - RNA, 19 nt, Homo sapiens
  misc_RNA (1)...(19): siRNA sense strand
cagauucaguuuagagaua

SEQ ID NO: 1738250 - RNA, 19 nt, Homo sapiens
  misc_RNA (1)...(19): siRNA sense strand
ggaggagacucuucagaug

SEQ ID NO: 1738251 - RNA, 19 nt, Homo sapiens
  misc_RNA (1)...(19): siRNA sense strand
ggaaauacaacaagaagug

SEQ ID NO: 1738252 - RNA, 19 nt, Homo sapiens
  misc_RNA (1)...(19): siRNA sense strand
gcacagcgcagaagucaga

SEQ ID NO: 1738253 - RNA, 19 nt, Homo sapiens
  misc_RNA (1)...(19): siRNA sense strand
guaaauaaccugagugaag

SEQ ID NO: 1738254 - RNA, 19 nt, Homo sapiens
  misc_RNA (1)...(19): siRNA sense strand
gaagcuuucuaucaauuug

SEQ ID NO: 1738255 - RNA, 19 nt, Homo sapiens
  misc_RNA (1)...(19): siRNA sense strand
uaaaugaggaugaugauga

SEQ ID NO: 1738256 - RNA, 19 nt, Homo sapiens
  misc_RNA (1)...(19): siRNA sense strand
gagaauaucggcagagaga

SEQ ID NO: 1738257 - RNA, 19 nt, Homo sapiens
  misc_RNA (1)...(19): siRNA sense strand
gacuacaucuguugcaauu

SEQ ID NO: 1738258 - RNA, 19 nt, Homo sapiens
  misc_RNA (1)...(19): siRNA sense strand
aaacaguggugauuucaga

SEQ ID NO: 1738259 - RNA, 19 nt, Homo sapiens
  misc_RNA (1)...(19): siRNA sense strand
cuagaggacucaccaaaga

SEQ ID NO: 1738260 - RNA, 19 nt, Homo sapiens
  misc_RNA (1)...(19): siRNA sense strand
cguagaaucuuaaauacug

SEQ ID NO: 1738261 - RNA, 19 nt, Homo sapiens
  misc_RNA (1)...(19): siRNA sense strand
gcaacaaacuucguaaacu

SEQ ID NO: 1738262 - RNA, 19 nt, Homo sapiens
  misc_RNA (1)...(19): siRNA sense strand
caacugaagcguuaacaga

SEQ ID NO: 1738263 - RNA, 19 nt, Homo sapiens
  misc_RNA (1)...(19): siRNA sense strand
cugcaucgaucgcugguua

SEQ ID NO: 1738264 - RNA, 19 nt, Homo sapiens
  misc_RNA (1)...(19): siRNA sense strand
gagaaaauguggaaaacaa

SEQ ID NO: 1738265 - RNA, 19 nt, Homo sapiens
  misc_RNA (1)...(19): siRNA sense strand
aagaacagauugacaacuu

SEQ ID NO: 1738266 - RNA, 19 nt, Homo sapiens
  misc_RNA (1)...(19): siRNA sense strand
ggacagagaccuccaacca

SEQ ID NO: 1738267 - RNA, 19 nt, Homo sapiens
  misc_RNA (1)...(19): siRNA sense strand
gcaaagaggaaaccaaucu

SEQ ID NO: 1738268 - RNA, 19 nt, Homo sapiens
  misc_RNA (1)...(19): siRNA sense strand
ccaaagaacagauugacaa

SEQ ID NO: 1738269 - RNA, 19 nt, Homo sapiens
  misc_RNA (1)...(19): siRNA sense strand
cuacaucuguugcaauuca

SEQ ID NO: 1738270 - RNA, 19 nt, Homo sapiens
  misc_RNA (1)...(19): siRNA sense strand
gggccugaguugcuaagua

SEQ ID NO: 1738271 - RNA, 19 nt, Homo sapiens
  misc_RNA (1)...(19): siRNA sense strand
gauuucagauucaguuuag

SEQ ID NO: 1738272 - RNA, 19 nt, Homo sapiens
  misc_RNA (1)...(19): siRNA sense strand
cagaugaugugucuaaugg

SEQ ID NO: 1738273 - RNA, 19 nt, Homo sapiens
  misc_RNA (1)...(19): siRNA sense strand
gcaauucagaccauguuaa

SEQ ID NO: 1738274 - RNA, 19 nt, Homo sapiens
  misc_RNA (1)...(19): siRNA sense strand
cagacaaacuggaaauaca

SEQ ID NO: 1738275 - RNA, 19 nt, Homo sapiens
  misc_RNA (1)...(19): siRNA sense strand
aauucuaccuguccuauuu

SEQ ID NO: 1738276 - RNA, 19 nt, Homo sapiens
  misc_RNA (1)...(19): siRNA sense strand
guacagugauagcgacuca

SEQ ID NO: 1738277 - RNA, 19 nt, Homo sapiens
  misc_RNA (1)...(19): siRNA sense strand
gaagauuauaggcuuauga

SEQ ID NO: 1738278 - RNA, 19 nt, Homo sapiens
  misc_RNA (1)...(19): siRNA sense strand
gugagaaccuaugucagua

SEQ ID NO: 1738279 - RNA, 19 nt, Homo sapiens
  misc_RNA (1)...(19): siRNA sense strand
caaacaacacugucaccua

SEQ ID NO: 1738280 - RNA, 19 nt, Homo sapiens
  misc_RNA (1)...(19): siRNA sense strand
uaagugagacuacaucugu

SEQ ID NO: 1738281 - RNA, 19 nt, Homo sapiens
  misc_RNA (1)...(19): siRNA sense strand
gaggagacucuucagauga

SEQ ID NO: 1738282 - RNA, 19 nt, Homo sapiens
  misc_RNA (1)...(19): siRNA sense strand
gaaccuaugucaguaccau

SEQ ID NO: 1738283 - RNA, 19 nt, Homo sapiens
  misc_RNA (1)...(19): siRNA sense strand
agacgacuacagcaaauua

SEQ ID NO: 1738284 - RNA, 19 nt, Homo sapiens
  misc_RNA (1)...(19): siRNA sense strand
guguuugcauuacagaaua

SEQ ID NO: 1738285 - RNA, 19 nt, Homo sapiens
  misc_RNA (1)...(19): siRNA sense strand
acaacacugucaccuauga

SEQ ID NO: 1738286 - RNA, 19 nt, Homo sapiens
  misc_RNA (1)...(19): siRNA sense strand
caaaggaaguggugaucag

SEQ ID NO: 1738287 - RNA, 19 nt, Homo sapiens
  misc_RNA (1)...(19): siRNA sense strand
uagacuggcuuaacucugu

SEQ ID NO: 1738288 - RNA, 19 nt, Homo sapiens
  misc_RNA (1)...(19): siRNA sense strand
gaucgcugguuaucugaga

SEQ ID NO: 1738289 - RNA, 19 nt, Homo sapiens
  misc_RNA (1)...(19): siRNA sense strand
acgaagaucucaucauagu

SEQ ID NO: 1738290 - RNA, 19 nt, Homo sapiens
  misc_RNA (1)...(19): siRNA sense strand
ggucaccucugcauccaau

SEQ ID NO: 1738291 - RNA, 19 nt, Homo sapiens
  misc_RNA (1)...(19): siRNA sense strand
uaaccugagugaagaagau

SEQ ID NO: 1738292 - RNA, 19 nt, Homo sapiens
  misc_RNA (1)...(19): siRNA sense strand
gagugaaauuccacgaaga

SEQ ID NO: 1738293 - RNA, 19 nt, Homo sapiens
  misc_RNA (1)...(19): siRNA sense strand
ggccugaguugcuaaguag

SEQ ID NO: 1738294 - RNA, 19 nt, Homo sapiens
  misc_RNA (1)...(19): siRNA sense strand
ccagucacauuugaugaaa

SEQ ID NO: 1738295 - RNA, 19 nt, Homo sapiens
  misc_RNA (1)...(19): siRNA sense strand
agcaagagcugaaagaagu

SEQ ID NO: 1738296 - RNA, 19 nt, Homo sapiens
  misc_RNA (1)...(19): siRNA sense strand
cagaaacuagcucagauuu

SEQ ID NO: 1738297 - RNA, 19 nt, Homo sapiens
  misc_RNA (1)...(19): siRNA sense strand
gaaagugaacgaggagguu

SEQ ID NO: 1738298 - RNA, 19 nt, Homo sapiens
  misc_RNA (1)...(19): siRNA sense strand
gcaagagcugaaagaagua

SEQ ID NO: 1738299 - RNA, 19 nt, Homo sapiens
  misc_RNA (1)...(19): siRNA sense strand
gcaaggccaucuagaucag

SEQ ID NO: 1738300 - RNA, 19 nt, Homo sapiens
  misc_RNA (1)...(19): siRNA sense strand
gagacuacaucuguugcaa

SEQ ID NO: 1738301 - RNA, 19 nt, Homo sapiens
  misc_RNA (1)...(19): siRNA sense strand
auuauaggcuuaugagaga

SEQ ID NO: 1738302 - RNA, 19 nt, Homo sapiens
  misc_RNA (1)...(19): siRNA sense strand
gcaaaacucagaugaaaau

SEQ ID NO: 1738303 - RNA, 19 nt, Homo sapiens
  misc_RNA (1)...(19): siRNA sense strand
ugaaggcaguaaugaagga

SEQ ID NO: 1738304 - RNA, 19 nt, Homo sapiens
  misc_RNA (1)...(19): siRNA sense strand
ucaaggagcagguucuuca

SEQ ID NO: 1738305 - RNA, 19 nt, Homo sapiens
  misc_RNA (1)...(19): siRNA sense strand
gggcaaagaggaaaccaau

SEQ ID NO: 1738306 - RNA, 19 nt, Homo sapiens
  misc_RNA (1)...(19): siRNA sense strand
gaucagaacgaaauucaac

SEQ ID NO: 1738307 - RNA, 19 nt, Homo sapiens
  misc_RNA (1)...(19): siRNA sense strand
aaacucagauuccaaugac

SEQ ID NO: 1738308 - RNA, 19 nt, Homo sapiens
  misc_RNA (1)...(19): siRNA sense strand
ugaaggaagcucaucauca

SEQ ID NO: 1738309 - RNA, 19 nt, Homo sapiens
  misc_RNA (1)...(19): siRNA sense strand
agaaacuagcucagauuua

SEQ ID NO: 1738310 - RNA, 19 nt, Homo sapiens
  misc_RNA (1)...(19): siRNA sense strand
ggagcagguucuucagaca

SEQ ID NO: 1738311 - RNA, 19 nt, Homo sapiens
  misc_RNA (1)...(19): siRNA sense strand
gaaauuccacgaagaucuc

SEQ ID NO: 1738312 - RNA, 19 nt, Homo sapiens
  misc_RNA (1)...(19): siRNA sense strand
ggcagauaaugacagguuu

SEQ ID NO: 1738313 - RNA, 19 nt, Homo sapiens
  misc_RNA (1)...(19): siRNA sense strand
gaagugggcaaagaggaaa

SEQ ID NO: 1738314 - RNA, 19 nt, Homo sapiens
  misc_RNA (1)...(19): siRNA sense strand
ccauaguccuugaucuuca

SEQ ID NO: 1738315 - RNA, 19 nt, Homo sapiens
  misc_RNA (1)...(19): siRNA sense strand
gagcaagagcugaaagaag

SEQ ID NO: 1738316 - RNA, 19 nt, Homo sapiens
  misc_RNA (1)...(19): siRNA sense strand
auaauagacuggcuuaacu

SEQ ID NO: 1738317 - RNA, 19 nt, Homo sapiens
  misc_RNA (1)...(19): siRNA sense strand
ugagacgacuacagcaaau

SEQ ID NO: 1738318 - RNA, 19 nt, Homo sapiens
  misc_RNA (1)...(19): siRNA sense strand
ggucagaggagggcaagaa

SEQ ID NO: 1738319 - RNA, 19 nt, Homo sapiens
  misc_RNA (1)...(19): siRNA sense strand
gacuacagcaaauuaaaga

SEQ ID NO: 1738320 - RNA, 19 nt, Homo sapiens
  misc_RNA (1)...(19): siRNA sense strand
cuucagaugaugugucuaa

SEQ ID NO: 1738321 - RNA, 19 nt, Homo sapiens
  misc_RNA (1)...(19): siRNA sense strand
agaacagauugacaacuug

SEQ ID NO: 1738322 - RNA, 19 nt, Homo sapiens
  misc_RNA (1)...(19): siRNA sense strand
ccaucuagaucagaacgaa

SEQ ID NO: 1738323 - RNA, 19 nt, Homo sapiens
  misc_RNA (1)...(19): siRNA sense strand
aacaagaagugggcaaaga

SEQ ID NO: 1738324 - RNA, 19 nt, Homo sapiens
  misc_RNA (1)...(19): siRNA sense strand
gacauugaggcagcaaaua

SEQ ID NO: 1738325 - RNA, 19 nt, Homo sapiens
  misc_RNA (1)...(19): siRNA sense strand
acagagaaaguguugugua

SEQ ID NO: 1738326 - RNA, 19 nt, Homo sapiens
  misc_RNA (1)...(19): siRNA sense strand
gaauucuaccuguccuauu

SEQ ID NO: 1738327 - RNA, 19 nt, Homo sapiens
  misc_RNA (1)...(19): siRNA sense strand
gcgagagggucgacauagg

SEQ ID NO: 1738328 - RNA, 19 nt, Homo sapiens
  misc_RNA (1)...(19): siRNA sense strand
gaaaaugagccaucugcaa

SEQ ID NO: 1738329 - RNA, 19 nt, Homo sapiens
  misc_RNA (1)...(19): siRNA sense strand
ugaggaugaugaugaccaa

SEQ ID NO: 1738330 - RNA, 19 nt, Homo sapiens
  misc_RNA (1)...(19): siRNA sense strand
gcagagucacggaguggaa

SEQ ID NO: 1738331 - RNA, 19 nt, Homo sapiens
  misc_RNA (1)...(19): siRNA sense strand
ggugugagaaccuauguca

SEQ ID NO: 1738332 - RNA, 19 nt, Homo sapiens
  misc_RNA (1)...(19): siRNA sense strand
gauagcauagccagcagaa

SEQ ID NO: 1738333 - RNA, 19 nt, Homo sapiens
  misc_RNA (1)...(19): siRNA sense strand
ugaacauccuuugguaaau

SEQ ID NO: 1738334 - RNA, 19 nt, Homo sapiens
  misc_RNA (1)...(19): siRNA sense strand
ugaaaguacugaggaagag

SEQ ID NO: 1738335 - RNA, 19 nt, Homo sapiens
  misc_RNA (1)...(19): siRNA sense strand
gugaaaguacugaggaaga

SEQ ID NO: 1738336 - RNA, 19 nt, Homo sapiens
  misc_RNA (1)...(19): siRNA sense strand
gaaacuagcucagauuuau

SEQ ID NO: 1738337 - RNA, 19 nt, Homo sapiens
  misc_RNA (1)...(19): siRNA sense strand
ccacgaagaucucaucaua

SEQ ID NO: 1738338 - RNA, 19 nt, Homo sapiens
  misc_RNA (1)...(19): siRNA sense strand
caacaaacuucguaaacua

SEQ ID NO: 1738339 - RNA, 19 nt, Homo sapiens
  misc_RNA (1)...(19): siRNA sense strand
gaagaagauuauaggcuua

SEQ ID NO: 1738340 - RNA, 19 nt, Homo sapiens
  misc_RNA (1)...(19): siRNA sense strand
gaagucagauggaccgauu

SEQ ID NO: 1738341 - RNA, 19 nt, Homo sapiens
  misc_RNA (1)...(19): siRNA sense strand
gaaggaagcucaucaucag

SEQ ID NO: 1738342 - RNA, 19 nt, Homo sapiens
  misc_RNA (1)...(19): siRNA sense strand
gaacauccuuugguaaaug

SEQ ID NO: 1738343 - RNA, 19 nt, Homo sapiens
  misc_RNA (1)...(19): siRNA sense strand
cagagaaaguguuguguaa

SEQ ID NO: 1738344 - RNA, 19 nt, Homo sapiens
  misc_RNA (1)...(19): siRNA sense strand
acagagaccuccaaccaua

SEQ ID NO: 1738345 - RNA, 19 nt, Homo sapiens
  misc_RNA (1)...(19): siRNA sense strand
uaaauaaccugagugaaga

SEQ ID NO: 1738346 - RNA, 19 nt, Homo sapiens
  misc_RNA (1)...(19): siRNA sense strand
cauaguaucucaucucaga

SEQ ID NO: 1738347 - RNA, 19 nt, Homo sapiens
  misc_RNA (1)...(19): siRNA sense strand
gaagaucucaucauaguau

SEQ ID NO: 1738348 - RNA, 19 nt, Homo sapiens
  misc_RNA (1)...(19): siRNA sense strand
aaacaacacugucaccuau

SEQ ID NO: 1738349 - RNA, 19 nt, Homo sapiens
  misc_RNA (1)...(19): siRNA sense strand
cagauucaguuuagagaua

SEQ ID NO: 1738350 - RNA, 19 nt, Homo sapiens
  misc_RNA (1)...(19): siRNA sense strand
ggaggagacucuucagaug

SEQ ID NO: 1738351 - RNA, 19 nt, Homo sapiens
  misc_RNA (1)...(19): siRNA sense strand
ggaaauacaacaagaagug

SEQ ID NO: 1738352 - RNA, 19 nt, Homo sapiens
  misc_RNA (1)...(19): siRNA sense strand
gcacagcgcagaagucaga

SEQ ID NO: 1738353 - RNA, 19 nt, Homo sapiens
  misc_RNA (1)...(19): siRNA sense strand
guaaauaaccugagugaag

SEQ ID NO: 1738354 - RNA, 19 nt, Homo sapiens
  misc_RNA (1)...(19): siRNA sense strand
gaagcuuucuaucaauuug

SEQ ID NO: 1738355 - RNA, 19 nt, Homo sapiens
  misc_RNA (1)...(19): siRNA sense strand
uaaaugaggaugaugauga

SEQ ID NO: 1738356 - RNA, 19 nt, Homo sapiens
  misc_RNA (1)...(19): siRNA sense strand
gagaauaucggcagagaga

SEQ ID NO: 1738357 - RNA, 19 nt, Homo sapiens
  misc_RNA (1)...(19): siRNA sense strand
gacuacaucuguugcaauu

SEQ ID NO: 1738358 - RNA, 19 nt, Homo sapiens
  misc_RNA (1)...(19): siRNA sense strand
aaacaguggugauuucaga

SEQ ID NO: 1738359 - RNA, 19 nt, Homo sapiens
  misc_RNA (1)...(19): siRNA sense strand
cuagaggacucaccaaaga

SEQ ID NO: 1738360 - RNA, 19 nt, Homo sapiens
  misc_RNA (1)...(19): siRNA sense strand
cguagaaucuuaaauacug

SEQ ID NO: 1738361 - RNA, 19 nt, Homo sapiens
  misc_RNA (1)...(19): siRNA sense strand
gcaacaaacuucguaaacu

SEQ ID NO: 1738362 - RNA, 19 nt, Homo sapiens
  misc_RNA (1)...(19): siRNA sense strand
caacugaagcguuaacaga

SEQ ID NO: 1738363 - RNA, 19 nt, Homo sapiens
  misc_RNA (1)...(19): siRNA sense strand
cugcaucgaucgcugguua

SEQ ID NO: 1738364 - RNA, 19 nt, Homo sapiens
  misc_RNA (1)...(19): siRNA sense strand
gagaaaauguggaaaacaa

SEQ ID NO: 1738365 - RNA, 19 nt, Homo sapiens
  misc_RNA (1)...(19): siRNA sense strand
aagaacagauugacaacuu

SEQ ID NO: 1738366 - RNA, 19 nt, Homo sapiens
  misc_RNA (1)...(19): siRNA sense strand
ggacagagaccuccaacca

SEQ ID NO: 1738367 - RNA, 19 nt, Homo sapiens
  misc_RNA (1)...(19): siRNA sense strand
gcaaagaggaaaccaaucu

SEQ ID NO: 1738368 - RNA, 19 nt, Homo sapiens
  misc_RNA (1)...(19): siRNA sense strand
ccaaagaacagauugacaa

SEQ ID NO: 1738369 - RNA, 19 nt, Homo sapiens
  misc_RNA (1)...(19): siRNA sense strand
cuacaucuguugcaauuca

SEQ ID NO: 1738370 - RNA, 19 nt, Homo sapiens
  misc_RNA (1)...(19): siRNA sense strand
gggccugaguugcuaagua

SEQ ID NO: 1738371 - RNA, 19 nt, Homo sapiens
  misc_RNA (1)...(19): siRNA sense strand
gauuucagauucaguuuag

SEQ ID NO: 1738372 - RNA, 19 nt, Homo sapiens
  misc_RNA (1)...(19): siRNA sense strand
cagaugaugugucuaaugg

SEQ ID NO: 1738373 - RNA, 19 nt, Homo sapiens
  misc_RNA (1)...(19): siRNA sense strand
gcaauucagaccauguuaa

SEQ ID NO: 1738374 - RNA, 19 nt, Homo sapiens
  misc_RNA (1)...(19): siRNA sense strand
cagacaaacuggaaauaca

SEQ ID NO: 1738375 - RNA, 19 nt, Homo sapiens
  misc_RNA (1)...(19): siRNA sense strand
aauucuaccuguccuauuu

SEQ ID NO: 1738376 - RNA, 19 nt, Homo sapiens
  misc_RNA (1)...(19): siRNA sense strand
guacagugauagcgacuca

SEQ ID NO: 1738377 - RNA, 19 nt, Homo sapiens
  misc_RNA (1)...(19): siRNA sense strand
gaagauuauaggcuuauga

SEQ ID NO: 1738378 - RNA, 19 nt, Homo sapiens
  misc_RNA (1)...(19): siRNA sense strand
gugagaaccuaugucagua

SEQ ID NO: 1738379 - RNA, 19 nt, Homo sapiens
  misc_RNA (1)...(19): siRNA sense strand
caaacaacacugucaccua

SEQ ID NO: 1738380 - RNA, 19 nt, Homo sapiens
  misc_RNA (1)...(19): siRNA sense strand
uaagugagacuacaucugu

SEQ ID NO: 1738381 - RNA, 19 nt, Homo sapiens
  misc_RNA (1)...(19): siRNA sense strand
gaggagacucuucagauga

SEQ ID NO: 1738382 - RNA, 19 nt, Homo sapiens
  misc_RNA (1)...(19): siRNA sense strand
gaaccuaugucaguaccau

SEQ ID NO: 1738383 - RNA, 19 nt, Homo sapiens
  misc_RNA (1)...(19): siRNA sense strand
agacgacuacagcaaauua

SEQ ID NO: 1738384 - RNA, 19 nt, Homo sapiens
  misc_RNA (1)...(19): siRNA sense strand
guguuugcauuacagaaua

SEQ ID NO: 1738385 - RNA, 19 nt, Homo sapiens
  misc_RNA (1)...(19): siRNA sense strand
acaacacugucaccuauga

SEQ ID NO: 1738386 - RNA, 19 nt, Homo sapiens
  misc_RNA (1)...(19): siRNA sense strand
caaaggaaguggugaucag

SEQ ID NO: 1738387 - RNA, 19 nt, Homo sapiens
  misc_RNA (1)...(19): siRNA sense strand
uagacuggcuuaacucugu

SEQ ID NO: 1738388 - RNA, 19 nt, Homo sapiens
  misc_RNA (1)...(19): siRNA sense strand
gaucgcugguuaucugaga

SEQ ID NO: 1738389 - RNA, 19 nt, Homo sapiens
  misc_RNA (1)...(19): siRNA sense strand
acgaagaucucaucauagu

SEQ ID NO: 1738390 - RNA, 19 nt, Homo sapiens
  misc_RNA (1)...(19): siRNA sense strand
ggucaccucugcauccaau

SEQ ID NO: 1738391 - RNA, 19 nt, Homo sapiens
  misc_RNA (1)...(19): siRNA sense strand
uaaccugagugaagaagau

SEQ ID NO: 1738392 - RNA, 19 nt, Homo sapiens
  misc_RNA (1)...(19): siRNA sense strand
gagugaaauuccacgaaga

SEQ ID NO: 1738393 - RNA, 19 nt, Homo sapiens
  misc_RNA (1)...(19): siRNA sense strand
ggccugaguugcuaaguag

SEQ ID NO: 1738394 - RNA, 19 nt, Homo sapiens
  misc_RNA (1)...(19): siRNA sense strand
ccagucacauuugaugaaa

SEQ ID NO: 1738395 - RNA, 19 nt, Homo sapiens
  misc_RNA (1)...(19): siRNA sense strand
agcaagagcugaaagaagu

SEQ ID NO: 1738396 - RNA, 19 nt, Homo sapiens
  misc_RNA (1)...(19): siRNA sense strand
cagaaacuagcucagauuu

SEQ ID NO: 1738397 - RNA, 19 nt, Homo sapiens
  misc_RNA (1)...(19): siRNA sense strand
gaaagugaacgaggagguu

SEQ ID NO: 1738398 - RNA, 19 nt, Homo sapiens
  misc_RNA (1)...(19): siRNA sense strand
gcaagagcugaaagaagua

SEQ ID NO: 1738399 - RNA, 19 nt, Homo sapiens
  misc_RNA (1)...(19): siRNA sense strand
gcaaggccaucuagaucag

SEQ ID NO: 1738400 - RNA, 19 nt, Homo sapiens
  misc_RNA (1)...(19): siRNA sense strand
gagacuacaucuguugcaa

SEQ ID NO: 1738401 - RNA, 19 nt, Homo sapiens
  misc_RNA (1)...(19): siRNA sense strand
auuauaggcuuaugagaga

SEQ ID NO: 1738402 - RNA, 19 nt, Homo sapiens
  misc_RNA (1)...(19): siRNA sense strand
gcaaaacucagaugaaaau

SEQ ID NO: 1738403 - RNA, 19 nt, Homo sapiens
  misc_RNA (1)...(19): siRNA sense strand
ugaaggcaguaaugaagga

SEQ ID NO: 1738404 - RNA, 19 nt, Homo sapiens
  misc_RNA (1)...(19): siRNA sense strand
ucaaggagcagguucuuca

SEQ ID NO: 1738405 - RNA, 19 nt, Homo sapiens
  misc_RNA (1)...(19): siRNA sense strand
gggcaaagaggaaaccaau

SEQ ID NO: 1738406 - RNA, 19 nt, Homo sapiens
  misc_RNA (1)...(19): siRNA sense strand
gaucagaacgaaauucaac

SEQ ID NO: 1738407 - RNA, 19 nt, Homo sapiens
  misc_RNA (1)...(19): siRNA sense strand
aaacucagauuccaaugac

SEQ ID NO: 1738408 - RNA, 19 nt, Homo sapiens
  misc_RNA (1)...(19): siRNA sense strand
ugaaggaagcucaucauca

SEQ ID NO: 1738409 - RNA, 19 nt, Homo sapiens
  misc_RNA (1)...(19): siRNA sense strand
agaaacuagcucagauuua

SEQ ID NO: 1738410 - RNA, 19 nt, Homo sapiens
  misc_RNA (1)...(19): siRNA sense strand
ggagcagguucuucagaca

SEQ ID NO: 1738411 - RNA, 19 nt, Homo sapiens
  misc_RNA (1)...(19): siRNA sense strand
gaaauuccacgaagaucuc

SEQ ID NO: 1738412 - RNA, 19 nt, Homo sapiens
  misc_RNA (1)...(19): siRNA sense strand
ggcagauaaugacagguuu

SEQ ID NO: 1738413 - RNA, 19 nt, Homo sapiens
  misc_RNA (1)...(19): siRNA sense strand
gaagugggcaaagaggaaa

SEQ ID NO: 1738414 - RNA, 19 nt, Homo sapiens
  misc_RNA (1)...(19): siRNA sense strand
ccauaguccuugaucuuca

SEQ ID NO: 1738415 - RNA, 19 nt, Homo sapiens
  misc_RNA (1)...(19): siRNA sense strand
gagcaagagcugaaagaag

SEQ ID NO: 1738416 - RNA, 19 nt, Homo sapiens
  misc_RNA (1)...(19): siRNA sense strand
auaauagacuggcuuaacu

SEQ ID NO: 1738417 - RNA, 19 nt, Homo sapiens
  misc_RNA (1)...(19): siRNA sense strand
ugagacgacuacagcaaau

SEQ ID NO: 1738418 - RNA, 19 nt, Homo sapiens
  misc_RNA (1)...(19): siRNA sense strand
ggucagaggagggcaagaa

SEQ ID NO: 1738419 - RNA, 19 nt, Homo sapiens
  misc_RNA (1)...(19): siRNA sense strand
gacuacagcaaauuaaaga

SEQ ID NO: 1738420 - RNA, 19 nt, Homo sapiens
  misc_RNA (1)...(19): siRNA sense strand
cuucagaugaugugucuaa

SEQ ID NO: 1738421 - RNA, 19 nt, Homo sapiens
  misc_RNA (1)...(19): siRNA sense strand
agaacagauugacaacuug

SEQ ID NO: 1738422 - RNA, 19 nt, Homo sapiens
  misc_RNA (1)...(19): siRNA sense strand
ccaucuagaucagaacgaa

SEQ ID NO: 1738423 - RNA, 19 nt, Homo sapiens
  misc_RNA (1)...(19): siRNA sense strand
aacaagaagugggcaaaga

SEQ ID NO: 1738424 - RNA, 19 nt, Homo sapiens
  misc_RNA (1)...(19): siRNA sense strand
gacauugaggcagcaaaua

SEQ ID NO: 1738425 - RNA, 19 nt, Homo sapiens
  misc_RNA (1)...(19): siRNA sense strand
acagagaaaguguugugua

SEQ ID NO: 1738426 - RNA, 19 nt, Homo sapiens
  misc_RNA (1)...(19): siRNA sense strand
gaauucuaccuguccuauu

SEQ ID NO: 1738427 - RNA, 19 nt, Homo sapiens
  misc_RNA (1)...(19): siRNA sense strand
gcgagagggucgacauagg

SEQ ID NO: 1738428 - RNA, 19 nt, Homo sapiens
  misc_RNA (1)...(19): siRNA sense strand
gaaaaugagccaucugcaa

SEQ ID NO: 1738429 - RNA, 19 nt, Homo sapiens
  misc_RNA (1)...(19): siRNA sense strand
ugaggaugaugaugaccaa

SEQ ID NO: 1738430 - RNA, 19 nt, Homo sapiens
  misc_RNA (1)...(19): siRNA sense strand
gcagagucacggaguggaa

SEQ ID NO: 1738431 - RNA, 19 nt, Homo sapiens
  misc_RNA (1)...(19): siRNA sense strand
ggugugagaaccuauguca

SEQ ID NO: 1738432 - RNA, 19 nt, Homo sapiens
  misc_RNA (1)...(19): siRNA sense strand
gauagcauagccagcagaa

SEQ ID NO: 1738433 - RNA, 19 nt, Homo sapiens
  misc_RNA (1)...(19): siRNA sense strand
ugaacauccuuugguaaau

SEQ ID NO: 1738434 - RNA, 19 nt, Homo sapiens
  misc_RNA (1)...(19): siRNA sense strand
ugaaaguacugaggaagag

SEQ ID NO: 1738435 - RNA, 19 nt, Homo sapiens
  misc_RNA (1)...(19): siRNA sense strand
gugaaaguacugaggaaga

SEQ ID NO: 1738436 - RNA, 19 nt, Homo sapiens
  misc_RNA (1)...(19): siRNA sense strand
gcugagaacuucacuauuu

SEQ ID NO: 1738437 - RNA, 19 nt, Homo sapiens
  misc_RNA (1)...(19): siRNA sense strand
gaucaucuccuacuuugua

SEQ ID NO: 1738438 - RNA, 19 nt, Homo sapiens
  misc_RNA (1)...(19): siRNA sense strand
guacaaagccaagaaguuu

SEQ ID NO: 1738439 - RNA, 19 nt, Homo sapiens
  misc_RNA (1)...(19): siRNA sense strand
ucauggaugugucugauua

SEQ ID NO: 1738440 - RNA, 19 nt, Homo sapiens
  misc_RNA (1)...(19): siRNA sense strand
ccaagaugauuguuacuga

SEQ ID NO: 1738441 - RNA, 19 nt, Homo sapiens
  misc_RNA (1)...(19): siRNA sense strand
ggagaaauaccgcugugua

SEQ ID NO: 1738442 - RNA, 19 nt, Homo sapiens
  misc_RNA (1)...(19): siRNA sense strand
gagaagcaguccaccgauu

SEQ ID NO: 1738443 - RNA, 19 nt, Homo sapiens
  misc_RNA (1)...(19): siRNA sense strand
gaucaucaaccgaguaguu

SEQ ID NO: 1738444 - RNA, 19 nt, Homo sapiens
  misc_RNA (1)...(19): siRNA sense strand
caagaugauuguuacugaa

SEQ ID NO: 1738445 - RNA, 19 nt, Homo sapiens
  misc_RNA (1)...(19): siRNA sense strand
gaaugagacuacgcugaaa

SEQ ID NO: 1738446 - RNA, 19 nt, Homo sapiens
  misc_RNA (1)...(19): siRNA sense strand
ccaagucggugguugugaa

SEQ ID NO: 1738447 - RNA, 19 nt, Homo sapiens
  misc_RNA (1)...(19): siRNA sense strand
gaacuucacuauuuucauc

SEQ ID NO: 1738448 - RNA, 19 nt, Homo sapiens
  misc_RNA (1)...(19): siRNA sense strand
gcacccuccugaaggcuuu

SEQ ID NO: 1738449 - RNA, 19 nt, Homo sapiens
  misc_RNA (1)...(19): siRNA sense strand
ucaccaagaugauuguuac

SEQ ID NO: 1738450 - RNA, 19 nt, Homo sapiens
  misc_RNA (1)...(19): siRNA sense strand
ugaaugagacuacgcugaa

SEQ ID NO: 1738451 - RNA, 19 nt, Homo sapiens
  misc_RNA (1)...(19): siRNA sense strand
gaagggcuccggacucuac

SEQ ID NO: 1738452 - RNA, 19 nt, Homo sapiens
  misc_RNA (1)...(19): siRNA sense strand
gcuggcaaguucaacauca

SEQ ID NO: 1738453 - RNA, 19 nt, Homo sapiens
  misc_RNA (1)...(19): siRNA sense strand
ggcuacaacuucagguuug

SEQ ID NO: 1738454 - RNA, 19 nt, Homo sapiens
  misc_RNA (1)...(19): siRNA sense strand
cagagagugaggagaaaua

SEQ ID NO: 1738455 - RNA, 19 nt, Homo sapiens
  misc_RNA (1)...(19): siRNA sense strand
ccaacagagucauggaugu

SEQ ID NO: 1738456 - RNA, 19 nt, Homo sapiens
  misc_RNA (1)...(19): siRNA sense strand
ggaguucugggcauuaaga

SEQ ID NO: 1738457 - RNA, 19 nt, Homo sapiens
  misc_RNA (1)...(19): siRNA sense strand
gcaccucggucuuugucau

SEQ ID NO: 1738458 - RNA, 19 nt, Homo sapiens
  misc_RNA (1)...(19): siRNA sense strand
gaacugcauauccgacuuc

SEQ ID NO: 1738459 - RNA, 19 nt, Homo sapiens
  misc_RNA (1)...(19): siRNA sense strand
gcuucgacgugcugguaua

SEQ ID NO: 1738460 - RNA, 19 nt, Homo sapiens
  misc_RNA (1)...(19): siRNA sense strand
ucaagaacagcauccguuu

SEQ ID NO: 1738461 - RNA, 19 nt, Homo sapiens
  misc_RNA (1)...(19): siRNA sense strand
cugaucaucuccuacuuug

SEQ ID NO: 1738462 - RNA, 19 nt, Homo sapiens
  misc_RNA (1)...(19): siRNA sense strand
cgggaaugcuggcaaguuc

SEQ ID NO: 1738463 - RNA, 19 nt, Homo sapiens
  misc_RNA (1)...(19): siRNA sense strand
gcccagagagugaggagaa

SEQ ID NO: 1738464 - RNA, 19 nt, Homo sapiens
  misc_RNA (1)...(19): siRNA sense strand
guggaaacgcccaucauga

SEQ ID NO: 1738465 - RNA, 19 nt, Homo sapiens
  misc_RNA (1)...(19): siRNA sense strand
ggagguggacacaguggaa

SEQ ID NO: 1738466 - RNA, 19 nt, Homo sapiens
  misc_RNA (1)...(19): siRNA sense strand
cugcauauccgacuucuuc

SEQ ID NO: 1738467 - RNA, 19 nt, Homo sapiens
  misc_RNA (1)...(19): siRNA sense strand
ggaaugcuggcaaguucaa

SEQ ID NO: 1738468 - RNA, 19 nt, Homo sapiens
  misc_RNA (1)...(19): siRNA sense strand
uauccgacuucuucaccua

SEQ ID NO: 1738469 - RNA, 19 nt, Homo sapiens
  misc_RNA (1)...(19): siRNA sense strand
gugaagggcuccggacucu

SEQ ID NO: 1738470 - RNA, 19 nt, Homo sapiens
  misc_RNA (1)...(19): siRNA sense strand
aagcugagaacuucacuau

SEQ ID NO: 1738471 - RNA, 19 nt, Homo sapiens
  misc_RNA (1)...(19): siRNA sense strand
caacagagucauggaugug

SEQ ID NO: 1738472 - RNA, 19 nt, Homo sapiens
  misc_RNA (1)...(19): siRNA sense strand
guacgggacacagccauug

SEQ ID NO: 1738473 - RNA, 19 nt, Homo sapiens
  misc_RNA (1)...(19): siRNA sense strand
caaccgaguaguucagcuu

SEQ ID NO: 1738474 - RNA, 19 nt, Homo sapiens
  misc_RNA (1)...(19): siRNA sense strand
gaaaccuccuucccaaccu

SEQ ID NO: 1738475 - RNA, 19 nt, Homo sapiens
  misc_RNA (1)...(19): siRNA sense strand
uggaaacgcccaucaugau

SEQ ID NO: 1738476 - RNA, 19 nt, Homo sapiens
  misc_RNA (1)...(19): siRNA sense strand
caagaacagcauccguuuc

SEQ ID NO: 1738477 - RNA, 19 nt, Homo sapiens
  misc_RNA (1)...(19): siRNA sense strand
ccuaugagaccaccaaguc

SEQ ID NO: 1738478 - RNA, 19 nt, Homo sapiens
  misc_RNA (1)...(19): siRNA sense strand
ugacagccagggacaugaa

SEQ ID NO: 1738479 - RNA, 19 nt, Homo sapiens
  misc_RNA (1)...(19): siRNA sense strand
ucagggcaccucggucuuu

SEQ ID NO: 1738480 - RNA, 19 nt, Homo sapiens
  misc_RNA (1)...(19): siRNA sense strand
gaaguuugaggaggugaau

SEQ ID NO: 1738481 - RNA, 19 nt, Homo sapiens
  misc_RNA (1)...(19): siRNA sense strand
cagggcaccucggucuuug

SEQ ID NO: 1738482 - RNA, 19 nt, Homo sapiens
  misc_RNA (1)...(19): siRNA sense strand
gaaaaucagaugcaaggau

SEQ ID NO: 1738483 - RNA, 19 nt, Homo sapiens
  misc_RNA (1)...(19): siRNA sense strand
ugauggaagcugagaacuu

SEQ ID NO: 1738484 - RNA, 19 nt, Homo sapiens
  misc_RNA (1)...(19): siRNA sense strand
gacaucauccugcucaacu

SEQ ID NO: 1738485 - RNA, 19 nt, Homo sapiens
  misc_RNA (1)...(19): siRNA sense strand
ucagguuugccaaguacua

SEQ ID NO: 1738486 - RNA, 19 nt, Homo sapiens
  misc_RNA (1)...(19): siRNA sense strand
guaccgcacccuccugaag

SEQ ID NO: 1738487 - RNA, 19 nt, Homo sapiens
  misc_RNA (1)...(19): siRNA sense strand
ucugaucaucuccuacuuu

SEQ ID NO: 1738488 - RNA, 19 nt, Homo sapiens
  misc_RNA (1)...(19): siRNA sense strand
ccgacuucuucaccuauga

SEQ ID NO: 1738489 - RNA, 19 nt, Homo sapiens
  misc_RNA (1)...(19): siRNA sense strand
agaagcaguccaccgauuc

SEQ ID NO: 1738490 - RNA, 19 nt, Homo sapiens
  misc_RNA (1)...(19): siRNA sense strand
gagguggacacaguggaaa

SEQ ID NO: 1738491 - RNA, 19 nt, Homo sapiens
  misc_RNA (1)...(19): siRNA sense strand
gggaucaucaaccgaguag

SEQ ID NO: 1738492 - RNA, 19 nt, Homo sapiens
  misc_RNA (1)...(19): siRNA sense strand
gaacauacuucguuucuua

SEQ ID NO: 1738493 - RNA, 19 nt, Homo sapiens
  misc_RNA (1)...(19): siRNA sense strand
gauggugaauugucuuuga

SEQ ID NO: 1738494 - RNA, 19 nt, Homo sapiens
  misc_RNA (1)...(19): siRNA sense strand
gaaaaucaauuccucuuug

SEQ ID NO: 1738495 - RNA, 19 nt, Homo sapiens
  misc_RNA (1)...(19): siRNA sense strand
uggacgaucugcacaauaa

SEQ ID NO: 1738496 - RNA, 19 nt, Homo sapiens
  misc_RNA (1)...(19): siRNA sense strand
cacuaaacauuucucauga

SEQ ID NO: 1738497 - RNA, 19 nt, Homo sapiens
  misc_RNA (1)...(19): siRNA sense strand
caauaagucugcuccugau

SEQ ID NO: 1738498 - RNA, 19 nt, Homo sapiens
  misc_RNA (1)...(19): siRNA sense strand
gaaauucuggcauucuguu

SEQ ID NO: 1738499 - RNA, 19 nt, Homo sapiens
  misc_RNA (1)...(19): siRNA sense strand
uaagaccugugcaguuguu

SEQ ID NO: 1738500 - RNA, 19 nt, Homo sapiens
  misc_RNA (1)...(19): siRNA sense strand
gucaauagcucugauaaaa

SEQ ID NO: 1738501 - RNA, 19 nt, Homo sapiens
  misc_RNA (1)...(19): siRNA sense strand
ugaagaaucgcagguuuaa

SEQ ID NO: 1738502 - RNA, 19 nt, Homo sapiens
  misc_RNA (1)...(19): siRNA sense strand
gaaaggcuggcucuucaau

SEQ ID NO: 1738503 - RNA, 19 nt, Homo sapiens
  misc_RNA (1)...(19): siRNA sense strand
ucgaaaggcuggcucuuca

SEQ ID NO: 1738504 - RNA, 19 nt, Homo sapiens
  misc_RNA (1)...(19): siRNA sense strand
uaagccuggugaugucaua

SEQ ID NO: 1738505 - RNA, 19 nt, Homo sapiens
  misc_RNA (1)...(19): siRNA sense strand
aagaaucgcagguuuaaga

SEQ ID NO: 1738506 - RNA, 19 nt, Homo sapiens
  misc_RNA (1)...(19): siRNA sense strand
aaugaagaaucgcagguuu

SEQ ID NO: 1738507 - RNA, 19 nt, Homo sapiens
  misc_RNA (1)...(19): siRNA sense strand
cuaaacauuucucaugauc

SEQ ID NO: 1738508 - RNA, 19 nt, Homo sapiens
  misc_RNA (1)...(19): siRNA sense strand
acacuaaacauuucucaug

SEQ ID NO: 1738509 - RNA, 19 nt, Homo sapiens
  misc_RNA (1)...(19): siRNA sense strand
uuuaagaccugugcaguug

SEQ ID NO: 1738510 - RNA, 19 nt, Homo sapiens
  misc_RNA (1)...(19): siRNA sense strand
caauguagaagguuggaaa

SEQ ID NO: 1738511 - RNA, 19 nt, Homo sapiens
  misc_RNA (1)...(19): siRNA sense strand
caauagcucugauaaaauc

SEQ ID NO: 1738512 - RNA, 19 nt, Homo sapiens
  misc_RNA (1)...(19): siRNA sense strand
gagauggugaauugucuuu

SEQ ID NO: 1738513 - RNA, 19 nt, Homo sapiens
  misc_RNA (1)...(19): siRNA sense strand
uaagucugcuccugaucuu

SEQ ID NO: 1738514 - RNA, 19 nt, Homo sapiens
  misc_RNA (1)...(19): siRNA sense strand
guagaagguuggaaaauca

SEQ ID NO: 1738515 - RNA, 19 nt, Homo sapiens
  misc_RNA (1)...(19): siRNA sense strand
auacuucguuucuuagaug

SEQ ID NO: 1738516 - RNA, 19 nt, Homo sapiens
  misc_RNA (1)...(19): siRNA sense strand
caauuccucuuugguccua

SEQ ID NO: 1738517 - RNA, 19 nt, Homo sapiens
  misc_RNA (1)...(19): siRNA sense strand
gauaaggaagaacauacuu

SEQ ID NO: 1738518 - RNA, 19 nt, Homo sapiens
  misc_RNA (1)...(19): siRNA sense strand
gucggucacuugucaauag

SEQ ID NO: 1738519 - RNA, 19 nt, Homo sapiens
  misc_RNA (1)...(19): siRNA sense strand
gagauaaggaagaacauac

SEQ ID NO: 1738520 - RNA, 19 nt, Homo sapiens
  misc_RNA (1)...(19): siRNA sense strand
aggaagagguggacgaucu

SEQ ID NO: 1738521 - RNA, 19 nt, Homo sapiens
  misc_RNA (1)...(19): siRNA sense strand
aaagaaauagcaagaacug

SEQ ID NO: 1738522 - RNA, 19 nt, Homo sapiens
  misc_RNA (1)...(19): siRNA sense strand
cuggugaugucauacacua

SEQ ID NO: 1738523 - RNA, 19 nt, Homo sapiens
  misc_RNA (1)...(19): siRNA sense strand
gccggacacuaaacauuuc

SEQ ID NO: 1738524 - RNA, 19 nt, Homo sapiens
  misc_RNA (1)...(19): siRNA sense strand
caaaagaaauagcaagaac

SEQ ID NO: 1738525 - RNA, 19 nt, Homo sapiens
  misc_RNA (1)...(19): siRNA sense strand
ggacacuaaacauuucuca

SEQ ID NO: 1738526 - RNA, 19 nt, Homo sapiens
  misc_RNA (1)...(19): siRNA sense strand
ggcuggcucuucaaucuuc

SEQ ID NO: 1738527 - RNA, 19 nt, Homo sapiens
  misc_RNA (1)...(19): siRNA sense strand
gugcaguuguuggaaauuc

SEQ ID NO: 1738528 - RNA, 19 nt, Homo sapiens
  misc_RNA (1)...(19): siRNA sense strand
gguggacgaucugcacaau

SEQ ID NO: 1738529 - RNA, 19 nt, Homo sapiens
  misc_RNA (1)...(19): siRNA sense strand
cgccggacacuaaacauuu

SEQ ID NO: 1738530 - RNA, 19 nt, Homo sapiens
  misc_RNA (1)...(19): siRNA sense strand
gauaaaaucauucgaaagg

SEQ ID NO: 1738531 - RNA, 19 nt, Homo sapiens
  misc_RNA (1)...(19): siRNA sense strand
ggaaauucuggcauucugu

SEQ ID NO: 1738532 - RNA, 19 nt, Homo sapiens
  misc_RNA (1)...(19): siRNA sense strand
ccugugcaguuguuggaaa

SEQ ID NO: 1738533 - RNA, 19 nt, Homo sapiens
  misc_RNA (1)...(19): siRNA sense strand
aaggcuggcucuucaaucu

SEQ ID NO: 1738534 - RNA, 19 nt, Homo sapiens
  misc_RNA (1)...(19): siRNA sense strand
uguuggaaauucuggcauu

SEQ ID NO: 1738535 - RNA, 19 nt, Homo sapiens
  misc_RNA (1)...(19): siRNA sense strand
cauacuucguuucuuagau

SEQ ID NO: 1738536 - RNA, 19 nt, Homo sapiens
  misc_RNA (1)...(19): siRNA sense strand
ccagcacaauguagaaggu

SEQ ID NO: 1738537 - RNA, 19 nt, Homo sapiens
  misc_RNA (1)...(19): siRNA sense strand
gaauguggaaaggagauug

SEQ ID NO: 1738538 - RNA, 19 nt, Homo sapiens
  misc_RNA (1)...(19): siRNA sense strand
ugaucuacauagccuccua

SEQ ID NO: 1738539 - RNA, 19 nt, Homo sapiens
  misc_RNA (1)...(19): siRNA sense strand
agagauaaggaagaacaua

SEQ ID NO: 1738540 - RNA, 19 nt, Homo sapiens
  misc_RNA (1)...(19): siRNA sense strand
uugagucggucacuuguca

SEQ ID NO: 1738541 - RNA, 19 nt, Homo sapiens
  misc_RNA (1)...(19): siRNA sense strand
augaagaaucgcagguuua

SEQ ID NO: 1738542 - RNA, 19 nt, Homo sapiens
  misc_RNA (1)...(19): siRNA sense strand
gacagugaauguggaaagg

SEQ ID NO: 1738543 - RNA, 19 nt, Homo sapiens
  misc_RNA (1)...(19): siRNA sense strand
uggaaauucuggcauucug

SEQ ID NO: 1738544 - RNA, 19 nt, Homo sapiens
  misc_RNA (1)...(19): siRNA sense strand
guuuaagaccugugcaguu

SEQ ID NO: 1738545 - RNA, 19 nt, Homo sapiens
  misc_RNA (1)...(19): siRNA sense strand
caaugaagaaucgcagguu

SEQ ID NO: 1738546 - RNA, 19 nt, Homo sapiens
  misc_RNA (1)...(19): siRNA sense strand
cuagagauaaggaagaaca

SEQ ID NO: 1738547 - RNA, 19 nt, Homo sapiens
  misc_RNA (1)...(19): siRNA sense strand
guuggaaauucuggcauuc

SEQ ID NO: 1738548 - RNA, 19 nt, Homo sapiens
  misc_RNA (1)...(19): siRNA sense strand
aaauucuggcauucuguua

SEQ ID NO: 1738549 - RNA, 19 nt, Homo sapiens
  misc_RNA (1)...(19): siRNA sense strand
ggaagagguggacgaucug

SEQ ID NO: 1738550 - RNA, 19 nt, Homo sapiens
  misc_RNA (1)...(19): siRNA sense strand
ggagauggugaauugucuu

SEQ ID NO: 1738551 - RNA, 19 nt, Homo sapiens
  misc_RNA (1)...(19): siRNA sense strand
ugucaauagcucugauaaa

SEQ ID NO: 1738552 - RNA, 19 nt, Homo sapiens
  misc_RNA (1)...(19): siRNA sense strand
cggagauggugaauugucu

SEQ ID NO: 1738553 - RNA, 19 nt, Homo sapiens
  misc_RNA (1)...(19): siRNA sense strand
aaucuuccagcacaaugua

SEQ ID NO: 1738554 - RNA, 19 nt, Homo sapiens
  misc_RNA (1)...(19): siRNA sense strand
gaccugugcaguuguugga

SEQ ID NO: 1738555 - RNA, 19 nt, Homo sapiens
  misc_RNA (1)...(19): siRNA sense strand
gacgaucugcacaauaagu

SEQ ID NO: 1738556 - RNA, 19 nt, Homo sapiens
  misc_RNA (1)...(19): siRNA sense strand
guggacgaucugcacaaua

SEQ ID NO: 1738557 - RNA, 19 nt, Homo sapiens
  misc_RNA (1)...(19): siRNA sense strand
gacaaaagaaauagcaaga

SEQ ID NO: 1738558 - RNA, 19 nt, Homo sapiens
  misc_RNA (1)...(19): siRNA sense strand
auucuggcauucuguuaga

SEQ ID NO: 1738559 - RNA, 19 nt, Homo sapiens
  misc_RNA (1)...(19): siRNA sense strand
gaacauacuucguuucuua

SEQ ID NO: 1738560 - RNA, 19 nt, Homo sapiens
  misc_RNA (1)...(19): siRNA sense strand
gauggugaauugucuuuga

SEQ ID NO: 1738561 - RNA, 19 nt, Homo sapiens
  misc_RNA (1)...(19): siRNA sense strand
gaaaaucaauuccucuuug

SEQ ID NO: 1738562 - RNA, 19 nt, Homo sapiens
  misc_RNA (1)...(19): siRNA sense strand
uggacgaucugcacaauaa

SEQ ID NO: 1738563 - RNA, 19 nt, Homo sapiens
  misc_RNA (1)...(19): siRNA sense strand
cacuaaacauuucucauga

SEQ ID NO: 1738564 - RNA, 19 nt, Homo sapiens
  misc_RNA (1)...(19): siRNA sense strand
caauaagucugcuccugau

SEQ ID NO: 1738565 - RNA, 19 nt, Homo sapiens
  misc_RNA (1)...(19): siRNA sense strand
gaaauucuggcauucuguu

SEQ ID NO: 1738566 - RNA, 19 nt, Homo sapiens
  misc_RNA (1)...(19): siRNA sense strand
uaagaccugugcaguuguu

SEQ ID NO: 1738567 - RNA, 19 nt, Homo sapiens
  misc_RNA (1)...(19): siRNA sense strand
gucaauagcucugauaaaa

SEQ ID NO: 1738568 - RNA, 19 nt, Homo sapiens
  misc_RNA (1)...(19): siRNA sense strand
ugaagaaucgcagguuuaa

SEQ ID NO: 1738569 - RNA, 19 nt, Homo sapiens
  misc_RNA (1)...(19): siRNA sense strand
gaaaggcuggcucuucaau

SEQ ID NO: 1738570 - RNA, 19 nt, Homo sapiens
  misc_RNA (1)...(19): siRNA sense strand
ucgaaaggcuggcucuuca

SEQ ID NO: 1738571 - RNA, 19 nt, Homo sapiens
  misc_RNA (1)...(19): siRNA sense strand
uaagccuggugaugucaua

SEQ ID NO: 1738572 - RNA, 19 nt, Homo sapiens
  misc_RNA (1)...(19): siRNA sense strand
aagaaucgcagguuuaaga

SEQ ID NO: 1738573 - RNA, 19 nt, Homo sapiens
  misc_RNA (1)...(19): siRNA sense strand
aaugaagaaucgcagguuu

SEQ ID NO: 1738574 - RNA, 19 nt, Homo sapiens
  misc_RNA (1)...(19): siRNA sense strand
cuaaacauuucucaugauc

SEQ ID NO: 1738575 - RNA, 19 nt, Homo sapiens
  misc_RNA (1)...(19): siRNA sense strand
acacuaaacauuucucaug

SEQ ID NO: 1738576 - RNA, 19 nt, Homo sapiens
  misc_RNA (1)...(19): siRNA sense strand
uuuaagaccugugcaguug

SEQ ID NO: 1738577 - RNA, 19 nt, Homo sapiens
  misc_RNA (1)...(19): siRNA sense strand
caauguagaagguuggaaa

SEQ ID NO: 1738578 - RNA, 19 nt, Homo sapiens
  misc_RNA (1)...(19): siRNA sense strand
caauagcucugauaaaauc

SEQ ID NO: 1738579 - RNA, 19 nt, Homo sapiens
  misc_RNA (1)...(19): siRNA sense strand
gagauggugaauugucuuu

SEQ ID NO: 1738580 - RNA, 19 nt, Homo sapiens
  misc_RNA (1)...(19): siRNA sense strand
uaagucugcuccugaucuu

SEQ ID NO: 1738581 - RNA, 19 nt, Homo sapiens
  misc_RNA (1)...(19): siRNA sense strand
guagaagguuggaaaauca

SEQ ID NO: 1738582 - RNA, 19 nt, Homo sapiens
  misc_RNA (1)...(19): siRNA sense strand
auacuucguuucuuagaug

SEQ ID NO: 1738583 - RNA, 19 nt, Homo sapiens
  misc_RNA (1)...(19): siRNA sense strand
caauuccucuuugguccua

SEQ ID NO: 1738584 - RNA, 19 nt, Homo sapiens
  misc_RNA (1)...(19): siRNA sense strand
gauaaggaagaacauacuu

SEQ ID NO: 1738585 - RNA, 19 nt, Homo sapiens
  misc_RNA (1)...(19): siRNA sense strand
gucggucacuugucaauag

SEQ ID NO: 1738586 - RNA, 19 nt, Homo sapiens
  misc_RNA (1)...(19): siRNA sense strand
gagauaaggaagaacauac

SEQ ID NO: 1738587 - RNA, 19 nt, Homo sapiens
  misc_RNA (1)...(19): siRNA sense strand
aggaagagguggacgaucu

SEQ ID NO: 1738588 - RNA, 19 nt, Homo sapiens
  misc_RNA (1)...(19): siRNA sense strand
aaagaaauagcaagaacug

SEQ ID NO: 1738589 - RNA, 19 nt, Homo sapiens
  misc_RNA (1)...(19): siRNA sense strand
cuggugaugucauacacua

SEQ ID NO: 1738590 - RNA, 19 nt, Homo sapiens
  misc_RNA (1)...(19): siRNA sense strand
gccggacacuaaacauuuc

SEQ ID NO: 1738591 - RNA, 19 nt, Homo sapiens
  misc_RNA (1)...(19): siRNA sense strand
caaaagaaauagcaagaac

SEQ ID NO: 1738592 - RNA, 19 nt, Homo sapiens
  misc_RNA (1)...(19): siRNA sense strand
ggacacuaaacauuucuca

SEQ ID NO: 1738593 - RNA, 19 nt, Homo sapiens
  misc_RNA (1)...(19): siRNA sense strand
ggcuggcucuucaaucuuc

SEQ ID NO: 1738594 - RNA, 19 nt, Homo sapiens
  misc_RNA (1)...(19): siRNA sense strand
gugcaguuguuggaaauuc

SEQ ID NO: 1738595 - RNA, 19 nt, Homo sapiens
  misc_RNA (1)...(19): siRNA sense strand
gguggacgaucugcacaau

SEQ ID NO: 1738596 - RNA, 19 nt, Homo sapiens
  misc_RNA (1)...(19): siRNA sense strand
cgccggacacuaaacauuu

SEQ ID NO: 1738597 - RNA, 19 nt, Homo sapiens
  misc_RNA (1)...(19): siRNA sense strand
gauaaaaucauucgaaagg

SEQ ID NO: 1738598 - RNA, 19 nt, Homo sapiens
  misc_RNA (1)...(19): siRNA sense strand
ggaaauucuggcauucugu

SEQ ID NO: 1738599 - RNA, 19 nt, Homo sapiens
  misc_RNA (1)...(19): siRNA sense strand
ccugugcaguuguuggaaa

SEQ ID NO: 1738600 - RNA, 19 nt, Homo sapiens
  misc_RNA (1)...(19): siRNA sense strand
aaggcuggcucuucaaucu

SEQ ID NO: 1738601 - RNA, 19 nt, Homo sapiens
  misc_RNA (1)...(19): siRNA sense strand
uguuggaaauucuggcauu

SEQ ID NO: 1738602 - RNA, 19 nt, Homo sapiens
  misc_RNA (1)...(19): siRNA sense strand
cauacuucguuucuuagau

SEQ ID NO: 1738603 - RNA, 19 nt, Homo sapiens
  misc_RNA (1)...(19): siRNA sense strand
ccagcacaauguagaaggu

SEQ ID NO: 1738604 - RNA, 19 nt, Homo sapiens
  misc_RNA (1)...(19): siRNA sense strand
gaauguggaaaggagauug

SEQ ID NO: 1738605 - RNA, 19 nt, Homo sapiens
  misc_RNA (1)...(19): siRNA sense strand
ugaucuacauagccuccua

SEQ ID NO: 1738606 - RNA, 19 nt, Homo sapiens
  misc_RNA (1)...(19): siRNA sense strand
agagauaaggaagaacaua

SEQ ID NO: 1738607 - RNA, 19 nt, Homo sapiens
  misc_RNA (1)...(19): siRNA sense strand
uugagucggucacuuguca

SEQ ID NO: 1738608 - RNA, 19 nt, Homo sapiens
  misc_RNA (1)...(19): siRNA sense strand
augaagaaucgcagguuua

SEQ ID NO: 1738609 - RNA, 19 nt, Homo sapiens
  misc_RNA (1)...(19): siRNA sense strand
gacagugaauguggaaagg

SEQ ID NO: 1738610 - RNA, 19 nt, Homo sapiens
  misc_RNA (1)...(19): siRNA sense strand
uggaaauucuggcauucug

SEQ ID NO: 1738611 - RNA, 19 nt, Homo sapiens
  misc_RNA (1)...(19): siRNA sense strand
guuuaagaccugugcaguu

SEQ ID NO: 1738612 - RNA, 19 nt, Homo sapiens
  misc_RNA (1)...(19): siRNA sense strand
caaugaagaaucgcagguu

SEQ ID NO: 1738613 - RNA, 19 nt, Homo sapiens
  misc_RNA (1)...(19): siRNA sense strand
cuagagauaaggaagaaca

SEQ ID NO: 1738614 - RNA, 19 nt, Homo sapiens
  misc_RNA (1)...(19): siRNA sense strand
guuggaaauucuggcauuc

SEQ ID NO: 1738615 - RNA, 19 nt, Homo sapiens
  misc_RNA (1)...(19): siRNA sense strand
aaauucuggcauucuguua

SEQ ID NO: 1738616 - RNA, 19 nt, Homo sapiens
  misc_RNA (1)...(19): siRNA sense strand
ggaagagguggacgaucug

SEQ ID NO: 1738617 - RNA, 19 nt, Homo sapiens
  misc_RNA (1)...(19): siRNA sense strand
ggagauggugaauugucuu

SEQ ID NO: 1738618 - RNA, 19 nt, Homo sapiens
  misc_RNA (1)...(19): siRNA sense strand
ugucaauagcucugauaaa

SEQ ID NO: 1738619 - RNA, 19 nt, Homo sapiens
  misc_RNA (1)...(19): siRNA sense strand
cggagauggugaauugucu

SEQ ID NO: 1738620 - RNA, 19 nt, Homo sapiens
  misc_RNA (1)...(19): siRNA sense strand
aaucuuccagcacaaugua

SEQ ID NO: 1738621 - RNA, 19 nt, Homo sapiens
  misc_RNA (1)...(19): siRNA sense strand
gaccugugcaguuguugga

SEQ ID NO: 1738622 - RNA, 19 nt, Homo sapiens
  misc_RNA (1)...(19): siRNA sense strand
gacgaucugcacaauaagu

SEQ ID NO: 1738623 - RNA, 19 nt, Homo sapiens
  misc_RNA (1)...(19): siRNA sense strand
guggacgaucugcacaaua

SEQ ID NO: 1738624 - RNA, 19 nt, Homo sapiens
  misc_RNA (1)...(19): siRNA sense strand
gacaaaagaaauagcaaga

SEQ ID NO: 1738625 - RNA, 19 nt, Homo sapiens
  misc_RNA (1)...(19): siRNA sense strand
auucuggcauucuguuaga

SEQ ID NO: 1738626 - RNA, 19 nt, Homo sapiens
  misc_RNA (1)...(19): siRNA sense strand
gagacuggcugguuugaua

SEQ ID NO: 1738627 - RNA, 19 nt, Homo sapiens
  misc_RNA (1)...(19): siRNA sense strand
gcaaacauaucuucaacaa

SEQ ID NO: 1738628 - RNA, 19 nt, Homo sapiens
  misc_RNA (1)...(19): siRNA sense strand
agacaaagcugaugccauu

SEQ ID NO: 1738629 - RNA, 19 nt, Homo sapiens
  misc_RNA (1)...(19): siRNA sense strand
caacaagcaugcagagaaa

SEQ ID NO: 1738630 - RNA, 19 nt, Homo sapiens
  misc_RNA (1)...(19): siRNA sense strand
gcacagcucugacccauac

SEQ ID NO: 1738631 - RNA, 19 nt, Homo sapiens
  misc_RNA (1)...(19): siRNA sense strand
ggcaacagaugcaggauuu

SEQ ID NO: 1738632 - RNA, 19 nt, Homo sapiens
  misc_RNA (1)...(19): siRNA sense strand
caagggccauuguggaaua

SEQ ID NO: 1738633 - RNA, 19 nt, Homo sapiens
  misc_RNA (1)...(19): siRNA sense strand
gcaagcaggcugagaauga

SEQ ID NO: 1738634 - RNA, 19 nt, Homo sapiens
  misc_RNA (1)...(19): siRNA sense strand
gaaagaagacuccgagaag

SEQ ID NO: 1738635 - RNA, 19 nt, Homo sapiens
  misc_RNA (1)...(19): siRNA sense strand
ugaagaauaucaccgacua

SEQ ID NO: 1738636 - RNA, 19 nt, Homo sapiens
  misc_RNA (1)...(19): siRNA sense strand
uggacaagcuccuccuuua

SEQ ID NO: 1738637 - RNA, 19 nt, Homo sapiens
  misc_RNA (1)...(19): siRNA sense strand
gaucaucucccuuuguaaa

SEQ ID NO: 1738638 - RNA, 19 nt, Homo sapiens
  misc_RNA (1)...(19): siRNA sense strand
gaugagaaguugauuaagg

SEQ ID NO: 1738639 - RNA, 19 nt, Homo sapiens
  misc_RNA (1)...(19): siRNA sense strand
gaagagagcgcagcgacua

SEQ ID NO: 1738640 - RNA, 19 nt, Homo sapiens
  misc_RNA (1)...(19): siRNA sense strand
gggaugagaaguugauuaa

SEQ ID NO: 1738641 - RNA, 19 nt, Homo sapiens
  misc_RNA (1)...(19): siRNA sense strand
gugaauaucgggacuauga

SEQ ID NO: 1738642 - RNA, 19 nt, Homo sapiens
  misc_RNA (1)...(19): siRNA sense strand
uuaaagagaucuguuggaa

SEQ ID NO: 1738643 - RNA, 19 nt, Homo sapiens
  misc_RNA (1)...(19): siRNA sense strand
ccgaagcgcucaaggagaa

SEQ ID NO: 1738644 - RNA, 19 nt, Homo sapiens
  misc_RNA (1)...(19): siRNA sense strand
gcuaugagaugcccuaugc

SEQ ID NO: 1738645 - RNA, 19 nt, Homo sapiens
  misc_RNA (1)...(19): siRNA sense strand
gaaugacaguucuaaugau

SEQ ID NO: 1738646 - RNA, 19 nt, Homo sapiens
  misc_RNA (1)...(19): siRNA sense strand
gagcugagcccugguguga

SEQ ID NO: 1738647 - RNA, 19 nt, Homo sapiens
  misc_RNA (1)...(19): siRNA sense strand
ggacaaggaagagaagaaa

SEQ ID NO: 1738648 - RNA, 19 nt, Homo sapiens
  misc_RNA (1)...(19): siRNA sense strand
gggcagcauugcagagauu

SEQ ID NO: 1738649 - RNA, 19 nt, Homo sapiens
  misc_RNA (1)...(19): siRNA sense strand
ggacauagacaaagcugau

SEQ ID NO: 1738650 - RNA, 19 nt, Homo sapiens
  misc_RNA (1)...(19): siRNA sense strand
cauggagacuggcugguuu

SEQ ID NO: 1738651 - RNA, 19 nt, Homo sapiens
  misc_RNA (1)...(19): siRNA sense strand
agacgauguugauuucuuu

SEQ ID NO: 1738652 - RNA, 19 nt, Homo sapiens
  misc_RNA (1)...(19): siRNA sense strand
gaggagugguuucggucua

SEQ ID NO: 1738653 - RNA, 19 nt, Homo sapiens
  misc_RNA (1)...(19): siRNA sense strand
ggaagaggcccagaagaug

SEQ ID NO: 1738654 - RNA, 19 nt, Homo sapiens
  misc_RNA (1)...(19): siRNA sense strand
cgaccgcaguguuaacauu

SEQ ID NO: 1738655 - RNA, 19 nt, Homo sapiens
  misc_RNA (1)...(19): siRNA sense strand
gaccgcaguguuaacauua

SEQ ID NO: 1738656 - RNA, 19 nt, Homo sapiens
  misc_RNA (1)...(19): siRNA sense strand
ugcauuccuuggauuauua

SEQ ID NO: 1738657 - RNA, 19 nt, Homo sapiens
  misc_RNA (1)...(19): siRNA sense strand
gaaguugauuaaggucuug

SEQ ID NO: 1738658 - RNA, 19 nt, Homo sapiens
  misc_RNA (1)...(19): siRNA sense strand
gaagggaacccggcagaga

SEQ ID NO: 1738659 - RNA, 19 nt, Homo sapiens
  misc_RNA (1)...(19): siRNA sense strand
ugauuaaggucuuggacaa

SEQ ID NO: 1738660 - RNA, 19 nt, Homo sapiens
  misc_RNA (1)...(19): siRNA sense strand
cgacaaggaugagaagaag

SEQ ID NO: 1738661 - RNA, 19 nt, Homo sapiens
  misc_RNA (1)...(19): siRNA sense strand
ggagcgggaugagaaguug

SEQ ID NO: 1738662 - RNA, 19 nt, Homo sapiens
  misc_RNA (1)...(19): siRNA sense strand
gaugacaggacacagcuuu

SEQ ID NO: 1738663 - RNA, 19 nt, Homo sapiens
  misc_RNA (1)...(19): siRNA sense strand
auucaaggguccugaguuu

SEQ ID NO: 1738664 - RNA, 19 nt, Homo sapiens
  misc_RNA (1)...(19): siRNA sense strand
gcgcaaacauaucuucaac

SEQ ID NO: 1738665 - RNA, 19 nt, Homo sapiens
  misc_RNA (1)...(19): siRNA sense strand
cuaaguaccacccagauga

SEQ ID NO: 1738666 - RNA, 19 nt, Homo sapiens
  misc_RNA (1)...(19): siRNA sense strand
gugcauuccuuggauuauu

SEQ ID NO: 1738667 - RNA, 19 nt, Homo sapiens
  misc_RNA (1)...(19): siRNA sense strand
ucaacaagcaugcagagaa

SEQ ID NO: 1738668 - RNA, 19 nt, Homo sapiens
  misc_RNA (1)...(19): siRNA sense strand
ugacagugaugacgaguac

SEQ ID NO: 1738669 - RNA, 19 nt, Homo sapiens
  misc_RNA (1)...(19): siRNA sense strand
cagacgauguugauuucuu

SEQ ID NO: 1738670 - RNA, 19 nt, Homo sapiens
  misc_RNA (1)...(19): siRNA sense strand
guuggaaccugcagaacau

SEQ ID NO: 1738671 - RNA, 19 nt, Homo sapiens
  misc_RNA (1)...(19): siRNA sense strand
gaaggaggcacggagaaug

SEQ ID NO: 1738672 - RNA, 19 nt, Homo sapiens
  misc_RNA (1)...(19): siRNA sense strand
gcccagcucugccugagau

SEQ ID NO: 1738673 - RNA, 19 nt, Homo sapiens
  misc_RNA (1)...(19): siRNA sense strand
uuaacaacuuccucacuga

SEQ ID NO: 1738674 - RNA, 19 nt, Homo sapiens
  misc_RNA (1)...(19): siRNA sense strand
gaaaauugaggaagugaaa

SEQ ID NO: 1738675 - RNA, 19 nt, Homo sapiens
  misc_RNA (1)...(19): siRNA sense strand
gaacugggcaaggauaagu

SEQ ID NO: 1738676 - RNA, 19 nt, Homo sapiens
  misc_RNA (1)...(19): siRNA sense strand
ggagaagcccaaggaagaa

SEQ ID NO: 1738677 - RNA, 19 nt, Homo sapiens
  misc_RNA (1)...(19): siRNA sense strand
aaugacaguucuaaugaug

SEQ ID NO: 1738678 - RNA, 19 nt, Homo sapiens
  misc_RNA (1)...(19): siRNA sense strand
gaaggagaagcccaaggaa

SEQ ID NO: 1738679 - RNA, 19 nt, Homo sapiens
  misc_RNA (1)...(19): siRNA sense strand
gggacaaguucagaagaga

SEQ ID NO: 1738680 - RNA, 19 nt, Homo sapiens
  misc_RNA (1)...(19): siRNA sense strand
ggaaaccucgcaacaggau

SEQ ID NO: 1738681 - RNA, 19 nt, Homo sapiens
  misc_RNA (1)...(19): siRNA sense strand
gggagguuauccugggaaa

SEQ ID NO: 1738682 - RNA, 19 nt, Homo sapiens
  misc_RNA (1)...(19): siRNA sense strand
acaaggaagagaagaaaga

SEQ ID NO: 1738683 - RNA, 19 nt, Homo sapiens
  misc_RNA (1)...(19): siRNA sense strand
gcugagcccuggugugaac

SEQ ID NO: 1738684 - RNA, 19 nt, Homo sapiens
  misc_RNA (1)...(19): siRNA sense strand
ggaagaagaaugggagaag

SEQ ID NO: 1738685 - RNA, 19 nt, Homo sapiens
  misc_RNA (1)...(19): siRNA sense strand
caaagcugaugccauuguc

SEQ ID NO: 1738686 - RNA, 19 nt, Homo sapiens
  misc_RNA (1)...(19): siRNA sense strand
ucaaggguccugaguuugu

SEQ ID NO: 1738687 - RNA, 19 nt, Homo sapiens
  misc_RNA (1)...(19): siRNA sense strand
gugcuggaguggcagaaga

SEQ ID NO: 1738688 - RNA, 19 nt, Homo sapiens
  misc_RNA (1)...(19): siRNA sense strand
ggacaagcuccuccuuuac

SEQ ID NO: 1738689 - RNA, 19 nt, Homo sapiens
  misc_RNA (1)...(19): siRNA sense strand
gaccugcucccucuucaug

SEQ ID NO: 1738690 - RNA, 19 nt, Homo sapiens
  misc_RNA (1)...(19): siRNA sense strand
agaaagaagacuccgagaa

SEQ ID NO: 1738691 - RNA, 19 nt, Homo sapiens
  misc_RNA (1)...(19): siRNA sense strand
caaggaagagaagaaagaa

SEQ ID NO: 1738692 - RNA, 19 nt, Homo sapiens
  misc_RNA (1)...(19): siRNA sense strand
ggaaggaggcacggagaau

SEQ ID NO: 1738693 - RNA, 19 nt, Homo sapiens
  misc_RNA (1)...(19): siRNA sense strand
acaaagaugaggagugguu

SEQ ID NO: 1738694 - RNA, 19 nt, Homo sapiens
  misc_RNA (1)...(19): siRNA sense strand
cccagacgauguugauuuc

SEQ ID NO: 1738695 - RNA, 19 nt, Homo sapiens
  misc_RNA (1)...(19): siRNA sense strand
uggaguggcagaagacuuu

SEQ ID NO: 1738696 - RNA, 19 nt, Homo sapiens
  misc_RNA (1)...(19): siRNA sense strand
caucgugcauuccuuggau

SEQ ID NO: 1738697 - RNA, 19 nt, Homo sapiens
  misc_RNA (1)...(19): siRNA sense strand
agaaguugauuaaggucuu

SEQ ID NO: 1738698 - RNA, 19 nt, Homo sapiens
  misc_RNA (1)...(19): siRNA sense strand
gcgcuauaaugacuacaag

SEQ ID NO: 1738699 - RNA, 19 nt, Homo sapiens
  misc_RNA (1)...(19): siRNA sense strand
gggugaauaucgggacuau

SEQ ID NO: 1738700 - RNA, 19 nt, Homo sapiens
  misc_RNA (1)...(19): siRNA sense strand
aggagaagcccaaggaaga

SEQ ID NO: 1738701 - RNA, 19 nt, Homo sapiens
  misc_RNA (1)...(19): siRNA sense strand
gaaggcgcagggacaaguu

SEQ ID NO: 1738702 - RNA, 19 nt, Homo sapiens
  misc_RNA (1)...(19): siRNA sense strand
aaaccaacgacaaggauga

SEQ ID NO: 1738703 - RNA, 19 nt, Homo sapiens
  misc_RNA (1)...(19): siRNA sense strand
gaugcagccgugauuaaga

SEQ ID NO: 1738704 - RNA, 19 nt, Homo sapiens
  misc_RNA (1)...(19): siRNA sense strand
agaaggagaagcccaagga

SEQ ID NO: 1738705 - RNA, 19 nt, Homo sapiens
  misc_RNA (1)...(19): siRNA sense strand
gcagggacaaguucagaag

SEQ ID NO: 1738706 - RNA, 19 nt, Homo sapiens
  misc_RNA (1)...(19): siRNA sense strand
gggacaaggaagagaagaa

SEQ ID NO: 1738707 - RNA, 19 nt, Homo sapiens
  misc_RNA (1)...(19): siRNA sense strand
caaggguccugaguuugug

SEQ ID NO: 1738708 - RNA, 19 nt, Homo sapiens
  misc_RNA (1)...(19): siRNA sense strand
agcaggaaguggagaaguu

SEQ ID NO: 1738709 - RNA, 19 nt, Homo sapiens
  misc_RNA (1)...(19): siRNA sense strand
caaagacccagagcaggaa

SEQ ID NO: 1738710 - RNA, 19 nt, Homo sapiens
  misc_RNA (1)...(19): siRNA sense strand
uuacaacaccugugaguac

SEQ ID NO: 1738711 - RNA, 19 nt, Homo sapiens
  misc_RNA (1)...(19): siRNA sense strand
gaagcccaaggaagaagaa

SEQ ID NO: 1738712 - RNA, 19 nt, Homo sapiens
  misc_RNA (1)...(19): siRNA sense strand
aggaagagaagaaagaaga

SEQ ID NO: 1738713 - RNA, 19 nt, Homo sapiens
  misc_RNA (1)...(19): siRNA sense strand
caaagaugaggagugguuu

SEQ ID NO: 1738714 - RNA, 19 nt, Homo sapiens
  misc_RNA (1)...(19): siRNA sense strand
ucacgccguugcugagugu

SEQ ID NO: 1738715 - RNA, 19 nt, Homo sapiens
  misc_RNA (1)...(19): siRNA sense strand
cagcaagaaagaagaagga

SEQ ID NO: 1738716 - RNA, 19 nt, Homo sapiens
  misc_RNA (1)...(19): siRNA sense strand
caagcgcuauaaugacuac

SEQ ID NO: 1738717 - RNA, 19 nt, Homo sapiens
  misc_RNA (1)...(19): siRNA sense strand
gcaggaaguggagaaguuc

SEQ ID NO: 1738718 - RNA, 19 nt, Homo sapiens
  misc_RNA (1)...(19): siRNA sense strand
gaggaagaggcccagaaga

SEQ ID NO: 1738719 - RNA, 19 nt, Homo sapiens
  misc_RNA (1)...(19): siRNA sense strand
acaaggaugagaagaagga

SEQ ID NO: 1738720 - RNA, 19 nt, Homo sapiens
  misc_RNA (1)...(19): siRNA sense strand
ccaacgacaaggaugagaa

SEQ ID NO: 1738721 - RNA, 19 nt, Homo sapiens
  misc_RNA (1)...(19): siRNA sense strand
caacagaugcaggauuucu

SEQ ID NO: 1738722 - RNA, 19 nt, Homo sapiens
  misc_RNA (1)...(19): siRNA sense strand
ugacaguucuaaugaugac

SEQ ID NO: 1738723 - RNA, 19 nt, Homo sapiens
  misc_RNA (1)...(19): siRNA sense strand
gaugacgaguacgaucgaa

SEQ ID NO: 1738724 - RNA, 19 nt, Homo sapiens
  misc_RNA (1)...(19): siRNA sense strand
gaccuucgaccgcaguguu

SEQ ID NO: 1738725 - RNA, 19 nt, Homo sapiens
  misc_RNA (1)...(19): siRNA sense strand
caggaacugggcaaggaua

SEQ ID NO: 1738726 - RNA, 19 nt, Homo sapiens
  misc_RNA (1)...(19): siRNA sense strand
gagacuggcugguuugaua

SEQ ID NO: 1738727 - RNA, 19 nt, Homo sapiens
  misc_RNA (1)...(19): siRNA sense strand
gcaaacauaucuucaacaa

SEQ ID NO: 1738728 - RNA, 19 nt, Homo sapiens
  misc_RNA (1)...(19): siRNA sense strand
agacaaagcugaugccauu

SEQ ID NO: 1738729 - RNA, 19 nt, Homo sapiens
  misc_RNA (1)...(19): siRNA sense strand
caacaagcaugcagagaaa

SEQ ID NO: 1738730 - RNA, 19 nt, Homo sapiens
  misc_RNA (1)...(19): siRNA sense strand
gcacagcucugacccauac

SEQ ID NO: 1738731 - RNA, 19 nt, Homo sapiens
  misc_RNA (1)...(19): siRNA sense strand
ggcaacagaugcaggauuu

SEQ ID NO: 1738732 - RNA, 19 nt, Homo sapiens
  misc_RNA (1)...(19): siRNA sense strand
caagggccauuguggaaua

SEQ ID NO: 1738733 - RNA, 19 nt, Homo sapiens
  misc_RNA (1)...(19): siRNA sense strand
gcaagcaggcugagaauga

SEQ ID NO: 1738734 - RNA, 19 nt, Homo sapiens
  misc_RNA (1)...(19): siRNA sense strand
gaaagaagacuccgagaag

SEQ ID NO: 1738735 - RNA, 19 nt, Homo sapiens
  misc_RNA (1)...(19): siRNA sense strand
ugaagaauaucaccgacua

SEQ ID NO: 1738736 - RNA, 19 nt, Homo sapiens
  misc_RNA (1)...(19): siRNA sense strand
uggacaagcuccuccuuua

SEQ ID NO: 1738737 - RNA, 19 nt, Homo sapiens
  misc_RNA (1)...(19): siRNA sense strand
gaucaucucccuuuguaaa

SEQ ID NO: 1738738 - RNA, 19 nt, Homo sapiens
  misc_RNA (1)...(19): siRNA sense strand
gaugagaaguugauuaagg

SEQ ID NO: 1738739 - RNA, 19 nt, Homo sapiens
  misc_RNA (1)...(19): siRNA sense strand
gggaugagaaguugauuaa

SEQ ID NO: 1738740 - RNA, 19 nt, Homo sapiens
  misc_RNA (1)...(19): siRNA sense strand
ccgaagcgcucaaggagaa

SEQ ID NO: 1738741 - RNA, 19 nt, Homo sapiens
  misc_RNA (1)...(19): siRNA sense strand
uuaaagagaucuguuggaa

SEQ ID NO: 1738742 - RNA, 19 nt, Homo sapiens
  misc_RNA (1)...(19): siRNA sense strand
gaaugacaguucuaaugau

SEQ ID NO: 1738743 - RNA, 19 nt, Homo sapiens
  misc_RNA (1)...(19): siRNA sense strand
gcuaugagaugcccuaugc

SEQ ID NO: 1738744 - RNA, 19 nt, Homo sapiens
  misc_RNA (1)...(19): siRNA sense strand
gagcugagcccugguguga

SEQ ID NO: 1738745 - RNA, 19 nt, Homo sapiens
  misc_RNA (1)...(19): siRNA sense strand
ggacaaggaagagaagaaa

SEQ ID NO: 1738746 - RNA, 19 nt, Homo sapiens
  misc_RNA (1)...(19): siRNA sense strand
gggcagcauugcagagauu

SEQ ID NO: 1738747 - RNA, 19 nt, Homo sapiens
  misc_RNA (1)...(19): siRNA sense strand
ggacauagacaaagcugau

SEQ ID NO: 1738748 - RNA, 19 nt, Homo sapiens
  misc_RNA (1)...(19): siRNA sense strand
cauggagacuggcugguuu

SEQ ID NO: 1738749 - RNA, 19 nt, Homo sapiens
  misc_RNA (1)...(19): siRNA sense strand
agacgauguugauuucuuu

SEQ ID NO: 1738750 - RNA, 19 nt, Homo sapiens
  misc_RNA (1)...(19): siRNA sense strand
gaggagugguuucggucua

SEQ ID NO: 1738751 - RNA, 19 nt, Homo sapiens
  misc_RNA (1)...(19): siRNA sense strand
ggaagaggcccagaagaug

SEQ ID NO: 1738752 - RNA, 19 nt, Homo sapiens
  misc_RNA (1)...(19): siRNA sense strand
cgaccgcaguguuaacauu

SEQ ID NO: 1738753 - RNA, 19 nt, Homo sapiens
  misc_RNA (1)...(19): siRNA sense strand
gaccgcaguguuaacauua

SEQ ID NO: 1738754 - RNA, 19 nt, Homo sapiens
  misc_RNA (1)...(19): siRNA sense strand
ugcauuccuuggauuauua

SEQ ID NO: 1738755 - RNA, 19 nt, Homo sapiens
  misc_RNA (1)...(19): siRNA sense strand
gaaguugauuaaggucuug

SEQ ID NO: 1738756 - RNA, 19 nt, Homo sapiens
  misc_RNA (1)...(19): siRNA sense strand
gaagggaacccggcagaga

SEQ ID NO: 1738757 - RNA, 19 nt, Homo sapiens
  misc_RNA (1)...(19): siRNA sense strand
ugauuaaggucuuggacaa

SEQ ID NO: 1738758 - RNA, 19 nt, Homo sapiens
  misc_RNA (1)...(19): siRNA sense strand
cgacaaggaugagaagaag

SEQ ID NO: 1738759 - RNA, 19 nt, Homo sapiens
  misc_RNA (1)...(19): siRNA sense strand
ggagcgggaugagaaguug

SEQ ID NO: 1738760 - RNA, 19 nt, Homo sapiens
  misc_RNA (1)...(19): siRNA sense strand
gaugacaggacacagcuuu

SEQ ID NO: 1738761 - RNA, 19 nt, Homo sapiens
  misc_RNA (1)...(19): siRNA sense strand
auucaaggguccugaguuu

SEQ ID NO: 1738762 - RNA, 19 nt, Homo sapiens
  misc_RNA (1)...(19): siRNA sense strand
gcgcaaacauaucuucaac

SEQ ID NO: 1738763 - RNA, 19 nt, Homo sapiens
  misc_RNA (1)...(19): siRNA sense strand
cuaaguaccacccagauga

SEQ ID NO: 1738764 - RNA, 19 nt, Homo sapiens
  misc_RNA (1)...(19): siRNA sense strand
gugcauuccuuggauuauu

SEQ ID NO: 1738765 - RNA, 19 nt, Homo sapiens
  misc_RNA (1)...(19): siRNA sense strand
ucaacaagcaugcagagaa

SEQ ID NO: 1738766 - RNA, 19 nt, Homo sapiens
  misc_RNA (1)...(19): siRNA sense strand
guuggaaccugcagaacau

SEQ ID NO: 1738767 - RNA, 19 nt, Homo sapiens
  misc_RNA (1)...(19): siRNA sense strand
cagacgauguugauuucuu

SEQ ID NO: 1738768 - RNA, 19 nt, Homo sapiens
  misc_RNA (1)...(19): siRNA sense strand
gaaggaggcacggagaaug

SEQ ID NO: 1738769 - RNA, 19 nt, Homo sapiens
  misc_RNA (1)...(19): siRNA sense strand
gcccagcucugccugagau

SEQ ID NO: 1738770 - RNA, 19 nt, Homo sapiens
  misc_RNA (1)...(19): siRNA sense strand
uuaacaacuuccucacuga

SEQ ID NO: 1738771 - RNA, 19 nt, Homo sapiens
  misc_RNA (1)...(19): siRNA sense strand
gaaaauugaggaagugaaa

SEQ ID NO: 1738772 - RNA, 19 nt, Homo sapiens
  misc_RNA (1)...(19): siRNA sense strand
gaacugggcaaggauaagu

SEQ ID NO: 1738773 - RNA, 19 nt, Homo sapiens
  misc_RNA (1)...(19): siRNA sense strand
ggagaagcccaaggaagaa

SEQ ID NO: 1738774 - RNA, 19 nt, Homo sapiens
  misc_RNA (1)...(19): siRNA sense strand
aaugacaguucuaaugaug

SEQ ID NO: 1738775 - RNA, 19 nt, Homo sapiens
  misc_RNA (1)...(19): siRNA sense strand
gaaggagaagcccaaggaa

SEQ ID NO: 1738776 - RNA, 19 nt, Homo sapiens
  misc_RNA (1)...(19): siRNA sense strand
ggaaaccucgcaacaggau

SEQ ID NO: 1738777 - RNA, 19 nt, Homo sapiens
  misc_RNA (1)...(19): siRNA sense strand
gggagguuauccugggaaa

SEQ ID NO: 1738778 - RNA, 19 nt, Homo sapiens
  misc_RNA (1)...(19): siRNA sense strand
acaaggaagagaagaaaga

SEQ ID NO: 1738779 - RNA, 19 nt, Homo sapiens
  misc_RNA (1)...(19): siRNA sense strand
gcugagcccuggugugaac

SEQ ID NO: 1738780 - RNA, 19 nt, Homo sapiens
  misc_RNA (1)...(19): siRNA sense strand
ggaagaagaaugggagaag

SEQ ID NO: 1738781 - RNA, 19 nt, Homo sapiens
  misc_RNA (1)...(19): siRNA sense strand
caaagcugaugccauuguc

SEQ ID NO: 1738782 - RNA, 19 nt, Homo sapiens
  misc_RNA (1)...(19): siRNA sense strand
ucaaggguccugaguuugu

SEQ ID NO: 1738783 - RNA, 19 nt, Homo sapiens
  misc_RNA (1)...(19): siRNA sense strand
gugcuggaguggcagaaga

SEQ ID NO: 1738784 - RNA, 19 nt, Homo sapiens
  misc_RNA (1)...(19): siRNA sense strand
ggacaagcuccuccuuuac

SEQ ID NO: 1738785 - RNA, 19 nt, Homo sapiens
  misc_RNA (1)...(19): siRNA sense strand
gaccugcucccucuucaug

SEQ ID NO: 1738786 - RNA, 19 nt, Homo sapiens
  misc_RNA (1)...(19): siRNA sense strand
agaaagaagacuccgagaa

SEQ ID NO: 1738787 - RNA, 19 nt, Homo sapiens
  misc_RNA (1)...(19): siRNA sense strand
caaggaagagaagaaagaa

SEQ ID NO: 1738788 - RNA, 19 nt, Homo sapiens
  misc_RNA (1)...(19): siRNA sense strand
ggaaggaggcacggagaau

SEQ ID NO: 1738789 - RNA, 19 nt, Homo sapiens
  misc_RNA (1)...(19): siRNA sense strand
acaaagaugaggagugguu

SEQ ID NO: 1738790 - RNA, 19 nt, Homo sapiens
  misc_RNA (1)...(19): siRNA sense strand
cccagacgauguugauuuc

SEQ ID NO: 1738791 - RNA, 19 nt, Homo sapiens
  misc_RNA (1)...(19): siRNA sense strand
uggaguggcagaagacuuu

SEQ ID NO: 1738792 - RNA, 19 nt, Homo sapiens
  misc_RNA (1)...(19): siRNA sense strand
caucgugcauuccuuggau

SEQ ID NO: 1738793 - RNA, 19 nt, Homo sapiens
  misc_RNA (1)...(19): siRNA sense strand
agaaguugauuaaggucuu

SEQ ID NO: 1738794 - RNA, 19 nt, Homo sapiens
  misc_RNA (1)...(19): siRNA sense strand
gaugcagccgugauuaaga

SEQ ID NO: 1738795 - RNA, 19 nt, Homo sapiens
  misc_RNA (1)...(19): siRNA sense strand
gcgcuauaaugacuacaag

SEQ ID NO: 1738796 - RNA, 19 nt, Homo sapiens
  misc_RNA (1)...(19): siRNA sense strand
aggagaagcccaaggaaga

SEQ ID NO: 1738797 - RNA, 19 nt, Homo sapiens
  misc_RNA (1)...(19): siRNA sense strand
aaaccaacgacaaggauga

SEQ ID NO: 1738798 - RNA, 19 nt, Homo sapiens
  misc_RNA (1)...(19): siRNA sense strand
agaaggagaagcccaagga

SEQ ID NO: 1738799 - RNA, 19 nt, Homo sapiens
  misc_RNA (1)...(19): siRNA sense strand
gggacaaggaagagaagaa

SEQ ID NO: 1738800 - RNA, 19 nt, Homo sapiens
  misc_RNA (1)...(19): siRNA sense strand
caaggguccugaguuugug

SEQ ID NO: 1738801 - RNA, 19 nt, Homo sapiens
  misc_RNA (1)...(19): siRNA sense strand
agcaggaaguggagaaguu

SEQ ID NO: 1738802 - RNA, 19 nt, Homo sapiens
  misc_RNA (1)...(19): siRNA sense strand
caaagacccagagcaggaa

SEQ ID NO: 1738803 - RNA, 19 nt, Homo sapiens
  misc_RNA (1)...(19): siRNA sense strand
uuacaacaccugugaguac

SEQ ID NO: 1738804 - RNA, 19 nt, Homo sapiens
  misc_RNA (1)...(19): siRNA sense strand
gaagcccaaggaagaagaa

SEQ ID NO: 1738805 - RNA, 19 nt, Homo sapiens
  misc_RNA (1)...(19): siRNA sense strand
aggaagagaagaaagaaga

SEQ ID NO: 1738806 - RNA, 19 nt, Homo sapiens
  misc_RNA (1)...(19): siRNA sense strand
cagcaagaaagaagaagga

SEQ ID NO: 1738807 - RNA, 19 nt, Homo sapiens
  misc_RNA (1)...(19): siRNA sense strand
caaagaugaggagugguuu

SEQ ID NO: 1738808 - RNA, 19 nt, Homo sapiens
  misc_RNA (1)...(19): siRNA sense strand
ucacgccguugcugagugu

SEQ ID NO: 1738809 - RNA, 19 nt, Homo sapiens
  misc_RNA (1)...(19): siRNA sense strand
ccaacgacaaggaugagaa

SEQ ID NO: 1738810 - RNA, 19 nt, Homo sapiens
  misc_RNA (1)...(19): siRNA sense strand
caacagaugcaggauuucu

SEQ ID NO: 1738811 - RNA, 19 nt, Homo sapiens
  misc_RNA (1)...(19): siRNA sense strand
caagcgcuauaaugacuac

SEQ ID NO: 1738812 - RNA, 19 nt, Homo sapiens
  misc_RNA (1)...(19): siRNA sense strand
gcaggaaguggagaaguuc

SEQ ID NO: 1738813 - RNA, 19 nt, Homo sapiens
  misc_RNA (1)...(19): siRNA sense strand
gaggaagaggcccagaaga

SEQ ID NO: 1738814 - RNA, 19 nt, Homo sapiens
  misc_RNA (1)...(19): siRNA sense strand
acaaggaugagaagaagga

SEQ ID NO: 1738815 - RNA, 19 nt, Homo sapiens
  misc_RNA (1)...(19): siRNA sense strand
ugacaguucuaaugaugac

SEQ ID NO: 1738816 - RNA, 19 nt, Homo sapiens
  misc_RNA (1)...(19): siRNA sense strand
gaccuucgaccgcaguguu

SEQ ID NO: 1738817 - RNA, 19 nt, Homo sapiens
  misc_RNA (1)...(19): siRNA sense strand
cagccgugauuaagaugga

SEQ ID NO: 1738818 - RNA, 19 nt, Homo sapiens
  misc_RNA (1)...(19): siRNA sense strand
caggaacugggcaaggaua

SEQ ID NO: 1738819 - RNA, 19 nt, Homo sapiens
  misc_RNA (1)...(19): siRNA sense strand
cgcaggaacugggcaagga

SEQ ID NO: 1738820 - RNA, 19 nt, Homo sapiens
  misc_RNA (1)...(19): siRNA sense strand
cgggaugagaaguugauua

SEQ ID NO: 1738821 - RNA, 19 nt, Homo sapiens
  misc_RNA (1)...(19): siRNA sense strand
ccgucaagcgcuauaauga

SEQ ID NO: 1738822 - RNA, 19 nt, Homo sapiens
  misc_RNA (1)...(19): siRNA sense strand
gagggcagcgugucagagu

SEQ ID NO: 1738823 - RNA, 19 nt, Homo sapiens
  misc_RNA (1)...(19): siRNA sense strand
caacgacaaggaugagaag

SEQ ID NO: 1738824 - RNA, 19 nt, Homo sapiens
  misc_RNA (1)...(19): siRNA sense strand
aggaagaggcccagaagau

SEQ ID NO: 1738825 - RNA, 19 nt, Homo sapiens
  misc_RNA (1)...(19): siRNA sense strand
uaacaacuuccucacugau

SEQ ID NO: 1738826 - RNA, 19 nt, Homo sapiens
  misc_RNA (1)...(19): siRNA sense strand
gcaguuaccugacguauga

SEQ ID NO: 1738827 - RNA, 19 nt, Homo sapiens
  misc_RNA (1)...(19): siRNA sense strand
gaucaaauguguucaugag

SEQ ID NO: 1738828 - RNA, 19 nt, Homo sapiens
  misc_RNA (1)...(19): siRNA sense strand
aaauugcucugcacacuaa

SEQ ID NO: 1738829 - RNA, 19 nt, Homo sapiens
  misc_RNA (1)...(19): siRNA sense strand
gaaagauaaccguggauga

SEQ ID NO: 1738830 - RNA, 19 nt, Homo sapiens
  misc_RNA (1)...(19): siRNA sense strand
caaauguguucaugagguu

SEQ ID NO: 1738831 - RNA, 19 nt, Homo sapiens
  misc_RNA (1)...(19): siRNA sense strand
gaaauugcucugcacacua

SEQ ID NO: 1738832 - RNA, 19 nt, Homo sapiens
  misc_RNA (1)...(19): siRNA sense strand
ggauggagcccucguguuc

SEQ ID NO: 1738833 - RNA, 19 nt, Homo sapiens
  misc_RNA (1)...(19): siRNA sense strand
caauggagcucuguaugug

SEQ ID NO: 1738834 - RNA, 19 nt, Homo sapiens
  misc_RNA (1)...(19): siRNA sense strand
ccauugagaucccgcaguu

SEQ ID NO: 1738835 - RNA, 19 nt, Homo sapiens
  misc_RNA (1)...(19): siRNA sense strand
ggaaauugcucugcacacu

SEQ ID NO: 1738836 - RNA, 19 nt, Homo sapiens
  misc_RNA (1)...(19): siRNA sense strand
ugacaacccagauaucuug

SEQ ID NO: 1738837 - RNA, 19 nt, Homo sapiens
  misc_RNA (1)...(19): siRNA sense strand
gaagagggugucaggauca

SEQ ID NO: 1738838 - RNA, 19 nt, Homo sapiens
  misc_RNA (1)...(19): siRNA sense strand
uaacaggcaauauaugaga

SEQ ID NO: 1738839 - RNA, 19 nt, Homo sapiens
  misc_RNA (1)...(19): siRNA sense strand
caacccagauaucuugaag

SEQ ID NO: 1738840 - RNA, 19 nt, Homo sapiens
  misc_RNA (1)...(19): siRNA sense strand
gaucauagaagccauugag

SEQ ID NO: 1738841 - RNA, 19 nt, Homo sapiens
  misc_RNA (1)...(19): siRNA sense strand
guccaccgauuaccacauu

SEQ ID NO: 1738842 - RNA, 19 nt, Homo sapiens
  misc_RNA (1)...(19): siRNA sense strand
acacuaacaggcaauauau

SEQ ID NO: 1738843 - RNA, 19 nt, Homo sapiens
  misc_RNA (1)...(19): siRNA sense strand
gaauggcuccuucaacgau

SEQ ID NO: 1738844 - RNA, 19 nt, Homo sapiens
  misc_RNA (1)...(19): siRNA sense strand
cauagaagccauugagauc

SEQ ID NO: 1738845 - RNA, 19 nt, Homo sapiens
  misc_RNA (1)...(19): siRNA sense strand
uaaaacaacugccaaggau

SEQ ID NO: 1738846 - RNA, 19 nt, Homo sapiens
  misc_RNA (1)...(19): siRNA sense strand
guauguggguggaaugaag

SEQ ID NO: 1738847 - RNA, 19 nt, Homo sapiens
  misc_RNA (1)...(19): siRNA sense strand
cacacuaacaggcaauaua

SEQ ID NO: 1738848 - RNA, 19 nt, Homo sapiens
  misc_RNA (1)...(19): siRNA sense strand
gcccucguguucagcuaua

SEQ ID NO: 1738849 - RNA, 19 nt, Homo sapiens
  misc_RNA (1)...(19): siRNA sense strand
agauaaccguggaugacua

SEQ ID NO: 1738850 - RNA, 19 nt, Homo sapiens
  misc_RNA (1)...(19): siRNA sense strand
gcagugguguggcauccau

SEQ ID NO: 1738851 - RNA, 19 nt, Homo sapiens
  misc_RNA (1)...(19): siRNA sense strand
gauaaccguggaugacuau

SEQ ID NO: 1738852 - RNA, 19 nt, Homo sapiens
  misc_RNA (1)...(19): siRNA sense strand
ggcuguaucucucacuuca

SEQ ID NO: 1738853 - RNA, 19 nt, Homo sapiens
  misc_RNA (1)...(19): siRNA sense strand
caacagcgacuucauuucc

SEQ ID NO: 1738854 - RNA, 19 nt, Homo sapiens
  misc_RNA (1)...(19): siRNA sense strand
acuaacaggcaauauauga

SEQ ID NO: 1738855 - RNA, 19 nt, Homo sapiens
  misc_RNA (1)...(19): siRNA sense strand
ucaauggagcucuguaugu

SEQ ID NO: 1738856 - RNA, 19 nt, Homo sapiens
  misc_RNA (1)...(19): siRNA sense strand
auugagaucccgcaguuua

SEQ ID NO: 1738857 - RNA, 19 nt, Homo sapiens
  misc_RNA (1)...(19): siRNA sense strand
gagggugucaggaucaaga

SEQ ID NO: 1738858 - RNA, 19 nt, Homo sapiens
  misc_RNA (1)...(19): siRNA sense strand
gauggccagucaggaaaga

SEQ ID NO: 1738859 - RNA, 19 nt, Homo sapiens
  misc_RNA (1)...(19): siRNA sense strand
cguggaagaugccguggau

SEQ ID NO: 1738860 - RNA, 19 nt, Homo sapiens
  misc_RNA (1)...(19): siRNA sense strand
cccaacagcgacuucauuu

SEQ ID NO: 1738861 - RNA, 19 nt, Homo sapiens
  misc_RNA (1)...(19): siRNA sense strand
gggauggccagucaggaaa

SEQ ID NO: 1738862 - RNA, 19 nt, Homo sapiens
  misc_RNA (1)...(19): siRNA sense strand
cguuagggauggccaguca

SEQ ID NO: 1738863 - RNA, 19 nt, Homo sapiens
  misc_RNA (1)...(19): siRNA sense strand
caucaauggagcucuguau

SEQ ID NO: 1738864 - RNA, 19 nt, Homo sapiens
  misc_RNA (1)...(19): siRNA sense strand
aagaucaaauguguucaug

SEQ ID NO: 1738865 - RNA, 19 nt, Homo sapiens
  misc_RNA (1)...(19): siRNA sense strand
gagcccucguguucagcua

SEQ ID NO: 1738866 - RNA, 19 nt, Homo sapiens
  misc_RNA (1)...(19): siRNA sense strand
caagaucaaauguguucau

SEQ ID NO: 1738867 - RNA, 19 nt, Homo sapiens
  misc_RNA (1)...(19): siRNA sense strand
ggccagucaggaaagauaa

SEQ ID NO: 1738868 - RNA, 19 nt, Homo sapiens
  misc_RNA (1)...(19): siRNA sense strand
gcacacuaacaggcaauau

SEQ ID NO: 1738869 - RNA, 19 nt, Homo sapiens
  misc_RNA (1)...(19): siRNA sense strand
cguaugacaacccagauau

SEQ ID NO: 1738870 - RNA, 19 nt, Homo sapiens
  misc_RNA (1)...(19): siRNA sense strand
ugcggcagcuuaacaucaa

SEQ ID NO: 1738871 - RNA, 19 nt, Homo sapiens
  misc_RNA (1)...(19): siRNA sense strand
aaccguggaugacuaugga

SEQ ID NO: 1738872 - RNA, 19 nt, Homo sapiens
  misc_RNA (1)...(19): siRNA sense strand
ucauagaagccauugagau

SEQ ID NO: 1738873 - RNA, 19 nt, Homo sapiens
  misc_RNA (1)...(19): siRNA sense strand
gcucgugggcuguaucucu

SEQ ID NO: 1738874 - RNA, 19 nt, Homo sapiens
  misc_RNA (1)...(19): siRNA sense strand
acagcgacuucauuuccuu

SEQ ID NO: 1738875 - RNA, 19 nt, Homo sapiens
  misc_RNA (1)...(19): siRNA sense strand
uggguggaaugaaggaaau

SEQ ID NO: 1738876 - RNA, 19 nt, Homo sapiens
  misc_RNA (1)...(19): siRNA sense strand
aauguguucaugagguuua

SEQ ID NO: 1738877 - RNA, 19 nt, Homo sapiens
  misc_RNA (1)...(19): siRNA sense strand
uggccagucaggaaagaua

SEQ ID NO: 1738878 - RNA, 19 nt, Homo sapiens
  misc_RNA (1)...(19): siRNA sense strand
gcaguuaccugacguauga

SEQ ID NO: 1738879 - RNA, 19 nt, Homo sapiens
  misc_RNA (1)...(19): siRNA sense strand
gaucaaauguguucaugag

SEQ ID NO: 1738880 - RNA, 19 nt, Homo sapiens
  misc_RNA (1)...(19): siRNA sense strand
aaauugcucugcacacuaa

SEQ ID NO: 1738881 - RNA, 19 nt, Homo sapiens
  misc_RNA (1)...(19): siRNA sense strand
gaaagauaaccguggauga

SEQ ID NO: 1738882 - RNA, 19 nt, Homo sapiens
  misc_RNA (1)...(19): siRNA sense strand
caaauguguucaugagguu

SEQ ID NO: 1738883 - RNA, 19 nt, Homo sapiens
  misc_RNA (1)...(19): siRNA sense strand
gaaauugcucugcacacua

SEQ ID NO: 1738884 - RNA, 19 nt, Homo sapiens
  misc_RNA (1)...(19): siRNA sense strand
ggauggagcccucguguuc

SEQ ID NO: 1738885 - RNA, 19 nt, Homo sapiens
  misc_RNA (1)...(19): siRNA sense strand
caauggagcucuguaugug

SEQ ID NO: 1738886 - RNA, 19 nt, Homo sapiens
  misc_RNA (1)...(19): siRNA sense strand
ccauugagaucccgcaguu

SEQ ID NO: 1738887 - RNA, 19 nt, Homo sapiens
  misc_RNA (1)...(19): siRNA sense strand
ggaaauugcucugcacacu

SEQ ID NO: 1738888 - RNA, 19 nt, Homo sapiens
  misc_RNA (1)...(19): siRNA sense strand
ugacaacccagauaucuug

SEQ ID NO: 1738889 - RNA, 19 nt, Homo sapiens
  misc_RNA (1)...(19): siRNA sense strand
gaagagggugucaggauca

SEQ ID NO: 1738890 - RNA, 19 nt, Homo sapiens
  misc_RNA (1)...(19): siRNA sense strand
uaacaggcaauauaugaga

SEQ ID NO: 1738891 - RNA, 19 nt, Homo sapiens
  misc_RNA (1)...(19): siRNA sense strand
caacccagauaucuugaag

SEQ ID NO: 1738892 - RNA, 19 nt, Homo sapiens
  misc_RNA (1)...(19): siRNA sense strand
gaucauagaagccauugag

SEQ ID NO: 1738893 - RNA, 19 nt, Homo sapiens
  misc_RNA (1)...(19): siRNA sense strand
guccaccgauuaccacauu

SEQ ID NO: 1738894 - RNA, 19 nt, Homo sapiens
  misc_RNA (1)...(19): siRNA sense strand
acacuaacaggcaauauau

SEQ ID NO: 1738895 - RNA, 19 nt, Homo sapiens
  misc_RNA (1)...(19): siRNA sense strand
gaauggcuccuucaacgau

SEQ ID NO: 1738896 - RNA, 19 nt, Homo sapiens
  misc_RNA (1)...(19): siRNA sense strand
cauagaagccauugagauc

SEQ ID NO: 1738897 - RNA, 19 nt, Homo sapiens
  misc_RNA (1)...(19): siRNA sense strand
uaaaacaacugccaaggau

SEQ ID NO: 1738898 - RNA, 19 nt, Homo sapiens
  misc_RNA (1)...(19): siRNA sense strand
guauguggguggaaugaag

SEQ ID NO: 1738899 - RNA, 19 nt, Homo sapiens
  misc_RNA (1)...(19): siRNA sense strand
cacacuaacaggcaauaua

SEQ ID NO: 1738900 - RNA, 19 nt, Homo sapiens
  misc_RNA (1)...(19): siRNA sense strand
gcccucguguucagcuaua

SEQ ID NO: 1738901 - RNA, 19 nt, Homo sapiens
  misc_RNA (1)...(19): siRNA sense strand
agauaaccguggaugacua

SEQ ID NO: 1738902 - RNA, 19 nt, Homo sapiens
  misc_RNA (1)...(19): siRNA sense strand
gcagugguguggcauccau

SEQ ID NO: 1738903 - RNA, 19 nt, Homo sapiens
  misc_RNA (1)...(19): siRNA sense strand
gauaaccguggaugacuau

SEQ ID NO: 1738904 - RNA, 19 nt, Homo sapiens
  misc_RNA (1)...(19): siRNA sense strand
ggcuguaucucucacuuca

SEQ ID NO: 1738905 - RNA, 19 nt, Homo sapiens
  misc_RNA (1)...(19): siRNA sense strand
caacagcgacuucauuucc

SEQ ID NO: 1738906 - RNA, 19 nt, Homo sapiens
  misc_RNA (1)...(19): siRNA sense strand
acuaacaggcaauauauga

SEQ ID NO: 1738907 - RNA, 19 nt, Homo sapiens
  misc_RNA (1)...(19): siRNA sense strand
ucaauggagcucuguaugu

SEQ ID NO: 1738908 - RNA, 19 nt, Homo sapiens
  misc_RNA (1)...(19): siRNA sense strand
auugagaucccgcaguuua

SEQ ID NO: 1738909 - RNA, 19 nt, Homo sapiens
  misc_RNA (1)...(19): siRNA sense strand
gagggugucaggaucaaga

SEQ ID NO: 1738910 - RNA, 19 nt, Homo sapiens
  misc_RNA (1)...(19): siRNA sense strand
gauggccagucaggaaaga

SEQ ID NO: 1738911 - RNA, 19 nt, Homo sapiens
  misc_RNA (1)...(19): siRNA sense strand
cguggaagaugccguggau

SEQ ID NO: 1738912 - RNA, 19 nt, Homo sapiens
  misc_RNA (1)...(19): siRNA sense strand
cccaacagcgacuucauuu

SEQ ID NO: 1738913 - RNA, 19 nt, Homo sapiens
  misc_RNA (1)...(19): siRNA sense strand
gggauggccagucaggaaa

SEQ ID NO: 1738914 - RNA, 19 nt, Homo sapiens
  misc_RNA (1)...(19): siRNA sense strand
cguuagggauggccaguca

SEQ ID NO: 1738915 - RNA, 19 nt, Homo sapiens
  misc_RNA (1)...(19): siRNA sense strand
caucaauggagcucuguau

SEQ ID NO: 1738916 - RNA, 19 nt, Homo sapiens
  misc_RNA (1)...(19): siRNA sense strand
aagaucaaauguguucaug

SEQ ID NO: 1738917 - RNA, 19 nt, Homo sapiens
  misc_RNA (1)...(19): siRNA sense strand
gagcccucguguucagcua

SEQ ID NO: 1738918 - RNA, 19 nt, Homo sapiens
  misc_RNA (1)...(19): siRNA sense strand
caagaucaaauguguucau

SEQ ID NO: 1738919 - RNA, 19 nt, Homo sapiens
  misc_RNA (1)...(19): siRNA sense strand
ggccagucaggaaagauaa

SEQ ID NO: 1738920 - RNA, 19 nt, Homo sapiens
  misc_RNA (1)...(19): siRNA sense strand
gcacacuaacaggcaauau

SEQ ID NO: 1738921 - RNA, 19 nt, Homo sapiens
  misc_RNA (1)...(19): siRNA sense strand
cguaugacaacccagauau

SEQ ID NO: 1738922 - RNA, 19 nt, Homo sapiens
  misc_RNA (1)...(19): siRNA sense strand
ugcggcagcuuaacaucaa

SEQ ID NO: 1738923 - RNA, 19 nt, Homo sapiens
  misc_RNA (1)...(19): siRNA sense strand
aaccguggaugacuaugga

SEQ ID NO: 1738924 - RNA, 19 nt, Homo sapiens
  misc_RNA (1)...(19): siRNA sense strand
ucauagaagccauugagau

SEQ ID NO: 1738925 - RNA, 19 nt, Homo sapiens
  misc_RNA (1)...(19): siRNA sense strand
gcucgugggcuguaucucu

SEQ ID NO: 1738926 - RNA, 19 nt, Homo sapiens
  misc_RNA (1)...(19): siRNA sense strand
acagcgacuucauuuccuu

SEQ ID NO: 1738927 - RNA, 19 nt, Homo sapiens
  misc_RNA (1)...(19): siRNA sense strand
uggguggaaugaaggaaau

SEQ ID NO: 1738928 - RNA, 19 nt, Homo sapiens
  misc_RNA (1)...(19): siRNA sense strand
aauguguucaugagguuua

SEQ ID NO: 1738929 - RNA, 19 nt, Homo sapiens
  misc_RNA (1)...(19): siRNA sense strand
uggccagucaggaaagaua

SEQ ID NO: 1738930 - RNA, 19 nt, Homo sapiens
  misc_RNA (1)...(19): siRNA sense strand
gcaguuaccugacguauga

SEQ ID NO: 1738931 - RNA, 19 nt, Homo sapiens
  misc_RNA (1)...(19): siRNA sense strand
gaucaaauguguucaugag

SEQ ID NO: 1738932 - RNA, 19 nt, Homo sapiens
  misc_RNA (1)...(19): siRNA sense strand
aaauugcucugcacacuaa

SEQ ID NO: 1738933 - RNA, 19 nt, Homo sapiens
  misc_RNA (1)...(19): siRNA sense strand
gaaagauaaccguggauga

SEQ ID NO: 1738934 - RNA, 19 nt, Homo sapiens
  misc_RNA (1)...(19): siRNA sense strand
caaauguguucaugagguu

SEQ ID NO: 1738935 - RNA, 19 nt, Homo sapiens
  misc_RNA (1)...(19): siRNA sense strand
gaaauugcucugcacacua

SEQ ID NO: 1738936 - RNA, 19 nt, Homo sapiens
  misc_RNA (1)...(19): siRNA sense strand
ggauggagcccucguguuc

SEQ ID NO: 1738937 - RNA, 19 nt, Homo sapiens
  misc_RNA (1)...(19): siRNA sense strand
caauggagcucuguaugug

SEQ ID NO: 1738938 - RNA, 19 nt, Homo sapiens
  misc_RNA (1)...(19): siRNA sense strand
ccauugagaucccgcaguu

SEQ ID NO: 1738939 - RNA, 19 nt, Homo sapiens
  misc_RNA (1)...(19): siRNA sense strand
ggaaauugcucugcacacu

SEQ ID NO: 1738940 - RNA, 19 nt, Homo sapiens
  misc_RNA (1)...(19): siRNA sense strand
ugacaacccagauaucuug

SEQ ID NO: 1738941 - RNA, 19 nt, Homo sapiens
  misc_RNA (1)...(19): siRNA sense strand
gaagagggugucaggauca

SEQ ID NO: 1738942 - RNA, 19 nt, Homo sapiens
  misc_RNA (1)...(19): siRNA sense strand
uaacaggcaauauaugaga

SEQ ID NO: 1738943 - RNA, 19 nt, Homo sapiens
  misc_RNA (1)...(19): siRNA sense strand
caacccagauaucuugaag

SEQ ID NO: 1738944 - RNA, 19 nt, Homo sapiens
  misc_RNA (1)...(19): siRNA sense strand
gaucauagaagccauugag

SEQ ID NO: 1738945 - RNA, 19 nt, Homo sapiens
  misc_RNA (1)...(19): siRNA sense strand
guccaccgauuaccacauu

SEQ ID NO: 1738946 - RNA, 19 nt, Homo sapiens
  misc_RNA (1)...(19): siRNA sense strand
acacuaacaggcaauauau

SEQ ID NO: 1738947 - RNA, 19 nt, Homo sapiens
  misc_RNA (1)...(19): siRNA sense strand
gaauggcuccuucaacgau

SEQ ID NO: 1738948 - RNA, 19 nt, Homo sapiens
  misc_RNA (1)...(19): siRNA sense strand
cauagaagccauugagauc

SEQ ID NO: 1738949 - RNA, 19 nt, Homo sapiens
  misc_RNA (1)...(19): siRNA sense strand
uaaaacaacugccaaggau

SEQ ID NO: 1738950 - RNA, 19 nt, Homo sapiens
  misc_RNA (1)...(19): siRNA sense strand
guauguggguggaaugaag

SEQ ID NO: 1738951 - RNA, 19 nt, Homo sapiens
  misc_RNA (1)...(19): siRNA sense strand
cacacuaacaggcaauaua

SEQ ID NO: 1738952 - RNA, 19 nt, Homo sapiens
  misc_RNA (1)...(19): siRNA sense strand
gcccucguguucagcuaua

SEQ ID NO: 1738953 - RNA, 19 nt, Homo sapiens
  misc_RNA (1)...(19): siRNA sense strand
agauaaccguggaugacua

SEQ ID NO: 1738954 - RNA, 19 nt, Homo sapiens
  misc_RNA (1)...(19): siRNA sense strand
gcagugguguggcauccau

SEQ ID NO: 1738955 - RNA, 19 nt, Homo sapiens
  misc_RNA (1)...(19): siRNA sense strand
gauaaccguggaugacuau

SEQ ID NO: 1738956 - RNA, 19 nt, Homo sapiens
  misc_RNA (1)...(19): siRNA sense strand
ggcuguaucucucacuuca

SEQ ID NO: 1738957 - RNA, 19 nt, Homo sapiens
  misc_RNA (1)...(19): siRNA sense strand
caacagcgacuucauuucc

SEQ ID NO: 1738958 - RNA, 19 nt, Homo sapiens
  misc_RNA (1)...(19): siRNA sense strand
acuaacaggcaauauauga

SEQ ID NO: 1738959 - RNA, 19 nt, Homo sapiens
  misc_RNA (1)...(19): siRNA sense strand
ucaauggagcucuguaugu

SEQ ID NO: 1738960 - RNA, 19 nt, Homo sapiens
  misc_RNA (1)...(19): siRNA sense strand
auugagaucccgcaguuua

SEQ ID NO: 1738961 - RNA, 19 nt, Homo sapiens
  misc_RNA (1)...(19): siRNA sense strand
gagggugucaggaucaaga

SEQ ID NO: 1738962 - RNA, 19 nt, Homo sapiens
  misc_RNA (1)...(19): siRNA sense strand
gauggccagucaggaaaga

SEQ ID NO: 1738963 - RNA, 19 nt, Homo sapiens
  misc_RNA (1)...(19): siRNA sense strand
cguggaagaugccguggau

SEQ ID NO: 1738964 - RNA, 19 nt, Homo sapiens
  misc_RNA (1)...(19): siRNA sense strand
cccaacagcgacuucauuu

SEQ ID NO: 1738965 - RNA, 19 nt, Homo sapiens
  misc_RNA (1)...(19): siRNA sense strand
gggauggccagucaggaaa

SEQ ID NO: 1738966 - RNA, 19 nt, Homo sapiens
  misc_RNA (1)...(19): siRNA sense strand
cguuagggauggccaguca

SEQ ID NO: 1738967 - RNA, 19 nt, Homo sapiens
  misc_RNA (1)...(19): siRNA sense strand
caucaauggagcucuguau

SEQ ID NO: 1738968 - RNA, 19 nt, Homo sapiens
  misc_RNA (1)...(19): siRNA sense strand
aagaucaaauguguucaug

SEQ ID NO: 1738969 - RNA, 19 nt, Homo sapiens
  misc_RNA (1)...(19): siRNA sense strand
gagcccucguguucagcua

SEQ ID NO: 1738970 - RNA, 19 nt, Homo sapiens
  misc_RNA (1)...(19): siRNA sense strand
caagaucaaauguguucau

SEQ ID NO: 1738971 - RNA, 19 nt, Homo sapiens
  misc_RNA (1)...(19): siRNA sense strand
ggccagucaggaaagauaa

SEQ ID NO: 1738972 - RNA, 19 nt, Homo sapiens
  misc_RNA (1)...(19): siRNA sense strand
gcacacuaacaggcaauau

SEQ ID NO: 1738973 - RNA, 19 nt, Homo sapiens
  misc_RNA (1)...(19): siRNA sense strand
cguaugacaacccagauau

SEQ ID NO: 1738974 - RNA, 19 nt, Homo sapiens
  misc_RNA (1)...(19): siRNA sense strand
ugcggcagcuuaacaucaa

SEQ ID NO: 1738975 - RNA, 19 nt, Homo sapiens
  misc_RNA (1)...(19): siRNA sense strand
aaccguggaugacuaugga

SEQ ID NO: 1738976 - RNA, 19 nt, Homo sapiens
  misc_RNA (1)...(19): siRNA sense strand
ucauagaagccauugagau

SEQ ID NO: 1738977 - RNA, 19 nt, Homo sapiens
  misc_RNA (1)...(19): siRNA sense strand
gcucgugggcuguaucucu

SEQ ID NO: 1738978 - RNA, 19 nt, Homo sapiens
  misc_RNA (1)...(19): siRNA sense strand
acagcgacuucauuuccuu

SEQ ID NO: 1738979 - RNA, 19 nt, Homo sapiens
  misc_RNA (1)...(19): siRNA sense strand
uggguggaaugaaggaaau

SEQ ID NO: 1738980 - RNA, 19 nt, Homo sapiens
  misc_RNA (1)...(19): siRNA sense strand
aauguguucaugagguuua

SEQ ID NO: 1738981 - RNA, 19 nt, Homo sapiens
  misc_RNA (1)...(19): siRNA sense strand
uggccagucaggaaagaua

SEQ ID NO: 1738982 - RNA, 19 nt, Homo sapiens
  misc_RNA (1)...(19): siRNA sense strand
aaauugcucugcacacuaa

SEQ ID NO: 1738983 - RNA, 19 nt, Homo sapiens
  misc_RNA (1)...(19): siRNA sense strand
gaaagauaaccguggauga

SEQ ID NO: 1738984 - RNA, 19 nt, Homo sapiens
  misc_RNA (1)...(19): siRNA sense strand
gaaauugcucugcacacua

SEQ ID NO: 1738985 - RNA, 19 nt, Homo sapiens
  misc_RNA (1)...(19): siRNA sense strand
ggauggagcccucguguuc

SEQ ID NO: 1738986 - RNA, 19 nt, Homo sapiens
  misc_RNA (1)...(19): siRNA sense strand
caauggagcucuguaugug

SEQ ID NO: 1738987 - RNA, 19 nt, Homo sapiens
  misc_RNA (1)...(19): siRNA sense strand
ggaaauugcucugcacacu

SEQ ID NO: 1738988 - RNA, 19 nt, Homo sapiens
  misc_RNA (1)...(19): siRNA sense strand
uaacaggcaauauaugaga

SEQ ID NO: 1738989 - RNA, 19 nt, Homo sapiens
  misc_RNA (1)...(19): siRNA sense strand
guccaccgauuaccacauu

SEQ ID NO: 1738990 - RNA, 19 nt, Homo sapiens
  misc_RNA (1)...(19): siRNA sense strand
acacuaacaggcaauauau

SEQ ID NO: 1738991 - RNA, 19 nt, Homo sapiens
  misc_RNA (1)...(19): siRNA sense strand
gaauggcuccuucaacgau

SEQ ID NO: 1738992 - RNA, 19 nt, Homo sapiens
  misc_RNA (1)...(19): siRNA sense strand
uaaaacaacugccaaggau

SEQ ID NO: 1738993 - RNA, 19 nt, Homo sapiens
  misc_RNA (1)...(19): siRNA sense strand
guauguggguggaaugaag

SEQ ID NO: 1738994 - RNA, 19 nt, Homo sapiens
  misc_RNA (1)...(19): siRNA sense strand
cacacuaacaggcaauaua

SEQ ID NO: 1738995 - RNA, 19 nt, Homo sapiens
  misc_RNA (1)...(19): siRNA sense strand
gcccucguguucagcuaua

SEQ ID NO: 1738996 - RNA, 19 nt, Homo sapiens
  misc_RNA (1)...(19): siRNA sense strand
agauaaccguggaugacua

SEQ ID NO: 1738997 - RNA, 19 nt, Homo sapiens
  misc_RNA (1)...(19): siRNA sense strand
gcagugguguggcauccau

SEQ ID NO: 1738998 - RNA, 19 nt, Homo sapiens
  misc_RNA (1)...(19): siRNA sense strand
gauaaccguggaugacuau

SEQ ID NO: 1738999 - RNA, 19 nt, Homo sapiens
  misc_RNA (1)...(19): siRNA sense strand
ggcuguaucucucacuuca

SEQ ID NO: 1739000 - RNA, 19 nt, Homo sapiens
  misc_RNA (1)...(19): siRNA sense strand
caacagcgacuucauuucc

SEQ ID NO: 1739001 - RNA, 19 nt, Homo sapiens
  misc_RNA (1)...(19): siRNA sense strand
acuaacaggcaauauauga

SEQ ID NO: 1739002 - RNA, 19 nt, Homo sapiens
  misc_RNA (1)...(19): siRNA sense strand
ucaauggagcucuguaugu

SEQ ID NO: 1739003 - RNA, 19 nt, Homo sapiens
  misc_RNA (1)...(19): siRNA sense strand
gauggccagucaggaaaga

SEQ ID NO: 1739004 - RNA, 19 nt, Homo sapiens
  misc_RNA (1)...(19): siRNA sense strand
cguggaagaugccguggau

SEQ ID NO: 1739005 - RNA, 19 nt, Homo sapiens
  misc_RNA (1)...(19): siRNA sense strand
cccaacagcgacuucauuu

SEQ ID NO: 1739006 - RNA, 19 nt, Homo sapiens
  misc_RNA (1)...(19): siRNA sense strand
gggauggccagucaggaaa

SEQ ID NO: 1739007 - RNA, 19 nt, Homo sapiens
  misc_RNA (1)...(19): siRNA sense strand
cguuagggauggccaguca

SEQ ID NO: 1739008 - RNA, 19 nt, Homo sapiens
  misc_RNA (1)...(19): siRNA sense strand
caucaauggagcucuguau

SEQ ID NO: 1739009 - RNA, 19 nt, Homo sapiens
  misc_RNA (1)...(19): siRNA sense strand
gagcccucguguucagcua

SEQ ID NO: 1739010 - RNA, 19 nt, Homo sapiens
  misc_RNA (1)...(19): siRNA sense strand
ggccagucaggaaagauaa

SEQ ID NO: 1739011 - RNA, 19 nt, Homo sapiens
  misc_RNA (1)...(19): siRNA sense strand
gcacacuaacaggcaauau

SEQ ID NO: 1739012 - RNA, 19 nt, Homo sapiens
  misc_RNA (1)...(19): siRNA sense strand
ugcggcagcuuaacaucaa

SEQ ID NO: 1739013 - RNA, 19 nt, Homo sapiens
  misc_RNA (1)...(19): siRNA sense strand
aaccguggaugacuaugga

SEQ ID NO: 1739014 - RNA, 19 nt, Homo sapiens
  misc_RNA (1)...(19): siRNA sense strand
gcucgugggcuguaucucu

SEQ ID NO: 1739015 - RNA, 19 nt, Homo sapiens
  misc_RNA (1)...(19): siRNA sense strand
uggguggaaugaaggaaau

SEQ ID NO: 1739016 - RNA, 19 nt, Homo sapiens
  misc_RNA (1)...(19): siRNA sense strand
acagcgacuucauuuccuu

SEQ ID NO: 1739017 - RNA, 19 nt, Homo sapiens
  misc_RNA (1)...(19): siRNA sense strand
uggccagucaggaaagaua

SEQ ID NO: 1739018 - RNA, 19 nt, Homo sapiens
  misc_RNA (1)...(19): siRNA sense strand
gcaguuaccugacguauga

SEQ ID NO: 1739019 - RNA, 19 nt, Homo sapiens
  misc_RNA (1)...(19): siRNA sense strand
gaucaaauguguucaugag

SEQ ID NO: 1739020 - RNA, 19 nt, Homo sapiens
  misc_RNA (1)...(19): siRNA sense strand
aaauugcucugcacacuaa

SEQ ID NO: 1739021 - RNA, 19 nt, Homo sapiens
  misc_RNA (1)...(19): siRNA sense strand
gaaagauaaccguggauga

SEQ ID NO: 1739022 - RNA, 19 nt, Homo sapiens
  misc_RNA (1)...(19): siRNA sense strand
caaauguguucaugagguu

SEQ ID NO: 1739023 - RNA, 19 nt, Homo sapiens
  misc_RNA (1)...(19): siRNA sense strand
gaaauugcucugcacacua

SEQ ID NO: 1739024 - RNA, 19 nt, Homo sapiens
  misc_RNA (1)...(19): siRNA sense strand
ggauggagcccucguguuc

SEQ ID NO: 1739025 - RNA, 19 nt, Homo sapiens
  misc_RNA (1)...(19): siRNA sense strand
caauggagcucuguaugug

SEQ ID NO: 1739026 - RNA, 19 nt, Homo sapiens
  misc_RNA (1)...(19): siRNA sense strand
ccauugagaucccgcaguu

SEQ ID NO: 1739027 - RNA, 19 nt, Homo sapiens
  misc_RNA (1)...(19): siRNA sense strand
ggaaauugcucugcacacu

SEQ ID NO: 1739028 - RNA, 19 nt, Homo sapiens
  misc_RNA (1)...(19): siRNA sense strand
ugacaacccagauaucuug

SEQ ID NO: 1739029 - RNA, 19 nt, Homo sapiens
  misc_RNA (1)...(19): siRNA sense strand
gaagagggugucaggauca

SEQ ID NO: 1739030 - RNA, 19 nt, Homo sapiens
  misc_RNA (1)...(19): siRNA sense strand
uaacaggcaauauaugaga

SEQ ID NO: 1739031 - RNA, 19 nt, Homo sapiens
  misc_RNA (1)...(19): siRNA sense strand
caacccagauaucuugaag

SEQ ID NO: 1739032 - RNA, 19 nt, Homo sapiens
  misc_RNA (1)...(19): siRNA sense strand
gaucauagaagccauugag

SEQ ID NO: 1739033 - RNA, 19 nt, Homo sapiens
  misc_RNA (1)...(19): siRNA sense strand
guccaccgauuaccacauu

SEQ ID NO: 1739034 - RNA, 19 nt, Homo sapiens
  misc_RNA (1)...(19): siRNA sense strand
acacuaacaggcaauauau

SEQ ID NO: 1739035 - RNA, 19 nt, Homo sapiens
  misc_RNA (1)...(19): siRNA sense strand
gaauggcuccuucaacgau

SEQ ID NO: 1739036 - RNA, 19 nt, Homo sapiens
  misc_RNA (1)...(19): siRNA sense strand
cauagaagccauugagauc

SEQ ID NO: 1739037 - RNA, 19 nt, Homo sapiens
  misc_RNA (1)...(19): siRNA sense strand
uaaaacaacugccaaggau

SEQ ID NO: 1739038 - RNA, 19 nt, Homo sapiens
  misc_RNA (1)...(19): siRNA sense strand
guauguggguggaaugaag

SEQ ID NO: 1739039 - RNA, 19 nt, Homo sapiens
  misc_RNA (1)...(19): siRNA sense strand
cacacuaacaggcaauaua

SEQ ID NO: 1739040 - RNA, 19 nt, Homo sapiens
  misc_RNA (1)...(19): siRNA sense strand
gcccucguguucagcuaua

SEQ ID NO: 1739041 - RNA, 19 nt, Homo sapiens
  misc_RNA (1)...(19): siRNA sense strand
agauaaccguggaugacua

SEQ ID NO: 1739042 - RNA, 19 nt, Homo sapiens
  misc_RNA (1)...(19): siRNA sense strand
gcagugguguggcauccau

SEQ ID NO: 1739043 - RNA, 19 nt, Homo sapiens
  misc_RNA (1)...(19): siRNA sense strand
gauaaccguggaugacuau

SEQ ID NO: 1739044 - RNA, 19 nt, Homo sapiens
  misc_RNA (1)...(19): siRNA sense strand
ggcuguaucucucacuuca

SEQ ID NO: 1739045 - RNA, 19 nt, Homo sapiens
  misc_RNA (1)...(19): siRNA sense strand
caacagcgacuucauuucc

SEQ ID NO: 1739046 - RNA, 19 nt, Homo sapiens
  misc_RNA (1)...(19): siRNA sense strand
acuaacaggcaauauauga

SEQ ID NO: 1739047 - RNA, 19 nt, Homo sapiens
  misc_RNA (1)...(19): siRNA sense strand
ucaauggagcucuguaugu

SEQ ID NO: 1739048 - RNA, 19 nt, Homo sapiens
  misc_RNA (1)...(19): siRNA sense strand
auugagaucccgcaguuua

SEQ ID NO: 1739049 - RNA, 19 nt, Homo sapiens
  misc_RNA (1)...(19): siRNA sense strand
gagggugucaggaucaaga

SEQ ID NO: 1739050 - RNA, 19 nt, Homo sapiens
  misc_RNA (1)...(19): siRNA sense strand
gauggccagucaggaaaga

SEQ ID NO: 1739051 - RNA, 19 nt, Homo sapiens
  misc_RNA (1)...(19): siRNA sense strand
cguggaagaugccguggau

SEQ ID NO: 1739052 - RNA, 19 nt, Homo sapiens
  misc_RNA (1)...(19): siRNA sense strand
cccaacagcgacuucauuu

SEQ ID NO: 1739053 - RNA, 19 nt, Homo sapiens
  misc_RNA (1)...(19): siRNA sense strand
gggauggccagucaggaaa

SEQ ID NO: 1739054 - RNA, 19 nt, Homo sapiens
  misc_RNA (1)...(19): siRNA sense strand
cguuagggauggccaguca

SEQ ID NO: 1739055 - RNA, 19 nt, Homo sapiens
  misc_RNA (1)...(19): siRNA sense strand
caucaauggagcucuguau

SEQ ID NO: 1739056 - RNA, 19 nt, Homo sapiens
  misc_RNA (1)...(19): siRNA sense strand
aagaucaaauguguucaug

SEQ ID NO: 1739057 - RNA, 19 nt, Homo sapiens
  misc_RNA (1)...(19): siRNA sense strand
gagcccucguguucagcua

SEQ ID NO: 1739058 - RNA, 19 nt, Homo sapiens
  misc_RNA (1)...(19): siRNA sense strand
caagaucaaauguguucau

SEQ ID NO: 1739059 - RNA, 19 nt, Homo sapiens
  misc_RNA (1)...(19): siRNA sense strand
ggccagucaggaaagauaa

SEQ ID NO: 1739060 - RNA, 19 nt, Homo sapiens
  misc_RNA (1)...(19): siRNA sense strand
gcacacuaacaggcaauau

SEQ ID NO: 1739061 - RNA, 19 nt, Homo sapiens
  misc_RNA (1)...(19): siRNA sense strand
cguaugacaacccagauau

SEQ ID NO: 1739062 - RNA, 19 nt, Homo sapiens
  misc_RNA (1)...(19): siRNA sense strand
ugcggcagcuuaacaucaa

SEQ ID NO: 1739063 - RNA, 19 nt, Homo sapiens
  misc_RNA (1)...(19): siRNA sense strand
aaccguggaugacuaugga

SEQ ID NO: 1739064 - RNA, 19 nt, Homo sapiens
  misc_RNA (1)...(19): siRNA sense strand
ucauagaagccauugagau

SEQ ID NO: 1739065 - RNA, 19 nt, Homo sapiens
  misc_RNA (1)...(19): siRNA sense strand
gcucgugggcuguaucucu

SEQ ID NO: 1739066 - RNA, 19 nt, Homo sapiens
  misc_RNA (1)...(19): siRNA sense strand
acagcgacuucauuuccuu

SEQ ID NO: 1739067 - RNA, 19 nt, Homo sapiens
  misc_RNA (1)...(19): siRNA sense strand
uggguggaaugaaggaaau

SEQ ID NO: 1739068 - RNA, 19 nt, Homo sapiens
  misc_RNA (1)...(19): siRNA sense strand
aauguguucaugagguuua

SEQ ID NO: 1739069 - RNA, 19 nt, Homo sapiens
  misc_RNA (1)...(19): siRNA sense strand
uggccagucaggaaagaua

SEQ ID NO: 1739070 - RNA, 19 nt, Homo sapiens
  misc_RNA (1)...(19): siRNA sense strand
gcaguuaccugacguauga

SEQ ID NO: 1739071 - RNA, 19 nt, Homo sapiens
  misc_RNA (1)...(19): siRNA sense strand
gaucaaauguguucaugag

SEQ ID NO: 1739072 - RNA, 19 nt, Homo sapiens
  misc_RNA (1)...(19): siRNA sense strand
aaauugcucugcacacuaa

SEQ ID NO: 1739073 - RNA, 19 nt, Homo sapiens
  misc_RNA (1)...(19): siRNA sense strand
gaaagauaaccguggauga

SEQ ID NO: 1739074 - RNA, 19 nt, Homo sapiens
  misc_RNA (1)...(19): siRNA sense strand
caaauguguucaugagguu

SEQ ID NO: 1739075 - RNA, 19 nt, Homo sapiens
  misc_RNA (1)...(19): siRNA sense strand
gaaauugcucugcacacua

SEQ ID NO: 1739076 - RNA, 19 nt, Homo sapiens
  misc_RNA (1)...(19): siRNA sense strand
ggauggagcccucguguuc

SEQ ID NO: 1739077 - RNA, 19 nt, Homo sapiens
  misc_RNA (1)...(19): siRNA sense strand
caauggagcucuguaugug

SEQ ID NO: 1739078 - RNA, 19 nt, Homo sapiens
  misc_RNA (1)...(19): siRNA sense strand
ccauugagaucccgcaguu

SEQ ID NO: 1739079 - RNA, 19 nt, Homo sapiens
  misc_RNA (1)...(19): siRNA sense strand
ggaaauugcucugcacacu

SEQ ID NO: 1739080 - RNA, 19 nt, Homo sapiens
  misc_RNA (1)...(19): siRNA sense strand
ugacaacccagauaucuug

SEQ ID NO: 1739081 - RNA, 19 nt, Homo sapiens
  misc_RNA (1)...(19): siRNA sense strand
gaagagggugucaggauca

SEQ ID NO: 1739082 - RNA, 19 nt, Homo sapiens
  misc_RNA (1)...(19): siRNA sense strand
uaacaggcaauauaugaga

SEQ ID NO: 1739083 - RNA, 19 nt, Homo sapiens
  misc_RNA (1)...(19): siRNA sense strand
caacccagauaucuugaag

SEQ ID NO: 1739084 - RNA, 19 nt, Homo sapiens
  misc_RNA (1)...(19): siRNA sense strand
gaucauagaagccauugag

SEQ ID NO: 1739085 - RNA, 19 nt, Homo sapiens
  misc_RNA (1)...(19): siRNA sense strand
guccaccgauuaccacauu

SEQ ID NO: 1739086 - RNA, 19 nt, Homo sapiens
  misc_RNA (1)...(19): siRNA sense strand
acacuaacaggcaauauau

SEQ ID NO: 1739087 - RNA, 19 nt, Homo sapiens
  misc_RNA (1)...(19): siRNA sense strand
gaauggcuccuucaacgau

SEQ ID NO: 1739088 - RNA, 19 nt, Homo sapiens
  misc_RNA (1)...(19): siRNA sense strand
cauagaagccauugagauc

SEQ ID NO: 1739089 - RNA, 19 nt, Homo sapiens
  misc_RNA (1)...(19): siRNA sense strand
uaaaacaacugccaaggau

SEQ ID NO: 1739090 - RNA, 19 nt, Homo sapiens
  misc_RNA (1)...(19): siRNA sense strand
guauguggguggaaugaag

SEQ ID NO: 1739091 - RNA, 19 nt, Homo sapiens
  misc_RNA (1)...(19): siRNA sense strand
cacacuaacaggcaauaua

SEQ ID NO: 1739092 - RNA, 19 nt, Homo sapiens
  misc_RNA (1)...(19): siRNA sense strand
gcccucguguucagcuaua

SEQ ID NO: 1739093 - RNA, 19 nt, Homo sapiens
  misc_RNA (1)...(19): siRNA sense strand
agauaaccguggaugacua

SEQ ID NO: 1739094 - RNA, 19 nt, Homo sapiens
  misc_RNA (1)...(19): siRNA sense strand
gcagugguguggcauccau

SEQ ID NO: 1739095 - RNA, 19 nt, Homo sapiens
  misc_RNA (1)...(19): siRNA sense strand
gauaaccguggaugacuau

SEQ ID NO: 1739096 - RNA, 19 nt, Homo sapiens
  misc_RNA (1)...(19): siRNA sense strand
ggcuguaucucucacuuca

SEQ ID NO: 1739097 - RNA, 19 nt, Homo sapiens
  misc_RNA (1)...(19): siRNA sense strand
caacagcgacuucauuucc

SEQ ID NO: 1739098 - RNA, 19 nt, Homo sapiens
  misc_RNA (1)...(19): siRNA sense strand
acuaacaggcaauauauga

SEQ ID NO: 1739099 - RNA, 19 nt, Homo sapiens
  misc_RNA (1)...(19): siRNA sense strand
ucaauggagcucuguaugu

SEQ ID NO: 1739100 - RNA, 19 nt, Homo sapiens
  misc_RNA (1)...(19): siRNA sense strand
auugagaucccgcaguuua

SEQ ID NO: 1739101 - RNA, 19 nt, Homo sapiens
  misc_RNA (1)...(19): siRNA sense strand
gagggugucaggaucaaga

SEQ ID NO: 1739102 - RNA, 19 nt, Homo sapiens
  misc_RNA (1)...(19): siRNA sense strand
gauggccagucaggaaaga

SEQ ID NO: 1739103 - RNA, 19 nt, Homo sapiens
  misc_RNA (1)...(19): siRNA sense strand
cguggaagaugccguggau

SEQ ID NO: 1739104 - RNA, 19 nt, Homo sapiens
  misc_RNA (1)...(19): siRNA sense strand
cccaacagcgacuucauuu

SEQ ID NO: 1739105 - RNA, 19 nt, Homo sapiens
  misc_RNA (1)...(19): siRNA sense strand
gggauggccagucaggaaa

SEQ ID NO: 1739106 - RNA, 19 nt, Homo sapiens
  misc_RNA (1)...(19): siRNA sense strand
cguuagggauggccaguca

SEQ ID NO: 1739107 - RNA, 19 nt, Homo sapiens
  misc_RNA (1)...(19): siRNA sense strand
caucaauggagcucuguau

SEQ ID NO: 1739108 - RNA, 19 nt, Homo sapiens
  misc_RNA (1)...(19): siRNA sense strand
aagaucaaauguguucaug

SEQ ID NO: 1739109 - RNA, 19 nt, Homo sapiens
  misc_RNA (1)...(19): siRNA sense strand
gagcccucguguucagcua

SEQ ID NO: 1739110 - RNA, 19 nt, Homo sapiens
  misc_RNA (1)...(19): siRNA sense strand
caagaucaaauguguucau

SEQ ID NO: 1739111 - RNA, 19 nt, Homo sapiens
  misc_RNA (1)...(19): siRNA sense strand
ggccagucaggaaagauaa

SEQ ID NO: 1739112 - RNA, 19 nt, Homo sapiens
  misc_RNA (1)...(19): siRNA sense strand
gcacacuaacaggcaauau

SEQ ID NO: 1739113 - RNA, 19 nt, Homo sapiens
  misc_RNA (1)...(19): siRNA sense strand
cguaugacaacccagauau

SEQ ID NO: 1739114 - RNA, 19 nt, Homo sapiens
  misc_RNA (1)...(19): siRNA sense strand
ugcggcagcuuaacaucaa

SEQ ID NO: 1739115 - RNA, 19 nt, Homo sapiens
  misc_RNA (1)...(19): siRNA sense strand
aaccguggaugacuaugga

SEQ ID NO: 1739116 - RNA, 19 nt, Homo sapiens
  misc_RNA (1)...(19): siRNA sense strand
ucauagaagccauugagau

SEQ ID NO: 1739117 - RNA, 19 nt, Homo sapiens
  misc_RNA (1)...(19): siRNA sense strand
gcucgugggcuguaucucu

SEQ ID NO: 1739118 - RNA, 19 nt, Homo sapiens
  misc_RNA (1)...(19): siRNA sense strand
acagcgacuucauuuccuu

SEQ ID NO: 1739119 - RNA, 19 nt, Homo sapiens
  misc_RNA (1)...(19): siRNA sense strand
uggguggaaugaaggaaau

SEQ ID NO: 1739120 - RNA, 19 nt, Homo sapiens
  misc_RNA (1)...(19): siRNA sense strand
aauguguucaugagguuua

SEQ ID NO: 1739121 - RNA, 19 nt, Homo sapiens
  misc_RNA (1)...(19): siRNA sense strand
uggccagucaggaaagaua

SEQ ID NO: 1739122 - RNA, 19 nt, Homo sapiens
  misc_RNA (1)...(19): siRNA sense strand
gcaguuaccugacguauga

SEQ ID NO: 1739123 - RNA, 19 nt, Homo sapiens
  misc_RNA (1)...(19): siRNA sense strand
gaucaaauguguucaugag

SEQ ID NO: 1739124 - RNA, 19 nt, Homo sapiens
  misc_RNA (1)...(19): siRNA sense strand
aaauugcucugcacacuaa

SEQ ID NO: 1739125 - RNA, 19 nt, Homo sapiens
  misc_RNA (1)...(19): siRNA sense strand
gaaagauaaccguggauga

SEQ ID NO: 1739126 - RNA, 19 nt, Homo sapiens
  misc_RNA (1)...(19): siRNA sense strand
caaauguguucaugagguu

SEQ ID NO: 1739127 - RNA, 19 nt, Homo sapiens
  misc_RNA (1)...(19): siRNA sense strand
gaaauugcucugcacacua

SEQ ID NO: 1739128 - RNA, 19 nt, Homo sapiens
  misc_RNA (1)...(19): siRNA sense strand
ggauggagcccucguguuc

SEQ ID NO: 1739129 - RNA, 19 nt, Homo sapiens
  misc_RNA (1)...(19): siRNA sense strand
caauggagcucuguaugug

SEQ ID NO: 1739130 - RNA, 19 nt, Homo sapiens
  misc_RNA (1)...(19): siRNA sense strand
ccauugagaucccgcaguu

SEQ ID NO: 1739131 - RNA, 19 nt, Homo sapiens
  misc_RNA (1)...(19): siRNA sense strand
ggaaauugcucugcacacu

SEQ ID NO: 1739132 - RNA, 19 nt, Homo sapiens
  misc_RNA (1)...(19): siRNA sense strand
ugacaacccagauaucuug

SEQ ID NO: 1739133 - RNA, 19 nt, Homo sapiens
  misc_RNA (1)...(19): siRNA sense strand
gaagagggugucaggauca

SEQ ID NO: 1739134 - RNA, 19 nt, Homo sapiens
  misc_RNA (1)...(19): siRNA sense strand
uaacaggcaauauaugaga

SEQ ID NO: 1739135 - RNA, 19 nt, Homo sapiens
  misc_RNA (1)...(19): siRNA sense strand
caacccagauaucuugaag

SEQ ID NO: 1739136 - RNA, 19 nt, Homo sapiens
  misc_RNA (1)...(19): siRNA sense strand
gaucauagaagccauugag

SEQ ID NO: 1739137 - RNA, 19 nt, Homo sapiens
  misc_RNA (1)...(19): siRNA sense strand
guccaccgauuaccacauu

SEQ ID NO: 1739138 - RNA, 19 nt, Homo sapiens
  misc_RNA (1)...(19): siRNA sense strand
acacuaacaggcaauauau

SEQ ID NO: 1739139 - RNA, 19 nt, Homo sapiens
  misc_RNA (1)...(19): siRNA sense strand
gaauggcuccuucaacgau

SEQ ID NO: 1739140 - RNA, 19 nt, Homo sapiens
  misc_RNA (1)...(19): siRNA sense strand
cauagaagccauugagauc

SEQ ID NO: 1739141 - RNA, 19 nt, Homo sapiens
  misc_RNA (1)...(19): siRNA sense strand
uaaaacaacugccaaggau

SEQ ID NO: 1739142 - RNA, 19 nt, Homo sapiens
  misc_RNA (1)...(19): siRNA sense strand
guauguggguggaaugaag

SEQ ID NO: 1739143 - RNA, 19 nt, Homo sapiens
  misc_RNA (1)...(19): siRNA sense strand
cacacuaacaggcaauaua

SEQ ID NO: 1739144 - RNA, 19 nt, Homo sapiens
  misc_RNA (1)...(19): siRNA sense strand
gcccucguguucagcuaua

SEQ ID NO: 1739145 - RNA, 19 nt, Homo sapiens
  misc_RNA (1)...(19): siRNA sense strand
agauaaccguggaugacua

SEQ ID NO: 1739146 - RNA, 19 nt, Homo sapiens
  misc_RNA (1)...(19): siRNA sense strand
gcagugguguggcauccau

SEQ ID NO: 1739147 - RNA, 19 nt, Homo sapiens
  misc_RNA (1)...(19): siRNA sense strand
gauaaccguggaugacuau

SEQ ID NO: 1739148 - RNA, 19 nt, Homo sapiens
  misc_RNA (1)...(19): siRNA sense strand
ggcuguaucucucacuuca

SEQ ID NO: 1739149 - RNA, 19 nt, Homo sapiens
  misc_RNA (1)...(19): siRNA sense strand
caacagcgacuucauuucc

SEQ ID NO: 1739150 - RNA, 19 nt, Homo sapiens
  misc_RNA (1)...(19): siRNA sense strand
acuaacaggcaauauauga

SEQ ID NO: 1739151 - RNA, 19 nt, Homo sapiens
  misc_RNA (1)...(19): siRNA sense strand
ucaauggagcucuguaugu

SEQ ID NO: 1739152 - RNA, 19 nt, Homo sapiens
  misc_RNA (1)...(19): siRNA sense strand
auugagaucccgcaguuua

SEQ ID NO: 1739153 - RNA, 19 nt, Homo sapiens
  misc_RNA (1)...(19): siRNA sense strand
gagggugucaggaucaaga

SEQ ID NO: 1739154 - RNA, 19 nt, Homo sapiens
  misc_RNA (1)...(19): siRNA sense strand
gauggccagucaggaaaga

SEQ ID NO: 1739155 - RNA, 19 nt, Homo sapiens
  misc_RNA (1)...(19): siRNA sense strand
cguggaagaugccguggau

SEQ ID NO: 1739156 - RNA, 19 nt, Homo sapiens
  misc_RNA (1)...(19): siRNA sense strand
cccaacagcgacuucauuu

SEQ ID NO: 1739157 - RNA, 19 nt, Homo sapiens
  misc_RNA (1)...(19): siRNA sense strand
gggauggccagucaggaaa

SEQ ID NO: 1739158 - RNA, 19 nt, Homo sapiens
  misc_RNA (1)...(19): siRNA sense strand
cguuagggauggccaguca

SEQ ID NO: 1739159 - RNA, 19 nt, Homo sapiens
  misc_RNA (1)...(19): siRNA sense strand
caucaauggagcucuguau

SEQ ID NO: 1739160 - RNA, 19 nt, Homo sapiens
  misc_RNA (1)...(19): siRNA sense strand
aagaucaaauguguucaug

SEQ ID NO: 1739161 - RNA, 19 nt, Homo sapiens
  misc_RNA (1)...(19): siRNA sense strand
gagcccucguguucagcua

SEQ ID NO: 1739162 - RNA, 19 nt, Homo sapiens
  misc_RNA (1)...(19): siRNA sense strand
caagaucaaauguguucau

SEQ ID NO: 1739163 - RNA, 19 nt, Homo sapiens
  misc_RNA (1)...(19): siRNA sense strand
ggccagucaggaaagauaa

SEQ ID NO: 1739164 - RNA, 19 nt, Homo sapiens
  misc_RNA (1)...(19): siRNA sense strand
gcacacuaacaggcaauau

SEQ ID NO: 1739165 - RNA, 19 nt, Homo sapiens
  misc_RNA (1)...(19): siRNA sense strand
cguaugacaacccagauau

SEQ ID NO: 1739166 - RNA, 19 nt, Homo sapiens
  misc_RNA (1)...(19): siRNA sense strand
ugcggcagcuuaacaucaa

SEQ ID NO: 1739167 - RNA, 19 nt, Homo sapiens
  misc_RNA (1)...(19): siRNA sense strand
aaccguggaugacuaugga

SEQ ID NO: 1739168 - RNA, 19 nt, Homo sapiens
  misc_RNA (1)...(19): siRNA sense strand
ucauagaagccauugagau

SEQ ID NO: 1739169 - RNA, 19 nt, Homo sapiens
  misc_RNA (1)...(19): siRNA sense strand
gcucgugggcuguaucucu

SEQ ID NO: 1739170 - RNA, 19 nt, Homo sapiens
  misc_RNA (1)...(19): siRNA sense strand
acagcgacuucauuuccuu

SEQ ID NO: 1739171 - RNA, 19 nt, Homo sapiens
  misc_RNA (1)...(19): siRNA sense strand
uggguggaaugaaggaaau

SEQ ID NO: 1739172 - RNA, 19 nt, Homo sapiens
  misc_RNA (1)...(19): siRNA sense strand
aauguguucaugagguuua

SEQ ID NO: 1739173 - RNA, 19 nt, Homo sapiens
  misc_RNA (1)...(19): siRNA sense strand
uggccagucaggaaagaua

SEQ ID NO: 1739174 - RNA, 19 nt, Homo sapiens
  misc_RNA (1)...(19): siRNA sense strand
aaauugcucugcacacuaa

SEQ ID NO: 1739175 - RNA, 19 nt, Homo sapiens
  misc_RNA (1)...(19): siRNA sense strand
gaaagauaaccguggauga

SEQ ID NO: 1739176 - RNA, 19 nt, Homo sapiens
  misc_RNA (1)...(19): siRNA sense strand
gaaauugcucugcacacua

SEQ ID NO: 1739177 - RNA, 19 nt, Homo sapiens
  misc_RNA (1)...(19): siRNA sense strand
ggauggagcccucguguuc

SEQ ID NO: 1739178 - RNA, 19 nt, Homo sapiens
  misc_RNA (1)...(19): siRNA sense strand
caauggagcucuguaugug

SEQ ID NO: 1739179 - RNA, 19 nt, Homo sapiens
  misc_RNA (1)...(19): siRNA sense strand
ggaaauugcucugcacacu

SEQ ID NO: 1739180 - RNA, 19 nt, Homo sapiens
  misc_RNA (1)...(19): siRNA sense strand
uaacaggcaauauaugaga

SEQ ID NO: 1739181 - RNA, 19 nt, Homo sapiens
  misc_RNA (1)...(19): siRNA sense strand
guccaccgauuaccacauu

SEQ ID NO: 1739182 - RNA, 19 nt, Homo sapiens
  misc_RNA (1)...(19): siRNA sense strand
acacuaacaggcaauauau

SEQ ID NO: 1739183 - RNA, 19 nt, Homo sapiens
  misc_RNA (1)...(19): siRNA sense strand
gaauggcuccuucaacgau

SEQ ID NO: 1739184 - RNA, 19 nt, Homo sapiens
  misc_RNA (1)...(19): siRNA sense strand
uaaaacaacugccaaggau

SEQ ID NO: 1739185 - RNA, 19 nt, Homo sapiens
  misc_RNA (1)...(19): siRNA sense strand
guauguggguggaaugaag

SEQ ID NO: 1739186 - RNA, 19 nt, Homo sapiens
  misc_RNA (1)...(19): siRNA sense strand
cacacuaacaggcaauaua

SEQ ID NO: 1739187 - RNA, 19 nt, Homo sapiens
  misc_RNA (1)...(19): siRNA sense strand
gcccucguguucagcuaua

SEQ ID NO: 1739188 - RNA, 19 nt, Homo sapiens
  misc_RNA (1)...(19): siRNA sense strand
agauaaccguggaugacua

SEQ ID NO: 1739189 - RNA, 19 nt, Homo sapiens
  misc_RNA (1)...(19): siRNA sense strand
gcagugguguggcauccau

SEQ ID NO: 1739190 - RNA, 19 nt, Homo sapiens
  misc_RNA (1)...(19): siRNA sense strand
gauaaccguggaugacuau

SEQ ID NO: 1739191 - RNA, 19 nt, Homo sapiens
  misc_RNA (1)...(19): siRNA sense strand
ggcuguaucucucacuuca

SEQ ID NO: 1739192 - RNA, 19 nt, Homo sapiens
  misc_RNA (1)...(19): siRNA sense strand
caacagcgacuucauuucc

SEQ ID NO: 1739193 - RNA, 19 nt, Homo sapiens
  misc_RNA (1)...(19): siRNA sense strand
acuaacaggcaauauauga

SEQ ID NO: 1739194 - RNA, 19 nt, Homo sapiens
  misc_RNA (1)...(19): siRNA sense strand
ucaauggagcucuguaugu

SEQ ID NO: 1739195 - RNA, 19 nt, Homo sapiens
  misc_RNA (1)...(19): siRNA sense strand
gauggccagucaggaaaga

SEQ ID NO: 1739196 - RNA, 19 nt, Homo sapiens
  misc_RNA (1)...(19): siRNA sense strand
cguggaagaugccguggau

SEQ ID NO: 1739197 - RNA, 19 nt, Homo sapiens
  misc_RNA (1)...(19): siRNA sense strand
cccaacagcgacuucauuu

SEQ ID NO: 1739198 - RNA, 19 nt, Homo sapiens
  misc_RNA (1)...(19): siRNA sense strand
gggauggccagucaggaaa

SEQ ID NO: 1739199 - RNA, 19 nt, Homo sapiens
  misc_RNA (1)...(19): siRNA sense strand
cguuagggauggccaguca

SEQ ID NO: 1739200 - RNA, 19 nt, Homo sapiens
  misc_RNA (1)...(19): siRNA sense strand
caucaauggagcucuguau

SEQ ID NO: 1739201 - RNA, 19 nt, Homo sapiens
  misc_RNA (1)...(19): siRNA sense strand
gagcccucguguucagcua

SEQ ID NO: 1739202 - RNA, 19 nt, Homo sapiens
  misc_RNA (1)...(19): siRNA sense strand
ggccagucaggaaagauaa

SEQ ID NO: 1739203 - RNA, 19 nt, Homo sapiens
  misc_RNA (1)...(19): siRNA sense strand
gcacacuaacaggcaauau

SEQ ID NO: 1739204 - RNA, 19 nt, Homo sapiens
  misc_RNA (1)...(19): siRNA sense strand
ugcggcagcuuaacaucaa

SEQ ID NO: 1739205 - RNA, 19 nt, Homo sapiens
  misc_RNA (1)...(19): siRNA sense strand
aaccguggaugacuaugga

SEQ ID NO: 1739206 - RNA, 19 nt, Homo sapiens
  misc_RNA (1)...(19): siRNA sense strand
gcucgugggcuguaucucu

SEQ ID NO: 1739207 - RNA, 19 nt, Homo sapiens
  misc_RNA (1)...(19): siRNA sense strand
uggguggaaugaaggaaau

SEQ ID NO: 1739208 - RNA, 19 nt, Homo sapiens
  misc_RNA (1)...(19): siRNA sense strand
acagcgacuucauuuccuu

SEQ ID NO: 1739209 - RNA, 19 nt, Homo sapiens
  misc_RNA (1)...(19): siRNA sense strand
uggccagucaggaaagaua

SEQ ID NO: 1739210 - RNA, 19 nt, Homo sapiens
  misc_RNA (1)...(19): siRNA sense strand
gcaguuaccugacguauga

SEQ ID NO: 1739211 - RNA, 19 nt, Homo sapiens
  misc_RNA (1)...(19): siRNA sense strand
gaucaaauguguucaugag

SEQ ID NO: 1739212 - RNA, 19 nt, Homo sapiens
  misc_RNA (1)...(19): siRNA sense strand
aaauugcucugcacacuaa

SEQ ID NO: 1739213 - RNA, 19 nt, Homo sapiens
  misc_RNA (1)...(19): siRNA sense strand
gaaagauaaccguggauga

SEQ ID NO: 1739214 - RNA, 19 nt, Homo sapiens
  misc_RNA (1)...(19): siRNA sense strand
caaauguguucaugagguu

SEQ ID NO: 1739215 - RNA, 19 nt, Homo sapiens
  misc_RNA (1)...(19): siRNA sense strand
gaaauugcucugcacacua

SEQ ID NO: 1739216 - RNA, 19 nt, Homo sapiens
  misc_RNA (1)...(19): siRNA sense strand
ggauggagcccucguguuc

SEQ ID NO: 1739217 - RNA, 19 nt, Homo sapiens
  misc_RNA (1)...(19): siRNA sense strand
caauggagcucuguaugug

SEQ ID NO: 1739218 - RNA, 19 nt, Homo sapiens
  misc_RNA (1)...(19): siRNA sense strand
ccauugagaucccgcaguu

SEQ ID NO: 1739219 - RNA, 19 nt, Homo sapiens
  misc_RNA (1)...(19): siRNA sense strand
ggaaauugcucugcacacu

SEQ ID NO: 1739220 - RNA, 19 nt, Homo sapiens
  misc_RNA (1)...(19): siRNA sense strand
ugacaacccagauaucuug

SEQ ID NO: 1739221 - RNA, 19 nt, Homo sapiens
  misc_RNA (1)...(19): siRNA sense strand
gaagagggugucaggauca

SEQ ID NO: 1739222 - RNA, 19 nt, Homo sapiens
  misc_RNA (1)...(19): siRNA sense strand
uaacaggcaauauaugaga

SEQ ID NO: 1739223 - RNA, 19 nt, Homo sapiens
  misc_RNA (1)...(19): siRNA sense strand
caacccagauaucuugaag

SEQ ID NO: 1739224 - RNA, 19 nt, Homo sapiens
  misc_RNA (1)...(19): siRNA sense strand
gaucauagaagccauugag

SEQ ID NO: 1739225 - RNA, 19 nt, Homo sapiens
  misc_RNA (1)...(19): siRNA sense strand
guccaccgauuaccacauu

SEQ ID NO: 1739226 - RNA, 19 nt, Homo sapiens
  misc_RNA (1)...(19): siRNA sense strand
acacuaacaggcaauauau

SEQ ID NO: 1739227 - RNA, 19 nt, Homo sapiens
  misc_RNA (1)...(19): siRNA sense strand
gaauggcuccuucaacgau

SEQ ID NO: 1739228 - RNA, 19 nt, Homo sapiens
  misc_RNA (1)...(19): siRNA sense strand
cauagaagccauugagauc

SEQ ID NO: 1739229 - RNA, 19 nt, Homo sapiens
  misc_RNA (1)...(19): siRNA sense strand
uaaaacaacugccaaggau

SEQ ID NO: 1739230 - RNA, 19 nt, Homo sapiens
  misc_RNA (1)...(19): siRNA sense strand
guauguggguggaaugaag

SEQ ID NO: 1739231 - RNA, 19 nt, Homo sapiens
  misc_RNA (1)...(19): siRNA sense strand
cacacuaacaggcaauaua

SEQ ID NO: 1739232 - RNA, 19 nt, Homo sapiens
  misc_RNA (1)...(19): siRNA sense strand
gcccucguguucagcuaua

SEQ ID NO: 1739233 - RNA, 19 nt, Homo sapiens
  misc_RNA (1)...(19): siRNA sense strand
agauaaccguggaugacua

SEQ ID NO: 1739234 - RNA, 19 nt, Homo sapiens
  misc_RNA (1)...(19): siRNA sense strand
gcagugguguggcauccau

SEQ ID NO: 1739235 - RNA, 19 nt, Homo sapiens
  misc_RNA (1)...(19): siRNA sense strand
gauaaccguggaugacuau

SEQ ID NO: 1739236 - RNA, 19 nt, Homo sapiens
  misc_RNA (1)...(19): siRNA sense strand
ggcuguaucucucacuuca

SEQ ID NO: 1739237 - RNA, 19 nt, Homo sapiens
  misc_RNA (1)...(19): siRNA sense strand
caacagcgacuucauuucc

SEQ ID NO: 1739238 - RNA, 19 nt, Homo sapiens
  misc_RNA (1)...(19): siRNA sense strand
acuaacaggcaauauauga

SEQ ID NO: 1739239 - RNA, 19 nt, Homo sapiens
  misc_RNA (1)...(19): siRNA sense strand
ucaauggagcucuguaugu

SEQ ID NO: 1739240 - RNA, 19 nt, Homo sapiens
  misc_RNA (1)...(19): siRNA sense strand
auugagaucccgcaguuua

SEQ ID NO: 1739241 - RNA, 19 nt, Homo sapiens
  misc_RNA (1)...(19): siRNA sense strand
gagggugucaggaucaaga

SEQ ID NO: 1739242 - RNA, 19 nt, Homo sapiens
  misc_RNA (1)...(19): siRNA sense strand
gauggccagucaggaaaga

SEQ ID NO: 1739243 - RNA, 19 nt, Homo sapiens
  misc_RNA (1)...(19): siRNA sense strand
cguggaagaugccguggau

SEQ ID NO: 1739244 - RNA, 19 nt, Homo sapiens
  misc_RNA (1)...(19): siRNA sense strand
cccaacagcgacuucauuu

SEQ ID NO: 1739245 - RNA, 19 nt, Homo sapiens
  misc_RNA (1)...(19): siRNA sense strand
gggauggccagucaggaaa

SEQ ID NO: 1739246 - RNA, 19 nt, Homo sapiens
  misc_RNA (1)...(19): siRNA sense strand
cguuagggauggccaguca

SEQ ID NO: 1739247 - RNA, 19 nt, Homo sapiens
  misc_RNA (1)...(19): siRNA sense strand
caucaauggagcucuguau

SEQ ID NO: 1739248 - RNA, 19 nt, Homo sapiens
  misc_RNA (1)...(19): siRNA sense strand
aagaucaaauguguucaug

SEQ ID NO: 1739249 - RNA, 19 nt, Homo sapiens
  misc_RNA (1)...(19): siRNA sense strand
gagcccucguguucagcua

SEQ ID NO: 1739250 - RNA, 19 nt, Homo sapiens
  misc_RNA (1)...(19): siRNA sense strand
caagaucaaauguguucau

SEQ ID NO: 1739251 - RNA, 19 nt, Homo sapiens
  misc_RNA (1)...(19): siRNA sense strand
ggccagucaggaaagauaa

SEQ ID NO: 1739252 - RNA, 19 nt, Homo sapiens
  misc_RNA (1)...(19): siRNA sense strand
gcacacuaacaggcaauau

SEQ ID NO: 1739253 - RNA, 19 nt, Homo sapiens
  misc_RNA (1)...(19): siRNA sense strand
cguaugacaacccagauau

SEQ ID NO: 1739254 - RNA, 19 nt, Homo sapiens
  misc_RNA (1)...(19): siRNA sense strand
ugcggcagcuuaacaucaa

SEQ ID NO: 1739255 - RNA, 19 nt, Homo sapiens
  misc_RNA (1)...(19): siRNA sense strand
aaccguggaugacuaugga

SEQ ID NO: 1739256 - RNA, 19 nt, Homo sapiens
  misc_RNA (1)...(19): siRNA sense strand
ucauagaagccauugagau

SEQ ID NO: 1739257 - RNA, 19 nt, Homo sapiens
  misc_RNA (1)...(19): siRNA sense strand
gcucgugggcuguaucucu

SEQ ID NO: 1739258 - RNA, 19 nt, Homo sapiens
  misc_RNA (1)...(19): siRNA sense strand
acagcgacuucauuuccuu

SEQ ID NO: 1739259 - RNA, 19 nt, Homo sapiens
  misc_RNA (1)...(19): siRNA sense strand
uggguggaaugaaggaaau

SEQ ID NO: 1739260 - RNA, 19 nt, Homo sapiens
  misc_RNA (1)...(19): siRNA sense strand
aauguguucaugagguuua

SEQ ID NO: 1739261 - RNA, 19 nt, Homo sapiens
  misc_RNA (1)...(19): siRNA sense strand
uggccagucaggaaagaua

SEQ ID NO: 1739262 - RNA, 19 nt, Homo sapiens
  misc_RNA (1)...(19): siRNA sense strand
gcaguuaccugacguauga

SEQ ID NO: 1739263 - RNA, 19 nt, Homo sapiens
  misc_RNA (1)...(19): siRNA sense strand
gaucaaauguguucaugag

SEQ ID NO: 1739264 - RNA, 19 nt, Homo sapiens
  misc_RNA (1)...(19): siRNA sense strand
aaauugcucugcacacuaa

SEQ ID NO: 1739265 - RNA, 19 nt, Homo sapiens
  misc_RNA (1)...(19): siRNA sense strand
gaaagauaaccguggauga

SEQ ID NO: 1739266 - RNA, 19 nt, Homo sapiens
  misc_RNA (1)...(19): siRNA sense strand
caaauguguucaugagguu

SEQ ID NO: 1739267 - RNA, 19 nt, Homo sapiens
  misc_RNA (1)...(19): siRNA sense strand
gaaauugcucugcacacua

SEQ ID NO: 1739268 - RNA, 19 nt, Homo sapiens
  misc_RNA (1)...(19): siRNA sense strand
ggauggagcccucguguuc

SEQ ID NO: 1739269 - RNA, 19 nt, Homo sapiens
  misc_RNA (1)...(19): siRNA sense strand
caauggagcucuguaugug

SEQ ID NO: 1739270 - RNA, 19 nt, Homo sapiens
  misc_RNA (1)...(19): siRNA sense strand
ccauugagaucccgcaguu

SEQ ID NO: 1739271 - RNA, 19 nt, Homo sapiens
  misc_RNA (1)...(19): siRNA sense strand
ggaaauugcucugcacacu

SEQ ID NO: 1739272 - RNA, 19 nt, Homo sapiens
  misc_RNA (1)...(19): siRNA sense strand
ugacaacccagauaucuug

SEQ ID NO: 1739273 - RNA, 19 nt, Homo sapiens
  misc_RNA (1)...(19): siRNA sense strand
gaagagggugucaggauca

SEQ ID NO: 1739274 - RNA, 19 nt, Homo sapiens
  misc_RNA (1)...(19): siRNA sense strand
uaacaggcaauauaugaga

SEQ ID NO: 1739275 - RNA, 19 nt, Homo sapiens
  misc_RNA (1)...(19): siRNA sense strand
caacccagauaucuugaag

SEQ ID NO: 1739276 - RNA, 19 nt, Homo sapiens
  misc_RNA (1)...(19): siRNA sense strand
gaucauagaagccauugag

SEQ ID NO: 1739277 - RNA, 19 nt, Homo sapiens
  misc_RNA (1)...(19): siRNA sense strand
guccaccgauuaccacauu

SEQ ID NO: 1739278 - RNA, 19 nt, Homo sapiens
  misc_RNA (1)...(19): siRNA sense strand
acacuaacaggcaauauau

SEQ ID NO: 1739279 - RNA, 19 nt, Homo sapiens
  misc_RNA (1)...(19): siRNA sense strand
gaauggcuccuucaacgau

SEQ ID NO: 1739280 - RNA, 19 nt, Homo sapiens
  misc_RNA (1)...(19): siRNA sense strand
cauagaagccauugagauc

SEQ ID NO: 1739281 - RNA, 19 nt, Homo sapiens
  misc_RNA (1)...(19): siRNA sense strand
uaaaacaacugccaaggau

SEQ ID NO: 1739282 - RNA, 19 nt, Homo sapiens
  misc_RNA (1)...(19): siRNA sense strand
guauguggguggaaugaag

SEQ ID NO: 1739283 - RNA, 19 nt, Homo sapiens
  misc_RNA (1)...(19): siRNA sense strand
cacacuaacaggcaauaua

SEQ ID NO: 1739284 - RNA, 19 nt, Homo sapiens
  misc_RNA (1)...(19): siRNA sense strand
gcccucguguucagcuaua

SEQ ID NO: 1739285 - RNA, 19 nt, Homo sapiens
  misc_RNA (1)...(19): siRNA sense strand
agauaaccguggaugacua

SEQ ID NO: 1739286 - RNA, 19 nt, Homo sapiens
  misc_RNA (1)...(19): siRNA sense strand
gcagugguguggcauccau

SEQ ID NO: 1739287 - RNA, 19 nt, Homo sapiens
  misc_RNA (1)...(19): siRNA sense strand
gauaaccguggaugacuau

SEQ ID NO: 1739288 - RNA, 19 nt, Homo sapiens
  misc_RNA (1)...(19): siRNA sense strand
ggcuguaucucucacuuca

SEQ ID NO: 1739289 - RNA, 19 nt, Homo sapiens
  misc_RNA (1)...(19): siRNA sense strand
caacagcgacuucauuucc

SEQ ID NO: 1739290 - RNA, 19 nt, Homo sapiens
  misc_RNA (1)...(19): siRNA sense strand
acuaacaggcaauauauga

SEQ ID NO: 1739291 - RNA, 19 nt, Homo sapiens
  misc_RNA (1)...(19): siRNA sense strand
ucaauggagcucuguaugu

SEQ ID NO: 1739292 - RNA, 19 nt, Homo sapiens
  misc_RNA (1)...(19): siRNA sense strand
auugagaucccgcaguuua

SEQ ID NO: 1739293 - RNA, 19 nt, Homo sapiens
  misc_RNA (1)...(19): siRNA sense strand
gagggugucaggaucaaga

SEQ ID NO: 1739294 - RNA, 19 nt, Homo sapiens
  misc_RNA (1)...(19): siRNA sense strand
gauggccagucaggaaaga

SEQ ID NO: 1739295 - RNA, 19 nt, Homo sapiens
  misc_RNA (1)...(19): siRNA sense strand
cguggaagaugccguggau

SEQ ID NO: 1739296 - RNA, 19 nt, Homo sapiens
  misc_RNA (1)...(19): siRNA sense strand
cccaacagcgacuucauuu

SEQ ID NO: 1739297 - RNA, 19 nt, Homo sapiens
  misc_RNA (1)...(19): siRNA sense strand
gggauggccagucaggaaa

SEQ ID NO: 1739298 - RNA, 19 nt, Homo sapiens
  misc_RNA (1)...(19): siRNA sense strand
cguuagggauggccaguca

SEQ ID NO: 1739299 - RNA, 19 nt, Homo sapiens
  misc_RNA (1)...(19): siRNA sense strand
caucaauggagcucuguau

SEQ ID NO: 1739300 - RNA, 19 nt, Homo sapiens
  misc_RNA (1)...(19): siRNA sense strand
aagaucaaauguguucaug

SEQ ID NO: 1739301 - RNA, 19 nt, Homo sapiens
  misc_RNA (1)...(19): siRNA sense strand
gagcccucguguucagcua

SEQ ID NO: 1739302 - RNA, 19 nt, Homo sapiens
  misc_RNA (1)...(19): siRNA sense strand
caagaucaaauguguucau

SEQ ID NO: 1739303 - RNA, 19 nt, Homo sapiens
  misc_RNA (1)...(19): siRNA sense strand
ggccagucaggaaagauaa

SEQ ID NO: 1739304 - RNA, 19 nt, Homo sapiens
  misc_RNA (1)...(19): siRNA sense strand
gcacacuaacaggcaauau

SEQ ID NO: 1739305 - RNA, 19 nt, Homo sapiens
  misc_RNA (1)...(19): siRNA sense strand
cguaugacaacccagauau

SEQ ID NO: 1739306 - RNA, 19 nt, Homo sapiens
  misc_RNA (1)...(19): siRNA sense strand
ugcggcagcuuaacaucaa

SEQ ID NO: 1739307 - RNA, 19 nt, Homo sapiens
  misc_RNA (1)...(19): siRNA sense strand
aaccguggaugacuaugga

SEQ ID NO: 1739308 - RNA, 19 nt, Homo sapiens
  misc_RNA (1)...(19): siRNA sense strand
ucauagaagccauugagau

SEQ ID NO: 1739309 - RNA, 19 nt, Homo sapiens
  misc_RNA (1)...(19): siRNA sense strand
gcucgugggcuguaucucu

SEQ ID NO: 1739310 - RNA, 19 nt, Homo sapiens
  misc_RNA (1)...(19): siRNA sense strand
acagcgacuucauuuccuu

SEQ ID NO: 1739311 - RNA, 19 nt, Homo sapiens
  misc_RNA (1)...(19): siRNA sense strand
uggguggaaugaaggaaau

SEQ ID NO: 1739312 - RNA, 19 nt, Homo sapiens
  misc_RNA (1)...(19): siRNA sense strand
aauguguucaugagguuua

SEQ ID NO: 1739313 - RNA, 19 nt, Homo sapiens
  misc_RNA (1)...(19): siRNA sense strand
uggccagucaggaaagaua

SEQ ID NO: 1739314 - RNA, 19 nt, Homo sapiens
  misc_RNA (1)...(19): siRNA sense strand
gcaguuaccugacguauga

SEQ ID NO: 1739315 - RNA, 19 nt, Homo sapiens
  misc_RNA (1)...(19): siRNA sense strand
gaucaaauguguucaugag

SEQ ID NO: 1739316 - RNA, 19 nt, Homo sapiens
  misc_RNA (1)...(19): siRNA sense strand
aaauugcucugcacacuaa

SEQ ID NO: 1739317 - RNA, 19 nt, Homo sapiens
  misc_RNA (1)...(19): siRNA sense strand
gaaagauaaccguggauga

SEQ ID NO: 1739318 - RNA, 19 nt, Homo sapiens
  misc_RNA (1)...(19): siRNA sense strand
caaauguguucaugagguu

SEQ ID NO: 1739319 - RNA, 19 nt, Homo sapiens
  misc_RNA (1)...(19): siRNA sense strand
gaaauugcucugcacacua

SEQ ID NO: 1739320 - RNA, 19 nt, Homo sapiens
  misc_RNA (1)...(19): siRNA sense strand
ggauggagcccucguguuc

SEQ ID NO: 1739321 - RNA, 19 nt, Homo sapiens
  misc_RNA (1)...(19): siRNA sense strand
caauggagcucuguaugug

SEQ ID NO: 1739322 - RNA, 19 nt, Homo sapiens
  misc_RNA (1)...(19): siRNA sense strand
ccauugagaucccgcaguu

SEQ ID NO: 1739323 - RNA, 19 nt, Homo sapiens
  misc_RNA (1)...(19): siRNA sense strand
ggaaauugcucugcacacu

SEQ ID NO: 1739324 - RNA, 19 nt, Homo sapiens
  misc_RNA (1)...(19): siRNA sense strand
ugacaacccagauaucuug

SEQ ID NO: 1739325 - RNA, 19 nt, Homo sapiens
  misc_RNA (1)...(19): siRNA sense strand
gaagagggugucaggauca

SEQ ID NO: 1739326 - RNA, 19 nt, Homo sapiens
  misc_RNA (1)...(19): siRNA sense strand
uaacaggcaauauaugaga

SEQ ID NO: 1739327 - RNA, 19 nt, Homo sapiens
  misc_RNA (1)...(19): siRNA sense strand
caacccagauaucuugaag

SEQ ID NO: 1739328 - RNA, 19 nt, Homo sapiens
  misc_RNA (1)...(19): siRNA sense strand
gaucauagaagccauugag

SEQ ID NO: 1739329 - RNA, 19 nt, Homo sapiens
  misc_RNA (1)...(19): siRNA sense strand
guccaccgauuaccacauu

SEQ ID NO: 1739330 - RNA, 19 nt, Homo sapiens
  misc_RNA (1)...(19): siRNA sense strand
acacuaacaggcaauauau

SEQ ID NO: 1739331 - RNA, 19 nt, Homo sapiens
  misc_RNA (1)...(19): siRNA sense strand
gaauggcuccuucaacgau

SEQ ID NO: 1739332 - RNA, 19 nt, Homo sapiens
  misc_RNA (1)...(19): siRNA sense strand
cauagaagccauugagauc

SEQ ID NO: 1739333 - RNA, 19 nt, Homo sapiens
  misc_RNA (1)...(19): siRNA sense strand
uaaaacaacugccaaggau

SEQ ID NO: 1739334 - RNA, 19 nt, Homo sapiens
  misc_RNA (1)...(19): siRNA sense strand
guauguggguggaaugaag

SEQ ID NO: 1739335 - RNA, 19 nt, Homo sapiens
  misc_RNA (1)...(19): siRNA sense strand
cacacuaacaggcaauaua

SEQ ID NO: 1739336 - RNA, 19 nt, Homo sapiens
  misc_RNA (1)...(19): siRNA sense strand
gcccucguguucagcuaua

SEQ ID NO: 1739337 - RNA, 19 nt, Homo sapiens
  misc_RNA (1)...(19): siRNA sense strand
agauaaccguggaugacua

SEQ ID NO: 1739338 - RNA, 19 nt, Homo sapiens
  misc_RNA (1)...(19): siRNA sense strand
gcagugguguggcauccau

SEQ ID NO: 1739339 - RNA, 19 nt, Homo sapiens
  misc_RNA (1)...(19): siRNA sense strand
gauaaccguggaugacuau

SEQ ID NO: 1739340 - RNA, 19 nt, Homo sapiens
  misc_RNA (1)...(19): siRNA sense strand
ggcuguaucucucacuuca

SEQ ID NO: 1739341 - RNA, 19 nt, Homo sapiens
  misc_RNA (1)...(19): siRNA sense strand
caacagcgacuucauuucc

SEQ ID NO: 1739342 - RNA, 19 nt, Homo sapiens
  misc_RNA (1)...(19): siRNA sense strand
acuaacaggcaauauauga

SEQ ID NO: 1739343 - RNA, 19 nt, Homo sapiens
  misc_RNA (1)...(19): siRNA sense strand
ucaauggagcucuguaugu

SEQ ID NO: 1739344 - RNA, 19 nt, Homo sapiens
  misc_RNA (1)...(19): siRNA sense strand
auugagaucccgcaguuua

SEQ ID NO: 1739345 - RNA, 19 nt, Homo sapiens
  misc_RNA (1)...(19): siRNA sense strand
gagggugucaggaucaaga

SEQ ID NO: 1739346 - RNA, 19 nt, Homo sapiens
  misc_RNA (1)...(19): siRNA sense strand
gauggccagucaggaaaga

SEQ ID NO: 1739347 - RNA, 19 nt, Homo sapiens
  misc_RNA (1)...(19): siRNA sense strand
cguggaagaugccguggau

SEQ ID NO: 1739348 - RNA, 19 nt, Homo sapiens
  misc_RNA (1)...(19): siRNA sense strand
cccaacagcgacuucauuu

SEQ ID NO: 1739349 - RNA, 19 nt, Homo sapiens
  misc_RNA (1)...(19): siRNA sense strand
gggauggccagucaggaaa

SEQ ID NO: 1739350 - RNA, 19 nt, Homo sapiens
  misc_RNA (1)...(19): siRNA sense strand
cguuagggauggccaguca

SEQ ID NO: 1739351 - RNA, 19 nt, Homo sapiens
  misc_RNA (1)...(19): siRNA sense strand
caucaauggagcucuguau

SEQ ID NO: 1739352 - RNA, 19 nt, Homo sapiens
  misc_RNA (1)...(19): siRNA sense strand
aagaucaaauguguucaug

SEQ ID NO: 1739353 - RNA, 19 nt, Homo sapiens
  misc_RNA (1)...(19): siRNA sense strand
gagcccucguguucagcua

SEQ ID NO: 1739354 - RNA, 19 nt, Homo sapiens
  misc_RNA (1)...(19): siRNA sense strand
caagaucaaauguguucau

SEQ ID NO: 1739355 - RNA, 19 nt, Homo sapiens
  misc_RNA (1)...(19): siRNA sense strand
ggccagucaggaaagauaa

SEQ ID NO: 1739356 - RNA, 19 nt, Homo sapiens
  misc_RNA (1)...(19): siRNA sense strand
gcacacuaacaggcaauau

SEQ ID NO: 1739357 - RNA, 19 nt, Homo sapiens
  misc_RNA (1)...(19): siRNA sense strand
cguaugacaacccagauau

SEQ ID NO: 1739358 - RNA, 19 nt, Homo sapiens
  misc_RNA (1)...(19): siRNA sense strand
ugcggcagcuuaacaucaa

SEQ ID NO: 1739359 - RNA, 19 nt, Homo sapiens
  misc_RNA (1)...(19): siRNA sense strand
aaccguggaugacuaugga

SEQ ID NO: 1739360 - RNA, 19 nt, Homo sapiens
  misc_RNA (1)...(19): siRNA sense strand
ucauagaagccauugagau

SEQ ID NO: 1739361 - RNA, 19 nt, Homo sapiens
  misc_RNA (1)...(19): siRNA sense strand
gcucgugggcuguaucucu

SEQ ID NO: 1739362 - RNA, 19 nt, Homo sapiens
  misc_RNA (1)...(19): siRNA sense strand
acagcgacuucauuuccuu

SEQ ID NO: 1739363 - RNA, 19 nt, Homo sapiens
  misc_RNA (1)...(19): siRNA sense strand
uggguggaaugaaggaaau

SEQ ID NO: 1739364 - RNA, 19 nt, Homo sapiens
  misc_RNA (1)...(19): siRNA sense strand
aauguguucaugagguuua

SEQ ID NO: 1739365 - RNA, 19 nt, Homo sapiens
  misc_RNA (1)...(19): siRNA sense strand
uggccagucaggaaagaua

SEQ ID NO: 1739366 - RNA, 19 nt, Homo sapiens
  misc_RNA (1)...(19): siRNA sense strand
aaauugcucugcacacuaa

SEQ ID NO: 1739367 - RNA, 19 nt, Homo sapiens
  misc_RNA (1)...(19): siRNA sense strand
gaaagauaaccguggauga

SEQ ID NO: 1739368 - RNA, 19 nt, Homo sapiens
  misc_RNA (1)...(19): siRNA sense strand
gaaauugcucugcacacua

SEQ ID NO: 1739369 - RNA, 19 nt, Homo sapiens
  misc_RNA (1)...(19): siRNA sense strand
ggauggagcccucguguuc

SEQ ID NO: 1739370 - RNA, 19 nt, Homo sapiens
  misc_RNA (1)...(19): siRNA sense strand
caauggagcucuguaugug

SEQ ID NO: 1739371 - RNA, 19 nt, Homo sapiens
  misc_RNA (1)...(19): siRNA sense strand
ggaaauugcucugcacacu

SEQ ID NO: 1739372 - RNA, 19 nt, Homo sapiens
  misc_RNA (1)...(19): siRNA sense strand
uaacaggcaauauaugaga

SEQ ID NO: 1739373 - RNA, 19 nt, Homo sapiens
  misc_RNA (1)...(19): siRNA sense strand
guccaccgauuaccacauu

SEQ ID NO: 1739374 - RNA, 19 nt, Homo sapiens
  misc_RNA (1)...(19): siRNA sense strand
acacuaacaggcaauauau

SEQ ID NO: 1739375 - RNA, 19 nt, Homo sapiens
  misc_RNA (1)...(19): siRNA sense strand
gaauggcuccuucaacgau

SEQ ID NO: 1739376 - RNA, 19 nt, Homo sapiens
  misc_RNA (1)...(19): siRNA sense strand
uaaaacaacugccaaggau

SEQ ID NO: 1739377 - RNA, 19 nt, Homo sapiens
  misc_RNA (1)...(19): siRNA sense strand
guauguggguggaaugaag

SEQ ID NO: 1739378 - RNA, 19 nt, Homo sapiens
  misc_RNA (1)...(19): siRNA sense strand
cacacuaacaggcaauaua

SEQ ID NO: 1739379 - RNA, 19 nt, Homo sapiens
  misc_RNA (1)...(19): siRNA sense strand
gcccucguguucagcuaua

SEQ ID NO: 1739380 - RNA, 19 nt, Homo sapiens
  misc_RNA (1)...(19): siRNA sense strand
agauaaccguggaugacua

SEQ ID NO: 1739381 - RNA, 19 nt, Homo sapiens
  misc_RNA (1)...(19): siRNA sense strand
gcagugguguggcauccau

SEQ ID NO: 1739382 - RNA, 19 nt, Homo sapiens
  misc_RNA (1)...(19): siRNA sense strand
gauaaccguggaugacuau

SEQ ID NO: 1739383 - RNA, 19 nt, Homo sapiens
  misc_RNA (1)...(19): siRNA sense strand
ggcuguaucucucacuuca

SEQ ID NO: 1739384 - RNA, 19 nt, Homo sapiens
  misc_RNA (1)...(19): siRNA sense strand
caacagcgacuucauuucc

SEQ ID NO: 1739385 - RNA, 19 nt, Homo sapiens
  misc_RNA (1)...(19): siRNA sense strand
acuaacaggcaauauauga

SEQ ID NO: 1739386 - RNA, 19 nt, Homo sapiens
  misc_RNA (1)...(19): siRNA sense strand
ucaauggagcucuguaugu

SEQ ID NO: 1739387 - RNA, 19 nt, Homo sapiens
  misc_RNA (1)...(19): siRNA sense strand
gauggccagucaggaaaga

SEQ ID NO: 1739388 - RNA, 19 nt, Homo sapiens
  misc_RNA (1)...(19): siRNA sense strand
cguggaagaugccguggau

SEQ ID NO: 1739389 - RNA, 19 nt, Homo sapiens
  misc_RNA (1)...(19): siRNA sense strand
cccaacagcgacuucauuu

SEQ ID NO: 1739390 - RNA, 19 nt, Homo sapiens
  misc_RNA (1)...(19): siRNA sense strand
gggauggccagucaggaaa

SEQ ID NO: 1739391 - RNA, 19 nt, Homo sapiens
  misc_RNA (1)...(19): siRNA sense strand
cguuagggauggccaguca

SEQ ID NO: 1739392 - RNA, 19 nt, Homo sapiens
  misc_RNA (1)...(19): siRNA sense strand
caucaauggagcucuguau

SEQ ID NO: 1739393 - RNA, 19 nt, Homo sapiens
  misc_RNA (1)...(19): siRNA sense strand
gagcccucguguucagcua

SEQ ID NO: 1739394 - RNA, 19 nt, Homo sapiens
  misc_RNA (1)...(19): siRNA sense strand
ggccagucaggaaagauaa

SEQ ID NO: 1739395 - RNA, 19 nt, Homo sapiens
  misc_RNA (1)...(19): siRNA sense strand
gcacacuaacaggcaauau

SEQ ID NO: 1739396 - RNA, 19 nt, Homo sapiens
  misc_RNA (1)...(19): siRNA sense strand
ugcggcagcuuaacaucaa

SEQ ID NO: 1739397 - RNA, 19 nt, Homo sapiens
  misc_RNA (1)...(19): siRNA sense strand
aaccguggaugacuaugga

SEQ ID NO: 1739398 - RNA, 19 nt, Homo sapiens
  misc_RNA (1)...(19): siRNA sense strand
gcucgugggcuguaucucu

SEQ ID NO: 1739399 - RNA, 19 nt, Homo sapiens
  misc_RNA (1)...(19): siRNA sense strand
uggguggaaugaaggaaau

SEQ ID NO: 1739400 - RNA, 19 nt, Homo sapiens
  misc_RNA (1)...(19): siRNA sense strand
acagcgacuucauuuccuu

SEQ ID NO: 1739401 - RNA, 19 nt, Homo sapiens
  misc_RNA (1)...(19): siRNA sense strand
uggccagucaggaaagaua

SEQ ID NO: 1739402 - RNA, 19 nt, Homo sapiens
  misc_RNA (1)...(19): siRNA sense strand
gugaggagaucguggucua

SEQ ID NO: 1739403 - RNA, 19 nt, Homo sapiens
  misc_RNA (1)...(19): siRNA sense strand
gaagaggcccaucguguuc

SEQ ID NO: 1739404 - RNA, 19 nt, Homo sapiens
  misc_RNA (1)...(19): siRNA sense strand
gcgcaacuauucacacuac

SEQ ID NO: 1739405 - RNA, 19 nt, Homo sapiens
  misc_RNA (1)...(19): siRNA sense strand
gagacacgcucuacauggu

SEQ ID NO: 1739406 - RNA, 19 nt, Homo sapiens
  misc_RNA (1)...(19): siRNA sense strand
ggucuucucugccgucuac

SEQ ID NO: 1739407 - RNA, 19 nt, Homo sapiens
  misc_RNA (1)...(19): siRNA sense strand
cuagaugagugucagaugu

SEQ ID NO: 1739408 - RNA, 19 nt, Homo sapiens
  misc_RNA (1)...(19): siRNA sense strand
caacuauucacacuacuuc

SEQ ID NO: 1739409 - RNA, 19 nt, Homo sapiens
  misc_RNA (1)...(19): siRNA sense strand
gcaacuauucacacuacuu

SEQ ID NO: 1739410 - RNA, 19 nt, Homo sapiens
  misc_RNA (1)...(19): siRNA sense strand
uagaugagugucagaugua

SEQ ID NO: 1739411 - RNA, 19 nt, Homo sapiens
  misc_RNA (1)...(19): siRNA sense strand
agaagaggcccaucguguu

SEQ ID NO: 1739412 - RNA, 19 nt, Homo sapiens
  misc_RNA (1)...(19): siRNA sense strand
gaggagaucguggucuaug

SEQ ID NO: 1739413 - RNA, 19 nt, Homo sapiens
  misc_RNA (1)...(19): siRNA sense strand
guccagcuccggccaaaug

SEQ ID NO: 1739414 - RNA, 19 nt, Homo sapiens
  misc_RNA (1)...(19): siRNA sense strand
ggacgagacgggcaagaac

SEQ ID NO: 1739415 - RNA, 19 nt, Homo sapiens
  misc_RNA (1)...(19): siRNA sense strand
ggucggcucgugcucauca

SEQ ID NO: 1739416 - RNA, 19 nt, Homo sapiens
  misc_RNA (1)...(19): siRNA sense strand
ggagcugugugaggagauc

SEQ ID NO: 1739417 - RNA, 19 nt, Homo sapiens
  misc_RNA (1)...(19): siRNA sense strand
ugccuuaccacuacuuuga

SEQ ID NO: 1739418 - RNA, 19 nt, Homo sapiens
  misc_RNA (1)...(19): siRNA sense strand
ccuuaccacuacuuugaga

SEQ ID NO: 1739419 - RNA, 19 nt, Homo sapiens
  misc_RNA (1)...(19): siRNA sense strand
ucacugagaaggcggucuu

SEQ ID NO: 1739420 - RNA, 19 nt, Homo sapiens
  misc_RNA (1)...(19): siRNA sense strand
gcuagaugagugucagaug

SEQ ID NO: 1739421 - RNA, 19 nt, Homo sapiens
  misc_RNA (1)...(19): siRNA sense strand
gugaggagaucguggucua

SEQ ID NO: 1739422 - RNA, 19 nt, Homo sapiens
  misc_RNA (1)...(19): siRNA sense strand
gaagaggcccaucguguuc

SEQ ID NO: 1739423 - RNA, 19 nt, Homo sapiens
  misc_RNA (1)...(19): siRNA sense strand
gcgcaacuauucacacuac

SEQ ID NO: 1739424 - RNA, 19 nt, Homo sapiens
  misc_RNA (1)...(19): siRNA sense strand
gagacacgcucuacauggu

SEQ ID NO: 1739425 - RNA, 19 nt, Homo sapiens
  misc_RNA (1)...(19): siRNA sense strand
ggucuucucugccgucuac

SEQ ID NO: 1739426 - RNA, 19 nt, Homo sapiens
  misc_RNA (1)...(19): siRNA sense strand
cuagaugagugucagaugu

SEQ ID NO: 1739427 - RNA, 19 nt, Homo sapiens
  misc_RNA (1)...(19): siRNA sense strand
caacuauucacacuacuuc

SEQ ID NO: 1739428 - RNA, 19 nt, Homo sapiens
  misc_RNA (1)...(19): siRNA sense strand
gcaacuauucacacuacuu

SEQ ID NO: 1739429 - RNA, 19 nt, Homo sapiens
  misc_RNA (1)...(19): siRNA sense strand
uagaugagugucagaugua

SEQ ID NO: 1739430 - RNA, 19 nt, Homo sapiens
  misc_RNA (1)...(19): siRNA sense strand
agaagaggcccaucguguu

SEQ ID NO: 1739431 - RNA, 19 nt, Homo sapiens
  misc_RNA (1)...(19): siRNA sense strand
gaggagaucguggucuaug

SEQ ID NO: 1739432 - RNA, 19 nt, Homo sapiens
  misc_RNA (1)...(19): siRNA sense strand
guccagcuccggccaaaug

SEQ ID NO: 1739433 - RNA, 19 nt, Homo sapiens
  misc_RNA (1)...(19): siRNA sense strand
ggacgagacgggcaagaac

SEQ ID NO: 1739434 - RNA, 19 nt, Homo sapiens
  misc_RNA (1)...(19): siRNA sense strand
ggucggcucgugcucauca

SEQ ID NO: 1739435 - RNA, 19 nt, Homo sapiens
  misc_RNA (1)...(19): siRNA sense strand
ggagcugugugaggagauc

SEQ ID NO: 1739436 - RNA, 19 nt, Homo sapiens
  misc_RNA (1)...(19): siRNA sense strand
ugccuuaccacuacuuuga

SEQ ID NO: 1739437 - RNA, 19 nt, Homo sapiens
  misc_RNA (1)...(19): siRNA sense strand
ccuuaccacuacuuugaga

SEQ ID NO: 1739438 - RNA, 19 nt, Homo sapiens
  misc_RNA (1)...(19): siRNA sense strand
ucacugagaaggcggucuu

SEQ ID NO: 1739439 - RNA, 19 nt, Homo sapiens
  misc_RNA (1)...(19): siRNA sense strand
gcuagaugagugucagaug

SEQ ID NO: 1739440 - RNA, 19 nt, Homo sapiens
  misc_RNA (1)...(19): siRNA sense strand
gugaggagaucguggucua

SEQ ID NO: 1739441 - RNA, 19 nt, Homo sapiens
  misc_RNA (1)...(19): siRNA sense strand
gaagaggcccaucguguuc

SEQ ID NO: 1739442 - RNA, 19 nt, Homo sapiens
  misc_RNA (1)...(19): siRNA sense strand
gcgcaacuauucacacuac

SEQ ID NO: 1739443 - RNA, 19 nt, Homo sapiens
  misc_RNA (1)...(19): siRNA sense strand
gagacacgcucuacauggu

SEQ ID NO: 1739444 - RNA, 19 nt, Homo sapiens
  misc_RNA (1)...(19): siRNA sense strand
cuagaugagugucagaugu

SEQ ID NO: 1739445 - RNA, 19 nt, Homo sapiens
  misc_RNA (1)...(19): siRNA sense strand
caacuauucacacuacuuc

SEQ ID NO: 1739446 - RNA, 19 nt, Homo sapiens
  misc_RNA (1)...(19): siRNA sense strand
gcaacuauucacacuacuu

SEQ ID NO: 1739447 - RNA, 19 nt, Homo sapiens
  misc_RNA (1)...(19): siRNA sense strand
uagaugagugucagaugua

SEQ ID NO: 1739448 - RNA, 19 nt, Homo sapiens
  misc_RNA (1)...(19): siRNA sense strand
agaagaggcccaucguguu

SEQ ID NO: 1739449 - RNA, 19 nt, Homo sapiens
  misc_RNA (1)...(19): siRNA sense strand
gaggagaucguggucuaug

SEQ ID NO: 1739450 - RNA, 19 nt, Homo sapiens
  misc_RNA (1)...(19): siRNA sense strand
ggacgagacgggcaagaac

SEQ ID NO: 1739451 - RNA, 19 nt, Homo sapiens
  misc_RNA (1)...(19): siRNA sense strand
ggagcugugugaggagauc

SEQ ID NO: 1739452 - RNA, 19 nt, Homo sapiens
  misc_RNA (1)...(19): siRNA sense strand
ugccuuaccacuacuuuga

SEQ ID NO: 1739453 - RNA, 19 nt, Homo sapiens
  misc_RNA (1)...(19): siRNA sense strand
ccuuaccacuacuuugaga

SEQ ID NO: 1739454 - RNA, 19 nt, Homo sapiens
  misc_RNA (1)...(19): siRNA sense strand
ucacugagaaggcggucuu

SEQ ID NO: 1739455 - RNA, 19 nt, Homo sapiens
  misc_RNA (1)...(19): siRNA sense strand
gcuagaugagugucagaug

SEQ ID NO: 1739456 - RNA, 19 nt, Homo sapiens
  misc_RNA (1)...(19): siRNA sense strand
gagacuggcugguuugaua

SEQ ID NO: 1739457 - RNA, 19 nt, Homo sapiens
  misc_RNA (1)...(19): siRNA sense strand
gcaaacauaucuucaacaa

SEQ ID NO: 1739458 - RNA, 19 nt, Homo sapiens
  misc_RNA (1)...(19): siRNA sense strand
agacaaagcugaugccauu

SEQ ID NO: 1739459 - RNA, 19 nt, Homo sapiens
  misc_RNA (1)...(19): siRNA sense strand
caacaagcaugcagagaaa

SEQ ID NO: 1739460 - RNA, 19 nt, Homo sapiens
  misc_RNA (1)...(19): siRNA sense strand
gcacagcucugacccauac

SEQ ID NO: 1739461 - RNA, 19 nt, Homo sapiens
  misc_RNA (1)...(19): siRNA sense strand
ggcaacagaugcaggauuu

SEQ ID NO: 1739462 - RNA, 19 nt, Homo sapiens
  misc_RNA (1)...(19): siRNA sense strand
caagggccauuguggaaua

SEQ ID NO: 1739463 - RNA, 19 nt, Homo sapiens
  misc_RNA (1)...(19): siRNA sense strand
gcaagcaggcugagaauga

SEQ ID NO: 1739464 - RNA, 19 nt, Homo sapiens
  misc_RNA (1)...(19): siRNA sense strand
gaaagaagacuccgagaag

SEQ ID NO: 1739465 - RNA, 19 nt, Homo sapiens
  misc_RNA (1)...(19): siRNA sense strand
ugaagaauaucaccgacua

SEQ ID NO: 1739466 - RNA, 19 nt, Homo sapiens
  misc_RNA (1)...(19): siRNA sense strand
uggacaagcuccuccuuua

SEQ ID NO: 1739467 - RNA, 19 nt, Homo sapiens
  misc_RNA (1)...(19): siRNA sense strand
gaucaucucccuuuguaaa

SEQ ID NO: 1739468 - RNA, 19 nt, Homo sapiens
  misc_RNA (1)...(19): siRNA sense strand
gaugagaaguugauuaagg

SEQ ID NO: 1739469 - RNA, 19 nt, Homo sapiens
  misc_RNA (1)...(19): siRNA sense strand
gaagagagcgcagcgacua

SEQ ID NO: 1739470 - RNA, 19 nt, Homo sapiens
  misc_RNA (1)...(19): siRNA sense strand
gggaugagaaguugauuaa

SEQ ID NO: 1739471 - RNA, 19 nt, Homo sapiens
  misc_RNA (1)...(19): siRNA sense strand
gugaauaucgggacuauga

SEQ ID NO: 1739472 - RNA, 19 nt, Homo sapiens
  misc_RNA (1)...(19): siRNA sense strand
uuaaagagaucuguuggaa

SEQ ID NO: 1739473 - RNA, 19 nt, Homo sapiens
  misc_RNA (1)...(19): siRNA sense strand
ccgaagcgcucaaggagaa

SEQ ID NO: 1739474 - RNA, 19 nt, Homo sapiens
  misc_RNA (1)...(19): siRNA sense strand
gcuaugagaugcccuaugc

SEQ ID NO: 1739475 - RNA, 19 nt, Homo sapiens
  misc_RNA (1)...(19): siRNA sense strand
gaaugacaguucuaaugau

SEQ ID NO: 1739476 - RNA, 19 nt, Homo sapiens
  misc_RNA (1)...(19): siRNA sense strand
gagcugagcccugguguga

SEQ ID NO: 1739477 - RNA, 19 nt, Homo sapiens
  misc_RNA (1)...(19): siRNA sense strand
ggacaaggaagagaagaaa

SEQ ID NO: 1739478 - RNA, 19 nt, Homo sapiens
  misc_RNA (1)...(19): siRNA sense strand
gggcagcauugcagagauu

SEQ ID NO: 1739479 - RNA, 19 nt, Homo sapiens
  misc_RNA (1)...(19): siRNA sense strand
ggacauagacaaagcugau

SEQ ID NO: 1739480 - RNA, 19 nt, Homo sapiens
  misc_RNA (1)...(19): siRNA sense strand
cauggagacuggcugguuu

SEQ ID NO: 1739481 - RNA, 19 nt, Homo sapiens
  misc_RNA (1)...(19): siRNA sense strand
agacgauguugauuucuuu

SEQ ID NO: 1739482 - RNA, 19 nt, Homo sapiens
  misc_RNA (1)...(19): siRNA sense strand
gaggagugguuucggucua

SEQ ID NO: 1739483 - RNA, 19 nt, Homo sapiens
  misc_RNA (1)...(19): siRNA sense strand
ggaagaggcccagaagaug

SEQ ID NO: 1739484 - RNA, 19 nt, Homo sapiens
  misc_RNA (1)...(19): siRNA sense strand
cgaccgcaguguuaacauu

SEQ ID NO: 1739485 - RNA, 19 nt, Homo sapiens
  misc_RNA (1)...(19): siRNA sense strand
gaccgcaguguuaacauua

SEQ ID NO: 1739486 - RNA, 19 nt, Homo sapiens
  misc_RNA (1)...(19): siRNA sense strand
ugcauuccuuggauuauua

SEQ ID NO: 1739487 - RNA, 19 nt, Homo sapiens
  misc_RNA (1)...(19): siRNA sense strand
gaaguugauuaaggucuug

SEQ ID NO: 1739488 - RNA, 19 nt, Homo sapiens
  misc_RNA (1)...(19): siRNA sense strand
gaagggaacccggcagaga

SEQ ID NO: 1739489 - RNA, 19 nt, Homo sapiens
  misc_RNA (1)...(19): siRNA sense strand
ugauuaaggucuuggacaa

SEQ ID NO: 1739490 - RNA, 19 nt, Homo sapiens
  misc_RNA (1)...(19): siRNA sense strand
cgacaaggaugagaagaag

SEQ ID NO: 1739491 - RNA, 19 nt, Homo sapiens
  misc_RNA (1)...(19): siRNA sense strand
ggagcgggaugagaaguug

SEQ ID NO: 1739492 - RNA, 19 nt, Homo sapiens
  misc_RNA (1)...(19): siRNA sense strand
gaugacaggacacagcuuu

SEQ ID NO: 1739493 - RNA, 19 nt, Homo sapiens
  misc_RNA (1)...(19): siRNA sense strand
auucaaggguccugaguuu

SEQ ID NO: 1739494 - RNA, 19 nt, Homo sapiens
  misc_RNA (1)...(19): siRNA sense strand
gcgcaaacauaucuucaac

SEQ ID NO: 1739495 - RNA, 19 nt, Homo sapiens
  misc_RNA (1)...(19): siRNA sense strand
cuaaguaccacccagauga

SEQ ID NO: 1739496 - RNA, 19 nt, Homo sapiens
  misc_RNA (1)...(19): siRNA sense strand
gugcauuccuuggauuauu

SEQ ID NO: 1739497 - RNA, 19 nt, Homo sapiens
  misc_RNA (1)...(19): siRNA sense strand
ucaacaagcaugcagagaa

SEQ ID NO: 1739498 - RNA, 19 nt, Homo sapiens
  misc_RNA (1)...(19): siRNA sense strand
ugacagugaugacgaguac

SEQ ID NO: 1739499 - RNA, 19 nt, Homo sapiens
  misc_RNA (1)...(19): siRNA sense strand
cagacgauguugauuucuu

SEQ ID NO: 1739500 - RNA, 19 nt, Homo sapiens
  misc_RNA (1)...(19): siRNA sense strand
guuggaaccugcagaacau

SEQ ID NO: 1739501 - RNA, 19 nt, Homo sapiens
  misc_RNA (1)...(19): siRNA sense strand
gaaggaggcacggagaaug

SEQ ID NO: 1739502 - RNA, 19 nt, Homo sapiens
  misc_RNA (1)...(19): siRNA sense strand
gcccagcucugccugagau

SEQ ID NO: 1739503 - RNA, 19 nt, Homo sapiens
  misc_RNA (1)...(19): siRNA sense strand
uuaacaacuuccucacuga

SEQ ID NO: 1739504 - RNA, 19 nt, Homo sapiens
  misc_RNA (1)...(19): siRNA sense strand
gaaaauugaggaagugaaa

SEQ ID NO: 1739505 - RNA, 19 nt, Homo sapiens
  misc_RNA (1)...(19): siRNA sense strand
gaacugggcaaggauaagu

SEQ ID NO: 1739506 - RNA, 19 nt, Homo sapiens
  misc_RNA (1)...(19): siRNA sense strand
ggagaagcccaaggaagaa

SEQ ID NO: 1739507 - RNA, 19 nt, Homo sapiens
  misc_RNA (1)...(19): siRNA sense strand
aaugacaguucuaaugaug

SEQ ID NO: 1739508 - RNA, 19 nt, Homo sapiens
  misc_RNA (1)...(19): siRNA sense strand
gaaggagaagcccaaggaa

SEQ ID NO: 1739509 - RNA, 19 nt, Homo sapiens
  misc_RNA (1)...(19): siRNA sense strand
gggacaaguucagaagaga

SEQ ID NO: 1739510 - RNA, 19 nt, Homo sapiens
  misc_RNA (1)...(19): siRNA sense strand
ggaaaccucgcaacaggau

SEQ ID NO: 1739511 - RNA, 19 nt, Homo sapiens
  misc_RNA (1)...(19): siRNA sense strand
gggagguuauccugggaaa

SEQ ID NO: 1739512 - RNA, 19 nt, Homo sapiens
  misc_RNA (1)...(19): siRNA sense strand
acaaggaagagaagaaaga

SEQ ID NO: 1739513 - RNA, 19 nt, Homo sapiens
  misc_RNA (1)...(19): siRNA sense strand
gcugagcccuggugugaac

SEQ ID NO: 1739514 - RNA, 19 nt, Homo sapiens
  misc_RNA (1)...(19): siRNA sense strand
ggaagaagaaugggagaag

SEQ ID NO: 1739515 - RNA, 19 nt, Homo sapiens
  misc_RNA (1)...(19): siRNA sense strand
caaagcugaugccauuguc

SEQ ID NO: 1739516 - RNA, 19 nt, Homo sapiens
  misc_RNA (1)...(19): siRNA sense strand
ucaaggguccugaguuugu

SEQ ID NO: 1739517 - RNA, 19 nt, Homo sapiens
  misc_RNA (1)...(19): siRNA sense strand
gugcuggaguggcagaaga

SEQ ID NO: 1739518 - RNA, 19 nt, Homo sapiens
  misc_RNA (1)...(19): siRNA sense strand
ggacaagcuccuccuuuac

SEQ ID NO: 1739519 - RNA, 19 nt, Homo sapiens
  misc_RNA (1)...(19): siRNA sense strand
gaccugcucccucuucaug

SEQ ID NO: 1739520 - RNA, 19 nt, Homo sapiens
  misc_RNA (1)...(19): siRNA sense strand
agaaagaagacuccgagaa

SEQ ID NO: 1739521 - RNA, 19 nt, Homo sapiens
  misc_RNA (1)...(19): siRNA sense strand
caaggaagagaagaaagaa

SEQ ID NO: 1739522 - RNA, 19 nt, Homo sapiens
  misc_RNA (1)...(19): siRNA sense strand
ggaaggaggcacggagaau

SEQ ID NO: 1739523 - RNA, 19 nt, Homo sapiens
  misc_RNA (1)...(19): siRNA sense strand
acaaagaugaggagugguu

SEQ ID NO: 1739524 - RNA, 19 nt, Homo sapiens
  misc_RNA (1)...(19): siRNA sense strand
cccagacgauguugauuuc

SEQ ID NO: 1739525 - RNA, 19 nt, Homo sapiens
  misc_RNA (1)...(19): siRNA sense strand
uggaguggcagaagacuuu

SEQ ID NO: 1739526 - RNA, 19 nt, Homo sapiens
  misc_RNA (1)...(19): siRNA sense strand
caucgugcauuccuuggau

SEQ ID NO: 1739527 - RNA, 19 nt, Homo sapiens
  misc_RNA (1)...(19): siRNA sense strand
agaaguugauuaaggucuu

SEQ ID NO: 1739528 - RNA, 19 nt, Homo sapiens
  misc_RNA (1)...(19): siRNA sense strand
gcgcuauaaugacuacaag

SEQ ID NO: 1739529 - RNA, 19 nt, Homo sapiens
  misc_RNA (1)...(19): siRNA sense strand
gggugaauaucgggacuau

SEQ ID NO: 1739530 - RNA, 19 nt, Homo sapiens
  misc_RNA (1)...(19): siRNA sense strand
aggagaagcccaaggaaga

SEQ ID NO: 1739531 - RNA, 19 nt, Homo sapiens
  misc_RNA (1)...(19): siRNA sense strand
gaaggcgcagggacaaguu

SEQ ID NO: 1739532 - RNA, 19 nt, Homo sapiens
  misc_RNA (1)...(19): siRNA sense strand
aaaccaacgacaaggauga

SEQ ID NO: 1739533 - RNA, 19 nt, Homo sapiens
  misc_RNA (1)...(19): siRNA sense strand
gaugcagccgugauuaaga

SEQ ID NO: 1739534 - RNA, 19 nt, Homo sapiens
  misc_RNA (1)...(19): siRNA sense strand
agaaggagaagcccaagga

SEQ ID NO: 1739535 - RNA, 19 nt, Homo sapiens
  misc_RNA (1)...(19): siRNA sense strand
gcagggacaaguucagaag

SEQ ID NO: 1739536 - RNA, 19 nt, Homo sapiens
  misc_RNA (1)...(19): siRNA sense strand
gggacaaggaagagaagaa

SEQ ID NO: 1739537 - RNA, 19 nt, Homo sapiens
  misc_RNA (1)...(19): siRNA sense strand
caaggguccugaguuugug

SEQ ID NO: 1739538 - RNA, 19 nt, Homo sapiens
  misc_RNA (1)...(19): siRNA sense strand
agcaggaaguggagaaguu

SEQ ID NO: 1739539 - RNA, 19 nt, Homo sapiens
  misc_RNA (1)...(19): siRNA sense strand
caaagacccagagcaggaa

SEQ ID NO: 1739540 - RNA, 19 nt, Homo sapiens
  misc_RNA (1)...(19): siRNA sense strand
uuacaacaccugugaguac

SEQ ID NO: 1739541 - RNA, 19 nt, Homo sapiens
  misc_RNA (1)...(19): siRNA sense strand
gaagcccaaggaagaagaa

SEQ ID NO: 1739542 - RNA, 19 nt, Homo sapiens
  misc_RNA (1)...(19): siRNA sense strand
aggaagagaagaaagaaga

SEQ ID NO: 1739543 - RNA, 19 nt, Homo sapiens
  misc_RNA (1)...(19): siRNA sense strand
caaagaugaggagugguuu

SEQ ID NO: 1739544 - RNA, 19 nt, Homo sapiens
  misc_RNA (1)...(19): siRNA sense strand
ucacgccguugcugagugu

SEQ ID NO: 1739545 - RNA, 19 nt, Homo sapiens
  misc_RNA (1)...(19): siRNA sense strand
cagcaagaaagaagaagga

SEQ ID NO: 1739546 - RNA, 19 nt, Homo sapiens
  misc_RNA (1)...(19): siRNA sense strand
caagcgcuauaaugacuac

SEQ ID NO: 1739547 - RNA, 19 nt, Homo sapiens
  misc_RNA (1)...(19): siRNA sense strand
gcaggaaguggagaaguuc

SEQ ID NO: 1739548 - RNA, 19 nt, Homo sapiens
  misc_RNA (1)...(19): siRNA sense strand
gaggaagaggcccagaaga

SEQ ID NO: 1739549 - RNA, 19 nt, Homo sapiens
  misc_RNA (1)...(19): siRNA sense strand
acaaggaugagaagaagga

SEQ ID NO: 1739550 - RNA, 19 nt, Homo sapiens
  misc_RNA (1)...(19): siRNA sense strand
ccaacgacaaggaugagaa

SEQ ID NO: 1739551 - RNA, 19 nt, Homo sapiens
  misc_RNA (1)...(19): siRNA sense strand
caacagaugcaggauuucu

SEQ ID NO: 1739552 - RNA, 19 nt, Homo sapiens
  misc_RNA (1)...(19): siRNA sense strand
ugacaguucuaaugaugac

SEQ ID NO: 1739553 - RNA, 19 nt, Homo sapiens
  misc_RNA (1)...(19): siRNA sense strand
gaugacgaguacgaucgaa

SEQ ID NO: 1739554 - RNA, 19 nt, Homo sapiens
  misc_RNA (1)...(19): siRNA sense strand
gaccuucgaccgcaguguu

SEQ ID NO: 1739555 - RNA, 19 nt, Homo sapiens
  misc_RNA (1)...(19): siRNA sense strand
caggaacugggcaaggaua

SEQ ID NO: 1739556 - RNA, 19 nt, Homo sapiens
  misc_RNA (1)...(19): siRNA sense strand
gagacuggcugguuugaua

SEQ ID NO: 1739557 - RNA, 19 nt, Homo sapiens
  misc_RNA (1)...(19): siRNA sense strand
gcaaacauaucuucaacaa

SEQ ID NO: 1739558 - RNA, 19 nt, Homo sapiens
  misc_RNA (1)...(19): siRNA sense strand
agacaaagcugaugccauu

SEQ ID NO: 1739559 - RNA, 19 nt, Homo sapiens
  misc_RNA (1)...(19): siRNA sense strand
caacaagcaugcagagaaa

SEQ ID NO: 1739560 - RNA, 19 nt, Homo sapiens
  misc_RNA (1)...(19): siRNA sense strand
gcacagcucugacccauac

SEQ ID NO: 1739561 - RNA, 19 nt, Homo sapiens
  misc_RNA (1)...(19): siRNA sense strand
ggcaacagaugcaggauuu

SEQ ID NO: 1739562 - RNA, 19 nt, Homo sapiens
  misc_RNA (1)...(19): siRNA sense strand
caagggccauuguggaaua

SEQ ID NO: 1739563 - RNA, 19 nt, Homo sapiens
  misc_RNA (1)...(19): siRNA sense strand
gcaagcaggcugagaauga

SEQ ID NO: 1739564 - RNA, 19 nt, Homo sapiens
  misc_RNA (1)...(19): siRNA sense strand
gaaagaagacuccgagaag

SEQ ID NO: 1739565 - RNA, 19 nt, Homo sapiens
  misc_RNA (1)...(19): siRNA sense strand
ugaagaauaucaccgacua

SEQ ID NO: 1739566 - RNA, 19 nt, Homo sapiens
  misc_RNA (1)...(19): siRNA sense strand
uggacaagcuccuccuuua

SEQ ID NO: 1739567 - RNA, 19 nt, Homo sapiens
  misc_RNA (1)...(19): siRNA sense strand
gaucaucucccuuuguaaa

SEQ ID NO: 1739568 - RNA, 19 nt, Homo sapiens
  misc_RNA (1)...(19): siRNA sense strand
gaugagaaguugauuaagg

SEQ ID NO: 1739569 - RNA, 19 nt, Homo sapiens
  misc_RNA (1)...(19): siRNA sense strand
gggaugagaaguugauuaa

SEQ ID NO: 1739570 - RNA, 19 nt, Homo sapiens
  misc_RNA (1)...(19): siRNA sense strand
ccgaagcgcucaaggagaa

SEQ ID NO: 1739571 - RNA, 19 nt, Homo sapiens
  misc_RNA (1)...(19): siRNA sense strand
uuaaagagaucuguuggaa

SEQ ID NO: 1739572 - RNA, 19 nt, Homo sapiens
  misc_RNA (1)...(19): siRNA sense strand
gaaugacaguucuaaugau

SEQ ID NO: 1739573 - RNA, 19 nt, Homo sapiens
  misc_RNA (1)...(19): siRNA sense strand
gcuaugagaugcccuaugc

SEQ ID NO: 1739574 - RNA, 19 nt, Homo sapiens
  misc_RNA (1)...(19): siRNA sense strand
gagcugagcccugguguga

SEQ ID NO: 1739575 - RNA, 19 nt, Homo sapiens
  misc_RNA (1)...(19): siRNA sense strand
ggacaaggaagagaagaaa

SEQ ID NO: 1739576 - RNA, 19 nt, Homo sapiens
  misc_RNA (1)...(19): siRNA sense strand
gggcagcauugcagagauu

SEQ ID NO: 1739577 - RNA, 19 nt, Homo sapiens
  misc_RNA (1)...(19): siRNA sense strand
ggacauagacaaagcugau

SEQ ID NO: 1739578 - RNA, 19 nt, Homo sapiens
  misc_RNA (1)...(19): siRNA sense strand
cauggagacuggcugguuu

SEQ ID NO: 1739579 - RNA, 19 nt, Homo sapiens
  misc_RNA (1)...(19): siRNA sense strand
agacgauguugauuucuuu

SEQ ID NO: 1739580 - RNA, 19 nt, Homo sapiens
  misc_RNA (1)...(19): siRNA sense strand
gaggagugguuucggucua

SEQ ID NO: 1739581 - RNA, 19 nt, Homo sapiens
  misc_RNA (1)...(19): siRNA sense strand
ggaagaggcccagaagaug

SEQ ID NO: 1739582 - RNA, 19 nt, Homo sapiens
  misc_RNA (1)...(19): siRNA sense strand
cgaccgcaguguuaacauu

SEQ ID NO: 1739583 - RNA, 19 nt, Homo sapiens
  misc_RNA (1)...(19): siRNA sense strand
gaccgcaguguuaacauua

SEQ ID NO: 1739584 - RNA, 19 nt, Homo sapiens
  misc_RNA (1)...(19): siRNA sense strand
ugcauuccuuggauuauua

SEQ ID NO: 1739585 - RNA, 19 nt, Homo sapiens
  misc_RNA (1)...(19): siRNA sense strand
gaaguugauuaaggucuug

SEQ ID NO: 1739586 - RNA, 19 nt, Homo sapiens
  misc_RNA (1)...(19): siRNA sense strand
gaagggaacccggcagaga

SEQ ID NO: 1739587 - RNA, 19 nt, Homo sapiens
  misc_RNA (1)...(19): siRNA sense strand
ugauuaaggucuuggacaa

SEQ ID NO: 1739588 - RNA, 19 nt, Homo sapiens
  misc_RNA (1)...(19): siRNA sense strand
cgacaaggaugagaagaag

SEQ ID NO: 1739589 - RNA, 19 nt, Homo sapiens
  misc_RNA (1)...(19): siRNA sense strand
ggagcgggaugagaaguug

SEQ ID NO: 1739590 - RNA, 19 nt, Homo sapiens
  misc_RNA (1)...(19): siRNA sense strand
gaugacaggacacagcuuu

SEQ ID NO: 1739591 - RNA, 19 nt, Homo sapiens
  misc_RNA (1)...(19): siRNA sense strand
auucaaggguccugaguuu

SEQ ID NO: 1739592 - RNA, 19 nt, Homo sapiens
  misc_RNA (1)...(19): siRNA sense strand
gcgcaaacauaucuucaac

SEQ ID NO: 1739593 - RNA, 19 nt, Homo sapiens
  misc_RNA (1)...(19): siRNA sense strand
cuaaguaccacccagauga

SEQ ID NO: 1739594 - RNA, 19 nt, Homo sapiens
  misc_RNA (1)...(19): siRNA sense strand
gugcauuccuuggauuauu

SEQ ID NO: 1739595 - RNA, 19 nt, Homo sapiens
  misc_RNA (1)...(19): siRNA sense strand
ucaacaagcaugcagagaa

SEQ ID NO: 1739596 - RNA, 19 nt, Homo sapiens
  misc_RNA (1)...(19): siRNA sense strand
guuggaaccugcagaacau

SEQ ID NO: 1739597 - RNA, 19 nt, Homo sapiens
  misc_RNA (1)...(19): siRNA sense strand
cagacgauguugauuucuu

SEQ ID NO: 1739598 - RNA, 19 nt, Homo sapiens
  misc_RNA (1)...(19): siRNA sense strand
gaaggaggcacggagaaug

SEQ ID NO: 1739599 - RNA, 19 nt, Homo sapiens
  misc_RNA (1)...(19): siRNA sense strand
gcccagcucugccugagau

SEQ ID NO: 1739600 - RNA, 19 nt, Homo sapiens
  misc_RNA (1)...(19): siRNA sense strand
uuaacaacuuccucacuga

SEQ ID NO: 1739601 - RNA, 19 nt, Homo sapiens
  misc_RNA (1)...(19): siRNA sense strand
gaaaauugaggaagugaaa

SEQ ID NO: 1739602 - RNA, 19 nt, Homo sapiens
  misc_RNA (1)...(19): siRNA sense strand
gaacugggcaaggauaagu

SEQ ID NO: 1739603 - RNA, 19 nt, Homo sapiens
  misc_RNA (1)...(19): siRNA sense strand
ggagaagcccaaggaagaa

SEQ ID NO: 1739604 - RNA, 19 nt, Homo sapiens
  misc_RNA (1)...(19): siRNA sense strand
aaugacaguucuaaugaug

SEQ ID NO: 1739605 - RNA, 19 nt, Homo sapiens
  misc_RNA (1)...(19): siRNA sense strand
gaaggagaagcccaaggaa

SEQ ID NO: 1739606 - RNA, 19 nt, Homo sapiens
  misc_RNA (1)...(19): siRNA sense strand
ggaaaccucgcaacaggau

SEQ ID NO: 1739607 - RNA, 19 nt, Homo sapiens
  misc_RNA (1)...(19): siRNA sense strand
gggagguuauccugggaaa

SEQ ID NO: 1739608 - RNA, 19 nt, Homo sapiens
  misc_RNA (1)...(19): siRNA sense strand
acaaggaagagaagaaaga

SEQ ID NO: 1739609 - RNA, 19 nt, Homo sapiens
  misc_RNA (1)...(19): siRNA sense strand
gcugagcccuggugugaac

SEQ ID NO: 1739610 - RNA, 19 nt, Homo sapiens
  misc_RNA (1)...(19): siRNA sense strand
ggaagaagaaugggagaag

SEQ ID NO: 1739611 - RNA, 19 nt, Homo sapiens
  misc_RNA (1)...(19): siRNA sense strand
caaagcugaugccauuguc

SEQ ID NO: 1739612 - RNA, 19 nt, Homo sapiens
  misc_RNA (1)...(19): siRNA sense strand
ucaaggguccugaguuugu

SEQ ID NO: 1739613 - RNA, 19 nt, Homo sapiens
  misc_RNA (1)...(19): siRNA sense strand
gugcuggaguggcagaaga

SEQ ID NO: 1739614 - RNA, 19 nt, Homo sapiens
  misc_RNA (1)...(19): siRNA sense strand
ggacaagcuccuccuuuac

SEQ ID NO: 1739615 - RNA, 19 nt, Homo sapiens
  misc_RNA (1)...(19): siRNA sense strand
gaccugcucccucuucaug

SEQ ID NO: 1739616 - RNA, 19 nt, Homo sapiens
  misc_RNA (1)...(19): siRNA sense strand
agaaagaagacuccgagaa

SEQ ID NO: 1739617 - RNA, 19 nt, Homo sapiens
  misc_RNA (1)...(19): siRNA sense strand
caaggaagagaagaaagaa

SEQ ID NO: 1739618 - RNA, 19 nt, Homo sapiens
  misc_RNA (1)...(19): siRNA sense strand
ggaaggaggcacggagaau

SEQ ID NO: 1739619 - RNA, 19 nt, Homo sapiens
  misc_RNA (1)...(19): siRNA sense strand
acaaagaugaggagugguu

SEQ ID NO: 1739620 - RNA, 19 nt, Homo sapiens
  misc_RNA (1)...(19): siRNA sense strand
cccagacgauguugauuuc

SEQ ID NO: 1739621 - RNA, 19 nt, Homo sapiens
  misc_RNA (1)...(19): siRNA sense strand
uggaguggcagaagacuuu

SEQ ID NO: 1739622 - RNA, 19 nt, Homo sapiens
  misc_RNA (1)...(19): siRNA sense strand
caucgugcauuccuuggau

SEQ ID NO: 1739623 - RNA, 19 nt, Homo sapiens
  misc_RNA (1)...(19): siRNA sense strand
agaaguugauuaaggucuu

SEQ ID NO: 1739624 - RNA, 19 nt, Homo sapiens
  misc_RNA (1)...(19): siRNA sense strand
gaugcagccgugauuaaga

SEQ ID NO: 1739625 - RNA, 19 nt, Homo sapiens
  misc_RNA (1)...(19): siRNA sense strand
gcgcuauaaugacuacaag

SEQ ID NO: 1739626 - RNA, 19 nt, Homo sapiens
  misc_RNA (1)...(19): siRNA sense strand
aggagaagcccaaggaaga

SEQ ID NO: 1739627 - RNA, 19 nt, Homo sapiens
  misc_RNA (1)...(19): siRNA sense strand
aaaccaacgacaaggauga

SEQ ID NO: 1739628 - RNA, 19 nt, Homo sapiens
  misc_RNA (1)...(19): siRNA sense strand
agaaggagaagcccaagga

SEQ ID NO: 1739629 - RNA, 19 nt, Homo sapiens
  misc_RNA (1)...(19): siRNA sense strand
gggacaaggaagagaagaa

SEQ ID NO: 1739630 - RNA, 19 nt, Homo sapiens
  misc_RNA (1)...(19): siRNA sense strand
caaggguccugaguuugug

SEQ ID NO: 1739631 - RNA, 19 nt, Homo sapiens
  misc_RNA (1)...(19): siRNA sense strand
agcaggaaguggagaaguu

SEQ ID NO: 1739632 - RNA, 19 nt, Homo sapiens
  misc_RNA (1)...(19): siRNA sense strand
caaagacccagagcaggaa

SEQ ID NO: 1739633 - RNA, 19 nt, Homo sapiens
  misc_RNA (1)...(19): siRNA sense strand
uuacaacaccugugaguac

SEQ ID NO: 1739634 - RNA, 19 nt, Homo sapiens
  misc_RNA (1)...(19): siRNA sense strand
gaagcccaaggaagaagaa

SEQ ID NO: 1739635 - RNA, 19 nt, Homo sapiens
  misc_RNA (1)...(19): siRNA sense strand
aggaagagaagaaagaaga

SEQ ID NO: 1739636 - RNA, 19 nt, Homo sapiens
  misc_RNA (1)...(19): siRNA sense strand
cagcaagaaagaagaagga

SEQ ID NO: 1739637 - RNA, 19 nt, Homo sapiens
  misc_RNA (1)...(19): siRNA sense strand
caaagaugaggagugguuu

SEQ ID NO: 1739638 - RNA, 19 nt, Homo sapiens
  misc_RNA (1)...(19): siRNA sense strand
ucacgccguugcugagugu

SEQ ID NO: 1739639 - RNA, 19 nt, Homo sapiens
  misc_RNA (1)...(19): siRNA sense strand
ccaacgacaaggaugagaa

SEQ ID NO: 1739640 - RNA, 19 nt, Homo sapiens
  misc_RNA (1)...(19): siRNA sense strand
caacagaugcaggauuucu

SEQ ID NO: 1739641 - RNA, 19 nt, Homo sapiens
  misc_RNA (1)...(19): siRNA sense strand
caagcgcuauaaugacuac

SEQ ID NO: 1739642 - RNA, 19 nt, Homo sapiens
  misc_RNA (1)...(19): siRNA sense strand
gcaggaaguggagaaguuc

SEQ ID NO: 1739643 - RNA, 19 nt, Homo sapiens
  misc_RNA (1)...(19): siRNA sense strand
gaggaagaggcccagaaga

SEQ ID NO: 1739644 - RNA, 19 nt, Homo sapiens
  misc_RNA (1)...(19): siRNA sense strand
acaaggaugagaagaagga

SEQ ID NO: 1739645 - RNA, 19 nt, Homo sapiens
  misc_RNA (1)...(19): siRNA sense strand
ugacaguucuaaugaugac

SEQ ID NO: 1739646 - RNA, 19 nt, Homo sapiens
  misc_RNA (1)...(19): siRNA sense strand
gaccuucgaccgcaguguu

SEQ ID NO: 1739647 - RNA, 19 nt, Homo sapiens
  misc_RNA (1)...(19): siRNA sense strand
cagccgugauuaagaugga

SEQ ID NO: 1739648 - RNA, 19 nt, Homo sapiens
  misc_RNA (1)...(19): siRNA sense strand
caggaacugggcaaggaua

SEQ ID NO: 1739649 - RNA, 19 nt, Homo sapiens
  misc_RNA (1)...(19): siRNA sense strand
cgcaggaacugggcaagga

SEQ ID NO: 1739650 - RNA, 19 nt, Homo sapiens
  misc_RNA (1)...(19): siRNA sense strand
cgggaugagaaguugauua

SEQ ID NO: 1739651 - RNA, 19 nt, Homo sapiens
  misc_RNA (1)...(19): siRNA sense strand
ccgucaagcgcuauaauga

SEQ ID NO: 1739652 - RNA, 19 nt, Homo sapiens
  misc_RNA (1)...(19): siRNA sense strand
gagggcagcgugucagagu

SEQ ID NO: 1739653 - RNA, 19 nt, Homo sapiens
  misc_RNA (1)...(19): siRNA sense strand
caacgacaaggaugagaag

SEQ ID NO: 1739654 - RNA, 19 nt, Homo sapiens
  misc_RNA (1)...(19): siRNA sense strand
aggaagaggcccagaagau

SEQ ID NO: 1739655 - RNA, 19 nt, Homo sapiens
  misc_RNA (1)...(19): siRNA sense strand
uaacaacuuccucacugau

SEQ ID NO: 1739656 - RNA, 19 nt, Homo sapiens
  misc_RNA (1)...(19): siRNA sense strand
gcaguuaccugacguauga

SEQ ID NO: 1739657 - RNA, 19 nt, Homo sapiens
  misc_RNA (1)...(19): siRNA sense strand
gaucaaauguguucaugag

SEQ ID NO: 1739658 - RNA, 19 nt, Homo sapiens
  misc_RNA (1)...(19): siRNA sense strand
aaauugcucugcacacuaa

SEQ ID NO: 1739659 - RNA, 19 nt, Homo sapiens
  misc_RNA (1)...(19): siRNA sense strand
gaaagauaaccguggauga

SEQ ID NO: 1739660 - RNA, 19 nt, Homo sapiens
  misc_RNA (1)...(19): siRNA sense strand
caaauguguucaugagguu

SEQ ID NO: 1739661 - RNA, 19 nt, Homo sapiens
  misc_RNA (1)...(19): siRNA sense strand
gaaauugcucugcacacua

SEQ ID NO: 1739662 - RNA, 19 nt, Homo sapiens
  misc_RNA (1)...(19): siRNA sense strand
ggauggagcccucguguuc

SEQ ID NO: 1739663 - RNA, 19 nt, Homo sapiens
  misc_RNA (1)...(19): siRNA sense strand
caauggagcucuguaugug

SEQ ID NO: 1739664 - RNA, 19 nt, Homo sapiens
  misc_RNA (1)...(19): siRNA sense strand
ccauugagaucccgcaguu

SEQ ID NO: 1739665 - RNA, 19 nt, Homo sapiens
  misc_RNA (1)...(19): siRNA sense strand
ggaaauugcucugcacacu

SEQ ID NO: 1739666 - RNA, 19 nt, Homo sapiens
  misc_RNA (1)...(19): siRNA sense strand
ugacaacccagauaucuug

SEQ ID NO: 1739667 - RNA, 19 nt, Homo sapiens
  misc_RNA (1)...(19): siRNA sense strand
gaagagggugucaggauca

SEQ ID NO: 1739668 - RNA, 19 nt, Homo sapiens
  misc_RNA (1)...(19): siRNA sense strand
uaacaggcaauauaugaga

SEQ ID NO: 1739669 - RNA, 19 nt, Homo sapiens
  misc_RNA (1)...(19): siRNA sense strand
caacccagauaucuugaag

SEQ ID NO: 1739670 - RNA, 19 nt, Homo sapiens
  misc_RNA (1)...(19): siRNA sense strand
gaucauagaagccauugag

SEQ ID NO: 1739671 - RNA, 19 nt, Homo sapiens
  misc_RNA (1)...(19): siRNA sense strand
guccaccgauuaccacauu

SEQ ID NO: 1739672 - RNA, 19 nt, Homo sapiens
  misc_RNA (1)...(19): siRNA sense strand
acacuaacaggcaauauau

SEQ ID NO: 1739673 - RNA, 19 nt, Homo sapiens
  misc_RNA (1)...(19): siRNA sense strand
gaauggcuccuucaacgau

SEQ ID NO: 1739674 - RNA, 19 nt, Homo sapiens
  misc_RNA (1)...(19): siRNA sense strand
cauagaagccauugagauc

SEQ ID NO: 1739675 - RNA, 19 nt, Homo sapiens
  misc_RNA (1)...(19): siRNA sense strand
uaaaacaacugccaaggau

SEQ ID NO: 1739676 - RNA, 19 nt, Homo sapiens
  misc_RNA (1)...(19): siRNA sense strand
guauguggguggaaugaag

SEQ ID NO: 1739677 - RNA, 19 nt, Homo sapiens
  misc_RNA (1)...(19): siRNA sense strand
cacacuaacaggcaauaua

SEQ ID NO: 1739678 - RNA, 19 nt, Homo sapiens
  misc_RNA (1)...(19): siRNA sense strand
gcccucguguucagcuaua

SEQ ID NO: 1739679 - RNA, 19 nt, Homo sapiens
  misc_RNA (1)...(19): siRNA sense strand
agauaaccguggaugacua

SEQ ID NO: 1739680 - RNA, 19 nt, Homo sapiens
  misc_RNA (1)...(19): siRNA sense strand
gcagugguguggcauccau

SEQ ID NO: 1739681 - RNA, 19 nt, Homo sapiens
  misc_RNA (1)...(19): siRNA sense strand
gauaaccguggaugacuau

SEQ ID NO: 1739682 - RNA, 19 nt, Homo sapiens
  misc_RNA (1)...(19): siRNA sense strand
ggcuguaucucucacuuca

SEQ ID NO: 1739683 - RNA, 19 nt, Homo sapiens
  misc_RNA (1)...(19): siRNA sense strand
caacagcgacuucauuucc

SEQ ID NO: 1739684 - RNA, 19 nt, Homo sapiens
  misc_RNA (1)...(19): siRNA sense strand
acuaacaggcaauauauga

SEQ ID NO: 1739685 - RNA, 19 nt, Homo sapiens
  misc_RNA (1)...(19): siRNA sense strand
ucaauggagcucuguaugu

SEQ ID NO: 1739686 - RNA, 19 nt, Homo sapiens
  misc_RNA (1)...(19): siRNA sense strand
auugagaucccgcaguuua

SEQ ID NO: 1739687 - RNA, 19 nt, Homo sapiens
  misc_RNA (1)...(19): siRNA sense strand
gagggugucaggaucaaga

SEQ ID NO: 1739688 - RNA, 19 nt, Homo sapiens
  misc_RNA (1)...(19): siRNA sense strand
gauggccagucaggaaaga

SEQ ID NO: 1739689 - RNA, 19 nt, Homo sapiens
  misc_RNA (1)...(19): siRNA sense strand
cguggaagaugccguggau

SEQ ID NO: 1739690 - RNA, 19 nt, Homo sapiens
  misc_RNA (1)...(19): siRNA sense strand
cccaacagcgacuucauuu

SEQ ID NO: 1739691 - RNA, 19 nt, Homo sapiens
  misc_RNA (1)...(19): siRNA sense strand
gggauggccagucaggaaa

SEQ ID NO: 1739692 - RNA, 19 nt, Homo sapiens
  misc_RNA (1)...(19): siRNA sense strand
cguuagggauggccaguca

SEQ ID NO: 1739693 - RNA, 19 nt, Homo sapiens
  misc_RNA (1)...(19): siRNA sense strand
caucaauggagcucuguau

SEQ ID NO: 1739694 - RNA, 19 nt, Homo sapiens
  misc_RNA (1)...(19): siRNA sense strand
aagaucaaauguguucaug

SEQ ID NO: 1739695 - RNA, 19 nt, Homo sapiens
  misc_RNA (1)...(19): siRNA sense strand
gagcccucguguucagcua

SEQ ID NO: 1739696 - RNA, 19 nt, Homo sapiens
  misc_RNA (1)...(19): siRNA sense strand
caagaucaaauguguucau

SEQ ID NO: 1739697 - RNA, 19 nt, Homo sapiens
  misc_RNA (1)...(19): siRNA sense strand
ggccagucaggaaagauaa

SEQ ID NO: 1739698 - RNA, 19 nt, Homo sapiens
  misc_RNA (1)...(19): siRNA sense strand
gcacacuaacaggcaauau

SEQ ID NO: 1739699 - RNA, 19 nt, Homo sapiens
  misc_RNA (1)...(19): siRNA sense strand
cguaugacaacccagauau

SEQ ID NO: 1739700 - RNA, 19 nt, Homo sapiens
  misc_RNA (1)...(19): siRNA sense strand
ugcggcagcuuaacaucaa

SEQ ID NO: 1739701 - RNA, 19 nt, Homo sapiens
  misc_RNA (1)...(19): siRNA sense strand
aaccguggaugacuaugga

SEQ ID NO: 1739702 - RNA, 19 nt, Homo sapiens
  misc_RNA (1)...(19): siRNA sense strand
ucauagaagccauugagau

SEQ ID NO: 1739703 - RNA, 19 nt, Homo sapiens
  misc_RNA (1)...(19): siRNA sense strand
gcucgugggcuguaucucu

SEQ ID NO: 1739704 - RNA, 19 nt, Homo sapiens
  misc_RNA (1)...(19): siRNA sense strand
acagcgacuucauuuccuu

SEQ ID NO: 1739705 - RNA, 19 nt, Homo sapiens
  misc_RNA (1)...(19): siRNA sense strand
uggguggaaugaaggaaau

SEQ ID NO: 1739706 - RNA, 19 nt, Homo sapiens
  misc_RNA (1)...(19): siRNA sense strand
aauguguucaugagguuua

SEQ ID NO: 1739707 - RNA, 19 nt, Homo sapiens
  misc_RNA (1)...(19): siRNA sense strand
uggccagucaggaaagaua

SEQ ID NO: 1739708 - RNA, 19 nt, Homo sapiens
  misc_RNA (1)...(19): siRNA sense strand
gcaguuaccugacguauga

SEQ ID NO: 1739709 - RNA, 19 nt, Homo sapiens
  misc_RNA (1)...(19): siRNA sense strand
gaucaaauguguucaugag

SEQ ID NO: 1739710 - RNA, 19 nt, Homo sapiens
  misc_RNA (1)...(19): siRNA sense strand
aaauugcucugcacacuaa

SEQ ID NO: 1739711 - RNA, 19 nt, Homo sapiens
  misc_RNA (1)...(19): siRNA sense strand
gaaagauaaccguggauga

SEQ ID NO: 1739712 - RNA, 19 nt, Homo sapiens
  misc_RNA (1)...(19): siRNA sense strand
caaauguguucaugagguu

SEQ ID NO: 1739713 - RNA, 19 nt, Homo sapiens
  misc_RNA (1)...(19): siRNA sense strand
gaaauugcucugcacacua

SEQ ID NO: 1739714 - RNA, 19 nt, Homo sapiens
  misc_RNA (1)...(19): siRNA sense strand
ggauggagcccucguguuc

SEQ ID NO: 1739715 - RNA, 19 nt, Homo sapiens
  misc_RNA (1)...(19): siRNA sense strand
caauggagcucuguaugug

SEQ ID NO: 1739716 - RNA, 19 nt, Homo sapiens
  misc_RNA (1)...(19): siRNA sense strand
ccauugagaucccgcaguu

SEQ ID NO: 1739717 - RNA, 19 nt, Homo sapiens
  misc_RNA (1)...(19): siRNA sense strand
ggaaauugcucugcacacu

SEQ ID NO: 1739718 - RNA, 19 nt, Homo sapiens
  misc_RNA (1)...(19): siRNA sense strand
ugacaacccagauaucuug

SEQ ID NO: 1739719 - RNA, 19 nt, Homo sapiens
  misc_RNA (1)...(19): siRNA sense strand
gaagagggugucaggauca

SEQ ID NO: 1739720 - RNA, 19 nt, Homo sapiens
  misc_RNA (1)...(19): siRNA sense strand
uaacaggcaauauaugaga

SEQ ID NO: 1739721 - RNA, 19 nt, Homo sapiens
  misc_RNA (1)...(19): siRNA sense strand
caacccagauaucuugaag

SEQ ID NO: 1739722 - RNA, 19 nt, Homo sapiens
  misc_RNA (1)...(19): siRNA sense strand
gaucauagaagccauugag

SEQ ID NO: 1739723 - RNA, 19 nt, Homo sapiens
  misc_RNA (1)...(19): siRNA sense strand
guccaccgauuaccacauu

SEQ ID NO: 1739724 - RNA, 19 nt, Homo sapiens
  misc_RNA (1)...(19): siRNA sense strand
acacuaacaggcaauauau

SEQ ID NO: 1739725 - RNA, 19 nt, Homo sapiens
  misc_RNA (1)...(19): siRNA sense strand
gaauggcuccuucaacgau

SEQ ID NO: 1739726 - RNA, 19 nt, Homo sapiens
  misc_RNA (1)...(19): siRNA sense strand
cauagaagccauugagauc

SEQ ID NO: 1739727 - RNA, 19 nt, Homo sapiens
  misc_RNA (1)...(19): siRNA sense strand
uaaaacaacugccaaggau

SEQ ID NO: 1739728 - RNA, 19 nt, Homo sapiens
  misc_RNA (1)...(19): siRNA sense strand
guauguggguggaaugaag

SEQ ID NO: 1739729 - RNA, 19 nt, Homo sapiens
  misc_RNA (1)...(19): siRNA sense strand
cacacuaacaggcaauaua

SEQ ID NO: 1739730 - RNA, 19 nt, Homo sapiens
  misc_RNA (1)...(19): siRNA sense strand
gcccucguguucagcuaua

SEQ ID NO: 1739731 - RNA, 19 nt, Homo sapiens
  misc_RNA (1)...(19): siRNA sense strand
agauaaccguggaugacua

SEQ ID NO: 1739732 - RNA, 19 nt, Homo sapiens
  misc_RNA (1)...(19): siRNA sense strand
gcagugguguggcauccau

SEQ ID NO: 1739733 - RNA, 19 nt, Homo sapiens
  misc_RNA (1)...(19): siRNA sense strand
gauaaccguggaugacuau

SEQ ID NO: 1739734 - RNA, 19 nt, Homo sapiens
  misc_RNA (1)...(19): siRNA sense strand
ggcuguaucucucacuuca

SEQ ID NO: 1739735 - RNA, 19 nt, Homo sapiens
  misc_RNA (1)...(19): siRNA sense strand
caacagcgacuucauuucc

SEQ ID NO: 1739736 - RNA, 19 nt, Homo sapiens
  misc_RNA (1)...(19): siRNA sense strand
acuaacaggcaauauauga

SEQ ID NO: 1739737 - RNA, 19 nt, Homo sapiens
  misc_RNA (1)...(19): siRNA sense strand
ucaauggagcucuguaugu

SEQ ID NO: 1739738 - RNA, 19 nt, Homo sapiens
  misc_RNA (1)...(19): siRNA sense strand
auugagaucccgcaguuua

SEQ ID NO: 1739739 - RNA, 19 nt, Homo sapiens
  misc_RNA (1)...(19): siRNA sense strand
gagggugucaggaucaaga

SEQ ID NO: 1739740 - RNA, 19 nt, Homo sapiens
  misc_RNA (1)...(19): siRNA sense strand
gauggccagucaggaaaga

SEQ ID NO: 1739741 - RNA, 19 nt, Homo sapiens
  misc_RNA (1)...(19): siRNA sense strand
cguggaagaugccguggau

SEQ ID NO: 1739742 - RNA, 19 nt, Homo sapiens
  misc_RNA (1)...(19): siRNA sense strand
cccaacagcgacuucauuu

SEQ ID NO: 1739743 - RNA, 19 nt, Homo sapiens
  misc_RNA (1)...(19): siRNA sense strand
gggauggccagucaggaaa

SEQ ID NO: 1739744 - RNA, 19 nt, Homo sapiens
  misc_RNA (1)...(19): siRNA sense strand
cguuagggauggccaguca

SEQ ID NO: 1739745 - RNA, 19 nt, Homo sapiens
  misc_RNA (1)...(19): siRNA sense strand
caucaauggagcucuguau

SEQ ID NO: 1739746 - RNA, 19 nt, Homo sapiens
  misc_RNA (1)...(19): siRNA sense strand
aagaucaaauguguucaug

SEQ ID NO: 1739747 - RNA, 19 nt, Homo sapiens
  misc_RNA (1)...(19): siRNA sense strand
gagcccucguguucagcua

SEQ ID NO: 1739748 - RNA, 19 nt, Homo sapiens
  misc_RNA (1)...(19): siRNA sense strand
caagaucaaauguguucau

SEQ ID NO: 1739749 - RNA, 19 nt, Homo sapiens
  misc_RNA (1)...(19): siRNA sense strand
ggccagucaggaaagauaa

SEQ ID NO: 1739750 - RNA, 19 nt, Homo sapiens
  misc_RNA (1)...(19): siRNA sense strand
gcacacuaacaggcaauau

SEQ ID NO: 1739751 - RNA, 19 nt, Homo sapiens
  misc_RNA (1)...(19): siRNA sense strand
cguaugacaacccagauau

SEQ ID NO: 1739752 - RNA, 19 nt, Homo sapiens
  misc_RNA (1)...(19): siRNA sense strand
ugcggcagcuuaacaucaa

SEQ ID NO: 1739753 - RNA, 19 nt, Homo sapiens
  misc_RNA (1)...(19): siRNA sense strand
aaccguggaugacuaugga

SEQ ID NO: 1739754 - RNA, 19 nt, Homo sapiens
  misc_RNA (1)...(19): siRNA sense strand
ucauagaagccauugagau

SEQ ID NO: 1739755 - RNA, 19 nt, Homo sapiens
  misc_RNA (1)...(19): siRNA sense strand
gcucgugggcuguaucucu

SEQ ID NO: 1739756 - RNA, 19 nt, Homo sapiens
  misc_RNA (1)...(19): siRNA sense strand
acagcgacuucauuuccuu

SEQ ID NO: 1739757 - RNA, 19 nt, Homo sapiens
  misc_RNA (1)...(19): siRNA sense strand
uggguggaaugaaggaaau

SEQ ID NO: 1739758 - RNA, 19 nt, Homo sapiens
  misc_RNA (1)...(19): siRNA sense strand
aauguguucaugagguuua

SEQ ID NO: 1739759 - RNA, 19 nt, Homo sapiens
  misc_RNA (1)...(19): siRNA sense strand
uggccagucaggaaagaua

SEQ ID NO: 1739760 - RNA, 19 nt, Homo sapiens
  misc_RNA (1)...(19): siRNA sense strand
gcaguuaccugacguauga

SEQ ID NO: 1739761 - RNA, 19 nt, Homo sapiens
  misc_RNA (1)...(19): siRNA sense strand
gaucaaauguguucaugag

SEQ ID NO: 1739762 - RNA, 19 nt, Homo sapiens
  misc_RNA (1)...(19): siRNA sense strand
aaauugcucugcacacuaa

SEQ ID NO: 1739763 - RNA, 19 nt, Homo sapiens
  misc_RNA (1)...(19): siRNA sense strand
gaaagauaaccguggauga

SEQ ID NO: 1739764 - RNA, 19 nt, Homo sapiens
  misc_RNA (1)...(19): siRNA sense strand
caaauguguucaugagguu

SEQ ID NO: 1739765 - RNA, 19 nt, Homo sapiens
  misc_RNA (1)...(19): siRNA sense strand
gaaauugcucugcacacua

SEQ ID NO: 1739766 - RNA, 19 nt, Homo sapiens
  misc_RNA (1)...(19): siRNA sense strand
ggauggagcccucguguuc

SEQ ID NO: 1739767 - RNA, 19 nt, Homo sapiens
  misc_RNA (1)...(19): siRNA sense strand
caauggagcucuguaugug

SEQ ID NO: 1739768 - RNA, 19 nt, Homo sapiens
  misc_RNA (1)...(19): siRNA sense strand
ccauugagaucccgcaguu

SEQ ID NO: 1739769 - RNA, 19 nt, Homo sapiens
  misc_RNA (1)...(19): siRNA sense strand
ggaaauugcucugcacacu

SEQ ID NO: 1739770 - RNA, 19 nt, Homo sapiens
  misc_RNA (1)...(19): siRNA sense strand
ugacaacccagauaucuug

SEQ ID NO: 1739771 - RNA, 19 nt, Homo sapiens
  misc_RNA (1)...(19): siRNA sense strand
gaagagggugucaggauca

SEQ ID NO: 1739772 - RNA, 19 nt, Homo sapiens
  misc_RNA (1)...(19): siRNA sense strand
uaacaggcaauauaugaga

SEQ ID NO: 1739773 - RNA, 19 nt, Homo sapiens
  misc_RNA (1)...(19): siRNA sense strand
caacccagauaucuugaag

SEQ ID NO: 1739774 - RNA, 19 nt, Homo sapiens
  misc_RNA (1)...(19): siRNA sense strand
gaucauagaagccauugag

SEQ ID NO: 1739775 - RNA, 19 nt, Homo sapiens
  misc_RNA (1)...(19): siRNA sense strand
guccaccgauuaccacauu

SEQ ID NO: 1739776 - RNA, 19 nt, Homo sapiens
  misc_RNA (1)...(19): siRNA sense strand
acacuaacaggcaauauau

SEQ ID NO: 1739777 - RNA, 19 nt, Homo sapiens
  misc_RNA (1)...(19): siRNA sense strand
gaauggcuccuucaacgau

SEQ ID NO: 1739778 - RNA, 19 nt, Homo sapiens
  misc_RNA (1)...(19): siRNA sense strand
cauagaagccauugagauc

SEQ ID NO: 1739779 - RNA, 19 nt, Homo sapiens
  misc_RNA (1)...(19): siRNA sense strand
uaaaacaacugccaaggau

SEQ ID NO: 1739780 - RNA, 19 nt, Homo sapiens
  misc_RNA (1)...(19): siRNA sense strand
guauguggguggaaugaag

SEQ ID NO: 1739781 - RNA, 19 nt, Homo sapiens
  misc_RNA (1)...(19): siRNA sense strand
cacacuaacaggcaauaua

SEQ ID NO: 1739782 - RNA, 19 nt, Homo sapiens
  misc_RNA (1)...(19): siRNA sense strand
gcccucguguucagcuaua

SEQ ID NO: 1739783 - RNA, 19 nt, Homo sapiens
  misc_RNA (1)...(19): siRNA sense strand
agauaaccguggaugacua

SEQ ID NO: 1739784 - RNA, 19 nt, Homo sapiens
  misc_RNA (1)...(19): siRNA sense strand
gcagugguguggcauccau

SEQ ID NO: 1739785 - RNA, 19 nt, Homo sapiens
  misc_RNA (1)...(19): siRNA sense strand
gauaaccguggaugacuau

SEQ ID NO: 1739786 - RNA, 19 nt, Homo sapiens
  misc_RNA (1)...(19): siRNA sense strand
ggcuguaucucucacuuca

SEQ ID NO: 1739787 - RNA, 19 nt, Homo sapiens
  misc_RNA (1)...(19): siRNA sense strand
caacagcgacuucauuucc

SEQ ID NO: 1739788 - RNA, 19 nt, Homo sapiens
  misc_RNA (1)...(19): siRNA sense strand
acuaacaggcaauauauga

SEQ ID NO: 1739789 - RNA, 19 nt, Homo sapiens
  misc_RNA (1)...(19): siRNA sense strand
ucaauggagcucuguaugu

SEQ ID NO: 1739790 - RNA, 19 nt, Homo sapiens
  misc_RNA (1)...(19): siRNA sense strand
auugagaucccgcaguuua

SEQ ID NO: 1739791 - RNA, 19 nt, Homo sapiens
  misc_RNA (1)...(19): siRNA sense strand
gagggugucaggaucaaga

SEQ ID NO: 1739792 - RNA, 19 nt, Homo sapiens
  misc_RNA (1)...(19): siRNA sense strand
gauggccagucaggaaaga

SEQ ID NO: 1739793 - RNA, 19 nt, Homo sapiens
  misc_RNA (1)...(19): siRNA sense strand
cguggaagaugccguggau

SEQ ID NO: 1739794 - RNA, 19 nt, Homo sapiens
  misc_RNA (1)...(19): siRNA sense strand
cccaacagcgacuucauuu

SEQ ID NO: 1739795 - RNA, 19 nt, Homo sapiens
  misc_RNA (1)...(19): siRNA sense strand
gggauggccagucaggaaa

SEQ ID NO: 1739796 - RNA, 19 nt, Homo sapiens
  misc_RNA (1)...(19): siRNA sense strand
cguuagggauggccaguca

SEQ ID NO: 1739797 - RNA, 19 nt, Homo sapiens
  misc_RNA (1)...(19): siRNA sense strand
caucaauggagcucuguau

SEQ ID NO: 1739798 - RNA, 19 nt, Homo sapiens
  misc_RNA (1)...(19): siRNA sense strand
aagaucaaauguguucaug

SEQ ID NO: 1739799 - RNA, 19 nt, Homo sapiens
  misc_RNA (1)...(19): siRNA sense strand
gagcccucguguucagcua

SEQ ID NO: 1739800 - RNA, 19 nt, Homo sapiens
  misc_RNA (1)...(19): siRNA sense strand
caagaucaaauguguucau

SEQ ID NO: 1739801 - RNA, 19 nt, Homo sapiens
  misc_RNA (1)...(19): siRNA sense strand
ggccagucaggaaagauaa

SEQ ID NO: 1739802 - RNA, 19 nt, Homo sapiens
  misc_RNA (1)...(19): siRNA sense strand
gcacacuaacaggcaauau

SEQ ID NO: 1739803 - RNA, 19 nt, Homo sapiens
  misc_RNA (1)...(19): siRNA sense strand
cguaugacaacccagauau

SEQ ID NO: 1739804 - RNA, 19 nt, Homo sapiens
  misc_RNA (1)...(19): siRNA sense strand
ugcggcagcuuaacaucaa

SEQ ID NO: 1739805 - RNA, 19 nt, Homo sapiens
  misc_RNA (1)...(19): siRNA sense strand
aaccguggaugacuaugga

SEQ ID NO: 1739806 - RNA, 19 nt, Homo sapiens
  misc_RNA (1)...(19): siRNA sense strand
ucauagaagccauugagau

SEQ ID NO: 1739807 - RNA, 19 nt, Homo sapiens
  misc_RNA (1)...(19): siRNA sense strand
gcucgugggcuguaucucu

SEQ ID NO: 1739808 - RNA, 19 nt, Homo sapiens
  misc_RNA (1)...(19): siRNA sense strand
acagcgacuucauuuccuu

SEQ ID NO: 1739809 - RNA, 19 nt, Homo sapiens
  misc_RNA (1)...(19): siRNA sense strand
uggguggaaugaaggaaau

SEQ ID NO: 1739810 - RNA, 19 nt, Homo sapiens
  misc_RNA (1)...(19): siRNA sense strand
aauguguucaugagguuua

SEQ ID NO: 1739811 - RNA, 19 nt, Homo sapiens
  misc_RNA (1)...(19): siRNA sense strand
uggccagucaggaaagaua

SEQ ID NO: 1739812 - RNA, 19 nt, Homo sapiens
  misc_RNA (1)...(19): siRNA sense strand
aaauugcucugcacacuaa

SEQ ID NO: 1739813 - RNA, 19 nt, Homo sapiens
  misc_RNA (1)...(19): siRNA sense strand
gaaagauaaccguggauga

SEQ ID NO: 1739814 - RNA, 19 nt, Homo sapiens
  misc_RNA (1)...(19): siRNA sense strand
gaaauugcucugcacacua

SEQ ID NO: 1739815 - RNA, 19 nt, Homo sapiens
  misc_RNA (1)...(19): siRNA sense strand
ggauggagcccucguguuc

SEQ ID NO: 1739816 - RNA, 19 nt, Homo sapiens
  misc_RNA (1)...(19): siRNA sense strand
caauggagcucuguaugug

SEQ ID NO: 1739817 - RNA, 19 nt, Homo sapiens
  misc_RNA (1)...(19): siRNA sense strand
ggaaauugcucugcacacu

SEQ ID NO: 1739818 - RNA, 19 nt, Homo sapiens
  misc_RNA (1)...(19): siRNA sense strand
uaacaggcaauauaugaga

SEQ ID NO: 1739819 - RNA, 19 nt, Homo sapiens
  misc_RNA (1)...(19): siRNA sense strand
guccaccgauuaccacauu

SEQ ID NO: 1739820 - RNA, 19 nt, Homo sapiens
  misc_RNA (1)...(19): siRNA sense strand
acacuaacaggcaauauau

SEQ ID NO: 1739821 - RNA, 19 nt, Homo sapiens
  misc_RNA (1)...(19): siRNA sense strand
gaauggcuccuucaacgau

SEQ ID NO: 1739822 - RNA, 19 nt, Homo sapiens
  misc_RNA (1)...(19): siRNA sense strand
uaaaacaacugccaaggau

SEQ ID NO: 1739823 - RNA, 19 nt, Homo sapiens
  misc_RNA (1)...(19): siRNA sense strand
guauguggguggaaugaag

SEQ ID NO: 1739824 - RNA, 19 nt, Homo sapiens
  misc_RNA (1)...(19): siRNA sense strand
cacacuaacaggcaauaua

SEQ ID NO: 1739825 - RNA, 19 nt, Homo sapiens
  misc_RNA (1)...(19): siRNA sense strand
gcccucguguucagcuaua

SEQ ID NO: 1739826 - RNA, 19 nt, Homo sapiens
  misc_RNA (1)...(19): siRNA sense strand
agauaaccguggaugacua

SEQ ID NO: 1739827 - RNA, 19 nt, Homo sapiens
  misc_RNA (1)...(19): siRNA sense strand
gcagugguguggcauccau

SEQ ID NO: 1739828 - RNA, 19 nt, Homo sapiens
  misc_RNA (1)...(19): siRNA sense strand
gauaaccguggaugacuau

SEQ ID NO: 1739829 - RNA, 19 nt, Homo sapiens
  misc_RNA (1)...(19): siRNA sense strand
ggcuguaucucucacuuca

SEQ ID NO: 1739830 - RNA, 19 nt, Homo sapiens
  misc_RNA (1)...(19): siRNA sense strand
caacagcgacuucauuucc

SEQ ID NO: 1739831 - RNA, 19 nt, Homo sapiens
  misc_RNA (1)...(19): siRNA sense strand
acuaacaggcaauauauga

SEQ ID NO: 1739832 - RNA, 19 nt, Homo sapiens
  misc_RNA (1)...(19): siRNA sense strand
ucaauggagcucuguaugu

SEQ ID NO: 1739833 - RNA, 19 nt, Homo sapiens
  misc_RNA (1)...(19): siRNA sense strand
gauggccagucaggaaaga

SEQ ID NO: 1739834 - RNA, 19 nt, Homo sapiens
  misc_RNA (1)...(19): siRNA sense strand
cguggaagaugccguggau

SEQ ID NO: 1739835 - RNA, 19 nt, Homo sapiens
  misc_RNA (1)...(19): siRNA sense strand
cccaacagcgacuucauuu

SEQ ID NO: 1739836 - RNA, 19 nt, Homo sapiens
  misc_RNA (1)...(19): siRNA sense strand
gggauggccagucaggaaa

SEQ ID NO: 1739837 - RNA, 19 nt, Homo sapiens
  misc_RNA (1)...(19): siRNA sense strand
cguuagggauggccaguca

SEQ ID NO: 1739838 - RNA, 19 nt, Homo sapiens
  misc_RNA (1)...(19): siRNA sense strand
caucaauggagcucuguau

SEQ ID NO: 1739839 - RNA, 19 nt, Homo sapiens
  misc_RNA (1)...(19): siRNA sense strand
gagcccucguguucagcua

SEQ ID NO: 1739840 - RNA, 19 nt, Homo sapiens
  misc_RNA (1)...(19): siRNA sense strand
ggccagucaggaaagauaa

SEQ ID NO: 1739841 - RNA, 19 nt, Homo sapiens
  misc_RNA (1)...(19): siRNA sense strand
gcacacuaacaggcaauau

SEQ ID NO: 1739842 - RNA, 19 nt, Homo sapiens
  misc_RNA (1)...(19): siRNA sense strand
ugcggcagcuuaacaucaa

SEQ ID NO: 1739843 - RNA, 19 nt, Homo sapiens
  misc_RNA (1)...(19): siRNA sense strand
aaccguggaugacuaugga

SEQ ID NO: 1739844 - RNA, 19 nt, Homo sapiens
  misc_RNA (1)...(19): siRNA sense strand
gcucgugggcuguaucucu

SEQ ID NO: 1739845 - RNA, 19 nt, Homo sapiens
  misc_RNA (1)...(19): siRNA sense strand
uggguggaaugaaggaaau

SEQ ID NO: 1739846 - RNA, 19 nt, Homo sapiens
  misc_RNA (1)...(19): siRNA sense strand
acagcgacuucauuuccuu

SEQ ID NO: 1739847 - RNA, 19 nt, Homo sapiens
  misc_RNA (1)...(19): siRNA sense strand
uggccagucaggaaagaua

SEQ ID NO: 1739848 - RNA, 19 nt, Homo sapiens
  misc_RNA (1)...(19): siRNA sense strand
gcaagaacuuccauuauug

SEQ ID NO: 1739849 - RNA, 19 nt, Homo sapiens
  misc_RNA (1)...(19): siRNA sense strand
gaaagaaagggaaguauuu

SEQ ID NO: 1739850 - RNA, 19 nt, Homo sapiens
  misc_RNA (1)...(19): siRNA sense strand
uuaaauagcucaccaauca

SEQ ID NO: 1739851 - RNA, 19 nt, Homo sapiens
  misc_RNA (1)...(19): siRNA sense strand
gacagaagguggugaagua

SEQ ID NO: 1739852 - RNA, 19 nt, Homo sapiens
  misc_RNA (1)...(19): siRNA sense strand
gaaauacgcagaugacaaa

SEQ ID NO: 1739853 - RNA, 19 nt, Homo sapiens
  misc_RNA (1)...(19): siRNA sense strand
ugacacagcucaagaaugu

SEQ ID NO: 1739854 - RNA, 19 nt, Homo sapiens
  misc_RNA (1)...(19): siRNA sense strand
ugacaaggaugaaauagaa

SEQ ID NO: 1739855 - RNA, 19 nt, Homo sapiens
  misc_RNA (1)...(19): siRNA sense strand
ccaaagaacuaaacauuca

SEQ ID NO: 1739856 - RNA, 19 nt, Homo sapiens
  misc_RNA (1)...(19): siRNA sense strand
gagaagccauuaucagaaa

SEQ ID NO: 1739857 - RNA, 19 nt, Homo sapiens
  misc_RNA (1)...(19): siRNA sense strand
uaaagcagguuuggcauua

SEQ ID NO: 1739858 - RNA, 19 nt, Homo sapiens
  misc_RNA (1)...(19): siRNA sense strand
gagaaacaaugguaaaugu

SEQ ID NO: 1739859 - RNA, 19 nt, Homo sapiens
  misc_RNA (1)...(19): siRNA sense strand
gcacuacuauccagauuug

SEQ ID NO: 1739860 - RNA, 19 nt, Homo sapiens
  misc_RNA (1)...(19): siRNA sense strand
ggaaagcagagaaccauua

SEQ ID NO: 1739861 - RNA, 19 nt, Homo sapiens
  misc_RNA (1)...(19): siRNA sense strand
ggagacacagugacuauua

SEQ ID NO: 1739862 - RNA, 19 nt, Homo sapiens
  misc_RNA (1)...(19): siRNA sense strand
gaacuuacucugaugaauu

SEQ ID NO: 1739863 - RNA, 19 nt, Homo sapiens
  misc_RNA (1)...(19): siRNA sense strand
caaggcauauugauuugua

SEQ ID NO: 1739864 - RNA, 19 nt, Homo sapiens
  misc_RNA (1)...(19): siRNA sense strand
ggcaauacaucagguguua

SEQ ID NO: 1739865 - RNA, 19 nt, Homo sapiens
  misc_RNA (1)...(19): siRNA sense strand
gaacaugugauugcaauaa

SEQ ID NO: 1739866 - RNA, 19 nt, Homo sapiens
  misc_RNA (1)...(19): siRNA sense strand
ucacaaggcauauugauuu

SEQ ID NO: 1739867 - RNA, 19 nt, Homo sapiens
  misc_RNA (1)...(19): siRNA sense strand
aaacagagccagagguuaa

SEQ ID NO: 1739868 - RNA, 19 nt, Homo sapiens
  misc_RNA (1)...(19): siRNA sense strand
aaugugagcuuguucauga

SEQ ID NO: 1739869 - RNA, 19 nt, Homo sapiens
  misc_RNA (1)...(19): siRNA sense strand
gaggauauaguggaaauua

SEQ ID NO: 1739870 - RNA, 19 nt, Homo sapiens
  misc_RNA (1)...(19): siRNA sense strand
gaaaguacauuggcuaugc

SEQ ID NO: 1739871 - RNA, 19 nt, Homo sapiens
  misc_RNA (1)...(19): siRNA sense strand
agaagacgcugaggauaua

SEQ ID NO: 1739872 - RNA, 19 nt, Homo sapiens
  misc_RNA (1)...(19): siRNA sense strand
cgauagcucuccuuugauu

SEQ ID NO: 1739873 - RNA, 19 nt, Homo sapiens
  misc_RNA (1)...(19): siRNA sense strand
uauagcaacugaacuaaga

SEQ ID NO: 1739874 - RNA, 19 nt, Homo sapiens
  misc_RNA (1)...(19): siRNA sense strand
gaaggauugucuaaugaug

SEQ ID NO: 1739875 - RNA, 19 nt, Homo sapiens
  misc_RNA (1)...(19): siRNA sense strand
cacaguagcucguaugaau

SEQ ID NO: 1739876 - RNA, 19 nt, Homo sapiens
  misc_RNA (1)...(19): siRNA sense strand
caggaaggauugucuaaug

SEQ ID NO: 1739877 - RNA, 19 nt, Homo sapiens
  misc_RNA (1)...(19): siRNA sense strand
ugcaagaacuuccauuauu

SEQ ID NO: 1739878 - RNA, 19 nt, Homo sapiens
  misc_RNA (1)...(19): siRNA sense strand
ggugggaacuucucaggaa

SEQ ID NO: 1739879 - RNA, 19 nt, Homo sapiens
  misc_RNA (1)...(19): siRNA sense strand
cacagaagcugcucgaguu

SEQ ID NO: 1739880 - RNA, 19 nt, Homo sapiens
  misc_RNA (1)...(19): siRNA sense strand
gcagauugccaaagaacua

SEQ ID NO: 1739881 - RNA, 19 nt, Homo sapiens
  misc_RNA (1)...(19): siRNA sense strand
ugagaagauucaagcauuu

SEQ ID NO: 1739882 - RNA, 19 nt, Homo sapiens
  misc_RNA (1)...(19): siRNA sense strand
ggacgaggaagauuucaaa

SEQ ID NO: 1739883 - RNA, 19 nt, Homo sapiens
  misc_RNA (1)...(19): siRNA sense strand
uacaucagguguuaacuaa

SEQ ID NO: 1739884 - RNA, 19 nt, Homo sapiens
  misc_RNA (1)...(19): siRNA sense strand
gagagaagcaggucggauu

SEQ ID NO: 1739885 - RNA, 19 nt, Homo sapiens
  misc_RNA (1)...(19): siRNA sense strand
gcuaggaacuuacucugau

SEQ ID NO: 1739886 - RNA, 19 nt, Homo sapiens
  misc_RNA (1)...(19): siRNA sense strand
ggaagcuggugcccuggua

SEQ ID NO: 1739887 - RNA, 19 nt, Homo sapiens
  misc_RNA (1)...(19): siRNA sense strand
gcaugcagcugaguuacaa

SEQ ID NO: 1739888 - RNA, 19 nt, Homo sapiens
  misc_RNA (1)...(19): siRNA sense strand
gaaaauacauugcucuaag

SEQ ID NO: 1739889 - RNA, 19 nt, Homo sapiens
  misc_RNA (1)...(19): siRNA sense strand
aacauuggaucgauucaua

SEQ ID NO: 1739890 - RNA, 19 nt, Homo sapiens
  misc_RNA (1)...(19): siRNA sense strand
ggaaacagagccagagguu

SEQ ID NO: 1739891 - RNA, 19 nt, Homo sapiens
  misc_RNA (1)...(19): siRNA sense strand
gaucgauucauaccauaua

SEQ ID NO: 1739892 - RNA, 19 nt, Homo sapiens
  misc_RNA (1)...(19): siRNA sense strand
ucaaauacuuccguacuug

SEQ ID NO: 1739893 - RNA, 19 nt, Homo sapiens
  misc_RNA (1)...(19): siRNA sense strand
guacaacuaugagccuuug

SEQ ID NO: 1739894 - RNA, 19 nt, Homo sapiens
  misc_RNA (1)...(19): siRNA sense strand
gcuggaagcuuuauuucuc

SEQ ID NO: 1739895 - RNA, 19 nt, Homo sapiens
  misc_RNA (1)...(19): siRNA sense strand
guauagaggcagaggauuu

SEQ ID NO: 1739896 - RNA, 19 nt, Homo sapiens
  misc_RNA (1)...(19): siRNA sense strand
caacguugcugaaagaacu

SEQ ID NO: 1739897 - RNA, 19 nt, Homo sapiens
  misc_RNA (1)...(19): siRNA sense strand
uggaggacauuacaauaaa

SEQ ID NO: 1739898 - RNA, 19 nt, Homo sapiens
  misc_RNA (1)...(19): siRNA sense strand
gaauugaugucugaugauc

SEQ ID NO: 1739899 - RNA, 19 nt, Homo sapiens
  misc_RNA (1)...(19): siRNA sense strand
gauaguuccucuggagauu

SEQ ID NO: 1739900 - RNA, 19 nt, Homo sapiens
  misc_RNA (1)...(19): siRNA sense strand
aaacguacuucugaacaaa

SEQ ID NO: 1739901 - RNA, 19 nt, Homo sapiens
  misc_RNA (1)...(19): siRNA sense strand
cagcaugguucuggaauga

SEQ ID NO: 1739902 - RNA, 19 nt, Homo sapiens
  misc_RNA (1)...(19): siRNA sense strand
caaagaagacgcugaggau

SEQ ID NO: 1739903 - RNA, 19 nt, Homo sapiens
  misc_RNA (1)...(19): siRNA sense strand
gaaacagagccagagguua

SEQ ID NO: 1739904 - RNA, 19 nt, Homo sapiens
  misc_RNA (1)...(19): siRNA sense strand
ugauggaguucucacuuaa

SEQ ID NO: 1739905 - RNA, 19 nt, Homo sapiens
  misc_RNA (1)...(19): siRNA sense strand
guucgugucaguaauauaa

SEQ ID NO: 1739906 - RNA, 19 nt, Homo sapiens
  misc_RNA (1)...(19): siRNA sense strand
gcaaggguguacaacuaug

SEQ ID NO: 1739907 - RNA, 19 nt, Homo sapiens
  misc_RNA (1)...(19): siRNA sense strand
gaagcuuuauuucucugaa

SEQ ID NO: 1739908 - RNA, 19 nt, Homo sapiens
  misc_RNA (1)...(19): siRNA sense strand
ugaccaggguuaccucuug

SEQ ID NO: 1739909 - RNA, 19 nt, Homo sapiens
  misc_RNA (1)...(19): siRNA sense strand
ggauauaguggaaauuaug

SEQ ID NO: 1739910 - RNA, 19 nt, Homo sapiens
  misc_RNA (1)...(19): siRNA sense strand
gagcaagguuggaauugag

SEQ ID NO: 1739911 - RNA, 19 nt, Homo sapiens
  misc_RNA (1)...(19): siRNA sense strand
gagcaaauuacuauggaaa

SEQ ID NO: 1739912 - RNA, 19 nt, Homo sapiens
  misc_RNA (1)...(19): siRNA sense strand
agcgauagcucuccuuuga

SEQ ID NO: 1739913 - RNA, 19 nt, Homo sapiens
  misc_RNA (1)...(19): siRNA sense strand
uaccagauauagcaacuga

SEQ ID NO: 1739914 - RNA, 19 nt, Homo sapiens
  misc_RNA (1)...(19): siRNA sense strand
cagauuugauuuggucuuu

SEQ ID NO: 1739915 - RNA, 19 nt, Homo sapiens
  misc_RNA (1)...(19): siRNA sense strand
ggagaaacaaugguaaaug

SEQ ID NO: 1739916 - RNA, 19 nt, Homo sapiens
  misc_RNA (1)...(19): siRNA sense strand
cgaggaagauuucaaagcu

SEQ ID NO: 1739917 - RNA, 19 nt, Homo sapiens
  misc_RNA (1)...(19): siRNA sense strand
gagcuuuccucuuccagau

SEQ ID NO: 1739918 - RNA, 19 nt, Homo sapiens
  misc_RNA (1)...(19): siRNA sense strand
ggaaugagcaacaggucaa

SEQ ID NO: 1739919 - RNA, 19 nt, Homo sapiens
  misc_RNA (1)...(19): siRNA sense strand
cgagcaagguuggaauuga

SEQ ID NO: 1739920 - RNA, 19 nt, Homo sapiens
  misc_RNA (1)...(19): siRNA sense strand
gaaagcagagaaccauuag

SEQ ID NO: 1739921 - RNA, 19 nt, Homo sapiens
  misc_RNA (1)...(19): siRNA sense strand
caaaguauuagucuugcua

SEQ ID NO: 1739922 - RNA, 19 nt, Homo sapiens
  misc_RNA (1)...(19): siRNA sense strand
uugauggaguucucacuua

SEQ ID NO: 1739923 - RNA, 19 nt, Homo sapiens
  misc_RNA (1)...(19): siRNA sense strand
ccacauccuuguuguugga

SEQ ID NO: 1739924 - RNA, 19 nt, Homo sapiens
  misc_RNA (1)...(19): siRNA sense strand
gagaggaagcaaccaaaga

SEQ ID NO: 1739925 - RNA, 19 nt, Homo sapiens
  misc_RNA (1)...(19): siRNA sense strand
ugagcaucaugaucacuua

SEQ ID NO: 1739926 - RNA, 19 nt, Homo sapiens
  misc_RNA (1)...(19): siRNA sense strand
cagcaaaguauuagucuug

SEQ ID NO: 1739927 - RNA, 19 nt, Homo sapiens
  misc_RNA (1)...(19): siRNA sense strand
ggucugacgguaacucuuu

SEQ ID NO: 1739928 - RNA, 19 nt, Homo sapiens
  misc_RNA (1)...(19): siRNA sense strand
guggagaaauucagagcuu

SEQ ID NO: 1739929 - RNA, 19 nt, Homo sapiens
  misc_RNA (1)...(19): siRNA sense strand
ggaacuuacucugaugaau

SEQ ID NO: 1739930 - RNA, 19 nt, Homo sapiens
  misc_RNA (1)...(19): siRNA sense strand
gaaacaauagaucccauuc

SEQ ID NO: 1739931 - RNA, 19 nt, Homo sapiens
  misc_RNA (1)...(19): siRNA sense strand
cgaugaauuugauaagaug

SEQ ID NO: 1739932 - RNA, 19 nt, Homo sapiens
  misc_RNA (1)...(19): siRNA sense strand
gaucaagguauuuguggaa

SEQ ID NO: 1739933 - RNA, 19 nt, Homo sapiens
  misc_RNA (1)...(19): siRNA sense strand
gagagaaagagaacacaga

SEQ ID NO: 1739934 - RNA, 19 nt, Homo sapiens
  misc_RNA (1)...(19): siRNA sense strand
gaccaggguuaccucuuga

SEQ ID NO: 1739935 - RNA, 19 nt, Homo sapiens
  misc_RNA (1)...(19): siRNA sense strand
cauuagcagugccacagua

SEQ ID NO: 1739936 - RNA, 19 nt, Homo sapiens
  misc_RNA (1)...(19): siRNA sense strand
gacgguaacucuuucaaaa

SEQ ID NO: 1739937 - RNA, 19 nt, Homo sapiens
  misc_RNA (1)...(19): siRNA sense strand
cgaggcaggucauuuacug

SEQ ID NO: 1739938 - RNA, 19 nt, Homo sapiens
  misc_RNA (1)...(19): siRNA sense strand
aauacagucuucccacaaa

SEQ ID NO: 1739939 - RNA, 19 nt, Homo sapiens
  misc_RNA (1)...(19): siRNA sense strand
caucagguguuaacuaagg

SEQ ID NO: 1739940 - RNA, 19 nt, Homo sapiens
  misc_RNA (1)...(19): siRNA sense strand
guaugacaaggaugaaaua

SEQ ID NO: 1739941 - RNA, 19 nt, Homo sapiens
  misc_RNA (1)...(19): siRNA sense strand
cacaaggcauauugauuug

SEQ ID NO: 1739942 - RNA, 19 nt, Homo sapiens
  misc_RNA (1)...(19): siRNA sense strand
caacaggucaacagcgaaa

SEQ ID NO: 1739943 - RNA, 19 nt, Homo sapiens
  misc_RNA (1)...(19): siRNA sense strand
gccauuaucagaaagacua

SEQ ID NO: 1739944 - RNA, 19 nt, Homo sapiens
  misc_RNA (1)...(19): siRNA sense strand
ggaggacauuacaauaaag

SEQ ID NO: 1739945 - RNA, 19 nt, Homo sapiens
  misc_RNA (1)...(19): siRNA sense strand
uggaaucgaugaauuugau

SEQ ID NO: 1739946 - RNA, 19 nt, Homo sapiens
  misc_RNA (1)...(19): siRNA sense strand
ugucgaggcaggucauuua

SEQ ID NO: 1739947 - RNA, 19 nt, Homo sapiens
  misc_RNA (1)...(19): siRNA sense strand
gcagcaaaguauuagucuu

SEQ ID NO: 1739948 - RNA, 19 nt, Homo sapiens
  misc_RNA (1)...(19): siRNA sense strand
gcaagaacuuccauuauug

SEQ ID NO: 1739949 - RNA, 19 nt, Homo sapiens
  misc_RNA (1)...(19): siRNA sense strand
gaaagaaagggaaguauuu

SEQ ID NO: 1739950 - RNA, 19 nt, Homo sapiens
  misc_RNA (1)...(19): siRNA sense strand
uuaaauagcucaccaauca

SEQ ID NO: 1739951 - RNA, 19 nt, Homo sapiens
  misc_RNA (1)...(19): siRNA sense strand
gacagaagguggugaagua

SEQ ID NO: 1739952 - RNA, 19 nt, Homo sapiens
  misc_RNA (1)...(19): siRNA sense strand
gaaauacgcagaugacaaa

SEQ ID NO: 1739953 - RNA, 19 nt, Homo sapiens
  misc_RNA (1)...(19): siRNA sense strand
ugacacagcucaagaaugu

SEQ ID NO: 1739954 - RNA, 19 nt, Homo sapiens
  misc_RNA (1)...(19): siRNA sense strand
ugacaaggaugaaauagaa

SEQ ID NO: 1739955 - RNA, 19 nt, Homo sapiens
  misc_RNA (1)...(19): siRNA sense strand
ccaaagaacuaaacauuca

SEQ ID NO: 1739956 - RNA, 19 nt, Homo sapiens
  misc_RNA (1)...(19): siRNA sense strand
gagaagccauuaucagaaa

SEQ ID NO: 1739957 - RNA, 19 nt, Homo sapiens
  misc_RNA (1)...(19): siRNA sense strand
uaaagcagguuuggcauua

SEQ ID NO: 1739958 - RNA, 19 nt, Homo sapiens
  misc_RNA (1)...(19): siRNA sense strand
gagaaacaaugguaaaugu

SEQ ID NO: 1739959 - RNA, 19 nt, Homo sapiens
  misc_RNA (1)...(19): siRNA sense strand
gcacuacuauccagauuug

SEQ ID NO: 1739960 - RNA, 19 nt, Homo sapiens
  misc_RNA (1)...(19): siRNA sense strand
ggaaagcagagaaccauua

SEQ ID NO: 1739961 - RNA, 19 nt, Homo sapiens
  misc_RNA (1)...(19): siRNA sense strand
ggagacacagugacuauua

SEQ ID NO: 1739962 - RNA, 19 nt, Homo sapiens
  misc_RNA (1)...(19): siRNA sense strand
gaacuuacucugaugaauu

SEQ ID NO: 1739963 - RNA, 19 nt, Homo sapiens
  misc_RNA (1)...(19): siRNA sense strand
caaggcauauugauuugua

SEQ ID NO: 1739964 - RNA, 19 nt, Homo sapiens
  misc_RNA (1)...(19): siRNA sense strand
ggcaauacaucagguguua

SEQ ID NO: 1739965 - RNA, 19 nt, Homo sapiens
  misc_RNA (1)...(19): siRNA sense strand
gaacaugugauugcaauaa

SEQ ID NO: 1739966 - RNA, 19 nt, Homo sapiens
  misc_RNA (1)...(19): siRNA sense strand
ucacaaggcauauugauuu

SEQ ID NO: 1739967 - RNA, 19 nt, Homo sapiens
  misc_RNA (1)...(19): siRNA sense strand
aaacagagccagagguuaa

SEQ ID NO: 1739968 - RNA, 19 nt, Homo sapiens
  misc_RNA (1)...(19): siRNA sense strand
aaugugagcuuguucauga

SEQ ID NO: 1739969 - RNA, 19 nt, Homo sapiens
  misc_RNA (1)...(19): siRNA sense strand
gaggauauaguggaaauua

SEQ ID NO: 1739970 - RNA, 19 nt, Homo sapiens
  misc_RNA (1)...(19): siRNA sense strand
gaaaguacauuggcuaugc

SEQ ID NO: 1739971 - RNA, 19 nt, Homo sapiens
  misc_RNA (1)...(19): siRNA sense strand
agaagacgcugaggauaua

SEQ ID NO: 1739972 - RNA, 19 nt, Homo sapiens
  misc_RNA (1)...(19): siRNA sense strand
cgauagcucuccuuugauu

SEQ ID NO: 1739973 - RNA, 19 nt, Homo sapiens
  misc_RNA (1)...(19): siRNA sense strand
uauagcaacugaacuaaga

SEQ ID NO: 1739974 - RNA, 19 nt, Homo sapiens
  misc_RNA (1)...(19): siRNA sense strand
gaaggauugucuaaugaug

SEQ ID NO: 1739975 - RNA, 19 nt, Homo sapiens
  misc_RNA (1)...(19): siRNA sense strand
cacaguagcucguaugaau

SEQ ID NO: 1739976 - RNA, 19 nt, Homo sapiens
  misc_RNA (1)...(19): siRNA sense strand
caggaaggauugucuaaug

SEQ ID NO: 1739977 - RNA, 19 nt, Homo sapiens
  misc_RNA (1)...(19): siRNA sense strand
ugcaagaacuuccauuauu

SEQ ID NO: 1739978 - RNA, 19 nt, Homo sapiens
  misc_RNA (1)...(19): siRNA sense strand
ggugggaacuucucaggaa

SEQ ID NO: 1739979 - RNA, 19 nt, Homo sapiens
  misc_RNA (1)...(19): siRNA sense strand
cacagaagcugcucgaguu

SEQ ID NO: 1739980 - RNA, 19 nt, Homo sapiens
  misc_RNA (1)...(19): siRNA sense strand
gcagauugccaaagaacua

SEQ ID NO: 1739981 - RNA, 19 nt, Homo sapiens
  misc_RNA (1)...(19): siRNA sense strand
ugagaagauucaagcauuu

SEQ ID NO: 1739982 - RNA, 19 nt, Homo sapiens
  misc_RNA (1)...(19): siRNA sense strand
ggacgaggaagauuucaaa

SEQ ID NO: 1739983 - RNA, 19 nt, Homo sapiens
  misc_RNA (1)...(19): siRNA sense strand
uacaucagguguuaacuaa

SEQ ID NO: 1739984 - RNA, 19 nt, Homo sapiens
  misc_RNA (1)...(19): siRNA sense strand
gagagaagcaggucggauu

SEQ ID NO: 1739985 - RNA, 19 nt, Homo sapiens
  misc_RNA (1)...(19): siRNA sense strand
gcuaggaacuuacucugau

SEQ ID NO: 1739986 - RNA, 19 nt, Homo sapiens
  misc_RNA (1)...(19): siRNA sense strand
ggaagcuggugcccuggua

SEQ ID NO: 1739987 - RNA, 19 nt, Homo sapiens
  misc_RNA (1)...(19): siRNA sense strand
gcaugcagcugaguuacaa

SEQ ID NO: 1739988 - RNA, 19 nt, Homo sapiens
  misc_RNA (1)...(19): siRNA sense strand
gaaaauacauugcucuaag

SEQ ID NO: 1739989 - RNA, 19 nt, Homo sapiens
  misc_RNA (1)...(19): siRNA sense strand
aacauuggaucgauucaua

SEQ ID NO: 1739990 - RNA, 19 nt, Homo sapiens
  misc_RNA (1)...(19): siRNA sense strand
ggaaacagagccagagguu

SEQ ID NO: 1739991 - RNA, 19 nt, Homo sapiens
  misc_RNA (1)...(19): siRNA sense strand
gaucgauucauaccauaua

SEQ ID NO: 1739992 - RNA, 19 nt, Homo sapiens
  misc_RNA (1)...(19): siRNA sense strand
ucaaauacuuccguacuug

SEQ ID NO: 1739993 - RNA, 19 nt, Homo sapiens
  misc_RNA (1)...(19): siRNA sense strand
guacaacuaugagccuuug

SEQ ID NO: 1739994 - RNA, 19 nt, Homo sapiens
  misc_RNA (1)...(19): siRNA sense strand
gcuggaagcuuuauuucuc

SEQ ID NO: 1739995 - RNA, 19 nt, Homo sapiens
  misc_RNA (1)...(19): siRNA sense strand
guauagaggcagaggauuu

SEQ ID NO: 1739996 - RNA, 19 nt, Homo sapiens
  misc_RNA (1)...(19): siRNA sense strand
caacguugcugaaagaacu

SEQ ID NO: 1739997 - RNA, 19 nt, Homo sapiens
  misc_RNA (1)...(19): siRNA sense strand
uggaggacauuacaauaaa

SEQ ID NO: 1739998 - RNA, 19 nt, Homo sapiens
  misc_RNA (1)...(19): siRNA sense strand
gaauugaugucugaugauc

SEQ ID NO: 1739999 - RNA, 19 nt, Homo sapiens
  misc_RNA (1)...(19): siRNA sense strand
gauaguuccucuggagauu

SEQ ID NO: 1740000 - RNA, 19 nt, Homo sapiens
  misc_RNA (1)...(19): siRNA sense strand
aaacguacuucugaacaaa

SEQ ID NO: 1740001 - RNA, 19 nt, Homo sapiens
  misc_RNA (1)...(19): siRNA sense strand
cagcaugguucuggaauga

SEQ ID NO: 1740002 - RNA, 19 nt, Homo sapiens
  misc_RNA (1)...(19): siRNA sense strand
caaagaagacgcugaggau

SEQ ID NO: 1740003 - RNA, 19 nt, Homo sapiens
  misc_RNA (1)...(19): siRNA sense strand
gaaacagagccagagguua

SEQ ID NO: 1740004 - RNA, 19 nt, Homo sapiens
  misc_RNA (1)...(19): siRNA sense strand
ugauggaguucucacuuaa

SEQ ID NO: 1740005 - RNA, 19 nt, Homo sapiens
  misc_RNA (1)...(19): siRNA sense strand
guucgugucaguaauauaa

SEQ ID NO: 1740006 - RNA, 19 nt, Homo sapiens
  misc_RNA (1)...(19): siRNA sense strand
gcaaggguguacaacuaug

SEQ ID NO: 1740007 - RNA, 19 nt, Homo sapiens
  misc_RNA (1)...(19): siRNA sense strand
gaagcuuuauuucucugaa

SEQ ID NO: 1740008 - RNA, 19 nt, Homo sapiens
  misc_RNA (1)...(19): siRNA sense strand
ugaccaggguuaccucuug

SEQ ID NO: 1740009 - RNA, 19 nt, Homo sapiens
  misc_RNA (1)...(19): siRNA sense strand
ggauauaguggaaauuaug

SEQ ID NO: 1740010 - RNA, 19 nt, Homo sapiens
  misc_RNA (1)...(19): siRNA sense strand
gagcaagguuggaauugag

SEQ ID NO: 1740011 - RNA, 19 nt, Homo sapiens
  misc_RNA (1)...(19): siRNA sense strand
gagcaaauuacuauggaaa

SEQ ID NO: 1740012 - RNA, 19 nt, Homo sapiens
  misc_RNA (1)...(19): siRNA sense strand
agcgauagcucuccuuuga

SEQ ID NO: 1740013 - RNA, 19 nt, Homo sapiens
  misc_RNA (1)...(19): siRNA sense strand
uaccagauauagcaacuga

SEQ ID NO: 1740014 - RNA, 19 nt, Homo sapiens
  misc_RNA (1)...(19): siRNA sense strand
cagauuugauuuggucuuu

SEQ ID NO: 1740015 - RNA, 19 nt, Homo sapiens
  misc_RNA (1)...(19): siRNA sense strand
ggagaaacaaugguaaaug

SEQ ID NO: 1740016 - RNA, 19 nt, Homo sapiens
  misc_RNA (1)...(19): siRNA sense strand
cgaggaagauuucaaagcu

SEQ ID NO: 1740017 - RNA, 19 nt, Homo sapiens
  misc_RNA (1)...(19): siRNA sense strand
gagcuuuccucuuccagau

SEQ ID NO: 1740018 - RNA, 19 nt, Homo sapiens
  misc_RNA (1)...(19): siRNA sense strand
ggaaugagcaacaggucaa

SEQ ID NO: 1740019 - RNA, 19 nt, Homo sapiens
  misc_RNA (1)...(19): siRNA sense strand
cgagcaagguuggaauuga

SEQ ID NO: 1740020 - RNA, 19 nt, Homo sapiens
  misc_RNA (1)...(19): siRNA sense strand
gaaagcagagaaccauuag

SEQ ID NO: 1740021 - RNA, 19 nt, Homo sapiens
  misc_RNA (1)...(19): siRNA sense strand
caaaguauuagucuugcua

SEQ ID NO: 1740022 - RNA, 19 nt, Homo sapiens
  misc_RNA (1)...(19): siRNA sense strand
uugauggaguucucacuua

SEQ ID NO: 1740023 - RNA, 19 nt, Homo sapiens
  misc_RNA (1)...(19): siRNA sense strand
ccacauccuuguuguugga

SEQ ID NO: 1740024 - RNA, 19 nt, Homo sapiens
  misc_RNA (1)...(19): siRNA sense strand
gagaggaagcaaccaaaga

SEQ ID NO: 1740025 - RNA, 19 nt, Homo sapiens
  misc_RNA (1)...(19): siRNA sense strand
ugagcaucaugaucacuua

SEQ ID NO: 1740026 - RNA, 19 nt, Homo sapiens
  misc_RNA (1)...(19): siRNA sense strand
cagcaaaguauuagucuug

SEQ ID NO: 1740027 - RNA, 19 nt, Homo sapiens
  misc_RNA (1)...(19): siRNA sense strand
ggucugacgguaacucuuu

SEQ ID NO: 1740028 - RNA, 19 nt, Homo sapiens
  misc_RNA (1)...(19): siRNA sense strand
guggagaaauucagagcuu

SEQ ID NO: 1740029 - RNA, 19 nt, Homo sapiens
  misc_RNA (1)...(19): siRNA sense strand
ggaacuuacucugaugaau

SEQ ID NO: 1740030 - RNA, 19 nt, Homo sapiens
  misc_RNA (1)...(19): siRNA sense strand
gaaacaauagaucccauuc

SEQ ID NO: 1740031 - RNA, 19 nt, Homo sapiens
  misc_RNA (1)...(19): siRNA sense strand
cgaugaauuugauaagaug

SEQ ID NO: 1740032 - RNA, 19 nt, Homo sapiens
  misc_RNA (1)...(19): siRNA sense strand
gaucaagguauuuguggaa

SEQ ID NO: 1740033 - RNA, 19 nt, Homo sapiens
  misc_RNA (1)...(19): siRNA sense strand
gagagaaagagaacacaga

SEQ ID NO: 1740034 - RNA, 19 nt, Homo sapiens
  misc_RNA (1)...(19): siRNA sense strand
gaccaggguuaccucuuga

SEQ ID NO: 1740035 - RNA, 19 nt, Homo sapiens
  misc_RNA (1)...(19): siRNA sense strand
cauuagcagugccacagua

SEQ ID NO: 1740036 - RNA, 19 nt, Homo sapiens
  misc_RNA (1)...(19): siRNA sense strand
gacgguaacucuuucaaaa

SEQ ID NO: 1740037 - RNA, 19 nt, Homo sapiens
  misc_RNA (1)...(19): siRNA sense strand
cgaggcaggucauuuacug

SEQ ID NO: 1740038 - RNA, 19 nt, Homo sapiens
  misc_RNA (1)...(19): siRNA sense strand
aauacagucuucccacaaa

SEQ ID NO: 1740039 - RNA, 19 nt, Homo sapiens
  misc_RNA (1)...(19): siRNA sense strand
caucagguguuaacuaagg

SEQ ID NO: 1740040 - RNA, 19 nt, Homo sapiens
  misc_RNA (1)...(19): siRNA sense strand
guaugacaaggaugaaaua

SEQ ID NO: 1740041 - RNA, 19 nt, Homo sapiens
  misc_RNA (1)...(19): siRNA sense strand
cacaaggcauauugauuug

SEQ ID NO: 1740042 - RNA, 19 nt, Homo sapiens
  misc_RNA (1)...(19): siRNA sense strand
caacaggucaacagcgaaa

SEQ ID NO: 1740043 - RNA, 19 nt, Homo sapiens
  misc_RNA (1)...(19): siRNA sense strand
gccauuaucagaaagacua

SEQ ID NO: 1740044 - RNA, 19 nt, Homo sapiens
  misc_RNA (1)...(19): siRNA sense strand
ggaggacauuacaauaaag

SEQ ID NO: 1740045 - RNA, 19 nt, Homo sapiens
  misc_RNA (1)...(19): siRNA sense strand
uggaaucgaugaauuugau

SEQ ID NO: 1740046 - RNA, 19 nt, Homo sapiens
  misc_RNA (1)...(19): siRNA sense strand
ugucgaggcaggucauuua

SEQ ID NO: 1740047 - RNA, 19 nt, Homo sapiens
  misc_RNA (1)...(19): siRNA sense strand
gcagcaaaguauuagucuu

SEQ ID NO: 1740048 - RNA, 19 nt, Homo sapiens
  misc_RNA (1)...(19): siRNA sense strand
ggagaaauaugaacacuau

SEQ ID NO: 1740049 - RNA, 19 nt, Homo sapiens
  misc_RNA (1)...(19): siRNA sense strand
gcacaagacuggacuuaga

SEQ ID NO: 1740050 - RNA, 19 nt, Homo sapiens
  misc_RNA (1)...(19): siRNA sense strand
caacagcccugguaaggaa

SEQ ID NO: 1740051 - RNA, 19 nt, Homo sapiens
  misc_RNA (1)...(19): siRNA sense strand
gaauaaagcucuacuaccu

SEQ ID NO: 1740052 - RNA, 19 nt, Homo sapiens
  misc_RNA (1)...(19): siRNA sense strand
gaaagucuccugagcauau

SEQ ID NO: 1740053 - RNA, 19 nt, Homo sapiens
  misc_RNA (1)...(19): siRNA sense strand
gaaaugaccauguuaaucu

SEQ ID NO: 1740054 - RNA, 19 nt, Homo sapiens
  misc_RNA (1)...(19): siRNA sense strand
gaaguggaaaggauuaaua

SEQ ID NO: 1740055 - RNA, 19 nt, Homo sapiens
  misc_RNA (1)...(19): siRNA sense strand
caaggaucauucugacuua

SEQ ID NO: 1740056 - RNA, 19 nt, Homo sapiens
  misc_RNA (1)...(19): siRNA sense strand
ggauagagcuagagagaag

SEQ ID NO: 1740057 - RNA, 19 nt, Homo sapiens
  misc_RNA (1)...(19): siRNA sense strand
agacacagcucacaucuuc

SEQ ID NO: 1740058 - RNA, 19 nt, Homo sapiens
  misc_RNA (1)...(19): siRNA sense strand
ugaauugguugucucauuu

SEQ ID NO: 1740059 - RNA, 19 nt, Homo sapiens
  misc_RNA (1)...(19): siRNA sense strand
gacaagacauccuggaaug

SEQ ID NO: 1740060 - RNA, 19 nt, Homo sapiens
  misc_RNA (1)...(19): siRNA sense strand
ggaagauggugcuaagaug

SEQ ID NO: 1740061 - RNA, 19 nt, Homo sapiens
  misc_RNA (1)...(19): siRNA sense strand
gcccauauguuguauuaga

SEQ ID NO: 1740062 - RNA, 19 nt, Homo sapiens
  misc_RNA (1)...(19): siRNA sense strand
gaauugcccuguguuauca

SEQ ID NO: 1740063 - RNA, 19 nt, Homo sapiens
  misc_RNA (1)...(19): siRNA sense strand
ucacugaaguugcccauug

SEQ ID NO: 1740064 - RNA, 19 nt, Homo sapiens
  misc_RNA (1)...(19): siRNA sense strand
gauagugacuuuugcauuu

SEQ ID NO: 1740065 - RNA, 19 nt, Homo sapiens
  misc_RNA (1)...(19): siRNA sense strand
uaucagaaccucaaucauu

SEQ ID NO: 1740066 - RNA, 19 nt, Homo sapiens
  misc_RNA (1)...(19): siRNA sense strand
gcugaaauauuccuaccaa

SEQ ID NO: 1740067 - RNA, 19 nt, Homo sapiens
  misc_RNA (1)...(19): siRNA sense strand
gcaggaagauggugcuaag

SEQ ID NO: 1740068 - RNA, 19 nt, Homo sapiens
  misc_RNA (1)...(19): siRNA sense strand
gcucacaucuucugucagu

SEQ ID NO: 1740069 - RNA, 19 nt, Homo sapiens
  misc_RNA (1)...(19): siRNA sense strand
aggaagagcugcaggaaga

SEQ ID NO: 1740070 - RNA, 19 nt, Homo sapiens
  misc_RNA (1)...(19): siRNA sense strand
gcauauguccugaggcuaa

SEQ ID NO: 1740071 - RNA, 19 nt, Homo sapiens
  misc_RNA (1)...(19): siRNA sense strand
aaacuuggaucuccgguau

SEQ ID NO: 1740072 - RNA, 19 nt, Homo sapiens
  misc_RNA (1)...(19): siRNA sense strand
ugccaucacuucagcaaua

SEQ ID NO: 1740073 - RNA, 19 nt, Homo sapiens
  misc_RNA (1)...(19): siRNA sense strand
gcaaccaaaugcccacaga

SEQ ID NO: 1740074 - RNA, 19 nt, Homo sapiens
  misc_RNA (1)...(19): siRNA sense strand
ugacugagcucuccuugag

SEQ ID NO: 1740075 - RNA, 19 nt, Homo sapiens
  misc_RNA (1)...(19): siRNA sense strand
ccaaaugcccacagaauau

SEQ ID NO: 1740076 - RNA, 19 nt, Homo sapiens
  misc_RNA (1)...(19): siRNA sense strand
gcagaucgggacauuauga

SEQ ID NO: 1740077 - RNA, 19 nt, Homo sapiens
  misc_RNA (1)...(19): siRNA sense strand
gcaucgaccucuguagaaa

SEQ ID NO: 1740078 - RNA, 19 nt, Homo sapiens
  misc_RNA (1)...(19): siRNA sense strand
guacguaugucccuuacuc

SEQ ID NO: 1740079 - RNA, 19 nt, Homo sapiens
  misc_RNA (1)...(19): siRNA sense strand
aauaccagcuguucuaaga

SEQ ID NO: 1740080 - RNA, 19 nt, Homo sapiens
  misc_RNA (1)...(19): siRNA sense strand
gauguuguaugcagaguuc

SEQ ID NO: 1740081 - RNA, 19 nt, Homo sapiens
  misc_RNA (1)...(19): siRNA sense strand
caucauggagacauucuua

SEQ ID NO: 1740082 - RNA, 19 nt, Homo sapiens
  misc_RNA (1)...(19): siRNA sense strand
ggaauugcccuguguuauc

SEQ ID NO: 1740083 - RNA, 19 nt, Homo sapiens
  misc_RNA (1)...(19): siRNA sense strand
aagcaaagcuacaucaucu

SEQ ID NO: 1740084 - RNA, 19 nt, Homo sapiens
  misc_RNA (1)...(19): siRNA sense strand
uagaaacccugaaggugaa

SEQ ID NO: 1740085 - RNA, 19 nt, Homo sapiens
  misc_RNA (1)...(19): siRNA sense strand
gagacauucuuaaguaaag

SEQ ID NO: 1740086 - RNA, 19 nt, Homo sapiens
  misc_RNA (1)...(19): siRNA sense strand
gugcuaagauguuguaugc

SEQ ID NO: 1740087 - RNA, 19 nt, Homo sapiens
  misc_RNA (1)...(19): siRNA sense strand
gaaucacuguuugcuugua

SEQ ID NO: 1740088 - RNA, 19 nt, Homo sapiens
  misc_RNA (1)...(19): siRNA sense strand
uuaaaugccucaccacauc

SEQ ID NO: 1740089 - RNA, 19 nt, Homo sapiens
  misc_RNA (1)...(19): siRNA sense strand
ccgaagcacuagauaaugu

SEQ ID NO: 1740090 - RNA, 19 nt, Homo sapiens
  misc_RNA (1)...(19): siRNA sense strand
gcuuacaacuuuaaaggau

SEQ ID NO: 1740091 - RNA, 19 nt, Homo sapiens
  misc_RNA (1)...(19): siRNA sense strand
uguauuagauggaggaugu

SEQ ID NO: 1740092 - RNA, 19 nt, Homo sapiens
  misc_RNA (1)...(19): siRNA sense strand
ggaaaugaccauguuaauc

SEQ ID NO: 1740093 - RNA, 19 nt, Homo sapiens
  misc_RNA (1)...(19): siRNA sense strand
gaagauggugcuaagaugu

SEQ ID NO: 1740094 - RNA, 19 nt, Homo sapiens
  misc_RNA (1)...(19): siRNA sense strand
aaagcuacaucaucuacaa

SEQ ID NO: 1740095 - RNA, 19 nt, Homo sapiens
  misc_RNA (1)...(19): siRNA sense strand
ggacaagacauccuggaau

SEQ ID NO: 1740096 - RNA, 19 nt, Homo sapiens
  misc_RNA (1)...(19): siRNA sense strand
ccagcuaucuccuuucauc

SEQ ID NO: 1740097 - RNA, 19 nt, Homo sapiens
  misc_RNA (1)...(19): siRNA sense strand
ggagacauucuuaaguaaa

SEQ ID NO: 1740098 - RNA, 19 nt, Homo sapiens
  misc_RNA (1)...(19): siRNA sense strand
auggagacauucuuaagua

SEQ ID NO: 1740099 - RNA, 19 nt, Homo sapiens
  misc_RNA (1)...(19): siRNA sense strand
ggaccauucuucccacaca

SEQ ID NO: 1740100 - RNA, 19 nt, Homo sapiens
  misc_RNA (1)...(19): siRNA sense strand
gcagaguuccaaagaguga

SEQ ID NO: 1740101 - RNA, 19 nt, Homo sapiens
  misc_RNA (1)...(19): siRNA sense strand
gcaguccugucuccagaug

SEQ ID NO: 1740102 - RNA, 19 nt, Homo sapiens
  misc_RNA (1)...(19): siRNA sense strand
gcuaagcaacuuuaugaau

SEQ ID NO: 1740103 - RNA, 19 nt, Homo sapiens
  misc_RNA (1)...(19): siRNA sense strand
ggccagcuaucuccuuuca

SEQ ID NO: 1740104 - RNA, 19 nt, Homo sapiens
  misc_RNA (1)...(19): siRNA sense strand
uggagacauucuuaaguaa

SEQ ID NO: 1740105 - RNA, 19 nt, Homo sapiens
  misc_RNA (1)...(19): siRNA sense strand
cagcucacaucuucuguca

SEQ ID NO: 1740106 - RNA, 19 nt, Homo sapiens
  misc_RNA (1)...(19): siRNA sense strand
ccaaggaucauucugacuu

SEQ ID NO: 1740107 - RNA, 19 nt, Homo sapiens
  misc_RNA (1)...(19): siRNA sense strand
agaagcagaucgggacauu

SEQ ID NO: 1740108 - RNA, 19 nt, Homo sapiens
  misc_RNA (1)...(19): siRNA sense strand
uagaaagucuccugagcau

SEQ ID NO: 1740109 - RNA, 19 nt, Homo sapiens
  misc_RNA (1)...(19): siRNA sense strand
agaccuaacucgacuguac

SEQ ID NO: 1740110 - RNA, 19 nt, Homo sapiens
  misc_RNA (1)...(19): siRNA sense strand
gaacuggccaaggaucauu

SEQ ID NO: 1740111 - RNA, 19 nt, Homo sapiens
  misc_RNA (1)...(19): siRNA sense strand
ucagugaaguggaaaggau

SEQ ID NO: 1740112 - RNA, 19 nt, Homo sapiens
  misc_RNA (1)...(19): siRNA sense strand
ugccuugaaucuugguuua

SEQ ID NO: 1740113 - RNA, 19 nt, Homo sapiens
  misc_RNA (1)...(19): siRNA sense strand
cugaauugguugucucauu

SEQ ID NO: 1740114 - RNA, 19 nt, Homo sapiens
  misc_RNA (1)...(19): siRNA sense strand
augcccauauguuguauua

SEQ ID NO: 1740115 - RNA, 19 nt, Homo sapiens
  misc_RNA (1)...(19): siRNA sense strand
gcaaagcuacaucaucuac

SEQ ID NO: 1740116 - RNA, 19 nt, Homo sapiens
  misc_RNA (1)...(19): siRNA sense strand
gacauuaugacacuugcua

SEQ ID NO: 1740117 - RNA, 19 nt, Homo sapiens
  misc_RNA (1)...(19): siRNA sense strand
gaagcagaucgggacauua

SEQ ID NO: 1740118 - RNA, 19 nt, Homo sapiens
  misc_RNA (1)...(19): siRNA sense strand
aaucacuguuugcuuguaa

SEQ ID NO: 1740119 - RNA, 19 nt, Homo sapiens
  misc_RNA (1)...(19): siRNA sense strand
ggagcuaccaguucuaaag

SEQ ID NO: 1740120 - RNA, 19 nt, Homo sapiens
  misc_RNA (1)...(19): siRNA sense strand
cgucuuugcuucaguucaa

SEQ ID NO: 1740121 - RNA, 19 nt, Homo sapiens
  misc_RNA (1)...(19): siRNA sense strand
ucaggcaaaucaucuaugg

SEQ ID NO: 1740122 - RNA, 19 nt, Homo sapiens
  misc_RNA (1)...(19): siRNA sense strand
aaacuuagaggaacauagu

SEQ ID NO: 1740123 - RNA, 19 nt, Homo sapiens
  misc_RNA (1)...(19): siRNA sense strand
aagcagaucgggacauuau

SEQ ID NO: 1740124 - RNA, 19 nt, Homo sapiens
  misc_RNA (1)...(19): siRNA sense strand
agugaggccuccaacauug

SEQ ID NO: 1740125 - RNA, 19 nt, Homo sapiens
  misc_RNA (1)...(19): siRNA sense strand
uguggaagaucauaguaau

SEQ ID NO: 1740126 - RNA, 19 nt, Homo sapiens
  misc_RNA (1)...(19): siRNA sense strand
gggcacaagacuggacuua

SEQ ID NO: 1740127 - RNA, 19 nt, Homo sapiens
  misc_RNA (1)...(19): siRNA sense strand
gaggagacaccaccgaauc

SEQ ID NO: 1740128 - RNA, 19 nt, Homo sapiens
  misc_RNA (1)...(19): siRNA sense strand
gguauccgaggacuaauga

SEQ ID NO: 1740129 - RNA, 19 nt, Homo sapiens
  misc_RNA (1)...(19): siRNA sense strand
gagaaaauguuaaggaacu

SEQ ID NO: 1740130 - RNA, 19 nt, Homo sapiens
  misc_RNA (1)...(19): siRNA sense strand
uccgaggacuaaugaguuu

SEQ ID NO: 1740131 - RNA, 19 nt, Homo sapiens
  misc_RNA (1)...(19): siRNA sense strand
ccaaagcaaagcuacauca

SEQ ID NO: 1740132 - RNA, 19 nt, Homo sapiens
  misc_RNA (1)...(19): siRNA sense strand
uaaaggauagagcuagaga

SEQ ID NO: 1740133 - RNA, 19 nt, Homo sapiens
  misc_RNA (1)...(19): siRNA sense strand
aggcuaagcaacuuuauga

SEQ ID NO: 1740134 - RNA, 19 nt, Homo sapiens
  misc_RNA (1)...(19): siRNA sense strand
ugaaguugcgggacacaaa

SEQ ID NO: 1740135 - RNA, 19 nt, Homo sapiens
  misc_RNA (1)...(19): siRNA sense strand
guggaaaugaccauguuaa

SEQ ID NO: 1740136 - RNA, 19 nt, Homo sapiens
  misc_RNA (1)...(19): siRNA sense strand
cauccgggaaguauucaua

SEQ ID NO: 1740137 - RNA, 19 nt, Homo sapiens
  misc_RNA (1)...(19): siRNA sense strand
cuauaucccugccaaaugc

SEQ ID NO: 1740138 - RNA, 19 nt, Homo sapiens
  misc_RNA (1)...(19): siRNA sense strand
ucuaugggcuucuuuuaaa

SEQ ID NO: 1740139 - RNA, 19 nt, Homo sapiens
  misc_RNA (1)...(19): siRNA sense strand
gcccauucccuuucuguug

SEQ ID NO: 1740140 - RNA, 19 nt, Homo sapiens
  misc_RNA (1)...(19): siRNA sense strand
caccacaucuggacaagac

SEQ ID NO: 1740141 - RNA, 19 nt, Homo sapiens
  misc_RNA (1)...(19): siRNA sense strand
gcuaucuccuuucaucagu

SEQ ID NO: 1740142 - RNA, 19 nt, Homo sapiens
  misc_RNA (1)...(19): siRNA sense strand
caucacuucagcaauauga

SEQ ID NO: 1740143 - RNA, 19 nt, Homo sapiens
  misc_RNA (1)...(19): siRNA sense strand
uaucuccuuucaucaguga

SEQ ID NO: 1740144 - RNA, 19 nt, Homo sapiens
  misc_RNA (1)...(19): siRNA sense strand
gaaauauuccuaccaaaag

SEQ ID NO: 1740145 - RNA, 19 nt, Homo sapiens
  misc_RNA (1)...(19): siRNA sense strand
guaugcagaguuccaaaga

SEQ ID NO: 1740146 - RNA, 19 nt, Homo sapiens
  misc_RNA (1)...(19): siRNA sense strand
acaccgagaccaaagcaaa

SEQ ID NO: 1740147 - RNA, 19 nt, Homo sapiens
  misc_RNA (1)...(19): siRNA sense strand
aaacaugcagcaaccaaau

SEQ ID NO: 1740148 - RNA, 19 nt, Homo sapiens
  misc_RNA (1)...(19): siRNA sense strand
cacuagagcuucugucaaa

SEQ ID NO: 1740149 - RNA, 19 nt, Homo sapiens
  misc_RNA (1)...(19): siRNA sense strand
gaaaggcacuagagcuucu

SEQ ID NO: 1740150 - RNA, 19 nt, Homo sapiens
  misc_RNA (1)...(19): siRNA sense strand
gcucaaagccgcauacgau

SEQ ID NO: 1740151 - RNA, 19 nt, Homo sapiens
  misc_RNA (1)...(19): siRNA sense strand
gugagaagcuagaugacuu

SEQ ID NO: 1740152 - RNA, 19 nt, Homo sapiens
  misc_RNA (1)...(19): siRNA sense strand
gauccagcguucaggaauu

SEQ ID NO: 1740153 - RNA, 19 nt, Homo sapiens
  misc_RNA (1)...(19): siRNA sense strand
gaagguacuagaugaauuc

SEQ ID NO: 1740154 - RNA, 19 nt, Homo sapiens
  misc_RNA (1)...(19): siRNA sense strand
cgaacuagaugagaccaaa

SEQ ID NO: 1740155 - RNA, 19 nt, Homo sapiens
  misc_RNA (1)...(19): siRNA sense strand
aagcugaucccaugacuaa

SEQ ID NO: 1740156 - RNA, 19 nt, Homo sapiens
  misc_RNA (1)...(19): siRNA sense strand
gaggugagaagcuagauga

SEQ ID NO: 1740157 - RNA, 19 nt, Homo sapiens
  misc_RNA (1)...(19): siRNA sense strand
uggagaagguacuagauga

SEQ ID NO: 1740158 - RNA, 19 nt, Homo sapiens
  misc_RNA (1)...(19): siRNA sense strand
caccauggagucucuguua

SEQ ID NO: 1740159 - RNA, 19 nt, Homo sapiens
  misc_RNA (1)...(19): siRNA sense strand
caagcaagucgacaggaua

SEQ ID NO: 1740160 - RNA, 19 nt, Homo sapiens
  misc_RNA (1)...(19): siRNA sense strand
gucuaaagccuucuauaaa

SEQ ID NO: 1740161 - RNA, 19 nt, Homo sapiens
  misc_RNA (1)...(19): siRNA sense strand
agaagguacuagaugaauu

SEQ ID NO: 1740162 - RNA, 19 nt, Homo sapiens
  misc_RNA (1)...(19): siRNA sense strand
guggagcgcucaucgaaag

SEQ ID NO: 1740163 - RNA, 19 nt, Homo sapiens
  misc_RNA (1)...(19): siRNA sense strand
ggagaagguacuagaugaa

SEQ ID NO: 1740164 - RNA, 19 nt, Homo sapiens
  misc_RNA (1)...(19): siRNA sense strand
agucuaaagccuucuauaa

SEQ ID NO: 1740165 - RNA, 19 nt, Homo sapiens
  misc_RNA (1)...(19): siRNA sense strand
ucaaagaacaagacuaucu

SEQ ID NO: 1740166 - RNA, 19 nt, Homo sapiens
  misc_RNA (1)...(19): siRNA sense strand
ccaagcaagucgacaggau

SEQ ID NO: 1740167 - RNA, 19 nt, Homo sapiens
  misc_RNA (1)...(19): siRNA sense strand
cauacgaugugucuuccuu

SEQ ID NO: 1740168 - RNA, 19 nt, Homo sapiens
  misc_RNA (1)...(19): siRNA sense strand
ugucaaagaacaagacuau

SEQ ID NO: 1740169 - RNA, 19 nt, Homo sapiens
  misc_RNA (1)...(19): siRNA sense strand
gauggucaccucaguagau

SEQ ID NO: 1740170 - RNA, 19 nt, Homo sapiens
  misc_RNA (1)...(19): siRNA sense strand
uaaagugcaggccgaacua

SEQ ID NO: 1740171 - RNA, 19 nt, Homo sapiens
  misc_RNA (1)...(19): siRNA sense strand
gcacuagagcuucugucaa

SEQ ID NO: 1740172 - RNA, 19 nt, Homo sapiens
  misc_RNA (1)...(19): siRNA sense strand
caaagaacaagacuaucug

SEQ ID NO: 1740173 - RNA, 19 nt, Homo sapiens
  misc_RNA (1)...(19): siRNA sense strand
uagaugaauucuccaagca

SEQ ID NO: 1740174 - RNA, 19 nt, Homo sapiens
  misc_RNA (1)...(19): siRNA sense strand
gagaagguacuagaugaau

SEQ ID NO: 1740175 - RNA, 19 nt, Homo sapiens
  misc_RNA (1)...(19): siRNA sense strand
gaagcugaucccaugacua

SEQ ID NO: 1740176 - RNA, 19 nt, Homo sapiens
  misc_RNA (1)...(19): siRNA sense strand
caaagccgcauacgaugug

SEQ ID NO: 1740177 - RNA, 19 nt, Homo sapiens
  misc_RNA (1)...(19): siRNA sense strand
cuucacgagucaacugauu

SEQ ID NO: 1740178 - RNA, 19 nt, Homo sapiens
  misc_RNA (1)...(19): siRNA sense strand
ccaagguggugcugcucaa

SEQ ID NO: 1740179 - RNA, 19 nt, Homo sapiens
  misc_RNA (1)...(19): siRNA sense strand
gcugaucccaugacuaaag

SEQ ID NO: 1740180 - RNA, 19 nt, Homo sapiens
  misc_RNA (1)...(19): siRNA sense strand
gcacaacaccauggagucu

SEQ ID NO: 1740181 - RNA, 19 nt, Homo sapiens
  misc_RNA (1)...(19): siRNA sense strand
ccucagcguccucuacaaa

SEQ ID NO: 1740182 - RNA, 19 nt, Homo sapiens
  misc_RNA (1)...(19): siRNA sense strand
agagcgaggugagaagcua

SEQ ID NO: 1740183 - RNA, 19 nt, Homo sapiens
  misc_RNA (1)...(19): siRNA sense strand
gagauccagcguucaggaa

SEQ ID NO: 1740184 - RNA, 19 nt, Homo sapiens
  misc_RNA (1)...(19): siRNA sense strand
cuauaaaacugcccggaaa

SEQ ID NO: 1740185 - RNA, 19 nt, Homo sapiens
  misc_RNA (1)...(19): siRNA sense strand
ccauggagucucuguuaga

SEQ ID NO: 1740186 - RNA, 19 nt, Homo sapiens
  misc_RNA (1)...(19): siRNA sense strand
cuagagcuucugucaaaga

SEQ ID NO: 1740187 - RNA, 19 nt, Homo sapiens
  misc_RNA (1)...(19): siRNA sense strand
uaccagaacccacgagaag

SEQ ID NO: 1740188 - RNA, 19 nt, Homo sapiens
  misc_RNA (1)...(19): siRNA sense strand
ucaaagccgcauacgaugu

SEQ ID NO: 1740189 - RNA, 19 nt, Homo sapiens
  misc_RNA (1)...(19): siRNA sense strand
ccgcauacgaugugucuuc

SEQ ID NO: 1740190 - RNA, 19 nt, Homo sapiens
  misc_RNA (1)...(19): siRNA sense strand
ccaguaggauccccugcua

SEQ ID NO: 1740191 - RNA, 19 nt, Homo sapiens
  misc_RNA (1)...(19): siRNA sense strand
ucgaaaggcacuagagcuu

SEQ ID NO: 1740192 - RNA, 19 nt, Homo sapiens
  misc_RNA (1)...(19): siRNA sense strand
gcugggaacacagucuaaa

SEQ ID NO: 1740193 - RNA, 19 nt, Homo sapiens
  misc_RNA (1)...(19): siRNA sense strand
uacgaugugucuuccuuca

SEQ ID NO: 1740194 - RNA, 19 nt, Homo sapiens
  misc_RNA (1)...(19): siRNA sense strand
auggucaccucaguagaua

SEQ ID NO: 1740195 - RNA, 19 nt, Homo sapiens
  misc_RNA (1)...(19): siRNA sense strand
ccaaaaucauucugcacaa

SEQ ID NO: 1740196 - RNA, 19 nt, Homo sapiens
  misc_RNA (1)...(19): siRNA sense strand
ugagaagcuagaugacuug

SEQ ID NO: 1740197 - RNA, 19 nt, Homo sapiens
  misc_RNA (1)...(19): siRNA sense strand
ggcacuagagcuucuguca

SEQ ID NO: 1740198 - RNA, 19 nt, Homo sapiens
  misc_RNA (1)...(19): siRNA sense strand
acaacaccauggagucucu

SEQ ID NO: 1740199 - RNA, 19 nt, Homo sapiens
  misc_RNA (1)...(19): siRNA sense strand
ucacgagucaacugauugu

SEQ ID NO: 1740200 - RNA, 19 nt, Homo sapiens
  misc_RNA (1)...(19): siRNA sense strand
gaacccacgagaagcugau

SEQ ID NO: 1740201 - RNA, 19 nt, Homo sapiens
  misc_RNA (1)...(19): siRNA sense strand
gucuacguccggaaugaua

SEQ ID NO: 1740202 - RNA, 19 nt, Homo sapiens
  misc_RNA (1)...(19): siRNA sense strand
aaagaacaagacuaucugu

SEQ ID NO: 1740203 - RNA, 19 nt, Homo sapiens
  misc_RNA (1)...(19): siRNA sense strand
gguuguagcuccuguauua

SEQ ID NO: 1740204 - RNA, 19 nt, Homo sapiens
  misc_RNA (1)...(19): siRNA sense strand
ccacaucuaucccaaauuu

SEQ ID NO: 1740205 - RNA, 19 nt, Homo sapiens
  misc_RNA (1)...(19): siRNA sense strand
cagaauauguucaggauuu

SEQ ID NO: 1740206 - RNA, 19 nt, Homo sapiens
  misc_RNA (1)...(19): siRNA sense strand
gauccuaacuacuuuauga

SEQ ID NO: 1740207 - RNA, 19 nt, Homo sapiens
  misc_RNA (1)...(19): siRNA sense strand
guaauuaccugucccauca

SEQ ID NO: 1740208 - RNA, 19 nt, Homo sapiens
  misc_RNA (1)...(19): siRNA sense strand
gagcucgccuguguaauua

SEQ ID NO: 1740209 - RNA, 19 nt, Homo sapiens
  misc_RNA (1)...(19): siRNA sense strand
gaagaugcuuggaaggaaa

SEQ ID NO: 1740210 - RNA, 19 nt, Homo sapiens
  misc_RNA (1)...(19): siRNA sense strand
ggaagaaauuauucagaga

SEQ ID NO: 1740211 - RNA, 19 nt, Homo sapiens
  misc_RNA (1)...(19): siRNA sense strand
gcagagacccugaaugguu

SEQ ID NO: 1740212 - RNA, 19 nt, Homo sapiens
  misc_RNA (1)...(19): siRNA sense strand
ccaaauuucucuuauaugg

SEQ ID NO: 1740213 - RNA, 19 nt, Homo sapiens
  misc_RNA (1)...(19): siRNA sense strand
caagagaaauaccaagaau

SEQ ID NO: 1740214 - RNA, 19 nt, Homo sapiens
  misc_RNA (1)...(19): siRNA sense strand
guagaacuccggucaagua

SEQ ID NO: 1740215 - RNA, 19 nt, Homo sapiens
  misc_RNA (1)...(19): siRNA sense strand
gggaugaaguuacucgaaa

SEQ ID NO: 1740216 - RNA, 19 nt, Homo sapiens
  misc_RNA (1)...(19): siRNA sense strand
ccaccuaguucacaggaua

SEQ ID NO: 1740217 - RNA, 19 nt, Homo sapiens
  misc_RNA (1)...(19): siRNA sense strand
ggaagaugcuuggaaggaa

SEQ ID NO: 1740218 - RNA, 19 nt, Homo sapiens
  misc_RNA (1)...(19): siRNA sense strand
gaacuccggucaaguaacu

SEQ ID NO: 1740219 - RNA, 19 nt, Homo sapiens
  misc_RNA (1)...(19): siRNA sense strand
ggagcucgccuguguaauu

SEQ ID NO: 1740220 - RNA, 19 nt, Homo sapiens
  misc_RNA (1)...(19): siRNA sense strand
gggaacaaauggacagguu

SEQ ID NO: 1740221 - RNA, 19 nt, Homo sapiens
  misc_RNA (1)...(19): siRNA sense strand
gauagaagaagcuuaugaa

SEQ ID NO: 1740222 - RNA, 19 nt, Homo sapiens
  misc_RNA (1)...(19): siRNA sense strand
cagauuaccaagagaaaua

SEQ ID NO: 1740223 - RNA, 19 nt, Homo sapiens
  misc_RNA (1)...(19): siRNA sense strand
ggacugaauaugaaguuaa

SEQ ID NO: 1740224 - RNA, 19 nt, Homo sapiens
  misc_RNA (1)...(19): siRNA sense strand
ugucuaagcugucugugaa

SEQ ID NO: 1740225 - RNA, 19 nt, Homo sapiens
  misc_RNA (1)...(19): siRNA sense strand
uggaugauauugaugauga

SEQ ID NO: 1740226 - RNA, 19 nt, Homo sapiens
  misc_RNA (1)...(19): siRNA sense strand
ccaugcaacuucaacauau

SEQ ID NO: 1740227 - RNA, 19 nt, Homo sapiens
  misc_RNA (1)...(19): siRNA sense strand
aaagaugucggacugaaua

SEQ ID NO: 1740228 - RNA, 19 nt, Homo sapiens
  misc_RNA (1)...(19): siRNA sense strand
aaacugcaguagagaugua

SEQ ID NO: 1740229 - RNA, 19 nt, Homo sapiens
  misc_RNA (1)...(19): siRNA sense strand
ggaacaaauggacagguua

SEQ ID NO: 1740230 - RNA, 19 nt, Homo sapiens
  misc_RNA (1)...(19): siRNA sense strand
ugagauggacccagagaua

SEQ ID NO: 1740231 - RNA, 19 nt, Homo sapiens
  misc_RNA (1)...(19): siRNA sense strand
gaaagauggauauggaaga

SEQ ID NO: 1740232 - RNA, 19 nt, Homo sapiens
  misc_RNA (1)...(19): siRNA sense strand
caugcaacuucaacauaua

SEQ ID NO: 1740233 - RNA, 19 nt, Homo sapiens
  misc_RNA (1)...(19): siRNA sense strand
uacaacagaugaugcuuug

SEQ ID NO: 1740234 - RNA, 19 nt, Homo sapiens
  misc_RNA (1)...(19): siRNA sense strand
aaagauggauauggaagaa

SEQ ID NO: 1740235 - RNA, 19 nt, Homo sapiens
  misc_RNA (1)...(19): siRNA sense strand
aaggaaagauggauaugga

SEQ ID NO: 1740236 - RNA, 19 nt, Homo sapiens
  misc_RNA (1)...(19): siRNA sense strand
uccuauggaugacaauuua

SEQ ID NO: 1740237 - RNA, 19 nt, Homo sapiens
  misc_RNA (1)...(19): siRNA sense strand
uaugggagcucgccugugu

SEQ ID NO: 1740238 - RNA, 19 nt, Homo sapiens
  misc_RNA (1)...(19): siRNA sense strand
cagguuauucuuccaguua

SEQ ID NO: 1740239 - RNA, 19 nt, Homo sapiens
  misc_RNA (1)...(19): siRNA sense strand
ugaaugcccuguuuucuaa

SEQ ID NO: 1740240 - RNA, 19 nt, Homo sapiens
  misc_RNA (1)...(19): siRNA sense strand
gaugucggacugaauauga

SEQ ID NO: 1740241 - RNA, 19 nt, Homo sapiens
  misc_RNA (1)...(19): siRNA sense strand
ucaaagaugucggacugaa

SEQ ID NO: 1740242 - RNA, 19 nt, Homo sapiens
  misc_RNA (1)...(19): siRNA sense strand
caacuuccgccaauugcua

SEQ ID NO: 1740243 - RNA, 19 nt, Homo sapiens
  misc_RNA (1)...(19): siRNA sense strand
gcaaacugcaguagagaug

SEQ ID NO: 1740244 - RNA, 19 nt, Homo sapiens
  misc_RNA (1)...(19): siRNA sense strand
ggccacaucuaucccaaau

SEQ ID NO: 1740245 - RNA, 19 nt, Homo sapiens
  misc_RNA (1)...(19): siRNA sense strand
aaucagagcguaagcgaaa

SEQ ID NO: 1740246 - RNA, 19 nt, Homo sapiens
  misc_RNA (1)...(19): siRNA sense strand
agaagaagcuuaugaaaag

SEQ ID NO: 1740247 - RNA, 19 nt, Homo sapiens
  misc_RNA (1)...(19): siRNA sense strand
gaggaugguugugaggauu

SEQ ID NO: 1740248 - RNA, 19 nt, Homo sapiens
  misc_RNA (1)...(19): siRNA sense strand
gcuccuguauuaaugucua

SEQ ID NO: 1740249 - RNA, 19 nt, Homo sapiens
  misc_RNA (1)...(19): siRNA sense strand
gaacaaauggacagguuac

SEQ ID NO: 1740250 - RNA, 19 nt, Homo sapiens
  misc_RNA (1)...(19): siRNA sense strand
ccugagagcuccaccuagu

SEQ ID NO: 1740251 - RNA, 19 nt, Homo sapiens
  misc_RNA (1)...(19): siRNA sense strand
ugauauugaugaugagaug

SEQ ID NO: 1740252 - RNA, 19 nt, Homo sapiens
  misc_RNA (1)...(19): siRNA sense strand
caacuucaacauauagaga

SEQ ID NO: 1740253 - RNA, 19 nt, Homo sapiens
  misc_RNA (1)...(19): siRNA sense strand
ccuaacuacuuuaugaaug

SEQ ID NO: 1740254 - RNA, 19 nt, Homo sapiens
  misc_RNA (1)...(19): siRNA sense strand
ggagaucaagggaacaaau

SEQ ID NO: 1740255 - RNA, 19 nt, Homo sapiens
  misc_RNA (1)...(19): siRNA sense strand
gagaucaagggaacaaaug

SEQ ID NO: 1740256 - RNA, 19 nt, Homo sapiens
  misc_RNA (1)...(19): siRNA sense strand
caacagaugaugcuuugca

SEQ ID NO: 1740257 - RNA, 19 nt, Homo sapiens
  misc_RNA (1)...(19): siRNA sense strand
gccaauugcuacuucaaag

SEQ ID NO: 1740258 - RNA, 19 nt, Homo sapiens
  misc_RNA (1)...(19): siRNA sense strand
cagaugaugcuuugcaaga

SEQ ID NO: 1740259 - RNA, 19 nt, Homo sapiens
  misc_RNA (1)...(19): siRNA sense strand
ccaagagaaauaccaagaa

SEQ ID NO: 1740260 - RNA, 19 nt, Homo sapiens
  misc_RNA (1)...(19): siRNA sense strand
cagagcagccuggcaguuu

SEQ ID NO: 1740261 - RNA, 19 nt, Homo sapiens
  misc_RNA (1)...(19): siRNA sense strand
ggacccagagauagaagaa

SEQ ID NO: 1740262 - RNA, 19 nt, Homo sapiens
  misc_RNA (1)...(19): siRNA sense strand
agauggauauggaagaaau

SEQ ID NO: 1740263 - RNA, 19 nt, Homo sapiens
  misc_RNA (1)...(19): siRNA sense strand
caaauggacagguuacaag

SEQ ID NO: 1740264 - RNA, 19 nt, Homo sapiens
  misc_RNA (1)...(19): siRNA sense strand
ugaaugccccugaauuuua

SEQ ID NO: 1740265 - RNA, 19 nt, Homo sapiens
  misc_RNA (1)...(19): siRNA sense strand
uuaaagaucaagcugcaaa

SEQ ID NO: 1740266 - RNA, 19 nt, Homo sapiens
  misc_RNA (1)...(19): siRNA sense strand
agagauagaagaagcuuau

SEQ ID NO: 1740267 - RNA, 19 nt, Homo sapiens
  misc_RNA (1)...(19): siRNA sense strand
gcagaguccaugcaacuuc

SEQ ID NO: 1740268 - RNA, 19 nt, Homo sapiens
  misc_RNA (1)...(19): siRNA sense strand
ucagguuggucuucgagaa

SEQ ID NO: 1740269 - RNA, 19 nt, Homo sapiens
  misc_RNA (1)...(19): siRNA sense strand
gaugaugcuuugcaagaac

SEQ ID NO: 1740270 - RNA, 19 nt, Homo sapiens
  misc_RNA (1)...(19): siRNA sense strand
gaagaaaauggaacagauu

SEQ ID NO: 1740271 - RNA, 19 nt, Homo sapiens
  misc_RNA (1)...(19): siRNA sense strand
cagaguccaugcaacuuca

SEQ ID NO: 1740272 - RNA, 19 nt, Homo sapiens
  misc_RNA (1)...(19): siRNA sense strand
cccaucaucugacaauuag

SEQ ID NO: 1740273 - RNA, 19 nt, Homo sapiens
  misc_RNA (1)...(19): siRNA sense strand
ucccaucaucugacaauua

SEQ ID NO: 1740274 - RNA, 19 nt, Homo sapiens
  misc_RNA (1)...(19): siRNA sense strand
gaucaagggaacaaaugga

SEQ ID NO: 1740275 - RNA, 19 nt, Homo sapiens
  misc_RNA (1)...(19): siRNA sense strand
ccaguuacacagaauccua

SEQ ID NO: 1740276 - RNA, 19 nt, Homo sapiens
  misc_RNA (1)...(19): siRNA sense strand
gauccagauuaccaagaga

SEQ ID NO: 1740277 - RNA, 19 nt, Homo sapiens
  misc_RNA (1)...(19): siRNA sense strand
ggaugaaguuacucgaaaa

SEQ ID NO: 1740278 - RNA, 19 nt, Homo sapiens
  misc_RNA (1)...(19): siRNA sense strand
uagagaagcaacaccagaa

SEQ ID NO: 1740279 - RNA, 19 nt, Homo sapiens
  misc_RNA (1)...(19): siRNA sense strand
gacccugaaugguuguguu

SEQ ID NO: 1740280 - RNA, 19 nt, Homo sapiens
  misc_RNA (1)...(19): siRNA sense strand
gcaaaaggggaugaaguua

SEQ ID NO: 1740281 - RNA, 19 nt, Homo sapiens
  misc_RNA (1)...(19): siRNA sense strand
cggacugaauaugaaguua

SEQ ID NO: 1740282 - RNA, 19 nt, Homo sapiens
  misc_RNA (1)...(19): siRNA sense strand
uuguggaacucaucuauca

SEQ ID NO: 1740283 - RNA, 19 nt, Homo sapiens
  misc_RNA (1)...(19): siRNA sense strand
uuacaacagaugaugcuuu

SEQ ID NO: 1740284 - RNA, 19 nt, Homo sapiens
  misc_RNA (1)...(19): siRNA sense strand
gaacuuguggaacucaucu

SEQ ID NO: 1740285 - RNA, 19 nt, Homo sapiens
  misc_RNA (1)...(19): siRNA sense strand
gagauggacccagagauag

SEQ ID NO: 1740286 - RNA, 19 nt, Homo sapiens
  misc_RNA (1)...(19): siRNA sense strand
caacaggccacaucuaucc

SEQ ID NO: 1740287 - RNA, 19 nt, Homo sapiens
  misc_RNA (1)...(19): siRNA sense strand
agaugaugcuuugcaagaa

SEQ ID NO: 1740288 - RNA, 19 nt, Homo sapiens
  misc_RNA (1)...(19): siRNA sense strand
gaugagauggacccagaga

SEQ ID NO: 1740289 - RNA, 19 nt, Homo sapiens
  misc_RNA (1)...(19): siRNA sense strand
aaaguugacaggaucaguu

SEQ ID NO: 1740290 - RNA, 19 nt, Homo sapiens
  misc_RNA (1)...(19): siRNA sense strand
ggaugguugugaggauuau

SEQ ID NO: 1740291 - RNA, 19 nt, Homo sapiens
  misc_RNA (1)...(19): siRNA sense strand
uguagcuccuguauuaaug

SEQ ID NO: 1740292 - RNA, 19 nt, Homo sapiens
  misc_RNA (1)...(19): siRNA sense strand
acgauuucaugcauuugua

SEQ ID NO: 1740293 - RNA, 19 nt, Homo sapiens
  misc_RNA (1)...(19): siRNA sense strand
caaagaugucggacugaau

SEQ ID NO: 1740294 - RNA, 19 nt, Homo sapiens
  misc_RNA (1)...(19): siRNA sense strand
caauugcuacuucaaagau

SEQ ID NO: 1740295 - RNA, 19 nt, Homo sapiens
  misc_RNA (1)...(19): siRNA sense strand
ccaauugcuacuucaaaga

SEQ ID NO: 1740296 - RNA, 19 nt, Homo sapiens
  misc_RNA (1)...(19): siRNA sense strand
auccuacucuaucagaaua

SEQ ID NO: 1740297 - RNA, 19 nt, Homo sapiens
  misc_RNA (1)...(19): siRNA sense strand
cugcagcugauccagauua

SEQ ID NO: 1740298 - RNA, 19 nt, Homo sapiens
  misc_RNA (1)...(19): siRNA sense strand
cuucgagaauugcugaaug

SEQ ID NO: 1740299 - RNA, 19 nt, Homo sapiens
  misc_RNA (1)...(19): siRNA sense strand
ucagagaauugaaaacguu

SEQ ID NO: 1740300 - RNA, 19 nt, Homo sapiens
  misc_RNA (1)...(19): siRNA sense strand
gauggacccagagauagaa

SEQ ID NO: 1740301 - RNA, 19 nt, Homo sapiens
  misc_RNA (1)...(19): siRNA sense strand
guagagauguaaaacagau

SEQ ID NO: 1740302 - RNA, 19 nt, Homo sapiens
  misc_RNA (1)...(19): siRNA sense strand
ugaaaacguuguccuagau

SEQ ID NO: 1740303 - RNA, 19 nt, Homo sapiens
  misc_RNA (1)...(19): siRNA sense strand
gguuguagcuccuguauua

SEQ ID NO: 1740304 - RNA, 19 nt, Homo sapiens
  misc_RNA (1)...(19): siRNA sense strand
ccacaucuaucccaaauuu

SEQ ID NO: 1740305 - RNA, 19 nt, Homo sapiens
  misc_RNA (1)...(19): siRNA sense strand
cagaauauguucaggauuu

SEQ ID NO: 1740306 - RNA, 19 nt, Homo sapiens
  misc_RNA (1)...(19): siRNA sense strand
gauccuaacuacuuuauga

SEQ ID NO: 1740307 - RNA, 19 nt, Homo sapiens
  misc_RNA (1)...(19): siRNA sense strand
guaauuaccugucccauca

SEQ ID NO: 1740308 - RNA, 19 nt, Homo sapiens
  misc_RNA (1)...(19): siRNA sense strand
gagcucgccuguguaauua

SEQ ID NO: 1740309 - RNA, 19 nt, Homo sapiens
  misc_RNA (1)...(19): siRNA sense strand
gaagaugcuuggaaggaaa

SEQ ID NO: 1740310 - RNA, 19 nt, Homo sapiens
  misc_RNA (1)...(19): siRNA sense strand
ggaagaaauuauucagaga

SEQ ID NO: 1740311 - RNA, 19 nt, Homo sapiens
  misc_RNA (1)...(19): siRNA sense strand
gcagagacccugaaugguu

SEQ ID NO: 1740312 - RNA, 19 nt, Homo sapiens
  misc_RNA (1)...(19): siRNA sense strand
ccaaauuucucuuauaugg

SEQ ID NO: 1740313 - RNA, 19 nt, Homo sapiens
  misc_RNA (1)...(19): siRNA sense strand
caagagaaauaccaagaau

SEQ ID NO: 1740314 - RNA, 19 nt, Homo sapiens
  misc_RNA (1)...(19): siRNA sense strand
guagaacuccggucaagua

SEQ ID NO: 1740315 - RNA, 19 nt, Homo sapiens
  misc_RNA (1)...(19): siRNA sense strand
gggaugaaguuacucgaaa

SEQ ID NO: 1740316 - RNA, 19 nt, Homo sapiens
  misc_RNA (1)...(19): siRNA sense strand
ccaccuaguucacaggaua

SEQ ID NO: 1740317 - RNA, 19 nt, Homo sapiens
  misc_RNA (1)...(19): siRNA sense strand
ggaagaugcuuggaaggaa

SEQ ID NO: 1740318 - RNA, 19 nt, Homo sapiens
  misc_RNA (1)...(19): siRNA sense strand
gaacuccggucaaguaacu

SEQ ID NO: 1740319 - RNA, 19 nt, Homo sapiens
  misc_RNA (1)...(19): siRNA sense strand
ggagcucgccuguguaauu

SEQ ID NO: 1740320 - RNA, 19 nt, Homo sapiens
  misc_RNA (1)...(19): siRNA sense strand
gggaacaaauggacagguu

SEQ ID NO: 1740321 - RNA, 19 nt, Homo sapiens
  misc_RNA (1)...(19): siRNA sense strand
gauagaagaagcuuaugaa

SEQ ID NO: 1740322 - RNA, 19 nt, Homo sapiens
  misc_RNA (1)...(19): siRNA sense strand
cagauuaccaagagaaaua

SEQ ID NO: 1740323 - RNA, 19 nt, Homo sapiens
  misc_RNA (1)...(19): siRNA sense strand
ggacugaauaugaaguuaa

SEQ ID NO: 1740324 - RNA, 19 nt, Homo sapiens
  misc_RNA (1)...(19): siRNA sense strand
ugucuaagcugucugugaa

SEQ ID NO: 1740325 - RNA, 19 nt, Homo sapiens
  misc_RNA (1)...(19): siRNA sense strand
uggaugauauugaugauga

SEQ ID NO: 1740326 - RNA, 19 nt, Homo sapiens
  misc_RNA (1)...(19): siRNA sense strand
ccaugcaacuucaacauau

SEQ ID NO: 1740327 - RNA, 19 nt, Homo sapiens
  misc_RNA (1)...(19): siRNA sense strand
aaagaugucggacugaaua

SEQ ID NO: 1740328 - RNA, 19 nt, Homo sapiens
  misc_RNA (1)...(19): siRNA sense strand
aaacugcaguagagaugua

SEQ ID NO: 1740329 - RNA, 19 nt, Homo sapiens
  misc_RNA (1)...(19): siRNA sense strand
ggaacaaauggacagguua

SEQ ID NO: 1740330 - RNA, 19 nt, Homo sapiens
  misc_RNA (1)...(19): siRNA sense strand
ugagauggacccagagaua

SEQ ID NO: 1740331 - RNA, 19 nt, Homo sapiens
  misc_RNA (1)...(19): siRNA sense strand
gaaagauggauauggaaga

SEQ ID NO: 1740332 - RNA, 19 nt, Homo sapiens
  misc_RNA (1)...(19): siRNA sense strand
caugcaacuucaacauaua

SEQ ID NO: 1740333 - RNA, 19 nt, Homo sapiens
  misc_RNA (1)...(19): siRNA sense strand
uacaacagaugaugcuuug

SEQ ID NO: 1740334 - RNA, 19 nt, Homo sapiens
  misc_RNA (1)...(19): siRNA sense strand
aaagauggauauggaagaa

SEQ ID NO: 1740335 - RNA, 19 nt, Homo sapiens
  misc_RNA (1)...(19): siRNA sense strand
aaggaaagauggauaugga

SEQ ID NO: 1740336 - RNA, 19 nt, Homo sapiens
  misc_RNA (1)...(19): siRNA sense strand
uccuauggaugacaauuua

SEQ ID NO: 1740337 - RNA, 19 nt, Homo sapiens
  misc_RNA (1)...(19): siRNA sense strand
uaugggagcucgccugugu

SEQ ID NO: 1740338 - RNA, 19 nt, Homo sapiens
  misc_RNA (1)...(19): siRNA sense strand
cagguuauucuuccaguua

SEQ ID NO: 1740339 - RNA, 19 nt, Homo sapiens
  misc_RNA (1)...(19): siRNA sense strand
ugaaugcccuguuuucuaa

SEQ ID NO: 1740340 - RNA, 19 nt, Homo sapiens
  misc_RNA (1)...(19): siRNA sense strand
gaugucggacugaauauga

SEQ ID NO: 1740341 - RNA, 19 nt, Homo sapiens
  misc_RNA (1)...(19): siRNA sense strand
ucaaagaugucggacugaa

SEQ ID NO: 1740342 - RNA, 19 nt, Homo sapiens
  misc_RNA (1)...(19): siRNA sense strand
caacuuccgccaauugcua

SEQ ID NO: 1740343 - RNA, 19 nt, Homo sapiens
  misc_RNA (1)...(19): siRNA sense strand
gcaaacugcaguagagaug

SEQ ID NO: 1740344 - RNA, 19 nt, Homo sapiens
  misc_RNA (1)...(19): siRNA sense strand
ggccacaucuaucccaaau

SEQ ID NO: 1740345 - RNA, 19 nt, Homo sapiens
  misc_RNA (1)...(19): siRNA sense strand
aaucagagcguaagcgaaa

SEQ ID NO: 1740346 - RNA, 19 nt, Homo sapiens
  misc_RNA (1)...(19): siRNA sense strand
agaagaagcuuaugaaaag

SEQ ID NO: 1740347 - RNA, 19 nt, Homo sapiens
  misc_RNA (1)...(19): siRNA sense strand
gaggaugguugugaggauu

SEQ ID NO: 1740348 - RNA, 19 nt, Homo sapiens
  misc_RNA (1)...(19): siRNA sense strand
gcuccuguauuaaugucua

SEQ ID NO: 1740349 - RNA, 19 nt, Homo sapiens
  misc_RNA (1)...(19): siRNA sense strand
gaacaaauggacagguuac

SEQ ID NO: 1740350 - RNA, 19 nt, Homo sapiens
  misc_RNA (1)...(19): siRNA sense strand
ccugagagcuccaccuagu

SEQ ID NO: 1740351 - RNA, 19 nt, Homo sapiens
  misc_RNA (1)...(19): siRNA sense strand
ugauauugaugaugagaug

SEQ ID NO: 1740352 - RNA, 19 nt, Homo sapiens
  misc_RNA (1)...(19): siRNA sense strand
caacuucaacauauagaga

SEQ ID NO: 1740353 - RNA, 19 nt, Homo sapiens
  misc_RNA (1)...(19): siRNA sense strand
ccuaacuacuuuaugaaug

SEQ ID NO: 1740354 - RNA, 19 nt, Homo sapiens
  misc_RNA (1)...(19): siRNA sense strand
ggagaucaagggaacaaau

SEQ ID NO: 1740355 - RNA, 19 nt, Homo sapiens
  misc_RNA (1)...(19): siRNA sense strand
gagaucaagggaacaaaug

SEQ ID NO: 1740356 - RNA, 19 nt, Homo sapiens
  misc_RNA (1)...(19): siRNA sense strand
caacagaugaugcuuugca

SEQ ID NO: 1740357 - RNA, 19 nt, Homo sapiens
  misc_RNA (1)...(19): siRNA sense strand
gccaauugcuacuucaaag

SEQ ID NO: 1740358 - RNA, 19 nt, Homo sapiens
  misc_RNA (1)...(19): siRNA sense strand
cagaugaugcuuugcaaga

SEQ ID NO: 1740359 - RNA, 19 nt, Homo sapiens
  misc_RNA (1)...(19): siRNA sense strand
ccaagagaaauaccaagaa

SEQ ID NO: 1740360 - RNA, 19 nt, Homo sapiens
  misc_RNA (1)...(19): siRNA sense strand
cagagcagccuggcaguuu

SEQ ID NO: 1740361 - RNA, 19 nt, Homo sapiens
  misc_RNA (1)...(19): siRNA sense strand
ggacccagagauagaagaa

SEQ ID NO: 1740362 - RNA, 19 nt, Homo sapiens
  misc_RNA (1)...(19): siRNA sense strand
agauggauauggaagaaau

SEQ ID NO: 1740363 - RNA, 19 nt, Homo sapiens
  misc_RNA (1)...(19): siRNA sense strand
caaauggacagguuacaag

SEQ ID NO: 1740364 - RNA, 19 nt, Homo sapiens
  misc_RNA (1)...(19): siRNA sense strand
ugaaugccccugaauuuua

SEQ ID NO: 1740365 - RNA, 19 nt, Homo sapiens
  misc_RNA (1)...(19): siRNA sense strand
uuaaagaucaagcugcaaa

SEQ ID NO: 1740366 - RNA, 19 nt, Homo sapiens
  misc_RNA (1)...(19): siRNA sense strand
agagauagaagaagcuuau

SEQ ID NO: 1740367 - RNA, 19 nt, Homo sapiens
  misc_RNA (1)...(19): siRNA sense strand
gcagaguccaugcaacuuc

SEQ ID NO: 1740368 - RNA, 19 nt, Homo sapiens
  misc_RNA (1)...(19): siRNA sense strand
ucagguuggucuucgagaa

SEQ ID NO: 1740369 - RNA, 19 nt, Homo sapiens
  misc_RNA (1)...(19): siRNA sense strand
gaugaugcuuugcaagaac

SEQ ID NO: 1740370 - RNA, 19 nt, Homo sapiens
  misc_RNA (1)...(19): siRNA sense strand
gaagaaaauggaacagauu

SEQ ID NO: 1740371 - RNA, 19 nt, Homo sapiens
  misc_RNA (1)...(19): siRNA sense strand
cagaguccaugcaacuuca

SEQ ID NO: 1740372 - RNA, 19 nt, Homo sapiens
  misc_RNA (1)...(19): siRNA sense strand
cccaucaucugacaauuag

SEQ ID NO: 1740373 - RNA, 19 nt, Homo sapiens
  misc_RNA (1)...(19): siRNA sense strand
ucccaucaucugacaauua

SEQ ID NO: 1740374 - RNA, 19 nt, Homo sapiens
  misc_RNA (1)...(19): siRNA sense strand
gaucaagggaacaaaugga

SEQ ID NO: 1740375 - RNA, 19 nt, Homo sapiens
  misc_RNA (1)...(19): siRNA sense strand
ccaguuacacagaauccua

SEQ ID NO: 1740376 - RNA, 19 nt, Homo sapiens
  misc_RNA (1)...(19): siRNA sense strand
gauccagauuaccaagaga

SEQ ID NO: 1740377 - RNA, 19 nt, Homo sapiens
  misc_RNA (1)...(19): siRNA sense strand
ggaugaaguuacucgaaaa

SEQ ID NO: 1740378 - RNA, 19 nt, Homo sapiens
  misc_RNA (1)...(19): siRNA sense strand
uagagaagcaacaccagaa

SEQ ID NO: 1740379 - RNA, 19 nt, Homo sapiens
  misc_RNA (1)...(19): siRNA sense strand
gacccugaaugguuguguu

SEQ ID NO: 1740380 - RNA, 19 nt, Homo sapiens
  misc_RNA (1)...(19): siRNA sense strand
gcaaaaggggaugaaguua

SEQ ID NO: 1740381 - RNA, 19 nt, Homo sapiens
  misc_RNA (1)...(19): siRNA sense strand
cggacugaauaugaaguua

SEQ ID NO: 1740382 - RNA, 19 nt, Homo sapiens
  misc_RNA (1)...(19): siRNA sense strand
uuguggaacucaucuauca

SEQ ID NO: 1740383 - RNA, 19 nt, Homo sapiens
  misc_RNA (1)...(19): siRNA sense strand
uuacaacagaugaugcuuu

SEQ ID NO: 1740384 - RNA, 19 nt, Homo sapiens
  misc_RNA (1)...(19): siRNA sense strand
gaacuuguggaacucaucu

SEQ ID NO: 1740385 - RNA, 19 nt, Homo sapiens
  misc_RNA (1)...(19): siRNA sense strand
gagauggacccagagauag

SEQ ID NO: 1740386 - RNA, 19 nt, Homo sapiens
  misc_RNA (1)...(19): siRNA sense strand
caacaggccacaucuaucc

SEQ ID NO: 1740387 - RNA, 19 nt, Homo sapiens
  misc_RNA (1)...(19): siRNA sense strand
agaugaugcuuugcaagaa

SEQ ID NO: 1740388 - RNA, 19 nt, Homo sapiens
  misc_RNA (1)...(19): siRNA sense strand
gaugagauggacccagaga

SEQ ID NO: 1740389 - RNA, 19 nt, Homo sapiens
  misc_RNA (1)...(19): siRNA sense strand
aaaguugacaggaucaguu

SEQ ID NO: 1740390 - RNA, 19 nt, Homo sapiens
  misc_RNA (1)...(19): siRNA sense strand
ggaugguugugaggauuau

SEQ ID NO: 1740391 - RNA, 19 nt, Homo sapiens
  misc_RNA (1)...(19): siRNA sense strand
uguagcuccuguauuaaug

SEQ ID NO: 1740392 - RNA, 19 nt, Homo sapiens
  misc_RNA (1)...(19): siRNA sense strand
acgauuucaugcauuugua

SEQ ID NO: 1740393 - RNA, 19 nt, Homo sapiens
  misc_RNA (1)...(19): siRNA sense strand
caaagaugucggacugaau

SEQ ID NO: 1740394 - RNA, 19 nt, Homo sapiens
  misc_RNA (1)...(19): siRNA sense strand
caauugcuacuucaaagau

SEQ ID NO: 1740395 - RNA, 19 nt, Homo sapiens
  misc_RNA (1)...(19): siRNA sense strand
ccaauugcuacuucaaaga

SEQ ID NO: 1740396 - RNA, 19 nt, Homo sapiens
  misc_RNA (1)...(19): siRNA sense strand
auccuacucuaucagaaua

SEQ ID NO: 1740397 - RNA, 19 nt, Homo sapiens
  misc_RNA (1)...(19): siRNA sense strand
cugcagcugauccagauua

SEQ ID NO: 1740398 - RNA, 19 nt, Homo sapiens
  misc_RNA (1)...(19): siRNA sense strand
cuucgagaauugcugaaug

SEQ ID NO: 1740399 - RNA, 19 nt, Homo sapiens
  misc_RNA (1)...(19): siRNA sense strand
ucagagaauugaaaacguu

SEQ ID NO: 1740400 - RNA, 19 nt, Homo sapiens
  misc_RNA (1)...(19): siRNA sense strand
gauggacccagagauagaa

SEQ ID NO: 1740401 - RNA, 19 nt, Homo sapiens
  misc_RNA (1)...(19): siRNA sense strand
guagagauguaaaacagau

SEQ ID NO: 1740402 - RNA, 19 nt, Homo sapiens
  misc_RNA (1)...(19): siRNA sense strand
ugaaaacguuguccuagau

SEQ ID NO: 1740403 - RNA, 19 nt, Homo sapiens
  misc_RNA (1)...(19): siRNA sense strand
gguuguagcuccuguauua

SEQ ID NO: 1740404 - RNA, 19 nt, Homo sapiens
  misc_RNA (1)...(19): siRNA sense strand
ccacaucuaucccaaauuu

SEQ ID NO: 1740405 - RNA, 19 nt, Homo sapiens
  misc_RNA (1)...(19): siRNA sense strand
cagaauauguucaggauuu

SEQ ID NO: 1740406 - RNA, 19 nt, Homo sapiens
  misc_RNA (1)...(19): siRNA sense strand
gauccuaacuacuuuauga

SEQ ID NO: 1740407 - RNA, 19 nt, Homo sapiens
  misc_RNA (1)...(19): siRNA sense strand
guaauuaccugucccauca

SEQ ID NO: 1740408 - RNA, 19 nt, Homo sapiens
  misc_RNA (1)...(19): siRNA sense strand
gagcucgccuguguaauua

SEQ ID NO: 1740409 - RNA, 19 nt, Homo sapiens
  misc_RNA (1)...(19): siRNA sense strand
gaagaugcuuggaaggaaa

SEQ ID NO: 1740410 - RNA, 19 nt, Homo sapiens
  misc_RNA (1)...(19): siRNA sense strand
ggaagaaauuauucagaga

SEQ ID NO: 1740411 - RNA, 19 nt, Homo sapiens
  misc_RNA (1)...(19): siRNA sense strand
gcagagacccugaaugguu

SEQ ID NO: 1740412 - RNA, 19 nt, Homo sapiens
  misc_RNA (1)...(19): siRNA sense strand
ccaaauuucucuuauaugg

SEQ ID NO: 1740413 - RNA, 19 nt, Homo sapiens
  misc_RNA (1)...(19): siRNA sense strand
caagagaaauaccaagaau

SEQ ID NO: 1740414 - RNA, 19 nt, Homo sapiens
  misc_RNA (1)...(19): siRNA sense strand
guagaacuccggucaagua

SEQ ID NO: 1740415 - RNA, 19 nt, Homo sapiens
  misc_RNA (1)...(19): siRNA sense strand
gggaugaaguuacucgaaa

SEQ ID NO: 1740416 - RNA, 19 nt, Homo sapiens
  misc_RNA (1)...(19): siRNA sense strand
ggaagaugcuuggaaggaa

SEQ ID NO: 1740417 - RNA, 19 nt, Homo sapiens
  misc_RNA (1)...(19): siRNA sense strand
gaacuccggucaaguaacu

SEQ ID NO: 1740418 - RNA, 19 nt, Homo sapiens
  misc_RNA (1)...(19): siRNA sense strand
ggagcucgccuguguaauu

SEQ ID NO: 1740419 - RNA, 19 nt, Homo sapiens
  misc_RNA (1)...(19): siRNA sense strand
gggaacaaauggacagguu

SEQ ID NO: 1740420 - RNA, 19 nt, Homo sapiens
  misc_RNA (1)...(19): siRNA sense strand
gauagaagaagcuuaugaa

SEQ ID NO: 1740421 - RNA, 19 nt, Homo sapiens
  misc_RNA (1)...(19): siRNA sense strand
cagauuaccaagagaaaua

SEQ ID NO: 1740422 - RNA, 19 nt, Homo sapiens
  misc_RNA (1)...(19): siRNA sense strand
ggacugaauaugaaguuaa

SEQ ID NO: 1740423 - RNA, 19 nt, Homo sapiens
  misc_RNA (1)...(19): siRNA sense strand
ugucuaagcugucugugaa

SEQ ID NO: 1740424 - RNA, 19 nt, Homo sapiens
  misc_RNA (1)...(19): siRNA sense strand
uggaugauauugaugauga

SEQ ID NO: 1740425 - RNA, 19 nt, Homo sapiens
  misc_RNA (1)...(19): siRNA sense strand
ccaugcaacuucaacauau

SEQ ID NO: 1740426 - RNA, 19 nt, Homo sapiens
  misc_RNA (1)...(19): siRNA sense strand
aaagaugucggacugaaua

SEQ ID NO: 1740427 - RNA, 19 nt, Homo sapiens
  misc_RNA (1)...(19): siRNA sense strand
aaacugcaguagagaugua

SEQ ID NO: 1740428 - RNA, 19 nt, Homo sapiens
  misc_RNA (1)...(19): siRNA sense strand
ggaacaaauggacagguua

SEQ ID NO: 1740429 - RNA, 19 nt, Homo sapiens
  misc_RNA (1)...(19): siRNA sense strand
ugagauggacccagagaua

SEQ ID NO: 1740430 - RNA, 19 nt, Homo sapiens
  misc_RNA (1)...(19): siRNA sense strand
gaaagauggauauggaaga

SEQ ID NO: 1740431 - RNA, 19 nt, Homo sapiens
  misc_RNA (1)...(19): siRNA sense strand
caugcaacuucaacauaua

SEQ ID NO: 1740432 - RNA, 19 nt, Homo sapiens
  misc_RNA (1)...(19): siRNA sense strand
uacaacagaugaugcuuug

SEQ ID NO: 1740433 - RNA, 19 nt, Homo sapiens
  misc_RNA (1)...(19): siRNA sense strand
aaagauggauauggaagaa

SEQ ID NO: 1740434 - RNA, 19 nt, Homo sapiens
  misc_RNA (1)...(19): siRNA sense strand
aaggaaagauggauaugga

SEQ ID NO: 1740435 - RNA, 19 nt, Homo sapiens
  misc_RNA (1)...(19): siRNA sense strand
uccuauggaugacaauuua

SEQ ID NO: 1740436 - RNA, 19 nt, Homo sapiens
  misc_RNA (1)...(19): siRNA sense strand
uaugggagcucgccugugu

SEQ ID NO: 1740437 - RNA, 19 nt, Homo sapiens
  misc_RNA (1)...(19): siRNA sense strand
cagguuauucuuccaguua

SEQ ID NO: 1740438 - RNA, 19 nt, Homo sapiens
  misc_RNA (1)...(19): siRNA sense strand
ugaaugcccuguuuucuaa

SEQ ID NO: 1740439 - RNA, 19 nt, Homo sapiens
  misc_RNA (1)...(19): siRNA sense strand
gaugucggacugaauauga

SEQ ID NO: 1740440 - RNA, 19 nt, Homo sapiens
  misc_RNA (1)...(19): siRNA sense strand
ucaaagaugucggacugaa

SEQ ID NO: 1740441 - RNA, 19 nt, Homo sapiens
  misc_RNA (1)...(19): siRNA sense strand
caacuuccgccaauugcua

SEQ ID NO: 1740442 - RNA, 19 nt, Homo sapiens
  misc_RNA (1)...(19): siRNA sense strand
gcaaacugcaguagagaug

SEQ ID NO: 1740443 - RNA, 19 nt, Homo sapiens
  misc_RNA (1)...(19): siRNA sense strand
ggccacaucuaucccaaau

SEQ ID NO: 1740444 - RNA, 19 nt, Homo sapiens
  misc_RNA (1)...(19): siRNA sense strand
aaucagagcguaagcgaaa

SEQ ID NO: 1740445 - RNA, 19 nt, Homo sapiens
  misc_RNA (1)...(19): siRNA sense strand
agaagaagcuuaugaaaag

SEQ ID NO: 1740446 - RNA, 19 nt, Homo sapiens
  misc_RNA (1)...(19): siRNA sense strand
gaggaugguugugaggauu

SEQ ID NO: 1740447 - RNA, 19 nt, Homo sapiens
  misc_RNA (1)...(19): siRNA sense strand
gaacaaauggacagguuac

SEQ ID NO: 1740448 - RNA, 19 nt, Homo sapiens
  misc_RNA (1)...(19): siRNA sense strand
gcuccuguauuaaugucua

SEQ ID NO: 1740449 - RNA, 19 nt, Homo sapiens
  misc_RNA (1)...(19): siRNA sense strand
caacuucaacauauagaga

SEQ ID NO: 1740450 - RNA, 19 nt, Homo sapiens
  misc_RNA (1)...(19): siRNA sense strand
ugauauugaugaugagaug

SEQ ID NO: 1740451 - RNA, 19 nt, Homo sapiens
  misc_RNA (1)...(19): siRNA sense strand
ccuaacuacuuuaugaaug

SEQ ID NO: 1740452 - RNA, 19 nt, Homo sapiens
  misc_RNA (1)...(19): siRNA sense strand
ggagaucaagggaacaaau

SEQ ID NO: 1740453 - RNA, 19 nt, Homo sapiens
  misc_RNA (1)...(19): siRNA sense strand
gagaucaagggaacaaaug

SEQ ID NO: 1740454 - RNA, 19 nt, Homo sapiens
  misc_RNA (1)...(19): siRNA sense strand
caacagaugaugcuuugca

SEQ ID NO: 1740455 - RNA, 19 nt, Homo sapiens
  misc_RNA (1)...(19): siRNA sense strand
gccaauugcuacuucaaag

SEQ ID NO: 1740456 - RNA, 19 nt, Homo sapiens
  misc_RNA (1)...(19): siRNA sense strand
cagaugaugcuuugcaaga

SEQ ID NO: 1740457 - RNA, 19 nt, Homo sapiens
  misc_RNA (1)...(19): siRNA sense strand
ccaagagaaauaccaagaa

SEQ ID NO: 1740458 - RNA, 19 nt, Homo sapiens
  misc_RNA (1)...(19): siRNA sense strand
cagagcagccuggcaguuu

SEQ ID NO: 1740459 - RNA, 19 nt, Homo sapiens
  misc_RNA (1)...(19): siRNA sense strand
ggacccagagauagaagaa

SEQ ID NO: 1740460 - RNA, 19 nt, Homo sapiens
  misc_RNA (1)...(19): siRNA sense strand
agauggauauggaagaaau

SEQ ID NO: 1740461 - RNA, 19 nt, Homo sapiens
  misc_RNA (1)...(19): siRNA sense strand
ugaaugccccugaauuuua

SEQ ID NO: 1740462 - RNA, 19 nt, Homo sapiens
  misc_RNA (1)...(19): siRNA sense strand
caaauggacagguuacaag

SEQ ID NO: 1740463 - RNA, 19 nt, Homo sapiens
  misc_RNA (1)...(19): siRNA sense strand
uuaaagaucaagcugcaaa

SEQ ID NO: 1740464 - RNA, 19 nt, Homo sapiens
  misc_RNA (1)...(19): siRNA sense strand
agagauagaagaagcuuau

SEQ ID NO: 1740465 - RNA, 19 nt, Homo sapiens
  misc_RNA (1)...(19): siRNA sense strand
gcagaguccaugcaacuuc

SEQ ID NO: 1740466 - RNA, 19 nt, Homo sapiens
  misc_RNA (1)...(19): siRNA sense strand
ucagguuggucuucgagaa

SEQ ID NO: 1740467 - RNA, 19 nt, Homo sapiens
  misc_RNA (1)...(19): siRNA sense strand
gaugaugcuuugcaagaac

SEQ ID NO: 1740468 - RNA, 19 nt, Homo sapiens
  misc_RNA (1)...(19): siRNA sense strand
gaagaaaauggaacagauu

SEQ ID NO: 1740469 - RNA, 19 nt, Homo sapiens
  misc_RNA (1)...(19): siRNA sense strand
cagaguccaugcaacuuca

SEQ ID NO: 1740470 - RNA, 19 nt, Homo sapiens
  misc_RNA (1)...(19): siRNA sense strand
cccaucaucugacaauuag

SEQ ID NO: 1740471 - RNA, 19 nt, Homo sapiens
  misc_RNA (1)...(19): siRNA sense strand
ucccaucaucugacaauua

SEQ ID NO: 1740472 - RNA, 19 nt, Homo sapiens
  misc_RNA (1)...(19): siRNA sense strand
gaucaagggaacaaaugga

SEQ ID NO: 1740473 - RNA, 19 nt, Homo sapiens
  misc_RNA (1)...(19): siRNA sense strand
ccaguuacacagaauccua

SEQ ID NO: 1740474 - RNA, 19 nt, Homo sapiens
  misc_RNA (1)...(19): siRNA sense strand
gauccagauuaccaagaga

SEQ ID NO: 1740475 - RNA, 19 nt, Homo sapiens
  misc_RNA (1)...(19): siRNA sense strand
ggaugaaguuacucgaaaa

SEQ ID NO: 1740476 - RNA, 19 nt, Homo sapiens
  misc_RNA (1)...(19): siRNA sense strand
uagagaagcaacaccagaa

SEQ ID NO: 1740477 - RNA, 19 nt, Homo sapiens
  misc_RNA (1)...(19): siRNA sense strand
gacccugaaugguuguguu

SEQ ID NO: 1740478 - RNA, 19 nt, Homo sapiens
  misc_RNA (1)...(19): siRNA sense strand
gcaaaaggggaugaaguua

SEQ ID NO: 1740479 - RNA, 19 nt, Homo sapiens
  misc_RNA (1)...(19): siRNA sense strand
cggacugaauaugaaguua

SEQ ID NO: 1740480 - RNA, 19 nt, Homo sapiens
  misc_RNA (1)...(19): siRNA sense strand
uuguggaacucaucuauca

SEQ ID NO: 1740481 - RNA, 19 nt, Homo sapiens
  misc_RNA (1)...(19): siRNA sense strand
uuacaacagaugaugcuuu

SEQ ID NO: 1740482 - RNA, 19 nt, Homo sapiens
  misc_RNA (1)...(19): siRNA sense strand
gaacuuguggaacucaucu

SEQ ID NO: 1740483 - RNA, 19 nt, Homo sapiens
  misc_RNA (1)...(19): siRNA sense strand
gagauggacccagagauag

SEQ ID NO: 1740484 - RNA, 19 nt, Homo sapiens
  misc_RNA (1)...(19): siRNA sense strand
caacaggccacaucuaucc

SEQ ID NO: 1740485 - RNA, 19 nt, Homo sapiens
  misc_RNA (1)...(19): siRNA sense strand
agaugaugcuuugcaagaa

SEQ ID NO: 1740486 - RNA, 19 nt, Homo sapiens
  misc_RNA (1)...(19): siRNA sense strand
gaugagauggacccagaga

SEQ ID NO: 1740487 - RNA, 19 nt, Homo sapiens
  misc_RNA (1)...(19): siRNA sense strand
uguagcuccuguauuaaug

SEQ ID NO: 1740488 - RNA, 19 nt, Homo sapiens
  misc_RNA (1)...(19): siRNA sense strand
aaaguugacaggaucaguu

SEQ ID NO: 1740489 - RNA, 19 nt, Homo sapiens
  misc_RNA (1)...(19): siRNA sense strand
acgauuucaugcauuugua

SEQ ID NO: 1740490 - RNA, 19 nt, Homo sapiens
  misc_RNA (1)...(19): siRNA sense strand
ggaugguugugaggauuau

SEQ ID NO: 1740491 - RNA, 19 nt, Homo sapiens
  misc_RNA (1)...(19): siRNA sense strand
caaagaugucggacugaau

SEQ ID NO: 1740492 - RNA, 19 nt, Homo sapiens
  misc_RNA (1)...(19): siRNA sense strand
caauugcuacuucaaagau

SEQ ID NO: 1740493 - RNA, 19 nt, Homo sapiens
  misc_RNA (1)...(19): siRNA sense strand
ccaauugcuacuucaaaga

SEQ ID NO: 1740494 - RNA, 19 nt, Homo sapiens
  misc_RNA (1)...(19): siRNA sense strand
auccuacucuaucagaaua

SEQ ID NO: 1740495 - RNA, 19 nt, Homo sapiens
  misc_RNA (1)...(19): siRNA sense strand
cugcagcugauccagauua

SEQ ID NO: 1740496 - RNA, 19 nt, Homo sapiens
  misc_RNA (1)...(19): siRNA sense strand
cuucgagaauugcugaaug

SEQ ID NO: 1740497 - RNA, 19 nt, Homo sapiens
  misc_RNA (1)...(19): siRNA sense strand
ccugaaugguuguguuaca

SEQ ID NO: 1740498 - RNA, 19 nt, Homo sapiens
  misc_RNA (1)...(19): siRNA sense strand
gauggacccagagauagaa

SEQ ID NO: 1740499 - RNA, 19 nt, Homo sapiens
  misc_RNA (1)...(19): siRNA sense strand
guagagauguaaaacagau

SEQ ID NO: 1740500 - RNA, 19 nt, Homo sapiens
  misc_RNA (1)...(19): siRNA sense strand
ugaaaacguuguccuagau

SEQ ID NO: 1740501 - RNA, 19 nt, Homo sapiens
  misc_RNA (1)...(19): siRNA sense strand
ucagagaauugaaaacguu

SEQ ID NO: 1740502 - RNA, 19 nt, Homo sapiens
  misc_RNA (1)...(19): siRNA sense strand
agauagaagaagcuuauga

SEQ ID NO: 1740503 - RNA, 19 nt, Homo sapiens
  misc_RNA (1)...(19): siRNA sense strand
gguuguagcuccuguauua

SEQ ID NO: 1740504 - RNA, 19 nt, Homo sapiens
  misc_RNA (1)...(19): siRNA sense strand
ccacaucuaucccaaauuu

SEQ ID NO: 1740505 - RNA, 19 nt, Homo sapiens
  misc_RNA (1)...(19): siRNA sense strand
cagaauauguucaggauuu

SEQ ID NO: 1740506 - RNA, 19 nt, Homo sapiens
  misc_RNA (1)...(19): siRNA sense strand
gauccuaacuacuuuauga

SEQ ID NO: 1740507 - RNA, 19 nt, Homo sapiens
  misc_RNA (1)...(19): siRNA sense strand
guaauuaccugucccauca

SEQ ID NO: 1740508 - RNA, 19 nt, Homo sapiens
  misc_RNA (1)...(19): siRNA sense strand
gagcucgccuguguaauua

SEQ ID NO: 1740509 - RNA, 19 nt, Homo sapiens
  misc_RNA (1)...(19): siRNA sense strand
gaagaugcuuggaaggaaa

SEQ ID NO: 1740510 - RNA, 19 nt, Homo sapiens
  misc_RNA (1)...(19): siRNA sense strand
ggaagaaauuauucagaga

SEQ ID NO: 1740511 - RNA, 19 nt, Homo sapiens
  misc_RNA (1)...(19): siRNA sense strand
gcagagacccugaaugguu

SEQ ID NO: 1740512 - RNA, 19 nt, Homo sapiens
  misc_RNA (1)...(19): siRNA sense strand
ccaaauuucucuuauaugg

SEQ ID NO: 1740513 - RNA, 19 nt, Homo sapiens
  misc_RNA (1)...(19): siRNA sense strand
caagagaaauaccaagaau

SEQ ID NO: 1740514 - RNA, 19 nt, Homo sapiens
  misc_RNA (1)...(19): siRNA sense strand
guagaacuccggucaagua

SEQ ID NO: 1740515 - RNA, 19 nt, Homo sapiens
  misc_RNA (1)...(19): siRNA sense strand
gggaugaaguuacucgaaa

SEQ ID NO: 1740516 - RNA, 19 nt, Homo sapiens
  misc_RNA (1)...(19): siRNA sense strand
ccaccuaguucacaggaua

SEQ ID NO: 1740517 - RNA, 19 nt, Homo sapiens
  misc_RNA (1)...(19): siRNA sense strand
ggaagaugcuuggaaggaa

SEQ ID NO: 1740518 - RNA, 19 nt, Homo sapiens
  misc_RNA (1)...(19): siRNA sense strand
gaacuccggucaaguaacu

SEQ ID NO: 1740519 - RNA, 19 nt, Homo sapiens
  misc_RNA (1)...(19): siRNA sense strand
ggagcucgccuguguaauu

SEQ ID NO: 1740520 - RNA, 19 nt, Homo sapiens
  misc_RNA (1)...(19): siRNA sense strand
gggaacaaauggacagguu

SEQ ID NO: 1740521 - RNA, 19 nt, Homo sapiens
  misc_RNA (1)...(19): siRNA sense strand
gauagaagaagcuuaugaa

SEQ ID NO: 1740522 - RNA, 19 nt, Homo sapiens
  misc_RNA (1)...(19): siRNA sense strand
cagauuaccaagagaaaua

SEQ ID NO: 1740523 - RNA, 19 nt, Homo sapiens
  misc_RNA (1)...(19): siRNA sense strand
ggacugaauaugaaguuaa

SEQ ID NO: 1740524 - RNA, 19 nt, Homo sapiens
  misc_RNA (1)...(19): siRNA sense strand
ugucuaagcugucugugaa

SEQ ID NO: 1740525 - RNA, 19 nt, Homo sapiens
  misc_RNA (1)...(19): siRNA sense strand
uggaugauauugaugauga

SEQ ID NO: 1740526 - RNA, 19 nt, Homo sapiens
  misc_RNA (1)...(19): siRNA sense strand
ccaugcaacuucaacauau

SEQ ID NO: 1740527 - RNA, 19 nt, Homo sapiens
  misc_RNA (1)...(19): siRNA sense strand
aaagaugucggacugaaua

SEQ ID NO: 1740528 - RNA, 19 nt, Homo sapiens
  misc_RNA (1)...(19): siRNA sense strand
aaacugcaguagagaugua

SEQ ID NO: 1740529 - RNA, 19 nt, Homo sapiens
  misc_RNA (1)...(19): siRNA sense strand
ggaacaaauggacagguua

SEQ ID NO: 1740530 - RNA, 19 nt, Homo sapiens
  misc_RNA (1)...(19): siRNA sense strand
ugagauggacccagagaua

SEQ ID NO: 1740531 - RNA, 19 nt, Homo sapiens
  misc_RNA (1)...(19): siRNA sense strand
gaaagauggauauggaaga

SEQ ID NO: 1740532 - RNA, 19 nt, Homo sapiens
  misc_RNA (1)...(19): siRNA sense strand
caugcaacuucaacauaua

SEQ ID NO: 1740533 - RNA, 19 nt, Homo sapiens
  misc_RNA (1)...(19): siRNA sense strand
uacaacagaugaugcuuug

SEQ ID NO: 1740534 - RNA, 19 nt, Homo sapiens
  misc_RNA (1)...(19): siRNA sense strand
aaagauggauauggaagaa

SEQ ID NO: 1740535 - RNA, 19 nt, Homo sapiens
  misc_RNA (1)...(19): siRNA sense strand
aaggaaagauggauaugga

SEQ ID NO: 1740536 - RNA, 19 nt, Homo sapiens
  misc_RNA (1)...(19): siRNA sense strand
uccuauggaugacaauuua

SEQ ID NO: 1740537 - RNA, 19 nt, Homo sapiens
  misc_RNA (1)...(19): siRNA sense strand
uaugggagcucgccugugu

SEQ ID NO: 1740538 - RNA, 19 nt, Homo sapiens
  misc_RNA (1)...(19): siRNA sense strand
cagguuauucuuccaguua

SEQ ID NO: 1740539 - RNA, 19 nt, Homo sapiens
  misc_RNA (1)...(19): siRNA sense strand
ugaaugcccuguuuucuaa

SEQ ID NO: 1740540 - RNA, 19 nt, Homo sapiens
  misc_RNA (1)...(19): siRNA sense strand
gaugucggacugaauauga

SEQ ID NO: 1740541 - RNA, 19 nt, Homo sapiens
  misc_RNA (1)...(19): siRNA sense strand
ucaaagaugucggacugaa

SEQ ID NO: 1740542 - RNA, 19 nt, Homo sapiens
  misc_RNA (1)...(19): siRNA sense strand
caacuuccgccaauugcua

SEQ ID NO: 1740543 - RNA, 19 nt, Homo sapiens
  misc_RNA (1)...(19): siRNA sense strand
gcaaacugcaguagagaug

SEQ ID NO: 1740544 - RNA, 19 nt, Homo sapiens
  misc_RNA (1)...(19): siRNA sense strand
ggccacaucuaucccaaau

SEQ ID NO: 1740545 - RNA, 19 nt, Homo sapiens
  misc_RNA (1)...(19): siRNA sense strand
aaucagagcguaagcgaaa

SEQ ID NO: 1740546 - RNA, 19 nt, Homo sapiens
  misc_RNA (1)...(19): siRNA sense strand
agaagaagcuuaugaaaag

SEQ ID NO: 1740547 - RNA, 19 nt, Homo sapiens
  misc_RNA (1)...(19): siRNA sense strand
gaggaugguugugaggauu

SEQ ID NO: 1740548 - RNA, 19 nt, Homo sapiens
  misc_RNA (1)...(19): siRNA sense strand
gcuccuguauuaaugucua

SEQ ID NO: 1740549 - RNA, 19 nt, Homo sapiens
  misc_RNA (1)...(19): siRNA sense strand
gaacaaauggacagguuac

SEQ ID NO: 1740550 - RNA, 19 nt, Homo sapiens
  misc_RNA (1)...(19): siRNA sense strand
ccugagagcuccaccuagu

SEQ ID NO: 1740551 - RNA, 19 nt, Homo sapiens
  misc_RNA (1)...(19): siRNA sense strand
ugauauugaugaugagaug

SEQ ID NO: 1740552 - RNA, 19 nt, Homo sapiens
  misc_RNA (1)...(19): siRNA sense strand
caacuucaacauauagaga

SEQ ID NO: 1740553 - RNA, 19 nt, Homo sapiens
  misc_RNA (1)...(19): siRNA sense strand
ccuaacuacuuuaugaaug

SEQ ID NO: 1740554 - RNA, 19 nt, Homo sapiens
  misc_RNA (1)...(19): siRNA sense strand
ggagaucaagggaacaaau

SEQ ID NO: 1740555 - RNA, 19 nt, Homo sapiens
  misc_RNA (1)...(19): siRNA sense strand
gagaucaagggaacaaaug

SEQ ID NO: 1740556 - RNA, 19 nt, Homo sapiens
  misc_RNA (1)...(19): siRNA sense strand
caacagaugaugcuuugca

SEQ ID NO: 1740557 - RNA, 19 nt, Homo sapiens
  misc_RNA (1)...(19): siRNA sense strand
gccaauugcuacuucaaag

SEQ ID NO: 1740558 - RNA, 19 nt, Homo sapiens
  misc_RNA (1)...(19): siRNA sense strand
cagaugaugcuuugcaaga

SEQ ID NO: 1740559 - RNA, 19 nt, Homo sapiens
  misc_RNA (1)...(19): siRNA sense strand
ccaagagaaauaccaagaa

SEQ ID NO: 1740560 - RNA, 19 nt, Homo sapiens
  misc_RNA (1)...(19): siRNA sense strand
cagagcagccuggcaguuu

SEQ ID NO: 1740561 - RNA, 19 nt, Homo sapiens
  misc_RNA (1)...(19): siRNA sense strand
ggacccagagauagaagaa

SEQ ID NO: 1740562 - RNA, 19 nt, Homo sapiens
  misc_RNA (1)...(19): siRNA sense strand
agauggauauggaagaaau

SEQ ID NO: 1740563 - RNA, 19 nt, Homo sapiens
  misc_RNA (1)...(19): siRNA sense strand
caaauggacagguuacaag

SEQ ID NO: 1740564 - RNA, 19 nt, Homo sapiens
  misc_RNA (1)...(19): siRNA sense strand
ugaaugccccugaauuuua

SEQ ID NO: 1740565 - RNA, 19 nt, Homo sapiens
  misc_RNA (1)...(19): siRNA sense strand
uuaaagaucaagcugcaaa

SEQ ID NO: 1740566 - RNA, 19 nt, Homo sapiens
  misc_RNA (1)...(19): siRNA sense strand
agagauagaagaagcuuau

SEQ ID NO: 1740567 - RNA, 19 nt, Homo sapiens
  misc_RNA (1)...(19): siRNA sense strand
gcagaguccaugcaacuuc

SEQ ID NO: 1740568 - RNA, 19 nt, Homo sapiens
  misc_RNA (1)...(19): siRNA sense strand
ucagguuggucuucgagaa

SEQ ID NO: 1740569 - RNA, 19 nt, Homo sapiens
  misc_RNA (1)...(19): siRNA sense strand
gaugaugcuuugcaagaac

SEQ ID NO: 1740570 - RNA, 19 nt, Homo sapiens
  misc_RNA (1)...(19): siRNA sense strand
gaagaaaauggaacagauu

SEQ ID NO: 1740571 - RNA, 19 nt, Homo sapiens
  misc_RNA (1)...(19): siRNA sense strand
cagaguccaugcaacuuca

SEQ ID NO: 1740572 - RNA, 19 nt, Homo sapiens
  misc_RNA (1)...(19): siRNA sense strand
cccaucaucugacaauuag

SEQ ID NO: 1740573 - RNA, 19 nt, Homo sapiens
  misc_RNA (1)...(19): siRNA sense strand
ucccaucaucugacaauua

SEQ ID NO: 1740574 - RNA, 19 nt, Homo sapiens
  misc_RNA (1)...(19): siRNA sense strand
gaucaagggaacaaaugga

SEQ ID NO: 1740575 - RNA, 19 nt, Homo sapiens
  misc_RNA (1)...(19): siRNA sense strand
ccaguuacacagaauccua

SEQ ID NO: 1740576 - RNA, 19 nt, Homo sapiens
  misc_RNA (1)...(19): siRNA sense strand
gauccagauuaccaagaga

SEQ ID NO: 1740577 - RNA, 19 nt, Homo sapiens
  misc_RNA (1)...(19): siRNA sense strand
ggaugaaguuacucgaaaa

SEQ ID NO: 1740578 - RNA, 19 nt, Homo sapiens
  misc_RNA (1)...(19): siRNA sense strand
uagagaagcaacaccagaa

SEQ ID NO: 1740579 - RNA, 19 nt, Homo sapiens
  misc_RNA (1)...(19): siRNA sense strand
gacccugaaugguuguguu

SEQ ID NO: 1740580 - RNA, 19 nt, Homo sapiens
  misc_RNA (1)...(19): siRNA sense strand
gcaaaaggggaugaaguua

SEQ ID NO: 1740581 - RNA, 19 nt, Homo sapiens
  misc_RNA (1)...(19): siRNA sense strand
cggacugaauaugaaguua

SEQ ID NO: 1740582 - RNA, 19 nt, Homo sapiens
  misc_RNA (1)...(19): siRNA sense strand
uuguggaacucaucuauca

SEQ ID NO: 1740583 - RNA, 19 nt, Homo sapiens
  misc_RNA (1)...(19): siRNA sense strand
uuacaacagaugaugcuuu

SEQ ID NO: 1740584 - RNA, 19 nt, Homo sapiens
  misc_RNA (1)...(19): siRNA sense strand
gaacuuguggaacucaucu

SEQ ID NO: 1740585 - RNA, 19 nt, Homo sapiens
  misc_RNA (1)...(19): siRNA sense strand
gagauggacccagagauag

SEQ ID NO: 1740586 - RNA, 19 nt, Homo sapiens
  misc_RNA (1)...(19): siRNA sense strand
caacaggccacaucuaucc

SEQ ID NO: 1740587 - RNA, 19 nt, Homo sapiens
  misc_RNA (1)...(19): siRNA sense strand
agaugaugcuuugcaagaa

SEQ ID NO: 1740588 - RNA, 19 nt, Homo sapiens
  misc_RNA (1)...(19): siRNA sense strand
gaugagauggacccagaga

SEQ ID NO: 1740589 - RNA, 19 nt, Homo sapiens
  misc_RNA (1)...(19): siRNA sense strand
aaaguugacaggaucaguu

SEQ ID NO: 1740590 - RNA, 19 nt, Homo sapiens
  misc_RNA (1)...(19): siRNA sense strand
ggaugguugugaggauuau

SEQ ID NO: 1740591 - RNA, 19 nt, Homo sapiens
  misc_RNA (1)...(19): siRNA sense strand
uguagcuccuguauuaaug

SEQ ID NO: 1740592 - RNA, 19 nt, Homo sapiens
  misc_RNA (1)...(19): siRNA sense strand
acgauuucaugcauuugua

SEQ ID NO: 1740593 - RNA, 19 nt, Homo sapiens
  misc_RNA (1)...(19): siRNA sense strand
caaagaugucggacugaau

SEQ ID NO: 1740594 - RNA, 19 nt, Homo sapiens
  misc_RNA (1)...(19): siRNA sense strand
caauugcuacuucaaagau

SEQ ID NO: 1740595 - RNA, 19 nt, Homo sapiens
  misc_RNA (1)...(19): siRNA sense strand
ccaauugcuacuucaaaga

SEQ ID NO: 1740596 - RNA, 19 nt, Homo sapiens
  misc_RNA (1)...(19): siRNA sense strand
auccuacucuaucagaaua

SEQ ID NO: 1740597 - RNA, 19 nt, Homo sapiens
  misc_RNA (1)...(19): siRNA sense strand
cugcagcugauccagauua

SEQ ID NO: 1740598 - RNA, 19 nt, Homo sapiens
  misc_RNA (1)...(19): siRNA sense strand
cuucgagaauugcugaaug

SEQ ID NO: 1740599 - RNA, 19 nt, Homo sapiens
  misc_RNA (1)...(19): siRNA sense strand
ucagagaauugaaaacguu

SEQ ID NO: 1740600 - RNA, 19 nt, Homo sapiens
  misc_RNA (1)...(19): siRNA sense strand
gauggacccagagauagaa

SEQ ID NO: 1740601 - RNA, 19 nt, Homo sapiens
  misc_RNA (1)...(19): siRNA sense strand
guagagauguaaaacagau

SEQ ID NO: 1740602 - RNA, 19 nt, Homo sapiens
  misc_RNA (1)...(19): siRNA sense strand
ugaaaacguuguccuagau

SEQ ID NO: 1740603 - RNA, 19 nt, Homo sapiens
  misc_RNA (1)...(19): siRNA sense strand
gguuguagcuccuguauua

SEQ ID NO: 1740604 - RNA, 19 nt, Homo sapiens
  misc_RNA (1)...(19): siRNA sense strand
ccacaucuaucccaaauuu

SEQ ID NO: 1740605 - RNA, 19 nt, Homo sapiens
  misc_RNA (1)...(19): siRNA sense strand
cagaauauguucaggauuu

SEQ ID NO: 1740606 - RNA, 19 nt, Homo sapiens
  misc_RNA (1)...(19): siRNA sense strand
gauccuaacuacuuuauga

SEQ ID NO: 1740607 - RNA, 19 nt, Homo sapiens
  misc_RNA (1)...(19): siRNA sense strand
guaauuaccugucccauca

SEQ ID NO: 1740608 - RNA, 19 nt, Homo sapiens
  misc_RNA (1)...(19): siRNA sense strand
gagcucgccuguguaauua

SEQ ID NO: 1740609 - RNA, 19 nt, Homo sapiens
  misc_RNA (1)...(19): siRNA sense strand
gaagaugcuuggaaggaaa

SEQ ID NO: 1740610 - RNA, 19 nt, Homo sapiens
  misc_RNA (1)...(19): siRNA sense strand
ggaagaaauuauucagaga

SEQ ID NO: 1740611 - RNA, 19 nt, Homo sapiens
  misc_RNA (1)...(19): siRNA sense strand
gcagagacccugaaugguu

SEQ ID NO: 1740612 - RNA, 19 nt, Homo sapiens
  misc_RNA (1)...(19): siRNA sense strand
ccaaauuucucuuauaugg

SEQ ID NO: 1740613 - RNA, 19 nt, Homo sapiens
  misc_RNA (1)...(19): siRNA sense strand
caagagaaauaccaagaau

SEQ ID NO: 1740614 - RNA, 19 nt, Homo sapiens
  misc_RNA (1)...(19): siRNA sense strand
guagaacuccggucaagua

SEQ ID NO: 1740615 - RNA, 19 nt, Homo sapiens
  misc_RNA (1)...(19): siRNA sense strand
gggaugaaguuacucgaaa

SEQ ID NO: 1740616 - RNA, 19 nt, Homo sapiens
  misc_RNA (1)...(19): siRNA sense strand
ccaccuaguucacaggaua

SEQ ID NO: 1740617 - RNA, 19 nt, Homo sapiens
  misc_RNA (1)...(19): siRNA sense strand
ggaagaugcuuggaaggaa

SEQ ID NO: 1740618 - RNA, 19 nt, Homo sapiens
  misc_RNA (1)...(19): siRNA sense strand
gaacuccggucaaguaacu

SEQ ID NO: 1740619 - RNA, 19 nt, Homo sapiens
  misc_RNA (1)...(19): siRNA sense strand
ggagcucgccuguguaauu

SEQ ID NO: 1740620 - RNA, 19 nt, Homo sapiens
  misc_RNA (1)...(19): siRNA sense strand
gggaacaaauggacagguu

SEQ ID NO: 1740621 - RNA, 19 nt, Homo sapiens
  misc_RNA (1)...(19): siRNA sense strand
gauagaagaagcuuaugaa

SEQ ID NO: 1740622 - RNA, 19 nt, Homo sapiens
  misc_RNA (1)...(19): siRNA sense strand
cagauuaccaagagaaaua

SEQ ID NO: 1740623 - RNA, 19 nt, Homo sapiens
  misc_RNA (1)...(19): siRNA sense strand
ggacugaauaugaaguuaa

SEQ ID NO: 1740624 - RNA, 19 nt, Homo sapiens
  misc_RNA (1)...(19): siRNA sense strand
ugucuaagcugucugugaa

SEQ ID NO: 1740625 - RNA, 19 nt, Homo sapiens
  misc_RNA (1)...(19): siRNA sense strand
uggaugauauugaugauga

SEQ ID NO: 1740626 - RNA, 19 nt, Homo sapiens
  misc_RNA (1)...(19): siRNA sense strand
ccaugcaacuucaacauau

SEQ ID NO: 1740627 - RNA, 19 nt, Homo sapiens
  misc_RNA (1)...(19): siRNA sense strand
aaagaugucggacugaaua

SEQ ID NO: 1740628 - RNA, 19 nt, Homo sapiens
  misc_RNA (1)...(19): siRNA sense strand
aaacugcaguagagaugua

SEQ ID NO: 1740629 - RNA, 19 nt, Homo sapiens
  misc_RNA (1)...(19): siRNA sense strand
ggaacaaauggacagguua

SEQ ID NO: 1740630 - RNA, 19 nt, Homo sapiens
  misc_RNA (1)...(19): siRNA sense strand
ugagauggacccagagaua

SEQ ID NO: 1740631 - RNA, 19 nt, Homo sapiens
  misc_RNA (1)...(19): siRNA sense strand
gaaagauggauauggaaga

SEQ ID NO: 1740632 - RNA, 19 nt, Homo sapiens
  misc_RNA (1)...(19): siRNA sense strand
caugcaacuucaacauaua

SEQ ID NO: 1740633 - RNA, 19 nt, Homo sapiens
  misc_RNA (1)...(19): siRNA sense strand
uacaacagaugaugcuuug

SEQ ID NO: 1740634 - RNA, 19 nt, Homo sapiens
  misc_RNA (1)...(19): siRNA sense strand
aaagauggauauggaagaa

SEQ ID NO: 1740635 - RNA, 19 nt, Homo sapiens
  misc_RNA (1)...(19): siRNA sense strand
aaggaaagauggauaugga

SEQ ID NO: 1740636 - RNA, 19 nt, Homo sapiens
  misc_RNA (1)...(19): siRNA sense strand
uccuauggaugacaauuua

SEQ ID NO: 1740637 - RNA, 19 nt, Homo sapiens
  misc_RNA (1)...(19): siRNA sense strand
uaugggagcucgccugugu

SEQ ID NO: 1740638 - RNA, 19 nt, Homo sapiens
  misc_RNA (1)...(19): siRNA sense strand
cagguuauucuuccaguua

SEQ ID NO: 1740639 - RNA, 19 nt, Homo sapiens
  misc_RNA (1)...(19): siRNA sense strand
ugaaugcccuguuuucuaa

SEQ ID NO: 1740640 - RNA, 19 nt, Homo sapiens
  misc_RNA (1)...(19): siRNA sense strand
gaugucggacugaauauga

SEQ ID NO: 1740641 - RNA, 19 nt, Homo sapiens
  misc_RNA (1)...(19): siRNA sense strand
ucaaagaugucggacugaa

SEQ ID NO: 1740642 - RNA, 19 nt, Homo sapiens
  misc_RNA (1)...(19): siRNA sense strand
caacuuccgccaauugcua

SEQ ID NO: 1740643 - RNA, 19 nt, Homo sapiens
  misc_RNA (1)...(19): siRNA sense strand
gcaaacugcaguagagaug

SEQ ID NO: 1740644 - RNA, 19 nt, Homo sapiens
  misc_RNA (1)...(19): siRNA sense strand
ggccacaucuaucccaaau

SEQ ID NO: 1740645 - RNA, 19 nt, Homo sapiens
  misc_RNA (1)...(19): siRNA sense strand
aaucagagcguaagcgaaa

SEQ ID NO: 1740646 - RNA, 19 nt, Homo sapiens
  misc_RNA (1)...(19): siRNA sense strand
agaagaagcuuaugaaaag

SEQ ID NO: 1740647 - RNA, 19 nt, Homo sapiens
  misc_RNA (1)...(19): siRNA sense strand
gaggaugguugugaggauu

SEQ ID NO: 1740648 - RNA, 19 nt, Homo sapiens
  misc_RNA (1)...(19): siRNA sense strand
gcuccuguauuaaugucua

SEQ ID NO: 1740649 - RNA, 19 nt, Homo sapiens
  misc_RNA (1)...(19): siRNA sense strand
gaacaaauggacagguuac

SEQ ID NO: 1740650 - RNA, 19 nt, Homo sapiens
  misc_RNA (1)...(19): siRNA sense strand
ccugagagcuccaccuagu

SEQ ID NO: 1740651 - RNA, 19 nt, Homo sapiens
  misc_RNA (1)...(19): siRNA sense strand
ugauauugaugaugagaug

SEQ ID NO: 1740652 - RNA, 19 nt, Homo sapiens
  misc_RNA (1)...(19): siRNA sense strand
caacuucaacauauagaga

SEQ ID NO: 1740653 - RNA, 19 nt, Homo sapiens
  misc_RNA (1)...(19): siRNA sense strand
ccuaacuacuuuaugaaug

SEQ ID NO: 1740654 - RNA, 19 nt, Homo sapiens
  misc_RNA (1)...(19): siRNA sense strand
ggagaucaagggaacaaau

SEQ ID NO: 1740655 - RNA, 19 nt, Homo sapiens
  misc_RNA (1)...(19): siRNA sense strand
gagaucaagggaacaaaug

SEQ ID NO: 1740656 - RNA, 19 nt, Homo sapiens
  misc_RNA (1)...(19): siRNA sense strand
caacagaugaugcuuugca

SEQ ID NO: 1740657 - RNA, 19 nt, Homo sapiens
  misc_RNA (1)...(19): siRNA sense strand
gccaauugcuacuucaaag

SEQ ID NO: 1740658 - RNA, 19 nt, Homo sapiens
  misc_RNA (1)...(19): siRNA sense strand
cagaugaugcuuugcaaga

SEQ ID NO: 1740659 - RNA, 19 nt, Homo sapiens
  misc_RNA (1)...(19): siRNA sense strand
ccaagagaaauaccaagaa

SEQ ID NO: 1740660 - RNA, 19 nt, Homo sapiens
  misc_RNA (1)...(19): siRNA sense strand
cagagcagccuggcaguuu

SEQ ID NO: 1740661 - RNA, 19 nt, Homo sapiens
  misc_RNA (1)...(19): siRNA sense strand
ggacccagagauagaagaa

SEQ ID NO: 1740662 - RNA, 19 nt, Homo sapiens
  misc_RNA (1)...(19): siRNA sense strand
agauggauauggaagaaau

SEQ ID NO: 1740663 - RNA, 19 nt, Homo sapiens
  misc_RNA (1)...(19): siRNA sense strand
caaauggacagguuacaag

SEQ ID NO: 1740664 - RNA, 19 nt, Homo sapiens
  misc_RNA (1)...(19): siRNA sense strand
ugaaugccccugaauuuua

SEQ ID NO: 1740665 - RNA, 19 nt, Homo sapiens
  misc_RNA (1)...(19): siRNA sense strand
uuaaagaucaagcugcaaa

SEQ ID NO: 1740666 - RNA, 19 nt, Homo sapiens
  misc_RNA (1)...(19): siRNA sense strand
agagauagaagaagcuuau

SEQ ID NO: 1740667 - RNA, 19 nt, Homo sapiens
  misc_RNA (1)...(19): siRNA sense strand
gcagaguccaugcaacuuc

SEQ ID NO: 1740668 - RNA, 19 nt, Homo sapiens
  misc_RNA (1)...(19): siRNA sense strand
ucagguuggucuucgagaa

SEQ ID NO: 1740669 - RNA, 19 nt, Homo sapiens
  misc_RNA (1)...(19): siRNA sense strand
gaugaugcuuugcaagaac

SEQ ID NO: 1740670 - RNA, 19 nt, Homo sapiens
  misc_RNA (1)...(19): siRNA sense strand
gaagaaaauggaacagauu

SEQ ID NO: 1740671 - RNA, 19 nt, Homo sapiens
  misc_RNA (1)...(19): siRNA sense strand
cagaguccaugcaacuuca

SEQ ID NO: 1740672 - RNA, 19 nt, Homo sapiens
  misc_RNA (1)...(19): siRNA sense strand
cccaucaucugacaauuag

SEQ ID NO: 1740673 - RNA, 19 nt, Homo sapiens
  misc_RNA (1)...(19): siRNA sense strand
ucccaucaucugacaauua

SEQ ID NO: 1740674 - RNA, 19 nt, Homo sapiens
  misc_RNA (1)...(19): siRNA sense strand
gaucaagggaacaaaugga

SEQ ID NO: 1740675 - RNA, 19 nt, Homo sapiens
  misc_RNA (1)...(19): siRNA sense strand
ccaguuacacagaauccua

SEQ ID NO: 1740676 - RNA, 19 nt, Homo sapiens
  misc_RNA (1)...(19): siRNA sense strand
gauccagauuaccaagaga

SEQ ID NO: 1740677 - RNA, 19 nt, Homo sapiens
  misc_RNA (1)...(19): siRNA sense strand
ggaugaaguuacucgaaaa

SEQ ID NO: 1740678 - RNA, 19 nt, Homo sapiens
  misc_RNA (1)...(19): siRNA sense strand
uagagaagcaacaccagaa

SEQ ID NO: 1740679 - RNA, 19 nt, Homo sapiens
  misc_RNA (1)...(19): siRNA sense strand
gacccugaaugguuguguu

SEQ ID NO: 1740680 - RNA, 19 nt, Homo sapiens
  misc_RNA (1)...(19): siRNA sense strand
gcaaaaggggaugaaguua

SEQ ID NO: 1740681 - RNA, 19 nt, Homo sapiens
  misc_RNA (1)...(19): siRNA sense strand
cggacugaauaugaaguua

SEQ ID NO: 1740682 - RNA, 19 nt, Homo sapiens
  misc_RNA (1)...(19): siRNA sense strand
uuguggaacucaucuauca

SEQ ID NO: 1740683 - RNA, 19 nt, Homo sapiens
  misc_RNA (1)...(19): siRNA sense strand
uuacaacagaugaugcuuu

SEQ ID NO: 1740684 - RNA, 19 nt, Homo sapiens
  misc_RNA (1)...(19): siRNA sense strand
gaacuuguggaacucaucu

SEQ ID NO: 1740685 - RNA, 19 nt, Homo sapiens
  misc_RNA (1)...(19): siRNA sense strand
gagauggacccagagauag

SEQ ID NO: 1740686 - RNA, 19 nt, Homo sapiens
  misc_RNA (1)...(19): siRNA sense strand
caacaggccacaucuaucc

SEQ ID NO: 1740687 - RNA, 19 nt, Homo sapiens
  misc_RNA (1)...(19): siRNA sense strand
agaugaugcuuugcaagaa

SEQ ID NO: 1740688 - RNA, 19 nt, Homo sapiens
  misc_RNA (1)...(19): siRNA sense strand
gaugagauggacccagaga

SEQ ID NO: 1740689 - RNA, 19 nt, Homo sapiens
  misc_RNA (1)...(19): siRNA sense strand
aaaguugacaggaucaguu

SEQ ID NO: 1740690 - RNA, 19 nt, Homo sapiens
  misc_RNA (1)...(19): siRNA sense strand
ggaugguugugaggauuau

SEQ ID NO: 1740691 - RNA, 19 nt, Homo sapiens
  misc_RNA (1)...(19): siRNA sense strand
uguagcuccuguauuaaug

SEQ ID NO: 1740692 - RNA, 19 nt, Homo sapiens
  misc_RNA (1)...(19): siRNA sense strand
acgauuucaugcauuugua

SEQ ID NO: 1740693 - RNA, 19 nt, Homo sapiens
  misc_RNA (1)...(19): siRNA sense strand
caaagaugucggacugaau

SEQ ID NO: 1740694 - RNA, 19 nt, Homo sapiens
  misc_RNA (1)...(19): siRNA sense strand
caauugcuacuucaaagau

SEQ ID NO: 1740695 - RNA, 19 nt, Homo sapiens
  misc_RNA (1)...(19): siRNA sense strand
ccaauugcuacuucaaaga

SEQ ID NO: 1740696 - RNA, 19 nt, Homo sapiens
  misc_RNA (1)...(19): siRNA sense strand
auccuacucuaucagaaua

SEQ ID NO: 1740697 - RNA, 19 nt, Homo sapiens
  misc_RNA (1)...(19): siRNA sense strand
cugcagcugauccagauua

SEQ ID NO: 1740698 - RNA, 19 nt, Homo sapiens
  misc_RNA (1)...(19): siRNA sense strand
cuucgagaauugcugaaug

SEQ ID NO: 1740699 - RNA, 19 nt, Homo sapiens
  misc_RNA (1)...(19): siRNA sense strand
ucagagaauugaaaacguu

SEQ ID NO: 1740700 - RNA, 19 nt, Homo sapiens
  misc_RNA (1)...(19): siRNA sense strand
gauggacccagagauagaa

SEQ ID NO: 1740701 - RNA, 19 nt, Homo sapiens
  misc_RNA (1)...(19): siRNA sense strand
guagagauguaaaacagau

SEQ ID NO: 1740702 - RNA, 19 nt, Homo sapiens
  misc_RNA (1)...(19): siRNA sense strand
ugaaaacguuguccuagau

SEQ ID NO: 1740703 - RNA, 19 nt, Homo sapiens
  misc_RNA (1)...(19): siRNA sense strand
gguuguagcuccuguauua

SEQ ID NO: 1740704 - RNA, 19 nt, Homo sapiens
  misc_RNA (1)...(19): siRNA sense strand
ccacaucuaucccaaauuu

SEQ ID NO: 1740705 - RNA, 19 nt, Homo sapiens
  misc_RNA (1)...(19): siRNA sense strand
cagaauauguucaggauuu

SEQ ID NO: 1740706 - RNA, 19 nt, Homo sapiens
  misc_RNA (1)...(19): siRNA sense strand
gauccuaacuacuuuauga

SEQ ID NO: 1740707 - RNA, 19 nt, Homo sapiens
  misc_RNA (1)...(19): siRNA sense strand
guaauuaccugucccauca

SEQ ID NO: 1740708 - RNA, 19 nt, Homo sapiens
  misc_RNA (1)...(19): siRNA sense strand
gagcucgccuguguaauua

SEQ ID NO: 1740709 - RNA, 19 nt, Homo sapiens
  misc_RNA (1)...(19): siRNA sense strand
gaagaugcuuggaaggaaa

SEQ ID NO: 1740710 - RNA, 19 nt, Homo sapiens
  misc_RNA (1)...(19): siRNA sense strand
ggaagaaauuauucagaga

SEQ ID NO: 1740711 - RNA, 19 nt, Homo sapiens
  misc_RNA (1)...(19): siRNA sense strand
gcagagacccugaaugguu

SEQ ID NO: 1740712 - RNA, 19 nt, Homo sapiens
  misc_RNA (1)...(19): siRNA sense strand
ccaaauuucucuuauaugg

SEQ ID NO: 1740713 - RNA, 19 nt, Homo sapiens
  misc_RNA (1)...(19): siRNA sense strand
caagagaaauaccaagaau

SEQ ID NO: 1740714 - RNA, 19 nt, Homo sapiens
  misc_RNA (1)...(19): siRNA sense strand
guagaacuccggucaagua

SEQ ID NO: 1740715 - RNA, 19 nt, Homo sapiens
  misc_RNA (1)...(19): siRNA sense strand
gggaugaaguuacucgaaa

SEQ ID NO: 1740716 - RNA, 19 nt, Homo sapiens
  misc_RNA (1)...(19): siRNA sense strand
ggaagaugcuuggaaggaa

SEQ ID NO: 1740717 - RNA, 19 nt, Homo sapiens
  misc_RNA (1)...(19): siRNA sense strand
gaacuccggucaaguaacu

SEQ ID NO: 1740718 - RNA, 19 nt, Homo sapiens
  misc_RNA (1)...(19): siRNA sense strand
ggagcucgccuguguaauu

SEQ ID NO: 1740719 - RNA, 19 nt, Homo sapiens
  misc_RNA (1)...(19): siRNA sense strand
gggaacaaauggacagguu

SEQ ID NO: 1740720 - RNA, 19 nt, Homo sapiens
  misc_RNA (1)...(19): siRNA sense strand
gauagaagaagcuuaugaa

SEQ ID NO: 1740721 - RNA, 19 nt, Homo sapiens
  misc_RNA (1)...(19): siRNA sense strand
cagauuaccaagagaaaua

SEQ ID NO: 1740722 - RNA, 19 nt, Homo sapiens
  misc_RNA (1)...(19): siRNA sense strand
ggacugaauaugaaguuaa

SEQ ID NO: 1740723 - RNA, 19 nt, Homo sapiens
  misc_RNA (1)...(19): siRNA sense strand
ugucuaagcugucugugaa

SEQ ID NO: 1740724 - RNA, 19 nt, Homo sapiens
  misc_RNA (1)...(19): siRNA sense strand
uggaugauauugaugauga

SEQ ID NO: 1740725 - RNA, 19 nt, Homo sapiens
  misc_RNA (1)...(19): siRNA sense strand
ccaugcaacuucaacauau

SEQ ID NO: 1740726 - RNA, 19 nt, Homo sapiens
  misc_RNA (1)...(19): siRNA sense strand
aaagaugucggacugaaua

SEQ ID NO: 1740727 - RNA, 19 nt, Homo sapiens
  misc_RNA (1)...(19): siRNA sense strand
aaacugcaguagagaugua

SEQ ID NO: 1740728 - RNA, 19 nt, Homo sapiens
  misc_RNA (1)...(19): siRNA sense strand
ggaacaaauggacagguua

SEQ ID NO: 1740729 - RNA, 19 nt, Homo sapiens
  misc_RNA (1)...(19): siRNA sense strand
ugagauggacccagagaua

SEQ ID NO: 1740730 - RNA, 19 nt, Homo sapiens
  misc_RNA (1)...(19): siRNA sense strand
gaaagauggauauggaaga

SEQ ID NO: 1740731 - RNA, 19 nt, Homo sapiens
  misc_RNA (1)...(19): siRNA sense strand
caugcaacuucaacauaua

SEQ ID NO: 1740732 - RNA, 19 nt, Homo sapiens
  misc_RNA (1)...(19): siRNA sense strand
uacaacagaugaugcuuug

SEQ ID NO: 1740733 - RNA, 19 nt, Homo sapiens
  misc_RNA (1)...(19): siRNA sense strand
aaagauggauauggaagaa

SEQ ID NO: 1740734 - RNA, 19 nt, Homo sapiens
  misc_RNA (1)...(19): siRNA sense strand
aaggaaagauggauaugga

SEQ ID NO: 1740735 - RNA, 19 nt, Homo sapiens
  misc_RNA (1)...(19): siRNA sense strand
uccuauggaugacaauuua

SEQ ID NO: 1740736 - RNA, 19 nt, Homo sapiens
  misc_RNA (1)...(19): siRNA sense strand
uaugggagcucgccugugu

SEQ ID NO: 1740737 - RNA, 19 nt, Homo sapiens
  misc_RNA (1)...(19): siRNA sense strand
cagguuauucuuccaguua

SEQ ID NO: 1740738 - RNA, 19 nt, Homo sapiens
  misc_RNA (1)...(19): siRNA sense strand
ugaaugcccuguuuucuaa

SEQ ID NO: 1740739 - RNA, 19 nt, Homo sapiens
  misc_RNA (1)...(19): siRNA sense strand
gaugucggacugaauauga

SEQ ID NO: 1740740 - RNA, 19 nt, Homo sapiens
  misc_RNA (1)...(19): siRNA sense strand
ucaaagaugucggacugaa

SEQ ID NO: 1740741 - RNA, 19 nt, Homo sapiens
  misc_RNA (1)...(19): siRNA sense strand
caacuuccgccaauugcua

SEQ ID NO: 1740742 - RNA, 19 nt, Homo sapiens
  misc_RNA (1)...(19): siRNA sense strand
gcaaacugcaguagagaug

SEQ ID NO: 1740743 - RNA, 19 nt, Homo sapiens
  misc_RNA (1)...(19): siRNA sense strand
ggccacaucuaucccaaau

SEQ ID NO: 1740744 - RNA, 19 nt, Homo sapiens
  misc_RNA (1)...(19): siRNA sense strand
aaucagagcguaagcgaaa

SEQ ID NO: 1740745 - RNA, 19 nt, Homo sapiens
  misc_RNA (1)...(19): siRNA sense strand
agaagaagcuuaugaaaag

SEQ ID NO: 1740746 - RNA, 19 nt, Homo sapiens
  misc_RNA (1)...(19): siRNA sense strand
gaggaugguugugaggauu

SEQ ID NO: 1740747 - RNA, 19 nt, Homo sapiens
  misc_RNA (1)...(19): siRNA sense strand
gaacaaauggacagguuac

SEQ ID NO: 1740748 - RNA, 19 nt, Homo sapiens
  misc_RNA (1)...(19): siRNA sense strand
gcuccuguauuaaugucua

SEQ ID NO: 1740749 - RNA, 19 nt, Homo sapiens
  misc_RNA (1)...(19): siRNA sense strand
caacuucaacauauagaga

SEQ ID NO: 1740750 - RNA, 19 nt, Homo sapiens
  misc_RNA (1)...(19): siRNA sense strand
ugauauugaugaugagaug

SEQ ID NO: 1740751 - RNA, 19 nt, Homo sapiens
  misc_RNA (1)...(19): siRNA sense strand
ccuaacuacuuuaugaaug

SEQ ID NO: 1740752 - RNA, 19 nt, Homo sapiens
  misc_RNA (1)...(19): siRNA sense strand
ggagaucaagggaacaaau

SEQ ID NO: 1740753 - RNA, 19 nt, Homo sapiens
  misc_RNA (1)...(19): siRNA sense strand
gagaucaagggaacaaaug

SEQ ID NO: 1740754 - RNA, 19 nt, Homo sapiens
  misc_RNA (1)...(19): siRNA sense strand
caacagaugaugcuuugca

SEQ ID NO: 1740755 - RNA, 19 nt, Homo sapiens
  misc_RNA (1)...(19): siRNA sense strand
gccaauugcuacuucaaag

SEQ ID NO: 1740756 - RNA, 19 nt, Homo sapiens
  misc_RNA (1)...(19): siRNA sense strand
cagaugaugcuuugcaaga

SEQ ID NO: 1740757 - RNA, 19 nt, Homo sapiens
  misc_RNA (1)...(19): siRNA sense strand
ccaagagaaauaccaagaa

SEQ ID NO: 1740758 - RNA, 19 nt, Homo sapiens
  misc_RNA (1)...(19): siRNA sense strand
cagagcagccuggcaguuu

SEQ ID NO: 1740759 - RNA, 19 nt, Homo sapiens
  misc_RNA (1)...(19): siRNA sense strand
ggacccagagauagaagaa

SEQ ID NO: 1740760 - RNA, 19 nt, Homo sapiens
  misc_RNA (1)...(19): siRNA sense strand
agauggauauggaagaaau

SEQ ID NO: 1740761 - RNA, 19 nt, Homo sapiens
  misc_RNA (1)...(19): siRNA sense strand
ugaaugccccugaauuuua

SEQ ID NO: 1740762 - RNA, 19 nt, Homo sapiens
  misc_RNA (1)...(19): siRNA sense strand
caaauggacagguuacaag

SEQ ID NO: 1740763 - RNA, 19 nt, Homo sapiens
  misc_RNA (1)...(19): siRNA sense strand
uuaaagaucaagcugcaaa

SEQ ID NO: 1740764 - RNA, 19 nt, Homo sapiens
  misc_RNA (1)...(19): siRNA sense strand
agagauagaagaagcuuau

SEQ ID NO: 1740765 - RNA, 19 nt, Homo sapiens
  misc_RNA (1)...(19): siRNA sense strand
gcagaguccaugcaacuuc

SEQ ID NO: 1740766 - RNA, 19 nt, Homo sapiens
  misc_RNA (1)...(19): siRNA sense strand
ucagguuggucuucgagaa

SEQ ID NO: 1740767 - RNA, 19 nt, Homo sapiens
  misc_RNA (1)...(19): siRNA sense strand
gaugaugcuuugcaagaac

SEQ ID NO: 1740768 - RNA, 19 nt, Homo sapiens
  misc_RNA (1)...(19): siRNA sense strand
gaagaaaauggaacagauu

SEQ ID NO: 1740769 - RNA, 19 nt, Homo sapiens
  misc_RNA (1)...(19): siRNA sense strand
cagaguccaugcaacuuca

SEQ ID NO: 1740770 - RNA, 19 nt, Homo sapiens
  misc_RNA (1)...(19): siRNA sense strand
cccaucaucugacaauuag

SEQ ID NO: 1740771 - RNA, 19 nt, Homo sapiens
  misc_RNA (1)...(19): siRNA sense strand
ucccaucaucugacaauua

SEQ ID NO: 1740772 - RNA, 19 nt, Homo sapiens
  misc_RNA (1)...(19): siRNA sense strand
gaucaagggaacaaaugga

SEQ ID NO: 1740773 - RNA, 19 nt, Homo sapiens
  misc_RNA (1)...(19): siRNA sense strand
ccaguuacacagaauccua

SEQ ID NO: 1740774 - RNA, 19 nt, Homo sapiens
  misc_RNA (1)...(19): siRNA sense strand
gauccagauuaccaagaga

SEQ ID NO: 1740775 - RNA, 19 nt, Homo sapiens
  misc_RNA (1)...(19): siRNA sense strand
ggaugaaguuacucgaaaa

SEQ ID NO: 1740776 - RNA, 19 nt, Homo sapiens
  misc_RNA (1)...(19): siRNA sense strand
uagagaagcaacaccagaa

SEQ ID NO: 1740777 - RNA, 19 nt, Homo sapiens
  misc_RNA (1)...(19): siRNA sense strand
gacccugaaugguuguguu

SEQ ID NO: 1740778 - RNA, 19 nt, Homo sapiens
  misc_RNA (1)...(19): siRNA sense strand
gcaaaaggggaugaaguua

SEQ ID NO: 1740779 - RNA, 19 nt, Homo sapiens
  misc_RNA (1)...(19): siRNA sense strand
cggacugaauaugaaguua

SEQ ID NO: 1740780 - RNA, 19 nt, Homo sapiens
  misc_RNA (1)...(19): siRNA sense strand
uuguggaacucaucuauca

SEQ ID NO: 1740781 - RNA, 19 nt, Homo sapiens
  misc_RNA (1)...(19): siRNA sense strand
uuacaacagaugaugcuuu

SEQ ID NO: 1740782 - RNA, 19 nt, Homo sapiens
  misc_RNA (1)...(19): siRNA sense strand
gaacuuguggaacucaucu

SEQ ID NO: 1740783 - RNA, 19 nt, Homo sapiens
  misc_RNA (1)...(19): siRNA sense strand
gagauggacccagagauag

SEQ ID NO: 1740784 - RNA, 19 nt, Homo sapiens
  misc_RNA (1)...(19): siRNA sense strand
caacaggccacaucuaucc

SEQ ID NO: 1740785 - RNA, 19 nt, Homo sapiens
  misc_RNA (1)...(19): siRNA sense strand
agaugaugcuuugcaagaa

SEQ ID NO: 1740786 - RNA, 19 nt, Homo sapiens
  misc_RNA (1)...(19): siRNA sense strand
gaugagauggacccagaga

SEQ ID NO: 1740787 - RNA, 19 nt, Homo sapiens
  misc_RNA (1)...(19): siRNA sense strand
uguagcuccuguauuaaug

SEQ ID NO: 1740788 - RNA, 19 nt, Homo sapiens
  misc_RNA (1)...(19): siRNA sense strand
aaaguugacaggaucaguu

SEQ ID NO: 1740789 - RNA, 19 nt, Homo sapiens
  misc_RNA (1)...(19): siRNA sense strand
acgauuucaugcauuugua

SEQ ID NO: 1740790 - RNA, 19 nt, Homo sapiens
  misc_RNA (1)...(19): siRNA sense strand
ggaugguugugaggauuau

SEQ ID NO: 1740791 - RNA, 19 nt, Homo sapiens
  misc_RNA (1)...(19): siRNA sense strand
caaagaugucggacugaau

SEQ ID NO: 1740792 - RNA, 19 nt, Homo sapiens
  misc_RNA (1)...(19): siRNA sense strand
caauugcuacuucaaagau

SEQ ID NO: 1740793 - RNA, 19 nt, Homo sapiens
  misc_RNA (1)...(19): siRNA sense strand
ccaauugcuacuucaaaga

SEQ ID NO: 1740794 - RNA, 19 nt, Homo sapiens
  misc_RNA (1)...(19): siRNA sense strand
auccuacucuaucagaaua

SEQ ID NO: 1740795 - RNA, 19 nt, Homo sapiens
  misc_RNA (1)...(19): siRNA sense strand
cugcagcugauccagauua

SEQ ID NO: 1740796 - RNA, 19 nt, Homo sapiens
  misc_RNA (1)...(19): siRNA sense strand
cuucgagaauugcugaaug

SEQ ID NO: 1740797 - RNA, 19 nt, Homo sapiens
  misc_RNA (1)...(19): siRNA sense strand
ccugaaugguuguguuaca

SEQ ID NO: 1740798 - RNA, 19 nt, Homo sapiens
  misc_RNA (1)...(19): siRNA sense strand
gauggacccagagauagaa

SEQ ID NO: 1740799 - RNA, 19 nt, Homo sapiens
  misc_RNA (1)...(19): siRNA sense strand
guagagauguaaaacagau

SEQ ID NO: 1740800 - RNA, 19 nt, Homo sapiens
  misc_RNA (1)...(19): siRNA sense strand
ugaaaacguuguccuagau

SEQ ID NO: 1740801 - RNA, 19 nt, Homo sapiens
  misc_RNA (1)...(19): siRNA sense strand
ucagagaauugaaaacguu

SEQ ID NO: 1740802 - RNA, 19 nt, Homo sapiens
  misc_RNA (1)...(19): siRNA sense strand
agauagaagaagcuuauga

SEQ ID NO: 1740803 - RNA, 19 nt, Homo sapiens
  misc_RNA (1)...(19): siRNA sense strand
caacacggcugccaggaua

SEQ ID NO: 1740804 - RNA, 19 nt, Homo sapiens
  misc_RNA (1)...(19): siRNA sense strand
gcaccgaccugaagaagaa

SEQ ID NO: 1740805 - RNA, 19 nt, Homo sapiens
  misc_RNA (1)...(19): siRNA sense strand
ggaauucgguguaucagau

SEQ ID NO: 1740806 - RNA, 19 nt, Homo sapiens
  misc_RNA (1)...(19): siRNA sense strand
gacaaaggauccauucaga

SEQ ID NO: 1740807 - RNA, 19 nt, Homo sapiens
  misc_RNA (1)...(19): siRNA sense strand
gaagcugccuaucgucaau

SEQ ID NO: 1740808 - RNA, 19 nt, Homo sapiens
  misc_RNA (1)...(19): siRNA sense strand
gcacugcuguguacaaggu

SEQ ID NO: 1740809 - RNA, 19 nt, Homo sapiens
  misc_RNA (1)...(19): siRNA sense strand
gaaagaggcaaaugagauc

SEQ ID NO: 1740810 - RNA, 19 nt, Homo sapiens
  misc_RNA (1)...(19): siRNA sense strand
gggugcggcucaagaagua

SEQ ID NO: 1740811 - RNA, 19 nt, Homo sapiens
  misc_RNA (1)...(19): siRNA sense strand
gaugggagguauugguuuc

SEQ ID NO: 1740812 - RNA, 19 nt, Homo sapiens
  misc_RNA (1)...(19): siRNA sense strand
gcgaguacuucuucucaga

SEQ ID NO: 1740813 - RNA, 19 nt, Homo sapiens
  misc_RNA (1)...(19): siRNA sense strand
gccaagaaccugauugaug

SEQ ID NO: 1740814 - RNA, 19 nt, Homo sapiens
  misc_RNA (1)...(19): siRNA sense strand
uccauggccugcacucuua

SEQ ID NO: 1740815 - RNA, 19 nt, Homo sapiens
  misc_RNA (1)...(19): siRNA sense strand
cuacaacgacuuccugauu

SEQ ID NO: 1740816 - RNA, 19 nt, Homo sapiens
  misc_RNA (1)...(19): siRNA sense strand
ggccugcacucuuacgaaa

SEQ ID NO: 1740817 - RNA, 19 nt, Homo sapiens
  misc_RNA (1)...(19): siRNA sense strand
cagcaggugugacguugaa

SEQ ID NO: 1740818 - RNA, 19 nt, Homo sapiens
  misc_RNA (1)...(19): siRNA sense strand
uguacaagguggcugagua

SEQ ID NO: 1740819 - RNA, 19 nt, Homo sapiens
  misc_RNA (1)...(19): siRNA sense strand
cauggugcauuacaucaaa

SEQ ID NO: 1740820 - RNA, 19 nt, Homo sapiens
  misc_RNA (1)...(19): siRNA sense strand
caaaggauccauucagaag

SEQ ID NO: 1740821 - RNA, 19 nt, Homo sapiens
  misc_RNA (1)...(19): siRNA sense strand
guucgugcccuaccucaua

SEQ ID NO: 1740822 - RNA, 19 nt, Homo sapiens
  misc_RNA (1)...(19): siRNA sense strand
acaccacccuccucaguga

SEQ ID NO: 1740823 - RNA, 19 nt, Homo sapiens
  misc_RNA (1)...(19): siRNA sense strand
ggacaaaggauccauucag

SEQ ID NO: 1740824 - RNA, 19 nt, Homo sapiens
  misc_RNA (1)...(19): siRNA sense strand
ccaagggaauucgguguau

SEQ ID NO: 1740825 - RNA, 19 nt, Homo sapiens
  misc_RNA (1)...(19): siRNA sense strand
aaggauccauucagaaguu

SEQ ID NO: 1740826 - RNA, 19 nt, Homo sapiens
  misc_RNA (1)...(19): siRNA sense strand
guacaagguggcugaguau

SEQ ID NO: 1740827 - RNA, 19 nt, Homo sapiens
  misc_RNA (1)...(19): siRNA sense strand
gcagcagccagaaacgaua

SEQ ID NO: 1740828 - RNA, 19 nt, Homo sapiens
  misc_RNA (1)...(19): siRNA sense strand
ugaaagaggcaaaugagau

SEQ ID NO: 1740829 - RNA, 19 nt, Homo sapiens
  misc_RNA (1)...(19): siRNA sense strand
ccucuggccuccaaggauu

SEQ ID NO: 1740830 - RNA, 19 nt, Homo sapiens
  misc_RNA (1)...(19): siRNA sense strand
uacaacgacuuccugauuc

SEQ ID NO: 1740831 - RNA, 19 nt, Homo sapiens
  misc_RNA (1)...(19): siRNA sense strand
gagcagcagcagccagaaa

SEQ ID NO: 1740832 - RNA, 19 nt, Homo sapiens
  misc_RNA (1)...(19): siRNA sense strand
ugcauuacaucaaacagaa

SEQ ID NO: 1740833 - RNA, 19 nt, Homo sapiens
  misc_RNA (1)...(19): siRNA sense strand
gggagguauugguuucauu

SEQ ID NO: 1740834 - RNA, 19 nt, Homo sapiens
  misc_RNA (1)...(19): siRNA sense strand
ggagguauugguuucauuc

SEQ ID NO: 1740835 - RNA, 19 nt, Homo sapiens
  misc_RNA (1)...(19): siRNA sense strand
ccagggcacugcuguguac

SEQ ID NO: 1740836 - RNA, 19 nt, Homo sapiens
  misc_RNA (1)...(19): siRNA sense strand
agaucgccauggugcauua

SEQ ID NO: 1740837 - RNA, 19 nt, Homo sapiens
  misc_RNA (1)...(19): siRNA sense strand
ccucauagcaggcauccaa

SEQ ID NO: 1740838 - RNA, 19 nt, Homo sapiens
  misc_RNA (1)...(19): siRNA sense strand
cgagacaucgacuuucuug

SEQ ID NO: 1740839 - RNA, 19 nt, Homo sapiens
  misc_RNA (1)...(19): siRNA sense strand
gugaugacgccaaggauug

SEQ ID NO: 1740840 - RNA, 19 nt, Homo sapiens
  misc_RNA (1)...(19): siRNA sense strand
cggaagaucacgcugaaga

SEQ ID NO: 1740841 - RNA, 19 nt, Homo sapiens
  misc_RNA (1)...(19): siRNA sense strand
gauucucccaggauucaua

SEQ ID NO: 1740842 - RNA, 19 nt, Homo sapiens
  misc_RNA (1)...(19): siRNA sense strand
cagcagcccaggccaagaa

SEQ ID NO: 1740843 - RNA, 19 nt, Homo sapiens
  misc_RNA (1)...(19): siRNA sense strand
guccuucgguccaugaugu

SEQ ID NO: 1740844 - RNA, 19 nt, Homo sapiens
  misc_RNA (1)...(19): siRNA sense strand
gcccugacccggaagauca

SEQ ID NO: 1740845 - RNA, 19 nt, Homo sapiens
  misc_RNA (1)...(19): siRNA sense strand
ggugaugacgccaaggauu

SEQ ID NO: 1740846 - RNA, 19 nt, Homo sapiens
  misc_RNA (1)...(19): siRNA sense strand
cccgugaggaugacaaaua

SEQ ID NO: 1740847 - RNA, 19 nt, Homo sapiens
  misc_RNA (1)...(19): siRNA sense strand
ggaagcugccuaucgucaa

SEQ ID NO: 1740848 - RNA, 19 nt, Homo sapiens
  misc_RNA (1)...(19): siRNA sense strand
gcucugaugggagguauug

SEQ ID NO: 1740849 - RNA, 19 nt, Homo sapiens
  misc_RNA (1)...(19): siRNA sense strand
gauugagggugguguccau

SEQ ID NO: 1740850 - RNA, 19 nt, Homo sapiens
  misc_RNA (1)...(19): siRNA sense strand
gggcaugggcucacuggau

SEQ ID NO: 1740851 - RNA, 19 nt, Homo sapiens
  misc_RNA (1)...(19): siRNA sense strand
gaggugaugacgccaagga

SEQ ID NO: 1740852 - RNA, 19 nt, Homo sapiens
  misc_RNA (1)...(19): siRNA sense strand
acaaaggauccauucagaa

SEQ ID NO: 1740853 - RNA, 19 nt, Homo sapiens
  misc_RNA (1)...(19): siRNA sense strand
agaaagggaagcugccuau

SEQ ID NO: 1740854 - RNA, 19 nt, Homo sapiens
  misc_RNA (1)...(19): siRNA sense strand
gggcacugcuguguacaag

SEQ ID NO: 1740855 - RNA, 19 nt, Homo sapiens
  misc_RNA (1)...(19): siRNA sense strand
caagggaauucgguguauc

SEQ ID NO: 1740856 - RNA, 19 nt, Homo sapiens
  misc_RNA (1)...(19): siRNA sense strand
aagggaagcugccuaucgu

SEQ ID NO: 1740857 - RNA, 19 nt, Homo sapiens
  misc_RNA (1)...(19): siRNA sense strand
gugcauuacaucaaacaga

SEQ ID NO: 1740858 - RNA, 19 nt, Homo sapiens
  misc_RNA (1)...(19): siRNA sense strand
ccacaccacccuccucagu

SEQ ID NO: 1740859 - RNA, 19 nt, Homo sapiens
  misc_RNA (1)...(19): siRNA sense strand
cccggaagaucacgcugaa

SEQ ID NO: 1740860 - RNA, 19 nt, Homo sapiens
  misc_RNA (1)...(19): siRNA sense strand
ccaaggauucccagaagca

SEQ ID NO: 1740861 - RNA, 19 nt, Homo sapiens
  misc_RNA (1)...(19): siRNA sense strand
ccgugaggaugacaaauac

SEQ ID NO: 1740862 - RNA, 19 nt, Homo sapiens
  misc_RNA (1)...(19): siRNA sense strand
acaacgacuuccugauucu

SEQ ID NO: 1740863 - RNA, 19 nt, Homo sapiens
  misc_RNA (1)...(19): siRNA sense strand
caggugugacguugaaaga

SEQ ID NO: 1740864 - RNA, 19 nt, Homo sapiens
  misc_RNA (1)...(19): siRNA sense strand
uguaucagaucgccauggu

SEQ ID NO: 1740865 - RNA, 19 nt, Homo sapiens
  misc_RNA (1)...(19): siRNA sense strand
gggaauucgguguaucaga

SEQ ID NO: 1740866 - RNA, 19 nt, Homo sapiens
  misc_RNA (1)...(19): siRNA sense strand
cccgagacaucgacuuucu

SEQ ID NO: 1740867 - RNA, 19 nt, Homo sapiens
  misc_RNA (1)...(19): siRNA sense strand
ucaggagagcucaaguuug

SEQ ID NO: 1740868 - RNA, 19 nt, Homo sapiens
  misc_RNA (1)...(19): siRNA sense strand
cucaggagagcucaaguuu

SEQ ID NO: 1740869 - RNA, 19 nt, Homo sapiens
  misc_RNA (1)...(19): siRNA sense strand
gcaggugugacguugaaag

SEQ ID NO: 1740870 - RNA, 19 nt, Homo sapiens
  misc_RNA (1)...(19): siRNA sense strand
gaaagggaagcugccuauc

SEQ ID NO: 1740871 - RNA, 19 nt, Homo sapiens
  misc_RNA (1)...(19): siRNA sense strand
guccauggccugcacucuu

SEQ ID NO: 1740872 - RNA, 19 nt, Homo sapiens
  misc_RNA (1)...(19): siRNA sense strand
cuccaaggauucccagaag

SEQ ID NO: 1740873 - RNA, 19 nt, Homo sapiens
  misc_RNA (1)...(19): siRNA sense strand
ggaagaucacgcugaagac

SEQ ID NO: 1740874 - RNA, 19 nt, Homo sapiens
  misc_RNA (1)...(19): siRNA sense strand
ccaggacaaaggauccauu

SEQ ID NO: 1740875 - RNA, 19 nt, Homo sapiens
  misc_RNA (1)...(19): siRNA sense strand
gaauucgguguaucagauc

SEQ ID NO: 1740876 - RNA, 19 nt, Homo sapiens
  misc_RNA (1)...(19): siRNA sense strand
cugccuaucgucaaugauu

SEQ ID NO: 1740877 - RNA, 19 nt, Homo sapiens
  misc_RNA (1)...(19): siRNA sense strand
guugaaagaggcaaaugag

SEQ ID NO: 1740878 - RNA, 19 nt, Homo sapiens
  misc_RNA (1)...(19): siRNA sense strand
caacacggcugccaggaua

SEQ ID NO: 1740879 - RNA, 19 nt, Homo sapiens
  misc_RNA (1)...(19): siRNA sense strand
gcaccgaccugaagaagaa

SEQ ID NO: 1740880 - RNA, 19 nt, Homo sapiens
  misc_RNA (1)...(19): siRNA sense strand
ggaauucgguguaucagau

SEQ ID NO: 1740881 - RNA, 19 nt, Homo sapiens
  misc_RNA (1)...(19): siRNA sense strand
gacaaaggauccauucaga

SEQ ID NO: 1740882 - RNA, 19 nt, Homo sapiens
  misc_RNA (1)...(19): siRNA sense strand
gaagcugccuaucgucaau

SEQ ID NO: 1740883 - RNA, 19 nt, Homo sapiens
  misc_RNA (1)...(19): siRNA sense strand
gcacugcuguguacaaggu

SEQ ID NO: 1740884 - RNA, 19 nt, Homo sapiens
  misc_RNA (1)...(19): siRNA sense strand
gaaagaggcaaaugagauc

SEQ ID NO: 1740885 - RNA, 19 nt, Homo sapiens
  misc_RNA (1)...(19): siRNA sense strand
gggugcggcucaagaagua

SEQ ID NO: 1740886 - RNA, 19 nt, Homo sapiens
  misc_RNA (1)...(19): siRNA sense strand
gaugggagguauugguuuc

SEQ ID NO: 1740887 - RNA, 19 nt, Homo sapiens
  misc_RNA (1)...(19): siRNA sense strand
gcgaguacuucuucucaga

SEQ ID NO: 1740888 - RNA, 19 nt, Homo sapiens
  misc_RNA (1)...(19): siRNA sense strand
gccaagaaccugauugaug

SEQ ID NO: 1740889 - RNA, 19 nt, Homo sapiens
  misc_RNA (1)...(19): siRNA sense strand
uccauggccugcacucuua

SEQ ID NO: 1740890 - RNA, 19 nt, Homo sapiens
  misc_RNA (1)...(19): siRNA sense strand
cuacaacgacuuccugauu

SEQ ID NO: 1740891 - RNA, 19 nt, Homo sapiens
  misc_RNA (1)...(19): siRNA sense strand
ggccugcacucuuacgaaa

SEQ ID NO: 1740892 - RNA, 19 nt, Homo sapiens
  misc_RNA (1)...(19): siRNA sense strand
cagcaggugugacguugaa

SEQ ID NO: 1740893 - RNA, 19 nt, Homo sapiens
  misc_RNA (1)...(19): siRNA sense strand
uguacaagguggcugagua

SEQ ID NO: 1740894 - RNA, 19 nt, Homo sapiens
  misc_RNA (1)...(19): siRNA sense strand
cauggugcauuacaucaaa

SEQ ID NO: 1740895 - RNA, 19 nt, Homo sapiens
  misc_RNA (1)...(19): siRNA sense strand
caaaggauccauucagaag

SEQ ID NO: 1740896 - RNA, 19 nt, Homo sapiens
  misc_RNA (1)...(19): siRNA sense strand
guucgugcccuaccucaua

SEQ ID NO: 1740897 - RNA, 19 nt, Homo sapiens
  misc_RNA (1)...(19): siRNA sense strand
acaccacccuccucaguga

SEQ ID NO: 1740898 - RNA, 19 nt, Homo sapiens
  misc_RNA (1)...(19): siRNA sense strand
ggacaaaggauccauucag

SEQ ID NO: 1740899 - RNA, 19 nt, Homo sapiens
  misc_RNA (1)...(19): siRNA sense strand
ccaagggaauucgguguau

SEQ ID NO: 1740900 - RNA, 19 nt, Homo sapiens
  misc_RNA (1)...(19): siRNA sense strand
aaggauccauucagaaguu

SEQ ID NO: 1740901 - RNA, 19 nt, Homo sapiens
  misc_RNA (1)...(19): siRNA sense strand
guacaagguggcugaguau

SEQ ID NO: 1740902 - RNA, 19 nt, Homo sapiens
  misc_RNA (1)...(19): siRNA sense strand
gcagcagccagaaacgaua

SEQ ID NO: 1740903 - RNA, 19 nt, Homo sapiens
  misc_RNA (1)...(19): siRNA sense strand
ugaaagaggcaaaugagau

SEQ ID NO: 1740904 - RNA, 19 nt, Homo sapiens
  misc_RNA (1)...(19): siRNA sense strand
ccucuggccuccaaggauu

SEQ ID NO: 1740905 - RNA, 19 nt, Homo sapiens
  misc_RNA (1)...(19): siRNA sense strand
uacaacgacuuccugauuc

SEQ ID NO: 1740906 - RNA, 19 nt, Homo sapiens
  misc_RNA (1)...(19): siRNA sense strand
gagcagcagcagccagaaa

SEQ ID NO: 1740907 - RNA, 19 nt, Homo sapiens
  misc_RNA (1)...(19): siRNA sense strand
ugcauuacaucaaacagaa

SEQ ID NO: 1740908 - RNA, 19 nt, Homo sapiens
  misc_RNA (1)...(19): siRNA sense strand
gggagguauugguuucauu

SEQ ID NO: 1740909 - RNA, 19 nt, Homo sapiens
  misc_RNA (1)...(19): siRNA sense strand
ggagguauugguuucauuc

SEQ ID NO: 1740910 - RNA, 19 nt, Homo sapiens
  misc_RNA (1)...(19): siRNA sense strand
ccagggcacugcuguguac

SEQ ID NO: 1740911 - RNA, 19 nt, Homo sapiens
  misc_RNA (1)...(19): siRNA sense strand
agaucgccauggugcauua

SEQ ID NO: 1740912 - RNA, 19 nt, Homo sapiens
  misc_RNA (1)...(19): siRNA sense strand
ccucauagcaggcauccaa

SEQ ID NO: 1740913 - RNA, 19 nt, Homo sapiens
  misc_RNA (1)...(19): siRNA sense strand
cgagacaucgacuuucuug

SEQ ID NO: 1740914 - RNA, 19 nt, Homo sapiens
  misc_RNA (1)...(19): siRNA sense strand
gugaugacgccaaggauug

SEQ ID NO: 1740915 - RNA, 19 nt, Homo sapiens
  misc_RNA (1)...(19): siRNA sense strand
cggaagaucacgcugaaga

SEQ ID NO: 1740916 - RNA, 19 nt, Homo sapiens
  misc_RNA (1)...(19): siRNA sense strand
gauucucccaggauucaua

SEQ ID NO: 1740917 - RNA, 19 nt, Homo sapiens
  misc_RNA (1)...(19): siRNA sense strand
cagcagcccaggccaagaa

SEQ ID NO: 1740918 - RNA, 19 nt, Homo sapiens
  misc_RNA (1)...(19): siRNA sense strand
guccuucgguccaugaugu

SEQ ID NO: 1740919 - RNA, 19 nt, Homo sapiens
  misc_RNA (1)...(19): siRNA sense strand
gcccugacccggaagauca

SEQ ID NO: 1740920 - RNA, 19 nt, Homo sapiens
  misc_RNA (1)...(19): siRNA sense strand
ggugaugacgccaaggauu

SEQ ID NO: 1740921 - RNA, 19 nt, Homo sapiens
  misc_RNA (1)...(19): siRNA sense strand
cccgugaggaugacaaaua

SEQ ID NO: 1740922 - RNA, 19 nt, Homo sapiens
  misc_RNA (1)...(19): siRNA sense strand
ggaagcugccuaucgucaa

SEQ ID NO: 1740923 - RNA, 19 nt, Homo sapiens
  misc_RNA (1)...(19): siRNA sense strand
gcucugaugggagguauug

SEQ ID NO: 1740924 - RNA, 19 nt, Homo sapiens
  misc_RNA (1)...(19): siRNA sense strand
gauugagggugguguccau

SEQ ID NO: 1740925 - RNA, 19 nt, Homo sapiens
  misc_RNA (1)...(19): siRNA sense strand
gggcaugggcucacuggau

SEQ ID NO: 1740926 - RNA, 19 nt, Homo sapiens
  misc_RNA (1)...(19): siRNA sense strand
gaggugaugacgccaagga

SEQ ID NO: 1740927 - RNA, 19 nt, Homo sapiens
  misc_RNA (1)...(19): siRNA sense strand
acaaaggauccauucagaa

SEQ ID NO: 1740928 - RNA, 19 nt, Homo sapiens
  misc_RNA (1)...(19): siRNA sense strand
agaaagggaagcugccuau

SEQ ID NO: 1740929 - RNA, 19 nt, Homo sapiens
  misc_RNA (1)...(19): siRNA sense strand
gggcacugcuguguacaag

SEQ ID NO: 1740930 - RNA, 19 nt, Homo sapiens
  misc_RNA (1)...(19): siRNA sense strand
caagggaauucgguguauc

SEQ ID NO: 1740931 - RNA, 19 nt, Homo sapiens
  misc_RNA (1)...(19): siRNA sense strand
aagggaagcugccuaucgu

SEQ ID NO: 1740932 - RNA, 19 nt, Homo sapiens
  misc_RNA (1)...(19): siRNA sense strand
gugcauuacaucaaacaga

SEQ ID NO: 1740933 - RNA, 19 nt, Homo sapiens
  misc_RNA (1)...(19): siRNA sense strand
ccacaccacccuccucagu

SEQ ID NO: 1740934 - RNA, 19 nt, Homo sapiens
  misc_RNA (1)...(19): siRNA sense strand
cccggaagaucacgcugaa

SEQ ID NO: 1740935 - RNA, 19 nt, Homo sapiens
  misc_RNA (1)...(19): siRNA sense strand
ccaaggauucccagaagca

SEQ ID NO: 1740936 - RNA, 19 nt, Homo sapiens
  misc_RNA (1)...(19): siRNA sense strand
ccgugaggaugacaaauac

SEQ ID NO: 1740937 - RNA, 19 nt, Homo sapiens
  misc_RNA (1)...(19): siRNA sense strand
acaacgacuuccugauucu

SEQ ID NO: 1740938 - RNA, 19 nt, Homo sapiens
  misc_RNA (1)...(19): siRNA sense strand
caggugugacguugaaaga

SEQ ID NO: 1740939 - RNA, 19 nt, Homo sapiens
  misc_RNA (1)...(19): siRNA sense strand
uguaucagaucgccauggu

SEQ ID NO: 1740940 - RNA, 19 nt, Homo sapiens
  misc_RNA (1)...(19): siRNA sense strand
gggaauucgguguaucaga

SEQ ID NO: 1740941 - RNA, 19 nt, Homo sapiens
  misc_RNA (1)...(19): siRNA sense strand
cccgagacaucgacuuucu

SEQ ID NO: 1740942 - RNA, 19 nt, Homo sapiens
  misc_RNA (1)...(19): siRNA sense strand
ucaggagagcucaaguuug

SEQ ID NO: 1740943 - RNA, 19 nt, Homo sapiens
  misc_RNA (1)...(19): siRNA sense strand
cucaggagagcucaaguuu

SEQ ID NO: 1740944 - RNA, 19 nt, Homo sapiens
  misc_RNA (1)...(19): siRNA sense strand
gcaggugugacguugaaag

SEQ ID NO: 1740945 - RNA, 19 nt, Homo sapiens
  misc_RNA (1)...(19): siRNA sense strand
gaaagggaagcugccuauc

SEQ ID NO: 1740946 - RNA, 19 nt, Homo sapiens
  misc_RNA (1)...(19): siRNA sense strand
guccauggccugcacucuu

SEQ ID NO: 1740947 - RNA, 19 nt, Homo sapiens
  misc_RNA (1)...(19): siRNA sense strand
cuccaaggauucccagaag

SEQ ID NO: 1740948 - RNA, 19 nt, Homo sapiens
  misc_RNA (1)...(19): siRNA sense strand
ggaagaucacgcugaagac

SEQ ID NO: 1740949 - RNA, 19 nt, Homo sapiens
  misc_RNA (1)...(19): siRNA sense strand
ccaggacaaaggauccauu

SEQ ID NO: 1740950 - RNA, 19 nt, Homo sapiens
  misc_RNA (1)...(19): siRNA sense strand
gaauucgguguaucagauc

SEQ ID NO: 1740951 - RNA, 19 nt, Homo sapiens
  misc_RNA (1)...(19): siRNA sense strand
cugccuaucgucaaugauu

SEQ ID NO: 1740952 - RNA, 19 nt, Homo sapiens
  misc_RNA (1)...(19): siRNA sense strand
guugaaagaggcaaaugag

SEQ ID NO: 1740953 - RNA, 19 nt, Homo sapiens
  misc_RNA (1)...(19): siRNA sense strand
ggagaaggcucacaaaugg

SEQ ID NO: 1740954 - RNA, 19 nt, Homo sapiens
  misc_RNA (1)...(19): siRNA sense strand
gcgcaagcaucaucuguaa

SEQ ID NO: 1740955 - RNA, 19 nt, Homo sapiens
  misc_RNA (1)...(19): siRNA sense strand
ucaagaagccacugucgua

SEQ ID NO: 1740956 - RNA, 19 nt, Homo sapiens
  misc_RNA (1)...(19): siRNA sense strand
gcaagcaucaucuguaaca

SEQ ID NO: 1740957 - RNA, 19 nt, Homo sapiens
  misc_RNA (1)...(19): siRNA sense strand
gauguacacgugcaaguga

SEQ ID NO: 1740958 - RNA, 19 nt, Homo sapiens
  misc_RNA (1)...(19): siRNA sense strand
gcuacgugcucaaggacaa

SEQ ID NO: 1740959 - RNA, 19 nt, Homo sapiens
  misc_RNA (1)...(19): siRNA sense strand
gcuacaacacccaccagua

SEQ ID NO: 1740960 - RNA, 19 nt, Homo sapiens
  misc_RNA (1)...(19): siRNA sense strand
cagaaugcccggacucuca

SEQ ID NO: 1740961 - RNA, 19 nt, Homo sapiens
  misc_RNA (1)...(19): siRNA sense strand
gcugcuaugucaagugcaa

SEQ ID NO: 1740962 - RNA, 19 nt, Homo sapiens
  misc_RNA (1)...(19): siRNA sense strand
ucaugaacuugcacaacaa

SEQ ID NO: 1740963 - RNA, 19 nt, Homo sapiens
  misc_RNA (1)...(19): siRNA sense strand
caacgaggcaggccgaaag

SEQ ID NO: 1740964 - RNA, 19 nt, Homo sapiens
  misc_RNA (1)...(19): siRNA sense strand
gcucugggcgcaagcauca

SEQ ID NO: 1740965 - RNA, 19 nt, Homo sapiens
  misc_RNA (1)...(19): siRNA sense strand
cgacuguggcugcgacaaa

SEQ ID NO: 1740966 - RNA, 19 nt, Homo sapiens
  misc_RNA (1)...(19): siRNA sense strand
cccgggagaucaagcagaa

SEQ ID NO: 1740967 - RNA, 19 nt, Homo sapiens
  misc_RNA (1)...(19): siRNA sense strand
agaagucgcccaacuacug

SEQ ID NO: 1740968 - RNA, 19 nt, Homo sapiens
  misc_RNA (1)...(19): siRNA sense strand
ggacucucaugaacuugca

SEQ ID NO: 1740969 - RNA, 19 nt, Homo sapiens
  misc_RNA (1)...(19): siRNA sense strand
agcaucaucuguaacaaga

SEQ ID NO: 1740970 - RNA, 19 nt, Homo sapiens
  misc_RNA (1)...(19): siRNA sense strand
cucaugaacuugcacaaca

SEQ ID NO: 1740971 - RNA, 19 nt, Homo sapiens
  misc_RNA (1)...(19): siRNA sense strand
cuacaacacccaccaguac

SEQ ID NO: 1740972 - RNA, 19 nt, Homo sapiens
  misc_RNA (1)...(19): siRNA sense strand
cauaggagaaggcucacaa

SEQ ID NO: 1740973 - RNA, 19 nt, Homo sapiens
  misc_RNA (1)...(19): siRNA sense strand
uggcuucuccucaguggua

SEQ ID NO: 1740974 - RNA, 19 nt, Homo sapiens
  misc_RNA (1)...(19): siRNA sense strand
aggagaaggcucacaaaug

SEQ ID NO: 1740975 - RNA, 19 nt, Homo sapiens
  misc_RNA (1)...(19): siRNA sense strand
ggacgagugucaguuucag

SEQ ID NO: 1740976 - RNA, 19 nt, Homo sapiens
  misc_RNA (1)...(19): siRNA sense strand
caucaucgucauaggagaa

SEQ ID NO: 1740977 - RNA, 19 nt, Homo sapiens
  misc_RNA (1)...(19): siRNA sense strand
ucgagaagucgcccaacua

SEQ ID NO: 1740978 - RNA, 19 nt, Homo sapiens
  misc_RNA (1)...(19): siRNA sense strand
gggaggcugcguucaccua

SEQ ID NO: 1740979 - RNA, 19 nt, Homo sapiens
  misc_RNA (1)...(19): siRNA sense strand
ggcgcaagcaucaucugua

SEQ ID NO: 1740980 - RNA, 19 nt, Homo sapiens
  misc_RNA (1)...(19): siRNA sense strand
ucaaggacaaguacaacga

SEQ ID NO: 1740981 - RNA, 19 nt, Homo sapiens
  misc_RNA (1)...(19): siRNA sense strand
caguuucaguuccgcaaug

SEQ ID NO: 1740982 - RNA, 19 nt, Homo sapiens
  misc_RNA (1)...(19): siRNA sense strand
guucaccuacgccaucauu

SEQ ID NO: 1740983 - RNA, 19 nt, Homo sapiens
  misc_RNA (1)...(19): siRNA sense strand
cccggacucucaugaacuu

SEQ ID NO: 1740984 - RNA, 19 nt, Homo sapiens
  misc_RNA (1)...(19): siRNA sense strand
caagcaucaucuguaacaa

SEQ ID NO: 1740985 - RNA, 19 nt, Homo sapiens
  misc_RNA (1)...(19): siRNA sense strand
gcaauggccgcuggaacug

SEQ ID NO: 1740986 - RNA, 19 nt, Homo sapiens
  misc_RNA (1)...(19): siRNA sense strand
gcgagcgcacggagaugua

SEQ ID NO: 1740987 - RNA, 19 nt, Homo sapiens
  misc_RNA (1)...(19): siRNA sense strand
gagaacaugaagcuggaau

SEQ ID NO: 1740988 - RNA, 19 nt, Homo sapiens
  misc_RNA (1)...(19): siRNA sense strand
cgagaagucgcccaacuac

SEQ ID NO: 1740989 - RNA, 19 nt, Homo sapiens
  misc_RNA (1)...(19): siRNA sense strand
gacuguggcugcgacaaag

SEQ ID NO: 1740990 - RNA, 19 nt, Homo sapiens
  misc_RNA (1)...(19): siRNA sense strand
ccuggacgagugucaguuu

SEQ ID NO: 1740991 - RNA, 19 nt, Homo sapiens
  misc_RNA (1)...(19): siRNA sense strand
gagauguacacgugcaagu

SEQ ID NO: 1740992 - RNA, 19 nt, Homo sapiens
  misc_RNA (1)...(19): siRNA sense strand
cacuggugcugcuauguca

SEQ ID NO: 1740993 - RNA, 19 nt, Homo sapiens
  misc_RNA (1)...(19): siRNA sense strand
cgaggcaggccgaaagauc

SEQ ID NO: 1740994 - RNA, 19 nt, Homo sapiens
  misc_RNA (1)...(19): siRNA sense strand
cggcuucgccaaggucuuu

SEQ ID NO: 1740995 - RNA, 19 nt, Homo sapiens
  misc_RNA (1)...(19): siRNA sense strand
aagagaagcaaggccagua

SEQ ID NO: 1740996 - RNA, 19 nt, Homo sapiens
  misc_RNA (1)...(19): siRNA sense strand
uaggagaaggcucacaaau

SEQ ID NO: 1740997 - RNA, 19 nt, Homo sapiens
  misc_RNA (1)...(19): siRNA sense strand
ucaagaacguggccgauua

SEQ ID NO: 1740998 - RNA, 19 nt, Homo sapiens
  misc_RNA (1)...(19): siRNA sense strand
ucccggagcuuuacuuuaa

SEQ ID NO: 1740999 - RNA, 19 nt, Homo sapiens
  misc_RNA (1)...(19): siRNA sense strand
gaacguggccgauuacuac

SEQ ID NO: 1741000 - RNA, 19 nt, Homo sapiens
  misc_RNA (1)...(19): siRNA sense strand
gcagagcacugauuauggu

SEQ ID NO: 1741001 - RNA, 19 nt, Homo sapiens
  misc_RNA (1)...(19): siRNA sense strand
ccacuuuggugucuucuau

SEQ ID NO: 1741002 - RNA, 19 nt, Homo sapiens
  misc_RNA (1)...(19): siRNA sense strand
agguaaagcugaacaaguu

SEQ ID NO: 1741003 - RNA, 19 nt, Homo sapiens
  misc_RNA (1)...(19): siRNA sense strand
gagcaggagugucgcaaca

SEQ ID NO: 1741004 - RNA, 19 nt, Homo sapiens
  misc_RNA (1)...(19): siRNA sense strand
cuacaucccuaucuucuag

SEQ ID NO: 1741005 - RNA, 19 nt, Homo sapiens
  misc_RNA (1)...(19): siRNA sense strand
gcgagacgcuagaggacuu

SEQ ID NO: 1741006 - RNA, 19 nt, Homo sapiens
  misc_RNA (1)...(19): siRNA sense strand
gcaggagugucgcaacauc

SEQ ID NO: 1741007 - RNA, 19 nt, Homo sapiens
  misc_RNA (1)...(19): siRNA sense strand
ugaggaaccaugccuauga

SEQ ID NO: 1741008 - RNA, 19 nt, Homo sapiens
  misc_RNA (1)...(19): siRNA sense strand
guggaucgcugaauguauc

SEQ ID NO: 1741009 - RNA, 19 nt, Homo sapiens
  misc_RNA (1)...(19): siRNA sense strand
gcaggaccuugacgagaug

SEQ ID NO: 1741010 - RNA, 19 nt, Homo sapiens
  misc_RNA (1)...(19): siRNA sense strand
uccuagacuucauuacuua

SEQ ID NO: 1741011 - RNA, 19 nt, Homo sapiens
  misc_RNA (1)...(19): siRNA sense strand
gcuggaggaccgauucuuu

SEQ ID NO: 1741012 - RNA, 19 nt, Homo sapiens
  misc_RNA (1)...(19): siRNA sense strand
uagcaacccuggagacaag

SEQ ID NO: 1741013 - RNA, 19 nt, Homo sapiens
  misc_RNA (1)...(19): siRNA sense strand
acacgccucuugcggcuuu

SEQ ID NO: 1741014 - RNA, 19 nt, Homo sapiens
  misc_RNA (1)...(19): siRNA sense strand
acaguuacaugaucgacaa

SEQ ID NO: 1741015 - RNA, 19 nt, Homo sapiens
  misc_RNA (1)...(19): siRNA sense strand
cugcugagcucuacaaugc

SEQ ID NO: 1741016 - RNA, 19 nt, Homo sapiens
  misc_RNA (1)...(19): siRNA sense strand
gauggaggccgugaacauu

SEQ ID NO: 1741017 - RNA, 19 nt, Homo sapiens
  misc_RNA (1)...(19): siRNA sense strand
ucaucaccaucaauucuuu

SEQ ID NO: 1741018 - RNA, 19 nt, Homo sapiens
  misc_RNA (1)...(19): siRNA sense strand
gaggaaccaugccuaugag

SEQ ID NO: 1741019 - RNA, 19 nt, Homo sapiens
  misc_RNA (1)...(19): siRNA sense strand
acaacuacaucccuaucuu

SEQ ID NO: 1741020 - RNA, 19 nt, Homo sapiens
  misc_RNA (1)...(19): siRNA sense strand
guaacuuccuggccaacga

SEQ ID NO: 1741021 - RNA, 19 nt, Homo sapiens
  misc_RNA (1)...(19): siRNA sense strand
gccaagcucuuuccacacu

SEQ ID NO: 1741022 - RNA, 19 nt, Homo sapiens
  misc_RNA (1)...(19): siRNA sense strand
agaagauggugguggaguu

SEQ ID NO: 1741023 - RNA, 19 nt, Homo sapiens
  misc_RNA (1)...(19): siRNA sense strand
caacuacaucccuaucuuc

SEQ ID NO: 1741024 - RNA, 19 nt, Homo sapiens
  misc_RNA (1)...(19): siRNA sense strand
gagguaaagcugaacaagu

SEQ ID NO: 1741025 - RNA, 19 nt, Homo sapiens
  misc_RNA (1)...(19): siRNA sense strand
caaguuggccuuccugaac

SEQ ID NO: 1741026 - RNA, 19 nt, Homo sapiens
  misc_RNA (1)...(19): siRNA sense strand
gagcacugauuaugguaac

SEQ ID NO: 1741027 - RNA, 19 nt, Homo sapiens
  misc_RNA (1)...(19): siRNA sense strand
gaagauggugguggaguuc

SEQ ID NO: 1741028 - RNA, 19 nt, Homo sapiens
  misc_RNA (1)...(19): siRNA sense strand
gcacugauuaugguaacuu

SEQ ID NO: 1741029 - RNA, 19 nt, Homo sapiens
  misc_RNA (1)...(19): siRNA sense strand
cguggacaauggcuacuug

SEQ ID NO: 1741030 - RNA, 19 nt, Homo sapiens
  misc_RNA (1)...(19): siRNA sense strand
caagcucuuuccacacugu

SEQ ID NO: 1741031 - RNA, 19 nt, Homo sapiens
  misc_RNA (1)...(19): siRNA sense strand
ggaccgugccaagcucuuu

SEQ ID NO: 1741032 - RNA, 19 nt, Homo sapiens
  misc_RNA (1)...(19): siRNA sense strand
gacgcuagaggacuugaaa

SEQ ID NO: 1741033 - RNA, 19 nt, Homo sapiens
  misc_RNA (1)...(19): siRNA sense strand
aguacaagcugcucuucga

SEQ ID NO: 1741034 - RNA, 19 nt, Homo sapiens
  misc_RNA (1)...(19): siRNA sense strand
uuucagagcaggaccuuga

SEQ ID NO: 1741035 - RNA, 19 nt, Homo sapiens
  misc_RNA (1)...(19): siRNA sense strand
acuaugaacaggucaagaa

SEQ ID NO: 1741036 - RNA, 19 nt, Homo sapiens
  misc_RNA (1)...(19): siRNA sense strand
uggaguccuucuacaaguu

SEQ ID NO: 1741037 - RNA, 19 nt, Homo sapiens
  misc_RNA (1)...(19): siRNA sense strand
ucaauucuuucggcacaga

SEQ ID NO: 1741038 - RNA, 19 nt, Homo sapiens
  misc_RNA (1)...(19): siRNA sense strand
uuccuagacuucauuacuu

SEQ ID NO: 1741039 - RNA, 19 nt, Homo sapiens
  misc_RNA (1)...(19): siRNA sense strand
ggcucgggcugacgacuau

SEQ ID NO: 1741040 - RNA, 19 nt, Homo sapiens
  misc_RNA (1)...(19): siRNA sense strand
caucaucaccaucaauucu

SEQ ID NO: 1741041 - RNA, 19 nt, Homo sapiens
  misc_RNA (1)...(19): siRNA sense strand
gcagauggaggccgugaac

SEQ ID NO: 1741042 - RNA, 19 nt, Homo sapiens
  misc_RNA (1)...(19): siRNA sense strand
cuucauuacuuacaguuac

SEQ ID NO: 1741043 - RNA, 19 nt, Homo sapiens
  misc_RNA (1)...(19): siRNA sense strand
ggaguccuucuacaaguuc

SEQ ID NO: 1741044 - RNA, 19 nt, Homo sapiens
  misc_RNA (1)...(19): siRNA sense strand
gguaaagcugaacaaguug

SEQ ID NO: 1741045 - RNA, 19 nt, Homo sapiens
  misc_RNA (1)...(19): siRNA sense strand
caucugcagagcacugauu

SEQ ID NO: 1741046 - RNA, 19 nt, Homo sapiens
  misc_RNA (1)...(19): siRNA sense strand
gggcugacgacuaugaaca

SEQ ID NO: 1741047 - RNA, 19 nt, Homo sapiens
  misc_RNA (1)...(19): siRNA sense strand
agacuucauuacuuacagu

SEQ ID NO: 1741048 - RNA, 19 nt, Homo sapiens
  misc_RNA (1)...(19): siRNA sense strand
guuccacuuuggugucuuc

SEQ ID NO: 1741049 - RNA, 19 nt, Homo sapiens
  misc_RNA (1)...(19): siRNA sense strand
caagaacguggccgauuac

SEQ ID NO: 1741050 - RNA, 19 nt, Homo sapiens
  misc_RNA (1)...(19): siRNA sense strand
aggccuaccuggaguccuu

SEQ ID NO: 1741051 - RNA, 19 nt, Homo sapiens
  misc_RNA (1)...(19): siRNA sense strand
agcaggaccuugacgagau

SEQ ID NO: 1741052 - RNA, 19 nt, Homo sapiens
  misc_RNA (1)...(19): siRNA sense strand
ccgcaacacccucuacaag

SEQ ID NO: 1741053 - RNA, 19 nt, Homo sapiens
  misc_RNA (1)...(19): siRNA sense strand
uggaggaccgauucuuuga

SEQ ID NO: 1741054 - RNA, 19 nt, Homo sapiens
  misc_RNA (1)...(19): siRNA sense strand
gcuagaggacuugaaacug

SEQ ID NO: 1741055 - RNA, 19 nt, Homo sapiens
  misc_RNA (1)...(19): siRNA sense strand
cugcagagcacugauuaug

SEQ ID NO: 1741056 - RNA, 19 nt, Homo sapiens
  misc_RNA (1)...(19): siRNA sense strand
cgugaacauugcucagaca

SEQ ID NO: 1741057 - RNA, 19 nt, Homo sapiens
  misc_RNA (1)...(19): siRNA sense strand
cgacaacuacaucccuauc

SEQ ID NO: 1741058 - RNA, 19 nt, Homo sapiens
  misc_RNA (1)...(19): siRNA sense strand
guagcaacccuggagacaa

SEQ ID NO: 1741059 - RNA, 19 nt, Homo sapiens
  misc_RNA (1)...(19): siRNA sense strand
agaacguggccgauuacua

SEQ ID NO: 1741060 - RNA, 19 nt, Homo sapiens
  misc_RNA (1)...(19): siRNA sense strand
ucgaugaccggcucaagga

SEQ ID NO: 1741061 - RNA, 19 nt, Homo sapiens
  misc_RNA (1)...(19): siRNA sense strand
ggucagagcuccagaaguu

SEQ ID NO: 1741062 - RNA, 19 nt, Homo sapiens
  misc_RNA (1)...(19): siRNA sense strand
cagaauaggugacuucauu

SEQ ID NO: 1741063 - RNA, 19 nt, Homo sapiens
  misc_RNA (1)...(19): siRNA sense strand
ggacauguauaagccuuua

SEQ ID NO: 1741064 - RNA, 19 nt, Homo sapiens
  misc_RNA (1)...(19): siRNA sense strand
acaaaguccugugaaauua

SEQ ID NO: 1741065 - RNA, 19 nt, Homo sapiens
  misc_RNA (1)...(19): siRNA sense strand
ugacagaaaugcggaauga

SEQ ID NO: 1741066 - RNA, 19 nt, Homo sapiens
  misc_RNA (1)...(19): siRNA sense strand
gaugaugggcugugugaua

SEQ ID NO: 1741067 - RNA, 19 nt, Homo sapiens
  misc_RNA (1)...(19): siRNA sense strand
cgacagaauugacagaaau

SEQ ID NO: 1741068 - RNA, 19 nt, Homo sapiens
  misc_RNA (1)...(19): siRNA sense strand
gaacugagaagauagaagu

SEQ ID NO: 1741069 - RNA, 19 nt, Homo sapiens
  misc_RNA (1)...(19): siRNA sense strand
gggauaagcuauuggaaag

SEQ ID NO: 1741070 - RNA, 19 nt, Homo sapiens
  misc_RNA (1)...(19): siRNA sense strand
gcaaguacaaaguagauuu

SEQ ID NO: 1741071 - RNA, 19 nt, Homo sapiens
  misc_RNA (1)...(19): siRNA sense strand
ggaaagaucucggaaaaug

SEQ ID NO: 1741072 - RNA, 19 nt, Homo sapiens
  misc_RNA (1)...(19): siRNA sense strand
gucuuuaccuguucacuua

SEQ ID NO: 1741073 - RNA, 19 nt, Homo sapiens
  misc_RNA (1)...(19): siRNA sense strand
gaagauagaaguuaagcau

SEQ ID NO: 1741074 - RNA, 19 nt, Homo sapiens
  misc_RNA (1)...(19): siRNA sense strand
gagagggcauucaaagaug

SEQ ID NO: 1741075 - RNA, 19 nt, Homo sapiens
  misc_RNA (1)...(19): siRNA sense strand
gauaagcuauuggaaagau

SEQ ID NO: 1741076 - RNA, 19 nt, Homo sapiens
  misc_RNA (1)...(19): siRNA sense strand
gccaggcaguuaucauuaa

SEQ ID NO: 1741077 - RNA, 19 nt, Homo sapiens
  misc_RNA (1)...(19): siRNA sense strand
caacaucgccagcuucuca

SEQ ID NO: 1741078 - RNA, 19 nt, Homo sapiens
  misc_RNA (1)...(19): siRNA sense strand
guauuuguuuccaguauga

SEQ ID NO: 1741079 - RNA, 19 nt, Homo sapiens
  misc_RNA (1)...(19): siRNA sense strand
ggaauguacaucuaccuaa

SEQ ID NO: 1741080 - RNA, 19 nt, Homo sapiens
  misc_RNA (1)...(19): siRNA sense strand
gauagaaguuaagcauguu

SEQ ID NO: 1741081 - RNA, 19 nt, Homo sapiens
  misc_RNA (1)...(19): siRNA sense strand
gagaagugaauaaggcaua

SEQ ID NO: 1741082 - RNA, 19 nt, Homo sapiens
  misc_RNA (1)...(19): siRNA sense strand
agagaaagccaggcaguua

SEQ ID NO: 1741083 - RNA, 19 nt, Homo sapiens
  misc_RNA (1)...(19): siRNA sense strand
gaagaucaaaguaaagcaa

SEQ ID NO: 1741084 - RNA, 19 nt, Homo sapiens
  misc_RNA (1)...(19): siRNA sense strand
gaauaggugacuucauuga

SEQ ID NO: 1741085 - RNA, 19 nt, Homo sapiens
  misc_RNA (1)...(19): siRNA sense strand
uuaacaaaguccugugaaa

SEQ ID NO: 1741086 - RNA, 19 nt, Homo sapiens
  misc_RNA (1)...(19): siRNA sense strand
cugagaagauagaaguuaa

SEQ ID NO: 1741087 - RNA, 19 nt, Homo sapiens
  misc_RNA (1)...(19): siRNA sense strand
acagaggaauguacaucua

SEQ ID NO: 1741088 - RNA, 19 nt, Homo sapiens
  misc_RNA (1)...(19): siRNA sense strand
gcggaaugaucucuuuaau

SEQ ID NO: 1741089 - RNA, 19 nt, Homo sapiens
  misc_RNA (1)...(19): siRNA sense strand
gaauauauggucaauuugg

SEQ ID NO: 1741090 - RNA, 19 nt, Homo sapiens
  misc_RNA (1)...(19): siRNA sense strand
cggaaugaucucuuuaaua

SEQ ID NO: 1741091 - RNA, 19 nt, Homo sapiens
  misc_RNA (1)...(19): siRNA sense strand
caaaguccugugaaauuaa

SEQ ID NO: 1741092 - RNA, 19 nt, Homo sapiens
  misc_RNA (1)...(19): siRNA sense strand
agauagaaguuaagcaugu

SEQ ID NO: 1741093 - RNA, 19 nt, Homo sapiens
  misc_RNA (1)...(19): siRNA sense strand
uccagaaguuccuguaauu

SEQ ID NO: 1741094 - RNA, 19 nt, Homo sapiens
  misc_RNA (1)...(19): siRNA sense strand
gagaaagccaggcaguuau

SEQ ID NO: 1741095 - RNA, 19 nt, Homo sapiens
  misc_RNA (1)...(19): siRNA sense strand
ggagauuuauagcaacauc

SEQ ID NO: 1741096 - RNA, 19 nt, Homo sapiens
  misc_RNA (1)...(19): siRNA sense strand
gguacugucuucgugauga

SEQ ID NO: 1741097 - RNA, 19 nt, Homo sapiens
  misc_RNA (1)...(19): siRNA sense strand
ggacagccuugggacaugu

SEQ ID NO: 1741098 - RNA, 19 nt, Homo sapiens
  misc_RNA (1)...(19): siRNA sense strand
acacagcaaguacaaagua

SEQ ID NO: 1741099 - RNA, 19 nt, Homo sapiens
  misc_RNA (1)...(19): siRNA sense strand
caacacagcaaguacaaag

SEQ ID NO: 1741100 - RNA, 19 nt, Homo sapiens
  misc_RNA (1)...(19): siRNA sense strand
aaaguggcauuggaaauau

SEQ ID NO: 1741101 - RNA, 19 nt, Homo sapiens
  misc_RNA (1)...(19): siRNA sense strand
uaacaaaguccugugaaau

SEQ ID NO: 1741102 - RNA, 19 nt, Homo sapiens
  misc_RNA (1)...(19): siRNA sense strand
aacaaaguccugugaaauu

SEQ ID NO: 1741103 - RNA, 19 nt, Homo sapiens
  misc_RNA (1)...(19): siRNA sense strand
gauagagagggcauucaaa

SEQ ID NO: 1741104 - RNA, 19 nt, Homo sapiens
  misc_RNA (1)...(19): siRNA sense strand
guacugucuucgugaugaa

SEQ ID NO: 1741105 - RNA, 19 nt, Homo sapiens
  misc_RNA (1)...(19): siRNA sense strand
guaaagcaacagaggaaug

SEQ ID NO: 1741106 - RNA, 19 nt, Homo sapiens
  misc_RNA (1)...(19): siRNA sense strand
auaggugacuucauugaug

SEQ ID NO: 1741107 - RNA, 19 nt, Homo sapiens
  misc_RNA (1)...(19): siRNA sense strand
ccagaaguuccuguaauuu

SEQ ID NO: 1741108 - RNA, 19 nt, Homo sapiens
  misc_RNA (1)...(19): siRNA sense strand
guaacugaagaucaaagua

SEQ ID NO: 1741109 - RNA, 19 nt, Homo sapiens
  misc_RNA (1)...(19): siRNA sense strand
gggugugucuuuaccuguu

SEQ ID NO: 1741110 - RNA, 19 nt, Homo sapiens
  misc_RNA (1)...(19): siRNA sense strand
gaucuuccauuugaaacuc

SEQ ID NO: 1741111 - RNA, 19 nt, Homo sapiens
  misc_RNA (1)...(19): siRNA sense strand
cagaaguuccuguaauuuc

SEQ ID NO: 1741112 - RNA, 19 nt, Homo sapiens
  misc_RNA (1)...(19): siRNA sense strand
ccaagucucauacgaagau

SEQ ID NO: 1741113 - RNA, 19 nt, Homo sapiens
  misc_RNA (1)...(19): siRNA sense strand
ccgacagaauugacagaaa

SEQ ID NO: 1741114 - RNA, 19 nt, Homo sapiens
  misc_RNA (1)...(19): siRNA sense strand
gagcacauuuuacaauaug

SEQ ID NO: 1741115 - RNA, 19 nt, Homo sapiens
  misc_RNA (1)...(19): siRNA sense strand
agagggcauucaaagauga

SEQ ID NO: 1741116 - RNA, 19 nt, Homo sapiens
  misc_RNA (1)...(19): siRNA sense strand
caaguacaaaguagauuuc

SEQ ID NO: 1741117 - RNA, 19 nt, Homo sapiens
  misc_RNA (1)...(19): siRNA sense strand
ugucagcaguucacaaucu

SEQ ID NO: 1741118 - RNA, 19 nt, Homo sapiens
  misc_RNA (1)...(19): siRNA sense strand
ugacuucauugaugugagu

SEQ ID NO: 1741119 - RNA, 19 nt, Homo sapiens
  misc_RNA (1)...(19): siRNA sense strand
ugccuucuguuaugacgua

SEQ ID NO: 1741120 - RNA, 19 nt, Homo sapiens
  misc_RNA (1)...(19): siRNA sense strand
caacagaggaauguacauc

SEQ ID NO: 1741121 - RNA, 19 nt, Homo sapiens
  misc_RNA (1)...(19): siRNA sense strand
uaaagcaacagaggaaugu

SEQ ID NO: 1741122 - RNA, 19 nt, Homo sapiens
  misc_RNA (1)...(19): siRNA sense strand
uaggugacuucauugaugu

SEQ ID NO: 1741123 - RNA, 19 nt, Homo sapiens
  misc_RNA (1)...(19): siRNA sense strand
gaugcucaugcuuuaauuu

SEQ ID NO: 1741124 - RNA, 19 nt, Homo sapiens
  misc_RNA (1)...(19): siRNA sense strand
uuucaaagauugugaucca

SEQ ID NO: 1741125 - RNA, 19 nt, Homo sapiens
  misc_RNA (1)...(19): siRNA sense strand
aaugcggaaugaucucuuu

SEQ ID NO: 1741126 - RNA, 19 nt, Homo sapiens
  misc_RNA (1)...(19): siRNA sense strand
agagagggcauucaaagau

SEQ ID NO: 1741127 - RNA, 19 nt, Homo sapiens
  misc_RNA (1)...(19): siRNA sense strand
ucuggugccuucuguuaug

SEQ ID NO: 1741128 - RNA, 19 nt, Homo sapiens
  misc_RNA (1)...(19): siRNA sense strand
uacaauaugggauaagcua

SEQ ID NO: 1741129 - RNA, 19 nt, Homo sapiens
  misc_RNA (1)...(19): siRNA sense strand
uagucaagcuacacagaau

SEQ ID NO: 1741130 - RNA, 19 nt, Homo sapiens
  misc_RNA (1)...(19): siRNA sense strand
gaaagccaggcaguuauca

SEQ ID NO: 1741131 - RNA, 19 nt, Homo sapiens
  misc_RNA (1)...(19): siRNA sense strand
augaguggaugccaacaaa

SEQ ID NO: 1741132 - RNA, 19 nt, Homo sapiens
  misc_RNA (1)...(19): siRNA sense strand
cauuucaacucccuacagu

SEQ ID NO: 1741133 - RNA, 19 nt, Homo sapiens
  misc_RNA (1)...(19): siRNA sense strand
ugagagaauagucaagcua

SEQ ID NO: 1741134 - RNA, 19 nt, Homo sapiens
  misc_RNA (1)...(19): siRNA sense strand
acaguugugccaugcauuu

SEQ ID NO: 1741135 - RNA, 19 nt, Homo sapiens
  misc_RNA (1)...(19): siRNA sense strand
agaagugaauaaggcauau

SEQ ID NO: 1741136 - RNA, 19 nt, Homo sapiens
  misc_RNA (1)...(19): siRNA sense strand
aaaaguggcauuggaaaua

SEQ ID NO: 1741137 - RNA, 19 nt, Homo sapiens
  misc_RNA (1)...(19): siRNA sense strand
gcauuuaagcgagugguau

SEQ ID NO: 1741138 - RNA, 19 nt, Homo sapiens
  misc_RNA (1)...(19): siRNA sense strand
acagaaaugcggaaugauc

SEQ ID NO: 1741139 - RNA, 19 nt, Homo sapiens
  misc_RNA (1)...(19): siRNA sense strand
gaugaguggaugccaacaa

SEQ ID NO: 1741140 - RNA, 19 nt, Homo sapiens
  misc_RNA (1)...(19): siRNA sense strand
gcuccagaaguuccuguaa

SEQ ID NO: 1741141 - RNA, 19 nt, Homo sapiens
  misc_RNA (1)...(19): siRNA sense strand
gauccaggagaagugaaua

SEQ ID NO: 1741142 - RNA, 19 nt, Homo sapiens
  misc_RNA (1)...(19): siRNA sense strand
ugggauaagcuauuggaaa

SEQ ID NO: 1741143 - RNA, 19 nt, Homo sapiens
  misc_RNA (1)...(19): siRNA sense strand
ccagccaagucucauacga

SEQ ID NO: 1741144 - RNA, 19 nt, Homo sapiens
  misc_RNA (1)...(19): siRNA sense strand
uagagagggcauucaaaga

SEQ ID NO: 1741145 - RNA, 19 nt, Homo sapiens
  misc_RNA (1)...(19): siRNA sense strand
uuucuggugccuucuguua

SEQ ID NO: 1741146 - RNA, 19 nt, Homo sapiens
  misc_RNA (1)...(19): siRNA sense strand
gauuccagggugugucuuu

SEQ ID NO: 1741147 - RNA, 19 nt, Homo sapiens
  misc_RNA (1)...(19): siRNA sense strand
cagccaagucucauacgaa

SEQ ID NO: 1741148 - RNA, 19 nt, Homo sapiens
  misc_RNA (1)...(19): siRNA sense strand
uaugaagugucagcaguuc

SEQ ID NO: 1741149 - RNA, 19 nt, Homo sapiens
  misc_RNA (1)...(19): siRNA sense strand
guaugaagugucagcaguu

SEQ ID NO: 1741150 - RNA, 19 nt, Homo sapiens
  misc_RNA (1)...(19): siRNA sense strand
caaguauuuguuuccagua

SEQ ID NO: 1741151 - RNA, 19 nt, Homo sapiens
  misc_RNA (1)...(19): siRNA sense strand
uggcguuccugugcuauga

SEQ ID NO: 1741152 - RNA, 19 nt, Homo sapiens
  misc_RNA (1)...(19): siRNA sense strand
gaaaugcggaaugaucucu

SEQ ID NO: 1741153 - RNA, 19 nt, Homo sapiens
  misc_RNA (1)...(19): siRNA sense strand
gucagcaguucacaaucuu

SEQ ID NO: 1741154 - RNA, 19 nt, Homo sapiens
  misc_RNA (1)...(19): siRNA sense strand
acacagaauaggugacuuc

SEQ ID NO: 1741155 - RNA, 19 nt, Homo sapiens
  misc_RNA (1)...(19): siRNA sense strand
guagauuucauagaagaga

SEQ ID NO: 1741156 - RNA, 19 nt, Homo sapiens
  misc_RNA (1)...(19): siRNA sense strand
cagcaaguacaaaguagau

SEQ ID NO: 1741157 - RNA, 19 nt, Homo sapiens
  misc_RNA (1)...(19): siRNA sense strand
cuucuguuaugacguaguu

SEQ ID NO: 1741158 - RNA, 19 nt, Homo sapiens
  misc_RNA (1)...(19): siRNA sense strand
gaaguuccuguaauuucug

SEQ ID NO: 1741159 - RNA, 19 nt, Homo sapiens
  misc_RNA (1)...(19): siRNA sense strand
cuccagaaguuccuguaau

SEQ ID NO: 1741160 - RNA, 19 nt, Homo sapiens
  misc_RNA (1)...(19): siRNA sense strand
ugauagagagggcauucaa

SEQ ID NO: 1741161 - RNA, 19 nt, Homo sapiens
  misc_RNA (1)...(19): siRNA sense strand
ggucagagcuccagaaguu

SEQ ID NO: 1741162 - RNA, 19 nt, Homo sapiens
  misc_RNA (1)...(19): siRNA sense strand
cagaauaggugacuucauu

SEQ ID NO: 1741163 - RNA, 19 nt, Homo sapiens
  misc_RNA (1)...(19): siRNA sense strand
ggacauguauaagccuuua

SEQ ID NO: 1741164 - RNA, 19 nt, Homo sapiens
  misc_RNA (1)...(19): siRNA sense strand
acaaaguccugugaaauua

SEQ ID NO: 1741165 - RNA, 19 nt, Homo sapiens
  misc_RNA (1)...(19): siRNA sense strand
ugacagaaaugcggaauga

SEQ ID NO: 1741166 - RNA, 19 nt, Homo sapiens
  misc_RNA (1)...(19): siRNA sense strand
gaugaugggcugugugaua

SEQ ID NO: 1741167 - RNA, 19 nt, Homo sapiens
  misc_RNA (1)...(19): siRNA sense strand
cgacagaauugacagaaau

SEQ ID NO: 1741168 - RNA, 19 nt, Homo sapiens
  misc_RNA (1)...(19): siRNA sense strand
gaacugagaagauagaagu

SEQ ID NO: 1741169 - RNA, 19 nt, Homo sapiens
  misc_RNA (1)...(19): siRNA sense strand
gggauaagcuauuggaaag

SEQ ID NO: 1741170 - RNA, 19 nt, Homo sapiens
  misc_RNA (1)...(19): siRNA sense strand
gcaaguacaaaguagauuu

SEQ ID NO: 1741171 - RNA, 19 nt, Homo sapiens
  misc_RNA (1)...(19): siRNA sense strand
ggaaagaucucggaaaaug

SEQ ID NO: 1741172 - RNA, 19 nt, Homo sapiens
  misc_RNA (1)...(19): siRNA sense strand
gucuuuaccuguucacuua

SEQ ID NO: 1741173 - RNA, 19 nt, Homo sapiens
  misc_RNA (1)...(19): siRNA sense strand
gaagauagaaguuaagcau

SEQ ID NO: 1741174 - RNA, 19 nt, Homo sapiens
  misc_RNA (1)...(19): siRNA sense strand
gagagggcauucaaagaug

SEQ ID NO: 1741175 - RNA, 19 nt, Homo sapiens
  misc_RNA (1)...(19): siRNA sense strand
gauaagcuauuggaaagau

SEQ ID NO: 1741176 - RNA, 19 nt, Homo sapiens
  misc_RNA (1)...(19): siRNA sense strand
gccaggcaguuaucauuaa

SEQ ID NO: 1741177 - RNA, 19 nt, Homo sapiens
  misc_RNA (1)...(19): siRNA sense strand
caacaucgccagcuucuca

SEQ ID NO: 1741178 - RNA, 19 nt, Homo sapiens
  misc_RNA (1)...(19): siRNA sense strand
guauuuguuuccaguauga

SEQ ID NO: 1741179 - RNA, 19 nt, Homo sapiens
  misc_RNA (1)...(19): siRNA sense strand
gauagaaguuaagcauguu

SEQ ID NO: 1741180 - RNA, 19 nt, Homo sapiens
  misc_RNA (1)...(19): siRNA sense strand
gagaagugaauaaggcaua

SEQ ID NO: 1741181 - RNA, 19 nt, Homo sapiens
  misc_RNA (1)...(19): siRNA sense strand
agagaaagccaggcaguua

SEQ ID NO: 1741182 - RNA, 19 nt, Homo sapiens
  misc_RNA (1)...(19): siRNA sense strand
gaauaggugacuucauuga

SEQ ID NO: 1741183 - RNA, 19 nt, Homo sapiens
  misc_RNA (1)...(19): siRNA sense strand
uuaacaaaguccugugaaa

SEQ ID NO: 1741184 - RNA, 19 nt, Homo sapiens
  misc_RNA (1)...(19): siRNA sense strand
cugagaagauagaaguuaa

SEQ ID NO: 1741185 - RNA, 19 nt, Homo sapiens
  misc_RNA (1)...(19): siRNA sense strand
gcggaaugaucucuuuaau

SEQ ID NO: 1741186 - RNA, 19 nt, Homo sapiens
  misc_RNA (1)...(19): siRNA sense strand
gaauauauggucaauuugg

SEQ ID NO: 1741187 - RNA, 19 nt, Homo sapiens
  misc_RNA (1)...(19): siRNA sense strand
cggaaugaucucuuuaaua

SEQ ID NO: 1741188 - RNA, 19 nt, Homo sapiens
  misc_RNA (1)...(19): siRNA sense strand
caaaguccugugaaauuaa

SEQ ID NO: 1741189 - RNA, 19 nt, Homo sapiens
  misc_RNA (1)...(19): siRNA sense strand
agauagaaguuaagcaugu

SEQ ID NO: 1741190 - RNA, 19 nt, Homo sapiens
  misc_RNA (1)...(19): siRNA sense strand
uccagaaguuccuguaauu

SEQ ID NO: 1741191 - RNA, 19 nt, Homo sapiens
  misc_RNA (1)...(19): siRNA sense strand
gagaaagccaggcaguuau

SEQ ID NO: 1741192 - RNA, 19 nt, Homo sapiens
  misc_RNA (1)...(19): siRNA sense strand
ggagauuuauagcaacauc

SEQ ID NO: 1741193 - RNA, 19 nt, Homo sapiens
  misc_RNA (1)...(19): siRNA sense strand
gguacugucuucgugauga

SEQ ID NO: 1741194 - RNA, 19 nt, Homo sapiens
  misc_RNA (1)...(19): siRNA sense strand
ggacagccuugggacaugu

SEQ ID NO: 1741195 - RNA, 19 nt, Homo sapiens
  misc_RNA (1)...(19): siRNA sense strand
acacagcaaguacaaagua

SEQ ID NO: 1741196 - RNA, 19 nt, Homo sapiens
  misc_RNA (1)...(19): siRNA sense strand
caacacagcaaguacaaag

SEQ ID NO: 1741197 - RNA, 19 nt, Homo sapiens
  misc_RNA (1)...(19): siRNA sense strand
aaaguggcauuggaaauau

SEQ ID NO: 1741198 - RNA, 19 nt, Homo sapiens
  misc_RNA (1)...(19): siRNA sense strand
uaacaaaguccugugaaau

SEQ ID NO: 1741199 - RNA, 19 nt, Homo sapiens
  misc_RNA (1)...(19): siRNA sense strand
aacaaaguccugugaaauu

SEQ ID NO: 1741200 - RNA, 19 nt, Homo sapiens
  misc_RNA (1)...(19): siRNA sense strand
gauagagagggcauucaaa

SEQ ID NO: 1741201 - RNA, 19 nt, Homo sapiens
  misc_RNA (1)...(19): siRNA sense strand
guacugucuucgugaugaa

SEQ ID NO: 1741202 - RNA, 19 nt, Homo sapiens
  misc_RNA (1)...(19): siRNA sense strand
auaggugacuucauugaug

SEQ ID NO: 1741203 - RNA, 19 nt, Homo sapiens
  misc_RNA (1)...(19): siRNA sense strand
ccagaaguuccuguaauuu

SEQ ID NO: 1741204 - RNA, 19 nt, Homo sapiens
  misc_RNA (1)...(19): siRNA sense strand
gggugugucuuuaccuguu

SEQ ID NO: 1741205 - RNA, 19 nt, Homo sapiens
  misc_RNA (1)...(19): siRNA sense strand
gaucuuccauuugaaacuc

SEQ ID NO: 1741206 - RNA, 19 nt, Homo sapiens
  misc_RNA (1)...(19): siRNA sense strand
cagaaguuccuguaauuuc

SEQ ID NO: 1741207 - RNA, 19 nt, Homo sapiens
  misc_RNA (1)...(19): siRNA sense strand
ccaagucucauacgaagau

SEQ ID NO: 1741208 - RNA, 19 nt, Homo sapiens
  misc_RNA (1)...(19): siRNA sense strand
ccgacagaauugacagaaa

SEQ ID NO: 1741209 - RNA, 19 nt, Homo sapiens
  misc_RNA (1)...(19): siRNA sense strand
gagcacauuuuacaauaug

SEQ ID NO: 1741210 - RNA, 19 nt, Homo sapiens
  misc_RNA (1)...(19): siRNA sense strand
agagggcauucaaagauga

SEQ ID NO: 1741211 - RNA, 19 nt, Homo sapiens
  misc_RNA (1)...(19): siRNA sense strand
caaguacaaaguagauuuc

SEQ ID NO: 1741212 - RNA, 19 nt, Homo sapiens
  misc_RNA (1)...(19): siRNA sense strand
ugucagcaguucacaaucu

SEQ ID NO: 1741213 - RNA, 19 nt, Homo sapiens
  misc_RNA (1)...(19): siRNA sense strand
ugacuucauugaugugagu

SEQ ID NO: 1741214 - RNA, 19 nt, Homo sapiens
  misc_RNA (1)...(19): siRNA sense strand
ugccuucuguuaugacgua

SEQ ID NO: 1741215 - RNA, 19 nt, Homo sapiens
  misc_RNA (1)...(19): siRNA sense strand
uaggugacuucauugaugu

SEQ ID NO: 1741216 - RNA, 19 nt, Homo sapiens
  misc_RNA (1)...(19): siRNA sense strand
gaugcucaugcuuuaauuu

SEQ ID NO: 1741217 - RNA, 19 nt, Homo sapiens
  misc_RNA (1)...(19): siRNA sense strand
aaugcggaaugaucucuuu

SEQ ID NO: 1741218 - RNA, 19 nt, Homo sapiens
  misc_RNA (1)...(19): siRNA sense strand
agagagggcauucaaagau

SEQ ID NO: 1741219 - RNA, 19 nt, Homo sapiens
  misc_RNA (1)...(19): siRNA sense strand
uuucaaagauugugaucca

SEQ ID NO: 1741220 - RNA, 19 nt, Homo sapiens
  misc_RNA (1)...(19): siRNA sense strand
gaaagccaggcaguuauca

SEQ ID NO: 1741221 - RNA, 19 nt, Homo sapiens
  misc_RNA (1)...(19): siRNA sense strand
uacaauaugggauaagcua

SEQ ID NO: 1741222 - RNA, 19 nt, Homo sapiens
  misc_RNA (1)...(19): siRNA sense strand
uagucaagcuacacagaau

SEQ ID NO: 1741223 - RNA, 19 nt, Homo sapiens
  misc_RNA (1)...(19): siRNA sense strand
augaguggaugccaacaaa

SEQ ID NO: 1741224 - RNA, 19 nt, Homo sapiens
  misc_RNA (1)...(19): siRNA sense strand
ucuggugccuucuguuaug

SEQ ID NO: 1741225 - RNA, 19 nt, Homo sapiens
  misc_RNA (1)...(19): siRNA sense strand
cauuucaacucccuacagu

SEQ ID NO: 1741226 - RNA, 19 nt, Homo sapiens
  misc_RNA (1)...(19): siRNA sense strand
ugagagaauagucaagcua

SEQ ID NO: 1741227 - RNA, 19 nt, Homo sapiens
  misc_RNA (1)...(19): siRNA sense strand
acaguugugccaugcauuu

SEQ ID NO: 1741228 - RNA, 19 nt, Homo sapiens
  misc_RNA (1)...(19): siRNA sense strand
agaagugaauaaggcauau

SEQ ID NO: 1741229 - RNA, 19 nt, Homo sapiens
  misc_RNA (1)...(19): siRNA sense strand
aaaaguggcauuggaaaua

SEQ ID NO: 1741230 - RNA, 19 nt, Homo sapiens
  misc_RNA (1)...(19): siRNA sense strand
gcauuuaagcgagugguau

SEQ ID NO: 1741231 - RNA, 19 nt, Homo sapiens
  misc_RNA (1)...(19): siRNA sense strand
acagaaaugcggaaugauc

SEQ ID NO: 1741232 - RNA, 19 nt, Homo sapiens
  misc_RNA (1)...(19): siRNA sense strand
gaugaguggaugccaacaa

SEQ ID NO: 1741233 - RNA, 19 nt, Homo sapiens
  misc_RNA (1)...(19): siRNA sense strand
gcuccagaaguuccuguaa

SEQ ID NO: 1741234 - RNA, 19 nt, Homo sapiens
  misc_RNA (1)...(19): siRNA sense strand
gauccaggagaagugaaua

SEQ ID NO: 1741235 - RNA, 19 nt, Homo sapiens
  misc_RNA (1)...(19): siRNA sense strand
ugggauaagcuauuggaaa

SEQ ID NO: 1741236 - RNA, 19 nt, Homo sapiens
  misc_RNA (1)...(19): siRNA sense strand
ccagccaagucucauacga

SEQ ID NO: 1741237 - RNA, 19 nt, Homo sapiens
  misc_RNA (1)...(19): siRNA sense strand
uagagagggcauucaaaga

SEQ ID NO: 1741238 - RNA, 19 nt, Homo sapiens
  misc_RNA (1)...(19): siRNA sense strand
uuucuggugccuucuguua

SEQ ID NO: 1741239 - RNA, 19 nt, Homo sapiens
  misc_RNA (1)...(19): siRNA sense strand
gauuccagggugugucuuu

SEQ ID NO: 1741240 - RNA, 19 nt, Homo sapiens
  misc_RNA (1)...(19): siRNA sense strand
cagccaagucucauacgaa

SEQ ID NO: 1741241 - RNA, 19 nt, Homo sapiens
  misc_RNA (1)...(19): siRNA sense strand
uaugaagugucagcaguuc

SEQ ID NO: 1741242 - RNA, 19 nt, Homo sapiens
  misc_RNA (1)...(19): siRNA sense strand
guaugaagugucagcaguu

SEQ ID NO: 1741243 - RNA, 19 nt, Homo sapiens
  misc_RNA (1)...(19): siRNA sense strand
caaguauuuguuuccagua

SEQ ID NO: 1741244 - RNA, 19 nt, Homo sapiens
  misc_RNA (1)...(19): siRNA sense strand
uggcguuccugugcuauga

SEQ ID NO: 1741245 - RNA, 19 nt, Homo sapiens
  misc_RNA (1)...(19): siRNA sense strand
gaaaugcggaaugaucucu

SEQ ID NO: 1741246 - RNA, 19 nt, Homo sapiens
  misc_RNA (1)...(19): siRNA sense strand
gucagcaguucacaaucuu

SEQ ID NO: 1741247 - RNA, 19 nt, Homo sapiens
  misc_RNA (1)...(19): siRNA sense strand
gacagaauugacagaaaug

SEQ ID NO: 1741248 - RNA, 19 nt, Homo sapiens
  misc_RNA (1)...(19): siRNA sense strand
acacagaauaggugacuuc

SEQ ID NO: 1741249 - RNA, 19 nt, Homo sapiens
  misc_RNA (1)...(19): siRNA sense strand
guagauuucauagaagaga

SEQ ID NO: 1741250 - RNA, 19 nt, Homo sapiens
  misc_RNA (1)...(19): siRNA sense strand
cagcaaguacaaaguagau

SEQ ID NO: 1741251 - RNA, 19 nt, Homo sapiens
  misc_RNA (1)...(19): siRNA sense strand
cuucuguuaugacguaguu

SEQ ID NO: 1741252 - RNA, 19 nt, Homo sapiens
  misc_RNA (1)...(19): siRNA sense strand
gaaguuccuguaauuucug

SEQ ID NO: 1741253 - RNA, 19 nt, Homo sapiens
  misc_RNA (1)...(19): siRNA sense strand
cuccagaaguuccuguaau

SEQ ID NO: 1741254 - RNA, 19 nt, Homo sapiens
  misc_RNA (1)...(19): siRNA sense strand
ugauagagagggcauucaa

SEQ ID NO: 1741255 - RNA, 19 nt, Homo sapiens
  misc_RNA (1)...(19): siRNA sense strand
gaugggcugugugauagag

SEQ ID NO: 1741256 - RNA, 19 nt, Homo sapiens
  misc_RNA (1)...(19): siRNA sense strand
cacagcaaguacaaaguag

SEQ ID NO: 1741257 - RNA, 19 nt, Homo sapiens
  misc_RNA (1)...(19): siRNA sense strand
gcaaaaguggcauuggaaa

SEQ ID NO: 1741258 - RNA, 19 nt, Homo sapiens
  misc_RNA (1)...(19): siRNA sense strand
guugugccaugcauuuaag

SEQ ID NO: 1741259 - RNA, 19 nt, Homo sapiens
  misc_RNA (1)...(19): siRNA sense strand
acugagaagauagaaguua

SEQ ID NO: 1741260 - RNA, 19 nt, Homo sapiens
  misc_RNA (1)...(19): siRNA sense strand
cagaaaugcggaaugaucu

SEQ ID NO: 1741261 - RNA, 19 nt, Homo sapiens
  misc_RNA (1)...(19): siRNA sense strand
gugaggagaucguggucua

SEQ ID NO: 1741262 - RNA, 19 nt, Homo sapiens
  misc_RNA (1)...(19): siRNA sense strand
gaagaggcccaucguguuc

SEQ ID NO: 1741263 - RNA, 19 nt, Homo sapiens
  misc_RNA (1)...(19): siRNA sense strand
gcgcaacuauucacacuac

SEQ ID NO: 1741264 - RNA, 19 nt, Homo sapiens
  misc_RNA (1)...(19): siRNA sense strand
gagacacgcucuacauggu

SEQ ID NO: 1741265 - RNA, 19 nt, Homo sapiens
  misc_RNA (1)...(19): siRNA sense strand
ggucuucucugccgucuac

SEQ ID NO: 1741266 - RNA, 19 nt, Homo sapiens
  misc_RNA (1)...(19): siRNA sense strand
cuagaugagugucagaugu

SEQ ID NO: 1741267 - RNA, 19 nt, Homo sapiens
  misc_RNA (1)...(19): siRNA sense strand
caacuauucacacuacuuc

SEQ ID NO: 1741268 - RNA, 19 nt, Homo sapiens
  misc_RNA (1)...(19): siRNA sense strand
gcaacuauucacacuacuu

SEQ ID NO: 1741269 - RNA, 19 nt, Homo sapiens
  misc_RNA (1)...(19): siRNA sense strand
uagaugagugucagaugua

SEQ ID NO: 1741270 - RNA, 19 nt, Homo sapiens
  misc_RNA (1)...(19): siRNA sense strand
agaagaggcccaucguguu

SEQ ID NO: 1741271 - RNA, 19 nt, Homo sapiens
  misc_RNA (1)...(19): siRNA sense strand
gaggagaucguggucuaug

SEQ ID NO: 1741272 - RNA, 19 nt, Homo sapiens
  misc_RNA (1)...(19): siRNA sense strand
guccagcuccggccaaaug

SEQ ID NO: 1741273 - RNA, 19 nt, Homo sapiens
  misc_RNA (1)...(19): siRNA sense strand
ggacgagacgggcaagaac

SEQ ID NO: 1741274 - RNA, 19 nt, Homo sapiens
  misc_RNA (1)...(19): siRNA sense strand
ggucggcucgugcucauca

SEQ ID NO: 1741275 - RNA, 19 nt, Homo sapiens
  misc_RNA (1)...(19): siRNA sense strand
ggagcugugugaggagauc

SEQ ID NO: 1741276 - RNA, 19 nt, Homo sapiens
  misc_RNA (1)...(19): siRNA sense strand
ugccuuaccacuacuuuga

SEQ ID NO: 1741277 - RNA, 19 nt, Homo sapiens
  misc_RNA (1)...(19): siRNA sense strand
ccuuaccacuacuuugaga

SEQ ID NO: 1741278 - RNA, 19 nt, Homo sapiens
  misc_RNA (1)...(19): siRNA sense strand
ucacugagaaggcggucuu

SEQ ID NO: 1741279 - RNA, 19 nt, Homo sapiens
  misc_RNA (1)...(19): siRNA sense strand
gcuagaugagugucagaug

SEQ ID NO: 1741280 - RNA, 19 nt, Homo sapiens
  misc_RNA (1)...(19): siRNA sense strand
gugaggagaucguggucua

SEQ ID NO: 1741281 - RNA, 19 nt, Homo sapiens
  misc_RNA (1)...(19): siRNA sense strand
gaagaggcccaucguguuc

SEQ ID NO: 1741282 - RNA, 19 nt, Homo sapiens
  misc_RNA (1)...(19): siRNA sense strand
gcgcaacuauucacacuac

SEQ ID NO: 1741283 - RNA, 19 nt, Homo sapiens
  misc_RNA (1)...(19): siRNA sense strand
gagacacgcucuacauggu

SEQ ID NO: 1741284 - RNA, 19 nt, Homo sapiens
  misc_RNA (1)...(19): siRNA sense strand
ggucuucucugccgucuac

SEQ ID NO: 1741285 - RNA, 19 nt, Homo sapiens
  misc_RNA (1)...(19): siRNA sense strand
cuagaugagugucagaugu

SEQ ID NO: 1741286 - RNA, 19 nt, Homo sapiens
  misc_RNA (1)...(19): siRNA sense strand
caacuauucacacuacuuc

SEQ ID NO: 1741287 - RNA, 19 nt, Homo sapiens
  misc_RNA (1)...(19): siRNA sense strand
gcaacuauucacacuacuu

SEQ ID NO: 1741288 - RNA, 19 nt, Homo sapiens
  misc_RNA (1)...(19): siRNA sense strand
uagaugagugucagaugua

SEQ ID NO: 1741289 - RNA, 19 nt, Homo sapiens
  misc_RNA (1)...(19): siRNA sense strand
agaagaggcccaucguguu

SEQ ID NO: 1741290 - RNA, 19 nt, Homo sapiens
  misc_RNA (1)...(19): siRNA sense strand
gaggagaucguggucuaug

SEQ ID NO: 1741291 - RNA, 19 nt, Homo sapiens
  misc_RNA (1)...(19): siRNA sense strand
guccagcuccggccaaaug

SEQ ID NO: 1741292 - RNA, 19 nt, Homo sapiens
  misc_RNA (1)...(19): siRNA sense strand
ggacgagacgggcaagaac

SEQ ID NO: 1741293 - RNA, 19 nt, Homo sapiens
  misc_RNA (1)...(19): siRNA sense strand
ggucggcucgugcucauca

SEQ ID NO: 1741294 - RNA, 19 nt, Homo sapiens
  misc_RNA (1)...(19): siRNA sense strand
ggagcugugugaggagauc

SEQ ID NO: 1741295 - RNA, 19 nt, Homo sapiens
  misc_RNA (1)...(19): siRNA sense strand
ugccuuaccacuacuuuga

SEQ ID NO: 1741296 - RNA, 19 nt, Homo sapiens
  misc_RNA (1)...(19): siRNA sense strand
ccuuaccacuacuuugaga

SEQ ID NO: 1741297 - RNA, 19 nt, Homo sapiens
  misc_RNA (1)...(19): siRNA sense strand
ucacugagaaggcggucuu

SEQ ID NO: 1741298 - RNA, 19 nt, Homo sapiens
  misc_RNA (1)...(19): siRNA sense strand
gcuagaugagugucagaug

SEQ ID NO: 1741299 - RNA, 19 nt, Homo sapiens
  misc_RNA (1)...(19): siRNA sense strand
gugaggagaucguggucua

SEQ ID NO: 1741300 - RNA, 19 nt, Homo sapiens
  misc_RNA (1)...(19): siRNA sense strand
gaagaggcccaucguguuc

SEQ ID NO: 1741301 - RNA, 19 nt, Homo sapiens
  misc_RNA (1)...(19): siRNA sense strand
gcgcaacuauucacacuac

SEQ ID NO: 1741302 - RNA, 19 nt, Homo sapiens
  misc_RNA (1)...(19): siRNA sense strand
gagacacgcucuacauggu

SEQ ID NO: 1741303 - RNA, 19 nt, Homo sapiens
  misc_RNA (1)...(19): siRNA sense strand
cuagaugagugucagaugu

SEQ ID NO: 1741304 - RNA, 19 nt, Homo sapiens
  misc_RNA (1)...(19): siRNA sense strand
caacuauucacacuacuuc

SEQ ID NO: 1741305 - RNA, 19 nt, Homo sapiens
  misc_RNA (1)...(19): siRNA sense strand
gcaacuauucacacuacuu

SEQ ID NO: 1741306 - RNA, 19 nt, Homo sapiens
  misc_RNA (1)...(19): siRNA sense strand
uagaugagugucagaugua

SEQ ID NO: 1741307 - RNA, 19 nt, Homo sapiens
  misc_RNA (1)...(19): siRNA sense strand
agaagaggcccaucguguu

SEQ ID NO: 1741308 - RNA, 19 nt, Homo sapiens
  misc_RNA (1)...(19): siRNA sense strand
gaggagaucguggucuaug

SEQ ID NO: 1741309 - RNA, 19 nt, Homo sapiens
  misc_RNA (1)...(19): siRNA sense strand
ggacgagacgggcaagaac

SEQ ID NO: 1741310 - RNA, 19 nt, Homo sapiens
  misc_RNA (1)...(19): siRNA sense strand
ggagcugugugaggagauc

SEQ ID NO: 1741311 - RNA, 19 nt, Homo sapiens
  misc_RNA (1)...(19): siRNA sense strand
ugccuuaccacuacuuuga

SEQ ID NO: 1741312 - RNA, 19 nt, Homo sapiens
  misc_RNA (1)...(19): siRNA sense strand
ccuuaccacuacuuugaga

SEQ ID NO: 1741313 - RNA, 19 nt, Homo sapiens
  misc_RNA (1)...(19): siRNA sense strand
ucacugagaaggcggucuu

SEQ ID NO: 1741314 - RNA, 19 nt, Homo sapiens
  misc_RNA (1)...(19): siRNA sense strand
gcuagaugagugucagaug

SEQ ID NO: 1741315 - RNA, 19 nt, Homo sapiens
  misc_RNA (1)...(19): siRNA sense strand
gcaaagagcuggaaaagaa

SEQ ID NO: 1741316 - RNA, 19 nt, Homo sapiens
  misc_RNA (1)...(19): siRNA sense strand
gaucauuccuuuaguuuag

SEQ ID NO: 1741317 - RNA, 19 nt, Homo sapiens
  misc_RNA (1)...(19): siRNA sense strand
gauaguggcaucuguauga

SEQ ID NO: 1741318 - RNA, 19 nt, Homo sapiens
  misc_RNA (1)...(19): siRNA sense strand
cgacuuggaugcccuguug

SEQ ID NO: 1741319 - RNA, 19 nt, Homo sapiens
  misc_RNA (1)...(19): siRNA sense strand
gaagaaagccuaggucucu

SEQ ID NO: 1741320 - RNA, 19 nt, Homo sapiens
  misc_RNA (1)...(19): siRNA sense strand
ggguauagaugaccuggaa

SEQ ID NO: 1741321 - RNA, 19 nt, Homo sapiens
  misc_RNA (1)...(19): siRNA sense strand
uccaguaccugaaagauuu

SEQ ID NO: 1741322 - RNA, 19 nt, Homo sapiens
  misc_RNA (1)...(19): siRNA sense strand
cagauuggauguuggagaa

SEQ ID NO: 1741323 - RNA, 19 nt, Homo sapiens
  misc_RNA (1)...(19): siRNA sense strand
ccugaaagauuugauagaa

SEQ ID NO: 1741324 - RNA, 19 nt, Homo sapiens
  misc_RNA (1)...(19): siRNA sense strand
ccagaucauuccuuuaguu

SEQ ID NO: 1741325 - RNA, 19 nt, Homo sapiens
  misc_RNA (1)...(19): siRNA sense strand
ugacacuugugaucucuuu

SEQ ID NO: 1741326 - RNA, 19 nt, Homo sapiens
  misc_RNA (1)...(19): siRNA sense strand
caugaucccucagugcaua

SEQ ID NO: 1741327 - RNA, 19 nt, Homo sapiens
  misc_RNA (1)...(19): siRNA sense strand
ugaaggaguucgacuugga

SEQ ID NO: 1741328 - RNA, 19 nt, Homo sapiens
  misc_RNA (1)...(19): siRNA sense strand
guuuagagcugggcaguga

SEQ ID NO: 1741329 - RNA, 19 nt, Homo sapiens
  misc_RNA (1)...(19): siRNA sense strand
gccuaggucucuuagauga

SEQ ID NO: 1741330 - RNA, 19 nt, Homo sapiens
  misc_RNA (1)...(19): siRNA sense strand
ggagauccaguaccugaaa

SEQ ID NO: 1741331 - RNA, 19 nt, Homo sapiens
  misc_RNA (1)...(19): siRNA sense strand
guaccugaaagauuugaua

SEQ ID NO: 1741332 - RNA, 19 nt, Homo sapiens
  misc_RNA (1)...(19): siRNA sense strand
ggacagauuggauguugga

SEQ ID NO: 1741333 - RNA, 19 nt, Homo sapiens
  misc_RNA (1)...(19): siRNA sense strand
gaagaacgaggcucuaaaa

SEQ ID NO: 1741334 - RNA, 19 nt, Homo sapiens
  misc_RNA (1)...(19): siRNA sense strand
uggaaaccaugccagauga

SEQ ID NO: 1741335 - RNA, 19 nt, Homo sapiens
  misc_RNA (1)...(19): siRNA sense strand
uagaugaccuggaaaccau

SEQ ID NO: 1741336 - RNA, 19 nt, Homo sapiens
  misc_RNA (1)...(19): siRNA sense strand
ccaaggagauccaguaccu

SEQ ID NO: 1741337 - RNA, 19 nt, Homo sapiens
  misc_RNA (1)...(19): siRNA sense strand
cuaggucucuuagaugauu

SEQ ID NO: 1741338 - RNA, 19 nt, Homo sapiens
  misc_RNA (1)...(19): siRNA sense strand
gaugguagcagcaaaagua

SEQ ID NO: 1741339 - RNA, 19 nt, Homo sapiens
  misc_RNA (1)...(19): siRNA sense strand
ggaugacacuugugaucuc

SEQ ID NO: 1741340 - RNA, 19 nt, Homo sapiens
  misc_RNA (1)...(19): siRNA sense strand
agaaagccuaggucucuua

SEQ ID NO: 1741341 - RNA, 19 nt, Homo sapiens
  misc_RNA (1)...(19): siRNA sense strand
aagccuaggucucuuagau

SEQ ID NO: 1741342 - RNA, 19 nt, Homo sapiens
  misc_RNA (1)...(19): siRNA sense strand
cggauucccuggccaagga

SEQ ID NO: 1741343 - RNA, 19 nt, Homo sapiens
  misc_RNA (1)...(19): siRNA sense strand
cagaucauuccuuuaguuu

SEQ ID NO: 1741344 - RNA, 19 nt, Homo sapiens
  misc_RNA (1)...(19): siRNA sense strand
agacagcagccacuaggua

SEQ ID NO: 1741345 - RNA, 19 nt, Homo sapiens
  misc_RNA (1)...(19): siRNA sense strand
cgggacagauuggauguug

SEQ ID NO: 1741346 - RNA, 19 nt, Homo sapiens
  misc_RNA (1)...(19): siRNA sense strand
uggaugcccuguuggguau

SEQ ID NO: 1741347 - RNA, 19 nt, Homo sapiens
  misc_RNA (1)...(19): siRNA sense strand
gaacccaauuggccaucuc

SEQ ID NO: 1741348 - RNA, 19 nt, Homo sapiens
  misc_RNA (1)...(19): siRNA sense strand
cuagguaccgccagaagaa

SEQ ID NO: 1741349 - RNA, 19 nt, Homo sapiens
  misc_RNA (1)...(19): siRNA sense strand
agaagaugguagcagcaaa

SEQ ID NO: 1741350 - RNA, 19 nt, Homo sapiens
  misc_RNA (1)...(19): siRNA sense strand
gaaggaguucgacuuggau

SEQ ID NO: 1741351 - RNA, 19 nt, Homo sapiens
  misc_RNA (1)...(19): siRNA sense strand
gaaagccuaggucucuuag

SEQ ID NO: 1741352 - RNA, 19 nt, Homo sapiens
  misc_RNA (1)...(19): siRNA sense strand
gagaagaugguagcagcaa

SEQ ID NO: 1741353 - RNA, 19 nt, Homo sapiens
  misc_RNA (1)...(19): siRNA sense strand
gucagucccuccaacaaca

SEQ ID NO: 1741354 - RNA, 19 nt, Homo sapiens
  misc_RNA (1)...(19): siRNA sense strand
ggccaucucccagaaaguu

SEQ ID NO: 1741355 - RNA, 19 nt, Homo sapiens
  misc_RNA (1)...(19): siRNA sense strand
ccaucucccagaaaguuua

SEQ ID NO: 1741356 - RNA, 19 nt, Homo sapiens
  misc_RNA (1)...(19): siRNA sense strand
gagauccaguaccugaaag

SEQ ID NO: 1741357 - RNA, 19 nt, Homo sapiens
  misc_RNA (1)...(19): siRNA sense strand
ggagguggccaagcacuuc

SEQ ID NO: 1741358 - RNA, 19 nt, Homo sapiens
  misc_RNA (1)...(19): siRNA sense strand
gaagaugguagcagcaaaa

SEQ ID NO: 1741359 - RNA, 19 nt, Homo sapiens
  misc_RNA (1)...(19): siRNA sense strand
uaaugauaguggcaucugu

SEQ ID NO: 1741360 - RNA, 19 nt, Homo sapiens
  misc_RNA (1)...(19): siRNA sense strand
ccacguuggaugacacuug

SEQ ID NO: 1741361 - RNA, 19 nt, Homo sapiens
  misc_RNA (1)...(19): siRNA sense strand
gcugggcagugaaguggau

SEQ ID NO: 1741362 - RNA, 19 nt, Homo sapiens
  misc_RNA (1)...(19): siRNA sense strand
gaugacacuugugaucucu

SEQ ID NO: 1741363 - RNA, 19 nt, Homo sapiens
  misc_RNA (1)...(19): siRNA sense strand
ucccagaaaguuuaacaaa

SEQ ID NO: 1741364 - RNA, 19 nt, Homo sapiens
  misc_RNA (1)...(19): siRNA sense strand
agaagaacgaggcucuaaa

SEQ ID NO: 1741365 - RNA, 19 nt, Homo sapiens
  misc_RNA (1)...(19): siRNA sense strand
aagaagaacgaggcucuaa

SEQ ID NO: 1741366 - RNA, 19 nt, Homo sapiens
  misc_RNA (1)...(19): siRNA sense strand
cacguuggaugacacuugu

SEQ ID NO: 1741367 - RNA, 19 nt, Homo sapiens
  misc_RNA (1)...(19): siRNA sense strand
cacuccagaucauuccuuu

SEQ ID NO: 1741368 - RNA, 19 nt, Homo sapiens
  misc_RNA (1)...(19): siRNA sense strand
aaugauaguggcaucugua

SEQ ID NO: 1741369 - RNA, 19 nt, Homo sapiens
  misc_RNA (1)...(19): siRNA sense strand
ccucccaucuccagguguu

SEQ ID NO: 1741370 - RNA, 19 nt, Homo sapiens
  misc_RNA (1)...(19): siRNA sense strand
guaugagcccagaguccua

SEQ ID NO: 1741371 - RNA, 19 nt, Homo sapiens
  misc_RNA (1)...(19): siRNA sense strand
cugaaagauuugauagaag

SEQ ID NO: 1741372 - RNA, 19 nt, Homo sapiens
  misc_RNA (1)...(19): siRNA sense strand
accaggggcucuccaaaua

SEQ ID NO: 1741373 - RNA, 19 nt, Homo sapiens
  misc_RNA (1)...(19): siRNA sense strand
cccagaaaguuuaacaaaa

SEQ ID NO: 1741374 - RNA, 19 nt, Homo sapiens
  misc_RNA (1)...(19): siRNA sense strand
aguaaagggugagaaacug

SEQ ID NO: 1741375 - RNA, 19 nt, Homo sapiens
  misc_RNA (1)...(19): siRNA sense strand
uaggucucuuagaugauua

SEQ ID NO: 1741376 - RNA, 19 nt, Homo sapiens
  misc_RNA (1)...(19): siRNA sense strand
gauuggauguuggagaaaa

SEQ ID NO: 1741377 - RNA, 19 nt, Homo sapiens
  misc_RNA (1)...(19): siRNA sense strand
cccagacggugaacccaau

SEQ ID NO: 1741378 - RNA, 19 nt, Homo sapiens
  misc_RNA (1)...(19): siRNA sense strand
agacaccccuucagauaau

SEQ ID NO: 1741379 - RNA, 19 nt, Homo sapiens
  misc_RNA (1)...(19): siRNA sense strand
gaaagauuugauagaagag

SEQ ID NO: 1741380 - RNA, 19 nt, Homo sapiens
  misc_RNA (1)...(19): siRNA sense strand
uggccaaggagauccagua

SEQ ID NO: 1741381 - RNA, 19 nt, Homo sapiens
  misc_RNA (1)...(19): siRNA sense strand
aaaaguaaagggugagaaa

SEQ ID NO: 1741382 - RNA, 19 nt, Homo sapiens
  misc_RNA (1)...(19): siRNA sense strand
gcaaagagcuggaaaagaa

SEQ ID NO: 1741383 - RNA, 19 nt, Homo sapiens
  misc_RNA (1)...(19): siRNA sense strand
gaucauuccuuuaguuuag

SEQ ID NO: 1741384 - RNA, 19 nt, Homo sapiens
  misc_RNA (1)...(19): siRNA sense strand
gauaguggcaucuguauga

SEQ ID NO: 1741385 - RNA, 19 nt, Homo sapiens
  misc_RNA (1)...(19): siRNA sense strand
cgacuuggaugcccuguug

SEQ ID NO: 1741386 - RNA, 19 nt, Homo sapiens
  misc_RNA (1)...(19): siRNA sense strand
gaagaaagccuaggucucu

SEQ ID NO: 1741387 - RNA, 19 nt, Homo sapiens
  misc_RNA (1)...(19): siRNA sense strand
ggguauagaugaccuggaa

SEQ ID NO: 1741388 - RNA, 19 nt, Homo sapiens
  misc_RNA (1)...(19): siRNA sense strand
uccaguaccugaaagauuu

SEQ ID NO: 1741389 - RNA, 19 nt, Homo sapiens
  misc_RNA (1)...(19): siRNA sense strand
cagauuggauguuggagaa

SEQ ID NO: 1741390 - RNA, 19 nt, Homo sapiens
  misc_RNA (1)...(19): siRNA sense strand
ccugaaagauuugauagaa

SEQ ID NO: 1741391 - RNA, 19 nt, Homo sapiens
  misc_RNA (1)...(19): siRNA sense strand
ccagaucauuccuuuaguu

SEQ ID NO: 1741392 - RNA, 19 nt, Homo sapiens
  misc_RNA (1)...(19): siRNA sense strand
ugacacuugugaucucuuu

SEQ ID NO: 1741393 - RNA, 19 nt, Homo sapiens
  misc_RNA (1)...(19): siRNA sense strand
caugaucccucagugcaua

SEQ ID NO: 1741394 - RNA, 19 nt, Homo sapiens
  misc_RNA (1)...(19): siRNA sense strand
ugaaggaguucgacuugga

SEQ ID NO: 1741395 - RNA, 19 nt, Homo sapiens
  misc_RNA (1)...(19): siRNA sense strand
guuuagagcugggcaguga

SEQ ID NO: 1741396 - RNA, 19 nt, Homo sapiens
  misc_RNA (1)...(19): siRNA sense strand
gccuaggucucuuagauga

SEQ ID NO: 1741397 - RNA, 19 nt, Homo sapiens
  misc_RNA (1)...(19): siRNA sense strand
ggagauccaguaccugaaa

SEQ ID NO: 1741398 - RNA, 19 nt, Homo sapiens
  misc_RNA (1)...(19): siRNA sense strand
guaccugaaagauuugaua

SEQ ID NO: 1741399 - RNA, 19 nt, Homo sapiens
  misc_RNA (1)...(19): siRNA sense strand
ggacagauuggauguugga

SEQ ID NO: 1741400 - RNA, 19 nt, Homo sapiens
  misc_RNA (1)...(19): siRNA sense strand
gaagaacgaggcucuaaaa

SEQ ID NO: 1741401 - RNA, 19 nt, Homo sapiens
  misc_RNA (1)...(19): siRNA sense strand
uggaaaccaugccagauga

SEQ ID NO: 1741402 - RNA, 19 nt, Homo sapiens
  misc_RNA (1)...(19): siRNA sense strand
uagaugaccuggaaaccau

SEQ ID NO: 1741403 - RNA, 19 nt, Homo sapiens
  misc_RNA (1)...(19): siRNA sense strand
ccaaggagauccaguaccu

SEQ ID NO: 1741404 - RNA, 19 nt, Homo sapiens
  misc_RNA (1)...(19): siRNA sense strand
cuaggucucuuagaugauu

SEQ ID NO: 1741405 - RNA, 19 nt, Homo sapiens
  misc_RNA (1)...(19): siRNA sense strand
gaugguagcagcaaaagua

SEQ ID NO: 1741406 - RNA, 19 nt, Homo sapiens
  misc_RNA (1)...(19): siRNA sense strand
ggaugacacuugugaucuc

SEQ ID NO: 1741407 - RNA, 19 nt, Homo sapiens
  misc_RNA (1)...(19): siRNA sense strand
agaaagccuaggucucuua

SEQ ID NO: 1741408 - RNA, 19 nt, Homo sapiens
  misc_RNA (1)...(19): siRNA sense strand
aagccuaggucucuuagau

SEQ ID NO: 1741409 - RNA, 19 nt, Homo sapiens
  misc_RNA (1)...(19): siRNA sense strand
cggauucccuggccaagga

SEQ ID NO: 1741410 - RNA, 19 nt, Homo sapiens
  misc_RNA (1)...(19): siRNA sense strand
cagaucauuccuuuaguuu

SEQ ID NO: 1741411 - RNA, 19 nt, Homo sapiens
  misc_RNA (1)...(19): siRNA sense strand
agacagcagccacuaggua

SEQ ID NO: 1741412 - RNA, 19 nt, Homo sapiens
  misc_RNA (1)...(19): siRNA sense strand
cgggacagauuggauguug

SEQ ID NO: 1741413 - RNA, 19 nt, Homo sapiens
  misc_RNA (1)...(19): siRNA sense strand
uggaugcccuguuggguau

SEQ ID NO: 1741414 - RNA, 19 nt, Homo sapiens
  misc_RNA (1)...(19): siRNA sense strand
gaacccaauuggccaucuc

SEQ ID NO: 1741415 - RNA, 19 nt, Homo sapiens
  misc_RNA (1)...(19): siRNA sense strand
cuagguaccgccagaagaa

SEQ ID NO: 1741416 - RNA, 19 nt, Homo sapiens
  misc_RNA (1)...(19): siRNA sense strand
agaagaugguagcagcaaa

SEQ ID NO: 1741417 - RNA, 19 nt, Homo sapiens
  misc_RNA (1)...(19): siRNA sense strand
gaaggaguucgacuuggau

SEQ ID NO: 1741418 - RNA, 19 nt, Homo sapiens
  misc_RNA (1)...(19): siRNA sense strand
gaaagccuaggucucuuag

SEQ ID NO: 1741419 - RNA, 19 nt, Homo sapiens
  misc_RNA (1)...(19): siRNA sense strand
gagaagaugguagcagcaa

SEQ ID NO: 1741420 - RNA, 19 nt, Homo sapiens
  misc_RNA (1)...(19): siRNA sense strand
gucagucccuccaacaaca

SEQ ID NO: 1741421 - RNA, 19 nt, Homo sapiens
  misc_RNA (1)...(19): siRNA sense strand
ggccaucucccagaaaguu

SEQ ID NO: 1741422 - RNA, 19 nt, Homo sapiens
  misc_RNA (1)...(19): siRNA sense strand
ccaucucccagaaaguuua

SEQ ID NO: 1741423 - RNA, 19 nt, Homo sapiens
  misc_RNA (1)...(19): siRNA sense strand
gagauccaguaccugaaag

SEQ ID NO: 1741424 - RNA, 19 nt, Homo sapiens
  misc_RNA (1)...(19): siRNA sense strand
ggagguggccaagcacuuc

SEQ ID NO: 1741425 - RNA, 19 nt, Homo sapiens
  misc_RNA (1)...(19): siRNA sense strand
gaagaugguagcagcaaaa

SEQ ID NO: 1741426 - RNA, 19 nt, Homo sapiens
  misc_RNA (1)...(19): siRNA sense strand
uaaugauaguggcaucugu

SEQ ID NO: 1741427 - RNA, 19 nt, Homo sapiens
  misc_RNA (1)...(19): siRNA sense strand
ccacguuggaugacacuug

SEQ ID NO: 1741428 - RNA, 19 nt, Homo sapiens
  misc_RNA (1)...(19): siRNA sense strand
gcugggcagugaaguggau

SEQ ID NO: 1741429 - RNA, 19 nt, Homo sapiens
  misc_RNA (1)...(19): siRNA sense strand
gaugacacuugugaucucu

SEQ ID NO: 1741430 - RNA, 19 nt, Homo sapiens
  misc_RNA (1)...(19): siRNA sense strand
ucccagaaaguuuaacaaa

SEQ ID NO: 1741431 - RNA, 19 nt, Homo sapiens
  misc_RNA (1)...(19): siRNA sense strand
agaagaacgaggcucuaaa

SEQ ID NO: 1741432 - RNA, 19 nt, Homo sapiens
  misc_RNA (1)...(19): siRNA sense strand
aagaagaacgaggcucuaa

SEQ ID NO: 1741433 - RNA, 19 nt, Homo sapiens
  misc_RNA (1)...(19): siRNA sense strand
cacguuggaugacacuugu

SEQ ID NO: 1741434 - RNA, 19 nt, Homo sapiens
  misc_RNA (1)...(19): siRNA sense strand
cacuccagaucauuccuuu

SEQ ID NO: 1741435 - RNA, 19 nt, Homo sapiens
  misc_RNA (1)...(19): siRNA sense strand
aaugauaguggcaucugua

SEQ ID NO: 1741436 - RNA, 19 nt, Homo sapiens
  misc_RNA (1)...(19): siRNA sense strand
ccucccaucuccagguguu

SEQ ID NO: 1741437 - RNA, 19 nt, Homo sapiens
  misc_RNA (1)...(19): siRNA sense strand
guaugagcccagaguccua

SEQ ID NO: 1741438 - RNA, 19 nt, Homo sapiens
  misc_RNA (1)...(19): siRNA sense strand
cugaaagauuugauagaag

SEQ ID NO: 1741439 - RNA, 19 nt, Homo sapiens
  misc_RNA (1)...(19): siRNA sense strand
accaggggcucuccaaaua

SEQ ID NO: 1741440 - RNA, 19 nt, Homo sapiens
  misc_RNA (1)...(19): siRNA sense strand
cccagaaaguuuaacaaaa

SEQ ID NO: 1741441 - RNA, 19 nt, Homo sapiens
  misc_RNA (1)...(19): siRNA sense strand
aguaaagggugagaaacug

SEQ ID NO: 1741442 - RNA, 19 nt, Homo sapiens
  misc_RNA (1)...(19): siRNA sense strand
uaggucucuuagaugauua

SEQ ID NO: 1741443 - RNA, 19 nt, Homo sapiens
  misc_RNA (1)...(19): siRNA sense strand
gauuggauguuggagaaaa

SEQ ID NO: 1741444 - RNA, 19 nt, Homo sapiens
  misc_RNA (1)...(19): siRNA sense strand
cccagacggugaacccaau

SEQ ID NO: 1741445 - RNA, 19 nt, Homo sapiens
  misc_RNA (1)...(19): siRNA sense strand
agacaccccuucagauaau

SEQ ID NO: 1741446 - RNA, 19 nt, Homo sapiens
  misc_RNA (1)...(19): siRNA sense strand
gaaagauuugauagaagag

SEQ ID NO: 1741447 - RNA, 19 nt, Homo sapiens
  misc_RNA (1)...(19): siRNA sense strand
uggccaaggagauccagua

SEQ ID NO: 1741448 - RNA, 19 nt, Homo sapiens
  misc_RNA (1)...(19): siRNA sense strand
aaaaguaaagggugagaaa

SEQ ID NO: 1741449 - RNA, 19 nt, Homo sapiens
  misc_RNA (1)...(19): siRNA sense strand
gcacagagcugcacuccaa

SEQ ID NO: 1741450 - RNA, 19 nt, Homo sapiens
  misc_RNA (1)...(19): siRNA sense strand
gagcugaccuucaucaaga

SEQ ID NO: 1741451 - RNA, 19 nt, Homo sapiens
  misc_RNA (1)...(19): siRNA sense strand
agagaaacauggcccaaua

SEQ ID NO: 1741452 - RNA, 19 nt, Homo sapiens
  misc_RNA (1)...(19): siRNA sense strand
gagcugcacuccaaugaga

SEQ ID NO: 1741453 - RNA, 19 nt, Homo sapiens
  misc_RNA (1)...(19): siRNA sense strand
aaaccaaggcugagaaaua

SEQ ID NO: 1741454 - RNA, 19 nt, Homo sapiens
  misc_RNA (1)...(19): siRNA sense strand
ggaagaagcagcugugguu

SEQ ID NO: 1741455 - RNA, 19 nt, Homo sapiens
  misc_RNA (1)...(19): siRNA sense strand
ccaaccagcuuaagaggaa

SEQ ID NO: 1741456 - RNA, 19 nt, Homo sapiens
  misc_RNA (1)...(19): siRNA sense strand
gaagugaacauguggauca

SEQ ID NO: 1741457 - RNA, 19 nt, Homo sapiens
  misc_RNA (1)...(19): siRNA sense strand
ccaaggaccugaagaacau

SEQ ID NO: 1741458 - RNA, 19 nt, Homo sapiens
  misc_RNA (1)...(19): siRNA sense strand
gagcagugccuuugaagaa

SEQ ID NO: 1741459 - RNA, 19 nt, Homo sapiens
  misc_RNA (1)...(19): siRNA sense strand
gaaccaggcccucuucaug

SEQ ID NO: 1741460 - RNA, 19 nt, Homo sapiens
  misc_RNA (1)...(19): siRNA sense strand
gaggaccacugcagcauug

SEQ ID NO: 1741461 - RNA, 19 nt, Homo sapiens
  misc_RNA (1)...(19): siRNA sense strand
aaacauggcccaauacuuc

SEQ ID NO: 1741462 - RNA, 19 nt, Homo sapiens
  misc_RNA (1)...(19): siRNA sense strand
ggaagauccucaucaagca

SEQ ID NO: 1741463 - RNA, 19 nt, Homo sapiens
  misc_RNA (1)...(19): siRNA sense strand
gcaacucuaucaagaaugg

SEQ ID NO: 1741464 - RNA, 19 nt, Homo sapiens
  misc_RNA (1)...(19): siRNA sense strand
gcaccaagcagaagacaga

SEQ ID NO: 1741465 - RNA, 19 nt, Homo sapiens
  misc_RNA (1)...(19): siRNA sense strand
caaacccuaugccaacuuu

SEQ ID NO: 1741466 - RNA, 19 nt, Homo sapiens
  misc_RNA (1)...(19): siRNA sense strand
gcagcaagaucuacuacuc

SEQ ID NO: 1741467 - RNA, 19 nt, Homo sapiens
  misc_RNA (1)...(19): siRNA sense strand
ucacauugcuuugucauuc

SEQ ID NO: 1741468 - RNA, 19 nt, Homo sapiens
  misc_RNA (1)...(19): siRNA sense strand
aggaagacauguuuaguga

SEQ ID NO: 1741469 - RNA, 19 nt, Homo sapiens
  misc_RNA (1)...(19): siRNA sense strand
caaacuacguggaagagau

SEQ ID NO: 1741470 - RNA, 19 nt, Homo sapiens
  misc_RNA (1)...(19): siRNA sense strand
caagagggccagacaguga

SEQ ID NO: 1741471 - RNA, 19 nt, Homo sapiens
  misc_RNA (1)...(19): siRNA sense strand
cagcaacucuaucaagaau

SEQ ID NO: 1741472 - RNA, 19 nt, Homo sapiens
  misc_RNA (1)...(19): siRNA sense strand
gggcuuaacuuggcugaug

SEQ ID NO: 1741473 - RNA, 19 nt, Homo sapiens
  misc_RNA (1)...(19): siRNA sense strand
caacucauaugccaucucu

SEQ ID NO: 1741474 - RNA, 19 nt, Homo sapiens
  misc_RNA (1)...(19): siRNA sense strand
ggagaauggugaccucagu

SEQ ID NO: 1741475 - RNA, 19 nt, Homo sapiens
  misc_RNA (1)...(19): siRNA sense strand
ggauguugcugccgacuca

SEQ ID NO: 1741476 - RNA, 19 nt, Homo sapiens
  misc_RNA (1)...(19): siRNA sense strand
gaugggaugccaguuauuu

SEQ ID NO: 1741477 - RNA, 19 nt, Homo sapiens
  misc_RNA (1)...(19): siRNA sense strand
ucucugaacuugucgucua

SEQ ID NO: 1741478 - RNA, 19 nt, Homo sapiens
  misc_RNA (1)...(19): siRNA sense strand
ggaccagucacauugcuuu

SEQ ID NO: 1741479 - RNA, 19 nt, Homo sapiens
  misc_RNA (1)...(19): siRNA sense strand
gagugucccuuccugaguu

SEQ ID NO: 1741480 - RNA, 19 nt, Homo sapiens
  misc_RNA (1)...(19): siRNA sense strand
gaaacauggcccaauacuu

SEQ ID NO: 1741481 - RNA, 19 nt, Homo sapiens
  misc_RNA (1)...(19): siRNA sense strand
ggaaaccaaggcugagaaa

SEQ ID NO: 1741482 - RNA, 19 nt, Homo sapiens
  misc_RNA (1)...(19): siRNA sense strand
gcacagcugagccugacua

SEQ ID NO: 1741483 - RNA, 19 nt, Homo sapiens
  misc_RNA (1)...(19): siRNA sense strand
caucagcuacuaugagaaa

SEQ ID NO: 1741484 - RNA, 19 nt, Homo sapiens
  misc_RNA (1)...(19): siRNA sense strand
caugugccaucucuauuga

SEQ ID NO: 1741485 - RNA, 19 nt, Homo sapiens
  misc_RNA (1)...(19): siRNA sense strand
gaagaccucacgggacuuu

SEQ ID NO: 1741486 - RNA, 19 nt, Homo sapiens
  misc_RNA (1)...(19): siRNA sense strand
gcaccgucaugacuuuguu

SEQ ID NO: 1741487 - RNA, 19 nt, Homo sapiens
  misc_RNA (1)...(19): siRNA sense strand
gaugggcugucgcugcauu

SEQ ID NO: 1741488 - RNA, 19 nt, Homo sapiens
  misc_RNA (1)...(19): siRNA sense strand
gaggaagacauguuuagug

SEQ ID NO: 1741489 - RNA, 19 nt, Homo sapiens
  misc_RNA (1)...(19): siRNA sense strand
ggagcucucugaacuuguc

SEQ ID NO: 1741490 - RNA, 19 nt, Homo sapiens
  misc_RNA (1)...(19): siRNA sense strand
gcagcuggaugcaguaugc

SEQ ID NO: 1741491 - RNA, 19 nt, Homo sapiens
  misc_RNA (1)...(19): siRNA sense strand
gaaggacucgggucaaugg

SEQ ID NO: 1741492 - RNA, 19 nt, Homo sapiens
  misc_RNA (1)...(19): siRNA sense strand
gcagugccuuugaagaaca

SEQ ID NO: 1741493 - RNA, 19 nt, Homo sapiens
  misc_RNA (1)...(19): siRNA sense strand
gaauggaauuucgccugaa

SEQ ID NO: 1741494 - RNA, 19 nt, Homo sapiens
  misc_RNA (1)...(19): siRNA sense strand
ugaagaacaacuacaguga

SEQ ID NO: 1741495 - RNA, 19 nt, Homo sapiens
  misc_RNA (1)...(19): siRNA sense strand
cgacaucugccaaagaaug

SEQ ID NO: 1741496 - RNA, 19 nt, Homo sapiens
  misc_RNA (1)...(19): siRNA sense strand
gaccaguucuccagugagu

SEQ ID NO: 1741497 - RNA, 19 nt, Homo sapiens
  misc_RNA (1)...(19): siRNA sense strand
gggaccaguucuccaguga

SEQ ID NO: 1741498 - RNA, 19 nt, Homo sapiens
  misc_RNA (1)...(19): siRNA sense strand
gcaguuugcucagcuguac

SEQ ID NO: 1741499 - RNA, 19 nt, Homo sapiens
  misc_RNA (1)...(19): siRNA sense strand
ugacaagccuaugcagaug

SEQ ID NO: 1741500 - RNA, 19 nt, Homo sapiens
  misc_RNA (1)...(19): siRNA sense strand
acgcaacccuggcuucuau

SEQ ID NO: 1741501 - RNA, 19 nt, Homo sapiens
  misc_RNA (1)...(19): siRNA sense strand
gcgacuacacgcucucuuu

SEQ ID NO: 1741502 - RNA, 19 nt, Homo sapiens
  misc_RNA (1)...(19): siRNA sense strand
ccagucauccuguccauug

SEQ ID NO: 1741503 - RNA, 19 nt, Homo sapiens
  misc_RNA (1)...(19): siRNA sense strand
ccaccaagaucaaguucuc

SEQ ID NO: 1741504 - RNA, 19 nt, Homo sapiens
  misc_RNA (1)...(19): siRNA sense strand
gcaguuccuucuugacuac

SEQ ID NO: 1741505 - RNA, 19 nt, Homo sapiens
  misc_RNA (1)...(19): siRNA sense strand
acucauaugccaucucuuu

SEQ ID NO: 1741506 - RNA, 19 nt, Homo sapiens
  misc_RNA (1)...(19): siRNA sense strand
acagagcagugccuuugaa

SEQ ID NO: 1741507 - RNA, 19 nt, Homo sapiens
  misc_RNA (1)...(19): siRNA sense strand
cccgacaucugccaaagaa

SEQ ID NO: 1741508 - RNA, 19 nt, Homo sapiens
  misc_RNA (1)...(19): siRNA sense strand
ugacauucgugaaauuaag

SEQ ID NO: 1741509 - RNA, 19 nt, Homo sapiens
  misc_RNA (1)...(19): siRNA sense strand
gcugauggaggauacauug

SEQ ID NO: 1741510 - RNA, 19 nt, Homo sapiens
  misc_RNA (1)...(19): siRNA sense strand
guaugaggaagacauguuu

SEQ ID NO: 1741511 - RNA, 19 nt, Homo sapiens
  misc_RNA (1)...(19): siRNA sense strand
aagagaagauuggcacaga

SEQ ID NO: 1741512 - RNA, 19 nt, Homo sapiens
  misc_RNA (1)...(19): siRNA sense strand
gggacacacuccucaccaa

SEQ ID NO: 1741513 - RNA, 19 nt, Homo sapiens
  misc_RNA (1)...(19): siRNA sense strand
gacaucagcaacucuauca

SEQ ID NO: 1741514 - RNA, 19 nt, Homo sapiens
  misc_RNA (1)...(19): siRNA sense strand
uuucaagugugcagucaaa

SEQ ID NO: 1741515 - RNA, 19 nt, Homo sapiens
  misc_RNA (1)...(19): siRNA sense strand
gaucgaggagccauacuuc

SEQ ID NO: 1741516 - RNA, 19 nt, Homo sapiens
  misc_RNA (1)...(19): siRNA sense strand
cauugacauucgugaaauu

SEQ ID NO: 1741517 - RNA, 19 nt, Homo sapiens
  misc_RNA (1)...(19): siRNA sense strand
gcauugcccagcagagaaa

SEQ ID NO: 1741518 - RNA, 19 nt, Homo sapiens
  misc_RNA (1)...(19): siRNA sense strand
cggaugggaugccaguuau

SEQ ID NO: 1741519 - RNA, 19 nt, Homo sapiens
  misc_RNA (1)...(19): siRNA sense strand
aagaucaaguucucagaug

SEQ ID NO: 1741520 - RNA, 19 nt, Homo sapiens
  misc_RNA (1)...(19): siRNA sense strand
gggagcacuuggacgagaa

SEQ ID NO: 1741521 - RNA, 19 nt, Homo sapiens
  misc_RNA (1)...(19): siRNA sense strand
aagcugcgcuaucccauca

SEQ ID NO: 1741522 - RNA, 19 nt, Homo sapiens
  misc_RNA (1)...(19): siRNA sense strand
ggaguucgacagccuuguu

SEQ ID NO: 1741523 - RNA, 19 nt, Homo sapiens
  misc_RNA (1)...(19): siRNA sense strand
acaacccucuuucccacua

SEQ ID NO: 1741524 - RNA, 19 nt, Homo sapiens
  misc_RNA (1)...(19): siRNA sense strand
agagaagauuggcacagaa

SEQ ID NO: 1741525 - RNA, 19 nt, Homo sapiens
  misc_RNA (1)...(19): siRNA sense strand
gcugagcgccugcuuacug

SEQ ID NO: 1741526 - RNA, 19 nt, Homo sapiens
  misc_RNA (1)...(19): siRNA sense strand
uggaugaguuugucaccuu

SEQ ID NO: 1741527 - RNA, 19 nt, Homo sapiens
  misc_RNA (1)...(19): siRNA sense strand
ccaagcagaagacagaguu

SEQ ID NO: 1741528 - RNA, 19 nt, Homo sapiens
  misc_RNA (1)...(19): siRNA sense strand
ugacuuuguucuacuccaa

SEQ ID NO: 1741529 - RNA, 19 nt, Homo sapiens
  misc_RNA (1)...(19): siRNA sense strand
ccggaugggaugccaguua

SEQ ID NO: 1741530 - RNA, 19 nt, Homo sapiens
  misc_RNA (1)...(19): siRNA sense strand
ccacaccccugcagauuga

SEQ ID NO: 1741531 - RNA, 19 nt, Homo sapiens
  misc_RNA (1)...(19): siRNA sense strand
gagcaucucgcagaccauu

SEQ ID NO: 1741532 - RNA, 19 nt, Homo sapiens
  misc_RNA (1)...(19): siRNA sense strand
gcuaccagcagccguuuga

SEQ ID NO: 1741533 - RNA, 19 nt, Homo sapiens
  misc_RNA (1)...(19): siRNA sense strand
cucagucccuucaguggua

SEQ ID NO: 1741534 - RNA, 19 nt, Homo sapiens
  misc_RNA (1)...(19): siRNA sense strand
acaagccuaugcagaugaa

SEQ ID NO: 1741535 - RNA, 19 nt, Homo sapiens
  misc_RNA (1)...(19): siRNA sense strand
aaccaaggcugagaaauac

SEQ ID NO: 1741536 - RNA, 19 nt, Homo sapiens
  misc_RNA (1)...(19): siRNA sense strand
gccauugacauucgugaaa

SEQ ID NO: 1741537 - RNA, 19 nt, Homo sapiens
  misc_RNA (1)...(19): siRNA sense strand
gagcacaggcugagcacau

SEQ ID NO: 1741538 - RNA, 19 nt, Homo sapiens
  misc_RNA (1)...(19): siRNA sense strand
ccauugacauucgugaaau

SEQ ID NO: 1741539 - RNA, 19 nt, Homo sapiens
  misc_RNA (1)...(19): siRNA sense strand
cgucaugacuuuguucuac

SEQ ID NO: 1741540 - RNA, 19 nt, Homo sapiens
  misc_RNA (1)...(19): siRNA sense strand
ggagccaugugccaucucu

SEQ ID NO: 1741541 - RNA, 19 nt, Homo sapiens
  misc_RNA (1)...(19): siRNA sense strand
gaggaugaagugaacaugu

SEQ ID NO: 1741542 - RNA, 19 nt, Homo sapiens
  misc_RNA (1)...(19): siRNA sense strand
aagaaggacucgggucaau

SEQ ID NO: 1741543 - RNA, 19 nt, Homo sapiens
  misc_RNA (1)...(19): siRNA sense strand
ggccggaccagucacauug

SEQ ID NO: 1741544 - RNA, 19 nt, Homo sapiens
  misc_RNA (1)...(19): siRNA sense strand
cagccaagcccuuccacuu

SEQ ID NO: 1741545 - RNA, 19 nt, Homo sapiens
  misc_RNA (1)...(19): siRNA sense strand
ccagucacauugcuuuguc

SEQ ID NO: 1741546 - RNA, 19 nt, Homo sapiens
  misc_RNA (1)...(19): siRNA sense strand
ccaugugccaucucuauug

SEQ ID NO: 1741547 - RNA, 19 nt, Homo sapiens
  misc_RNA (1)...(19): siRNA sense strand
caagcaccaugcgggauga

SEQ ID NO: 1741548 - RNA, 19 nt, Homo sapiens
  misc_RNA (1)...(19): siRNA sense strand
gcugagaaauacgugaaca

SEQ ID NO: 1741549 - RNA, 19 nt, Homo sapiens
  misc_RNA (1)...(19): siRNA sense strand
gcacagagcugcacuccaa

SEQ ID NO: 1741550 - RNA, 19 nt, Homo sapiens
  misc_RNA (1)...(19): siRNA sense strand
gagcugaccuucaucaaga

SEQ ID NO: 1741551 - RNA, 19 nt, Homo sapiens
  misc_RNA (1)...(19): siRNA sense strand
agagaaacauggcccaaua

SEQ ID NO: 1741552 - RNA, 19 nt, Homo sapiens
  misc_RNA (1)...(19): siRNA sense strand
gagcugcacuccaaugaga

SEQ ID NO: 1741553 - RNA, 19 nt, Homo sapiens
  misc_RNA (1)...(19): siRNA sense strand
aaaccaaggcugagaaaua

SEQ ID NO: 1741554 - RNA, 19 nt, Homo sapiens
  misc_RNA (1)...(19): siRNA sense strand
ggaagaagcagcugugguu

SEQ ID NO: 1741555 - RNA, 19 nt, Homo sapiens
  misc_RNA (1)...(19): siRNA sense strand
ccaaccagcuuaagaggaa

SEQ ID NO: 1741556 - RNA, 19 nt, Homo sapiens
  misc_RNA (1)...(19): siRNA sense strand
gaagugaacauguggauca

SEQ ID NO: 1741557 - RNA, 19 nt, Homo sapiens
  misc_RNA (1)...(19): siRNA sense strand
ccaaggaccugaagaacau

SEQ ID NO: 1741558 - RNA, 19 nt, Homo sapiens
  misc_RNA (1)...(19): siRNA sense strand
gagcagugccuuugaagaa

SEQ ID NO: 1741559 - RNA, 19 nt, Homo sapiens
  misc_RNA (1)...(19): siRNA sense strand
gaaccaggcccucuucaug

SEQ ID NO: 1741560 - RNA, 19 nt, Homo sapiens
  misc_RNA (1)...(19): siRNA sense strand
gaggaccacugcagcauug

SEQ ID NO: 1741561 - RNA, 19 nt, Homo sapiens
  misc_RNA (1)...(19): siRNA sense strand
aaacauggcccaauacuuc

SEQ ID NO: 1741562 - RNA, 19 nt, Homo sapiens
  misc_RNA (1)...(19): siRNA sense strand
ggaagauccucaucaagca

SEQ ID NO: 1741563 - RNA, 19 nt, Homo sapiens
  misc_RNA (1)...(19): siRNA sense strand
gcaacucuaucaagaaugg

SEQ ID NO: 1741564 - RNA, 19 nt, Homo sapiens
  misc_RNA (1)...(19): siRNA sense strand
gcaccaagcagaagacaga

SEQ ID NO: 1741565 - RNA, 19 nt, Homo sapiens
  misc_RNA (1)...(19): siRNA sense strand
caaacccuaugccaacuuu

SEQ ID NO: 1741566 - RNA, 19 nt, Homo sapiens
  misc_RNA (1)...(19): siRNA sense strand
gcagcaagaucuacuacuc

SEQ ID NO: 1741567 - RNA, 19 nt, Homo sapiens
  misc_RNA (1)...(19): siRNA sense strand
ucacauugcuuugucauuc

SEQ ID NO: 1741568 - RNA, 19 nt, Homo sapiens
  misc_RNA (1)...(19): siRNA sense strand
aggaagacauguuuaguga

SEQ ID NO: 1741569 - RNA, 19 nt, Homo sapiens
  misc_RNA (1)...(19): siRNA sense strand
caaacuacguggaagagau

SEQ ID NO: 1741570 - RNA, 19 nt, Homo sapiens
  misc_RNA (1)...(19): siRNA sense strand
caagagggccagacaguga

SEQ ID NO: 1741571 - RNA, 19 nt, Homo sapiens
  misc_RNA (1)...(19): siRNA sense strand
cagcaacucuaucaagaau

SEQ ID NO: 1741572 - RNA, 19 nt, Homo sapiens
  misc_RNA (1)...(19): siRNA sense strand
gggcuuaacuuggcugaug

SEQ ID NO: 1741573 - RNA, 19 nt, Homo sapiens
  misc_RNA (1)...(19): siRNA sense strand
caacucauaugccaucucu

SEQ ID NO: 1741574 - RNA, 19 nt, Homo sapiens
  misc_RNA (1)...(19): siRNA sense strand
ggagaauggugaccucagu

SEQ ID NO: 1741575 - RNA, 19 nt, Homo sapiens
  misc_RNA (1)...(19): siRNA sense strand
ggauguugcugccgacuca

SEQ ID NO: 1741576 - RNA, 19 nt, Homo sapiens
  misc_RNA (1)...(19): siRNA sense strand
gaugggaugccaguuauuu

SEQ ID NO: 1741577 - RNA, 19 nt, Homo sapiens
  misc_RNA (1)...(19): siRNA sense strand
ucucugaacuugucgucua

SEQ ID NO: 1741578 - RNA, 19 nt, Homo sapiens
  misc_RNA (1)...(19): siRNA sense strand
ggaccagucacauugcuuu

SEQ ID NO: 1741579 - RNA, 19 nt, Homo sapiens
  misc_RNA (1)...(19): siRNA sense strand
gagugucccuuccugaguu

SEQ ID NO: 1741580 - RNA, 19 nt, Homo sapiens
  misc_RNA (1)...(19): siRNA sense strand
gaaacauggcccaauacuu

SEQ ID NO: 1741581 - RNA, 19 nt, Homo sapiens
  misc_RNA (1)...(19): siRNA sense strand
ggaaaccaaggcugagaaa

SEQ ID NO: 1741582 - RNA, 19 nt, Homo sapiens
  misc_RNA (1)...(19): siRNA sense strand
gcacagcugagccugacua

SEQ ID NO: 1741583 - RNA, 19 nt, Homo sapiens
  misc_RNA (1)...(19): siRNA sense strand
caucagcuacuaugagaaa

SEQ ID NO: 1741584 - RNA, 19 nt, Homo sapiens
  misc_RNA (1)...(19): siRNA sense strand
caugugccaucucuauuga

SEQ ID NO: 1741585 - RNA, 19 nt, Homo sapiens
  misc_RNA (1)...(19): siRNA sense strand
gaagaccucacgggacuuu

SEQ ID NO: 1741586 - RNA, 19 nt, Homo sapiens
  misc_RNA (1)...(19): siRNA sense strand
gcaccgucaugacuuuguu

SEQ ID NO: 1741587 - RNA, 19 nt, Homo sapiens
  misc_RNA (1)...(19): siRNA sense strand
gaugggcugucgcugcauu

SEQ ID NO: 1741588 - RNA, 19 nt, Homo sapiens
  misc_RNA (1)...(19): siRNA sense strand
gaggaagacauguuuagug

SEQ ID NO: 1741589 - RNA, 19 nt, Homo sapiens
  misc_RNA (1)...(19): siRNA sense strand
ggagcucucugaacuuguc

SEQ ID NO: 1741590 - RNA, 19 nt, Homo sapiens
  misc_RNA (1)...(19): siRNA sense strand
gcagcuggaugcaguaugc

SEQ ID NO: 1741591 - RNA, 19 nt, Homo sapiens
  misc_RNA (1)...(19): siRNA sense strand
gaaggacucgggucaaugg

SEQ ID NO: 1741592 - RNA, 19 nt, Homo sapiens
  misc_RNA (1)...(19): siRNA sense strand
gcagugccuuugaagaaca

SEQ ID NO: 1741593 - RNA, 19 nt, Homo sapiens
  misc_RNA (1)...(19): siRNA sense strand
gaauggaauuucgccugaa

SEQ ID NO: 1741594 - RNA, 19 nt, Homo sapiens
  misc_RNA (1)...(19): siRNA sense strand
ugaagaacaacuacaguga

SEQ ID NO: 1741595 - RNA, 19 nt, Homo sapiens
  misc_RNA (1)...(19): siRNA sense strand
cgacaucugccaaagaaug

SEQ ID NO: 1741596 - RNA, 19 nt, Homo sapiens
  misc_RNA (1)...(19): siRNA sense strand
gaccaguucuccagugagu

SEQ ID NO: 1741597 - RNA, 19 nt, Homo sapiens
  misc_RNA (1)...(19): siRNA sense strand
gggaccaguucuccaguga

SEQ ID NO: 1741598 - RNA, 19 nt, Homo sapiens
  misc_RNA (1)...(19): siRNA sense strand
gcaguuugcucagcuguac

SEQ ID NO: 1741599 - RNA, 19 nt, Homo sapiens
  misc_RNA (1)...(19): siRNA sense strand
ugacaagccuaugcagaug

SEQ ID NO: 1741600 - RNA, 19 nt, Homo sapiens
  misc_RNA (1)...(19): siRNA sense strand
acgcaacccuggcuucuau

SEQ ID NO: 1741601 - RNA, 19 nt, Homo sapiens
  misc_RNA (1)...(19): siRNA sense strand
gcgacuacacgcucucuuu

SEQ ID NO: 1741602 - RNA, 19 nt, Homo sapiens
  misc_RNA (1)...(19): siRNA sense strand
ccagucauccuguccauug

SEQ ID NO: 1741603 - RNA, 19 nt, Homo sapiens
  misc_RNA (1)...(19): siRNA sense strand
ccaccaagaucaaguucuc

SEQ ID NO: 1741604 - RNA, 19 nt, Homo sapiens
  misc_RNA (1)...(19): siRNA sense strand
gcaguuccuucuugacuac

SEQ ID NO: 1741605 - RNA, 19 nt, Homo sapiens
  misc_RNA (1)...(19): siRNA sense strand
acucauaugccaucucuuu

SEQ ID NO: 1741606 - RNA, 19 nt, Homo sapiens
  misc_RNA (1)...(19): siRNA sense strand
acagagcagugccuuugaa

SEQ ID NO: 1741607 - RNA, 19 nt, Homo sapiens
  misc_RNA (1)...(19): siRNA sense strand
cccgacaucugccaaagaa

SEQ ID NO: 1741608 - RNA, 19 nt, Homo sapiens
  misc_RNA (1)...(19): siRNA sense strand
ugacauucgugaaauuaag

SEQ ID NO: 1741609 - RNA, 19 nt, Homo sapiens
  misc_RNA (1)...(19): siRNA sense strand
gcugauggaggauacauug

SEQ ID NO: 1741610 - RNA, 19 nt, Homo sapiens
  misc_RNA (1)...(19): siRNA sense strand
guaugaggaagacauguuu

SEQ ID NO: 1741611 - RNA, 19 nt, Homo sapiens
  misc_RNA (1)...(19): siRNA sense strand
aagagaagauuggcacaga

SEQ ID NO: 1741612 - RNA, 19 nt, Homo sapiens
  misc_RNA (1)...(19): siRNA sense strand
gggacacacuccucaccaa

SEQ ID NO: 1741613 - RNA, 19 nt, Homo sapiens
  misc_RNA (1)...(19): siRNA sense strand
gacaucagcaacucuauca

SEQ ID NO: 1741614 - RNA, 19 nt, Homo sapiens
  misc_RNA (1)...(19): siRNA sense strand
uuucaagugugcagucaaa

SEQ ID NO: 1741615 - RNA, 19 nt, Homo sapiens
  misc_RNA (1)...(19): siRNA sense strand
gaucgaggagccauacuuc

SEQ ID NO: 1741616 - RNA, 19 nt, Homo sapiens
  misc_RNA (1)...(19): siRNA sense strand
cauugacauucgugaaauu

SEQ ID NO: 1741617 - RNA, 19 nt, Homo sapiens
  misc_RNA (1)...(19): siRNA sense strand
gcauugcccagcagagaaa

SEQ ID NO: 1741618 - RNA, 19 nt, Homo sapiens
  misc_RNA (1)...(19): siRNA sense strand
cggaugggaugccaguuau

SEQ ID NO: 1741619 - RNA, 19 nt, Homo sapiens
  misc_RNA (1)...(19): siRNA sense strand
aagaucaaguucucagaug

SEQ ID NO: 1741620 - RNA, 19 nt, Homo sapiens
  misc_RNA (1)...(19): siRNA sense strand
gggagcacuuggacgagaa

SEQ ID NO: 1741621 - RNA, 19 nt, Homo sapiens
  misc_RNA (1)...(19): siRNA sense strand
aagcugcgcuaucccauca

SEQ ID NO: 1741622 - RNA, 19 nt, Homo sapiens
  misc_RNA (1)...(19): siRNA sense strand
ggaguucgacagccuuguu

SEQ ID NO: 1741623 - RNA, 19 nt, Homo sapiens
  misc_RNA (1)...(19): siRNA sense strand
acaacccucuuucccacua

SEQ ID NO: 1741624 - RNA, 19 nt, Homo sapiens
  misc_RNA (1)...(19): siRNA sense strand
agagaagauuggcacagaa

SEQ ID NO: 1741625 - RNA, 19 nt, Homo sapiens
  misc_RNA (1)...(19): siRNA sense strand
gcugagcgccugcuuacug

SEQ ID NO: 1741626 - RNA, 19 nt, Homo sapiens
  misc_RNA (1)...(19): siRNA sense strand
uggaugaguuugucaccuu

SEQ ID NO: 1741627 - RNA, 19 nt, Homo sapiens
  misc_RNA (1)...(19): siRNA sense strand
ccaagcagaagacagaguu

SEQ ID NO: 1741628 - RNA, 19 nt, Homo sapiens
  misc_RNA (1)...(19): siRNA sense strand
ugacuuuguucuacuccaa

SEQ ID NO: 1741629 - RNA, 19 nt, Homo sapiens
  misc_RNA (1)...(19): siRNA sense strand
ccggaugggaugccaguua

SEQ ID NO: 1741630 - RNA, 19 nt, Homo sapiens
  misc_RNA (1)...(19): siRNA sense strand
ccacaccccugcagauuga

SEQ ID NO: 1741631 - RNA, 19 nt, Homo sapiens
  misc_RNA (1)...(19): siRNA sense strand
gagcaucucgcagaccauu

SEQ ID NO: 1741632 - RNA, 19 nt, Homo sapiens
  misc_RNA (1)...(19): siRNA sense strand
gcuaccagcagccguuuga

SEQ ID NO: 1741633 - RNA, 19 nt, Homo sapiens
  misc_RNA (1)...(19): siRNA sense strand
cucagucccuucaguggua

SEQ ID NO: 1741634 - RNA, 19 nt, Homo sapiens
  misc_RNA (1)...(19): siRNA sense strand
acaagccuaugcagaugaa

SEQ ID NO: 1741635 - RNA, 19 nt, Homo sapiens
  misc_RNA (1)...(19): siRNA sense strand
aaccaaggcugagaaauac

SEQ ID NO: 1741636 - RNA, 19 nt, Homo sapiens
  misc_RNA (1)...(19): siRNA sense strand
gccauugacauucgugaaa

SEQ ID NO: 1741637 - RNA, 19 nt, Homo sapiens
  misc_RNA (1)...(19): siRNA sense strand
gagcacaggcugagcacau

SEQ ID NO: 1741638 - RNA, 19 nt, Homo sapiens
  misc_RNA (1)...(19): siRNA sense strand
ccauugacauucgugaaau

SEQ ID NO: 1741639 - RNA, 19 nt, Homo sapiens
  misc_RNA (1)...(19): siRNA sense strand
cgucaugacuuuguucuac

SEQ ID NO: 1741640 - RNA, 19 nt, Homo sapiens
  misc_RNA (1)...(19): siRNA sense strand
ggagccaugugccaucucu

SEQ ID NO: 1741641 - RNA, 19 nt, Homo sapiens
  misc_RNA (1)...(19): siRNA sense strand
gaggaugaagugaacaugu

SEQ ID NO: 1741642 - RNA, 19 nt, Homo sapiens
  misc_RNA (1)...(19): siRNA sense strand
aagaaggacucgggucaau

SEQ ID NO: 1741643 - RNA, 19 nt, Homo sapiens
  misc_RNA (1)...(19): siRNA sense strand
ggccggaccagucacauug

SEQ ID NO: 1741644 - RNA, 19 nt, Homo sapiens
  misc_RNA (1)...(19): siRNA sense strand
cagccaagcccuuccacuu

SEQ ID NO: 1741645 - RNA, 19 nt, Homo sapiens
  misc_RNA (1)...(19): siRNA sense strand
ccagucacauugcuuuguc

SEQ ID NO: 1741646 - RNA, 19 nt, Homo sapiens
  misc_RNA (1)...(19): siRNA sense strand
ccaugugccaucucuauug

SEQ ID NO: 1741647 - RNA, 19 nt, Homo sapiens
  misc_RNA (1)...(19): siRNA sense strand
caagcaccaugcgggauga

SEQ ID NO: 1741648 - RNA, 19 nt, Homo sapiens
  misc_RNA (1)...(19): siRNA sense strand
gcugagaaauacgugaaca

SEQ ID NO: 1741649 - RNA, 19 nt, Homo sapiens
  misc_RNA (1)...(19): siRNA sense strand
gaagaaugcuggugacuua

SEQ ID NO: 1741650 - RNA, 19 nt, Homo sapiens
  misc_RNA (1)...(19): siRNA sense strand
ccacagaaauuagagguua

SEQ ID NO: 1741651 - RNA, 19 nt, Homo sapiens
  misc_RNA (1)...(19): siRNA sense strand
gcaggaagcucagaaagga

SEQ ID NO: 1741652 - RNA, 19 nt, Homo sapiens
  misc_RNA (1)...(19): siRNA sense strand
gagcagacuucuucuaugu

SEQ ID NO: 1741653 - RNA, 19 nt, Homo sapiens
  misc_RNA (1)...(19): siRNA sense strand
gaaaggagucagugaauug

SEQ ID NO: 1741654 - RNA, 19 nt, Homo sapiens
  misc_RNA (1)...(19): siRNA sense strand
gaaaggacauugcagaacu

SEQ ID NO: 1741655 - RNA, 19 nt, Homo sapiens
  misc_RNA (1)...(19): siRNA sense strand
ucagaagccuggucauuga

SEQ ID NO: 1741656 - RNA, 19 nt, Homo sapiens
  misc_RNA (1)...(19): siRNA sense strand
gaggagagcagacuucuuc

SEQ ID NO: 1741657 - RNA, 19 nt, Homo sapiens
  misc_RNA (1)...(19): siRNA sense strand
gcagacuucuucuaugugu

SEQ ID NO: 1741658 - RNA, 19 nt, Homo sapiens
  misc_RNA (1)...(19): siRNA sense strand
ggaaaggacggccaaggaa

SEQ ID NO: 1741659 - RNA, 19 nt, Homo sapiens
  misc_RNA (1)...(19): siRNA sense strand
gagagcagacuucuucuau

SEQ ID NO: 1741660 - RNA, 19 nt, Homo sapiens
  misc_RNA (1)...(19): siRNA sense strand
ggaauuagacaccaacaca

SEQ ID NO: 1741661 - RNA, 19 nt, Homo sapiens
  misc_RNA (1)...(19): siRNA sense strand
ggagaaaggagucagugaa

SEQ ID NO: 1741662 - RNA, 19 nt, Homo sapiens
  misc_RNA (1)...(19): siRNA sense strand
gagaaaggagucagugaau

SEQ ID NO: 1741663 - RNA, 19 nt, Homo sapiens
  misc_RNA (1)...(19): siRNA sense strand
gaaaggacggccaaggaau

SEQ ID NO: 1741664 - RNA, 19 nt, Homo sapiens
  misc_RNA (1)...(19): siRNA sense strand
agaaaggagucagugaauu

SEQ ID NO: 1741665 - RNA, 19 nt, Homo sapiens
  misc_RNA (1)...(19): siRNA sense strand
gcuggugacuuacugaaca

SEQ ID NO: 1741666 - RNA, 19 nt, Homo sapiens
  misc_RNA (1)...(19): siRNA sense strand
ccaacacacugaagaaugc

SEQ ID NO: 1741667 - RNA, 19 nt, Homo sapiens
  misc_RNA (1)...(19): siRNA sense strand
ggagagcagacuucuucua

SEQ ID NO: 1741668 - RNA, 19 nt, Homo sapiens
  misc_RNA (1)...(19): siRNA sense strand
caucaugaacugaccauug

SEQ ID NO: 1741669 - RNA, 19 nt, Homo sapiens
  misc_RNA (1)...(19): siRNA sense strand
gcaguaacacagcucagaa

SEQ ID NO: 1741670 - RNA, 19 nt, Homo sapiens
  misc_RNA (1)...(19): siRNA sense strand
ccaaggaauuagacaccaa

SEQ ID NO: 1741671 - RNA, 19 nt, Homo sapiens
  misc_RNA (1)...(19): siRNA sense strand
caacugcggacaucucuuc

SEQ ID NO: 1741672 - RNA, 19 nt, Homo sapiens
  misc_RNA (1)...(19): siRNA sense strand
gcucagaagccuggucauu

SEQ ID NO: 1741673 - RNA, 19 nt, Homo sapiens
  misc_RNA (1)...(19): siRNA sense strand
gaaugcuggugacuuacug

SEQ ID NO: 1741674 - RNA, 19 nt, Homo sapiens
  misc_RNA (1)...(19): siRNA sense strand
ggacggccaaggaauuaga

SEQ ID NO: 1741675 - RNA, 19 nt, Homo sapiens
  misc_RNA (1)...(19): siRNA sense strand
aaaggacauugcagaacuu

SEQ ID NO: 1741676 - RNA, 19 nt, Homo sapiens
  misc_RNA (1)...(19): siRNA sense strand
aaaggacggccaaggaauu

SEQ ID NO: 1741677 - RNA, 19 nt, Homo sapiens
  misc_RNA (1)...(19): siRNA sense strand
aucaugaacugaccauuga

SEQ ID NO: 1741678 - RNA, 19 nt, Homo sapiens
  misc_RNA (1)...(19): siRNA sense strand
cagaaaggacauugcagaa

SEQ ID NO: 1741679 - RNA, 19 nt, Homo sapiens
  misc_RNA (1)...(19): siRNA sense strand
cugaacacaugucucauca

SEQ ID NO: 1741680 - RNA, 19 nt, Homo sapiens
  misc_RNA (1)...(19): siRNA sense strand
gaagccuggucauugaucu

SEQ ID NO: 1741681 - RNA, 19 nt, Homo sapiens
  misc_RNA (1)...(19): siRNA sense strand
agaagagggugugcagguu

SEQ ID NO: 1741682 - RNA, 19 nt, Homo sapiens
  misc_RNA (1)...(19): siRNA sense strand
gucagugaauugcuucuuc

SEQ ID NO: 1741683 - RNA, 19 nt, Homo sapiens
  misc_RNA (1)...(19): siRNA sense strand
cagcagaagcggccagaau

SEQ ID NO: 1741684 - RNA, 19 nt, Homo sapiens
  misc_RNA (1)...(19): siRNA sense strand
ggacauugcagaacuucag

SEQ ID NO: 1741685 - RNA, 19 nt, Homo sapiens
  misc_RNA (1)...(19): siRNA sense strand
ccagaauccuugacaucuc

SEQ ID NO: 1741686 - RNA, 19 nt, Homo sapiens
  misc_RNA (1)...(19): siRNA sense strand
ggucauugaucuggaaagg

SEQ ID NO: 1741687 - RNA, 19 nt, Homo sapiens
  misc_RNA (1)...(19): siRNA sense strand
cuacaaggaacgacucaau

SEQ ID NO: 1741688 - RNA, 19 nt, Homo sapiens
  misc_RNA (1)...(19): siRNA sense strand
ugacaucuccagggcagua

SEQ ID NO: 1741689 - RNA, 19 nt, Homo sapiens
  misc_RNA (1)...(19): siRNA sense strand
agagcagacuucuucuaug

SEQ ID NO: 1741690 - RNA, 19 nt, Homo sapiens
  misc_RNA (1)...(19): siRNA sense strand
cacagaaauuagagguuau

SEQ ID NO: 1741691 - RNA, 19 nt, Homo sapiens
  misc_RNA (1)...(19): siRNA sense strand
caucucuucugucgagugu

SEQ ID NO: 1741692 - RNA, 19 nt, Homo sapiens
  misc_RNA (1)...(19): siRNA sense strand
caugaacugaccauugaaa

SEQ ID NO: 1741693 - RNA, 19 nt, Homo sapiens
  misc_RNA (1)...(19): siRNA sense strand
cugcggacaucucuucugu

SEQ ID NO: 1741694 - RNA, 19 nt, Homo sapiens
  misc_RNA (1)...(19): siRNA sense strand
gccggaagcccuguucuga

SEQ ID NO: 1741695 - RNA, 19 nt, Homo sapiens
  misc_RNA (1)...(19): siRNA sense strand
ucaaggcucagcaggagaa

SEQ ID NO: 1741696 - RNA, 19 nt, Homo sapiens
  misc_RNA (1)...(19): siRNA sense strand
aaggacggccaaggaauua

SEQ ID NO: 1741697 - RNA, 19 nt, Homo sapiens
  misc_RNA (1)...(19): siRNA sense strand
gcucagaaaggacauugca

SEQ ID NO: 1741698 - RNA, 19 nt, Homo sapiens
  misc_RNA (1)...(19): siRNA sense strand
ccucagccacuacaaggaa

SEQ ID NO: 1741699 - RNA, 19 nt, Homo sapiens
  misc_RNA (1)...(19): siRNA sense strand
gacaccaacacacugaaga

SEQ ID NO: 1741700 - RNA, 19 nt, Homo sapiens
  misc_RNA (1)...(19): siRNA sense strand
gcuagggacaggcuauauc

SEQ ID NO: 1741701 - RNA, 19 nt, Homo sapiens
  misc_RNA (1)...(19): siRNA sense strand
uggaaaggacggccaagga

SEQ ID NO: 1741702 - RNA, 19 nt, Homo sapiens
  misc_RNA (1)...(19): siRNA sense strand
acaccaacacacugaagaa

SEQ ID NO: 1741703 - RNA, 19 nt, Homo sapiens
  misc_RNA (1)...(19): siRNA sense strand
ggccagaauccuugacauc

SEQ ID NO: 1741704 - RNA, 19 nt, Homo sapiens
  misc_RNA (1)...(19): siRNA sense strand
gagugcuccacagaaauua

SEQ ID NO: 1741705 - RNA, 19 nt, Homo sapiens
  misc_RNA (1)...(19): siRNA sense strand
aaaaugcccucagccacua

SEQ ID NO: 1741706 - RNA, 19 nt, Homo sapiens
  misc_RNA (1)...(19): siRNA sense strand
ugaagaaugcuggugacuu

SEQ ID NO: 1741707 - RNA, 19 nt, Homo sapiens
  misc_RNA (1)...(19): siRNA sense strand
uuagacaccaacacacuga

SEQ ID NO: 1741708 - RNA, 19 nt, Homo sapiens
  misc_RNA (1)...(19): siRNA sense strand
ccuggucauugaucuggaa

SEQ ID NO: 1741709 - RNA, 19 nt, Homo sapiens
  misc_RNA (1)...(19): siRNA sense strand
aggcucagcaggagaagaa

SEQ ID NO: 1741710 - RNA, 19 nt, Homo sapiens
  misc_RNA (1)...(19): siRNA sense strand
aggagucagugaauugcuu

SEQ ID NO: 1741711 - RNA, 19 nt, Homo sapiens
  misc_RNA (1)...(19): siRNA sense strand
gagcacaugccagcagaag

SEQ ID NO: 1741712 - RNA, 19 nt, Homo sapiens
  misc_RNA (1)...(19): siRNA sense strand
ggcaguaacacagcucaga

SEQ ID NO: 1741713 - RNA, 19 nt, Homo sapiens
  misc_RNA (1)...(19): siRNA sense strand
gcucaucgcucagaagaaa

SEQ ID NO: 1741714 - RNA, 19 nt, Homo sapiens
  misc_RNA (1)...(19): siRNA sense strand
gaagaaacgggaaauugaa

SEQ ID NO: 1741715 - RNA, 19 nt, Homo sapiens
  misc_RNA (1)...(19): siRNA sense strand
agaagaaacgggaaauuga

SEQ ID NO: 1741716 - RNA, 19 nt, Homo sapiens
  misc_RNA (1)...(19): siRNA sense strand
cagaagaaacgggaaauug

SEQ ID NO: 1741717 - RNA, 19 nt, Homo sapiens
  misc_RNA (1)...(19): siRNA sense strand
gaagaggucccugcucauc

SEQ ID NO: 1741718 - RNA, 19 nt, Homo sapiens
  misc_RNA (1)...(19): siRNA sense strand
ggacgaggaggaggacuau

SEQ ID NO: 1741719 - RNA, 19 nt, Homo sapiens
  misc_RNA (1)...(19): siRNA sense strand
gcucagaagaaacgggaaa

SEQ ID NO: 1741720 - RNA, 19 nt, Homo sapiens
  misc_RNA (1)...(19): siRNA sense strand
agaaagccaagcagaauca

SEQ ID NO: 1741721 - RNA, 19 nt, Homo sapiens
  misc_RNA (1)...(19): siRNA sense strand
ggaaauugaagccaaaaug

SEQ ID NO: 1741722 - RNA, 19 nt, Homo sapiens
  misc_RNA (1)...(19): siRNA sense strand
acagaaagccaagcagaau

SEQ ID NO: 1741723 - RNA, 19 nt, Homo sapiens
  misc_RNA (1)...(19): siRNA sense strand
acgaggaggaggacuauga

SEQ ID NO: 1741724 - RNA, 19 nt, Homo sapiens
  misc_RNA (1)...(19): siRNA sense strand
gagcaguggcuggagauca

SEQ ID NO: 1741725 - RNA, 19 nt, Homo sapiens
  misc_RNA (1)...(19): siRNA sense strand
ucagaagaaacgggaaauu

SEQ ID NO: 1741726 - RNA, 19 nt, Homo sapiens
  misc_RNA (1)...(19): siRNA sense strand
agcaguggcuggagaucaa

SEQ ID NO: 1741727 - RNA, 19 nt, Homo sapiens
  misc_RNA (1)...(19): siRNA sense strand
gaaauugaagccaaaaugg

SEQ ID NO: 1741728 - RNA, 19 nt, Homo sapiens
  misc_RNA (1)...(19): siRNA sense strand
acgggaaauugaagccaaa

SEQ ID NO: 1741729 - RNA, 19 nt, Homo sapiens
  misc_RNA (1)...(19): siRNA sense strand
ggaagaggucccugcucau

SEQ ID NO: 1741730 - RNA, 19 nt, Homo sapiens
  misc_RNA (1)...(19): siRNA sense strand
cagaaagccaagcagaauc

SEQ ID NO: 1741731 - RNA, 19 nt, Homo sapiens
  misc_RNA (1)...(19): siRNA sense strand
ggaaagugauagagaaauu

SEQ ID NO: 1741732 - RNA, 19 nt, Homo sapiens
  misc_RNA (1)...(19): siRNA sense strand
gaagguggcugagauaaga

SEQ ID NO: 1741733 - RNA, 19 nt, Homo sapiens
  misc_RNA (1)...(19): siRNA sense strand
gacagaagcuggaggaguu

SEQ ID NO: 1741734 - RNA, 19 nt, Homo sapiens
  misc_RNA (1)...(19): siRNA sense strand
ggaagaagguggcugagau

SEQ ID NO: 1741735 - RNA, 19 nt, Homo sapiens
  misc_RNA (1)...(19): siRNA sense strand
gcucaucgcucagaagaaa

SEQ ID NO: 1741736 - RNA, 19 nt, Homo sapiens
  misc_RNA (1)...(19): siRNA sense strand
gcagggaauuccucuacua

SEQ ID NO: 1741737 - RNA, 19 nt, Homo sapiens
  misc_RNA (1)...(19): siRNA sense strand
gaagaagguggcugagaua

SEQ ID NO: 1741738 - RNA, 19 nt, Homo sapiens
  misc_RNA (1)...(19): siRNA sense strand
gcauucagcuuucuguaug

SEQ ID NO: 1741739 - RNA, 19 nt, Homo sapiens
  misc_RNA (1)...(19): siRNA sense strand
gaagaaacgggaaauugaa

SEQ ID NO: 1741740 - RNA, 19 nt, Homo sapiens
  misc_RNA (1)...(19): siRNA sense strand
gaaccaggcauucagcuuu

SEQ ID NO: 1741741 - RNA, 19 nt, Homo sapiens
  misc_RNA (1)...(19): siRNA sense strand
uaacccagcauuugcauuu

SEQ ID NO: 1741742 - RNA, 19 nt, Homo sapiens
  misc_RNA (1)...(19): siRNA sense strand
gcauggagauggauaagac

SEQ ID NO: 1741743 - RNA, 19 nt, Homo sapiens
  misc_RNA (1)...(19): siRNA sense strand
gaaaggaagcacagaaguc

SEQ ID NO: 1741744 - RNA, 19 nt, Homo sapiens
  misc_RNA (1)...(19): siRNA sense strand
ccaaggaggacgacgagua

SEQ ID NO: 1741745 - RNA, 19 nt, Homo sapiens
  misc_RNA (1)...(19): siRNA sense strand
cagacggccuuacuacuga

SEQ ID NO: 1741746 - RNA, 19 nt, Homo sapiens
  misc_RNA (1)...(19): siRNA sense strand
gcacggcuaugacagugau

SEQ ID NO: 1741747 - RNA, 19 nt, Homo sapiens
  misc_RNA (1)...(19): siRNA sense strand
ccgagcagcugacaaagau

SEQ ID NO: 1741748 - RNA, 19 nt, Homo sapiens
  misc_RNA (1)...(19): siRNA sense strand
agaagaaacgggaaauuga

SEQ ID NO: 1741749 - RNA, 19 nt, Homo sapiens
  misc_RNA (1)...(19): siRNA sense strand
gaaagugauagagaaauug

SEQ ID NO: 1741750 - RNA, 19 nt, Homo sapiens
  misc_RNA (1)...(19): siRNA sense strand
cagaagaaacgggaaauug

SEQ ID NO: 1741751 - RNA, 19 nt, Homo sapiens
  misc_RNA (1)...(19): siRNA sense strand
ccauugcccuccagaacaa

SEQ ID NO: 1741752 - RNA, 19 nt, Homo sapiens
  misc_RNA (1)...(19): siRNA sense strand
caaggaggacgacgaguau

SEQ ID NO: 1741753 - RNA, 19 nt, Homo sapiens
  misc_RNA (1)...(19): siRNA sense strand
agaagaagcagcugaagga

SEQ ID NO: 1741754 - RNA, 19 nt, Homo sapiens
  misc_RNA (1)...(19): siRNA sense strand
uaagaaaggaagcacagaa

SEQ ID NO: 1741755 - RNA, 19 nt, Homo sapiens
  misc_RNA (1)...(19): siRNA sense strand
gaagaggucccugcucauc

SEQ ID NO: 1741756 - RNA, 19 nt, Homo sapiens
  misc_RNA (1)...(19): siRNA sense strand
ucaagaacccagugaacaa

SEQ ID NO: 1741757 - RNA, 19 nt, Homo sapiens
  misc_RNA (1)...(19): siRNA sense strand
gggaauuccucuacuacag

SEQ ID NO: 1741758 - RNA, 19 nt, Homo sapiens
  misc_RNA (1)...(19): siRNA sense strand
gggccgagcagcugacaaa

SEQ ID NO: 1741759 - RNA, 19 nt, Homo sapiens
  misc_RNA (1)...(19): siRNA sense strand
ggacgaagaggucaagaac

SEQ ID NO: 1741760 - RNA, 19 nt, Homo sapiens
  misc_RNA (1)...(19): siRNA sense strand
cagacgagcuggaaaaguu

SEQ ID NO: 1741761 - RNA, 19 nt, Homo sapiens
  misc_RNA (1)...(19): siRNA sense strand
caaggauaacccagcauuu

SEQ ID NO: 1741762 - RNA, 19 nt, Homo sapiens
  misc_RNA (1)...(19): siRNA sense strand
aaaguuggccagguucaua

SEQ ID NO: 1741763 - RNA, 19 nt, Homo sapiens
  misc_RNA (1)...(19): siRNA sense strand
gcacuucaucggagacuuc

SEQ ID NO: 1741764 - RNA, 19 nt, Homo sapiens
  misc_RNA (1)...(19): siRNA sense strand
ggagaaggcaguccaacag

SEQ ID NO: 1741765 - RNA, 19 nt, Homo sapiens
  misc_RNA (1)...(19): siRNA sense strand
gauaagaauagcagggaau

SEQ ID NO: 1741766 - RNA, 19 nt, Homo sapiens
  misc_RNA (1)...(19): siRNA sense strand
ugaaggagcagcaggagau

SEQ ID NO: 1741767 - RNA, 19 nt, Homo sapiens
  misc_RNA (1)...(19): siRNA sense strand
gcucccaccugcugaacug

SEQ ID NO: 1741768 - RNA, 19 nt, Homo sapiens
  misc_RNA (1)...(19): siRNA sense strand
ugaugaagaugggcuggaa

SEQ ID NO: 1741769 - RNA, 19 nt, Homo sapiens
  misc_RNA (1)...(19): siRNA sense strand
ggacgaggaggaggacuau

SEQ ID NO: 1741770 - RNA, 19 nt, Homo sapiens
  misc_RNA (1)...(19): siRNA sense strand
cagaaaaguuggccagguu

SEQ ID NO: 1741771 - RNA, 19 nt, Homo sapiens
  misc_RNA (1)...(19): siRNA sense strand
ccagacggccuuacuacug

SEQ ID NO: 1741772 - RNA, 19 nt, Homo sapiens
  misc_RNA (1)...(19): siRNA sense strand
gcucagaagaaacgggaaa

SEQ ID NO: 1741773 - RNA, 19 nt, Homo sapiens
  misc_RNA (1)...(19): siRNA sense strand
ggcagccucucagaaaguu

SEQ ID NO: 1741774 - RNA, 19 nt, Homo sapiens
  misc_RNA (1)...(19): siRNA sense strand
ucaaggggcucggcuauga

SEQ ID NO: 1741775 - RNA, 19 nt, Homo sapiens
  misc_RNA (1)...(19): siRNA sense strand
agaaagccaagcagaauca

SEQ ID NO: 1741776 - RNA, 19 nt, Homo sapiens
  misc_RNA (1)...(19): siRNA sense strand
cagccaccgugaagaggaa

SEQ ID NO: 1741777 - RNA, 19 nt, Homo sapiens
  misc_RNA (1)...(19): siRNA sense strand
aaguagcuauggaggacua

SEQ ID NO: 1741778 - RNA, 19 nt, Homo sapiens
  misc_RNA (1)...(19): siRNA sense strand
ggaaauugaagccaaaaug

SEQ ID NO: 1741779 - RNA, 19 nt, Homo sapiens
  misc_RNA (1)...(19): siRNA sense strand
uacaaguacuaccgacaga

SEQ ID NO: 1741780 - RNA, 19 nt, Homo sapiens
  misc_RNA (1)...(19): siRNA sense strand
ggcauucagcuuucuguau

SEQ ID NO: 1741781 - RNA, 19 nt, Homo sapiens
  misc_RNA (1)...(19): siRNA sense strand
uggcugagauaagaaagga

SEQ ID NO: 1741782 - RNA, 19 nt, Homo sapiens
  misc_RNA (1)...(19): siRNA sense strand
aaggauaacccagcauuug

SEQ ID NO: 1741783 - RNA, 19 nt, Homo sapiens
  misc_RNA (1)...(19): siRNA sense strand
auggaggacuacaaggaua

SEQ ID NO: 1741784 - RNA, 19 nt, Homo sapiens
  misc_RNA (1)...(19): siRNA sense strand
gggagaaggcaguccaaca

SEQ ID NO: 1741785 - RNA, 19 nt, Homo sapiens
  misc_RNA (1)...(19): siRNA sense strand
acagaaagccaagcagaau

SEQ ID NO: 1741786 - RNA, 19 nt, Homo sapiens
  misc_RNA (1)...(19): siRNA sense strand
gugaagaggaagcggaaga

SEQ ID NO: 1741787 - RNA, 19 nt, Homo sapiens
  misc_RNA (1)...(19): siRNA sense strand
cauucagcuuucuguauga

SEQ ID NO: 1741788 - RNA, 19 nt, Homo sapiens
  misc_RNA (1)...(19): siRNA sense strand
gaaccuugcagaaaaguug

SEQ ID NO: 1741789 - RNA, 19 nt, Homo sapiens
  misc_RNA (1)...(19): siRNA sense strand
ggauaacccagcauuugca

SEQ ID NO: 1741790 - RNA, 19 nt, Homo sapiens
  misc_RNA (1)...(19): siRNA sense strand
acaaggauaacccagcauu

SEQ ID NO: 1741791 - RNA, 19 nt, Homo sapiens
  misc_RNA (1)...(19): siRNA sense strand
gcgcuggcuucggcauuga

SEQ ID NO: 1741792 - RNA, 19 nt, Homo sapiens
  misc_RNA (1)...(19): siRNA sense strand
gcaucaagaacccagugaa

SEQ ID NO: 1741793 - RNA, 19 nt, Homo sapiens
  misc_RNA (1)...(19): siRNA sense strand
gccugaagaggauaaggua

SEQ ID NO: 1741794 - RNA, 19 nt, Homo sapiens
  misc_RNA (1)...(19): siRNA sense strand
acgaggaggaggacuauga

SEQ ID NO: 1741795 - RNA, 19 nt, Homo sapiens
  misc_RNA (1)...(19): siRNA sense strand
ugaagaggauaagguagag

SEQ ID NO: 1741796 - RNA, 19 nt, Homo sapiens
  misc_RNA (1)...(19): siRNA sense strand
caaguacuaccgacagaag

SEQ ID NO: 1741797 - RNA, 19 nt, Homo sapiens
  misc_RNA (1)...(19): siRNA sense strand
uuucagacgcccagaagaa

SEQ ID NO: 1741798 - RNA, 19 nt, Homo sapiens
  misc_RNA (1)...(19): siRNA sense strand
gagcaguggcuggagauca

SEQ ID NO: 1741799 - RNA, 19 nt, Homo sapiens
  misc_RNA (1)...(19): siRNA sense strand
gaaauugaagccaaaaugg

SEQ ID NO: 1741800 - RNA, 19 nt, Homo sapiens
  misc_RNA (1)...(19): siRNA sense strand
gccgagcagcugacaaaga

SEQ ID NO: 1741801 - RNA, 19 nt, Homo sapiens
  misc_RNA (1)...(19): siRNA sense strand
ucagaagaaacgggaaauu

SEQ ID NO: 1741802 - RNA, 19 nt, Homo sapiens
  misc_RNA (1)...(19): siRNA sense strand
ccucgccucugucaguuca

SEQ ID NO: 1741803 - RNA, 19 nt, Homo sapiens
  misc_RNA (1)...(19): siRNA sense strand
agcaguggcuggagaucaa

SEQ ID NO: 1741804 - RNA, 19 nt, Homo sapiens
  misc_RNA (1)...(19): siRNA sense strand
aaccaggcauucagcuuuc

SEQ ID NO: 1741805 - RNA, 19 nt, Homo sapiens
  misc_RNA (1)...(19): siRNA sense strand
cagaguacaaggaguucaa

SEQ ID NO: 1741806 - RNA, 19 nt, Homo sapiens
  misc_RNA (1)...(19): siRNA sense strand
gaaggagcagcaggagaug

SEQ ID NO: 1741807 - RNA, 19 nt, Homo sapiens
  misc_RNA (1)...(19): siRNA sense strand
ggaagccugugggucuagu

SEQ ID NO: 1741808 - RNA, 19 nt, Homo sapiens
  misc_RNA (1)...(19): siRNA sense strand
cugaagaggauaagguaga

SEQ ID NO: 1741809 - RNA, 19 nt, Homo sapiens
  misc_RNA (1)...(19): siRNA sense strand
caagaacccagugaacaag

SEQ ID NO: 1741810 - RNA, 19 nt, Homo sapiens
  misc_RNA (1)...(19): siRNA sense strand
caagcugacuguggagaac

SEQ ID NO: 1741811 - RNA, 19 nt, Homo sapiens
  misc_RNA (1)...(19): siRNA sense strand
gccgugagccugacuacuc

SEQ ID NO: 1741812 - RNA, 19 nt, Homo sapiens
  misc_RNA (1)...(19): siRNA sense strand
ggauaagaccagggaaugg

SEQ ID NO: 1741813 - RNA, 19 nt, Homo sapiens
  misc_RNA (1)...(19): siRNA sense strand
cucggaaagugauagagaa

SEQ ID NO: 1741814 - RNA, 19 nt, Homo sapiens
  misc_RNA (1)...(19): siRNA sense strand
gcuggaggaguuccggaaa

SEQ ID NO: 1741815 - RNA, 19 nt, Homo sapiens
  misc_RNA (1)...(19): siRNA sense strand
ggaagaggucccugcucau

SEQ ID NO: 1741816 - RNA, 19 nt, Homo sapiens
  misc_RNA (1)...(19): siRNA sense strand
acgggaaauugaagccaaa

SEQ ID NO: 1741817 - RNA, 19 nt, Homo sapiens
  misc_RNA (1)...(19): siRNA sense strand
agcaggagaugcagcagau

SEQ ID NO: 1741818 - RNA, 19 nt, Homo sapiens
  misc_RNA (1)...(19): siRNA sense strand
uggaggacuacaaggauaa

SEQ ID NO: 1741819 - RNA, 19 nt, Homo sapiens
  misc_RNA (1)...(19): siRNA sense strand
caggagaugcagcagaugu

SEQ ID NO: 1741820 - RNA, 19 nt, Homo sapiens
  misc_RNA (1)...(19): siRNA sense strand
cagaaagccaagcagaauc

SEQ ID NO: 1741821 - RNA, 19 nt, Homo sapiens
  misc_RNA (1)...(19): siRNA sense strand
gcucaucgcucagaagaaa

SEQ ID NO: 1741822 - RNA, 19 nt, Homo sapiens
  misc_RNA (1)...(19): siRNA sense strand
gaagaaacgggaaauugaa

SEQ ID NO: 1741823 - RNA, 19 nt, Homo sapiens
  misc_RNA (1)...(19): siRNA sense strand
agaagaaacgggaaauuga

SEQ ID NO: 1741824 - RNA, 19 nt, Homo sapiens
  misc_RNA (1)...(19): siRNA sense strand
cagaagaaacgggaaauug

SEQ ID NO: 1741825 - RNA, 19 nt, Homo sapiens
  misc_RNA (1)...(19): siRNA sense strand
gaagaggucccugcucauc

SEQ ID NO: 1741826 - RNA, 19 nt, Homo sapiens
  misc_RNA (1)...(19): siRNA sense strand
gcucagaagaaacgggaaa

SEQ ID NO: 1741827 - RNA, 19 nt, Homo sapiens
  misc_RNA (1)...(19): siRNA sense strand
agaaagccaagcagaauca

SEQ ID NO: 1741828 - RNA, 19 nt, Homo sapiens
  misc_RNA (1)...(19): siRNA sense strand
ggaaauugaagccaaaaug

SEQ ID NO: 1741829 - RNA, 19 nt, Homo sapiens
  misc_RNA (1)...(19): siRNA sense strand
acagaaagccaagcagaau

SEQ ID NO: 1741830 - RNA, 19 nt, Homo sapiens
  misc_RNA (1)...(19): siRNA sense strand
ucagaagaaacgggaaauu

SEQ ID NO: 1741831 - RNA, 19 nt, Homo sapiens
  misc_RNA (1)...(19): siRNA sense strand
gaaauugaagccaaaaugg

SEQ ID NO: 1741832 - RNA, 19 nt, Homo sapiens
  misc_RNA (1)...(19): siRNA sense strand
acgggaaauugaagccaaa

SEQ ID NO: 1741833 - RNA, 19 nt, Homo sapiens
  misc_RNA (1)...(19): siRNA sense strand
ggaagaggucccugcucau

SEQ ID NO: 1741834 - RNA, 19 nt, Homo sapiens
  misc_RNA (1)...(19): siRNA sense strand
cagaaagccaagcagaauc

SEQ ID NO: 1741835 - RNA, 19 nt, Homo sapiens
  misc_RNA (1)...(19): siRNA sense strand
caacuuagcccugaaauuu

SEQ ID NO: 1741836 - RNA, 19 nt, Homo sapiens
  misc_RNA (1)...(19): siRNA sense strand
ggacacagcaggucaggaa

SEQ ID NO: 1741837 - RNA, 19 nt, Homo sapiens
  misc_RNA (1)...(19): siRNA sense strand
gcgagaagaucaagguuca

SEQ ID NO: 1741838 - RNA, 19 nt, Homo sapiens
  misc_RNA (1)...(19): siRNA sense strand
gugcuuggcuugccgauug

SEQ ID NO: 1741839 - RNA, 19 nt, Homo sapiens
  misc_RNA (1)...(19): siRNA sense strand
acaggaagcuaacaguaaa

SEQ ID NO: 1741840 - RNA, 19 nt, Homo sapiens
  misc_RNA (1)...(19): siRNA sense strand
ccaggugcccuccaacuua

SEQ ID NO: 1741841 - RNA, 19 nt, Homo sapiens
  misc_RNA (1)...(19): siRNA sense strand
aaagcauggucgagcauua

SEQ ID NO: 1741842 - RNA, 19 nt, Homo sapiens
  misc_RNA (1)...(19): siRNA sense strand
agaaaucccugcuguaucg

SEQ ID NO: 1741843 - RNA, 19 nt, Homo sapiens
  misc_RNA (1)...(19): siRNA sense strand
aaauguggauccaagaaug

SEQ ID NO: 1741844 - RNA, 19 nt, Homo sapiens
  misc_RNA (1)...(19): siRNA sense strand
ccacaggaagcuaacagua

SEQ ID NO: 1741845 - RNA, 19 nt, Homo sapiens
  misc_RNA (1)...(19): siRNA sense strand
ccagaaaucccugcuguau

SEQ ID NO: 1741846 - RNA, 19 nt, Homo sapiens
  misc_RNA (1)...(19): siRNA sense strand
gggagaagaccguggaaau

SEQ ID NO: 1741847 - RNA, 19 nt, Homo sapiens
  misc_RNA (1)...(19): siRNA sense strand
ggagaagaccguggaaauc

SEQ ID NO: 1741848 - RNA, 19 nt, Homo sapiens
  misc_RNA (1)...(19): siRNA sense strand
gcauuacuaccgcaacgua

SEQ ID NO: 1741849 - RNA, 19 nt, Homo sapiens
  misc_RNA (1)...(19): siRNA sense strand
ggaaaucgagggcgagaag

SEQ ID NO: 1741850 - RNA, 19 nt, Homo sapiens
  misc_RNA (1)...(19): siRNA sense strand
cacaggaagcuaacaguaa

SEQ ID NO: 1741851 - RNA, 19 nt, Homo sapiens
  misc_RNA (1)...(19): siRNA sense strand
cagcaggucaggaacguuu

SEQ ID NO: 1741852 - RNA, 19 nt, Homo sapiens
  misc_RNA (1)...(19): siRNA sense strand
ucuaugacgucaccaagau

SEQ ID NO: 1741853 - RNA, 19 nt, Homo sapiens
  misc_RNA (1)...(19): siRNA sense strand
gcccugaaauuugcugaug

SEQ ID NO: 1741854 - RNA, 19 nt, Homo sapiens
  misc_RNA (1)...(19): siRNA sense strand
gccagaacguggagucgau

SEQ ID NO: 1741855 - RNA, 19 nt, Homo sapiens
  misc_RNA (1)...(19): siRNA sense strand
ccaaagagagccagaacgu

SEQ ID NO: 1741856 - RNA, 19 nt, Homo sapiens
  misc_RNA (1)...(19): siRNA sense strand
gagaagaccguggaaaucg

SEQ ID NO: 1741857 - RNA, 19 nt, Homo sapiens
  misc_RNA (1)...(19): siRNA sense strand
caggugcccuccaacuuag

SEQ ID NO: 1741858 - RNA, 19 nt, Homo sapiens
  misc_RNA (1)...(19): siRNA sense strand
gaagcuaacaguaaaacuu

SEQ ID NO: 1741859 - RNA, 19 nt, Homo sapiens
  misc_RNA (1)...(19): siRNA sense strand
ggaccaguacgugcagauu

SEQ ID NO: 1741860 - RNA, 19 nt, Homo sapiens
  misc_RNA (1)...(19): siRNA sense strand
agaagaccguggaaaucga

SEQ ID NO: 1741861 - RNA, 19 nt, Homo sapiens
  misc_RNA (1)...(19): siRNA sense strand
ccaacuuagcccugaaauu

SEQ ID NO: 1741862 - RNA, 19 nt, Homo sapiens
  misc_RNA (1)...(19): siRNA sense strand
gaccaguacgugcagauuc

SEQ ID NO: 1741863 - RNA, 19 nt, Homo sapiens
  misc_RNA (1)...(19): siRNA sense strand
gaaaucgagggcgagaaga

SEQ ID NO: 1741864 - RNA, 19 nt, Homo sapiens
  misc_RNA (1)...(19): siRNA sense strand
ucaccaaccucaaaaugug

SEQ ID NO: 1741865 - RNA, 19 nt, Homo sapiens
  misc_RNA (1)...(19): siRNA sense strand
ugacaucuuucaccaaccu

SEQ ID NO: 1741866 - RNA, 19 nt, Homo sapiens
  misc_RNA (1)...(19): siRNA sense strand
aaacuuccuguccuuguug

SEQ ID NO: 1741867 - RNA, 19 nt, Homo sapiens
  misc_RNA (1)...(19): siRNA sense strand
gcauggucgagcauuacua

SEQ ID NO: 1741868 - RNA, 19 nt, Homo sapiens
  misc_RNA (1)...(19): siRNA sense strand
uaugacgucaccaagauga

SEQ ID NO: 1741869 - RNA, 19 nt, Homo sapiens
  misc_RNA (1)...(19): siRNA sense strand
gcaagaccugccugaccuu

SEQ ID NO: 1741870 - RNA, 19 nt, Homo sapiens
  misc_RNA (1)...(19): siRNA sense strand
gaacguuuccgcaaaagca

SEQ ID NO: 1741871 - RNA, 19 nt, Homo sapiens
  misc_RNA (1)...(19): siRNA sense strand
cagaacguggagucgauuu

SEQ ID NO: 1741872 - RNA, 19 nt, Homo sapiens
  misc_RNA (1)...(19): siRNA sense strand
cagaaaucccugcuguauc

SEQ ID NO: 1741873 - RNA, 19 nt, Homo sapiens
  misc_RNA (1)...(19): siRNA sense strand
gaacagccucgaugucaaa

SEQ ID NO: 1741874 - RNA, 19 nt, Homo sapiens
  misc_RNA (1)...(19): siRNA sense strand
ucaaggugauucuggauaa

SEQ ID NO: 1741875 - RNA, 19 nt, Homo sapiens
  misc_RNA (1)...(19): siRNA sense strand
ccaagaucaucaucauuga

SEQ ID NO: 1741876 - RNA, 19 nt, Homo sapiens
  misc_RNA (1)...(19): siRNA sense strand
ucaacuggaucuacaaugu

SEQ ID NO: 1741877 - RNA, 19 nt, Homo sapiens
  misc_RNA (1)...(19): siRNA sense strand
gaggagcacugugucaaga

SEQ ID NO: 1741878 - RNA, 19 nt, Homo sapiens
  misc_RNA (1)...(19): siRNA sense strand
ggaucuggauguuguugaa

SEQ ID NO: 1741879 - RNA, 19 nt, Homo sapiens
  misc_RNA (1)...(19): siRNA sense strand
gccaagaucaucaucauug

SEQ ID NO: 1741880 - RNA, 19 nt, Homo sapiens
  misc_RNA (1)...(19): siRNA sense strand
uuucagagcuguggagauu

SEQ ID NO: 1741881 - RNA, 19 nt, Homo sapiens
  misc_RNA (1)...(19): siRNA sense strand
cgaggaagcagcuguguga

SEQ ID NO: 1741882 - RNA, 19 nt, Homo sapiens
  misc_RNA (1)...(19): siRNA sense strand
cagcaaacccacuuucaga

SEQ ID NO: 1741883 - RNA, 19 nt, Homo sapiens
  misc_RNA (1)...(19): siRNA sense strand
cagccuaucucaacuggau

SEQ ID NO: 1741884 - RNA, 19 nt, Homo sapiens
  misc_RNA (1)...(19): siRNA sense strand
gaucaucaucauugaauuc

SEQ ID NO: 1741885 - RNA, 19 nt, Homo sapiens
  misc_RNA (1)...(19): siRNA sense strand
ccauggagaccuucagaaa

SEQ ID NO: 1741886 - RNA, 19 nt, Homo sapiens
  misc_RNA (1)...(19): siRNA sense strand
ugacaucgcccucaugaag

SEQ ID NO: 1741887 - RNA, 19 nt, Homo sapiens
  misc_RNA (1)...(19): siRNA sense strand
caaggugauucuggauaaa

SEQ ID NO: 1741888 - RNA, 19 nt, Homo sapiens
  misc_RNA (1)...(19): siRNA sense strand
cuggaaggcugagcuguaa

SEQ ID NO: 1741889 - RNA, 19 nt, Homo sapiens
  misc_RNA (1)...(19): siRNA sense strand
ugucugcccuucuuugaug

SEQ ID NO: 1741890 - RNA, 19 nt, Homo sapiens
  misc_RNA (1)...(19): siRNA sense strand
uaucucaacuggaucuaca

SEQ ID NO: 1741891 - RNA, 19 nt, Homo sapiens
  misc_RNA (1)...(19): siRNA sense strand
ggauguuguugaaaucaca

SEQ ID NO: 1741892 - RNA, 19 nt, Homo sapiens
  misc_RNA (1)...(19): siRNA sense strand
aggugauucuggauaaaua

SEQ ID NO: 1741893 - RNA, 19 nt, Homo sapiens
  misc_RNA (1)...(19): siRNA sense strand
ugaacagccucgaugucaa

SEQ ID NO: 1741894 - RNA, 19 nt, Homo sapiens
  misc_RNA (1)...(19): siRNA sense strand
ucagagcuguggagauugg

SEQ ID NO: 1741895 - RNA, 19 nt, Homo sapiens
  misc_RNA (1)...(19): siRNA sense strand
gcaguucccacucacuuuc

SEQ ID NO: 1741896 - RNA, 19 nt, Homo sapiens
  misc_RNA (1)...(19): siRNA sense strand
caagaucaucaucauugaa

SEQ ID NO: 1741897 - RNA, 19 nt, Homo sapiens
  misc_RNA (1)...(19): siRNA sense strand
cagcauccaguacgacaaa

SEQ ID NO: 1741898 - RNA, 19 nt, Homo sapiens
  misc_RNA (1)...(19): siRNA sense strand
ggucucagccuaucucaac

SEQ ID NO: 1741899 - RNA, 19 nt, Homo sapiens
  misc_RNA (1)...(19): siRNA sense strand
gcgggcaggcucagacaaa

SEQ ID NO: 1741900 - RNA, 19 nt, Homo sapiens
  misc_RNA (1)...(19): siRNA sense strand
cagacaaacugggcagcuu

SEQ ID NO: 1741901 - RNA, 19 nt, Homo sapiens
  misc_RNA (1)...(19): siRNA sense strand
gauucuggauaaauacuac

SEQ ID NO: 1741902 - RNA, 19 nt, Homo sapiens
  misc_RNA (1)...(19): siRNA sense strand
ggaggccucuguggauucu

SEQ ID NO: 1741903 - RNA, 19 nt, Homo sapiens
  misc_RNA (1)...(19): siRNA sense strand
uggcgaguaucaucauugu

SEQ ID NO: 1741904 - RNA, 19 nt, Homo sapiens
  misc_RNA (1)...(19): siRNA sense strand
aagcugcaguucccacuca

SEQ ID NO: 1741905 - RNA, 19 nt, Homo sapiens
  misc_RNA (1)...(19): siRNA sense strand
ggaucuacaaugucuggaa

SEQ ID NO: 1741906 - RNA, 19 nt, Homo sapiens
  misc_RNA (1)...(19): siRNA sense strand
gcagcaaacccacuuucag

SEQ ID NO: 1741907 - RNA, 19 nt, Homo sapiens
  misc_RNA (1)...(19): siRNA sense strand
ccaucugucugcccuucuu

SEQ ID NO: 1741908 - RNA, 19 nt, Homo sapiens
  misc_RNA (1)...(19): siRNA sense strand
auaccgauguguucaacug

SEQ ID NO: 1741909 - RNA, 19 nt, Homo sapiens
  misc_RNA (1)...(19): siRNA sense strand
gagcuucgcaugcggaacu

SEQ ID NO: 1741910 - RNA, 19 nt, Homo sapiens
  misc_RNA (1)...(19): siRNA sense strand
ccgauguguucaacuggaa

SEQ ID NO: 1741911 - RNA, 19 nt, Homo sapiens
  misc_RNA (1)...(19): siRNA sense strand
gcccacugcuucaggaaac

SEQ ID NO: 1741912 - RNA, 19 nt, Homo sapiens
  misc_RNA (1)...(19): siRNA sense strand
cauguggugggcaucguua

SEQ ID NO: 1741913 - RNA, 19 nt, Homo sapiens
  misc_RNA (1)...(19): siRNA sense strand
uggccaagaucaucaucau

SEQ ID NO: 1741914 - RNA, 19 nt, Homo sapiens
  misc_RNA (1)...(19): siRNA sense strand
caacuggaucuacaauguc

SEQ ID NO: 1741915 - RNA, 19 nt, Homo sapiens
  misc_RNA (1)...(19): siRNA sense strand
gaucuggauguuguugaaa

SEQ ID NO: 1741916 - RNA, 19 nt, Homo sapiens
  misc_RNA (1)...(19): siRNA sense strand
ucuggaaggcugagcugua

SEQ ID NO: 1741917 - RNA, 19 nt, Homo sapiens
  misc_RNA (1)...(19): siRNA sense strand
gaugggcuacagcagcaaa

SEQ ID NO: 1741918 - RNA, 19 nt, Homo sapiens
  misc_RNA (1)...(19): siRNA sense strand
ggccaagaucaucaucauu

SEQ ID NO: 1741919 - RNA, 19 nt, Homo sapiens
  misc_RNA (1)...(19): siRNA sense strand
guuguugaaaucacagaaa

SEQ ID NO: 1741920 - RNA, 19 nt, Homo sapiens
  misc_RNA (1)...(19): siRNA sense strand
cauugugguuguccucauc

SEQ ID NO: 1741921 - RNA, 19 nt, Homo sapiens
  misc_RNA (1)...(19): siRNA sense strand
gacagugaucaaccucuga

SEQ ID NO: 1741922 - RNA, 19 nt, Homo sapiens
  misc_RNA (1)...(19): siRNA sense strand
gagccuggcgaguaucauc

SEQ ID NO: 1741923 - RNA, 19 nt, Homo sapiens
  misc_RNA (1)...(19): siRNA sense strand
ucaagugggcccugucucu

SEQ ID NO: 1741924 - RNA, 19 nt, Homo sapiens
  misc_RNA (1)...(19): siRNA sense strand
ggcagccucuccacuucau

SEQ ID NO: 1741925 - RNA, 19 nt, Homo sapiens
  misc_RNA (1)...(19): siRNA sense strand
gcauguggugggcaucguu

SEQ ID NO: 1741926 - RNA, 19 nt, Homo sapiens
  misc_RNA (1)...(19): siRNA sense strand
cauggagaccuucagaaag

SEQ ID NO: 1741927 - RNA, 19 nt, Homo sapiens
  misc_RNA (1)...(19): siRNA sense strand
cugguucucugccuguuuc

SEQ ID NO: 1741928 - RNA, 19 nt, Homo sapiens
  misc_RNA (1)...(19): siRNA sense strand
gaacagccucgaugucaaa

SEQ ID NO: 1741929 - RNA, 19 nt, Homo sapiens
  misc_RNA (1)...(19): siRNA sense strand
ucaaggugauucuggauaa

SEQ ID NO: 1741930 - RNA, 19 nt, Homo sapiens
  misc_RNA (1)...(19): siRNA sense strand
ccaagaucaucaucauuga

SEQ ID NO: 1741931 - RNA, 19 nt, Homo sapiens
  misc_RNA (1)...(19): siRNA sense strand
gaggagcacugugucaaga

SEQ ID NO: 1741932 - RNA, 19 nt, Homo sapiens
  misc_RNA (1)...(19): siRNA sense strand
ggaucuggauguuguugaa

SEQ ID NO: 1741933 - RNA, 19 nt, Homo sapiens
  misc_RNA (1)...(19): siRNA sense strand
gccaagaucaucaucauug

SEQ ID NO: 1741934 - RNA, 19 nt, Homo sapiens
  misc_RNA (1)...(19): siRNA sense strand
uuucagagcuguggagauu

SEQ ID NO: 1741935 - RNA, 19 nt, Homo sapiens
  misc_RNA (1)...(19): siRNA sense strand
cgaggaagcagcuguguga

SEQ ID NO: 1741936 - RNA, 19 nt, Homo sapiens
  misc_RNA (1)...(19): siRNA sense strand
cagcaaacccacuuucaga

SEQ ID NO: 1741937 - RNA, 19 nt, Homo sapiens
  misc_RNA (1)...(19): siRNA sense strand
gaucaucaucauugaauuc

SEQ ID NO: 1741938 - RNA, 19 nt, Homo sapiens
  misc_RNA (1)...(19): siRNA sense strand
ccauggagaccuucagaaa

SEQ ID NO: 1741939 - RNA, 19 nt, Homo sapiens
  misc_RNA (1)...(19): siRNA sense strand
ugacaucgcccucaugaag

SEQ ID NO: 1741940 - RNA, 19 nt, Homo sapiens
  misc_RNA (1)...(19): siRNA sense strand
caaggugauucuggauaaa

SEQ ID NO: 1741941 - RNA, 19 nt, Homo sapiens
  misc_RNA (1)...(19): siRNA sense strand
ugucugcccuucuuugaug

SEQ ID NO: 1741942 - RNA, 19 nt, Homo sapiens
  misc_RNA (1)...(19): siRNA sense strand
ggauguuguugaaaucaca

SEQ ID NO: 1741943 - RNA, 19 nt, Homo sapiens
  misc_RNA (1)...(19): siRNA sense strand
aggugauucuggauaaaua

SEQ ID NO: 1741944 - RNA, 19 nt, Homo sapiens
  misc_RNA (1)...(19): siRNA sense strand
ugaacagccucgaugucaa

SEQ ID NO: 1741945 - RNA, 19 nt, Homo sapiens
  misc_RNA (1)...(19): siRNA sense strand
ucagagcuguggagauugg

SEQ ID NO: 1741946 - RNA, 19 nt, Homo sapiens
  misc_RNA (1)...(19): siRNA sense strand
gcaguucccacucacuuuc

SEQ ID NO: 1741947 - RNA, 19 nt, Homo sapiens
  misc_RNA (1)...(19): siRNA sense strand
caagaucaucaucauugaa

SEQ ID NO: 1741948 - RNA, 19 nt, Homo sapiens
  misc_RNA (1)...(19): siRNA sense strand
cagcauccaguacgacaaa

SEQ ID NO: 1741949 - RNA, 19 nt, Homo sapiens
  misc_RNA (1)...(19): siRNA sense strand
gcgggcaggcucagacaaa

SEQ ID NO: 1741950 - RNA, 19 nt, Homo sapiens
  misc_RNA (1)...(19): siRNA sense strand
cagacaaacugggcagcuu

SEQ ID NO: 1741951 - RNA, 19 nt, Homo sapiens
  misc_RNA (1)...(19): siRNA sense strand
gauucuggauaaauacuac

SEQ ID NO: 1741952 - RNA, 19 nt, Homo sapiens
  misc_RNA (1)...(19): siRNA sense strand
ggaggccucuguggauucu

SEQ ID NO: 1741953 - RNA, 19 nt, Homo sapiens
  misc_RNA (1)...(19): siRNA sense strand
uggcgaguaucaucauugu

SEQ ID NO: 1741954 - RNA, 19 nt, Homo sapiens
  misc_RNA (1)...(19): siRNA sense strand
aagcugcaguucccacuca

SEQ ID NO: 1741955 - RNA, 19 nt, Homo sapiens
  misc_RNA (1)...(19): siRNA sense strand
gcagcaaacccacuuucag

SEQ ID NO: 1741956 - RNA, 19 nt, Homo sapiens
  misc_RNA (1)...(19): siRNA sense strand
ccaucugucugcccuucuu

SEQ ID NO: 1741957 - RNA, 19 nt, Homo sapiens
  misc_RNA (1)...(19): siRNA sense strand
auaccgauguguucaacug

SEQ ID NO: 1741958 - RNA, 19 nt, Homo sapiens
  misc_RNA (1)...(19): siRNA sense strand
gagcuucgcaugcggaacu

SEQ ID NO: 1741959 - RNA, 19 nt, Homo sapiens
  misc_RNA (1)...(19): siRNA sense strand
ccgauguguucaacuggaa

SEQ ID NO: 1741960 - RNA, 19 nt, Homo sapiens
  misc_RNA (1)...(19): siRNA sense strand
gcccacugcuucaggaaac

SEQ ID NO: 1741961 - RNA, 19 nt, Homo sapiens
  misc_RNA (1)...(19): siRNA sense strand
uggccaagaucaucaucau

SEQ ID NO: 1741962 - RNA, 19 nt, Homo sapiens
  misc_RNA (1)...(19): siRNA sense strand
gaucuggauguuguugaaa

SEQ ID NO: 1741963 - RNA, 19 nt, Homo sapiens
  misc_RNA (1)...(19): siRNA sense strand
gaugggcuacagcagcaaa

SEQ ID NO: 1741964 - RNA, 19 nt, Homo sapiens
  misc_RNA (1)...(19): siRNA sense strand
ggccaagaucaucaucauu

SEQ ID NO: 1741965 - RNA, 19 nt, Homo sapiens
  misc_RNA (1)...(19): siRNA sense strand
guuguugaaaucacagaaa

SEQ ID NO: 1741966 - RNA, 19 nt, Homo sapiens
  misc_RNA (1)...(19): siRNA sense strand
cauugugguuguccucauc

SEQ ID NO: 1741967 - RNA, 19 nt, Homo sapiens
  misc_RNA (1)...(19): siRNA sense strand
ucaagugggcccugucucu

SEQ ID NO: 1741968 - RNA, 19 nt, Homo sapiens
  misc_RNA (1)...(19): siRNA sense strand
gacagugaucaaccucuga

SEQ ID NO: 1741969 - RNA, 19 nt, Homo sapiens
  misc_RNA (1)...(19): siRNA sense strand
gagccuggcgaguaucauc

SEQ ID NO: 1741970 - RNA, 19 nt, Homo sapiens
  misc_RNA (1)...(19): siRNA sense strand
ggcagccucuccacuucau

SEQ ID NO: 1741971 - RNA, 19 nt, Homo sapiens
  misc_RNA (1)...(19): siRNA sense strand
cauggagaccuucagaaag

SEQ ID NO: 1741972 - RNA, 19 nt, Homo sapiens
  misc_RNA (1)...(19): siRNA sense strand
cugguucucugccuguuuc

SEQ ID NO: 1741973 - RNA, 19 nt, Homo sapiens
  misc_RNA (1)...(19): siRNA sense strand
ccucuaaacucaacuauga

SEQ ID NO: 1741974 - RNA, 19 nt, Homo sapiens
  misc_RNA (1)...(19): siRNA sense strand
auaaugcucugauuccuaa

SEQ ID NO: 1741975 - RNA, 19 nt, Homo sapiens
  misc_RNA (1)...(19): siRNA sense strand
guuagaagaauuccuauug

SEQ ID NO: 1741976 - RNA, 19 nt, Homo sapiens
  misc_RNA (1)...(19): siRNA sense strand
cgaaagaagaauauacuga

SEQ ID NO: 1741977 - RNA, 19 nt, Homo sapiens
  misc_RNA (1)...(19): siRNA sense strand
gguguuaaaucuacaagca

SEQ ID NO: 1741978 - RNA, 19 nt, Homo sapiens
  misc_RNA (1)...(19): siRNA sense strand
ccaaugcgcagacgaaaga

SEQ ID NO: 1741979 - RNA, 19 nt, Homo sapiens
  misc_RNA (1)...(19): siRNA sense strand
gauaaugcucugauuccua

SEQ ID NO: 1741980 - RNA, 19 nt, Homo sapiens
  misc_RNA (1)...(19): siRNA sense strand
uagaagaauuccuauugga

SEQ ID NO: 1741981 - RNA, 19 nt, Homo sapiens
  misc_RNA (1)...(19): siRNA sense strand
gcagacgaaagaagaauau

SEQ ID NO: 1741982 - RNA, 19 nt, Homo sapiens
  misc_RNA (1)...(19): siRNA sense strand
acaagcaagacauauguua

SEQ ID NO: 1741983 - RNA, 19 nt, Homo sapiens
  misc_RNA (1)...(19): siRNA sense strand
uauuggagguguuaaaucu

SEQ ID NO: 1741984 - RNA, 19 nt, Homo sapiens
  misc_RNA (1)...(19): siRNA sense strand
ggagagagaagcugaaagc

SEQ ID NO: 1741985 - RNA, 19 nt, Homo sapiens
  misc_RNA (1)...(19): siRNA sense strand
gaugauaaugcucugauuc

SEQ ID NO: 1741986 - RNA, 19 nt, Homo sapiens
  misc_RNA (1)...(19): siRNA sense strand
caagcaagacauauguuau

SEQ ID NO: 1741987 - RNA, 19 nt, Homo sapiens
  misc_RNA (1)...(19): siRNA sense strand
gacuuaaagaagcagauua

SEQ ID NO: 1741988 - RNA, 19 nt, Homo sapiens
  misc_RNA (1)...(19): siRNA sense strand
uuagaagaauuccuauugg

SEQ ID NO: 1741989 - RNA, 19 nt, Homo sapiens
  misc_RNA (1)...(19): siRNA sense strand
uaugauaccgucaccuuug

SEQ ID NO: 1741990 - RNA, 19 nt, Homo sapiens
  misc_RNA (1)...(19): siRNA sense strand
ugaugauaaugcucugauu

SEQ ID NO: 1741991 - RNA, 19 nt, Homo sapiens
  misc_RNA (1)...(19): siRNA sense strand
gaaccagcgauggcaacua

SEQ ID NO: 1741992 - RNA, 19 nt, Homo sapiens
  misc_RNA (1)...(19): siRNA sense strand
uguuauaagucgaacugaa

SEQ ID NO: 1741993 - RNA, 19 nt, Homo sapiens
  misc_RNA (1)...(19): siRNA sense strand
cuacaagcaagacauaugu

SEQ ID NO: 1741994 - RNA, 19 nt, Homo sapiens
  misc_RNA (1)...(19): siRNA sense strand
uuaaagaagcagauuaugg

SEQ ID NO: 1741995 - RNA, 19 nt, Homo sapiens
  misc_RNA (1)...(19): siRNA sense strand
aaucuacaagcaagacaua

SEQ ID NO: 1741996 - RNA, 19 nt, Homo sapiens
  misc_RNA (1)...(19): siRNA sense strand
gcaagacauauguuauaag

SEQ ID NO: 1741997 - RNA, 19 nt, Homo sapiens
  misc_RNA (1)...(19): siRNA sense strand
gacgaaagaagaauauacu

SEQ ID NO: 1741998 - RNA, 19 nt, Homo sapiens
  misc_RNA (1)...(19): siRNA sense strand
ccugugugcauuauaaauu

SEQ ID NO: 1741999 - RNA, 19 nt, Homo sapiens
  misc_RNA (1)...(19): siRNA sense strand
caucucccucugcgacuua

SEQ ID NO: 1742000 - RNA, 19 nt, Homo sapiens
  misc_RNA (1)...(19): siRNA sense strand
ucaccaaugcgcagacgaa

SEQ ID NO: 1742001 - RNA, 19 nt, Homo sapiens
  misc_RNA (1)...(19): siRNA sense strand
cgacuuaaagaagcagauu

SEQ ID NO: 1742002 - RNA, 19 nt, Homo sapiens
  misc_RNA (1)...(19): siRNA sense strand
aaccagcgauggcaacuac

SEQ ID NO: 1742003 - RNA, 19 nt, Homo sapiens
  misc_RNA (1)...(19): siRNA sense strand
augauaccgucaccuuuga

SEQ ID NO: 1742004 - RNA, 19 nt, Homo sapiens
  misc_RNA (1)...(19): siRNA sense strand
gauaccgucaccuuugaug

SEQ ID NO: 1742005 - RNA, 19 nt, Homo sapiens
  misc_RNA (1)...(19): siRNA sense strand
ggagguguuaaaucuacaa

SEQ ID NO: 1742006 - RNA, 19 nt, Homo sapiens
  misc_RNA (1)...(19): siRNA sense strand
guuauaagucgaacugaac

SEQ ID NO: 1742007 - RNA, 19 nt, Homo sapiens
  misc_RNA (1)...(19): siRNA sense strand
cagcgauggcaacuacaaa

SEQ ID NO: 1742008 - RNA, 19 nt, Homo sapiens
  misc_RNA (1)...(19): siRNA sense strand
gaccugcagaucaccaaug

SEQ ID NO: 1742009 - RNA, 19 nt, Homo sapiens
  misc_RNA (1)...(19): siRNA sense strand
agacgaaagaagaauauac

SEQ ID NO: 1742010 - RNA, 19 nt, Homo sapiens
  misc_RNA (1)...(19): siRNA sense strand
cagacgaaagaagaauaua

SEQ ID NO: 1742011 - RNA, 19 nt, Homo sapiens
  misc_RNA (1)...(19): siRNA sense strand
ccucuaaacucaacuauga

SEQ ID NO: 1742012 - RNA, 19 nt, Homo sapiens
  misc_RNA (1)...(19): siRNA sense strand
auaaugcucugauuccuaa

SEQ ID NO: 1742013 - RNA, 19 nt, Homo sapiens
  misc_RNA (1)...(19): siRNA sense strand
guuagaagaauuccuauug

SEQ ID NO: 1742014 - RNA, 19 nt, Homo sapiens
  misc_RNA (1)...(19): siRNA sense strand
cgaaagaagaauauacuga

SEQ ID NO: 1742015 - RNA, 19 nt, Homo sapiens
  misc_RNA (1)...(19): siRNA sense strand
gguguuaaaucuacaagca

SEQ ID NO: 1742016 - RNA, 19 nt, Homo sapiens
  misc_RNA (1)...(19): siRNA sense strand
ccaaugcgcagacgaaaga

SEQ ID NO: 1742017 - RNA, 19 nt, Homo sapiens
  misc_RNA (1)...(19): siRNA sense strand
gauaaugcucugauuccua

SEQ ID NO: 1742018 - RNA, 19 nt, Homo sapiens
  misc_RNA (1)...(19): siRNA sense strand
uagaagaauuccuauugga

SEQ ID NO: 1742019 - RNA, 19 nt, Homo sapiens
  misc_RNA (1)...(19): siRNA sense strand
gcagacgaaagaagaauau

SEQ ID NO: 1742020 - RNA, 19 nt, Homo sapiens
  misc_RNA (1)...(19): siRNA sense strand
acaagcaagacauauguua

SEQ ID NO: 1742021 - RNA, 19 nt, Homo sapiens
  misc_RNA (1)...(19): siRNA sense strand
uauuggagguguuaaaucu

SEQ ID NO: 1742022 - RNA, 19 nt, Homo sapiens
  misc_RNA (1)...(19): siRNA sense strand
ggagagagaagcugaaagc

SEQ ID NO: 1742023 - RNA, 19 nt, Homo sapiens
  misc_RNA (1)...(19): siRNA sense strand
gaugauaaugcucugauuc

SEQ ID NO: 1742024 - RNA, 19 nt, Homo sapiens
  misc_RNA (1)...(19): siRNA sense strand
caagcaagacauauguuau

SEQ ID NO: 1742025 - RNA, 19 nt, Homo sapiens
  misc_RNA (1)...(19): siRNA sense strand
gacuuaaagaagcagauua

SEQ ID NO: 1742026 - RNA, 19 nt, Homo sapiens
  misc_RNA (1)...(19): siRNA sense strand
uuagaagaauuccuauugg

SEQ ID NO: 1742027 - RNA, 19 nt, Homo sapiens
  misc_RNA (1)...(19): siRNA sense strand
uaugauaccgucaccuuug

SEQ ID NO: 1742028 - RNA, 19 nt, Homo sapiens
  misc_RNA (1)...(19): siRNA sense strand
ugaugauaaugcucugauu

SEQ ID NO: 1742029 - RNA, 19 nt, Homo sapiens
  misc_RNA (1)...(19): siRNA sense strand
gaaccagcgauggcaacua

SEQ ID NO: 1742030 - RNA, 19 nt, Homo sapiens
  misc_RNA (1)...(19): siRNA sense strand
uguuauaagucgaacugaa

SEQ ID NO: 1742031 - RNA, 19 nt, Homo sapiens
  misc_RNA (1)...(19): siRNA sense strand
cuacaagcaagacauaugu

SEQ ID NO: 1742032 - RNA, 19 nt, Homo sapiens
  misc_RNA (1)...(19): siRNA sense strand
uuaaagaagcagauuaugg

SEQ ID NO: 1742033 - RNA, 19 nt, Homo sapiens
  misc_RNA (1)...(19): siRNA sense strand
aaucuacaagcaagacaua

SEQ ID NO: 1742034 - RNA, 19 nt, Homo sapiens
  misc_RNA (1)...(19): siRNA sense strand
gcaagacauauguuauaag

SEQ ID NO: 1742035 - RNA, 19 nt, Homo sapiens
  misc_RNA (1)...(19): siRNA sense strand
gacgaaagaagaauauacu

SEQ ID NO: 1742036 - RNA, 19 nt, Homo sapiens
  misc_RNA (1)...(19): siRNA sense strand
ccugugugcauuauaaauu

SEQ ID NO: 1742037 - RNA, 19 nt, Homo sapiens
  misc_RNA (1)...(19): siRNA sense strand
caucucccucugcgacuua

SEQ ID NO: 1742038 - RNA, 19 nt, Homo sapiens
  misc_RNA (1)...(19): siRNA sense strand
ucaccaaugcgcagacgaa

SEQ ID NO: 1742039 - RNA, 19 nt, Homo sapiens
  misc_RNA (1)...(19): siRNA sense strand
cgacuuaaagaagcagauu

SEQ ID NO: 1742040 - RNA, 19 nt, Homo sapiens
  misc_RNA (1)...(19): siRNA sense strand
aaccagcgauggcaacuac

SEQ ID NO: 1742041 - RNA, 19 nt, Homo sapiens
  misc_RNA (1)...(19): siRNA sense strand
augauaccgucaccuuuga

SEQ ID NO: 1742042 - RNA, 19 nt, Homo sapiens
  misc_RNA (1)...(19): siRNA sense strand
gauaccgucaccuuugaug

SEQ ID NO: 1742043 - RNA, 19 nt, Homo sapiens
  misc_RNA (1)...(19): siRNA sense strand
ggagguguuaaaucuacaa

SEQ ID NO: 1742044 - RNA, 19 nt, Homo sapiens
  misc_RNA (1)...(19): siRNA sense strand
guuauaagucgaacugaac

SEQ ID NO: 1742045 - RNA, 19 nt, Homo sapiens
  misc_RNA (1)...(19): siRNA sense strand
cagcgauggcaacuacaaa

SEQ ID NO: 1742046 - RNA, 19 nt, Homo sapiens
  misc_RNA (1)...(19): siRNA sense strand
gaccugcagaucaccaaug

SEQ ID NO: 1742047 - RNA, 19 nt, Homo sapiens
  misc_RNA (1)...(19): siRNA sense strand
agacgaaagaagaauauac

SEQ ID NO: 1742048 - RNA, 19 nt, Homo sapiens
  misc_RNA (1)...(19): siRNA sense strand
cagacgaaagaagaauaua

SEQ ID NO: 1742049 - RNA, 19 nt, Homo sapiens
  misc_RNA (1)...(19): siRNA sense strand
ccucuaaacucaacuauga

SEQ ID NO: 1742050 - RNA, 19 nt, Homo sapiens
  misc_RNA (1)...(19): siRNA sense strand
auaaugcucugauuccuaa

SEQ ID NO: 1742051 - RNA, 19 nt, Homo sapiens
  misc_RNA (1)...(19): siRNA sense strand
guuagaagaauuccuauug

SEQ ID NO: 1742052 - RNA, 19 nt, Homo sapiens
  misc_RNA (1)...(19): siRNA sense strand
cgaaagaagaauauacuga

SEQ ID NO: 1742053 - RNA, 19 nt, Homo sapiens
  misc_RNA (1)...(19): siRNA sense strand
gguguuaaaucuacaagca

SEQ ID NO: 1742054 - RNA, 19 nt, Homo sapiens
  misc_RNA (1)...(19): siRNA sense strand
ccaaugcgcagacgaaaga

SEQ ID NO: 1742055 - RNA, 19 nt, Homo sapiens
  misc_RNA (1)...(19): siRNA sense strand
gauaaugcucugauuccua

SEQ ID NO: 1742056 - RNA, 19 nt, Homo sapiens
  misc_RNA (1)...(19): siRNA sense strand
uagaagaauuccuauugga

SEQ ID NO: 1742057 - RNA, 19 nt, Homo sapiens
  misc_RNA (1)...(19): siRNA sense strand
gcagacgaaagaagaauau

SEQ ID NO: 1742058 - RNA, 19 nt, Homo sapiens
  misc_RNA (1)...(19): siRNA sense strand
acaagcaagacauauguua

SEQ ID NO: 1742059 - RNA, 19 nt, Homo sapiens
  misc_RNA (1)...(19): siRNA sense strand
uauuggagguguuaaaucu

SEQ ID NO: 1742060 - RNA, 19 nt, Homo sapiens
  misc_RNA (1)...(19): siRNA sense strand
ggagagagaagcugaaagc

SEQ ID NO: 1742061 - RNA, 19 nt, Homo sapiens
  misc_RNA (1)...(19): siRNA sense strand
gaugauaaugcucugauuc

SEQ ID NO: 1742062 - RNA, 19 nt, Homo sapiens
  misc_RNA (1)...(19): siRNA sense strand
caagcaagacauauguuau

SEQ ID NO: 1742063 - RNA, 19 nt, Homo sapiens
  misc_RNA (1)...(19): siRNA sense strand
gacuuaaagaagcagauua

SEQ ID NO: 1742064 - RNA, 19 nt, Homo sapiens
  misc_RNA (1)...(19): siRNA sense strand
uuagaagaauuccuauugg

SEQ ID NO: 1742065 - RNA, 19 nt, Homo sapiens
  misc_RNA (1)...(19): siRNA sense strand
uaugauaccgucaccuuug

SEQ ID NO: 1742066 - RNA, 19 nt, Homo sapiens
  misc_RNA (1)...(19): siRNA sense strand
ugaugauaaugcucugauu

SEQ ID NO: 1742067 - RNA, 19 nt, Homo sapiens
  misc_RNA (1)...(19): siRNA sense strand
gaaccagcgauggcaacua

SEQ ID NO: 1742068 - RNA, 19 nt, Homo sapiens
  misc_RNA (1)...(19): siRNA sense strand
uguuauaagucgaacugaa

SEQ ID NO: 1742069 - RNA, 19 nt, Homo sapiens
  misc_RNA (1)...(19): siRNA sense strand
cuacaagcaagacauaugu

SEQ ID NO: 1742070 - RNA, 19 nt, Homo sapiens
  misc_RNA (1)...(19): siRNA sense strand
uuaaagaagcagauuaugg

SEQ ID NO: 1742071 - RNA, 19 nt, Homo sapiens
  misc_RNA (1)...(19): siRNA sense strand
aaucuacaagcaagacaua

SEQ ID NO: 1742072 - RNA, 19 nt, Homo sapiens
  misc_RNA (1)...(19): siRNA sense strand
gcaagacauauguuauaag

SEQ ID NO: 1742073 - RNA, 19 nt, Homo sapiens
  misc_RNA (1)...(19): siRNA sense strand
gacgaaagaagaauauacu

SEQ ID NO: 1742074 - RNA, 19 nt, Homo sapiens
  misc_RNA (1)...(19): siRNA sense strand
ccugugugcauuauaaauu

SEQ ID NO: 1742075 - RNA, 19 nt, Homo sapiens
  misc_RNA (1)...(19): siRNA sense strand
caucucccucugcgacuua

SEQ ID NO: 1742076 - RNA, 19 nt, Homo sapiens
  misc_RNA (1)...(19): siRNA sense strand
ucaccaaugcgcagacgaa

SEQ ID NO: 1742077 - RNA, 19 nt, Homo sapiens
  misc_RNA (1)...(19): siRNA sense strand
cgacuuaaagaagcagauu

SEQ ID NO: 1742078 - RNA, 19 nt, Homo sapiens
  misc_RNA (1)...(19): siRNA sense strand
aaccagcgauggcaacuac

SEQ ID NO: 1742079 - RNA, 19 nt, Homo sapiens
  misc_RNA (1)...(19): siRNA sense strand
augauaccgucaccuuuga

SEQ ID NO: 1742080 - RNA, 19 nt, Homo sapiens
  misc_RNA (1)...(19): siRNA sense strand
gauaccgucaccuuugaug

SEQ ID NO: 1742081 - RNA, 19 nt, Homo sapiens
  misc_RNA (1)...(19): siRNA sense strand
ggagguguuaaaucuacaa

SEQ ID NO: 1742082 - RNA, 19 nt, Homo sapiens
  misc_RNA (1)...(19): siRNA sense strand
guuauaagucgaacugaac

SEQ ID NO: 1742083 - RNA, 19 nt, Homo sapiens
  misc_RNA (1)...(19): siRNA sense strand
cagcgauggcaacuacaaa

SEQ ID NO: 1742084 - RNA, 19 nt, Homo sapiens
  misc_RNA (1)...(19): siRNA sense strand
gaccugcagaucaccaaug

SEQ ID NO: 1742085 - RNA, 19 nt, Homo sapiens
  misc_RNA (1)...(19): siRNA sense strand
agacgaaagaagaauauac

SEQ ID NO: 1742086 - RNA, 19 nt, Homo sapiens
  misc_RNA (1)...(19): siRNA sense strand
cagacgaaagaagaauaua

SEQ ID NO: 1742087 - RNA, 19 nt, Homo sapiens
  misc_RNA (1)...(19): siRNA sense strand
gaaagaugcuggaauauac

SEQ ID NO: 1742088 - RNA, 19 nt, Homo sapiens
  misc_RNA (1)...(19): siRNA sense strand
acagaaagaugcuggaaua

SEQ ID NO: 1742089 - RNA, 19 nt, Homo sapiens
  misc_RNA (1)...(19): siRNA sense strand
gaggaaaccuuguuaucaa

SEQ ID NO: 1742090 - RNA, 19 nt, Homo sapiens
  misc_RNA (1)...(19): siRNA sense strand
gaagagcagccaaucaaua

SEQ ID NO: 1742091 - RNA, 19 nt, Homo sapiens
  misc_RNA (1)...(19): siRNA sense strand
ggauaaacaucaagcaaga

SEQ ID NO: 1742092 - RNA, 19 nt, Homo sapiens
  misc_RNA (1)...(19): siRNA sense strand
gaauggugcuucucuguga

SEQ ID NO: 1742093 - RNA, 19 nt, Homo sapiens
  misc_RNA (1)...(19): siRNA sense strand
agaagaagcugcaaacaga

SEQ ID NO: 1742094 - RNA, 19 nt, Homo sapiens
  misc_RNA (1)...(19): siRNA sense strand
gaugguagcuuggaaauca

SEQ ID NO: 1742095 - RNA, 19 nt, Homo sapiens
  misc_RNA (1)...(19): siRNA sense strand
ucaaaugaaucuacaguga

SEQ ID NO: 1742096 - RNA, 19 nt, Homo sapiens
  misc_RNA (1)...(19): siRNA sense strand
ggacaauucuucagcuuca

SEQ ID NO: 1742097 - RNA, 19 nt, Homo sapiens
  misc_RNA (1)...(19): siRNA sense strand
gaaaugaauccuaugaaga

SEQ ID NO: 1742098 - RNA, 19 nt, Homo sapiens
  misc_RNA (1)...(19): siRNA sense strand
gaauuaagacuguaugaug

SEQ ID NO: 1742099 - RNA, 19 nt, Homo sapiens
  misc_RNA (1)...(19): siRNA sense strand
gaaacaugcuggaagauac

SEQ ID NO: 1742100 - RNA, 19 nt, Homo sapiens
  misc_RNA (1)...(19): siRNA sense strand
ggauguauaugcauugaug

SEQ ID NO: 1742101 - RNA, 19 nt, Homo sapiens
  misc_RNA (1)...(19): siRNA sense strand
gagaauagaagacauuaga

SEQ ID NO: 1742102 - RNA, 19 nt, Homo sapiens
  misc_RNA (1)...(19): siRNA sense strand
ggucagucaucuugugaua

SEQ ID NO: 1742103 - RNA, 19 nt, Homo sapiens
  misc_RNA (1)...(19): siRNA sense strand
gaaaugcgcagcugaaaca

SEQ ID NO: 1742104 - RNA, 19 nt, Homo sapiens
  misc_RNA (1)...(19): siRNA sense strand
cagaguggcuugucaauag

SEQ ID NO: 1742105 - RNA, 19 nt, Homo sapiens
  misc_RNA (1)...(19): siRNA sense strand
caacaacccugacaaacag

SEQ ID NO: 1742106 - RNA, 19 nt, Homo sapiens
  misc_RNA (1)...(19): siRNA sense strand
ugagauaucuguucauugg

SEQ ID NO: 1742107 - RNA, 19 nt, Homo sapiens
  misc_RNA (1)...(19): siRNA sense strand
ggaauauacuacuguuuag

SEQ ID NO: 1742108 - RNA, 19 nt, Homo sapiens
  misc_RNA (1)...(19): siRNA sense strand
guggaaagcuaucagauuc

SEQ ID NO: 1742109 - RNA, 19 nt, Homo sapiens
  misc_RNA (1)...(19): siRNA sense strand
gaaagcccaucccuacaau

SEQ ID NO: 1742110 - RNA, 19 nt, Homo sapiens
  misc_RNA (1)...(19): siRNA sense strand
gaucuucaauauucagcua

SEQ ID NO: 1742111 - RNA, 19 nt, Homo sapiens
  misc_RNA (1)...(19): siRNA sense strand
gcuaucagauucgguauug

SEQ ID NO: 1742112 - RNA, 19 nt, Homo sapiens
  misc_RNA (1)...(19): siRNA sense strand
caacagaaguagguguaaa

SEQ ID NO: 1742113 - RNA, 19 nt, Homo sapiens
  misc_RNA (1)...(19): siRNA sense strand
gcugaaacaugcuggaaga

SEQ ID NO: 1742114 - RNA, 19 nt, Homo sapiens
  misc_RNA (1)...(19): siRNA sense strand
ggugauaauugaaugcaaa

SEQ ID NO: 1742115 - RNA, 19 nt, Homo sapiens
  misc_RNA (1)...(19): siRNA sense strand
gaagggugauaauugaaug

SEQ ID NO: 1742116 - RNA, 19 nt, Homo sapiens
  misc_RNA (1)...(19): siRNA sense strand
ucagaugacuggaaagaug

SEQ ID NO: 1742117 - RNA, 19 nt, Homo sapiens
  misc_RNA (1)...(19): siRNA sense strand
gcacagugauggaggagau

SEQ ID NO: 1742118 - RNA, 19 nt, Homo sapiens
  misc_RNA (1)...(19): siRNA sense strand
gcaaacagaguucaaguca

SEQ ID NO: 1742119 - RNA, 19 nt, Homo sapiens
  misc_RNA (1)...(19): siRNA sense strand
caagagcaguggacuuaau

SEQ ID NO: 1742120 - RNA, 19 nt, Homo sapiens
  misc_RNA (1)...(19): siRNA sense strand
gaucaucaguucaguaagg

SEQ ID NO: 1742121 - RNA, 19 nt, Homo sapiens
  misc_RNA (1)...(19): siRNA sense strand
guggaagggugauaauuga

SEQ ID NO: 1742122 - RNA, 19 nt, Homo sapiens
  misc_RNA (1)...(19): siRNA sense strand
ucacaaacacuccauagaa

SEQ ID NO: 1742123 - RNA, 19 nt, Homo sapiens
  misc_RNA (1)...(19): siRNA sense strand
ggaaaggaauggugcuucu

SEQ ID NO: 1742124 - RNA, 19 nt, Homo sapiens
  misc_RNA (1)...(19): siRNA sense strand
ccacugcauuucaaguuaa

SEQ ID NO: 1742125 - RNA, 19 nt, Homo sapiens
  misc_RNA (1)...(19): siRNA sense strand
ggaggaaaccuuguuauca

SEQ ID NO: 1742126 - RNA, 19 nt, Homo sapiens
  misc_RNA (1)...(19): siRNA sense strand
ggaguggugucucaaguca

SEQ ID NO: 1742127 - RNA, 19 nt, Homo sapiens
  misc_RNA (1)...(19): siRNA sense strand
gauauaagguacucuacag

SEQ ID NO: 1742128 - RNA, 19 nt, Homo sapiens
  misc_RNA (1)...(19): siRNA sense strand
agacuauucuuucagauga

SEQ ID NO: 1742129 - RNA, 19 nt, Homo sapiens
  misc_RNA (1)...(19): siRNA sense strand
ucaacaacauuacaaggaa

SEQ ID NO: 1742130 - RNA, 19 nt, Homo sapiens
  misc_RNA (1)...(19): siRNA sense strand
ggaagaugguagcuuggaa

SEQ ID NO: 1742131 - RNA, 19 nt, Homo sapiens
  misc_RNA (1)...(19): siRNA sense strand
ggaaagcccaucccuacaa

SEQ ID NO: 1742132 - RNA, 19 nt, Homo sapiens
  misc_RNA (1)...(19): siRNA sense strand
gauaaacggcgauuugugu

SEQ ID NO: 1742133 - RNA, 19 nt, Homo sapiens
  misc_RNA (1)...(19): siRNA sense strand
ggacguugaucucacaagu

SEQ ID NO: 1742134 - RNA, 19 nt, Homo sapiens
  misc_RNA (1)...(19): siRNA sense strand
gauccuggcugcuaaaggu

SEQ ID NO: 1742135 - RNA, 19 nt, Homo sapiens
  misc_RNA (1)...(19): siRNA sense strand
ucaaggauguauaugcauu

SEQ ID NO: 1742136 - RNA, 19 nt, Homo sapiens
  misc_RNA (1)...(19): siRNA sense strand
caaagagcguguucagcaa

SEQ ID NO: 1742137 - RNA, 19 nt, Homo sapiens
  misc_RNA (1)...(19): siRNA sense strand
gaggaaaggauaaacauca

SEQ ID NO: 1742138 - RNA, 19 nt, Homo sapiens
  misc_RNA (1)...(19): siRNA sense strand
gauccuacgcgaauuauau

SEQ ID NO: 1742139 - RNA, 19 nt, Homo sapiens
  misc_RNA (1)...(19): siRNA sense strand
ugaaaugaauccuaugaag

SEQ ID NO: 1742140 - RNA, 19 nt, Homo sapiens
  misc_RNA (1)...(19): siRNA sense strand
ucagucaucuugugauaau

SEQ ID NO: 1742141 - RNA, 19 nt, Homo sapiens
  misc_RNA (1)...(19): siRNA sense strand
guuuacaaauggagaauga

SEQ ID NO: 1742142 - RNA, 19 nt, Homo sapiens
  misc_RNA (1)...(19): siRNA sense strand
acagagagcugaccauaac

SEQ ID NO: 1742143 - RNA, 19 nt, Homo sapiens
  misc_RNA (1)...(19): siRNA sense strand
gaagaugguagcuuggaaa

SEQ ID NO: 1742144 - RNA, 19 nt, Homo sapiens
  misc_RNA (1)...(19): siRNA sense strand
gaaggcaucuaugaaugug

SEQ ID NO: 1742145 - RNA, 19 nt, Homo sapiens
  misc_RNA (1)...(19): siRNA sense strand
acaagacgcucccagugaa

SEQ ID NO: 1742146 - RNA, 19 nt, Homo sapiens
  misc_RNA (1)...(19): siRNA sense strand
agaaagaugcuggaauaua

SEQ ID NO: 1742147 - RNA, 19 nt, Homo sapiens
  misc_RNA (1)...(19): siRNA sense strand
caaagagaauauucacuac

SEQ ID NO: 1742148 - RNA, 19 nt, Homo sapiens
  misc_RNA (1)...(19): siRNA sense strand
ggguagaacacaucaauga

SEQ ID NO: 1742149 - RNA, 19 nt, Homo sapiens
  misc_RNA (1)...(19): siRNA sense strand
gcagcagaauacucauuug

SEQ ID NO: 1742150 - RNA, 19 nt, Homo sapiens
  misc_RNA (1)...(19): siRNA sense strand
gccaaucaauaccauuuau

SEQ ID NO: 1742151 - RNA, 19 nt, Homo sapiens
  misc_RNA (1)...(19): siRNA sense strand
caacaacauuacaaggaau

SEQ ID NO: 1742152 - RNA, 19 nt, Homo sapiens
  misc_RNA (1)...(19): siRNA sense strand
gaacccuuguuaucacaga

SEQ ID NO: 1742153 - RNA, 19 nt, Homo sapiens
  misc_RNA (1)...(19): siRNA sense strand
aaacagagagcugaccaua

SEQ ID NO: 1742154 - RNA, 19 nt, Homo sapiens
  misc_RNA (1)...(19): siRNA sense strand
guaggaggaaaccuuguua

SEQ ID NO: 1742155 - RNA, 19 nt, Homo sapiens
  misc_RNA (1)...(19): siRNA sense strand
ugaggaagacaaaggauuu

SEQ ID NO: 1742156 - RNA, 19 nt, Homo sapiens
  misc_RNA (1)...(19): siRNA sense strand
gcauuuaagccauuugaug

SEQ ID NO: 1742157 - RNA, 19 nt, Homo sapiens
  misc_RNA (1)...(19): siRNA sense strand
ggaaaucaacaacauuaca

SEQ ID NO: 1742158 - RNA, 19 nt, Homo sapiens
  misc_RNA (1)...(19): siRNA sense strand
gguggaagggugauaauug

SEQ ID NO: 1742159 - RNA, 19 nt, Homo sapiens
  misc_RNA (1)...(19): siRNA sense strand
acacagagguggacauagg

SEQ ID NO: 1742160 - RNA, 19 nt, Homo sapiens
  misc_RNA (1)...(19): siRNA sense strand
gcugagaacauuagaggaa

SEQ ID NO: 1742161 - RNA, 19 nt, Homo sapiens
  misc_RNA (1)...(19): siRNA sense strand
guucaaggauguauaugca

SEQ ID NO: 1742162 - RNA, 19 nt, Homo sapiens
  misc_RNA (1)...(19): siRNA sense strand
ucacagauccuacgcgaau

SEQ ID NO: 1742163 - RNA, 19 nt, Homo sapiens
  misc_RNA (1)...(19): siRNA sense strand
caaauucaucccacucauu

SEQ ID NO: 1742164 - RNA, 19 nt, Homo sapiens
  misc_RNA (1)...(19): siRNA sense strand
cacaaacacuccauagaag

SEQ ID NO: 1742165 - RNA, 19 nt, Homo sapiens
  misc_RNA (1)...(19): siRNA sense strand
gcacuggaacccuuguuau

SEQ ID NO: 1742166 - RNA, 19 nt, Homo sapiens
  misc_RNA (1)...(19): siRNA sense strand
aggaaucacuggaaggaaa

SEQ ID NO: 1742167 - RNA, 19 nt, Homo sapiens
  misc_RNA (1)...(19): siRNA sense strand
gggcuguucuuaagaucuu

SEQ ID NO: 1742168 - RNA, 19 nt, Homo sapiens
  misc_RNA (1)...(19): siRNA sense strand
aaucuacagugacgggaua

SEQ ID NO: 1742169 - RNA, 19 nt, Homo sapiens
  misc_RNA (1)...(19): siRNA sense strand
gcacugcccagacaauugu

SEQ ID NO: 1742170 - RNA, 19 nt, Homo sapiens
  misc_RNA (1)...(19): siRNA sense strand
ugaaacaugcuggaagaua

SEQ ID NO: 1742171 - RNA, 19 nt, Homo sapiens
  misc_RNA (1)...(19): siRNA sense strand
gcaagaauuuauguucaag

SEQ ID NO: 1742172 - RNA, 19 nt, Homo sapiens
  misc_RNA (1)...(19): siRNA sense strand
gcaaauucaucccacucau

SEQ ID NO: 1742173 - RNA, 19 nt, Homo sapiens
  misc_RNA (1)...(19): siRNA sense strand
gguucacgcuauauaauca

SEQ ID NO: 1742174 - RNA, 19 nt, Homo sapiens
  misc_RNA (1)...(19): siRNA sense strand
aaauguggcuccuucagau

SEQ ID NO: 1742175 - RNA, 19 nt, Homo sapiens
  misc_RNA (1)...(19): siRNA sense strand
ugccuuggaucucacauuu

SEQ ID NO: 1742176 - RNA, 19 nt, Homo sapiens
  misc_RNA (1)...(19): siRNA sense strand
cggaauguaucagugcaua

SEQ ID NO: 1742177 - RNA, 19 nt, Homo sapiens
  misc_RNA (1)...(19): siRNA sense strand
caagcaagaauuuauguuc

SEQ ID NO: 1742178 - RNA, 19 nt, Homo sapiens
  misc_RNA (1)...(19): siRNA sense strand
uccaauaccugaacgaaca

SEQ ID NO: 1742179 - RNA, 19 nt, Homo sapiens
  misc_RNA (1)...(19): siRNA sense strand
gaucaugucguugcacuau

SEQ ID NO: 1742180 - RNA, 19 nt, Homo sapiens
  misc_RNA (1)...(19): siRNA sense strand
ggaagggugauaauugaau

SEQ ID NO: 1742181 - RNA, 19 nt, Homo sapiens
  misc_RNA (1)...(19): siRNA sense strand
gugcauagcugaaaacaca

SEQ ID NO: 1742182 - RNA, 19 nt, Homo sapiens
  misc_RNA (1)...(19): siRNA sense strand
ggacauaggcagugaucuc

SEQ ID NO: 1742183 - RNA, 19 nt, Homo sapiens
  misc_RNA (1)...(19): siRNA sense strand
gcuggaauauacuacuguu

SEQ ID NO: 1742184 - RNA, 19 nt, Homo sapiens
  misc_RNA (1)...(19): siRNA sense strand
ggaaaagucucacucaacu

SEQ ID NO: 1742185 - RNA, 19 nt, Homo sapiens
  misc_RNA (1)...(19): siRNA sense strand
gucaaggccuucaacaaca

SEQ ID NO: 1742186 - RNA, 19 nt, Homo sapiens
  misc_RNA (1)...(19): siRNA sense strand
ucaaggccuucaacaacaa

SEQ ID NO: 1742187 - RNA, 19 nt, Homo sapiens
  misc_RNA (1)...(19): siRNA sense strand
gaaagaugcuggaauauac

SEQ ID NO: 1742188 - RNA, 19 nt, Homo sapiens
  misc_RNA (1)...(19): siRNA sense strand
acagaaagaugcuggaaua

SEQ ID NO: 1742189 - RNA, 19 nt, Homo sapiens
  misc_RNA (1)...(19): siRNA sense strand
gaggaaaccuuguuaucaa

SEQ ID NO: 1742190 - RNA, 19 nt, Homo sapiens
  misc_RNA (1)...(19): siRNA sense strand
gaagagcagccaaucaaua

SEQ ID NO: 1742191 - RNA, 19 nt, Homo sapiens
  misc_RNA (1)...(19): siRNA sense strand
ggauaaacaucaagcaaga

SEQ ID NO: 1742192 - RNA, 19 nt, Homo sapiens
  misc_RNA (1)...(19): siRNA sense strand
gaauggugcuucucuguga

SEQ ID NO: 1742193 - RNA, 19 nt, Homo sapiens
  misc_RNA (1)...(19): siRNA sense strand
agaagaagcugcaaacaga

SEQ ID NO: 1742194 - RNA, 19 nt, Homo sapiens
  misc_RNA (1)...(19): siRNA sense strand
gaugguagcuuggaaauca

SEQ ID NO: 1742195 - RNA, 19 nt, Homo sapiens
  misc_RNA (1)...(19): siRNA sense strand
ucaaaugaaucuacaguga

SEQ ID NO: 1742196 - RNA, 19 nt, Homo sapiens
  misc_RNA (1)...(19): siRNA sense strand
ggacaauucuucagcuuca

SEQ ID NO: 1742197 - RNA, 19 nt, Homo sapiens
  misc_RNA (1)...(19): siRNA sense strand
gaaaugaauccuaugaaga

SEQ ID NO: 1742198 - RNA, 19 nt, Homo sapiens
  misc_RNA (1)...(19): siRNA sense strand
gaauuaagacuguaugaug

SEQ ID NO: 1742199 - RNA, 19 nt, Homo sapiens
  misc_RNA (1)...(19): siRNA sense strand
gaaacaugcuggaagauac

SEQ ID NO: 1742200 - RNA, 19 nt, Homo sapiens
  misc_RNA (1)...(19): siRNA sense strand
ggauguauaugcauugaug

SEQ ID NO: 1742201 - RNA, 19 nt, Homo sapiens
  misc_RNA (1)...(19): siRNA sense strand
gagaauagaagacauuaga

SEQ ID NO: 1742202 - RNA, 19 nt, Homo sapiens
  misc_RNA (1)...(19): siRNA sense strand
ggucagucaucuugugaua

SEQ ID NO: 1742203 - RNA, 19 nt, Homo sapiens
  misc_RNA (1)...(19): siRNA sense strand
gaaaugcgcagcugaaaca

SEQ ID NO: 1742204 - RNA, 19 nt, Homo sapiens
  misc_RNA (1)...(19): siRNA sense strand
cagaguggcuugucaauag

SEQ ID NO: 1742205 - RNA, 19 nt, Homo sapiens
  misc_RNA (1)...(19): siRNA sense strand
caacaacccugacaaacag

SEQ ID NO: 1742206 - RNA, 19 nt, Homo sapiens
  misc_RNA (1)...(19): siRNA sense strand
ugagauaucuguucauugg

SEQ ID NO: 1742207 - RNA, 19 nt, Homo sapiens
  misc_RNA (1)...(19): siRNA sense strand
ggaauauacuacuguuuag

SEQ ID NO: 1742208 - RNA, 19 nt, Homo sapiens
  misc_RNA (1)...(19): siRNA sense strand
guggaaagcuaucagauuc

SEQ ID NO: 1742209 - RNA, 19 nt, Homo sapiens
  misc_RNA (1)...(19): siRNA sense strand
gaaagcccaucccuacaau

SEQ ID NO: 1742210 - RNA, 19 nt, Homo sapiens
  misc_RNA (1)...(19): siRNA sense strand
gaucuucaauauucagcua

SEQ ID NO: 1742211 - RNA, 19 nt, Homo sapiens
  misc_RNA (1)...(19): siRNA sense strand
gcuaucagauucgguauug

SEQ ID NO: 1742212 - RNA, 19 nt, Homo sapiens
  misc_RNA (1)...(19): siRNA sense strand
caacagaaguagguguaaa

SEQ ID NO: 1742213 - RNA, 19 nt, Homo sapiens
  misc_RNA (1)...(19): siRNA sense strand
gcugaaacaugcuggaaga

SEQ ID NO: 1742214 - RNA, 19 nt, Homo sapiens
  misc_RNA (1)...(19): siRNA sense strand
ggugauaauugaaugcaaa

SEQ ID NO: 1742215 - RNA, 19 nt, Homo sapiens
  misc_RNA (1)...(19): siRNA sense strand
gaagggugauaauugaaug

SEQ ID NO: 1742216 - RNA, 19 nt, Homo sapiens
  misc_RNA (1)...(19): siRNA sense strand
ucagaugacuggaaagaug

SEQ ID NO: 1742217 - RNA, 19 nt, Homo sapiens
  misc_RNA (1)...(19): siRNA sense strand
gcacagugauggaggagau

SEQ ID NO: 1742218 - RNA, 19 nt, Homo sapiens
  misc_RNA (1)...(19): siRNA sense strand
gcaaacagaguucaaguca

SEQ ID NO: 1742219 - RNA, 19 nt, Homo sapiens
  misc_RNA (1)...(19): siRNA sense strand
caagagcaguggacuuaau

SEQ ID NO: 1742220 - RNA, 19 nt, Homo sapiens
  misc_RNA (1)...(19): siRNA sense strand
gaucaucaguucaguaagg

SEQ ID NO: 1742221 - RNA, 19 nt, Homo sapiens
  misc_RNA (1)...(19): siRNA sense strand
guggaagggugauaauuga

SEQ ID NO: 1742222 - RNA, 19 nt, Homo sapiens
  misc_RNA (1)...(19): siRNA sense strand
ucacaaacacuccauagaa

SEQ ID NO: 1742223 - RNA, 19 nt, Homo sapiens
  misc_RNA (1)...(19): siRNA sense strand
ggaaaggaauggugcuucu

SEQ ID NO: 1742224 - RNA, 19 nt, Homo sapiens
  misc_RNA (1)...(19): siRNA sense strand
ccacugcauuucaaguuaa

SEQ ID NO: 1742225 - RNA, 19 nt, Homo sapiens
  misc_RNA (1)...(19): siRNA sense strand
ggaggaaaccuuguuauca

SEQ ID NO: 1742226 - RNA, 19 nt, Homo sapiens
  misc_RNA (1)...(19): siRNA sense strand
ggaguggugucucaaguca

SEQ ID NO: 1742227 - RNA, 19 nt, Homo sapiens
  misc_RNA (1)...(19): siRNA sense strand
gauauaagguacucuacag

SEQ ID NO: 1742228 - RNA, 19 nt, Homo sapiens
  misc_RNA (1)...(19): siRNA sense strand
agacuauucuuucagauga

SEQ ID NO: 1742229 - RNA, 19 nt, Homo sapiens
  misc_RNA (1)...(19): siRNA sense strand
ucaacaacauuacaaggaa

SEQ ID NO: 1742230 - RNA, 19 nt, Homo sapiens
  misc_RNA (1)...(19): siRNA sense strand
ggaagaugguagcuuggaa

SEQ ID NO: 1742231 - RNA, 19 nt, Homo sapiens
  misc_RNA (1)...(19): siRNA sense strand
ggaaagcccaucccuacaa

SEQ ID NO: 1742232 - RNA, 19 nt, Homo sapiens
  misc_RNA (1)...(19): siRNA sense strand
gauaaacggcgauuugugu

SEQ ID NO: 1742233 - RNA, 19 nt, Homo sapiens
  misc_RNA (1)...(19): siRNA sense strand
ggacguugaucucacaagu

SEQ ID NO: 1742234 - RNA, 19 nt, Homo sapiens
  misc_RNA (1)...(19): siRNA sense strand
gauccuggcugcuaaaggu

SEQ ID NO: 1742235 - RNA, 19 nt, Homo sapiens
  misc_RNA (1)...(19): siRNA sense strand
ucaaggauguauaugcauu

SEQ ID NO: 1742236 - RNA, 19 nt, Homo sapiens
  misc_RNA (1)...(19): siRNA sense strand
caaagagcguguucagcaa

SEQ ID NO: 1742237 - RNA, 19 nt, Homo sapiens
  misc_RNA (1)...(19): siRNA sense strand
gaggaaaggauaaacauca

SEQ ID NO: 1742238 - RNA, 19 nt, Homo sapiens
  misc_RNA (1)...(19): siRNA sense strand
gauccuacgcgaauuauau

SEQ ID NO: 1742239 - RNA, 19 nt, Homo sapiens
  misc_RNA (1)...(19): siRNA sense strand
ugaaaugaauccuaugaag

SEQ ID NO: 1742240 - RNA, 19 nt, Homo sapiens
  misc_RNA (1)...(19): siRNA sense strand
ucagucaucuugugauaau

SEQ ID NO: 1742241 - RNA, 19 nt, Homo sapiens
  misc_RNA (1)...(19): siRNA sense strand
guuuacaaauggagaauga

SEQ ID NO: 1742242 - RNA, 19 nt, Homo sapiens
  misc_RNA (1)...(19): siRNA sense strand
acagagagcugaccauaac

SEQ ID NO: 1742243 - RNA, 19 nt, Homo sapiens
  misc_RNA (1)...(19): siRNA sense strand
gaagaugguagcuuggaaa

SEQ ID NO: 1742244 - RNA, 19 nt, Homo sapiens
  misc_RNA (1)...(19): siRNA sense strand
gaaggcaucuaugaaugug

SEQ ID NO: 1742245 - RNA, 19 nt, Homo sapiens
  misc_RNA (1)...(19): siRNA sense strand
acaagacgcucccagugaa

SEQ ID NO: 1742246 - RNA, 19 nt, Homo sapiens
  misc_RNA (1)...(19): siRNA sense strand
agaaagaugcuggaauaua

SEQ ID NO: 1742247 - RNA, 19 nt, Homo sapiens
  misc_RNA (1)...(19): siRNA sense strand
caaagagaauauucacuac

SEQ ID NO: 1742248 - RNA, 19 nt, Homo sapiens
  misc_RNA (1)...(19): siRNA sense strand
ggguagaacacaucaauga

SEQ ID NO: 1742249 - RNA, 19 nt, Homo sapiens
  misc_RNA (1)...(19): siRNA sense strand
gcagcagaauacucauuug

SEQ ID NO: 1742250 - RNA, 19 nt, Homo sapiens
  misc_RNA (1)...(19): siRNA sense strand
gccaaucaauaccauuuau

SEQ ID NO: 1742251 - RNA, 19 nt, Homo sapiens
  misc_RNA (1)...(19): siRNA sense strand
caacaacauuacaaggaau

SEQ ID NO: 1742252 - RNA, 19 nt, Homo sapiens
  misc_RNA (1)...(19): siRNA sense strand
gaacccuuguuaucacaga

SEQ ID NO: 1742253 - RNA, 19 nt, Homo sapiens
  misc_RNA (1)...(19): siRNA sense strand
aaacagagagcugaccaua

SEQ ID NO: 1742254 - RNA, 19 nt, Homo sapiens
  misc_RNA (1)...(19): siRNA sense strand
guaggaggaaaccuuguua

SEQ ID NO: 1742255 - RNA, 19 nt, Homo sapiens
  misc_RNA (1)...(19): siRNA sense strand
ugaggaagacaaaggauuu

SEQ ID NO: 1742256 - RNA, 19 nt, Homo sapiens
  misc_RNA (1)...(19): siRNA sense strand
gcauuuaagccauuugaug

SEQ ID NO: 1742257 - RNA, 19 nt, Homo sapiens
  misc_RNA (1)...(19): siRNA sense strand
ggaaaucaacaacauuaca

SEQ ID NO: 1742258 - RNA, 19 nt, Homo sapiens
  misc_RNA (1)...(19): siRNA sense strand
gguggaagggugauaauug

SEQ ID NO: 1742259 - RNA, 19 nt, Homo sapiens
  misc_RNA (1)...(19): siRNA sense strand
acacagagguggacauagg

SEQ ID NO: 1742260 - RNA, 19 nt, Homo sapiens
  misc_RNA (1)...(19): siRNA sense strand
gcugagaacauuagaggaa

SEQ ID NO: 1742261 - RNA, 19 nt, Homo sapiens
  misc_RNA (1)...(19): siRNA sense strand
guucaaggauguauaugca

SEQ ID NO: 1742262 - RNA, 19 nt, Homo sapiens
  misc_RNA (1)...(19): siRNA sense strand
ucacagauccuacgcgaau

SEQ ID NO: 1742263 - RNA, 19 nt, Homo sapiens
  misc_RNA (1)...(19): siRNA sense strand
caaauucaucccacucauu

SEQ ID NO: 1742264 - RNA, 19 nt, Homo sapiens
  misc_RNA (1)...(19): siRNA sense strand
cacaaacacuccauagaag

SEQ ID NO: 1742265 - RNA, 19 nt, Homo sapiens
  misc_RNA (1)...(19): siRNA sense strand
gcacuggaacccuuguuau

SEQ ID NO: 1742266 - RNA, 19 nt, Homo sapiens
  misc_RNA (1)...(19): siRNA sense strand
aggaaucacuggaaggaaa

SEQ ID NO: 1742267 - RNA, 19 nt, Homo sapiens
  misc_RNA (1)...(19): siRNA sense strand
gggcuguucuuaagaucuu

SEQ ID NO: 1742268 - RNA, 19 nt, Homo sapiens
  misc_RNA (1)...(19): siRNA sense strand
aaucuacagugacgggaua

SEQ ID NO: 1742269 - RNA, 19 nt, Homo sapiens
  misc_RNA (1)...(19): siRNA sense strand
gcacugcccagacaauugu

SEQ ID NO: 1742270 - RNA, 19 nt, Homo sapiens
  misc_RNA (1)...(19): siRNA sense strand
ugaaacaugcuggaagaua

SEQ ID NO: 1742271 - RNA, 19 nt, Homo sapiens
  misc_RNA (1)...(19): siRNA sense strand
gcaagaauuuauguucaag

SEQ ID NO: 1742272 - RNA, 19 nt, Homo sapiens
  misc_RNA (1)...(19): siRNA sense strand
gcaaauucaucccacucau

SEQ ID NO: 1742273 - RNA, 19 nt, Homo sapiens
  misc_RNA (1)...(19): siRNA sense strand
gguucacgcuauauaauca

SEQ ID NO: 1742274 - RNA, 19 nt, Homo sapiens
  misc_RNA (1)...(19): siRNA sense strand
aaauguggcuccuucagau

SEQ ID NO: 1742275 - RNA, 19 nt, Homo sapiens
  misc_RNA (1)...(19): siRNA sense strand
ugccuuggaucucacauuu

SEQ ID NO: 1742276 - RNA, 19 nt, Homo sapiens
  misc_RNA (1)...(19): siRNA sense strand
cggaauguaucagugcaua

SEQ ID NO: 1742277 - RNA, 19 nt, Homo sapiens
  misc_RNA (1)...(19): siRNA sense strand
caagcaagaauuuauguuc

SEQ ID NO: 1742278 - RNA, 19 nt, Homo sapiens
  misc_RNA (1)...(19): siRNA sense strand
uccaauaccugaacgaaca

SEQ ID NO: 1742279 - RNA, 19 nt, Homo sapiens
  misc_RNA (1)...(19): siRNA sense strand
gaucaugucguugcacuau

SEQ ID NO: 1742280 - RNA, 19 nt, Homo sapiens
  misc_RNA (1)...(19): siRNA sense strand
ggaagggugauaauugaau

SEQ ID NO: 1742281 - RNA, 19 nt, Homo sapiens
  misc_RNA (1)...(19): siRNA sense strand
gugcauagcugaaaacaca

SEQ ID NO: 1742282 - RNA, 19 nt, Homo sapiens
  misc_RNA (1)...(19): siRNA sense strand
ggacauaggcagugaucuc

SEQ ID NO: 1742283 - RNA, 19 nt, Homo sapiens
  misc_RNA (1)...(19): siRNA sense strand
gcuggaauauacuacuguu

SEQ ID NO: 1742284 - RNA, 19 nt, Homo sapiens
  misc_RNA (1)...(19): siRNA sense strand
ggaaaagucucacucaacu

SEQ ID NO: 1742285 - RNA, 19 nt, Homo sapiens
  misc_RNA (1)...(19): siRNA sense strand
gucaaggccuucaacaaca

SEQ ID NO: 1742286 - RNA, 19 nt, Homo sapiens
  misc_RNA (1)...(19): siRNA sense strand
ucaaggccuucaacaacaa

SEQ ID NO: 1742287 - RNA, 19 nt, Homo sapiens
  misc_RNA (1)...(19): siRNA sense strand
gcucaucgcucagaagaaa

SEQ ID NO: 1742288 - RNA, 19 nt, Homo sapiens
  misc_RNA (1)...(19): siRNA sense strand
gaagaaacgggaaauugaa

SEQ ID NO: 1742289 - RNA, 19 nt, Homo sapiens
  misc_RNA (1)...(19): siRNA sense strand
agaagaaacgggaaauuga

SEQ ID NO: 1742290 - RNA, 19 nt, Homo sapiens
  misc_RNA (1)...(19): siRNA sense strand
cagaagaaacgggaaauug

SEQ ID NO: 1742291 - RNA, 19 nt, Homo sapiens
  misc_RNA (1)...(19): siRNA sense strand
gaagaggucccugcucauc

SEQ ID NO: 1742292 - RNA, 19 nt, Homo sapiens
  misc_RNA (1)...(19): siRNA sense strand
ggacgaggaggaggacuau

SEQ ID NO: 1742293 - RNA, 19 nt, Homo sapiens
  misc_RNA (1)...(19): siRNA sense strand
gcucagaagaaacgggaaa

SEQ ID NO: 1742294 - RNA, 19 nt, Homo sapiens
  misc_RNA (1)...(19): siRNA sense strand
agaaagccaagcagaauca

SEQ ID NO: 1742295 - RNA, 19 nt, Homo sapiens
  misc_RNA (1)...(19): siRNA sense strand
ggaaauugaagccaaaaug

SEQ ID NO: 1742296 - RNA, 19 nt, Homo sapiens
  misc_RNA (1)...(19): siRNA sense strand
acagaaagccaagcagaau

SEQ ID NO: 1742297 - RNA, 19 nt, Homo sapiens
  misc_RNA (1)...(19): siRNA sense strand
acgaggaggaggacuauga

SEQ ID NO: 1742298 - RNA, 19 nt, Homo sapiens
  misc_RNA (1)...(19): siRNA sense strand
gagcaguggcuggagauca

SEQ ID NO: 1742299 - RNA, 19 nt, Homo sapiens
  misc_RNA (1)...(19): siRNA sense strand
ucagaagaaacgggaaauu

SEQ ID NO: 1742300 - RNA, 19 nt, Homo sapiens
  misc_RNA (1)...(19): siRNA sense strand
agcaguggcuggagaucaa

SEQ ID NO: 1742301 - RNA, 19 nt, Homo sapiens
  misc_RNA (1)...(19): siRNA sense strand
gaaauugaagccaaaaugg

SEQ ID NO: 1742302 - RNA, 19 nt, Homo sapiens
  misc_RNA (1)...(19): siRNA sense strand
acgggaaauugaagccaaa

SEQ ID NO: 1742303 - RNA, 19 nt, Homo sapiens
  misc_RNA (1)...(19): siRNA sense strand
ggaagaggucccugcucau

SEQ ID NO: 1742304 - RNA, 19 nt, Homo sapiens
  misc_RNA (1)...(19): siRNA sense strand
cagaaagccaagcagaauc

SEQ ID NO: 1742305 - RNA, 19 nt, Homo sapiens
  misc_RNA (1)...(19): siRNA sense strand
ggaaagugauagagaaauu

SEQ ID NO: 1742306 - RNA, 19 nt, Homo sapiens
  misc_RNA (1)...(19): siRNA sense strand
gaagguggcugagauaaga

SEQ ID NO: 1742307 - RNA, 19 nt, Homo sapiens
  misc_RNA (1)...(19): siRNA sense strand
gacagaagcuggaggaguu

SEQ ID NO: 1742308 - RNA, 19 nt, Homo sapiens
  misc_RNA (1)...(19): siRNA sense strand
ggaagaagguggcugagau

SEQ ID NO: 1742309 - RNA, 19 nt, Homo sapiens
  misc_RNA (1)...(19): siRNA sense strand
gcucaucgcucagaagaaa

SEQ ID NO: 1742310 - RNA, 19 nt, Homo sapiens
  misc_RNA (1)...(19): siRNA sense strand
gcagggaauuccucuacua

SEQ ID NO: 1742311 - RNA, 19 nt, Homo sapiens
  misc_RNA (1)...(19): siRNA sense strand
gaagaagguggcugagaua

SEQ ID NO: 1742312 - RNA, 19 nt, Homo sapiens
  misc_RNA (1)...(19): siRNA sense strand
gcauucagcuuucuguaug

SEQ ID NO: 1742313 - RNA, 19 nt, Homo sapiens
  misc_RNA (1)...(19): siRNA sense strand
gaagaaacgggaaauugaa

SEQ ID NO: 1742314 - RNA, 19 nt, Homo sapiens
  misc_RNA (1)...(19): siRNA sense strand
gaaccaggcauucagcuuu

SEQ ID NO: 1742315 - RNA, 19 nt, Homo sapiens
  misc_RNA (1)...(19): siRNA sense strand
uaacccagcauuugcauuu

SEQ ID NO: 1742316 - RNA, 19 nt, Homo sapiens
  misc_RNA (1)...(19): siRNA sense strand
gcauggagauggauaagac

SEQ ID NO: 1742317 - RNA, 19 nt, Homo sapiens
  misc_RNA (1)...(19): siRNA sense strand
gaaaggaagcacagaaguc

SEQ ID NO: 1742318 - RNA, 19 nt, Homo sapiens
  misc_RNA (1)...(19): siRNA sense strand
ccaaggaggacgacgagua

SEQ ID NO: 1742319 - RNA, 19 nt, Homo sapiens
  misc_RNA (1)...(19): siRNA sense strand
cagacggccuuacuacuga

SEQ ID NO: 1742320 - RNA, 19 nt, Homo sapiens
  misc_RNA (1)...(19): siRNA sense strand
gcacggcuaugacagugau

SEQ ID NO: 1742321 - RNA, 19 nt, Homo sapiens
  misc_RNA (1)...(19): siRNA sense strand
ccgagcagcugacaaagau

SEQ ID NO: 1742322 - RNA, 19 nt, Homo sapiens
  misc_RNA (1)...(19): siRNA sense strand
agaagaaacgggaaauuga

SEQ ID NO: 1742323 - RNA, 19 nt, Homo sapiens
  misc_RNA (1)...(19): siRNA sense strand
gaaagugauagagaaauug

SEQ ID NO: 1742324 - RNA, 19 nt, Homo sapiens
  misc_RNA (1)...(19): siRNA sense strand
cagaagaaacgggaaauug

SEQ ID NO: 1742325 - RNA, 19 nt, Homo sapiens
  misc_RNA (1)...(19): siRNA sense strand
ccauugcccuccagaacaa

SEQ ID NO: 1742326 - RNA, 19 nt, Homo sapiens
  misc_RNA (1)...(19): siRNA sense strand
caaggaggacgacgaguau

SEQ ID NO: 1742327 - RNA, 19 nt, Homo sapiens
  misc_RNA (1)...(19): siRNA sense strand
agaagaagcagcugaagga

SEQ ID NO: 1742328 - RNA, 19 nt, Homo sapiens
  misc_RNA (1)...(19): siRNA sense strand
uaagaaaggaagcacagaa

SEQ ID NO: 1742329 - RNA, 19 nt, Homo sapiens
  misc_RNA (1)...(19): siRNA sense strand
gaagaggucccugcucauc

SEQ ID NO: 1742330 - RNA, 19 nt, Homo sapiens
  misc_RNA (1)...(19): siRNA sense strand
ucaagaacccagugaacaa

SEQ ID NO: 1742331 - RNA, 19 nt, Homo sapiens
  misc_RNA (1)...(19): siRNA sense strand
gggaauuccucuacuacag

SEQ ID NO: 1742332 - RNA, 19 nt, Homo sapiens
  misc_RNA (1)...(19): siRNA sense strand
gggccgagcagcugacaaa

SEQ ID NO: 1742333 - RNA, 19 nt, Homo sapiens
  misc_RNA (1)...(19): siRNA sense strand
ggacgaagaggucaagaac

SEQ ID NO: 1742334 - RNA, 19 nt, Homo sapiens
  misc_RNA (1)...(19): siRNA sense strand
cagacgagcuggaaaaguu

SEQ ID NO: 1742335 - RNA, 19 nt, Homo sapiens
  misc_RNA (1)...(19): siRNA sense strand
caaggauaacccagcauuu

SEQ ID NO: 1742336 - RNA, 19 nt, Homo sapiens
  misc_RNA (1)...(19): siRNA sense strand
aaaguuggccagguucaua

SEQ ID NO: 1742337 - RNA, 19 nt, Homo sapiens
  misc_RNA (1)...(19): siRNA sense strand
gcacuucaucggagacuuc

SEQ ID NO: 1742338 - RNA, 19 nt, Homo sapiens
  misc_RNA (1)...(19): siRNA sense strand
ggagaaggcaguccaacag

SEQ ID NO: 1742339 - RNA, 19 nt, Homo sapiens
  misc_RNA (1)...(19): siRNA sense strand
gauaagaauagcagggaau

SEQ ID NO: 1742340 - RNA, 19 nt, Homo sapiens
  misc_RNA (1)...(19): siRNA sense strand
ugaaggagcagcaggagau

SEQ ID NO: 1742341 - RNA, 19 nt, Homo sapiens
  misc_RNA (1)...(19): siRNA sense strand
gcucccaccugcugaacug

SEQ ID NO: 1742342 - RNA, 19 nt, Homo sapiens
  misc_RNA (1)...(19): siRNA sense strand
ugaugaagaugggcuggaa

SEQ ID NO: 1742343 - RNA, 19 nt, Homo sapiens
  misc_RNA (1)...(19): siRNA sense strand
ggacgaggaggaggacuau

SEQ ID NO: 1742344 - RNA, 19 nt, Homo sapiens
  misc_RNA (1)...(19): siRNA sense strand
cagaaaaguuggccagguu

SEQ ID NO: 1742345 - RNA, 19 nt, Homo sapiens
  misc_RNA (1)...(19): siRNA sense strand
ccagacggccuuacuacug

SEQ ID NO: 1742346 - RNA, 19 nt, Homo sapiens
  misc_RNA (1)...(19): siRNA sense strand
gcucagaagaaacgggaaa

SEQ ID NO: 1742347 - RNA, 19 nt, Homo sapiens
  misc_RNA (1)...(19): siRNA sense strand
ggcagccucucagaaaguu

SEQ ID NO: 1742348 - RNA, 19 nt, Homo sapiens
  misc_RNA (1)...(19): siRNA sense strand
ucaaggggcucggcuauga

SEQ ID NO: 1742349 - RNA, 19 nt, Homo sapiens
  misc_RNA (1)...(19): siRNA sense strand
agaaagccaagcagaauca

SEQ ID NO: 1742350 - RNA, 19 nt, Homo sapiens
  misc_RNA (1)...(19): siRNA sense strand
cagccaccgugaagaggaa

SEQ ID NO: 1742351 - RNA, 19 nt, Homo sapiens
  misc_RNA (1)...(19): siRNA sense strand
aaguagcuauggaggacua

SEQ ID NO: 1742352 - RNA, 19 nt, Homo sapiens
  misc_RNA (1)...(19): siRNA sense strand
ggaaauugaagccaaaaug

SEQ ID NO: 1742353 - RNA, 19 nt, Homo sapiens
  misc_RNA (1)...(19): siRNA sense strand
uacaaguacuaccgacaga

SEQ ID NO: 1742354 - RNA, 19 nt, Homo sapiens
  misc_RNA (1)...(19): siRNA sense strand
ggcauucagcuuucuguau

SEQ ID NO: 1742355 - RNA, 19 nt, Homo sapiens
  misc_RNA (1)...(19): siRNA sense strand
uggcugagauaagaaagga

SEQ ID NO: 1742356 - RNA, 19 nt, Homo sapiens
  misc_RNA (1)...(19): siRNA sense strand
aaggauaacccagcauuug

SEQ ID NO: 1742357 - RNA, 19 nt, Homo sapiens
  misc_RNA (1)...(19): siRNA sense strand
auggaggacuacaaggaua

SEQ ID NO: 1742358 - RNA, 19 nt, Homo sapiens
  misc_RNA (1)...(19): siRNA sense strand
gggagaaggcaguccaaca

SEQ ID NO: 1742359 - RNA, 19 nt, Homo sapiens
  misc_RNA (1)...(19): siRNA sense strand
acagaaagccaagcagaau

SEQ ID NO: 1742360 - RNA, 19 nt, Homo sapiens
  misc_RNA (1)...(19): siRNA sense strand
gugaagaggaagcggaaga

SEQ ID NO: 1742361 - RNA, 19 nt, Homo sapiens
  misc_RNA (1)...(19): siRNA sense strand
cauucagcuuucuguauga

SEQ ID NO: 1742362 - RNA, 19 nt, Homo sapiens
  misc_RNA (1)...(19): siRNA sense strand
gaaccuugcagaaaaguug

SEQ ID NO: 1742363 - RNA, 19 nt, Homo sapiens
  misc_RNA (1)...(19): siRNA sense strand
ggauaacccagcauuugca

SEQ ID NO: 1742364 - RNA, 19 nt, Homo sapiens
  misc_RNA (1)...(19): siRNA sense strand
acaaggauaacccagcauu

SEQ ID NO: 1742365 - RNA, 19 nt, Homo sapiens
  misc_RNA (1)...(19): siRNA sense strand
gcgcuggcuucggcauuga

SEQ ID NO: 1742366 - RNA, 19 nt, Homo sapiens
  misc_RNA (1)...(19): siRNA sense strand
gcaucaagaacccagugaa

SEQ ID NO: 1742367 - RNA, 19 nt, Homo sapiens
  misc_RNA (1)...(19): siRNA sense strand
gccugaagaggauaaggua

SEQ ID NO: 1742368 - RNA, 19 nt, Homo sapiens
  misc_RNA (1)...(19): siRNA sense strand
acgaggaggaggacuauga

SEQ ID NO: 1742369 - RNA, 19 nt, Homo sapiens
  misc_RNA (1)...(19): siRNA sense strand
ugaagaggauaagguagag

SEQ ID NO: 1742370 - RNA, 19 nt, Homo sapiens
  misc_RNA (1)...(19): siRNA sense strand
caaguacuaccgacagaag

SEQ ID NO: 1742371 - RNA, 19 nt, Homo sapiens
  misc_RNA (1)...(19): siRNA sense strand
uuucagacgcccagaagaa

SEQ ID NO: 1742372 - RNA, 19 nt, Homo sapiens
  misc_RNA (1)...(19): siRNA sense strand
gagcaguggcuggagauca

SEQ ID NO: 1742373 - RNA, 19 nt, Homo sapiens
  misc_RNA (1)...(19): siRNA sense strand
gaaauugaagccaaaaugg

SEQ ID NO: 1742374 - RNA, 19 nt, Homo sapiens
  misc_RNA (1)...(19): siRNA sense strand
gccgagcagcugacaaaga

SEQ ID NO: 1742375 - RNA, 19 nt, Homo sapiens
  misc_RNA (1)...(19): siRNA sense strand
ucagaagaaacgggaaauu

SEQ ID NO: 1742376 - RNA, 19 nt, Homo sapiens
  misc_RNA (1)...(19): siRNA sense strand
ccucgccucugucaguuca

SEQ ID NO: 1742377 - RNA, 19 nt, Homo sapiens
  misc_RNA (1)...(19): siRNA sense strand
agcaguggcuggagaucaa

SEQ ID NO: 1742378 - RNA, 19 nt, Homo sapiens
  misc_RNA (1)...(19): siRNA sense strand
aaccaggcauucagcuuuc

SEQ ID NO: 1742379 - RNA, 19 nt, Homo sapiens
  misc_RNA (1)...(19): siRNA sense strand
cagaguacaaggaguucaa

SEQ ID NO: 1742380 - RNA, 19 nt, Homo sapiens
  misc_RNA (1)...(19): siRNA sense strand
gaaggagcagcaggagaug

SEQ ID NO: 1742381 - RNA, 19 nt, Homo sapiens
  misc_RNA (1)...(19): siRNA sense strand
ggaagccugugggucuagu

SEQ ID NO: 1742382 - RNA, 19 nt, Homo sapiens
  misc_RNA (1)...(19): siRNA sense strand
cugaagaggauaagguaga

SEQ ID NO: 1742383 - RNA, 19 nt, Homo sapiens
  misc_RNA (1)...(19): siRNA sense strand
caagaacccagugaacaag

SEQ ID NO: 1742384 - RNA, 19 nt, Homo sapiens
  misc_RNA (1)...(19): siRNA sense strand
caagcugacuguggagaac

SEQ ID NO: 1742385 - RNA, 19 nt, Homo sapiens
  misc_RNA (1)...(19): siRNA sense strand
gccgugagccugacuacuc

SEQ ID NO: 1742386 - RNA, 19 nt, Homo sapiens
  misc_RNA (1)...(19): siRNA sense strand
ggauaagaccagggaaugg

SEQ ID NO: 1742387 - RNA, 19 nt, Homo sapiens
  misc_RNA (1)...(19): siRNA sense strand
cucggaaagugauagagaa

SEQ ID NO: 1742388 - RNA, 19 nt, Homo sapiens
  misc_RNA (1)...(19): siRNA sense strand
gcuggaggaguuccggaaa

SEQ ID NO: 1742389 - RNA, 19 nt, Homo sapiens
  misc_RNA (1)...(19): siRNA sense strand
ggaagaggucccugcucau

SEQ ID NO: 1742390 - RNA, 19 nt, Homo sapiens
  misc_RNA (1)...(19): siRNA sense strand
acgggaaauugaagccaaa

SEQ ID NO: 1742391 - RNA, 19 nt, Homo sapiens
  misc_RNA (1)...(19): siRNA sense strand
agcaggagaugcagcagau

SEQ ID NO: 1742392 - RNA, 19 nt, Homo sapiens
  misc_RNA (1)...(19): siRNA sense strand
uggaggacuacaaggauaa

SEQ ID NO: 1742393 - RNA, 19 nt, Homo sapiens
  misc_RNA (1)...(19): siRNA sense strand
caggagaugcagcagaugu

SEQ ID NO: 1742394 - RNA, 19 nt, Homo sapiens
  misc_RNA (1)...(19): siRNA sense strand
cagaaagccaagcagaauc

SEQ ID NO: 1742395 - RNA, 19 nt, Homo sapiens
  misc_RNA (1)...(19): siRNA sense strand
gcucaucgcucagaagaaa

SEQ ID NO: 1742396 - RNA, 19 nt, Homo sapiens
  misc_RNA (1)...(19): siRNA sense strand
gaagaaacgggaaauugaa

SEQ ID NO: 1742397 - RNA, 19 nt, Homo sapiens
  misc_RNA (1)...(19): siRNA sense strand
agaagaaacgggaaauuga

SEQ ID NO: 1742398 - RNA, 19 nt, Homo sapiens
  misc_RNA (1)...(19): siRNA sense strand
cagaagaaacgggaaauug

SEQ ID NO: 1742399 - RNA, 19 nt, Homo sapiens
  misc_RNA (1)...(19): siRNA sense strand
gaagaggucccugcucauc

SEQ ID NO: 1742400 - RNA, 19 nt, Homo sapiens
  misc_RNA (1)...(19): siRNA sense strand
gcucagaagaaacgggaaa

SEQ ID NO: 1742401 - RNA, 19 nt, Homo sapiens
  misc_RNA (1)...(19): siRNA sense strand
agaaagccaagcagaauca

SEQ ID NO: 1742402 - RNA, 19 nt, Homo sapiens
  misc_RNA (1)...(19): siRNA sense strand
ggaaauugaagccaaaaug

SEQ ID NO: 1742403 - RNA, 19 nt, Homo sapiens
  misc_RNA (1)...(19): siRNA sense strand
acagaaagccaagcagaau

SEQ ID NO: 1742404 - RNA, 19 nt, Homo sapiens
  misc_RNA (1)...(19): siRNA sense strand
ucagaagaaacgggaaauu

SEQ ID NO: 1742405 - RNA, 19 nt, Homo sapiens
  misc_RNA (1)...(19): siRNA sense strand
gaaauugaagccaaaaugg

SEQ ID NO: 1742406 - RNA, 19 nt, Homo sapiens
  misc_RNA (1)...(19): siRNA sense strand
acgggaaauugaagccaaa

SEQ ID NO: 1742407 - RNA, 19 nt, Homo sapiens
  misc_RNA (1)...(19): siRNA sense strand
ggaagaggucccugcucau

SEQ ID NO: 1742408 - RNA, 19 nt, Homo sapiens
  misc_RNA (1)...(19): siRNA sense strand
cagaaagccaagcagaauc

SEQ ID NO: 1742409 - RNA, 19 nt, Homo sapiens
  misc_RNA (1)...(19): siRNA sense strand
ugaagaaucuggaaaguaa

SEQ ID NO: 1742410 - RNA, 19 nt, Homo sapiens
  misc_RNA (1)...(19): siRNA sense strand
gcagagauauccgcuauaa

SEQ ID NO: 1742411 - RNA, 19 nt, Homo sapiens
  misc_RNA (1)...(19): siRNA sense strand
ggaaauauaucugcgaauu

SEQ ID NO: 1742412 - RNA, 19 nt, Homo sapiens
  misc_RNA (1)...(19): siRNA sense strand
ugaaaugccucauauagaa

SEQ ID NO: 1742413 - RNA, 19 nt, Homo sapiens
  misc_RNA (1)...(19): siRNA sense strand
gagcagagauauccgcuau

SEQ ID NO: 1742414 - RNA, 19 nt, Homo sapiens
  misc_RNA (1)...(19): siRNA sense strand
uaucaaagcuguuaagucu

SEQ ID NO: 1742415 - RNA, 19 nt, Homo sapiens
  misc_RNA (1)...(19): siRNA sense strand
caugaaguguggaaauaua

SEQ ID NO: 1742416 - RNA, 19 nt, Homo sapiens
  misc_RNA (1)...(19): siRNA sense strand
gaauaaaggacucucagaa

SEQ ID NO: 1742417 - RNA, 19 nt, Homo sapiens
  misc_RNA (1)...(19): siRNA sense strand
gaagggauccgauaaccaa

SEQ ID NO: 1742418 - RNA, 19 nt, Homo sapiens
  misc_RNA (1)...(19): siRNA sense strand
ggaaauaaaggaauaugga

SEQ ID NO: 1742419 - RNA, 19 nt, Homo sapiens
  misc_RNA (1)...(19): siRNA sense strand
cagaguggcucgaauuuua

SEQ ID NO: 1742420 - RNA, 19 nt, Homo sapiens
  misc_RNA (1)...(19): siRNA sense strand
gcagaaacagcacgagaaa

SEQ ID NO: 1742421 - RNA, 19 nt, Homo sapiens
  misc_RNA (1)...(19): siRNA sense strand
gaaauauaucugcgaauug

SEQ ID NO: 1742422 - RNA, 19 nt, Homo sapiens
  misc_RNA (1)...(19): siRNA sense strand
ggaauauggagcagagaua

SEQ ID NO: 1742423 - RNA, 19 nt, Homo sapiens
  misc_RNA (1)...(19): siRNA sense strand
ucaaagcuguuaagucugu

SEQ ID NO: 1742424 - RNA, 19 nt, Homo sapiens
  misc_RNA (1)...(19): siRNA sense strand
agaauuaugucaccaguuc

SEQ ID NO: 1742425 - RNA, 19 nt, Homo sapiens
  misc_RNA (1)...(19): siRNA sense strand
caaacagaacccaaugaua

SEQ ID NO: 1742426 - RNA, 19 nt, Homo sapiens
  misc_RNA (1)...(19): siRNA sense strand
auaaaggacucucagaaug

SEQ ID NO: 1742427 - RNA, 19 nt, Homo sapiens
  misc_RNA (1)...(19): siRNA sense strand
aaacagaacccaaugauac

SEQ ID NO: 1742428 - RNA, 19 nt, Homo sapiens
  misc_RNA (1)...(19): siRNA sense strand
gauauccgcuauaaaagua

SEQ ID NO: 1742429 - RNA, 19 nt, Homo sapiens
  misc_RNA (1)...(19): siRNA sense strand
gaagguguauaugcucuau

SEQ ID NO: 1742430 - RNA, 19 nt, Homo sapiens
  misc_RNA (1)...(19): siRNA sense strand
cauagaggaugcaggaaau

SEQ ID NO: 1742431 - RNA, 19 nt, Homo sapiens
  misc_RNA (1)...(19): siRNA sense strand
aaucacagaccaaguaauu

SEQ ID NO: 1742432 - RNA, 19 nt, Homo sapiens
  misc_RNA (1)...(19): siRNA sense strand
gcaaacagaacccaaugau

SEQ ID NO: 1742433 - RNA, 19 nt, Homo sapiens
  misc_RNA (1)...(19): siRNA sense strand
ggaaucacagaccaaguaa

SEQ ID NO: 1742434 - RNA, 19 nt, Homo sapiens
  misc_RNA (1)...(19): siRNA sense strand
gggauccgauaaccaagaa

SEQ ID NO: 1742435 - RNA, 19 nt, Homo sapiens
  misc_RNA (1)...(19): siRNA sense strand
ucaguaagguagaguuauc

SEQ ID NO: 1742436 - RNA, 19 nt, Homo sapiens
  misc_RNA (1)...(19): siRNA sense strand
ugcaggaaauaaaggaaua

SEQ ID NO: 1742437 - RNA, 19 nt, Homo sapiens
  misc_RNA (1)...(19): siRNA sense strand
aaauauaucugcgaauugg

SEQ ID NO: 1742438 - RNA, 19 nt, Homo sapiens
  misc_RNA (1)...(19): siRNA sense strand
ugacagaguggcucgaauu

SEQ ID NO: 1742439 - RNA, 19 nt, Homo sapiens
  misc_RNA (1)...(19): siRNA sense strand
ucauuugccucaucacaug

SEQ ID NO: 1742440 - RNA, 19 nt, Homo sapiens
  misc_RNA (1)...(19): siRNA sense strand
aaaguggagaugacgauua

SEQ ID NO: 1742441 - RNA, 19 nt, Homo sapiens
  misc_RNA (1)...(19): siRNA sense strand
gcacgagaaagcaaacaga

SEQ ID NO: 1742442 - RNA, 19 nt, Homo sapiens
  misc_RNA (1)...(19): siRNA sense strand
ucacagaccaaguaauuca

SEQ ID NO: 1742443 - RNA, 19 nt, Homo sapiens
  misc_RNA (1)...(19): siRNA sense strand
ucaguuggaucucuuaagg

SEQ ID NO: 1742444 - RNA, 19 nt, Homo sapiens
  misc_RNA (1)...(19): siRNA sense strand
gacagaguggcucgaauuu

SEQ ID NO: 1742445 - RNA, 19 nt, Homo sapiens
  misc_RNA (1)...(19): siRNA sense strand
gcaauacgggccuuuuaua

SEQ ID NO: 1742446 - RNA, 19 nt, Homo sapiens
  misc_RNA (1)...(19): siRNA sense strand
aaguggagaugacgauuau

SEQ ID NO: 1742447 - RNA, 19 nt, Homo sapiens
  misc_RNA (1)...(19): siRNA sense strand
uggaaucacagaccaagua

SEQ ID NO: 1742448 - RNA, 19 nt, Homo sapiens
  misc_RNA (1)...(19): siRNA sense strand
uagaggugcuuaaccaaca

SEQ ID NO: 1742449 - RNA, 19 nt, Homo sapiens
  misc_RNA (1)...(19): siRNA sense strand
gaagaaucuggaaaguaaa

SEQ ID NO: 1742450 - RNA, 19 nt, Homo sapiens
  misc_RNA (1)...(19): siRNA sense strand
guggagaugacgauuauug

SEQ ID NO: 1742451 - RNA, 19 nt, Homo sapiens
  misc_RNA (1)...(19): siRNA sense strand
gaaaccauccugaauacac

SEQ ID NO: 1742452 - RNA, 19 nt, Homo sapiens
  misc_RNA (1)...(19): siRNA sense strand
caguagccaucaauagguu

SEQ ID NO: 1742453 - RNA, 19 nt, Homo sapiens
  misc_RNA (1)...(19): siRNA sense strand
ucagaaugcugguaaaaug

SEQ ID NO: 1742454 - RNA, 19 nt, Homo sapiens
  misc_RNA (1)...(19): siRNA sense strand
uuaaauuccuacaguccaa

SEQ ID NO: 1742455 - RNA, 19 nt, Homo sapiens
  misc_RNA (1)...(19): siRNA sense strand
cauccugaauacacucauu

SEQ ID NO: 1742456 - RNA, 19 nt, Homo sapiens
  misc_RNA (1)...(19): siRNA sense strand
uggaagacauugaaaccau

SEQ ID NO: 1742457 - RNA, 19 nt, Homo sapiens
  misc_RNA (1)...(19): siRNA sense strand
gcgaauugggaaucaguaa

SEQ ID NO: 1742458 - RNA, 19 nt, Homo sapiens
  misc_RNA (1)...(19): siRNA sense strand
agagauauccgcuauaaaa

SEQ ID NO: 1742459 - RNA, 19 nt, Homo sapiens
  misc_RNA (1)...(19): siRNA sense strand
cgaagguggugagauuuca

SEQ ID NO: 1742460 - RNA, 19 nt, Homo sapiens
  misc_RNA (1)...(19): siRNA sense strand
gaaaugccucauauagaag

SEQ ID NO: 1742461 - RNA, 19 nt, Homo sapiens
  misc_RNA (1)...(19): siRNA sense strand
aucaauagguuguugucua

SEQ ID NO: 1742462 - RNA, 19 nt, Homo sapiens
  misc_RNA (1)...(19): siRNA sense strand
aauaaaggacucucagaau

SEQ ID NO: 1742463 - RNA, 19 nt, Homo sapiens
  misc_RNA (1)...(19): siRNA sense strand
gcaguagccaucaauaggu

SEQ ID NO: 1742464 - RNA, 19 nt, Homo sapiens
  misc_RNA (1)...(19): siRNA sense strand
ggcagucaauccaaucauc

SEQ ID NO: 1742465 - RNA, 19 nt, Homo sapiens
  misc_RNA (1)...(19): siRNA sense strand
gauggacacaugaaacugu

SEQ ID NO: 1742466 - RNA, 19 nt, Homo sapiens
  misc_RNA (1)...(19): siRNA sense strand
gaacccaaugauacaaaga

SEQ ID NO: 1742467 - RNA, 19 nt, Homo sapiens
  misc_RNA (1)...(19): siRNA sense strand
aaaugaagggauccgauaa

SEQ ID NO: 1742468 - RNA, 19 nt, Homo sapiens
  misc_RNA (1)...(19): siRNA sense strand
uguggacucugcccgguuu

SEQ ID NO: 1742469 - RNA, 19 nt, Homo sapiens
  misc_RNA (1)...(19): siRNA sense strand
guacagggcagucaaucca

SEQ ID NO: 1742470 - RNA, 19 nt, Homo sapiens
  misc_RNA (1)...(19): siRNA sense strand
aaucaguaagguagaguua

SEQ ID NO: 1742471 - RNA, 19 nt, Homo sapiens
  misc_RNA (1)...(19): siRNA sense strand
gaauugggaaucaguaagg

SEQ ID NO: 1742472 - RNA, 19 nt, Homo sapiens
  misc_RNA (1)...(19): siRNA sense strand
gauccggucgaaauagaaa

SEQ ID NO: 1742473 - RNA, 19 nt, Homo sapiens
  misc_RNA (1)...(19): siRNA sense strand
ucauagaggaugcaggaaa

SEQ ID NO: 1742474 - RNA, 19 nt, Homo sapiens
  misc_RNA (1)...(19): siRNA sense strand
caccaucuaacuguauuua

SEQ ID NO: 1742475 - RNA, 19 nt, Homo sapiens
  misc_RNA (1)...(19): siRNA sense strand
gagcaauacgggccuuuua

SEQ ID NO: 1742476 - RNA, 19 nt, Homo sapiens
  misc_RNA (1)...(19): siRNA sense strand
gaucucuuaaggagcaaua

SEQ ID NO: 1742477 - RNA, 19 nt, Homo sapiens
  misc_RNA (1)...(19): siRNA sense strand
aggcacaguuggcagugua

SEQ ID NO: 1742478 - RNA, 19 nt, Homo sapiens
  misc_RNA (1)...(19): siRNA sense strand
cugaauacacucauuuaug

SEQ ID NO: 1742479 - RNA, 19 nt, Homo sapiens
  misc_RNA (1)...(19): siRNA sense strand
ggcagaaacagcacgagaa

SEQ ID NO: 1742480 - RNA, 19 nt, Homo sapiens
  misc_RNA (1)...(19): siRNA sense strand
gaauuuguagaggugcuua

SEQ ID NO: 1742481 - RNA, 19 nt, Homo sapiens
  misc_RNA (1)...(19): siRNA sense strand
cagaccaaguaauucagaa

SEQ ID NO: 1742482 - RNA, 19 nt, Homo sapiens
  misc_RNA (1)...(19): siRNA sense strand
auugaaaccauccugaaua

SEQ ID NO: 1742483 - RNA, 19 nt, Homo sapiens
  misc_RNA (1)...(19): siRNA sense strand
gaaguguggaaauauaucu

SEQ ID NO: 1742484 - RNA, 19 nt, Homo sapiens
  misc_RNA (1)...(19): siRNA sense strand
gaggaugcaggaaauaaag

SEQ ID NO: 1742485 - RNA, 19 nt, Homo sapiens
  misc_RNA (1)...(19): siRNA sense strand
uaaaggacucucagaaugc

SEQ ID NO: 1742486 - RNA, 19 nt, Homo sapiens
  misc_RNA (1)...(19): siRNA sense strand
uagaggaugcaggaaauaa

SEQ ID NO: 1742487 - RNA, 19 nt, Homo sapiens
  misc_RNA (1)...(19): siRNA sense strand
gcaggaaauaaaggaauau

SEQ ID NO: 1742488 - RNA, 19 nt, Homo sapiens
  misc_RNA (1)...(19): siRNA sense strand
uugaaaccauccugaauac

SEQ ID NO: 1742489 - RNA, 19 nt, Homo sapiens
  misc_RNA (1)...(19): siRNA sense strand
gggcaguagccaucaauag

SEQ ID NO: 1742490 - RNA, 19 nt, Homo sapiens
  misc_RNA (1)...(19): siRNA sense strand
aaacagcacgagaaagcaa

SEQ ID NO: 1742491 - RNA, 19 nt, Homo sapiens
  misc_RNA (1)...(19): siRNA sense strand
cagaacccaaugauacaaa

SEQ ID NO: 1742492 - RNA, 19 nt, Homo sapiens
  misc_RNA (1)...(19): siRNA sense strand
gauuucaccaucuaacugu

SEQ ID NO: 1742493 - RNA, 19 nt, Homo sapiens
  misc_RNA (1)...(19): siRNA sense strand
ggacacaugaaacuguaca

SEQ ID NO: 1742494 - RNA, 19 nt, Homo sapiens
  misc_RNA (1)...(19): siRNA sense strand
gcaaaagaaggcacaguug

SEQ ID NO: 1742495 - RNA, 19 nt, Homo sapiens
  misc_RNA (1)...(19): siRNA sense strand
gaaucaguaagguagaguu

SEQ ID NO: 1742496 - RNA, 19 nt, Homo sapiens
  misc_RNA (1)...(19): siRNA sense strand
ggaugcaggaaauaaagga

SEQ ID NO: 1742497 - RNA, 19 nt, Homo sapiens
  misc_RNA (1)...(19): siRNA sense strand
gaaacagcacgagaaagca

SEQ ID NO: 1742498 - RNA, 19 nt, Homo sapiens
  misc_RNA (1)...(19): siRNA sense strand
gguacagugaccaggauuu

SEQ ID NO: 1742499 - RNA, 19 nt, Homo sapiens
  misc_RNA (1)...(19): siRNA sense strand
caaagcuguuaagucugua

SEQ ID NO: 1742500 - RNA, 19 nt, Homo sapiens
  misc_RNA (1)...(19): siRNA sense strand
agaggaugcaggaaauaaa

SEQ ID NO: 1742501 - RNA, 19 nt, Homo sapiens
  misc_RNA (1)...(19): siRNA sense strand
aaaccauccugaauacacu

SEQ ID NO: 1742502 - RNA, 19 nt, Homo sapiens
  misc_RNA (1)...(19): siRNA sense strand
gggaaucaguaagguagag

SEQ ID NO: 1742503 - RNA, 19 nt, Homo sapiens
  misc_RNA (1)...(19): siRNA sense strand
cugaagaaucuggaaagua

SEQ ID NO: 1742504 - RNA, 19 nt, Homo sapiens
  misc_RNA (1)...(19): siRNA sense strand
guagauggacacaugaaac

SEQ ID NO: 1742505 - RNA, 19 nt, Homo sapiens
  misc_RNA (1)...(19): siRNA sense strand
acccaaugauacaaagaaa

SEQ ID NO: 1742506 - RNA, 19 nt, Homo sapiens
  misc_RNA (1)...(19): siRNA sense strand
agaaacagcacgagaaagc

SEQ ID NO: 1742507 - RNA, 19 nt, Homo sapiens
  misc_RNA (1)...(19): siRNA sense strand
ugucaccaguucccucaug

SEQ ID NO: 1742508 - RNA, 19 nt, Homo sapiens
  misc_RNA (1)...(19): siRNA sense strand
acagggcagucaauccaau

SEQ ID NO: 1742509 - RNA, 19 nt, Homo sapiens
  misc_RNA (1)...(19): siRNA sense strand
ggaggaagcugaauaccuu

SEQ ID NO: 1742510 - RNA, 19 nt, Homo sapiens
  misc_RNA (1)...(19): siRNA sense strand
gaagaauucugaucaauac

SEQ ID NO: 1742511 - RNA, 19 nt, Homo sapiens
  misc_RNA (1)...(19): siRNA sense strand
cgggagagcugaacacuuu

SEQ ID NO: 1742512 - RNA, 19 nt, Homo sapiens
  misc_RNA (1)...(19): siRNA sense strand
acaaggagcuguaccacua

SEQ ID NO: 1742513 - RNA, 19 nt, Homo sapiens
  misc_RNA (1)...(19): siRNA sense strand
gaggagggaugguguugua

SEQ ID NO: 1742514 - RNA, 19 nt, Homo sapiens
  misc_RNA (1)...(19): siRNA sense strand
gcacugauguagaugaaug

SEQ ID NO: 1742515 - RNA, 19 nt, Homo sapiens
  misc_RNA (1)...(19): siRNA sense strand
gaagaaagagugcuuagau

SEQ ID NO: 1742516 - RNA, 19 nt, Homo sapiens
  misc_RNA (1)...(19): siRNA sense strand
gauaagcccugaaggacuu

SEQ ID NO: 1742517 - RNA, 19 nt, Homo sapiens
  misc_RNA (1)...(19): siRNA sense strand
guagaugaaugcucagaaa

SEQ ID NO: 1742518 - RNA, 19 nt, Homo sapiens
  misc_RNA (1)...(19): siRNA sense strand
gaaagagugcuuagauuug

SEQ ID NO: 1742519 - RNA, 19 nt, Homo sapiens
  misc_RNA (1)...(19): siRNA sense strand
gcuacgcccucuuucuuua

SEQ ID NO: 1742520 - RNA, 19 nt, Homo sapiens
  misc_RNA (1)...(19): siRNA sense strand
cuacagcccuggaaaguga

SEQ ID NO: 1742521 - RNA, 19 nt, Homo sapiens
  misc_RNA (1)...(19): siRNA sense strand
gaacacaaccacagacaau

SEQ ID NO: 1742522 - RNA, 19 nt, Homo sapiens
  misc_RNA (1)...(19): siRNA sense strand
gaaauuguucuucgaaguu

SEQ ID NO: 1742523 - RNA, 19 nt, Homo sapiens
  misc_RNA (1)...(19): siRNA sense strand
gaauagagaagcuccuaaa

SEQ ID NO: 1742524 - RNA, 19 nt, Homo sapiens
  misc_RNA (1)...(19): siRNA sense strand
guuaugaguuugcagauga

SEQ ID NO: 1742525 - RNA, 19 nt, Homo sapiens
  misc_RNA (1)...(19): siRNA sense strand
gagaacuaccugagcauua

SEQ ID NO: 1742526 - RNA, 19 nt, Homo sapiens
  misc_RNA (1)...(19): siRNA sense strand
gagcagagccugagacgau

SEQ ID NO: 1742527 - RNA, 19 nt, Homo sapiens
  misc_RNA (1)...(19): siRNA sense strand
gguguuguaucaguaaaua

SEQ ID NO: 1742528 - RNA, 19 nt, Homo sapiens
  misc_RNA (1)...(19): siRNA sense strand
ccacaucucucccuacaag

SEQ ID NO: 1742529 - RNA, 19 nt, Homo sapiens
  misc_RNA (1)...(19): siRNA sense strand
acaccgaggucuucacgua

SEQ ID NO: 1742530 - RNA, 19 nt, Homo sapiens
  misc_RNA (1)...(19): siRNA sense strand
uagagaagcuccuaaaauu

SEQ ID NO: 1742531 - RNA, 19 nt, Homo sapiens
  misc_RNA (1)...(19): siRNA sense strand
agaacuaccugagcauuaa

SEQ ID NO: 1742532 - RNA, 19 nt, Homo sapiens
  misc_RNA (1)...(19): siRNA sense strand
gcagaugaccggcauacuu

SEQ ID NO: 1742533 - RNA, 19 nt, Homo sapiens
  misc_RNA (1)...(19): siRNA sense strand
gaagucagaaggaccauau

SEQ ID NO: 1742534 - RNA, 19 nt, Homo sapiens
  misc_RNA (1)...(19): siRNA sense strand
gugcuuagauuugcuguga

SEQ ID NO: 1742535 - RNA, 19 nt, Homo sapiens
  misc_RNA (1)...(19): siRNA sense strand
gcauuaagaccaacauuca

SEQ ID NO: 1742536 - RNA, 19 nt, Homo sapiens
  misc_RNA (1)...(19): siRNA sense strand
aagaaagagugcuuagauu

SEQ ID NO: 1742537 - RNA, 19 nt, Homo sapiens
  misc_RNA (1)...(19): siRNA sense strand
cccaauggcuuaaccuuug

SEQ ID NO: 1742538 - RNA, 19 nt, Homo sapiens
  misc_RNA (1)...(19): siRNA sense strand
agaaagagugcuuagauuu

SEQ ID NO: 1742539 - RNA, 19 nt, Homo sapiens
  misc_RNA (1)...(19): siRNA sense strand
gcaggaaggcgacgacgaa

SEQ ID NO: 1742540 - RNA, 19 nt, Homo sapiens
  misc_RNA (1)...(19): siRNA sense strand
ggaugguguuguaucagua

SEQ ID NO: 1742541 - RNA, 19 nt, Homo sapiens
  misc_RNA (1)...(19): siRNA sense strand
gagggaugguguuguauca

SEQ ID NO: 1742542 - RNA, 19 nt, Homo sapiens
  misc_RNA (1)...(19): siRNA sense strand
gagaggagacgguucguau

SEQ ID NO: 1742543 - RNA, 19 nt, Homo sapiens
  misc_RNA (1)...(19): siRNA sense strand
caauuuggauuacuacgau

SEQ ID NO: 1742544 - RNA, 19 nt, Homo sapiens
  misc_RNA (1)...(19): siRNA sense strand
ggacagacuggaauagaga

SEQ ID NO: 1742545 - RNA, 19 nt, Homo sapiens
  misc_RNA (1)...(19): siRNA sense strand
ggauggauuucagugcaua

SEQ ID NO: 1742546 - RNA, 19 nt, Homo sapiens
  misc_RNA (1)...(19): siRNA sense strand
gcaccuuccugcucuauac

SEQ ID NO: 1742547 - RNA, 19 nt, Homo sapiens
  misc_RNA (1)...(19): siRNA sense strand
acacagaucuggugaaucc

SEQ ID NO: 1742548 - RNA, 19 nt, Homo sapiens
  misc_RNA (1)...(19): siRNA sense strand
ccagcagauuggcuacuua

SEQ ID NO: 1742549 - RNA, 19 nt, Homo sapiens
  misc_RNA (1)...(19): siRNA sense strand
cgcaguauguggacuauga

SEQ ID NO: 1742550 - RNA, 19 nt, Homo sapiens
  misc_RNA (1)...(19): siRNA sense strand
gugccugccugccugguua

SEQ ID NO: 1742551 - RNA, 19 nt, Homo sapiens
  misc_RNA (1)...(19): siRNA sense strand
gggaauccuugcuaugaug

SEQ ID NO: 1742552 - RNA, 19 nt, Homo sapiens
  misc_RNA (1)...(19): siRNA sense strand
caccagagguagacagaga

SEQ ID NO: 1742553 - RNA, 19 nt, Homo sapiens
  misc_RNA (1)...(19): siRNA sense strand
guauaaugcugccaacaag

SEQ ID NO: 1742554 - RNA, 19 nt, Homo sapiens
  misc_RNA (1)...(19): siRNA sense strand
gcugguguguggacaaaga

SEQ ID NO: 1742555 - RNA, 19 nt, Homo sapiens
  misc_RNA (1)...(19): siRNA sense strand
gggagaggaugguguacug

SEQ ID NO: 1742556 - RNA, 19 nt, Homo sapiens
  misc_RNA (1)...(19): siRNA sense strand
gaaaugggaagcacugucu

SEQ ID NO: 1742557 - RNA, 19 nt, Homo sapiens
  misc_RNA (1)...(19): siRNA sense strand
ggacggcgugucauucaaa

SEQ ID NO: 1742558 - RNA, 19 nt, Homo sapiens
  misc_RNA (1)...(19): siRNA sense strand
gaccacauccgcagaacaa

SEQ ID NO: 1742559 - RNA, 19 nt, Homo sapiens
  misc_RNA (1)...(19): siRNA sense strand
cggcauacuugcaucuuga

SEQ ID NO: 1742560 - RNA, 19 nt, Homo sapiens
  misc_RNA (1)...(19): siRNA sense strand
ccggagugguuaugaguuu

SEQ ID NO: 1742561 - RNA, 19 nt, Homo sapiens
  misc_RNA (1)...(19): siRNA sense strand
gggagcagguaggcgcuua

SEQ ID NO: 1742562 - RNA, 19 nt, Homo sapiens
  misc_RNA (1)...(19): siRNA sense strand
ccaauggcuuaaccuuuga

SEQ ID NO: 1742563 - RNA, 19 nt, Homo sapiens
  misc_RNA (1)...(19): siRNA sense strand
cuacacagaucuggugaau

SEQ ID NO: 1742564 - RNA, 19 nt, Homo sapiens
  misc_RNA (1)...(19): siRNA sense strand
acugugaccucuacaaguu

SEQ ID NO: 1742565 - RNA, 19 nt, Homo sapiens
  misc_RNA (1)...(19): siRNA sense strand
acauggaaguuacauucua

SEQ ID NO: 1742566 - RNA, 19 nt, Homo sapiens
  misc_RNA (1)...(19): siRNA sense strand
ggaaagugacuauaaugag

SEQ ID NO: 1742567 - RNA, 19 nt, Homo sapiens
  misc_RNA (1)...(19): siRNA sense strand
cgggauaacugcagucuac

SEQ ID NO: 1742568 - RNA, 19 nt, Homo sapiens
  misc_RNA (1)...(19): siRNA sense strand
ggagaaaacagaagaauuc

SEQ ID NO: 1742569 - RNA, 19 nt, Homo sapiens
  misc_RNA (1)...(19): siRNA sense strand
cugaaggacuugccauaga

SEQ ID NO: 1742570 - RNA, 19 nt, Homo sapiens
  misc_RNA (1)...(19): siRNA sense strand
ugugagcgcuggagggaaa

SEQ ID NO: 1742571 - RNA, 19 nt, Homo sapiens
  misc_RNA (1)...(19): siRNA sense strand
uguaucaacuugccuggaa

SEQ ID NO: 1742572 - RNA, 19 nt, Homo sapiens
  misc_RNA (1)...(19): siRNA sense strand
gaggagacgguucguauca

SEQ ID NO: 1742573 - RNA, 19 nt, Homo sapiens
  misc_RNA (1)...(19): siRNA sense strand
ggucaugaaguuccuggua

SEQ ID NO: 1742574 - RNA, 19 nt, Homo sapiens
  misc_RNA (1)...(19): siRNA sense strand
ggaccauauuucagcuuga

SEQ ID NO: 1742575 - RNA, 19 nt, Homo sapiens
  misc_RNA (1)...(19): siRNA sense strand
acaacgaucucaccucuac

SEQ ID NO: 1742576 - RNA, 19 nt, Homo sapiens
  misc_RNA (1)...(19): siRNA sense strand
gcuuaaccuuugacccuuu

SEQ ID NO: 1742577 - RNA, 19 nt, Homo sapiens
  misc_RNA (1)...(19): siRNA sense strand
gagaagcuccuaaaauuga

SEQ ID NO: 1742578 - RNA, 19 nt, Homo sapiens
  misc_RNA (1)...(19): siRNA sense strand
ggaauagagaagcuccuaa

SEQ ID NO: 1742579 - RNA, 19 nt, Homo sapiens
  misc_RNA (1)...(19): siRNA sense strand
gcgaugaccugggccacuu

SEQ ID NO: 1742580 - RNA, 19 nt, Homo sapiens
  misc_RNA (1)...(19): siRNA sense strand
cagaugaccggcauacuug

SEQ ID NO: 1742581 - RNA, 19 nt, Homo sapiens
  misc_RNA (1)...(19): siRNA sense strand
guauaaugacgaagaaaga

SEQ ID NO: 1742582 - RNA, 19 nt, Homo sapiens
  misc_RNA (1)...(19): siRNA sense strand
ugacauggaaguuacauuc

SEQ ID NO: 1742583 - RNA, 19 nt, Homo sapiens
  misc_RNA (1)...(19): siRNA sense strand
gaugagagagagaccagaa

SEQ ID NO: 1742584 - RNA, 19 nt, Homo sapiens
  misc_RNA (1)...(19): siRNA sense strand
gcauugauguuuccuucca

SEQ ID NO: 1742585 - RNA, 19 nt, Homo sapiens
  misc_RNA (1)...(19): siRNA sense strand
ucagaaggaccauauuuca

SEQ ID NO: 1742586 - RNA, 19 nt, Homo sapiens
  misc_RNA (1)...(19): siRNA sense strand
gggaugguguuguaucagu

SEQ ID NO: 1742587 - RNA, 19 nt, Homo sapiens
  misc_RNA (1)...(19): siRNA sense strand
gcaagguccucuucuacac

SEQ ID NO: 1742588 - RNA, 19 nt, Homo sapiens
  misc_RNA (1)...(19): siRNA sense strand
gaaaaugaaugugcaacug

SEQ ID NO: 1742589 - RNA, 19 nt, Homo sapiens
  misc_RNA (1)...(19): siRNA sense strand
cugagacgaucgugaauuc

SEQ ID NO: 1742590 - RNA, 19 nt, Homo sapiens
  misc_RNA (1)...(19): siRNA sense strand
cagcuugacuagcacugaa

SEQ ID NO: 1742591 - RNA, 19 nt, Homo sapiens
  misc_RNA (1)...(19): siRNA sense strand
ggaacuggacggcguguca

SEQ ID NO: 1742592 - RNA, 19 nt, Homo sapiens
  misc_RNA (1)...(19): siRNA sense strand
ucagaaggaugcagcuaag

SEQ ID NO: 1742593 - RNA, 19 nt, Homo sapiens
  misc_RNA (1)...(19): siRNA sense strand
ggaacuguguggaugaaaa

SEQ ID NO: 1742594 - RNA, 19 nt, Homo sapiens
  misc_RNA (1)...(19): siRNA sense strand
gcccacaucucucccuaca

SEQ ID NO: 1742595 - RNA, 19 nt, Homo sapiens
  misc_RNA (1)...(19): siRNA sense strand
ccacugccaauccaaguuu

SEQ ID NO: 1742596 - RNA, 19 nt, Homo sapiens
  misc_RNA (1)...(19): siRNA sense strand
gggacuggaagacaacaua

SEQ ID NO: 1742597 - RNA, 19 nt, Homo sapiens
  misc_RNA (1)...(19): siRNA sense strand
ccuggaaagugacuauaau

SEQ ID NO: 1742598 - RNA, 19 nt, Homo sapiens
  misc_RNA (1)...(19): siRNA sense strand
ggagugugggcuuuccaua

SEQ ID NO: 1742599 - RNA, 19 nt, Homo sapiens
  misc_RNA (1)...(19): siRNA sense strand
gccagugccuucggaaaug

SEQ ID NO: 1742600 - RNA, 19 nt, Homo sapiens
  misc_RNA (1)...(19): siRNA sense strand
gcagaggccgaguccugua

SEQ ID NO: 1742601 - RNA, 19 nt, Homo sapiens
  misc_RNA (1)...(19): siRNA sense strand
gugcacugauguagaugaa

SEQ ID NO: 1742602 - RNA, 19 nt, Homo sapiens
  misc_RNA (1)...(19): siRNA sense strand
caacaaggaaaccugugaa

SEQ ID NO: 1742603 - RNA, 19 nt, Homo sapiens
  misc_RNA (1)...(19): siRNA sense strand
uauuucagcuugacuagca

SEQ ID NO: 1742604 - RNA, 19 nt, Homo sapiens
  misc_RNA (1)...(19): siRNA sense strand
ccuuugacccuuucucuaa

SEQ ID NO: 1742605 - RNA, 19 nt, Homo sapiens
  misc_RNA (1)...(19): siRNA sense strand
ccagggaaacgcaguaugu

SEQ ID NO: 1742606 - RNA, 19 nt, Homo sapiens
  misc_RNA (1)...(19): siRNA sense strand
gagauggacggaacugugu

SEQ ID NO: 1742607 - RNA, 19 nt, Homo sapiens
  misc_RNA (1)...(19): siRNA sense strand
ggagacgguucguaucacu

SEQ ID NO: 1742608 - RNA, 19 nt, Homo sapiens
  misc_RNA (1)...(19): siRNA sense strand
cagcucauccugaagaaga

SEQ ID NO: 1742609 - RNA, 19 nt, Homo sapiens
  misc_RNA (1)...(19): siRNA sense strand
ggagaugccuugugcguua

SEQ ID NO: 1742610 - RNA, 19 nt, Homo sapiens
  misc_RNA (1)...(19): siRNA sense strand
ggagaaauccuucgcaaug

SEQ ID NO: 1742611 - RNA, 19 nt, Homo sapiens
  misc_RNA (1)...(19): siRNA sense strand
gaaccuaucuuugcacaca

SEQ ID NO: 1742612 - RNA, 19 nt, Homo sapiens
  misc_RNA (1)...(19): siRNA sense strand
gaagagaacaugcaugauc

SEQ ID NO: 1742613 - RNA, 19 nt, Homo sapiens
  misc_RNA (1)...(19): siRNA sense strand
gaacaugcaugaucuucag

SEQ ID NO: 1742614 - RNA, 19 nt, Homo sapiens
  misc_RNA (1)...(19): siRNA sense strand
gaaauuggcaccaucuuca

SEQ ID NO: 1742615 - RNA, 19 nt, Homo sapiens
  misc_RNA (1)...(19): siRNA sense strand
cgaaagcccugaacaacug

SEQ ID NO: 1742616 - RNA, 19 nt, Homo sapiens
  misc_RNA (1)...(19): siRNA sense strand
gagaaauccuucgcaaugu

SEQ ID NO: 1742617 - RNA, 19 nt, Homo sapiens
  misc_RNA (1)...(19): siRNA sense strand
gagaggcggucaagaacau

SEQ ID NO: 1742618 - RNA, 19 nt, Homo sapiens
  misc_RNA (1)...(19): siRNA sense strand
gagcaugcacgaccuggua

SEQ ID NO: 1742619 - RNA, 19 nt, Homo sapiens
  misc_RNA (1)...(19): siRNA sense strand
ggacacacagcauggagaa

SEQ ID NO: 1742620 - RNA, 19 nt, Homo sapiens
  misc_RNA (1)...(19): siRNA sense strand
gaacuacacacggcucuuc

SEQ ID NO: 1742621 - RNA, 19 nt, Homo sapiens
  misc_RNA (1)...(19): siRNA sense strand
caucggugcggauucuuua

SEQ ID NO: 1742622 - RNA, 19 nt, Homo sapiens
  misc_RNA (1)...(19): siRNA sense strand
gaaauccuucgcaauguca

SEQ ID NO: 1742623 - RNA, 19 nt, Homo sapiens
  misc_RNA (1)...(19): siRNA sense strand
ugacccagucuauuuauga

SEQ ID NO: 1742624 - RNA, 19 nt, Homo sapiens
  misc_RNA (1)...(19): siRNA sense strand
guguuggccucucugguuu

SEQ ID NO: 1742625 - RNA, 19 nt, Homo sapiens
  misc_RNA (1)...(19): siRNA sense strand
aggaggagcuggagggaau

SEQ ID NO: 1742626 - RNA, 19 nt, Homo sapiens
  misc_RNA (1)...(19): siRNA sense strand
ucuacuaccugaacaaguc

SEQ ID NO: 1742627 - RNA, 19 nt, Homo sapiens
  misc_RNA (1)...(19): siRNA sense strand
ugaaggcaguggacacaca

SEQ ID NO: 1742628 - RNA, 19 nt, Homo sapiens
  misc_RNA (1)...(19): siRNA sense strand
uggauaacaucucguccuu

SEQ ID NO: 1742629 - RNA, 19 nt, Homo sapiens
  misc_RNA (1)...(19): siRNA sense strand
aagagaacaugcaugaucu

SEQ ID NO: 1742630 - RNA, 19 nt, Homo sapiens
  misc_RNA (1)...(19): siRNA sense strand
cugaacaacugcucuuucu

SEQ ID NO: 1742631 - RNA, 19 nt, Homo sapiens
  misc_RNA (1)...(19): siRNA sense strand
guccggaaccucuccauga

SEQ ID NO: 1742632 - RNA, 19 nt, Homo sapiens
  misc_RNA (1)...(19): siRNA sense strand
ccgaggagcucuacuaccu

SEQ ID NO: 1742633 - RNA, 19 nt, Homo sapiens
  misc_RNA (1)...(19): siRNA sense strand
acgaagagaacaugcauga

SEQ ID NO: 1742634 - RNA, 19 nt, Homo sapiens
  misc_RNA (1)...(19): siRNA sense strand
ggccuggaccucucucuga

SEQ ID NO: 1742635 - RNA, 19 nt, Homo sapiens
  misc_RNA (1)...(19): siRNA sense strand
gccuggaccucucucugaa

SEQ ID NO: 1742636 - RNA, 19 nt, Homo sapiens
  misc_RNA (1)...(19): siRNA sense strand
ggcaccaucuucaccaaca

SEQ ID NO: 1742637 - RNA, 19 nt, Homo sapiens
  misc_RNA (1)...(19): siRNA sense strand
gcggauucuuuaccucuuc

SEQ ID NO: 1742638 - RNA, 19 nt, Homo sapiens
  misc_RNA (1)...(19): siRNA sense strand
gagcucuacuaccugaaca

SEQ ID NO: 1742639 - RNA, 19 nt, Homo sapiens
  misc_RNA (1)...(19): siRNA sense strand
gagcuggagggaauucaga

SEQ ID NO: 1742640 - RNA, 19 nt, Homo sapiens
  misc_RNA (1)...(19): siRNA sense strand
ggagugcuacgaugucaag

SEQ ID NO: 1742641 - RNA, 19 nt, Homo sapiens
  misc_RNA (1)...(19): siRNA sense strand
agaaauccuucgcaauguc

SEQ ID NO: 1742642 - RNA, 19 nt, Homo sapiens
  misc_RNA (1)...(19): siRNA sense strand
ggauccagcggaagacaga

SEQ ID NO: 1742643 - RNA, 19 nt, Homo sapiens
  misc_RNA (1)...(19): siRNA sense strand
uggacucucucuccgaaga

SEQ ID NO: 1742644 - RNA, 19 nt, Homo sapiens
  misc_RNA (1)...(19): siRNA sense strand
gcacagcaugcucaaguac

SEQ ID NO: 1742645 - RNA, 19 nt, Homo sapiens
  misc_RNA (1)...(19): siRNA sense strand
caucuucaccaacaucaau

SEQ ID NO: 1742646 - RNA, 19 nt, Homo sapiens
  misc_RNA (1)...(19): siRNA sense strand
gcacuguggagagguuuga

SEQ ID NO: 1742647 - RNA, 19 nt, Homo sapiens
  misc_RNA (1)...(19): siRNA sense strand
ugcaugaucuucaguacca

SEQ ID NO: 1742648 - RNA, 19 nt, Homo sapiens
  misc_RNA (1)...(19): siRNA sense strand
ggagaggcggucaagaaca

SEQ ID NO: 1742649 - RNA, 19 nt, Homo sapiens
  misc_RNA (1)...(19): siRNA sense strand
acacaucggugcggauucu

SEQ ID NO: 1742650 - RNA, 19 nt, Homo sapiens
  misc_RNA (1)...(19): siRNA sense strand
ccgaagacaucuccuugac

SEQ ID NO: 1742651 - RNA, 19 nt, Homo sapiens
  misc_RNA (1)...(19): siRNA sense strand
gugcacagcaugcucaagu

SEQ ID NO: 1742652 - RNA, 19 nt, Homo sapiens
  misc_RNA (1)...(19): siRNA sense strand
gcaccaucuucaccaacau

SEQ ID NO: 1742653 - RNA, 19 nt, Homo sapiens
  misc_RNA (1)...(19): siRNA sense strand
gagaacaugcaugaucuuc

SEQ ID NO: 1742654 - RNA, 19 nt, Homo sapiens
  misc_RNA (1)...(19): siRNA sense strand
ccuugacccagucuauuua

SEQ ID NO: 1742655 - RNA, 19 nt, Homo sapiens
  misc_RNA (1)...(19): siRNA sense strand
cccagucuauuuaugacaa

SEQ ID NO: 1742656 - RNA, 19 nt, Homo sapiens
  misc_RNA (1)...(19): siRNA sense strand
acacacagcauggagaaau

SEQ ID NO: 1742657 - RNA, 19 nt, Homo sapiens
  misc_RNA (1)...(19): siRNA sense strand
gaugaaggcaguggacaca

SEQ ID NO: 1742658 - RNA, 19 nt, Homo sapiens
  misc_RNA (1)...(19): siRNA sense strand
acaagucugucuccaucau

SEQ ID NO: 1742659 - RNA, 19 nt, Homo sapiens
  misc_RNA (1)...(19): siRNA sense strand
ugcacagcaugcucaagua

SEQ ID NO: 1742660 - RNA, 19 nt, Homo sapiens
  misc_RNA (1)...(19): siRNA sense strand
ugaaauuggcaccaucuuc

SEQ ID NO: 1742661 - RNA, 19 nt, Homo sapiens
  misc_RNA (1)...(19): siRNA sense strand
cuggagaggcggucaagaa

SEQ ID NO: 1742662 - RNA, 19 nt, Homo sapiens
  misc_RNA (1)...(19): siRNA sense strand
ucucguccuuccuggauga

SEQ ID NO: 1742663 - RNA, 19 nt, Homo sapiens
  misc_RNA (1)...(19): siRNA sense strand
caggagugcuacgauguca

SEQ ID NO: 1742664 - RNA, 19 nt, Homo sapiens
  misc_RNA (1)...(19): siRNA sense strand
uggaugaccacgaagagaa

SEQ ID NO: 1742665 - RNA, 19 nt, Homo sapiens
  misc_RNA (1)...(19): siRNA sense strand
cacacagcauggagaaauc

SEQ ID NO: 1742666 - RNA, 19 nt, Homo sapiens
  misc_RNA (1)...(19): siRNA sense strand
caugaucuucaguaccaua

SEQ ID NO: 1742667 - RNA, 19 nt, Homo sapiens
  misc_RNA (1)...(19): siRNA sense strand
gcaucagccagaacucaga

SEQ ID NO: 1742668 - RNA, 19 nt, Homo sapiens
  misc_RNA (1)...(19): siRNA sense strand
gagguuugagucucuggaa

SEQ ID NO: 1742669 - RNA, 19 nt, Homo sapiens
  misc_RNA (1)...(19): siRNA sense strand
cuuccuggaugaccacgaa

SEQ ID NO: 1742670 - RNA, 19 nt, Homo sapiens
  misc_RNA (1)...(19): siRNA sense strand
gauccgaaagcccugaaca

SEQ ID NO: 1742671 - RNA, 19 nt, Homo sapiens
  misc_RNA (1)...(19): siRNA sense strand
gcagugcaccagaucaacu

SEQ ID NO: 1742672 - RNA, 19 nt, Homo sapiens
  misc_RNA (1)...(19): siRNA sense strand
guuugagucucuggaagga

SEQ ID NO: 1742673 - RNA, 19 nt, Homo sapiens
  misc_RNA (1)...(19): siRNA sense strand
caaugucaccauccuacga

SEQ ID NO: 1742674 - RNA, 19 nt, Homo sapiens
  misc_RNA (1)...(19): siRNA sense strand
acgaggacaugccgaccuu

SEQ ID NO: 1742675 - RNA, 19 nt, Homo sapiens
  misc_RNA (1)...(19): siRNA sense strand
ccaccagguuaaccagucu

SEQ ID NO: 1742676 - RNA, 19 nt, Homo sapiens
  misc_RNA (1)...(19): siRNA sense strand
gacccagucuauuuaugac

SEQ ID NO: 1742677 - RNA, 19 nt, Homo sapiens
  misc_RNA (1)...(19): siRNA sense strand
ucaguaccauacccacuac

SEQ ID NO: 1742678 - RNA, 19 nt, Homo sapiens
  misc_RNA (1)...(19): siRNA sense strand
uguguuggccucucugguu

SEQ ID NO: 1742679 - RNA, 19 nt, Homo sapiens
  misc_RNA (1)...(19): siRNA sense strand
ccacgaagagaacaugcau

SEQ ID NO: 1742680 - RNA, 19 nt, Homo sapiens
  misc_RNA (1)...(19): siRNA sense strand
ccuugugcguuacagaaga

SEQ ID NO: 1742681 - RNA, 19 nt, Homo sapiens
  misc_RNA (1)...(19): siRNA sense strand
gcgcaucagccagaacuca

SEQ ID NO: 1742682 - RNA, 19 nt, Homo sapiens
  misc_RNA (1)...(19): siRNA sense strand
cgcaccaccuccaccaaga

SEQ ID NO: 1742683 - RNA, 19 nt, Homo sapiens
  misc_RNA (1)...(19): siRNA sense strand
ucaccgacuggcagaacua

SEQ ID NO: 1742684 - RNA, 19 nt, Homo sapiens
  misc_RNA (1)...(19): siRNA sense strand
uccggaaccucuccaugau

SEQ ID NO: 1742685 - RNA, 19 nt, Homo sapiens
  misc_RNA (1)...(19): siRNA sense strand
ucagaaaaguggacucucu

SEQ ID NO: 1742686 - RNA, 19 nt, Homo sapiens
  misc_RNA (1)...(19): siRNA sense strand
ggagaugccuugugcguua

SEQ ID NO: 1742687 - RNA, 19 nt, Homo sapiens
  misc_RNA (1)...(19): siRNA sense strand
ggagaaauccuucgcaaug

SEQ ID NO: 1742688 - RNA, 19 nt, Homo sapiens
  misc_RNA (1)...(19): siRNA sense strand
gaaccuaucuuugcacaca

SEQ ID NO: 1742689 - RNA, 19 nt, Homo sapiens
  misc_RNA (1)...(19): siRNA sense strand
gaagagaacaugcaugauc

SEQ ID NO: 1742690 - RNA, 19 nt, Homo sapiens
  misc_RNA (1)...(19): siRNA sense strand
gaacaugcaugaucuucag

SEQ ID NO: 1742691 - RNA, 19 nt, Homo sapiens
  misc_RNA (1)...(19): siRNA sense strand
gaaauuggcaccaucuuca

SEQ ID NO: 1742692 - RNA, 19 nt, Homo sapiens
  misc_RNA (1)...(19): siRNA sense strand
cgaaagcccugaacaacug

SEQ ID NO: 1742693 - RNA, 19 nt, Homo sapiens
  misc_RNA (1)...(19): siRNA sense strand
gagaaauccuucgcaaugu

SEQ ID NO: 1742694 - RNA, 19 nt, Homo sapiens
  misc_RNA (1)...(19): siRNA sense strand
gagaggcggucaagaacau

SEQ ID NO: 1742695 - RNA, 19 nt, Homo sapiens
  misc_RNA (1)...(19): siRNA sense strand
gagcaugcacgaccuggua

SEQ ID NO: 1742696 - RNA, 19 nt, Homo sapiens
  misc_RNA (1)...(19): siRNA sense strand
ggacacacagcauggagaa

SEQ ID NO: 1742697 - RNA, 19 nt, Homo sapiens
  misc_RNA (1)...(19): siRNA sense strand
gaacuacacacggcucuuc

SEQ ID NO: 1742698 - RNA, 19 nt, Homo sapiens
  misc_RNA (1)...(19): siRNA sense strand
caucggugcggauucuuua

SEQ ID NO: 1742699 - RNA, 19 nt, Homo sapiens
  misc_RNA (1)...(19): siRNA sense strand
gaaauccuucgcaauguca

SEQ ID NO: 1742700 - RNA, 19 nt, Homo sapiens
  misc_RNA (1)...(19): siRNA sense strand
ugacccagucuauuuauga

SEQ ID NO: 1742701 - RNA, 19 nt, Homo sapiens
  misc_RNA (1)...(19): siRNA sense strand
guguuggccucucugguuu

SEQ ID NO: 1742702 - RNA, 19 nt, Homo sapiens
  misc_RNA (1)...(19): siRNA sense strand
aggaggagcuggagggaau

SEQ ID NO: 1742703 - RNA, 19 nt, Homo sapiens
  misc_RNA (1)...(19): siRNA sense strand
ucuacuaccugaacaaguc

SEQ ID NO: 1742704 - RNA, 19 nt, Homo sapiens
  misc_RNA (1)...(19): siRNA sense strand
ugaaggcaguggacacaca

SEQ ID NO: 1742705 - RNA, 19 nt, Homo sapiens
  misc_RNA (1)...(19): siRNA sense strand
uggauaacaucucguccuu

SEQ ID NO: 1742706 - RNA, 19 nt, Homo sapiens
  misc_RNA (1)...(19): siRNA sense strand
aagagaacaugcaugaucu

SEQ ID NO: 1742707 - RNA, 19 nt, Homo sapiens
  misc_RNA (1)...(19): siRNA sense strand
cugaacaacugcucuuucu

SEQ ID NO: 1742708 - RNA, 19 nt, Homo sapiens
  misc_RNA (1)...(19): siRNA sense strand
guccggaaccucuccauga

SEQ ID NO: 1742709 - RNA, 19 nt, Homo sapiens
  misc_RNA (1)...(19): siRNA sense strand
ccgaggagcucuacuaccu

SEQ ID NO: 1742710 - RNA, 19 nt, Homo sapiens
  misc_RNA (1)...(19): siRNA sense strand
acgaagagaacaugcauga

SEQ ID NO: 1742711 - RNA, 19 nt, Homo sapiens
  misc_RNA (1)...(19): siRNA sense strand
ggccuggaccucucucuga

SEQ ID NO: 1742712 - RNA, 19 nt, Homo sapiens
  misc_RNA (1)...(19): siRNA sense strand
gccuggaccucucucugaa

SEQ ID NO: 1742713 - RNA, 19 nt, Homo sapiens
  misc_RNA (1)...(19): siRNA sense strand
ggcaccaucuucaccaaca

SEQ ID NO: 1742714 - RNA, 19 nt, Homo sapiens
  misc_RNA (1)...(19): siRNA sense strand
gcggauucuuuaccucuuc

SEQ ID NO: 1742715 - RNA, 19 nt, Homo sapiens
  misc_RNA (1)...(19): siRNA sense strand
gagcucuacuaccugaaca

SEQ ID NO: 1742716 - RNA, 19 nt, Homo sapiens
  misc_RNA (1)...(19): siRNA sense strand
gagcuggagggaauucaga

SEQ ID NO: 1742717 - RNA, 19 nt, Homo sapiens
  misc_RNA (1)...(19): siRNA sense strand
ggagugcuacgaugucaag

SEQ ID NO: 1742718 - RNA, 19 nt, Homo sapiens
  misc_RNA (1)...(19): siRNA sense strand
agaaauccuucgcaauguc

SEQ ID NO: 1742719 - RNA, 19 nt, Homo sapiens
  misc_RNA (1)...(19): siRNA sense strand
ggauccagcggaagacaga

SEQ ID NO: 1742720 - RNA, 19 nt, Homo sapiens
  misc_RNA (1)...(19): siRNA sense strand
uggacucucucuccgaaga

SEQ ID NO: 1742721 - RNA, 19 nt, Homo sapiens
  misc_RNA (1)...(19): siRNA sense strand
gcacagcaugcucaaguac

SEQ ID NO: 1742722 - RNA, 19 nt, Homo sapiens
  misc_RNA (1)...(19): siRNA sense strand
caucuucaccaacaucaau

SEQ ID NO: 1742723 - RNA, 19 nt, Homo sapiens
  misc_RNA (1)...(19): siRNA sense strand
gcacuguggagagguuuga

SEQ ID NO: 1742724 - RNA, 19 nt, Homo sapiens
  misc_RNA (1)...(19): siRNA sense strand
ugcaugaucuucaguacca

SEQ ID NO: 1742725 - RNA, 19 nt, Homo sapiens
  misc_RNA (1)...(19): siRNA sense strand
ggagaggcggucaagaaca

SEQ ID NO: 1742726 - RNA, 19 nt, Homo sapiens
  misc_RNA (1)...(19): siRNA sense strand
acacaucggugcggauucu

SEQ ID NO: 1742727 - RNA, 19 nt, Homo sapiens
  misc_RNA (1)...(19): siRNA sense strand
ccgaagacaucuccuugac

SEQ ID NO: 1742728 - RNA, 19 nt, Homo sapiens
  misc_RNA (1)...(19): siRNA sense strand
gugcacagcaugcucaagu

SEQ ID NO: 1742729 - RNA, 19 nt, Homo sapiens
  misc_RNA (1)...(19): siRNA sense strand
gcaccaucuucaccaacau

SEQ ID NO: 1742730 - RNA, 19 nt, Homo sapiens
  misc_RNA (1)...(19): siRNA sense strand
gagaacaugcaugaucuuc

SEQ ID NO: 1742731 - RNA, 19 nt, Homo sapiens
  misc_RNA (1)...(19): siRNA sense strand
ccuugacccagucuauuua

SEQ ID NO: 1742732 - RNA, 19 nt, Homo sapiens
  misc_RNA (1)...(19): siRNA sense strand
cccagucuauuuaugacaa

SEQ ID NO: 1742733 - RNA, 19 nt, Homo sapiens
  misc_RNA (1)...(19): siRNA sense strand
acacacagcauggagaaau

SEQ ID NO: 1742734 - RNA, 19 nt, Homo sapiens
  misc_RNA (1)...(19): siRNA sense strand
gaugaaggcaguggacaca

SEQ ID NO: 1742735 - RNA, 19 nt, Homo sapiens
  misc_RNA (1)...(19): siRNA sense strand
acaagucugucuccaucau

SEQ ID NO: 1742736 - RNA, 19 nt, Homo sapiens
  misc_RNA (1)...(19): siRNA sense strand
ugcacagcaugcucaagua

SEQ ID NO: 1742737 - RNA, 19 nt, Homo sapiens
  misc_RNA (1)...(19): siRNA sense strand
ugaaauuggcaccaucuuc

SEQ ID NO: 1742738 - RNA, 19 nt, Homo sapiens
  misc_RNA (1)...(19): siRNA sense strand
cuggagaggcggucaagaa

SEQ ID NO: 1742739 - RNA, 19 nt, Homo sapiens
  misc_RNA (1)...(19): siRNA sense strand
ucucguccuuccuggauga

SEQ ID NO: 1742740 - RNA, 19 nt, Homo sapiens
  misc_RNA (1)...(19): siRNA sense strand
caggagugcuacgauguca

SEQ ID NO: 1742741 - RNA, 19 nt, Homo sapiens
  misc_RNA (1)...(19): siRNA sense strand
uggaugaccacgaagagaa

SEQ ID NO: 1742742 - RNA, 19 nt, Homo sapiens
  misc_RNA (1)...(19): siRNA sense strand
cacacagcauggagaaauc

SEQ ID NO: 1742743 - RNA, 19 nt, Homo sapiens
  misc_RNA (1)...(19): siRNA sense strand
caugaucuucaguaccaua

SEQ ID NO: 1742744 - RNA, 19 nt, Homo sapiens
  misc_RNA (1)...(19): siRNA sense strand
gcaucagccagaacucaga

SEQ ID NO: 1742745 - RNA, 19 nt, Homo sapiens
  misc_RNA (1)...(19): siRNA sense strand
gagguuugagucucuggaa

SEQ ID NO: 1742746 - RNA, 19 nt, Homo sapiens
  misc_RNA (1)...(19): siRNA sense strand
cuuccuggaugaccacgaa

SEQ ID NO: 1742747 - RNA, 19 nt, Homo sapiens
  misc_RNA (1)...(19): siRNA sense strand
gauccgaaagcccugaaca

SEQ ID NO: 1742748 - RNA, 19 nt, Homo sapiens
  misc_RNA (1)...(19): siRNA sense strand
gcagugcaccagaucaacu

SEQ ID NO: 1742749 - RNA, 19 nt, Homo sapiens
  misc_RNA (1)...(19): siRNA sense strand
guuugagucucuggaagga

SEQ ID NO: 1742750 - RNA, 19 nt, Homo sapiens
  misc_RNA (1)...(19): siRNA sense strand
caaugucaccauccuacga

SEQ ID NO: 1742751 - RNA, 19 nt, Homo sapiens
  misc_RNA (1)...(19): siRNA sense strand
acgaggacaugccgaccuu

SEQ ID NO: 1742752 - RNA, 19 nt, Homo sapiens
  misc_RNA (1)...(19): siRNA sense strand
ccaccagguuaaccagucu

SEQ ID NO: 1742753 - RNA, 19 nt, Homo sapiens
  misc_RNA (1)...(19): siRNA sense strand
gacccagucuauuuaugac

SEQ ID NO: 1742754 - RNA, 19 nt, Homo sapiens
  misc_RNA (1)...(19): siRNA sense strand
ucaguaccauacccacuac

SEQ ID NO: 1742755 - RNA, 19 nt, Homo sapiens
  misc_RNA (1)...(19): siRNA sense strand
uguguuggccucucugguu

SEQ ID NO: 1742756 - RNA, 19 nt, Homo sapiens
  misc_RNA (1)...(19): siRNA sense strand
ccacgaagagaacaugcau

SEQ ID NO: 1742757 - RNA, 19 nt, Homo sapiens
  misc_RNA (1)...(19): siRNA sense strand
ccuugugcguuacagaaga

SEQ ID NO: 1742758 - RNA, 19 nt, Homo sapiens
  misc_RNA (1)...(19): siRNA sense strand
gcgcaucagccagaacuca

SEQ ID NO: 1742759 - RNA, 19 nt, Homo sapiens
  misc_RNA (1)...(19): siRNA sense strand
cgcaccaccuccaccaaga

SEQ ID NO: 1742760 - RNA, 19 nt, Homo sapiens
  misc_RNA (1)...(19): siRNA sense strand
ucaccgacuggcagaacua

SEQ ID NO: 1742761 - RNA, 19 nt, Homo sapiens
  misc_RNA (1)...(19): siRNA sense strand
uccggaaccucuccaugau

SEQ ID NO: 1742762 - RNA, 19 nt, Homo sapiens
  misc_RNA (1)...(19): siRNA sense strand
ucagaaaaguggacucucu

SEQ ID NO: 1742763 - RNA, 19 nt, Homo sapiens
  misc_RNA (1)...(19): siRNA sense strand
gagaggagcucaucaagaa

SEQ ID NO: 1742764 - RNA, 19 nt, Homo sapiens
  misc_RNA (1)...(19): siRNA sense strand
gaagagaaaucaagcaaag

SEQ ID NO: 1742765 - RNA, 19 nt, Homo sapiens
  misc_RNA (1)...(19): siRNA sense strand
ccaaagaccugccguggaa

SEQ ID NO: 1742766 - RNA, 19 nt, Homo sapiens
  misc_RNA (1)...(19): siRNA sense strand
aagcaaagauugacaagaa

SEQ ID NO: 1742767 - RNA, 19 nt, Homo sapiens
  misc_RNA (1)...(19): siRNA sense strand
cagaaggacugaugaagaa

SEQ ID NO: 1742768 - RNA, 19 nt, Homo sapiens
  misc_RNA (1)...(19): siRNA sense strand
gaucauaaauucugaacuc

SEQ ID NO: 1742769 - RNA, 19 nt, Homo sapiens
  misc_RNA (1)...(19): siRNA sense strand
ggaggaggcuuggagcuuu

SEQ ID NO: 1742770 - RNA, 19 nt, Homo sapiens
  misc_RNA (1)...(19): siRNA sense strand
gaagaaagaagagaaauca

SEQ ID NO: 1742771 - RNA, 19 nt, Homo sapiens
  misc_RNA (1)...(19): siRNA sense strand
cgucagcgcuggagaagaa

SEQ ID NO: 1742772 - RNA, 19 nt, Homo sapiens
  misc_RNA (1)...(19): siRNA sense strand
uaaagggucuccaaagaag

SEQ ID NO: 1742773 - RNA, 19 nt, Homo sapiens
  misc_RNA (1)...(19): siRNA sense strand
guaaugaaauggagguaca

SEQ ID NO: 1742774 - RNA, 19 nt, Homo sapiens
  misc_RNA (1)...(19): siRNA sense strand
cugaacgacuccauuauuu

SEQ ID NO: 1742775 - RNA, 19 nt, Homo sapiens
  misc_RNA (1)...(19): siRNA sense strand
caaagaagcggcuggaugu

SEQ ID NO: 1742776 - RNA, 19 nt, Homo sapiens
  misc_RNA (1)...(19): siRNA sense strand
gaaaguaaagggucuccaa

SEQ ID NO: 1742777 - RNA, 19 nt, Homo sapiens
  misc_RNA (1)...(19): siRNA sense strand
gagcuggagagaagaaaua

SEQ ID NO: 1742778 - RNA, 19 nt, Homo sapiens
  misc_RNA (1)...(19): siRNA sense strand
guaaagggucuccaaagaa

SEQ ID NO: 1742779 - RNA, 19 nt, Homo sapiens
  misc_RNA (1)...(19): siRNA sense strand
aggagaaccugaucauaaa

SEQ ID NO: 1742780 - RNA, 19 nt, Homo sapiens
  misc_RNA (1)...(19): siRNA sense strand
gcgcugaacgacuccauua

SEQ ID NO: 1742781 - RNA, 19 nt, Homo sapiens
  misc_RNA (1)...(19): siRNA sense strand
uggaagagcuggagagaag

SEQ ID NO: 1742782 - RNA, 19 nt, Homo sapiens
  misc_RNA (1)...(19): siRNA sense strand
gauaaggcagcaauucgua

SEQ ID NO: 1742783 - RNA, 19 nt, Homo sapiens
  misc_RNA (1)...(19): siRNA sense strand
aaggagaaccugaucauaa

SEQ ID NO: 1742784 - RNA, 19 nt, Homo sapiens
  misc_RNA (1)...(19): siRNA sense strand
gaacgacuccauuauuucu

SEQ ID NO: 1742785 - RNA, 19 nt, Homo sapiens
  misc_RNA (1)...(19): siRNA sense strand
gcaaacaggaacuagaaga

SEQ ID NO: 1742786 - RNA, 19 nt, Homo sapiens
  misc_RNA (1)...(19): siRNA sense strand
cuagaagaccggaacauuu

SEQ ID NO: 1742787 - RNA, 19 nt, Homo sapiens
  misc_RNA (1)...(19): siRNA sense strand
aguaaagggucuccaaaga

SEQ ID NO: 1742788 - RNA, 19 nt, Homo sapiens
  misc_RNA (1)...(19): siRNA sense strand
gagacccacuguugaugaa

SEQ ID NO: 1742789 - RNA, 19 nt, Homo sapiens
  misc_RNA (1)...(19): siRNA sense strand
gagaaccugaucauaaauu

SEQ ID NO: 1742790 - RNA, 19 nt, Homo sapiens
  misc_RNA (1)...(19): siRNA sense strand
gaacaaggagaaccugauc

SEQ ID NO: 1742791 - RNA, 19 nt, Homo sapiens
  misc_RNA (1)...(19): siRNA sense strand
gcugaacgacuccauuauu

SEQ ID NO: 1742792 - RNA, 19 nt, Homo sapiens
  misc_RNA (1)...(19): siRNA sense strand
guccucagcugcccacuug

SEQ ID NO: 1742793 - RNA, 19 nt, Homo sapiens
  misc_RNA (1)...(19): siRNA sense strand
gacccacuguugaugaauu

SEQ ID NO: 1742794 - RNA, 19 nt, Homo sapiens
  misc_RNA (1)...(19): siRNA sense strand
gaacugccgcuaaggaauc

SEQ ID NO: 1742795 - RNA, 19 nt, Homo sapiens
  misc_RNA (1)...(19): siRNA sense strand
ggcagcagaucgagaugaa

SEQ ID NO: 1742796 - RNA, 19 nt, Homo sapiens
  misc_RNA (1)...(19): siRNA sense strand
acaaaggaaugaucagaca

SEQ ID NO: 1742797 - RNA, 19 nt, Homo sapiens
  misc_RNA (1)...(19): siRNA sense strand
gaagagcuggagagaagaa

SEQ ID NO: 1742798 - RNA, 19 nt, Homo sapiens
  misc_RNA (1)...(19): siRNA sense strand
gcaggaagaaagaagagaa

SEQ ID NO: 1742799 - RNA, 19 nt, Homo sapiens
  misc_RNA (1)...(19): siRNA sense strand
caaaagcgcaggacuauga

SEQ ID NO: 1742800 - RNA, 19 nt, Homo sapiens
  misc_RNA (1)...(19): siRNA sense strand
aaucagagacccacuguug

SEQ ID NO: 1742801 - RNA, 19 nt, Homo sapiens
  misc_RNA (1)...(19): siRNA sense strand
ggaagaaagaagagaaauc

SEQ ID NO: 1742802 - RNA, 19 nt, Homo sapiens
  misc_RNA (1)...(19): siRNA sense strand
ccagaaggacugaugaaga

SEQ ID NO: 1742803 - RNA, 19 nt, Homo sapiens
  misc_RNA (1)...(19): siRNA sense strand
gaggaggcuuggagcuuug

SEQ ID NO: 1742804 - RNA, 19 nt, Homo sapiens
  misc_RNA (1)...(19): siRNA sense strand
gcagauaaggcagcaauuc

SEQ ID NO: 1742805 - RNA, 19 nt, Homo sapiens
  misc_RNA (1)...(19): siRNA sense strand
gaacacugccacggaaaug

SEQ ID NO: 1742806 - RNA, 19 nt, Homo sapiens
  misc_RNA (1)...(19): siRNA sense strand
acaagaaagcuuaaucaga

SEQ ID NO: 1742807 - RNA, 19 nt, Homo sapiens
  misc_RNA (1)...(19): siRNA sense strand
ggcagcaauucguaaagaa

SEQ ID NO: 1742808 - RNA, 19 nt, Homo sapiens
  misc_RNA (1)...(19): siRNA sense strand
caaggagaaccugaucaua

SEQ ID NO: 1742809 - RNA, 19 nt, Homo sapiens
  misc_RNA (1)...(19): siRNA sense strand
guugaugaauuaagagaca

SEQ ID NO: 1742810 - RNA, 19 nt, Homo sapiens
  misc_RNA (1)...(19): siRNA sense strand
ugacaagaaagcuuaauca

SEQ ID NO: 1742811 - RNA, 19 nt, Homo sapiens
  misc_RNA (1)...(19): siRNA sense strand
agacagagcaggaagaaag

SEQ ID NO: 1742812 - RNA, 19 nt, Homo sapiens
  misc_RNA (1)...(19): siRNA sense strand
uaaggaaucugaggagaac

SEQ ID NO: 1742813 - RNA, 19 nt, Homo sapiens
  misc_RNA (1)...(19): siRNA sense strand
ucaaggaagagaaaguaaa

SEQ ID NO: 1742814 - RNA, 19 nt, Homo sapiens
  misc_RNA (1)...(19): siRNA sense strand
caacgucagcgcuggagaa

SEQ ID NO: 1742815 - RNA, 19 nt, Homo sapiens
  misc_RNA (1)...(19): siRNA sense strand
caaggaagagaaaguaaag

SEQ ID NO: 1742816 - RNA, 19 nt, Homo sapiens
  misc_RNA (1)...(19): siRNA sense strand
agaugaagcuuuccaaacg

SEQ ID NO: 1742817 - RNA, 19 nt, Homo sapiens
  misc_RNA (1)...(19): siRNA sense strand
ugauacgauucagugauua

SEQ ID NO: 1742818 - RNA, 19 nt, Homo sapiens
  misc_RNA (1)...(19): siRNA sense strand
gcaaagauugacaagaaag

SEQ ID NO: 1742819 - RNA, 19 nt, Homo sapiens
  misc_RNA (1)...(19): siRNA sense strand
ggacugaugaagaaagaca

SEQ ID NO: 1742820 - RNA, 19 nt, Homo sapiens
  misc_RNA (1)...(19): siRNA sense strand
gaaauggagguacaugcau

SEQ ID NO: 1742821 - RNA, 19 nt, Homo sapiens
  misc_RNA (1)...(19): siRNA sense strand
ugaaacaaaggaaugauca

SEQ ID NO: 1742822 - RNA, 19 nt, Homo sapiens
  misc_RNA (1)...(19): siRNA sense strand
gagaugaagcuuuccaaac

SEQ ID NO: 1742823 - RNA, 19 nt, Homo sapiens
  misc_RNA (1)...(19): siRNA sense strand
gaucuucaaacccuggaaa

SEQ ID NO: 1742824 - RNA, 19 nt, Homo sapiens
  misc_RNA (1)...(19): siRNA sense strand
uaaggcagcaauucguaaa

SEQ ID NO: 1742825 - RNA, 19 nt, Homo sapiens
  misc_RNA (1)...(19): siRNA sense strand
acccacuguugaugaauua

SEQ ID NO: 1742826 - RNA, 19 nt, Homo sapiens
  misc_RNA (1)...(19): siRNA sense strand
aagcaaacaggaacuagaa

SEQ ID NO: 1742827 - RNA, 19 nt, Homo sapiens
  misc_RNA (1)...(19): siRNA sense strand
caagcaaacaggaacuaga

SEQ ID NO: 1742828 - RNA, 19 nt, Homo sapiens
  misc_RNA (1)...(19): siRNA sense strand
gaaccacccacucccaagu

SEQ ID NO: 1742829 - RNA, 19 nt, Homo sapiens
  misc_RNA (1)...(19): siRNA sense strand
uaucuggucucagggauuc

SEQ ID NO: 1742830 - RNA, 19 nt, Homo sapiens
  misc_RNA (1)...(19): siRNA sense strand
aaacaaaggaaugaucaga

SEQ ID NO: 1742831 - RNA, 19 nt, Homo sapiens
  misc_RNA (1)...(19): siRNA sense strand
gaaggacugaugaagaaag

SEQ ID NO: 1742832 - RNA, 19 nt, Homo sapiens
  misc_RNA (1)...(19): siRNA sense strand
gcgaacugccgcuaaggaa

SEQ ID NO: 1742833 - RNA, 19 nt, Homo sapiens
  misc_RNA (1)...(19): siRNA sense strand
cgagaggagcucaucaaga

SEQ ID NO: 1742834 - RNA, 19 nt, Homo sapiens
  misc_RNA (1)...(19): siRNA sense strand
ggaacacugccacggaaau

SEQ ID NO: 1742835 - RNA, 19 nt, Homo sapiens
  misc_RNA (1)...(19): siRNA sense strand
agaaccugaucauaaauuc

SEQ ID NO: 1742836 - RNA, 19 nt, Homo sapiens
  misc_RNA (1)...(19): siRNA sense strand
uuccaagccuccagcauga

SEQ ID NO: 1742837 - RNA, 19 nt, Homo sapiens
  misc_RNA (1)...(19): siRNA sense strand
ugacaggagggcagacaaa

SEQ ID NO: 1742838 - RNA, 19 nt, Homo sapiens
  misc_RNA (1)...(19): siRNA sense strand
agauugacaagaaagcuua

SEQ ID NO: 1742839 - RNA, 19 nt, Homo sapiens
  misc_RNA (1)...(19): siRNA sense strand
gaacuagaagaccggaaca

SEQ ID NO: 1742840 - RNA, 19 nt, Homo sapiens
  misc_RNA (1)...(19): siRNA sense strand
uaaggaaccggccaagcaa

SEQ ID NO: 1742841 - RNA, 19 nt, Homo sapiens
  misc_RNA (1)...(19): siRNA sense strand
aaaguaaagggucuccaaa

SEQ ID NO: 1742842 - RNA, 19 nt, Homo sapiens
  misc_RNA (1)...(19): siRNA sense strand
cgagaugaagcuuuccaaa

SEQ ID NO: 1742843 - RNA, 19 nt, Homo sapiens
  misc_RNA (1)...(19): siRNA sense strand
aaggacugaugaagaaaga

SEQ ID NO: 1742844 - RNA, 19 nt, Homo sapiens
  misc_RNA (1)...(19): siRNA sense strand
cuaaggaaccggccaagca

SEQ ID NO: 1742845 - RNA, 19 nt, Homo sapiens
  misc_RNA (1)...(19): siRNA sense strand
ggagaaccugaucauaaau

SEQ ID NO: 1742846 - RNA, 19 nt, Homo sapiens
  misc_RNA (1)...(19): siRNA sense strand
ggacaguuuucaaggaaga

SEQ ID NO: 1742847 - RNA, 19 nt, Homo sapiens
  misc_RNA (1)...(19): siRNA sense strand
caagauuccacaggccaua

SEQ ID NO: 1742848 - RNA, 19 nt, Homo sapiens
  misc_RNA (1)...(19): siRNA sense strand
aagaaagcuuaaucagaga

SEQ ID NO: 1742849 - RNA, 19 nt, Homo sapiens
  misc_RNA (1)...(19): siRNA sense strand
agaaagaagagaaaucaag

SEQ ID NO: 1742850 - RNA, 19 nt, Homo sapiens
  misc_RNA (1)...(19): siRNA sense strand
aaaggaaugaucagacaga

SEQ ID NO: 1742851 - RNA, 19 nt, Homo sapiens
  misc_RNA (1)...(19): siRNA sense strand
cuaaggaaucugaggagaa

SEQ ID NO: 1742852 - RNA, 19 nt, Homo sapiens
  misc_RNA (1)...(19): siRNA sense strand
cacuguugaugaauuaaga

SEQ ID NO: 1742853 - RNA, 19 nt, Homo sapiens
  misc_RNA (1)...(19): siRNA sense strand
agagaaaucaagcaaagau

SEQ ID NO: 1742854 - RNA, 19 nt, Homo sapiens
  misc_RNA (1)...(19): siRNA sense strand
caggaagaaagaagagaaa

SEQ ID NO: 1742855 - RNA, 19 nt, Homo sapiens
  misc_RNA (1)...(19): siRNA sense strand
gacagagcaggaagaaaga

SEQ ID NO: 1742856 - RNA, 19 nt, Homo sapiens
  misc_RNA (1)...(19): siRNA sense strand
agaucgagaugaagcuuuc

SEQ ID NO: 1742857 - RNA, 19 nt, Homo sapiens
  misc_RNA (1)...(19): siRNA sense strand
ucagagacccacuguugau

SEQ ID NO: 1742858 - RNA, 19 nt, Homo sapiens
  misc_RNA (1)...(19): siRNA sense strand
agcaaagauugacaagaaa

SEQ ID NO: 1742859 - RNA, 19 nt, Homo sapiens
  misc_RNA (1)...(19): siRNA sense strand
acucaaagacgacuugcuu

SEQ ID NO: 1742860 - RNA, 19 nt, Homo sapiens
  misc_RNA (1)...(19): siRNA sense strand
aggcagcaauucguaaaga

SEQ ID NO: 1742861 - RNA, 19 nt, Homo sapiens
  misc_RNA (1)...(19): siRNA sense strand
uagaagaccggaacauuuu

SEQ ID NO: 1742862 - RNA, 19 nt, Homo sapiens
  misc_RNA (1)...(19): siRNA sense strand
aaucugaggagaacaagga

SEQ ID NO: 1742863 - RNA, 19 nt, Homo sapiens
  misc_RNA (1)...(19): siRNA sense strand
gagaggagcucaucaagaa

SEQ ID NO: 1742864 - RNA, 19 nt, Homo sapiens
  misc_RNA (1)...(19): siRNA sense strand
gaagagaaaucaagcaaag

SEQ ID NO: 1742865 - RNA, 19 nt, Homo sapiens
  misc_RNA (1)...(19): siRNA sense strand
ccaaagaccugccguggaa

SEQ ID NO: 1742866 - RNA, 19 nt, Homo sapiens
  misc_RNA (1)...(19): siRNA sense strand
aagcaaagauugacaagaa

SEQ ID NO: 1742867 - RNA, 19 nt, Homo sapiens
  misc_RNA (1)...(19): siRNA sense strand
cagaaggacugaugaagaa

SEQ ID NO: 1742868 - RNA, 19 nt, Homo sapiens
  misc_RNA (1)...(19): siRNA sense strand
gaucauaaauucugaacuc

SEQ ID NO: 1742869 - RNA, 19 nt, Homo sapiens
  misc_RNA (1)...(19): siRNA sense strand
ggaggaggcuuggagcuuu

SEQ ID NO: 1742870 - RNA, 19 nt, Homo sapiens
  misc_RNA (1)...(19): siRNA sense strand
gaagaaagaagagaaauca

SEQ ID NO: 1742871 - RNA, 19 nt, Homo sapiens
  misc_RNA (1)...(19): siRNA sense strand
cgucagcgcuggagaagaa

SEQ ID NO: 1742872 - RNA, 19 nt, Homo sapiens
  misc_RNA (1)...(19): siRNA sense strand
uaaagggucuccaaagaag

SEQ ID NO: 1742873 - RNA, 19 nt, Homo sapiens
  misc_RNA (1)...(19): siRNA sense strand
guaaugaaauggagguaca

SEQ ID NO: 1742874 - RNA, 19 nt, Homo sapiens
  misc_RNA (1)...(19): siRNA sense strand
cugaacgacuccauuauuu

SEQ ID NO: 1742875 - RNA, 19 nt, Homo sapiens
  misc_RNA (1)...(19): siRNA sense strand
caaagaagcggcuggaugu

SEQ ID NO: 1742876 - RNA, 19 nt, Homo sapiens
  misc_RNA (1)...(19): siRNA sense strand
gaaaguaaagggucuccaa

SEQ ID NO: 1742877 - RNA, 19 nt, Homo sapiens
  misc_RNA (1)...(19): siRNA sense strand
gagcuggagagaagaaaua

SEQ ID NO: 1742878 - RNA, 19 nt, Homo sapiens
  misc_RNA (1)...(19): siRNA sense strand
guaaagggucuccaaagaa

SEQ ID NO: 1742879 - RNA, 19 nt, Homo sapiens
  misc_RNA (1)...(19): siRNA sense strand
aggagaaccugaucauaaa

SEQ ID NO: 1742880 - RNA, 19 nt, Homo sapiens
  misc_RNA (1)...(19): siRNA sense strand
gcgcugaacgacuccauua

SEQ ID NO: 1742881 - RNA, 19 nt, Homo sapiens
  misc_RNA (1)...(19): siRNA sense strand
uggaagagcuggagagaag

SEQ ID NO: 1742882 - RNA, 19 nt, Homo sapiens
  misc_RNA (1)...(19): siRNA sense strand
gauaaggcagcaauucgua

SEQ ID NO: 1742883 - RNA, 19 nt, Homo sapiens
  misc_RNA (1)...(19): siRNA sense strand
aaggagaaccugaucauaa

SEQ ID NO: 1742884 - RNA, 19 nt, Homo sapiens
  misc_RNA (1)...(19): siRNA sense strand
gaacgacuccauuauuucu

SEQ ID NO: 1742885 - RNA, 19 nt, Homo sapiens
  misc_RNA (1)...(19): siRNA sense strand
gcaaacaggaacuagaaga

SEQ ID NO: 1742886 - RNA, 19 nt, Homo sapiens
  misc_RNA (1)...(19): siRNA sense strand
cuagaagaccggaacauuu

SEQ ID NO: 1742887 - RNA, 19 nt, Homo sapiens
  misc_RNA (1)...(19): siRNA sense strand
aguaaagggucuccaaaga

SEQ ID NO: 1742888 - RNA, 19 nt, Homo sapiens
  misc_RNA (1)...(19): siRNA sense strand
gagacccacuguugaugaa

SEQ ID NO: 1742889 - RNA, 19 nt, Homo sapiens
  misc_RNA (1)...(19): siRNA sense strand
gagaaccugaucauaaauu

SEQ ID NO: 1742890 - RNA, 19 nt, Homo sapiens
  misc_RNA (1)...(19): siRNA sense strand
gaacaaggagaaccugauc

SEQ ID NO: 1742891 - RNA, 19 nt, Homo sapiens
  misc_RNA (1)...(19): siRNA sense strand
gcugaacgacuccauuauu

SEQ ID NO: 1742892 - RNA, 19 nt, Homo sapiens
  misc_RNA (1)...(19): siRNA sense strand
guccucagcugcccacuug

SEQ ID NO: 1742893 - RNA, 19 nt, Homo sapiens
  misc_RNA (1)...(19): siRNA sense strand
gacccacuguugaugaauu

SEQ ID NO: 1742894 - RNA, 19 nt, Homo sapiens
  misc_RNA (1)...(19): siRNA sense strand
gaacugccgcuaaggaauc

SEQ ID NO: 1742895 - RNA, 19 nt, Homo sapiens
  misc_RNA (1)...(19): siRNA sense strand
ggcagcagaucgagaugaa

SEQ ID NO: 1742896 - RNA, 19 nt, Homo sapiens
  misc_RNA (1)...(19): siRNA sense strand
acaaaggaaugaucagaca

SEQ ID NO: 1742897 - RNA, 19 nt, Homo sapiens
  misc_RNA (1)...(19): siRNA sense strand
gaagagcuggagagaagaa

SEQ ID NO: 1742898 - RNA, 19 nt, Homo sapiens
  misc_RNA (1)...(19): siRNA sense strand
gcaggaagaaagaagagaa

SEQ ID NO: 1742899 - RNA, 19 nt, Homo sapiens
  misc_RNA (1)...(19): siRNA sense strand
caaaagcgcaggacuauga

SEQ ID NO: 1742900 - RNA, 19 nt, Homo sapiens
  misc_RNA (1)...(19): siRNA sense strand
aaucagagacccacuguug

SEQ ID NO: 1742901 - RNA, 19 nt, Homo sapiens
  misc_RNA (1)...(19): siRNA sense strand
ggaagaaagaagagaaauc

SEQ ID NO: 1742902 - RNA, 19 nt, Homo sapiens
  misc_RNA (1)...(19): siRNA sense strand
ccagaaggacugaugaaga

SEQ ID NO: 1742903 - RNA, 19 nt, Homo sapiens
  misc_RNA (1)...(19): siRNA sense strand
gaggaggcuuggagcuuug

SEQ ID NO: 1742904 - RNA, 19 nt, Homo sapiens
  misc_RNA (1)...(19): siRNA sense strand
gcagauaaggcagcaauuc

SEQ ID NO: 1742905 - RNA, 19 nt, Homo sapiens
  misc_RNA (1)...(19): siRNA sense strand
gaacacugccacggaaaug

SEQ ID NO: 1742906 - RNA, 19 nt, Homo sapiens
  misc_RNA (1)...(19): siRNA sense strand
acaagaaagcuuaaucaga

SEQ ID NO: 1742907 - RNA, 19 nt, Homo sapiens
  misc_RNA (1)...(19): siRNA sense strand
ggcagcaauucguaaagaa

SEQ ID NO: 1742908 - RNA, 19 nt, Homo sapiens
  misc_RNA (1)...(19): siRNA sense strand
caaggagaaccugaucaua

SEQ ID NO: 1742909 - RNA, 19 nt, Homo sapiens
  misc_RNA (1)...(19): siRNA sense strand
guugaugaauuaagagaca

SEQ ID NO: 1742910 - RNA, 19 nt, Homo sapiens
  misc_RNA (1)...(19): siRNA sense strand
ugacaagaaagcuuaauca

SEQ ID NO: 1742911 - RNA, 19 nt, Homo sapiens
  misc_RNA (1)...(19): siRNA sense strand
agacagagcaggaagaaag

SEQ ID NO: 1742912 - RNA, 19 nt, Homo sapiens
  misc_RNA (1)...(19): siRNA sense strand
uaaggaaucugaggagaac

SEQ ID NO: 1742913 - RNA, 19 nt, Homo sapiens
  misc_RNA (1)...(19): siRNA sense strand
ucaaggaagagaaaguaaa

SEQ ID NO: 1742914 - RNA, 19 nt, Homo sapiens
  misc_RNA (1)...(19): siRNA sense strand
caacgucagcgcuggagaa

SEQ ID NO: 1742915 - RNA, 19 nt, Homo sapiens
  misc_RNA (1)...(19): siRNA sense strand
caaggaagagaaaguaaag

SEQ ID NO: 1742916 - RNA, 19 nt, Homo sapiens
  misc_RNA (1)...(19): siRNA sense strand
agaugaagcuuuccaaacg

SEQ ID NO: 1742917 - RNA, 19 nt, Homo sapiens
  misc_RNA (1)...(19): siRNA sense strand
ugauacgauucagugauua

SEQ ID NO: 1742918 - RNA, 19 nt, Homo sapiens
  misc_RNA (1)...(19): siRNA sense strand
gcaaagauugacaagaaag

SEQ ID NO: 1742919 - RNA, 19 nt, Homo sapiens
  misc_RNA (1)...(19): siRNA sense strand
ggacugaugaagaaagaca

SEQ ID NO: 1742920 - RNA, 19 nt, Homo sapiens
  misc_RNA (1)...(19): siRNA sense strand
gaaauggagguacaugcau

SEQ ID NO: 1742921 - RNA, 19 nt, Homo sapiens
  misc_RNA (1)...(19): siRNA sense strand
ugaaacaaaggaaugauca

SEQ ID NO: 1742922 - RNA, 19 nt, Homo sapiens
  misc_RNA (1)...(19): siRNA sense strand
gagaugaagcuuuccaaac

SEQ ID NO: 1742923 - RNA, 19 nt, Homo sapiens
  misc_RNA (1)...(19): siRNA sense strand
gaucuucaaacccuggaaa

SEQ ID NO: 1742924 - RNA, 19 nt, Homo sapiens
  misc_RNA (1)...(19): siRNA sense strand
uaaggcagcaauucguaaa

SEQ ID NO: 1742925 - RNA, 19 nt, Homo sapiens
  misc_RNA (1)...(19): siRNA sense strand
acccacuguugaugaauua

SEQ ID NO: 1742926 - RNA, 19 nt, Homo sapiens
  misc_RNA (1)...(19): siRNA sense strand
aagcaaacaggaacuagaa

SEQ ID NO: 1742927 - RNA, 19 nt, Homo sapiens
  misc_RNA (1)...(19): siRNA sense strand
caagcaaacaggaacuaga

SEQ ID NO: 1742928 - RNA, 19 nt, Homo sapiens
  misc_RNA (1)...(19): siRNA sense strand
gaaccacccacucccaagu

SEQ ID NO: 1742929 - RNA, 19 nt, Homo sapiens
  misc_RNA (1)...(19): siRNA sense strand
uaucuggucucagggauuc

SEQ ID NO: 1742930 - RNA, 19 nt, Homo sapiens
  misc_RNA (1)...(19): siRNA sense strand
aaacaaaggaaugaucaga

SEQ ID NO: 1742931 - RNA, 19 nt, Homo sapiens
  misc_RNA (1)...(19): siRNA sense strand
gaaggacugaugaagaaag

SEQ ID NO: 1742932 - RNA, 19 nt, Homo sapiens
  misc_RNA (1)...(19): siRNA sense strand
gcgaacugccgcuaaggaa

SEQ ID NO: 1742933 - RNA, 19 nt, Homo sapiens
  misc_RNA (1)...(19): siRNA sense strand
cgagaggagcucaucaaga

SEQ ID NO: 1742934 - RNA, 19 nt, Homo sapiens
  misc_RNA (1)...(19): siRNA sense strand
ggaacacugccacggaaau

SEQ ID NO: 1742935 - RNA, 19 nt, Homo sapiens
  misc_RNA (1)...(19): siRNA sense strand
agaaccugaucauaaauuc

SEQ ID NO: 1742936 - RNA, 19 nt, Homo sapiens
  misc_RNA (1)...(19): siRNA sense strand
uuccaagccuccagcauga

SEQ ID NO: 1742937 - RNA, 19 nt, Homo sapiens
  misc_RNA (1)...(19): siRNA sense strand
ugacaggagggcagacaaa

SEQ ID NO: 1742938 - RNA, 19 nt, Homo sapiens
  misc_RNA (1)...(19): siRNA sense strand
agauugacaagaaagcuua

SEQ ID NO: 1742939 - RNA, 19 nt, Homo sapiens
  misc_RNA (1)...(19): siRNA sense strand
gaacuagaagaccggaaca

SEQ ID NO: 1742940 - RNA, 19 nt, Homo sapiens
  misc_RNA (1)...(19): siRNA sense strand
uaaggaaccggccaagcaa

SEQ ID NO: 1742941 - RNA, 19 nt, Homo sapiens
  misc_RNA (1)...(19): siRNA sense strand
aaaguaaagggucuccaaa

SEQ ID NO: 1742942 - RNA, 19 nt, Homo sapiens
  misc_RNA (1)...(19): siRNA sense strand
cgagaugaagcuuuccaaa

SEQ ID NO: 1742943 - RNA, 19 nt, Homo sapiens
  misc_RNA (1)...(19): siRNA sense strand
aaggacugaugaagaaaga

SEQ ID NO: 1742944 - RNA, 19 nt, Homo sapiens
  misc_RNA (1)...(19): siRNA sense strand
cuaaggaaccggccaagca

SEQ ID NO: 1742945 - RNA, 19 nt, Homo sapiens
  misc_RNA (1)...(19): siRNA sense strand
ggagaaccugaucauaaau

SEQ ID NO: 1742946 - RNA, 19 nt, Homo sapiens
  misc_RNA (1)...(19): siRNA sense strand
ggacaguuuucaaggaaga

SEQ ID NO: 1742947 - RNA, 19 nt, Homo sapiens
  misc_RNA (1)...(19): siRNA sense strand
caagauuccacaggccaua

SEQ ID NO: 1742948 - RNA, 19 nt, Homo sapiens
  misc_RNA (1)...(19): siRNA sense strand
aagaaagcuuaaucagaga

SEQ ID NO: 1742949 - RNA, 19 nt, Homo sapiens
  misc_RNA (1)...(19): siRNA sense strand
agaaagaagagaaaucaag

SEQ ID NO: 1742950 - RNA, 19 nt, Homo sapiens
  misc_RNA (1)...(19): siRNA sense strand
aaaggaaugaucagacaga

SEQ ID NO: 1742951 - RNA, 19 nt, Homo sapiens
  misc_RNA (1)...(19): siRNA sense strand
cuaaggaaucugaggagaa

SEQ ID NO: 1742952 - RNA, 19 nt, Homo sapiens
  misc_RNA (1)...(19): siRNA sense strand
cacuguugaugaauuaaga

SEQ ID NO: 1742953 - RNA, 19 nt, Homo sapiens
  misc_RNA (1)...(19): siRNA sense strand
agagaaaucaagcaaagau

SEQ ID NO: 1742954 - RNA, 19 nt, Homo sapiens
  misc_RNA (1)...(19): siRNA sense strand
caggaagaaagaagagaaa

SEQ ID NO: 1742955 - RNA, 19 nt, Homo sapiens
  misc_RNA (1)...(19): siRNA sense strand
gacagagcaggaagaaaga

SEQ ID NO: 1742956 - RNA, 19 nt, Homo sapiens
  misc_RNA (1)...(19): siRNA sense strand
agaucgagaugaagcuuuc

SEQ ID NO: 1742957 - RNA, 19 nt, Homo sapiens
  misc_RNA (1)...(19): siRNA sense strand
ucagagacccacuguugau

SEQ ID NO: 1742958 - RNA, 19 nt, Homo sapiens
  misc_RNA (1)...(19): siRNA sense strand
agcaaagauugacaagaaa

SEQ ID NO: 1742959 - RNA, 19 nt, Homo sapiens
  misc_RNA (1)...(19): siRNA sense strand
acucaaagacgacuugcuu

SEQ ID NO: 1742960 - RNA, 19 nt, Homo sapiens
  misc_RNA (1)...(19): siRNA sense strand
aggcagcaauucguaaaga

SEQ ID NO: 1742961 - RNA, 19 nt, Homo sapiens
  misc_RNA (1)...(19): siRNA sense strand
uagaagaccggaacauuuu

SEQ ID NO: 1742962 - RNA, 19 nt, Homo sapiens
  misc_RNA (1)...(19): siRNA sense strand
aaucugaggagaacaagga

SEQ ID NO: 1742963 - RNA, 19 nt, Homo sapiens
  misc_RNA (1)...(19): siRNA sense strand
gagaggagcucaucaagaa

SEQ ID NO: 1742964 - RNA, 19 nt, Homo sapiens
  misc_RNA (1)...(19): siRNA sense strand
gaagagaaaucaagcaaag

SEQ ID NO: 1742965 - RNA, 19 nt, Homo sapiens
  misc_RNA (1)...(19): siRNA sense strand
ccaaagaccugccguggaa

SEQ ID NO: 1742966 - RNA, 19 nt, Homo sapiens
  misc_RNA (1)...(19): siRNA sense strand
aagcaaagauugacaagaa

SEQ ID NO: 1742967 - RNA, 19 nt, Homo sapiens
  misc_RNA (1)...(19): siRNA sense strand
cagaaggacugaugaagaa

SEQ ID NO: 1742968 - RNA, 19 nt, Homo sapiens
  misc_RNA (1)...(19): siRNA sense strand
gaucauaaauucugaacuc

SEQ ID NO: 1742969 - RNA, 19 nt, Homo sapiens
  misc_RNA (1)...(19): siRNA sense strand
ggaggaggcuuggagcuuu

SEQ ID NO: 1742970 - RNA, 19 nt, Homo sapiens
  misc_RNA (1)...(19): siRNA sense strand
gaagaaagaagagaaauca

SEQ ID NO: 1742971 - RNA, 19 nt, Homo sapiens
  misc_RNA (1)...(19): siRNA sense strand
cgucagcgcuggagaagaa

SEQ ID NO: 1742972 - RNA, 19 nt, Homo sapiens
  misc_RNA (1)...(19): siRNA sense strand
uaaagggucuccaaagaag

SEQ ID NO: 1742973 - RNA, 19 nt, Homo sapiens
  misc_RNA (1)...(19): siRNA sense strand
guaaugaaauggagguaca

SEQ ID NO: 1742974 - RNA, 19 nt, Homo sapiens
  misc_RNA (1)...(19): siRNA sense strand
cugaacgacuccauuauuu

SEQ ID NO: 1742975 - RNA, 19 nt, Homo sapiens
  misc_RNA (1)...(19): siRNA sense strand
caaagaagcggcuggaugu

SEQ ID NO: 1742976 - RNA, 19 nt, Homo sapiens
  misc_RNA (1)...(19): siRNA sense strand
gaaaguaaagggucuccaa

SEQ ID NO: 1742977 - RNA, 19 nt, Homo sapiens
  misc_RNA (1)...(19): siRNA sense strand
gagcuggagagaagaaaua

SEQ ID NO: 1742978 - RNA, 19 nt, Homo sapiens
  misc_RNA (1)...(19): siRNA sense strand
guaaagggucuccaaagaa

SEQ ID NO: 1742979 - RNA, 19 nt, Homo sapiens
  misc_RNA (1)...(19): siRNA sense strand
aggagaaccugaucauaaa

SEQ ID NO: 1742980 - RNA, 19 nt, Homo sapiens
  misc_RNA (1)...(19): siRNA sense strand
gcgcugaacgacuccauua

SEQ ID NO: 1742981 - RNA, 19 nt, Homo sapiens
  misc_RNA (1)...(19): siRNA sense strand
uggaagagcuggagagaag

SEQ ID NO: 1742982 - RNA, 19 nt, Homo sapiens
  misc_RNA (1)...(19): siRNA sense strand
gauaaggcagcaauucgua

SEQ ID NO: 1742983 - RNA, 19 nt, Homo sapiens
  misc_RNA (1)...(19): siRNA sense strand
aaggagaaccugaucauaa

SEQ ID NO: 1742984 - RNA, 19 nt, Homo sapiens
  misc_RNA (1)...(19): siRNA sense strand
gaacgacuccauuauuucu

SEQ ID NO: 1742985 - RNA, 19 nt, Homo sapiens
  misc_RNA (1)...(19): siRNA sense strand
gcaaacaggaacuagaaga

SEQ ID NO: 1742986 - RNA, 19 nt, Homo sapiens
  misc_RNA (1)...(19): siRNA sense strand
cuagaagaccggaacauuu

SEQ ID NO: 1742987 - RNA, 19 nt, Homo sapiens
  misc_RNA (1)...(19): siRNA sense strand
aguaaagggucuccaaaga

SEQ ID NO: 1742988 - RNA, 19 nt, Homo sapiens
  misc_RNA (1)...(19): siRNA sense strand
gagacccacuguugaugaa

SEQ ID NO: 1742989 - RNA, 19 nt, Homo sapiens
  misc_RNA (1)...(19): siRNA sense strand
gagaaccugaucauaaauu

SEQ ID NO: 1742990 - RNA, 19 nt, Homo sapiens
  misc_RNA (1)...(19): siRNA sense strand
gaacaaggagaaccugauc

SEQ ID NO: 1742991 - RNA, 19 nt, Homo sapiens
  misc_RNA (1)...(19): siRNA sense strand
gcugaacgacuccauuauu

SEQ ID NO: 1742992 - RNA, 19 nt, Homo sapiens
  misc_RNA (1)...(19): siRNA sense strand
guccucagcugcccacuug

SEQ ID NO: 1742993 - RNA, 19 nt, Homo sapiens
  misc_RNA (1)...(19): siRNA sense strand
gacccacuguugaugaauu

SEQ ID NO: 1742994 - RNA, 19 nt, Homo sapiens
  misc_RNA (1)...(19): siRNA sense strand
gaacugccgcuaaggaauc

SEQ ID NO: 1742995 - RNA, 19 nt, Homo sapiens
  misc_RNA (1)...(19): siRNA sense strand
ggcagcagaucgagaugaa

SEQ ID NO: 1742996 - RNA, 19 nt, Homo sapiens
  misc_RNA (1)...(19): siRNA sense strand
acaaaggaaugaucagaca

SEQ ID NO: 1742997 - RNA, 19 nt, Homo sapiens
  misc_RNA (1)...(19): siRNA sense strand
gaagagcuggagagaagaa

SEQ ID NO: 1742998 - RNA, 19 nt, Homo sapiens
  misc_RNA (1)...(19): siRNA sense strand
gcaggaagaaagaagagaa

SEQ ID NO: 1742999 - RNA, 19 nt, Homo sapiens
  misc_RNA (1)...(19): siRNA sense strand
caaaagcgcaggacuauga

SEQ ID NO: 1743000 - RNA, 19 nt, Homo sapiens
  misc_RNA (1)...(19): siRNA sense strand
aaucagagacccacuguug

SEQ ID NO: 1743001 - RNA, 19 nt, Homo sapiens
  misc_RNA (1)...(19): siRNA sense strand
ggaagaaagaagagaaauc

SEQ ID NO: 1743002 - RNA, 19 nt, Homo sapiens
  misc_RNA (1)...(19): siRNA sense strand
ccagaaggacugaugaaga

SEQ ID NO: 1743003 - RNA, 19 nt, Homo sapiens
  misc_RNA (1)...(19): siRNA sense strand
gaggaggcuuggagcuuug

SEQ ID NO: 1743004 - RNA, 19 nt, Homo sapiens
  misc_RNA (1)...(19): siRNA sense strand
gcagauaaggcagcaauuc

SEQ ID NO: 1743005 - RNA, 19 nt, Homo sapiens
  misc_RNA (1)...(19): siRNA sense strand
gaacacugccacggaaaug

SEQ ID NO: 1743006 - RNA, 19 nt, Homo sapiens
  misc_RNA (1)...(19): siRNA sense strand
acaagaaagcuuaaucaga

SEQ ID NO: 1743007 - RNA, 19 nt, Homo sapiens
  misc_RNA (1)...(19): siRNA sense strand
ggcagcaauucguaaagaa

SEQ ID NO: 1743008 - RNA, 19 nt, Homo sapiens
  misc_RNA (1)...(19): siRNA sense strand
caaggagaaccugaucaua

SEQ ID NO: 1743009 - RNA, 19 nt, Homo sapiens
  misc_RNA (1)...(19): siRNA sense strand
guugaugaauuaagagaca

SEQ ID NO: 1743010 - RNA, 19 nt, Homo sapiens
  misc_RNA (1)...(19): siRNA sense strand
ugacaagaaagcuuaauca

SEQ ID NO: 1743011 - RNA, 19 nt, Homo sapiens
  misc_RNA (1)...(19): siRNA sense strand
agacagagcaggaagaaag

SEQ ID NO: 1743012 - RNA, 19 nt, Homo sapiens
  misc_RNA (1)...(19): siRNA sense strand
uaaggaaucugaggagaac

SEQ ID NO: 1743013 - RNA, 19 nt, Homo sapiens
  misc_RNA (1)...(19): siRNA sense strand
ucaaggaagagaaaguaaa

SEQ ID NO: 1743014 - RNA, 19 nt, Homo sapiens
  misc_RNA (1)...(19): siRNA sense strand
caacgucagcgcuggagaa

SEQ ID NO: 1743015 - RNA, 19 nt, Homo sapiens
  misc_RNA (1)...(19): siRNA sense strand
caaggaagagaaaguaaag

SEQ ID NO: 1743016 - RNA, 19 nt, Homo sapiens
  misc_RNA (1)...(19): siRNA sense strand
agaugaagcuuuccaaacg

SEQ ID NO: 1743017 - RNA, 19 nt, Homo sapiens
  misc_RNA (1)...(19): siRNA sense strand
ugauacgauucagugauua

SEQ ID NO: 1743018 - RNA, 19 nt, Homo sapiens
  misc_RNA (1)...(19): siRNA sense strand
gcaaagauugacaagaaag

SEQ ID NO: 1743019 - RNA, 19 nt, Homo sapiens
  misc_RNA (1)...(19): siRNA sense strand
ggacugaugaagaaagaca

SEQ ID NO: 1743020 - RNA, 19 nt, Homo sapiens
  misc_RNA (1)...(19): siRNA sense strand
gaaauggagguacaugcau

SEQ ID NO: 1743021 - RNA, 19 nt, Homo sapiens
  misc_RNA (1)...(19): siRNA sense strand
ugaaacaaaggaaugauca

SEQ ID NO: 1743022 - RNA, 19 nt, Homo sapiens
  misc_RNA (1)...(19): siRNA sense strand
gagaugaagcuuuccaaac

SEQ ID NO: 1743023 - RNA, 19 nt, Homo sapiens
  misc_RNA (1)...(19): siRNA sense strand
gaucuucaaacccuggaaa

SEQ ID NO: 1743024 - RNA, 19 nt, Homo sapiens
  misc_RNA (1)...(19): siRNA sense strand
uaaggcagcaauucguaaa

SEQ ID NO: 1743025 - RNA, 19 nt, Homo sapiens
  misc_RNA (1)...(19): siRNA sense strand
acccacuguugaugaauua

SEQ ID NO: 1743026 - RNA, 19 nt, Homo sapiens
  misc_RNA (1)...(19): siRNA sense strand
aagcaaacaggaacuagaa

SEQ ID NO: 1743027 - RNA, 19 nt, Homo sapiens
  misc_RNA (1)...(19): siRNA sense strand
caagcaaacaggaacuaga

SEQ ID NO: 1743028 - RNA, 19 nt, Homo sapiens
  misc_RNA (1)...(19): siRNA sense strand
gaaccacccacucccaagu

SEQ ID NO: 1743029 - RNA, 19 nt, Homo sapiens
  misc_RNA (1)...(19): siRNA sense strand
uaucuggucucagggauuc

SEQ ID NO: 1743030 - RNA, 19 nt, Homo sapiens
  misc_RNA (1)...(19): siRNA sense strand
aaacaaaggaaugaucaga

SEQ ID NO: 1743031 - RNA, 19 nt, Homo sapiens
  misc_RNA (1)...(19): siRNA sense strand
gaaggacugaugaagaaag

SEQ ID NO: 1743032 - RNA, 19 nt, Homo sapiens
  misc_RNA (1)...(19): siRNA sense strand
gcgaacugccgcuaaggaa

SEQ ID NO: 1743033 - RNA, 19 nt, Homo sapiens
  misc_RNA (1)...(19): siRNA sense strand
cgagaggagcucaucaaga

SEQ ID NO: 1743034 - RNA, 19 nt, Homo sapiens
  misc_RNA (1)...(19): siRNA sense strand
ggaacacugccacggaaau

SEQ ID NO: 1743035 - RNA, 19 nt, Homo sapiens
  misc_RNA (1)...(19): siRNA sense strand
agaaccugaucauaaauuc

SEQ ID NO: 1743036 - RNA, 19 nt, Homo sapiens
  misc_RNA (1)...(19): siRNA sense strand
uuccaagccuccagcauga

SEQ ID NO: 1743037 - RNA, 19 nt, Homo sapiens
  misc_RNA (1)...(19): siRNA sense strand
ugacaggagggcagacaaa

SEQ ID NO: 1743038 - RNA, 19 nt, Homo sapiens
  misc_RNA (1)...(19): siRNA sense strand
agauugacaagaaagcuua

SEQ ID NO: 1743039 - RNA, 19 nt, Homo sapiens
  misc_RNA (1)...(19): siRNA sense strand
gaacuagaagaccggaaca

SEQ ID NO: 1743040 - RNA, 19 nt, Homo sapiens
  misc_RNA (1)...(19): siRNA sense strand
uaaggaaccggccaagcaa

SEQ ID NO: 1743041 - RNA, 19 nt, Homo sapiens
  misc_RNA (1)...(19): siRNA sense strand
aaaguaaagggucuccaaa

SEQ ID NO: 1743042 - RNA, 19 nt, Homo sapiens
  misc_RNA (1)...(19): siRNA sense strand
cgagaugaagcuuuccaaa

SEQ ID NO: 1743043 - RNA, 19 nt, Homo sapiens
  misc_RNA (1)...(19): siRNA sense strand
aaggacugaugaagaaaga

SEQ ID NO: 1743044 - RNA, 19 nt, Homo sapiens
  misc_RNA (1)...(19): siRNA sense strand
cuaaggaaccggccaagca

SEQ ID NO: 1743045 - RNA, 19 nt, Homo sapiens
  misc_RNA (1)...(19): siRNA sense strand
ggagaaccugaucauaaau

SEQ ID NO: 1743046 - RNA, 19 nt, Homo sapiens
  misc_RNA (1)...(19): siRNA sense strand
ggacaguuuucaaggaaga

SEQ ID NO: 1743047 - RNA, 19 nt, Homo sapiens
  misc_RNA (1)...(19): siRNA sense strand
caagauuccacaggccaua

SEQ ID NO: 1743048 - RNA, 19 nt, Homo sapiens
  misc_RNA (1)...(19): siRNA sense strand
aagaaagcuuaaucagaga

SEQ ID NO: 1743049 - RNA, 19 nt, Homo sapiens
  misc_RNA (1)...(19): siRNA sense strand
agaaagaagagaaaucaag

SEQ ID NO: 1743050 - RNA, 19 nt, Homo sapiens
  misc_RNA (1)...(19): siRNA sense strand
aaaggaaugaucagacaga

SEQ ID NO: 1743051 - RNA, 19 nt, Homo sapiens
  misc_RNA (1)...(19): siRNA sense strand
cuaaggaaucugaggagaa

SEQ ID NO: 1743052 - RNA, 19 nt, Homo sapiens
  misc_RNA (1)...(19): siRNA sense strand
cacuguugaugaauuaaga

SEQ ID NO: 1743053 - RNA, 19 nt, Homo sapiens
  misc_RNA (1)...(19): siRNA sense strand
agagaaaucaagcaaagau

SEQ ID NO: 1743054 - RNA, 19 nt, Homo sapiens
  misc_RNA (1)...(19): siRNA sense strand
caggaagaaagaagagaaa

SEQ ID NO: 1743055 - RNA, 19 nt, Homo sapiens
  misc_RNA (1)...(19): siRNA sense strand
gacagagcaggaagaaaga

SEQ ID NO: 1743056 - RNA, 19 nt, Homo sapiens
  misc_RNA (1)...(19): siRNA sense strand
agaucgagaugaagcuuuc

SEQ ID NO: 1743057 - RNA, 19 nt, Homo sapiens
  misc_RNA (1)...(19): siRNA sense strand
ucagagacccacuguugau

SEQ ID NO: 1743058 - RNA, 19 nt, Homo sapiens
  misc_RNA (1)...(19): siRNA sense strand
agcaaagauugacaagaaa

SEQ ID NO: 1743059 - RNA, 19 nt, Homo sapiens
  misc_RNA (1)...(19): siRNA sense strand
acucaaagacgacuugcuu

SEQ ID NO: 1743060 - RNA, 19 nt, Homo sapiens
  misc_RNA (1)...(19): siRNA sense strand
aggcagcaauucguaaaga

SEQ ID NO: 1743061 - RNA, 19 nt, Homo sapiens
  misc_RNA (1)...(19): siRNA sense strand
uagaagaccggaacauuuu

SEQ ID NO: 1743062 - RNA, 19 nt, Homo sapiens
  misc_RNA (1)...(19): siRNA sense strand
aaucugaggagaacaagga

SEQ ID NO: 1743063 - RNA, 19 nt, Homo sapiens
  misc_RNA (1)...(19): siRNA sense strand
gcacuugucucgagauaua

SEQ ID NO: 1743064 - RNA, 19 nt, Homo sapiens
  misc_RNA (1)...(19): siRNA sense strand
gaacgagcgcuuccuuaua

SEQ ID NO: 1743065 - RNA, 19 nt, Homo sapiens
  misc_RNA (1)...(19): siRNA sense strand
gcuacgagcuggcuuuaau

SEQ ID NO: 1743066 - RNA, 19 nt, Homo sapiens
  misc_RNA (1)...(19): siRNA sense strand
ggacagaggagcaauagug

SEQ ID NO: 1743067 - RNA, 19 nt, Homo sapiens
  misc_RNA (1)...(19): siRNA sense strand
gagggaauauugucaaaca

SEQ ID NO: 1743068 - RNA, 19 nt, Homo sapiens
  misc_RNA (1)...(19): siRNA sense strand
gagcacuugucucgagaua

SEQ ID NO: 1743069 - RNA, 19 nt, Homo sapiens
  misc_RNA (1)...(19): siRNA sense strand
caaagaagaggaagaagug

SEQ ID NO: 1743070 - RNA, 19 nt, Homo sapiens
  misc_RNA (1)...(19): siRNA sense strand
caacagaggcggguauuuc

SEQ ID NO: 1743071 - RNA, 19 nt, Homo sapiens
  misc_RNA (1)...(19): siRNA sense strand
gugauuagagggaauauug

SEQ ID NO: 1743072 - RNA, 19 nt, Homo sapiens
  misc_RNA (1)...(19): siRNA sense strand
gguauuucuugguggauuu

SEQ ID NO: 1743073 - RNA, 19 nt, Homo sapiens
  misc_RNA (1)...(19): siRNA sense strand
ccacaaagaagaggaagaa

SEQ ID NO: 1743074 - RNA, 19 nt, Homo sapiens
  misc_RNA (1)...(19): siRNA sense strand
gcugcuacuuugaaacgua

SEQ ID NO: 1743075 - RNA, 19 nt, Homo sapiens
  misc_RNA (1)...(19): siRNA sense strand
cgagauauagaugugauua

SEQ ID NO: 1743076 - RNA, 19 nt, Homo sapiens
  misc_RNA (1)...(19): siRNA sense strand
aacgagcgcuuccuuauag

SEQ ID NO: 1743077 - RNA, 19 nt, Homo sapiens
  misc_RNA (1)...(19): siRNA sense strand
uagagggaauauugucaaa

SEQ ID NO: 1743078 - RNA, 19 nt, Homo sapiens
  misc_RNA (1)...(19): siRNA sense strand
gauggacagaggagcaaua

SEQ ID NO: 1743079 - RNA, 19 nt, Homo sapiens
  misc_RNA (1)...(19): siRNA sense strand
gcacaacagaggcggguau

SEQ ID NO: 1743080 - RNA, 19 nt, Homo sapiens
  misc_RNA (1)...(19): siRNA sense strand
gacagaggagcaauaguga

SEQ ID NO: 1743081 - RNA, 19 nt, Homo sapiens
  misc_RNA (1)...(19): siRNA sense strand
agagacugcugcuacuuug

SEQ ID NO: 1743082 - RNA, 19 nt, Homo sapiens
  misc_RNA (1)...(19): siRNA sense strand
cagagacugcugcuacuuu

SEQ ID NO: 1743083 - RNA, 19 nt, Homo sapiens
  misc_RNA (1)...(19): siRNA sense strand
aaaagaaugugaagggauu

SEQ ID NO: 1743084 - RNA, 19 nt, Homo sapiens
  misc_RNA (1)...(19): siRNA sense strand
ugaacgagcgcuuccuuau

SEQ ID NO: 1743085 - RNA, 19 nt, Homo sapiens
  misc_RNA (1)...(19): siRNA sense strand
uaggaucucugcccacagu

SEQ ID NO: 1743086 - RNA, 19 nt, Homo sapiens
  misc_RNA (1)...(19): siRNA sense strand
gagcaauagugagggacuu

SEQ ID NO: 1743087 - RNA, 19 nt, Homo sapiens
  misc_RNA (1)...(19): siRNA sense strand
gugaacgagcgcuuccuua

SEQ ID NO: 1743088 - RNA, 19 nt, Homo sapiens
  misc_RNA (1)...(19): siRNA sense strand
gaugugauuagagggaaua

SEQ ID NO: 1743089 - RNA, 19 nt, Homo sapiens
  misc_RNA (1)...(19): siRNA sense strand
cgauagaggcccugaugga

SEQ ID NO: 1743090 - RNA, 19 nt, Homo sapiens
  misc_RNA (1)...(19): siRNA sense strand
caccgcagcuguugaaagc

SEQ ID NO: 1743091 - RNA, 19 nt, Homo sapiens
  misc_RNA (1)...(19): siRNA sense strand
cagaggcggguauuucuug

SEQ ID NO: 1743092 - RNA, 19 nt, Homo sapiens
  misc_RNA (1)...(19): siRNA sense strand
gacugcugcuacuuugaaa

SEQ ID NO: 1743093 - RNA, 19 nt, Homo sapiens
  misc_RNA (1)...(19): siRNA sense strand
ggguauuucuugguggauu

SEQ ID NO: 1743094 - RNA, 19 nt, Homo sapiens
  misc_RNA (1)...(19): siRNA sense strand
acaaagaagaggaagaagu

SEQ ID NO: 1743095 - RNA, 19 nt, Homo sapiens
  misc_RNA (1)...(19): siRNA sense strand
agacugcugcuacuuugaa

SEQ ID NO: 1743096 - RNA, 19 nt, Homo sapiens
  misc_RNA (1)...(19): siRNA sense strand
ccucugacccaggaacuaa

SEQ ID NO: 1743097 - RNA, 19 nt, Homo sapiens
  misc_RNA (1)...(19): siRNA sense strand
ccgcagcuguugaaagcau

SEQ ID NO: 1743098 - RNA, 19 nt, Homo sapiens
  misc_RNA (1)...(19): siRNA sense strand
gagauauagaugugauuag

SEQ ID NO: 1743099 - RNA, 19 nt, Homo sapiens
  misc_RNA (1)...(19): siRNA sense strand
gauuagagggaauauuguc

SEQ ID NO: 1743100 - RNA, 19 nt, Homo sapiens
  misc_RNA (1)...(19): siRNA sense strand
gauauagaugugauuagag

SEQ ID NO: 1743101 - RNA, 19 nt, Homo sapiens
  misc_RNA (1)...(19): siRNA sense strand
aaagcaugguggagcacuu

SEQ ID NO: 1743102 - RNA, 19 nt, Homo sapiens
  misc_RNA (1)...(19): siRNA sense strand
ggugaacgagcgcuuccuu

SEQ ID NO: 1743103 - RNA, 19 nt, Homo sapiens
  misc_RNA (1)...(19): siRNA sense strand
gccagagacugcugcuacu

SEQ ID NO: 1743104 - RNA, 19 nt, Homo sapiens
  misc_RNA (1)...(19): siRNA sense strand
gagacugcugcuacuuuga

SEQ ID NO: 1743105 - RNA, 19 nt, Homo sapiens
  misc_RNA (1)...(19): siRNA sense strand
gaacuaaaagaaugugaag

SEQ ID NO: 1743106 - RNA, 19 nt, Homo sapiens
  misc_RNA (1)...(19): siRNA sense strand
caaauagguugcccaagug

SEQ ID NO: 1743107 - RNA, 19 nt, Homo sapiens
  misc_RNA (1)...(19): siRNA sense strand
acaaauagguugcccaagu

SEQ ID NO: 1743108 - RNA, 19 nt, Homo sapiens
  misc_RNA (1)...(19): siRNA sense strand
cagcugggcaugacaaaua

SEQ ID NO: 1743109 - RNA, 19 nt, Homo sapiens
  misc_RNA (1)...(19): siRNA sense strand
ccaaggcccuagcgaagaa

SEQ ID NO: 1743110 - RNA, 19 nt, Homo sapiens
  misc_RNA (1)...(19): siRNA sense strand
aagcaaggcugugcacauu

SEQ ID NO: 1743111 - RNA, 19 nt, Homo sapiens
  misc_RNA (1)...(19): siRNA sense strand
gcaaggcugugcacauuuu

SEQ ID NO: 1743112 - RNA, 19 nt, Homo sapiens
  misc_RNA (1)...(19): siRNA sense strand
caccugcucucaccauuga

SEQ ID NO: 1743113 - RNA, 19 nt, Homo sapiens
  misc_RNA (1)...(19): siRNA sense strand
gaacagcugggcaugacaa

SEQ ID NO: 1743114 - RNA, 19 nt, Homo sapiens
  misc_RNA (1)...(19): siRNA sense strand
caagguggugggugaguua

SEQ ID NO: 1743115 - RNA, 19 nt, Homo sapiens
  misc_RNA (1)...(19): siRNA sense strand
gguggugggugaguuauug

SEQ ID NO: 1743116 - RNA, 19 nt, Homo sapiens
  misc_RNA (1)...(19): siRNA sense strand
gcaccagcgucuaccucaa

SEQ ID NO: 1743117 - RNA, 19 nt, Homo sapiens
  misc_RNA (1)...(19): siRNA sense strand
agaaguucguggaugauga

SEQ ID NO: 1743118 - RNA, 19 nt, Homo sapiens
  misc_RNA (1)...(19): siRNA sense strand
uugagaaguucguggauga

SEQ ID NO: 1743119 - RNA, 19 nt, Homo sapiens
  misc_RNA (1)...(19): siRNA sense strand
guucguggaugaugagaag

SEQ ID NO: 1743120 - RNA, 19 nt, Homo sapiens
  misc_RNA (1)...(19): siRNA sense strand
gcgucuaccucaagaugga

SEQ ID NO: 1743121 - RNA, 19 nt, Homo sapiens
  misc_RNA (1)...(19): siRNA sense strand
gcauugggcacuucugcaa

SEQ ID NO: 1743122 - RNA, 19 nt, Homo sapiens
  misc_RNA (1)...(19): siRNA sense strand
cagcauggcccuguccaaa

SEQ ID NO: 1743123 - RNA, 19 nt, Homo sapiens
  misc_RNA (1)...(19): siRNA sense strand
ugggugaguuauuggauga

SEQ ID NO: 1743124 - RNA, 19 nt, Homo sapiens
  misc_RNA (1)...(19): siRNA sense strand
ucaucgccauggagacuuu

SEQ ID NO: 1743125 - RNA, 19 nt, Homo sapiens
  misc_RNA (1)...(19): siRNA sense strand
cccaagaucaccaguguug

SEQ ID NO: 1743126 - RNA, 19 nt, Homo sapiens
  misc_RNA (1)...(19): siRNA sense strand
gcauggcccuguccaaaau

SEQ ID NO: 1743127 - RNA, 19 nt, Homo sapiens
  misc_RNA (1)...(19): siRNA sense strand
acgcuuccaucgugaaaga

SEQ ID NO: 1743128 - RNA, 19 nt, Homo sapiens
  misc_RNA (1)...(19): siRNA sense strand
ucaagguggugggugaguu

SEQ ID NO: 1743129 - RNA, 19 nt, Homo sapiens
  misc_RNA (1)...(19): siRNA sense strand
gagcugaaggagacacugu

SEQ ID NO: 1743130 - RNA, 19 nt, Homo sapiens
  misc_RNA (1)...(19): siRNA sense strand
gagaaccccugcacgugaa

SEQ ID NO: 1743131 - RNA, 19 nt, Homo sapiens
  misc_RNA (1)...(19): siRNA sense strand
gcaagaggugggccaagca

SEQ ID NO: 1743132 - RNA, 19 nt, Homo sapiens
  misc_RNA (1)...(19): siRNA sense strand
gaaguucguggaugaugag

SEQ ID NO: 1743133 - RNA, 19 nt, Homo sapiens
  misc_RNA (1)...(19): siRNA sense strand
gagaaguucguggaugaug

SEQ ID NO: 1743134 - RNA, 19 nt, Homo sapiens
  misc_RNA (1)...(19): siRNA sense strand
caagcaaggcugugcacau

SEQ ID NO: 1743135 - RNA, 19 nt, Homo sapiens
  misc_RNA (1)...(19): siRNA sense strand
aaggagacacugugggaaa

SEQ ID NO: 1743136 - RNA, 19 nt, Homo sapiens
  misc_RNA (1)...(19): siRNA sense strand
caagaggugggccaagcaa

SEQ ID NO: 1743137 - RNA, 19 nt, Homo sapiens
  misc_RNA (1)...(19): siRNA sense strand
ugcccaagaucaccagugu

SEQ ID NO: 1743138 - RNA, 19 nt, Homo sapiens
  misc_RNA (1)...(19): siRNA sense strand
cagcgucuaccucaagaug

SEQ ID NO: 1743139 - RNA, 19 nt, Homo sapiens
  misc_RNA (1)...(19): siRNA sense strand
aggcauggcggcugcauau

SEQ ID NO: 1743140 - RNA, 19 nt, Homo sapiens
  misc_RNA (1)...(19): siRNA sense strand
cacaccugcucucaccauu

SEQ ID NO: 1743141 - RNA, 19 nt, Homo sapiens
  misc_RNA (1)...(19): siRNA sense strand
gccaaggcccuagcgaaga

SEQ ID NO: 1743142 - RNA, 19 nt, Homo sapiens
  misc_RNA (1)...(19): siRNA sense strand
ggugaguuauuggaugaag

SEQ ID NO: 1743143 - RNA, 19 nt, Homo sapiens
  misc_RNA (1)...(19): siRNA sense strand
ggaaggagcaucaauauug

SEQ ID NO: 1743144 - RNA, 19 nt, Homo sapiens
  misc_RNA (1)...(19): siRNA sense strand
gcaagaauuugaacucuau

SEQ ID NO: 1743145 - RNA, 19 nt, Homo sapiens
  misc_RNA (1)...(19): siRNA sense strand
gaagguagcuacauuucga

SEQ ID NO: 1743146 - RNA, 19 nt, Homo sapiens
  misc_RNA (1)...(19): siRNA sense strand
ccagugagcugaguaaauu

SEQ ID NO: 1743147 - RNA, 19 nt, Homo sapiens
  misc_RNA (1)...(19): siRNA sense strand
gaggaaugcuugaauauag

SEQ ID NO: 1743148 - RNA, 19 nt, Homo sapiens
  misc_RNA (1)...(19): siRNA sense strand
gaauauagccaguuccauu

SEQ ID NO: 1743149 - RNA, 19 nt, Homo sapiens
  misc_RNA (1)...(19): siRNA sense strand
gcagauccuucgucaguuu

SEQ ID NO: 1743150 - RNA, 19 nt, Homo sapiens
  misc_RNA (1)...(19): siRNA sense strand
gaacauuucugggcaacaa

SEQ ID NO: 1743151 - RNA, 19 nt, Homo sapiens
  misc_RNA (1)...(19): siRNA sense strand
gaagaaaugguuaacauca

SEQ ID NO: 1743152 - RNA, 19 nt, Homo sapiens
  misc_RNA (1)...(19): siRNA sense strand
gaacguggcucagcaaacu

SEQ ID NO: 1743153 - RNA, 19 nt, Homo sapiens
  misc_RNA (1)...(19): siRNA sense strand
ggaugaagcauaugaagaa

SEQ ID NO: 1743154 - RNA, 19 nt, Homo sapiens
  misc_RNA (1)...(19): siRNA sense strand
guaaugaccaaacacauaa

SEQ ID NO: 1743155 - RNA, 19 nt, Homo sapiens
  misc_RNA (1)...(19): siRNA sense strand
ucaaagagauucugacaac

SEQ ID NO: 1743156 - RNA, 19 nt, Homo sapiens
  misc_RNA (1)...(19): siRNA sense strand
ugaagcauaugaagaaaug

SEQ ID NO: 1743157 - RNA, 19 nt, Homo sapiens
  misc_RNA (1)...(19): siRNA sense strand
gaagauggcuggcauuccu

SEQ ID NO: 1743158 - RNA, 19 nt, Homo sapiens
  misc_RNA (1)...(19): siRNA sense strand
guauuuggaugaagcauau

SEQ ID NO: 1743159 - RNA, 19 nt, Homo sapiens
  misc_RNA (1)...(19): siRNA sense strand
gaacagaaggaacugauuc

SEQ ID NO: 1743160 - RNA, 19 nt, Homo sapiens
  misc_RNA (1)...(19): siRNA sense strand
ggaggaaugcuugaauaua

SEQ ID NO: 1743161 - RNA, 19 nt, Homo sapiens
  misc_RNA (1)...(19): siRNA sense strand
caaugaaagugaaagaugu

SEQ ID NO: 1743162 - RNA, 19 nt, Homo sapiens
  misc_RNA (1)...(19): siRNA sense strand
caggagagcuuaaucaaac

SEQ ID NO: 1743163 - RNA, 19 nt, Homo sapiens
  misc_RNA (1)...(19): siRNA sense strand
uggcagaacuggaaacaga

SEQ ID NO: 1743164 - RNA, 19 nt, Homo sapiens
  misc_RNA (1)...(19): siRNA sense strand
uaagcuaugucaauaagga

SEQ ID NO: 1743165 - RNA, 19 nt, Homo sapiens
  misc_RNA (1)...(19): siRNA sense strand
gaacucuauucuucagcua

SEQ ID NO: 1743166 - RNA, 19 nt, Homo sapiens
  misc_RNA (1)...(19): siRNA sense strand
gggcaacaaugaaagugaa

SEQ ID NO: 1743167 - RNA, 19 nt, Homo sapiens
  misc_RNA (1)...(19): siRNA sense strand
gaacaagaagcucauuauc

SEQ ID NO: 1743168 - RNA, 19 nt, Homo sapiens
  misc_RNA (1)...(19): siRNA sense strand
gcuaagcuaugucaauaag

SEQ ID NO: 1743169 - RNA, 19 nt, Homo sapiens
  misc_RNA (1)...(19): siRNA sense strand
gaaagugaaagauguaagu

SEQ ID NO: 1743170 - RNA, 19 nt, Homo sapiens
  misc_RNA (1)...(19): siRNA sense strand
ggagguggcuuugaacaag

SEQ ID NO: 1743171 - RNA, 19 nt, Homo sapiens
  misc_RNA (1)...(19): siRNA sense strand
guagcuacauuucgacaug

SEQ ID NO: 1743172 - RNA, 19 nt, Homo sapiens
  misc_RNA (1)...(19): siRNA sense strand
ccaagaagcaggaccauuc

SEQ ID NO: 1743173 - RNA, 19 nt, Homo sapiens
  misc_RNA (1)...(19): siRNA sense strand
gaauggaggcuaagcuaug

SEQ ID NO: 1743174 - RNA, 19 nt, Homo sapiens
  misc_RNA (1)...(19): siRNA sense strand
agugaaagauguaaguuga

SEQ ID NO: 1743175 - RNA, 19 nt, Homo sapiens
  misc_RNA (1)...(19): siRNA sense strand
gcuuaugccucacaguuug

SEQ ID NO: 1743176 - RNA, 19 nt, Homo sapiens
  misc_RNA (1)...(19): siRNA sense strand
guaaauuggaggccucuaa

SEQ ID NO: 1743177 - RNA, 19 nt, Homo sapiens
  misc_RNA (1)...(19): siRNA sense strand
aggcuaagcuaugucaaua

SEQ ID NO: 1743178 - RNA, 19 nt, Homo sapiens
  misc_RNA (1)...(19): siRNA sense strand
uaaggaauuugcugucugu

SEQ ID NO: 1743179 - RNA, 19 nt, Homo sapiens
  misc_RNA (1)...(19): siRNA sense strand
gaugaagcauaugaagaaa

SEQ ID NO: 1743180 - RNA, 19 nt, Homo sapiens
  misc_RNA (1)...(19): siRNA sense strand
gacgagaagcugauaaaug

SEQ ID NO: 1743181 - RNA, 19 nt, Homo sapiens
  misc_RNA (1)...(19): siRNA sense strand
gcauaugaagaaaugguua

SEQ ID NO: 1743182 - RNA, 19 nt, Homo sapiens
  misc_RNA (1)...(19): siRNA sense strand
gagaagcugauaaaugcua

SEQ ID NO: 1743183 - RNA, 19 nt, Homo sapiens
  misc_RNA (1)...(19): siRNA sense strand
aagcguggcuacaucauug

SEQ ID NO: 1743184 - RNA, 19 nt, Homo sapiens
  misc_RNA (1)...(19): siRNA sense strand
gagcaagaauuugaacucu

SEQ ID NO: 1743185 - RNA, 19 nt, Homo sapiens
  misc_RNA (1)...(19): siRNA sense strand
auaaguccauugagaggua

SEQ ID NO: 1743186 - RNA, 19 nt, Homo sapiens
  misc_RNA (1)...(19): siRNA sense strand
gaauucauaaguccauuga

SEQ ID NO: 1743187 - RNA, 19 nt, Homo sapiens
  misc_RNA (1)...(19): siRNA sense strand
caagcgauuuguaggauca

SEQ ID NO: 1743188 - RNA, 19 nt, Homo sapiens
  misc_RNA (1)...(19): siRNA sense strand
acuaagcuauuaccacaaa

SEQ ID NO: 1743189 - RNA, 19 nt, Homo sapiens
  misc_RNA (1)...(19): siRNA sense strand
ccaguuccauugaggcauu

SEQ ID NO: 1743190 - RNA, 19 nt, Homo sapiens
  misc_RNA (1)...(19): siRNA sense strand
gaagguauuuuccuacguu

SEQ ID NO: 1743191 - RNA, 19 nt, Homo sapiens
  misc_RNA (1)...(19): siRNA sense strand
ggaaagcguggcuacauca

SEQ ID NO: 1743192 - RNA, 19 nt, Homo sapiens
  misc_RNA (1)...(19): siRNA sense strand
acgagaagcugauaaaugc

SEQ ID NO: 1743193 - RNA, 19 nt, Homo sapiens
  misc_RNA (1)...(19): siRNA sense strand
ggucagccacucacuggua

SEQ ID NO: 1743194 - RNA, 19 nt, Homo sapiens
  misc_RNA (1)...(19): siRNA sense strand
caacaaugaaagugaaaga

SEQ ID NO: 1743195 - RNA, 19 nt, Homo sapiens
  misc_RNA (1)...(19): siRNA sense strand
uguaaugaccaaacacaua

SEQ ID NO: 1743196 - RNA, 19 nt, Homo sapiens
  misc_RNA (1)...(19): siRNA sense strand
ugagagguaucacauucuu

SEQ ID NO: 1743197 - RNA, 19 nt, Homo sapiens
  misc_RNA (1)...(19): siRNA sense strand
ucacucugauguacccuuu

SEQ ID NO: 1743198 - RNA, 19 nt, Homo sapiens
  misc_RNA (1)...(19): siRNA sense strand
cagggaaggagcaucaaua

SEQ ID NO: 1743199 - RNA, 19 nt, Homo sapiens
  misc_RNA (1)...(19): siRNA sense strand
ggaggcgaauucauaaguc

SEQ ID NO: 1743200 - RNA, 19 nt, Homo sapiens
  misc_RNA (1)...(19): siRNA sense strand
acaagaagcucauuauccu

SEQ ID NO: 1743201 - RNA, 19 nt, Homo sapiens
  misc_RNA (1)...(19): siRNA sense strand
ucagcaaacuagagccaaa

SEQ ID NO: 1743202 - RNA, 19 nt, Homo sapiens
  misc_RNA (1)...(19): siRNA sense strand
gagguggcuuugaacaaga

SEQ ID NO: 1743203 - RNA, 19 nt, Homo sapiens
  misc_RNA (1)...(19): siRNA sense strand
ugacucacaucaaagagau

SEQ ID NO: 1743204 - RNA, 19 nt, Homo sapiens
  misc_RNA (1)...(19): siRNA sense strand
caguggaggcgaauucaua

SEQ ID NO: 1743205 - RNA, 19 nt, Homo sapiens
  misc_RNA (1)...(19): siRNA sense strand
ggaacagaaggaacugauu

SEQ ID NO: 1743206 - RNA, 19 nt, Homo sapiens
  misc_RNA (1)...(19): siRNA sense strand
auucauaaguccauugaga

SEQ ID NO: 1743207 - RNA, 19 nt, Homo sapiens
  misc_RNA (1)...(19): siRNA sense strand
ugaaagauguaaguugaag

SEQ ID NO: 1743208 - RNA, 19 nt, Homo sapiens
  misc_RNA (1)...(19): siRNA sense strand
ugaacaagaagcucauuau

SEQ ID NO: 1743209 - RNA, 19 nt, Homo sapiens
  misc_RNA (1)...(19): siRNA sense strand
ccucacaguuuggaacauu

SEQ ID NO: 1743210 - RNA, 19 nt, Homo sapiens
  misc_RNA (1)...(19): siRNA sense strand
gcaggcuggucacccauuc

SEQ ID NO: 1743211 - RNA, 19 nt, Homo sapiens
  misc_RNA (1)...(19): siRNA sense strand
ggaccgauggcucaguaaa

SEQ ID NO: 1743212 - RNA, 19 nt, Homo sapiens
  misc_RNA (1)...(19): siRNA sense strand
ucccaguacuaagcuauua

SEQ ID NO: 1743213 - RNA, 19 nt, Homo sapiens
  misc_RNA (1)...(19): siRNA sense strand
gggaaggagcaucaauauu

SEQ ID NO: 1743214 - RNA, 19 nt, Homo sapiens
  misc_RNA (1)...(19): siRNA sense strand
gcuugaauauagccaguuc

SEQ ID NO: 1743215 - RNA, 19 nt, Homo sapiens
  misc_RNA (1)...(19): siRNA sense strand
cgacagggaaggagcauca

SEQ ID NO: 1743216 - RNA, 19 nt, Homo sapiens
  misc_RNA (1)...(19): siRNA sense strand
cuaacuggcugacucacau

SEQ ID NO: 1743217 - RNA, 19 nt, Homo sapiens
  misc_RNA (1)...(19): siRNA sense strand
ugaccaaacacauaacaug

SEQ ID NO: 1743218 - RNA, 19 nt, Homo sapiens
  misc_RNA (1)...(19): siRNA sense strand
gcaaggaggacgagaagcu

SEQ ID NO: 1743219 - RNA, 19 nt, Homo sapiens
  misc_RNA (1)...(19): siRNA sense strand
auggaggaaugcuugaaua

SEQ ID NO: 1743220 - RNA, 19 nt, Homo sapiens
  misc_RNA (1)...(19): siRNA sense strand
gugaauggaggcuaagcua

SEQ ID NO: 1743221 - RNA, 19 nt, Homo sapiens
  misc_RNA (1)...(19): siRNA sense strand
cugaguaaauucaccaauc

SEQ ID NO: 1743222 - RNA, 19 nt, Homo sapiens
  misc_RNA (1)...(19): siRNA sense strand
accgauggcucaguaaauu

SEQ ID NO: 1743223 - RNA, 19 nt, Homo sapiens
  misc_RNA (1)...(19): siRNA sense strand
ggaagcuuguaaugaccaa

SEQ ID NO: 1743224 - RNA, 19 nt, Homo sapiens
  misc_RNA (1)...(19): siRNA sense strand
gcuccuccauucaaacauc

SEQ ID NO: 1743225 - RNA, 19 nt, Homo sapiens
  misc_RNA (1)...(19): siRNA sense strand
cguccuauguuugaaguga

SEQ ID NO: 1743226 - RNA, 19 nt, Homo sapiens
  misc_RNA (1)...(19): siRNA sense strand
uggguaccaucaucauaaa

SEQ ID NO: 1743227 - RNA, 19 nt, Homo sapiens
  misc_RNA (1)...(19): siRNA sense strand
ugauguacccuuucuuuua

SEQ ID NO: 1743228 - RNA, 19 nt, Homo sapiens
  misc_RNA (1)...(19): siRNA sense strand
acaaugaaagugaaagaug

SEQ ID NO: 1743229 - RNA, 19 nt, Homo sapiens
  misc_RNA (1)...(19): siRNA sense strand
ucaggagagcuuaaucaaa

SEQ ID NO: 1743230 - RNA, 19 nt, Homo sapiens
  misc_RNA (1)...(19): siRNA sense strand
gaagcucauuauccucagu

SEQ ID NO: 1743231 - RNA, 19 nt, Homo sapiens
  misc_RNA (1)...(19): siRNA sense strand
ggaauggaggaaugcuuga

SEQ ID NO: 1743232 - RNA, 19 nt, Homo sapiens
  misc_RNA (1)...(19): siRNA sense strand
ggacgagaagcugauaaau

SEQ ID NO: 1743233 - RNA, 19 nt, Homo sapiens
  misc_RNA (1)...(19): siRNA sense strand
ggaggacgagaagcugaua

SEQ ID NO: 1743234 - RNA, 19 nt, Homo sapiens
  misc_RNA (1)...(19): siRNA sense strand
caucaaagagauucugaca

SEQ ID NO: 1743235 - RNA, 19 nt, Homo sapiens
  misc_RNA (1)...(19): siRNA sense strand
ccucuaaguauuuggauga

SEQ ID NO: 1743236 - RNA, 19 nt, Homo sapiens
  misc_RNA (1)...(19): siRNA sense strand
gcuccuguauuucuucucu

SEQ ID NO: 1743237 - RNA, 19 nt, Homo sapiens
  misc_RNA (1)...(19): siRNA sense strand
gaggcuaagcuaugucaau

SEQ ID NO: 1743238 - RNA, 19 nt, Homo sapiens
  misc_RNA (1)...(19): siRNA sense strand
ggguuaaucagcccaguga

SEQ ID NO: 1743239 - RNA, 19 nt, Homo sapiens
  misc_RNA (1)...(19): siRNA sense strand
uguuugaagugauagaaga

SEQ ID NO: 1743240 - RNA, 19 nt, Homo sapiens
  misc_RNA (1)...(19): siRNA sense strand
ggaguuugcggagcugauu

SEQ ID NO: 1743241 - RNA, 19 nt, Homo sapiens
  misc_RNA (1)...(19): siRNA sense strand
uugcggagcugauuaagac

SEQ ID NO: 1743242 - RNA, 19 nt, Homo sapiens
  misc_RNA (1)...(19): siRNA sense strand
aaagagauucugacaacug

SEQ ID NO: 1743243 - RNA, 19 nt, Homo sapiens
  misc_RNA (1)...(19): siRNA sense strand
gaaggaagguuugcugaaa

SEQ ID NO: 1743244 - RNA, 19 nt, Homo sapiens
  misc_RNA (1)...(19): siRNA sense strand
ggaagaccauggauauuga

SEQ ID NO: 1743245 - RNA, 19 nt, Homo sapiens
  misc_RNA (1)...(19): siRNA sense strand
ggaagaagauugagaccau

SEQ ID NO: 1743246 - RNA, 19 nt, Homo sapiens
  misc_RNA (1)...(19): siRNA sense strand
gaagagaauuacccagaga

SEQ ID NO: 1743247 - RNA, 19 nt, Homo sapiens
  misc_RNA (1)...(19): siRNA sense strand
uaaccaagauuaacuaugg

SEQ ID NO: 1743248 - RNA, 19 nt, Homo sapiens
  misc_RNA (1)...(19): siRNA sense strand
ggaaaccucugguagaagu

SEQ ID NO: 1743249 - RNA, 19 nt, Homo sapiens
  misc_RNA (1)...(19): siRNA sense strand
cgacaacaccuauagcuuu

SEQ ID NO: 1743250 - RNA, 19 nt, Homo sapiens
  misc_RNA (1)...(19): siRNA sense strand
gcccaacccugaugauuau

SEQ ID NO: 1743251 - RNA, 19 nt, Homo sapiens
  misc_RNA (1)...(19): siRNA sense strand
ggacaucggcuucggaguu

SEQ ID NO: 1743252 - RNA, 19 nt, Homo sapiens
  misc_RNA (1)...(19): siRNA sense strand
gacaacaccuauagcuuug

SEQ ID NO: 1743253 - RNA, 19 nt, Homo sapiens
  misc_RNA (1)...(19): siRNA sense strand
cagaggugauccagaagua

SEQ ID NO: 1743254 - RNA, 19 nt, Homo sapiens
  misc_RNA (1)...(19): siRNA sense strand
ggagaugacagauguucua

SEQ ID NO: 1743255 - RNA, 19 nt, Homo sapiens
  misc_RNA (1)...(19): siRNA sense strand
gacaucggcuucggaguuu

SEQ ID NO: 1743256 - RNA, 19 nt, Homo sapiens
  misc_RNA (1)...(19): siRNA sense strand
cagagacccuggccaaguu

SEQ ID NO: 1743257 - RNA, 19 nt, Homo sapiens
  misc_RNA (1)...(19): siRNA sense strand
cgugaaagcuaccaaacug

SEQ ID NO: 1743258 - RNA, 19 nt, Homo sapiens
  misc_RNA (1)...(19): siRNA sense strand
ugaggacacucgcaggaaa

SEQ ID NO: 1743259 - RNA, 19 nt, Homo sapiens
  misc_RNA (1)...(19): siRNA sense strand
gguggcaguucucaucuga

SEQ ID NO: 1743260 - RNA, 19 nt, Homo sapiens
  misc_RNA (1)...(19): siRNA sense strand
ccaaauguuuaaccaagau

SEQ ID NO: 1743261 - RNA, 19 nt, Homo sapiens
  misc_RNA (1)...(19): siRNA sense strand
ggaaggaagguuugcugaa

SEQ ID NO: 1743262 - RNA, 19 nt, Homo sapiens
  misc_RNA (1)...(19): siRNA sense strand
acgagggcaugcagaaaua

SEQ ID NO: 1743263 - RNA, 19 nt, Homo sapiens
  misc_RNA (1)...(19): siRNA sense strand
caucacaccaaguggaaua

SEQ ID NO: 1743264 - RNA, 19 nt, Homo sapiens
  misc_RNA (1)...(19): siRNA sense strand
gcaugcagaaauaugauaa

SEQ ID NO: 1743265 - RNA, 19 nt, Homo sapiens
  misc_RNA (1)...(19): siRNA sense strand
caacccugaugauuauuuc

SEQ ID NO: 1743266 - RNA, 19 nt, Homo sapiens
  misc_RNA (1)...(19): siRNA sense strand
gagaaaacguccaggaugu

SEQ ID NO: 1743267 - RNA, 19 nt, Homo sapiens
  misc_RNA (1)...(19): siRNA sense strand
cagagaggcuagggaagaa

SEQ ID NO: 1743268 - RNA, 19 nt, Homo sapiens
  misc_RNA (1)...(19): siRNA sense strand
gcaggaaaauuauuguguu

SEQ ID NO: 1743269 - RNA, 19 nt, Homo sapiens
  misc_RNA (1)...(19): siRNA sense strand
gggaccaggugaagacuca

SEQ ID NO: 1743270 - RNA, 19 nt, Homo sapiens
  misc_RNA (1)...(19): siRNA sense strand
ggguugcucuucucaguca

SEQ ID NO: 1743271 - RNA, 19 nt, Homo sapiens
  misc_RNA (1)...(19): siRNA sense strand
gaaagcuaccaaacuguuc

SEQ ID NO: 1743272 - RNA, 19 nt, Homo sapiens
  misc_RNA (1)...(19): siRNA sense strand
cuggaaaccucugguagaa

SEQ ID NO: 1743273 - RNA, 19 nt, Homo sapiens
  misc_RNA (1)...(19): siRNA sense strand
caacaccuauagcuuuguc

SEQ ID NO: 1743274 - RNA, 19 nt, Homo sapiens
  misc_RNA (1)...(19): siRNA sense strand
gcagagacccuggccaagu

SEQ ID NO: 1743275 - RNA, 19 nt, Homo sapiens
  misc_RNA (1)...(19): siRNA sense strand
gaugauuauuuccuucuac

SEQ ID NO: 1743276 - RNA, 19 nt, Homo sapiens
  misc_RNA (1)...(19): siRNA sense strand
cggaagaccauggauauug

SEQ ID NO: 1743277 - RNA, 19 nt, Homo sapiens
  misc_RNA (1)...(19): siRNA sense strand
ugaagccauuccugaguga

SEQ ID NO: 1743278 - RNA, 19 nt, Homo sapiens
  misc_RNA (1)...(19): siRNA sense strand
gagcgcauccugcaugagu

SEQ ID NO: 1743279 - RNA, 19 nt, Homo sapiens
  misc_RNA (1)...(19): siRNA sense strand
ugcccaacccugaugauua

SEQ ID NO: 1743280 - RNA, 19 nt, Homo sapiens
  misc_RNA (1)...(19): siRNA sense strand
ugaaagcuaccaaacuguu

SEQ ID NO: 1743281 - RNA, 19 nt, Homo sapiens
  misc_RNA (1)...(19): siRNA sense strand
agugugaccugcagacaga

SEQ ID NO: 1743282 - RNA, 19 nt, Homo sapiens
  misc_RNA (1)...(19): siRNA sense strand
gacgagggcaugcagaaau

SEQ ID NO: 1743283 - RNA, 19 nt, Homo sapiens
  misc_RNA (1)...(19): siRNA sense strand
gacacucgcaggaaaauua

SEQ ID NO: 1743284 - RNA, 19 nt, Homo sapiens
  misc_RNA (1)...(19): siRNA sense strand
gcagaagucggaggcuuug

SEQ ID NO: 1743285 - RNA, 19 nt, Homo sapiens
  misc_RNA (1)...(19): siRNA sense strand
gugagcgcauccugcauga

SEQ ID NO: 1743286 - RNA, 19 nt, Homo sapiens
  misc_RNA (1)...(19): siRNA sense strand
uaacuggaaggaagguuug

SEQ ID NO: 1743287 - RNA, 19 nt, Homo sapiens
  misc_RNA (1)...(19): siRNA sense strand
ccaacccugaugauuauuu

SEQ ID NO: 1743288 - RNA, 19 nt, Homo sapiens
  misc_RNA (1)...(19): siRNA sense strand
gagaggcuagggaagaaga

SEQ ID NO: 1743289 - RNA, 19 nt, Homo sapiens
  misc_RNA (1)...(19): siRNA sense strand
cugaaacacuucuggaaac

SEQ ID NO: 1743290 - RNA, 19 nt, Homo sapiens
  misc_RNA (1)...(19): siRNA sense strand
ccaagaugagggacuguga

SEQ ID NO: 1743291 - RNA, 19 nt, Homo sapiens
  misc_RNA (1)...(19): siRNA sense strand
cccaaauguuuaaccaaga

SEQ ID NO: 1743292 - RNA, 19 nt, Homo sapiens
  misc_RNA (1)...(19): siRNA sense strand
gaggugauccagaaguaca

SEQ ID NO: 1743293 - RNA, 19 nt, Homo sapiens
  misc_RNA (1)...(19): siRNA sense strand
cuacccagccagcgcuaua

SEQ ID NO: 1743294 - RNA, 19 nt, Homo sapiens
  misc_RNA (1)...(19): siRNA sense strand
ccaaguggaauacgagauc

SEQ ID NO: 1743295 - RNA, 19 nt, Homo sapiens
  misc_RNA (1)...(19): siRNA sense strand
uacauggaguuccggaaga

SEQ ID NO: 1743296 - RNA, 19 nt, Homo sapiens
  misc_RNA (1)...(19): siRNA sense strand
gacugaaacacuucuggaa

SEQ ID NO: 1743297 - RNA, 19 nt, Homo sapiens
  misc_RNA (1)...(19): siRNA sense strand
guucucagguggcaguucu

SEQ ID NO: 1743298 - RNA, 19 nt, Homo sapiens
  misc_RNA (1)...(19): siRNA sense strand
ggcaugcagaaauaugaua

SEQ ID NO: 1743299 - RNA, 19 nt, Homo sapiens
  misc_RNA (1)...(19): siRNA sense strand
ugacaucauugggccacuu

SEQ ID NO: 1743300 - RNA, 19 nt, Homo sapiens
  misc_RNA (1)...(19): siRNA sense strand
guccuacgcuucgacaaca

SEQ ID NO: 1743301 - RNA, 19 nt, Homo sapiens
  misc_RNA (1)...(19): siRNA sense strand
ugaugauauuugacuguga

SEQ ID NO: 1743302 - RNA, 19 nt, Homo sapiens
  misc_RNA (1)...(19): siRNA sense strand
acagagaggcuagggaaga

SEQ ID NO: 1743303 - RNA, 19 nt, Homo sapiens
  misc_RNA (1)...(19): siRNA sense strand
gccugggacugaaacacuu

SEQ ID NO: 1743304 - RNA, 19 nt, Homo sapiens
  misc_RNA (1)...(19): siRNA sense strand
acccagagacccugaaguu

SEQ ID NO: 1743305 - RNA, 19 nt, Homo sapiens
  misc_RNA (1)...(19): siRNA sense strand
gugagggccugggacugaa

SEQ ID NO: 1743306 - RNA, 19 nt, Homo sapiens
  misc_RNA (1)...(19): siRNA sense strand
gcuauaacgcccacauggu

SEQ ID NO: 1743307 - RNA, 19 nt, Homo sapiens
  misc_RNA (1)...(19): siRNA sense strand
uugaccauauccuugauug

SEQ ID NO: 1743308 - RNA, 19 nt, Homo sapiens
  misc_RNA (1)...(19): siRNA sense strand
gagggcaugcagaaauaug

SEQ ID NO: 1743309 - RNA, 19 nt, Homo sapiens
  misc_RNA (1)...(19): siRNA sense strand
ucagguggcaguucucauc

SEQ ID NO: 1743310 - RNA, 19 nt, Homo sapiens
  misc_RNA (1)...(19): siRNA sense strand
caggaaaauuauuguguug

SEQ ID NO: 1743311 - RNA, 19 nt, Homo sapiens
  misc_RNA (1)...(19): siRNA sense strand
acugaaacacuucuggaaa

SEQ ID NO: 1743312 - RNA, 19 nt, Homo sapiens
  misc_RNA (1)...(19): siRNA sense strand
gaccugcucaagaccaaga

SEQ ID NO: 1743313 - RNA, 19 nt, Homo sapiens
  misc_RNA (1)...(19): siRNA sense strand
caucgugaaagcuaccaaa

SEQ ID NO: 1743314 - RNA, 19 nt, Homo sapiens
  misc_RNA (1)...(19): siRNA sense strand
ggcuagggaagaagauuga

SEQ ID NO: 1743315 - RNA, 19 nt, Homo sapiens
  misc_RNA (1)...(19): siRNA sense strand
caggggagaugacagaugu

SEQ ID NO: 1743316 - RNA, 19 nt, Homo sapiens
  misc_RNA (1)...(19): siRNA sense strand
cacccugacugacccagau

SEQ ID NO: 1743317 - RNA, 19 nt, Homo sapiens
  misc_RNA (1)...(19): siRNA sense strand
gggcuacaaccucaugaag

SEQ ID NO: 1743318 - RNA, 19 nt, Homo sapiens
  misc_RNA (1)...(19): siRNA sense strand
guucuuuggccuccuugaa

SEQ ID NO: 1743319 - RNA, 19 nt, Homo sapiens
  misc_RNA (1)...(19): siRNA sense strand
cacaccaaguggaauacga

SEQ ID NO: 1743320 - RNA, 19 nt, Homo sapiens
  misc_RNA (1)...(19): siRNA sense strand
gggaaauaacuggaaggaa

SEQ ID NO: 1743321 - RNA, 19 nt, Homo sapiens
  misc_RNA (1)...(19): siRNA sense strand
ccccagaggugauccagaa

SEQ ID NO: 1743322 - RNA, 19 nt, Homo sapiens
  misc_RNA (1)...(19): siRNA sense strand
gcugcgagcucgaaacuuu

SEQ ID NO: 1743323 - RNA, 19 nt, Homo sapiens
  misc_RNA (1)...(19): siRNA sense strand
gcagaaauccgaagacaug

SEQ ID NO: 1743324 - RNA, 19 nt, Homo sapiens
  misc_RNA (1)...(19): siRNA sense strand
gcaggaagauugugauucu

SEQ ID NO: 1743325 - RNA, 19 nt, Homo sapiens
  misc_RNA (1)...(19): siRNA sense strand
cugagacccugaagaauuu

SEQ ID NO: 1743326 - RNA, 19 nt, Homo sapiens
  misc_RNA (1)...(19): siRNA sense strand
ccaagugccugaccaagau

SEQ ID NO: 1743327 - RNA, 19 nt, Homo sapiens
  misc_RNA (1)...(19): siRNA sense strand
ucaagucguucaugaguga

SEQ ID NO: 1743328 - RNA, 19 nt, Homo sapiens
  misc_RNA (1)...(19): siRNA sense strand
gaagcaaauuauccugaga

SEQ ID NO: 1743329 - RNA, 19 nt, Homo sapiens
  misc_RNA (1)...(19): siRNA sense strand
ugaccaagaucaacuaugg

SEQ ID NO: 1743330 - RNA, 19 nt, Homo sapiens
  misc_RNA (1)...(19): siRNA sense strand
ggaagcaggagcugacaaa

SEQ ID NO: 1743331 - RNA, 19 nt, Homo sapiens
  misc_RNA (1)...(19): siRNA sense strand
gcaguuugcuucagauggu

SEQ ID NO: 1743332 - RNA, 19 nt, Homo sapiens
  misc_RNA (1)...(19): siRNA sense strand
gcagagugcuagggagaug

SEQ ID NO: 1743333 - RNA, 19 nt, Homo sapiens
  misc_RNA (1)...(19): siRNA sense strand
gagcugcuguugcaugagu

SEQ ID NO: 1743334 - RNA, 19 nt, Homo sapiens
  misc_RNA (1)...(19): siRNA sense strand
gaggagacacgcaggaaga

SEQ ID NO: 1743335 - RNA, 19 nt, Homo sapiens
  misc_RNA (1)...(19): siRNA sense strand
gcgcuacaaugcccacaug

SEQ ID NO: 1743336 - RNA, 19 nt, Homo sapiens
  misc_RNA (1)...(19): siRNA sense strand
gagacacgcaggaagauug

SEQ ID NO: 1743337 - RNA, 19 nt, Homo sapiens
  misc_RNA (1)...(19): siRNA sense strand
ccugagacccugaagaauu

SEQ ID NO: 1743338 - RNA, 19 nt, Homo sapiens
  misc_RNA (1)...(19): siRNA sense strand
gcccaaugcugaugacuac

SEQ ID NO: 1743339 - RNA, 19 nt, Homo sapiens
  misc_RNA (1)...(19): siRNA sense strand
gugagcugcuguugcauga

SEQ ID NO: 1743340 - RNA, 19 nt, Homo sapiens
  misc_RNA (1)...(19): siRNA sense strand
gugcucagguggcaguuug

SEQ ID NO: 1743341 - RNA, 19 nt, Homo sapiens
  misc_RNA (1)...(19): siRNA sense strand
aggaagcgcuggccagguu

SEQ ID NO: 1743342 - RNA, 19 nt, Homo sapiens
  misc_RNA (1)...(19): siRNA sense strand
aacaagaccuggacaacau

SEQ ID NO: 1743343 - RNA, 19 nt, Homo sapiens
  misc_RNA (1)...(19): siRNA sense strand
gguggcaguuugcuucaga

SEQ ID NO: 1743344 - RNA, 19 nt, Homo sapiens
  misc_RNA (1)...(19): siRNA sense strand
caacaagaccuggacaaca

SEQ ID NO: 1743345 - RNA, 19 nt, Homo sapiens
  misc_RNA (1)...(19): siRNA sense strand
ccagcugccuguggaguuu

SEQ ID NO: 1743346 - RNA, 19 nt, Homo sapiens
  misc_RNA (1)...(19): siRNA sense strand
ugacucggguggucuuugu

SEQ ID NO: 1743347 - RNA, 19 nt, Homo sapiens
  misc_RNA (1)...(19): siRNA sense strand
uacgaaggcugcccugugu

SEQ ID NO: 1743348 - RNA, 19 nt, Homo sapiens
  misc_RNA (1)...(19): siRNA sense strand
ggaggucuaccagcaguuu

SEQ ID NO: 1743349 - RNA, 19 nt, Homo sapiens
  misc_RNA (1)...(19): siRNA sense strand
aggugaggcugcaguauga

SEQ ID NO: 1743350 - RNA, 19 nt, Homo sapiens
  misc_RNA (1)...(19): siRNA sense strand
caaugcugaugacuacuuc

SEQ ID NO: 1743351 - RNA, 19 nt, Homo sapiens
  misc_RNA (1)...(19): siRNA sense strand
ucugugagcugcuguugca

SEQ ID NO: 1743352 - RNA, 19 nt, Homo sapiens
  misc_RNA (1)...(19): siRNA sense strand
ggucaagucguucaugagu

SEQ ID NO: 1743353 - RNA, 19 nt, Homo sapiens
  misc_RNA (1)...(19): siRNA sense strand
agauggcgcugaugguguu

SEQ ID NO: 1743354 - RNA, 19 nt, Homo sapiens
  misc_RNA (1)...(19): siRNA sense strand
gaaacuuugaccugcagaa

SEQ ID NO: 1743355 - RNA, 19 nt, Homo sapiens
  misc_RNA (1)...(19): siRNA sense strand
ccuguguacuucaacauca

SEQ ID NO: 1743356 - RNA, 19 nt, Homo sapiens
  misc_RNA (1)...(19): siRNA sense strand
ggagacacgcaggaagauu

SEQ ID NO: 1743357 - RNA, 19 nt, Homo sapiens
  misc_RNA (1)...(19): siRNA sense strand
gcaugagugugagcugcaa

SEQ ID NO: 1743358 - RNA, 19 nt, Homo sapiens
  misc_RNA (1)...(19): siRNA sense strand
agcaggagcugacaaaauu

SEQ ID NO: 1743359 - RNA, 19 nt, Homo sapiens
  misc_RNA (1)...(19): siRNA sense strand
ccaaugcugaugacuacuu

SEQ ID NO: 1743360 - RNA, 19 nt, Homo sapiens
  misc_RNA (1)...(19): siRNA sense strand
acuuugaccugcagaaauc

SEQ ID NO: 1743361 - RNA, 19 nt, Homo sapiens
  misc_RNA (1)...(19): siRNA sense strand
gugaggugcccaagagcua

SEQ ID NO: 1743362 - RNA, 19 nt, Homo sapiens
  misc_RNA (1)...(19): siRNA sense strand
gauccggaagcgcaucaaa

SEQ ID NO: 1743363 - RNA, 19 nt, Homo sapiens
  misc_RNA (1)...(19): siRNA sense strand
aaacuuugaccugcagaaa

SEQ ID NO: 1743364 - RNA, 19 nt, Homo sapiens
  misc_RNA (1)...(19): siRNA sense strand
guucaugagugaggagaca

SEQ ID NO: 1743365 - RNA, 19 nt, Homo sapiens
  misc_RNA (1)...(19): siRNA sense strand
cucagaagcugggcaggaa

SEQ ID NO: 1743366 - RNA, 19 nt, Homo sapiens
  misc_RNA (1)...(19): siRNA sense strand
gcaacaagaccuggacaac

SEQ ID NO: 1743367 - RNA, 19 nt, Homo sapiens
  misc_RNA (1)...(19): siRNA sense strand
gcugaugguguuugacaug

SEQ ID NO: 1743368 - RNA, 19 nt, Homo sapiens
  misc_RNA (1)...(19): siRNA sense strand
gaggucauccagcuguaug

SEQ ID NO: 1743369 - RNA, 19 nt, Homo sapiens
  misc_RNA (1)...(19): siRNA sense strand
caggugaggcugcaguaug

SEQ ID NO: 1743370 - RNA, 19 nt, Homo sapiens
  misc_RNA (1)...(19): siRNA sense strand
cauccuggaagcaaauuau

SEQ ID NO: 1743371 - RNA, 19 nt, Homo sapiens
  misc_RNA (1)...(19): siRNA sense strand
gcauccuggaagcaaauua

SEQ ID NO: 1743372 - RNA, 19 nt, Homo sapiens
  misc_RNA (1)...(19): siRNA sense strand
gcgcugaugguguuugaca

SEQ ID NO: 1743373 - RNA, 19 nt, Homo sapiens
  misc_RNA (1)...(19): siRNA sense strand
caagaccuggacaacauug

SEQ ID NO: 1743374 - RNA, 19 nt, Homo sapiens
  misc_RNA (1)...(19): siRNA sense strand
guccugcgcuucgacaaca

SEQ ID NO: 1743375 - RNA, 19 nt, Homo sapiens
  misc_RNA (1)...(19): siRNA sense strand
cugcagaaauccgaagaca

SEQ ID NO: 1743376 - RNA, 19 nt, Homo sapiens
  misc_RNA (1)...(19): siRNA sense strand
uuggucaagucguucauga

SEQ ID NO: 1743377 - RNA, 19 nt, Homo sapiens
  misc_RNA (1)...(19): siRNA sense strand
uuagcauccuggaagcaaa

SEQ ID NO: 1743378 - RNA, 19 nt, Homo sapiens
  misc_RNA (1)...(19): siRNA sense strand
cggaagcgcaucaaagucu

SEQ ID NO: 1743379 - RNA, 19 nt, Homo sapiens
  misc_RNA (1)...(19): siRNA sense strand
cagaagcugggcaggaaga

SEQ ID NO: 1743380 - RNA, 19 nt, Homo sapiens
  misc_RNA (1)...(19): siRNA sense strand
ccggaugcaugccaagaag

SEQ ID NO: 1743381 - RNA, 19 nt, Homo sapiens
  misc_RNA (1)...(19): siRNA sense strand
gcagguggagaacgagauc

SEQ ID NO: 1743382 - RNA, 19 nt, Homo sapiens
  misc_RNA (1)...(19): siRNA sense strand
acacgcaggaagauuguga

SEQ ID NO: 1743383 - RNA, 19 nt, Homo sapiens
  misc_RNA (1)...(19): siRNA sense strand
gagacccugaagaauuuaa

SEQ ID NO: 1743384 - RNA, 19 nt, Homo sapiens
  misc_RNA (1)...(19): siRNA sense strand
uggcgcugaugguguuuga

SEQ ID NO: 1743385 - RNA, 19 nt, Homo sapiens
  misc_RNA (1)...(19): siRNA sense strand
gacaucggcuuugggguuu

SEQ ID NO: 1743386 - RNA, 19 nt, Homo sapiens
  misc_RNA (1)...(19): siRNA sense strand
ccacauggugccugaggau

SEQ ID NO: 1743387 - RNA, 19 nt, Homo sapiens
  misc_RNA (1)...(19): siRNA sense strand
gaagcgcaucaaagucugu

SEQ ID NO: 1743388 - RNA, 19 nt, Homo sapiens
  misc_RNA (1)...(19): siRNA sense strand
cccaagugccugaccaaga

SEQ ID NO: 1743389 - RNA, 19 nt, Homo sapiens
  misc_RNA (1)...(19): siRNA sense strand
ggugaaagcucgcgucauc

SEQ ID NO: 1743390 - RNA, 19 nt, Homo sapiens
  misc_RNA (1)...(19): siRNA sense strand
guuccuggaugacuccuuu

SEQ ID NO: 1743391 - RNA, 19 nt, Homo sapiens
  misc_RNA (1)...(19): siRNA sense strand
ucuaagcaguggcaucuga

SEQ ID NO: 1743392 - RNA, 19 nt, Homo sapiens
  misc_RNA (1)...(19): siRNA sense strand
ugaauuagccaccaaguac

SEQ ID NO: 1743393 - RNA, 19 nt, Homo sapiens
  misc_RNA (1)...(19): siRNA sense strand
uccugaaucuggacucuaa

SEQ ID NO: 1743394 - RNA, 19 nt, Homo sapiens
  misc_RNA (1)...(19): siRNA sense strand
gaugacuccuuucgcaagu

SEQ ID NO: 1743395 - RNA, 19 nt, Homo sapiens
  misc_RNA (1)...(19): siRNA sense strand
gggaguucgugccgccuuu

SEQ ID NO: 1743396 - RNA, 19 nt, Homo sapiens
  misc_RNA (1)...(19): siRNA sense strand
cacaauauccagcgagaga

SEQ ID NO: 1743397 - RNA, 19 nt, Homo sapiens
  misc_RNA (1)...(19): siRNA sense strand
gaucuaagcaguggcaucu

SEQ ID NO: 1743398 - RNA, 19 nt, Homo sapiens
  misc_RNA (1)...(19): siRNA sense strand
caauauccagcgagagaaa

SEQ ID NO: 1743399 - RNA, 19 nt, Homo sapiens
  misc_RNA (1)...(19): siRNA sense strand
gggcuagaauccgggaguu

SEQ ID NO: 1743400 - RNA, 19 nt, Homo sapiens
  misc_RNA (1)...(19): siRNA sense strand
ccagcgagagaaagaguuu

SEQ ID NO: 1743401 - RNA, 19 nt, Homo sapiens
  misc_RNA (1)...(19): siRNA sense strand
caagccagcacccauguuc

SEQ ID NO: 1743402 - RNA, 19 nt, Homo sapiens
  misc_RNA (1)...(19): siRNA sense strand
cguggaagcuacacuuacu

SEQ ID NO: 1743403 - RNA, 19 nt, Homo sapiens
  misc_RNA (1)...(19): siRNA sense strand
aagcucgcgucaucacuga

SEQ ID NO: 1743404 - RNA, 19 nt, Homo sapiens
  misc_RNA (1)...(19): siRNA sense strand
cugaauuagccaccaagua

SEQ ID NO: 1743405 - RNA, 19 nt, Homo sapiens
  misc_RNA (1)...(19): siRNA sense strand
gcuagcccucugccucuuu

SEQ ID NO: 1743406 - RNA, 19 nt, Homo sapiens
  misc_RNA (1)...(19): siRNA sense strand
uguauuauucugcguggaa

SEQ ID NO: 1743407 - RNA, 19 nt, Homo sapiens
  misc_RNA (1)...(19): siRNA sense strand
ugcggaagcuggugaaagc

SEQ ID NO: 1743408 - RNA, 19 nt, Homo sapiens
  misc_RNA (1)...(19): siRNA sense strand
ggugaaagcucgcgucauc

SEQ ID NO: 1743409 - RNA, 19 nt, Homo sapiens
  misc_RNA (1)...(19): siRNA sense strand
guuccuggaugacuccuuu

SEQ ID NO: 1743410 - RNA, 19 nt, Homo sapiens
  misc_RNA (1)...(19): siRNA sense strand
ucuaagcaguggcaucuga

SEQ ID NO: 1743411 - RNA, 19 nt, Homo sapiens
  misc_RNA (1)...(19): siRNA sense strand
ugaauuagccaccaaguac

SEQ ID NO: 1743412 - RNA, 19 nt, Homo sapiens
  misc_RNA (1)...(19): siRNA sense strand
uccugaaucuggacucuaa

SEQ ID NO: 1743413 - RNA, 19 nt, Homo sapiens
  misc_RNA (1)...(19): siRNA sense strand
gaugacuccuuucgcaagu

SEQ ID NO: 1743414 - RNA, 19 nt, Homo sapiens
  misc_RNA (1)...(19): siRNA sense strand
gggaguucgugccgccuuu

SEQ ID NO: 1743415 - RNA, 19 nt, Homo sapiens
  misc_RNA (1)...(19): siRNA sense strand
cacaauauccagcgagaga

SEQ ID NO: 1743416 - RNA, 19 nt, Homo sapiens
  misc_RNA (1)...(19): siRNA sense strand
gaucuaagcaguggcaucu

SEQ ID NO: 1743417 - RNA, 19 nt, Homo sapiens
  misc_RNA (1)...(19): siRNA sense strand
caauauccagcgagagaaa

SEQ ID NO: 1743418 - RNA, 19 nt, Homo sapiens
  misc_RNA (1)...(19): siRNA sense strand
gggcuagaauccgggaguu

SEQ ID NO: 1743419 - RNA, 19 nt, Homo sapiens
  misc_RNA (1)...(19): siRNA sense strand
ccagcgagagaaagaguuu

SEQ ID NO: 1743420 - RNA, 19 nt, Homo sapiens
  misc_RNA (1)...(19): siRNA sense strand
caagccagcacccauguuc

SEQ ID NO: 1743421 - RNA, 19 nt, Homo sapiens
  misc_RNA (1)...(19): siRNA sense strand
cguggaagcuacacuuacu

SEQ ID NO: 1743422 - RNA, 19 nt, Homo sapiens
  misc_RNA (1)...(19): siRNA sense strand
aagcucgcgucaucacuga

SEQ ID NO: 1743423 - RNA, 19 nt, Homo sapiens
  misc_RNA (1)...(19): siRNA sense strand
cugaauuagccaccaagua

SEQ ID NO: 1743424 - RNA, 19 nt, Homo sapiens
  misc_RNA (1)...(19): siRNA sense strand
gcuagcccucugccucuuu

SEQ ID NO: 1743425 - RNA, 19 nt, Homo sapiens
  misc_RNA (1)...(19): siRNA sense strand
uguauuauucugcguggaa

SEQ ID NO: 1743426 - RNA, 19 nt, Homo sapiens
  misc_RNA (1)...(19): siRNA sense strand
ugcggaagcuggugaaagc

SEQ ID NO: 1743427 - RNA, 19 nt, Homo sapiens
  misc_RNA (1)...(19): siRNA sense strand
ggugaaagcucgcgucauc

SEQ ID NO: 1743428 - RNA, 19 nt, Homo sapiens
  misc_RNA (1)...(19): siRNA sense strand
guuccuggaugacuccuuu

SEQ ID NO: 1743429 - RNA, 19 nt, Homo sapiens
  misc_RNA (1)...(19): siRNA sense strand
ucuaagcaguggcaucuga

SEQ ID NO: 1743430 - RNA, 19 nt, Homo sapiens
  misc_RNA (1)...(19): siRNA sense strand
ugaauuagccaccaaguac

SEQ ID NO: 1743431 - RNA, 19 nt, Homo sapiens
  misc_RNA (1)...(19): siRNA sense strand
uccugaaucuggacucuaa

SEQ ID NO: 1743432 - RNA, 19 nt, Homo sapiens
  misc_RNA (1)...(19): siRNA sense strand
gaugacuccuuucgcaagu

SEQ ID NO: 1743433 - RNA, 19 nt, Homo sapiens
  misc_RNA (1)...(19): siRNA sense strand
gggaguucgugccgccuuu

SEQ ID NO: 1743434 - RNA, 19 nt, Homo sapiens
  misc_RNA (1)...(19): siRNA sense strand
cacaauauccagcgagaga

SEQ ID NO: 1743435 - RNA, 19 nt, Homo sapiens
  misc_RNA (1)...(19): siRNA sense strand
gaucuaagcaguggcaucu

SEQ ID NO: 1743436 - RNA, 19 nt, Homo sapiens
  misc_RNA (1)...(19): siRNA sense strand
caauauccagcgagagaaa

SEQ ID NO: 1743437 - RNA, 19 nt, Homo sapiens
  misc_RNA (1)...(19): siRNA sense strand
gggcuagaauccgggaguu

SEQ ID NO: 1743438 - RNA, 19 nt, Homo sapiens
  misc_RNA (1)...(19): siRNA sense strand
ccagcgagagaaagaguuu

SEQ ID NO: 1743439 - RNA, 19 nt, Homo sapiens
  misc_RNA (1)...(19): siRNA sense strand
caagccagcacccauguuc

SEQ ID NO: 1743440 - RNA, 19 nt, Homo sapiens
  misc_RNA (1)...(19): siRNA sense strand
cguggaagcuacacuuacu

SEQ ID NO: 1743441 - RNA, 19 nt, Homo sapiens
  misc_RNA (1)...(19): siRNA sense strand
aagcucgcgucaucacuga

SEQ ID NO: 1743442 - RNA, 19 nt, Homo sapiens
  misc_RNA (1)...(19): siRNA sense strand
cugaauuagccaccaagua

SEQ ID NO: 1743443 - RNA, 19 nt, Homo sapiens
  misc_RNA (1)...(19): siRNA sense strand
gcuagcccucugccucuuu

SEQ ID NO: 1743444 - RNA, 19 nt, Homo sapiens
  misc_RNA (1)...(19): siRNA sense strand
uguauuauucugcguggaa

SEQ ID NO: 1743445 - RNA, 19 nt, Homo sapiens
  misc_RNA (1)...(19): siRNA sense strand
ugcggaagcuggugaaagc

SEQ ID NO: 1743446 - RNA, 19 nt, Homo sapiens
  misc_RNA (1)...(19): siRNA sense strand
ggugaaagcucgcgucauc

SEQ ID NO: 1743447 - RNA, 19 nt, Homo sapiens
  misc_RNA (1)...(19): siRNA sense strand
guuccuggaugacuccuuu

SEQ ID NO: 1743448 - RNA, 19 nt, Homo sapiens
  misc_RNA (1)...(19): siRNA sense strand
ugaauuagccaccaaguac

SEQ ID NO: 1743449 - RNA, 19 nt, Homo sapiens
  misc_RNA (1)...(19): siRNA sense strand
uccugaaucuggacucuaa

SEQ ID NO: 1743450 - RNA, 19 nt, Homo sapiens
  misc_RNA (1)...(19): siRNA sense strand
gaugacuccuuucgcaagu

SEQ ID NO: 1743451 - RNA, 19 nt, Homo sapiens
  misc_RNA (1)...(19): siRNA sense strand
gggaguucgugccgccuuu

SEQ ID NO: 1743452 - RNA, 19 nt, Homo sapiens
  misc_RNA (1)...(19): siRNA sense strand
cacaauauccagcgagaga

SEQ ID NO: 1743453 - RNA, 19 nt, Homo sapiens
  misc_RNA (1)...(19): siRNA sense strand
caauauccagcgagagaaa

SEQ ID NO: 1743454 - RNA, 19 nt, Homo sapiens
  misc_RNA (1)...(19): siRNA sense strand
gggcuagaauccgggaguu

SEQ ID NO: 1743455 - RNA, 19 nt, Homo sapiens
  misc_RNA (1)...(19): siRNA sense strand
ccagcgagagaaagaguuu

SEQ ID NO: 1743456 - RNA, 19 nt, Homo sapiens
  misc_RNA (1)...(19): siRNA sense strand
caagccagcacccauguuc

SEQ ID NO: 1743457 - RNA, 19 nt, Homo sapiens
  misc_RNA (1)...(19): siRNA sense strand
cguggaagcuacacuuacu

SEQ ID NO: 1743458 - RNA, 19 nt, Homo sapiens
  misc_RNA (1)...(19): siRNA sense strand
aagcucgcgucaucacuga

SEQ ID NO: 1743459 - RNA, 19 nt, Homo sapiens
  misc_RNA (1)...(19): siRNA sense strand
cugaauuagccaccaagua

SEQ ID NO: 1743460 - RNA, 19 nt, Homo sapiens
  misc_RNA (1)...(19): siRNA sense strand
gcuagcccucugccucuuu

SEQ ID NO: 1743461 - RNA, 19 nt, Homo sapiens
  misc_RNA (1)...(19): siRNA sense strand
uguauuauucugcguggaa

SEQ ID NO: 1743462 - RNA, 19 nt, Homo sapiens
  misc_RNA (1)...(19): siRNA sense strand
ugcggaagcuggugaaagc

SEQ ID NO: 1743463 - RNA, 19 nt, Homo sapiens
  misc_RNA (1)...(19): siRNA sense strand
ggugaaagcucgcgucauc

SEQ ID NO: 1743464 - RNA, 19 nt, Homo sapiens
  misc_RNA (1)...(19): siRNA sense strand
guuccuggaugacuccuuu

SEQ ID NO: 1743465 - RNA, 19 nt, Homo sapiens
  misc_RNA (1)...(19): siRNA sense strand
ucuaagcaguggcaucuga

SEQ ID NO: 1743466 - RNA, 19 nt, Homo sapiens
  misc_RNA (1)...(19): siRNA sense strand
ugaauuagccaccaaguac

SEQ ID NO: 1743467 - RNA, 19 nt, Homo sapiens
  misc_RNA (1)...(19): siRNA sense strand
uccugaaucuggacucuaa

SEQ ID NO: 1743468 - RNA, 19 nt, Homo sapiens
  misc_RNA (1)...(19): siRNA sense strand
gaugacuccuuucgcaagu

SEQ ID NO: 1743469 - RNA, 19 nt, Homo sapiens
  misc_RNA (1)...(19): siRNA sense strand
gggaguucgugccgccuuu

SEQ ID NO: 1743470 - RNA, 19 nt, Homo sapiens
  misc_RNA (1)...(19): siRNA sense strand
cacaauauccagcgagaga

SEQ ID NO: 1743471 - RNA, 19 nt, Homo sapiens
  misc_RNA (1)...(19): siRNA sense strand
gaucuaagcaguggcaucu

SEQ ID NO: 1743472 - RNA, 19 nt, Homo sapiens
  misc_RNA (1)...(19): siRNA sense strand
caauauccagcgagagaaa

SEQ ID NO: 1743473 - RNA, 19 nt, Homo sapiens
  misc_RNA (1)...(19): siRNA sense strand
gggcuagaauccgggaguu

SEQ ID NO: 1743474 - RNA, 19 nt, Homo sapiens
  misc_RNA (1)...(19): siRNA sense strand
ccagcgagagaaagaguuu

SEQ ID NO: 1743475 - RNA, 19 nt, Homo sapiens
  misc_RNA (1)...(19): siRNA sense strand
caagccagcacccauguuc

SEQ ID NO: 1743476 - RNA, 19 nt, Homo sapiens
  misc_RNA (1)...(19): siRNA sense strand
cguggaagcuacacuuacu

SEQ ID NO: 1743477 - RNA, 19 nt, Homo sapiens
  misc_RNA (1)...(19): siRNA sense strand
aagcucgcgucaucacuga

SEQ ID NO: 1743478 - RNA, 19 nt, Homo sapiens
  misc_RNA (1)...(19): siRNA sense strand
cugaauuagccaccaagua

SEQ ID NO: 1743479 - RNA, 19 nt, Homo sapiens
  misc_RNA (1)...(19): siRNA sense strand
gcuagcccucugccucuuu

SEQ ID NO: 1743480 - RNA, 19 nt, Homo sapiens
  misc_RNA (1)...(19): siRNA sense strand
uguauuauucugcguggaa

SEQ ID NO: 1743481 - RNA, 19 nt, Homo sapiens
  misc_RNA (1)...(19): siRNA sense strand
ugcggaagcuggugaaagc

SEQ ID NO: 1743482 - RNA, 19 nt, Homo sapiens
  misc_RNA (1)...(19): siRNA sense strand
ggugaaagcucgcgucauc

SEQ ID NO: 1743483 - RNA, 19 nt, Homo sapiens
  misc_RNA (1)...(19): siRNA sense strand
guuccuggaugacuccuuu

SEQ ID NO: 1743484 - RNA, 19 nt, Homo sapiens
  misc_RNA (1)...(19): siRNA sense strand
ugaauuagccaccaaguac

SEQ ID NO: 1743485 - RNA, 19 nt, Homo sapiens
  misc_RNA (1)...(19): siRNA sense strand
uccugaaucuggacucuaa

SEQ ID NO: 1743486 - RNA, 19 nt, Homo sapiens
  misc_RNA (1)...(19): siRNA sense strand
gaugacuccuuucgcaagu

SEQ ID NO: 1743487 - RNA, 19 nt, Homo sapiens
  misc_RNA (1)...(19): siRNA sense strand
gggaguucgugccgccuuu

SEQ ID NO: 1743488 - RNA, 19 nt, Homo sapiens
  misc_RNA (1)...(19): siRNA sense strand
cacaauauccagcgagaga

SEQ ID NO: 1743489 - RNA, 19 nt, Homo sapiens
  misc_RNA (1)...(19): siRNA sense strand
caauauccagcgagagaaa

SEQ ID NO: 1743490 - RNA, 19 nt, Homo sapiens
  misc_RNA (1)...(19): siRNA sense strand
gggcuagaauccgggaguu

SEQ ID NO: 1743491 - RNA, 19 nt, Homo sapiens
  misc_RNA (1)...(19): siRNA sense strand
ccagcgagagaaagaguuu

SEQ ID NO: 1743492 - RNA, 19 nt, Homo sapiens
  misc_RNA (1)...(19): siRNA sense strand
caagccagcacccauguuc

SEQ ID NO: 1743493 - RNA, 19 nt, Homo sapiens
  misc_RNA (1)...(19): siRNA sense strand
cguggaagcuacacuuacu

SEQ ID NO: 1743494 - RNA, 19 nt, Homo sapiens
  misc_RNA (1)...(19): siRNA sense strand
aagcucgcgucaucacuga

SEQ ID NO: 1743495 - RNA, 19 nt, Homo sapiens
  misc_RNA (1)...(19): siRNA sense strand
cugaauuagccaccaagua

SEQ ID NO: 1743496 - RNA, 19 nt, Homo sapiens
  misc_RNA (1)...(19): siRNA sense strand
gcuagcccucugccucuuu

SEQ ID NO: 1743497 - RNA, 19 nt, Homo sapiens
  misc_RNA (1)...(19): siRNA sense strand
uguauuauucugcguggaa

SEQ ID NO: 1743498 - RNA, 19 nt, Homo sapiens
  misc_RNA (1)...(19): siRNA sense strand
ugcggaagcuggugaaagc

SEQ ID NO: 1743499 - RNA, 19 nt, Homo sapiens
  misc_RNA (1)...(19): siRNA sense strand
ggugaaagcucgcgucauc

SEQ ID NO: 1743500 - RNA, 19 nt, Homo sapiens
  misc_RNA (1)...(19): siRNA sense strand
guuccuggaugacuccuuu

SEQ ID NO: 1743501 - RNA, 19 nt, Homo sapiens
  misc_RNA (1)...(19): siRNA sense strand
ucuaagcaguggcaucuga

SEQ ID NO: 1743502 - RNA, 19 nt, Homo sapiens
  misc_RNA (1)...(19): siRNA sense strand
ugaauuagccaccaaguac

SEQ ID NO: 1743503 - RNA, 19 nt, Homo sapiens
  misc_RNA (1)...(19): siRNA sense strand
uccugaaucuggacucuaa

SEQ ID NO: 1743504 - RNA, 19 nt, Homo sapiens
  misc_RNA (1)...(19): siRNA sense strand
gaugacuccuuucgcaagu

SEQ ID NO: 1743505 - RNA, 19 nt, Homo sapiens
  misc_RNA (1)...(19): siRNA sense strand
gggaguucgugccgccuuu

SEQ ID NO: 1743506 - RNA, 19 nt, Homo sapiens
  misc_RNA (1)...(19): siRNA sense strand
cacaauauccagcgagaga

SEQ ID NO: 1743507 - RNA, 19 nt, Homo sapiens
  misc_RNA (1)...(19): siRNA sense strand
gaucuaagcaguggcaucu

SEQ ID NO: 1743508 - RNA, 19 nt, Homo sapiens
  misc_RNA (1)...(19): siRNA sense strand
caauauccagcgagagaaa

SEQ ID NO: 1743509 - RNA, 19 nt, Homo sapiens
  misc_RNA (1)...(19): siRNA sense strand
gggcuagaauccgggaguu

SEQ ID NO: 1743510 - RNA, 19 nt, Homo sapiens
  misc_RNA (1)...(19): siRNA sense strand
ccagcgagagaaagaguuu

SEQ ID NO: 1743511 - RNA, 19 nt, Homo sapiens
  misc_RNA (1)...(19): siRNA sense strand
caagccagcacccauguuc

SEQ ID NO: 1743512 - RNA, 19 nt, Homo sapiens
  misc_RNA (1)...(19): siRNA sense strand
cguggaagcuacacuuacu

SEQ ID NO: 1743513 - RNA, 19 nt, Homo sapiens
  misc_RNA (1)...(19): siRNA sense strand
aagcucgcgucaucacuga

SEQ ID NO: 1743514 - RNA, 19 nt, Homo sapiens
  misc_RNA (1)...(19): siRNA sense strand
cugaauuagccaccaagua

SEQ ID NO: 1743515 - RNA, 19 nt, Homo sapiens
  misc_RNA (1)...(19): siRNA sense strand
gcuagcccucugccucuuu

SEQ ID NO: 1743516 - RNA, 19 nt, Homo sapiens
  misc_RNA (1)...(19): siRNA sense strand
uguauuauucugcguggaa

SEQ ID NO: 1743517 - RNA, 19 nt, Homo sapiens
  misc_RNA (1)...(19): siRNA sense strand
ugcggaagcuggugaaagc

SEQ ID NO: 1743518 - RNA, 19 nt, Homo sapiens
  misc_RNA (1)...(19): siRNA sense strand
ggugaaagcucgcgucauc

SEQ ID NO: 1743519 - RNA, 19 nt, Homo sapiens
  misc_RNA (1)...(19): siRNA sense strand
guuccuggaugacuccuuu

SEQ ID NO: 1743520 - RNA, 19 nt, Homo sapiens
  misc_RNA (1)...(19): siRNA sense strand
ucuaagcaguggcaucuga

SEQ ID NO: 1743521 - RNA, 19 nt, Homo sapiens
  misc_RNA (1)...(19): siRNA sense strand
ugaauuagccaccaaguac

SEQ ID NO: 1743522 - RNA, 19 nt, Homo sapiens
  misc_RNA (1)...(19): siRNA sense strand
uccugaaucuggacucuaa

SEQ ID NO: 1743523 - RNA, 19 nt, Homo sapiens
  misc_RNA (1)...(19): siRNA sense strand
gaugacuccuuucgcaagu

SEQ ID NO: 1743524 - RNA, 19 nt, Homo sapiens
  misc_RNA (1)...(19): siRNA sense strand
gggaguucgugccgccuuu

SEQ ID NO: 1743525 - RNA, 19 nt, Homo sapiens
  misc_RNA (1)...(19): siRNA sense strand
cacaauauccagcgagaga

SEQ ID NO: 1743526 - RNA, 19 nt, Homo sapiens
  misc_RNA (1)...(19): siRNA sense strand
gaucuaagcaguggcaucu

SEQ ID NO: 1743527 - RNA, 19 nt, Homo sapiens
  misc_RNA (1)...(19): siRNA sense strand
caauauccagcgagagaaa

SEQ ID NO: 1743528 - RNA, 19 nt, Homo sapiens
  misc_RNA (1)...(19): siRNA sense strand
gggcuagaauccgggaguu

SEQ ID NO: 1743529 - RNA, 19 nt, Homo sapiens
  misc_RNA (1)...(19): siRNA sense strand
ccagcgagagaaagaguuu

SEQ ID NO: 1743530 - RNA, 19 nt, Homo sapiens
  misc_RNA (1)...(19): siRNA sense strand
caagccagcacccauguuc

SEQ ID NO: 1743531 - RNA, 19 nt, Homo sapiens
  misc_RNA (1)...(19): siRNA sense strand
cguggaagcuacacuuacu

SEQ ID NO: 1743532 - RNA, 19 nt, Homo sapiens
  misc_RNA (1)...(19): siRNA sense strand
aagcucgcgucaucacuga

SEQ ID NO: 1743533 - RNA, 19 nt, Homo sapiens
  misc_RNA (1)...(19): siRNA sense strand
cugaauuagccaccaagua

SEQ ID NO: 1743534 - RNA, 19 nt, Homo sapiens
  misc_RNA (1)...(19): siRNA sense strand
gcuagcccucugccucuuu

SEQ ID NO: 1743535 - RNA, 19 nt, Homo sapiens
  misc_RNA (1)...(19): siRNA sense strand
uguauuauucugcguggaa

SEQ ID NO: 1743536 - RNA, 19 nt, Homo sapiens
  misc_RNA (1)...(19): siRNA sense strand
ugcggaagcuggugaaagc

SEQ ID NO: 1743537 - RNA, 19 nt, Homo sapiens
  misc_RNA (1)...(19): siRNA sense strand
ggugaaagcucgcgucauc

SEQ ID NO: 1743538 - RNA, 19 nt, Homo sapiens
  misc_RNA (1)...(19): siRNA sense strand
guuccuggaugacuccuuu

SEQ ID NO: 1743539 - RNA, 19 nt, Homo sapiens
  misc_RNA (1)...(19): siRNA sense strand
ugaauuagccaccaaguac

SEQ ID NO: 1743540 - RNA, 19 nt, Homo sapiens
  misc_RNA (1)...(19): siRNA sense strand
uccugaaucuggacucuaa

SEQ ID NO: 1743541 - RNA, 19 nt, Homo sapiens
  misc_RNA (1)...(19): siRNA sense strand
gaugacuccuuucgcaagu

SEQ ID NO: 1743542 - RNA, 19 nt, Homo sapiens
  misc_RNA (1)...(19): siRNA sense strand
gggaguucgugccgccuuu

SEQ ID NO: 1743543 - RNA, 19 nt, Homo sapiens
  misc_RNA (1)...(19): siRNA sense strand
cacaauauccagcgagaga

SEQ ID NO: 1743544 - RNA, 19 nt, Homo sapiens
  misc_RNA (1)...(19): siRNA sense strand
caauauccagcgagagaaa

SEQ ID NO: 1743545 - RNA, 19 nt, Homo sapiens
  misc_RNA (1)...(19): siRNA sense strand
gggcuagaauccgggaguu

SEQ ID NO: 1743546 - RNA, 19 nt, Homo sapiens
  misc_RNA (1)...(19): siRNA sense strand
ccagcgagagaaagaguuu

SEQ ID NO: 1743547 - RNA, 19 nt, Homo sapiens
  misc_RNA (1)...(19): siRNA sense strand
caagccagcacccauguuc

SEQ ID NO: 1743548 - RNA, 19 nt, Homo sapiens
  misc_RNA (1)...(19): siRNA sense strand
cguggaagcuacacuuacu

SEQ ID NO: 1743549 - RNA, 19 nt, Homo sapiens
  misc_RNA (1)...(19): siRNA sense strand
aagcucgcgucaucacuga

SEQ ID NO: 1743550 - RNA, 19 nt, Homo sapiens
  misc_RNA (1)...(19): siRNA sense strand
cugaauuagccaccaagua

SEQ ID NO: 1743551 - RNA, 19 nt, Homo sapiens
  misc_RNA (1)...(19): siRNA sense strand
gcuagcccucugccucuuu

SEQ ID NO: 1743552 - RNA, 19 nt, Homo sapiens
  misc_RNA (1)...(19): siRNA sense strand
uguauuauucugcguggaa

SEQ ID NO: 1743553 - RNA, 19 nt, Homo sapiens
  misc_RNA (1)...(19): siRNA sense strand
ugcggaagcuggugaaagc

SEQ ID NO: 1743554 - RNA, 19 nt, Homo sapiens
  misc_RNA (1)...(19): siRNA sense strand
ggugaaagcucgcgucauc

SEQ ID NO: 1743555 - RNA, 19 nt, Homo sapiens
  misc_RNA (1)...(19): siRNA sense strand
guuccuggaugacuccuuu

SEQ ID NO: 1743556 - RNA, 19 nt, Homo sapiens
  misc_RNA (1)...(19): siRNA sense strand
ucuaagcaguggcaucuga

SEQ ID NO: 1743557 - RNA, 19 nt, Homo sapiens
  misc_RNA (1)...(19): siRNA sense strand
ugaauuagccaccaaguac

SEQ ID NO: 1743558 - RNA, 19 nt, Homo sapiens
  misc_RNA (1)...(19): siRNA sense strand
uccugaaucuggacucuaa

SEQ ID NO: 1743559 - RNA, 19 nt, Homo sapiens
  misc_RNA (1)...(19): siRNA sense strand
gaugacuccuuucgcaagu

SEQ ID NO: 1743560 - RNA, 19 nt, Homo sapiens
  misc_RNA (1)...(19): siRNA sense strand
gggaguucgugccgccuuu

SEQ ID NO: 1743561 - RNA, 19 nt, Homo sapiens
  misc_RNA (1)...(19): siRNA sense strand
cacaauauccagcgagaga

SEQ ID NO: 1743562 - RNA, 19 nt, Homo sapiens
  misc_RNA (1)...(19): siRNA sense strand
gaucuaagcaguggcaucu

SEQ ID NO: 1743563 - RNA, 19 nt, Homo sapiens
  misc_RNA (1)...(19): siRNA sense strand
caauauccagcgagagaaa

SEQ ID NO: 1743564 - RNA, 19 nt, Homo sapiens
  misc_RNA (1)...(19): siRNA sense strand
gggcuagaauccgggaguu

SEQ ID NO: 1743565 - RNA, 19 nt, Homo sapiens
  misc_RNA (1)...(19): siRNA sense strand
ccagcgagagaaagaguuu

SEQ ID NO: 1743566 - RNA, 19 nt, Homo sapiens
  misc_RNA (1)...(19): siRNA sense strand
caagccagcacccauguuc

SEQ ID NO: 1743567 - RNA, 19 nt, Homo sapiens
  misc_RNA (1)...(19): siRNA sense strand
cguggaagcuacacuuacu

SEQ ID NO: 1743568 - RNA, 19 nt, Homo sapiens
  misc_RNA (1)...(19): siRNA sense strand
aagcucgcgucaucacuga

SEQ ID NO: 1743569 - RNA, 19 nt, Homo sapiens
  misc_RNA (1)...(19): siRNA sense strand
cugaauuagccaccaagua

SEQ ID NO: 1743570 - RNA, 19 nt, Homo sapiens
  misc_RNA (1)...(19): siRNA sense strand
gcuagcccucugccucuuu

SEQ ID NO: 1743571 - RNA, 19 nt, Homo sapiens
  misc_RNA (1)...(19): siRNA sense strand
uguauuauucugcguggaa

SEQ ID NO: 1743572 - RNA, 19 nt, Homo sapiens
  misc_RNA (1)...(19): siRNA sense strand
ugcggaagcuggugaaagc

SEQ ID NO: 1743573 - RNA, 19 nt, Homo sapiens
  misc_RNA (1)...(19): siRNA sense strand
guuccuggaugacuccuuu

SEQ ID NO: 1743574 - RNA, 19 nt, Homo sapiens
  misc_RNA (1)...(19): siRNA sense strand
ugaauuagccaccaaguac

SEQ ID NO: 1743575 - RNA, 19 nt, Homo sapiens
  misc_RNA (1)...(19): siRNA sense strand
uccugaaucuggacucuaa

SEQ ID NO: 1743576 - RNA, 19 nt, Homo sapiens
  misc_RNA (1)...(19): siRNA sense strand
gaugacuccuuucgcaagu

SEQ ID NO: 1743577 - RNA, 19 nt, Homo sapiens
  misc_RNA (1)...(19): siRNA sense strand
gggaguucgugccgccuuu

SEQ ID NO: 1743578 - RNA, 19 nt, Homo sapiens
  misc_RNA (1)...(19): siRNA sense strand
gggcuagaauccgggaguu

SEQ ID NO: 1743579 - RNA, 19 nt, Homo sapiens
  misc_RNA (1)...(19): siRNA sense strand
caagccagcacccauguuc

SEQ ID NO: 1743580 - RNA, 19 nt, Homo sapiens
  misc_RNA (1)...(19): siRNA sense strand
cguggaagcuacacuuacu

SEQ ID NO: 1743581 - RNA, 19 nt, Homo sapiens
  misc_RNA (1)...(19): siRNA sense strand
cugaauuagccaccaagua

SEQ ID NO: 1743582 - RNA, 19 nt, Homo sapiens
  misc_RNA (1)...(19): siRNA sense strand
gcuagcccucugccucuuu

SEQ ID NO: 1743583 - RNA, 19 nt, Homo sapiens
  misc_RNA (1)...(19): siRNA sense strand
uguauuauucugcguggaa

SEQ ID NO: 1743584 - RNA, 19 nt, Homo sapiens
  misc_RNA (1)...(19): siRNA sense strand
gaaggcaggugacugguau

SEQ ID NO: 1743585 - RNA, 19 nt, Homo sapiens
  misc_RNA (1)...(19): siRNA sense strand
gggcagagcucaggcaaga

SEQ ID NO: 1743586 - RNA, 19 nt, Homo sapiens
  misc_RNA (1)...(19): siRNA sense strand
ggaaggaguuugagacacu

SEQ ID NO: 1743587 - RNA, 19 nt, Homo sapiens
  misc_RNA (1)...(19): siRNA sense strand
ggacgaaguggacaaguuc

SEQ ID NO: 1743588 - RNA, 19 nt, Homo sapiens
  misc_RNA (1)...(19): siRNA sense strand
caaguacgguugggugguu

SEQ ID NO: 1743589 - RNA, 19 nt, Homo sapiens
  misc_RNA (1)...(19): siRNA sense strand
cggaccagcuuuagcaaga

SEQ ID NO: 1743590 - RNA, 19 nt, Homo sapiens
  misc_RNA (1)...(19): siRNA sense strand
cggacgaaguggacaaguu

SEQ ID NO: 1743591 - RNA, 19 nt, Homo sapiens
  misc_RNA (1)...(19): siRNA sense strand
aagaugacuuccugcugua

SEQ ID NO: 1743592 - RNA, 19 nt, Homo sapiens
  misc_RNA (1)...(19): siRNA sense strand
cgagugagccggacgaagu

SEQ ID NO: 1743593 - RNA, 19 nt, Homo sapiens
  misc_RNA (1)...(19): siRNA sense strand
gagacaggaaggaguuuga

SEQ ID NO: 1743594 - RNA, 19 nt, Homo sapiens
  misc_RNA (1)...(19): siRNA sense strand
cgagggcgagggugacaua

SEQ ID NO: 1743595 - RNA, 19 nt, Homo sapiens
  misc_RNA (1)...(19): siRNA sense strand
gcagagcucaggcaagaag

SEQ ID NO: 1743596 - RNA, 19 nt, Homo sapiens
  misc_RNA (1)...(19): siRNA sense strand
gacacucacuguacuucau

SEQ ID NO: 1743597 - RNA, 19 nt, Homo sapiens
  misc_RNA (1)...(19): siRNA sense strand
gcucugaggacuuuguguu

SEQ ID NO: 1743598 - RNA, 19 nt, Homo sapiens
  misc_RNA (1)...(19): siRNA sense strand
gggcgagggugacauacag

SEQ ID NO: 1743599 - RNA, 19 nt, Homo sapiens
  misc_RNA (1)...(19): siRNA sense strand
ggaagucuguggucauccu

SEQ ID NO: 1743600 - RNA, 19 nt, Homo sapiens
  misc_RNA (1)...(19): siRNA sense strand
ggaccagcuuuagcaagau

SEQ ID NO: 1743601 - RNA, 19 nt, Homo sapiens
  misc_RNA (1)...(19): siRNA sense strand
gaccagcuuuagcaagauc

SEQ ID NO: 1743602 - RNA, 19 nt, Homo sapiens
  misc_RNA (1)...(19): siRNA sense strand
uuacgcagcggccagauga

SEQ ID NO: 1743603 - RNA, 19 nt, Homo sapiens
  misc_RNA (1)...(19): siRNA sense strand
ccuggaacaacgucaagua

SEQ ID NO: 1743604 - RNA, 19 nt, Homo sapiens
  misc_RNA (1)...(19): siRNA sense strand
caaguucaaggccaaguuc

SEQ ID NO: 1743605 - RNA, 19 nt, Homo sapiens
  misc_RNA (1)...(19): siRNA sense strand
aagauggacccaagcugua

SEQ ID NO: 1743606 - RNA, 19 nt, Homo sapiens
  misc_RNA (1)...(19): siRNA sense strand
guggaagucuguggucauc

SEQ ID NO: 1743607 - RNA, 19 nt, Homo sapiens
  misc_RNA (1)...(19): siRNA sense strand
ggcagauuguguccugguu

SEQ ID NO: 1743608 - RNA, 19 nt, Homo sapiens
  misc_RNA (1)...(19): siRNA sense strand
gcuguaccgugggcuucua

SEQ ID NO: 1743609 - RNA, 19 nt, Homo sapiens
  misc_RNA (1)...(19): siRNA sense strand
ggaaaccgcgacacucacu

SEQ ID NO: 1743610 - RNA, 19 nt, Homo sapiens
  misc_RNA (1)...(19): siRNA sense strand
uuagcaagaucuccagcau

SEQ ID NO: 1743611 - RNA, 19 nt, Homo sapiens
  misc_RNA (1)...(19): siRNA sense strand
gacaggaaggaguuugaga

SEQ ID NO: 1743612 - RNA, 19 nt, Homo sapiens
  misc_RNA (1)...(19): siRNA sense strand
ggagacaggaaggaguuug

SEQ ID NO: 1743613 - RNA, 19 nt, Homo sapiens
  misc_RNA (1)...(19): siRNA sense strand
agggugacauacagcguuu

SEQ ID NO: 1743614 - RNA, 19 nt, Homo sapiens
  misc_RNA (1)...(19): siRNA sense strand
guaccuggacccucacuac

SEQ ID NO: 1743615 - RNA, 19 nt, Homo sapiens
  misc_RNA (1)...(19): siRNA sense strand
agaaggcaggugacuggua

SEQ ID NO: 1743616 - RNA, 19 nt, Homo sapiens
  misc_RNA (1)...(19): siRNA sense strand
gggcaucaugggugggaaa

SEQ ID NO: 1743617 - RNA, 19 nt, Homo sapiens
  misc_RNA (1)...(19): siRNA sense strand
caggaaggaguuugagaca

SEQ ID NO: 1743618 - RNA, 19 nt, Homo sapiens
  misc_RNA (1)...(19): siRNA sense strand
gaaacucgcuccuggcuuu

SEQ ID NO: 1743619 - RNA, 19 nt, Homo sapiens
  misc_RNA (1)...(19): siRNA sense strand
ggucacagcugaggaauuu

SEQ ID NO: 1743620 - RNA, 19 nt, Homo sapiens
  misc_RNA (1)...(19): siRNA sense strand
caaacaggaugaacucuaa

SEQ ID NO: 1743621 - RNA, 19 nt, Homo sapiens
  misc_RNA (1)...(19): siRNA sense strand
gagaaguccuccuggaaga

SEQ ID NO: 1743622 - RNA, 19 nt, Homo sapiens
  misc_RNA (1)...(19): siRNA sense strand
uggaagaguucucagagua

SEQ ID NO: 1743623 - RNA, 19 nt, Homo sapiens
  misc_RNA (1)...(19): siRNA sense strand
gagcugauugugaagaaua

SEQ ID NO: 1743624 - RNA, 19 nt, Homo sapiens
  misc_RNA (1)...(19): siRNA sense strand
gaugugcguuggcgagaaa

SEQ ID NO: 1743625 - RNA, 19 nt, Homo sapiens
  misc_RNA (1)...(19): siRNA sense strand
gaagaguucucagaguaca

SEQ ID NO: 1743626 - RNA, 19 nt, Homo sapiens
  misc_RNA (1)...(19): siRNA sense strand
gaaggucacagcugaggaa

SEQ ID NO: 1743627 - RNA, 19 nt, Homo sapiens
  misc_RNA (1)...(19): siRNA sense strand
ugaagaaauugacaaggau

SEQ ID NO: 1743628 - RNA, 19 nt, Homo sapiens
  misc_RNA (1)...(19): siRNA sense strand
uugaagaaauugacaagga

SEQ ID NO: 1743629 - RNA, 19 nt, Homo sapiens
  misc_RNA (1)...(19): siRNA sense strand
ucacagcugaggaauuuaa

SEQ ID NO: 1743630 - RNA, 19 nt, Homo sapiens
  misc_RNA (1)...(19): siRNA sense strand
gaaacggacagugaucauu

SEQ ID NO: 1743631 - RNA, 19 nt, Homo sapiens
  misc_RNA (1)...(19): siRNA sense strand
gcagugccguauuaguguu

SEQ ID NO: 1743632 - RNA, 19 nt, Homo sapiens
  misc_RNA (1)...(19): siRNA sense strand
ccaaacaggaugaacucua

SEQ ID NO: 1743633 - RNA, 19 nt, Homo sapiens
  misc_RNA (1)...(19): siRNA sense strand
guauuaguguuugacauug

SEQ ID NO: 1743634 - RNA, 19 nt, Homo sapiens
  misc_RNA (1)...(19): siRNA sense strand
augcugagcugauugugaa

SEQ ID NO: 1743635 - RNA, 19 nt, Homo sapiens
  misc_RNA (1)...(19): siRNA sense strand
ggguacauguucauaugga

SEQ ID NO: 1743636 - RNA, 19 nt, Homo sapiens
  misc_RNA (1)...(19): siRNA sense strand
gguacauguucauauggaa

SEQ ID NO: 1743637 - RNA, 19 nt, Homo sapiens
  misc_RNA (1)...(19): siRNA sense strand
caaagaccaggaagccaaa

SEQ ID NO: 1743638 - RNA, 19 nt, Homo sapiens
  misc_RNA (1)...(19): siRNA sense strand
aaacggacagugaucauuc

SEQ ID NO: 1743639 - RNA, 19 nt, Homo sapiens
  misc_RNA (1)...(19): siRNA sense strand
cguauuaguguuugacauu

SEQ ID NO: 1743640 - RNA, 19 nt, Homo sapiens
  misc_RNA (1)...(19): siRNA sense strand
ccaggaagccaaacaggau

SEQ ID NO: 1743641 - RNA, 19 nt, Homo sapiens
  misc_RNA (1)...(19): siRNA sense strand
ggcgagaaacggacaguga

SEQ ID NO: 1743642 - RNA, 19 nt, Homo sapiens
  misc_RNA (1)...(19): siRNA sense strand
gagaaacggacagugauca

SEQ ID NO: 1743643 - RNA, 19 nt, Homo sapiens
  misc_RNA (1)...(19): siRNA sense strand
uggcguggauggagaagug

SEQ ID NO: 1743644 - RNA, 19 nt, Homo sapiens
  misc_RNA (1)...(19): siRNA sense strand
ggaagaguucucagaguac

SEQ ID NO: 1743645 - RNA, 19 nt, Homo sapiens
  misc_RNA (1)...(19): siRNA sense strand
gaugcugagcugauuguga

SEQ ID NO: 1743646 - RNA, 19 nt, Homo sapiens
  misc_RNA (1)...(19): siRNA sense strand
guacauguucauauggaau

SEQ ID NO: 1743647 - RNA, 19 nt, Homo sapiens
  misc_RNA (1)...(19): siRNA sense strand
gcgagaaacggacagugau

SEQ ID NO: 1743648 - RNA, 19 nt, Homo sapiens
  misc_RNA (1)...(19): siRNA sense strand
gaaguccuccuggaagagu

SEQ ID NO: 1743649 - RNA, 19 nt, Homo sapiens
  misc_RNA (1)...(19): siRNA sense strand
uaaacucaaagaccaggaa

SEQ ID NO: 1743650 - RNA, 19 nt, Homo sapiens
  misc_RNA (1)...(19): siRNA sense strand
cugagcugauugugaagaa

SEQ ID NO: 1743651 - RNA, 19 nt, Homo sapiens
  misc_RNA (1)...(19): siRNA sense strand
ggaauuuaaacucaaagac

SEQ ID NO: 1743652 - RNA, 19 nt, Homo sapiens
  misc_RNA (1)...(19): siRNA sense strand
caaggauggcaacggagaa

SEQ ID NO: 1743653 - RNA, 19 nt, Homo sapiens
  misc_RNA (1)...(19): siRNA sense strand
agaauauguucaccaacca

SEQ ID NO: 1743654 - RNA, 19 nt, Homo sapiens
  misc_RNA (1)...(19): siRNA sense strand
ggauggcaacggagaaguc

SEQ ID NO: 1743655 - RNA, 19 nt, Homo sapiens
  misc_RNA (1)...(19): siRNA sense strand
cagcugaggaauuuaaacu

SEQ ID NO: 1743656 - RNA, 19 nt, Homo sapiens
  misc_RNA (1)...(19): siRNA sense strand
gaaguaaacuggaagauau

SEQ ID NO: 1743657 - RNA, 19 nt, Homo sapiens
  misc_RNA (1)...(19): siRNA sense strand
auaaggagcuuguuucaua

SEQ ID NO: 1743658 - RNA, 19 nt, Homo sapiens
  misc_RNA (1)...(19): siRNA sense strand
gcaacuacauugaauauca

SEQ ID NO: 1743659 - RNA, 19 nt, Homo sapiens
  misc_RNA (1)...(19): siRNA sense strand
uaacuccgguugauaaauu

SEQ ID NO: 1743660 - RNA, 19 nt, Homo sapiens
  misc_RNA (1)...(19): siRNA sense strand
gcaacuccuuuacaucaua

SEQ ID NO: 1743661 - RNA, 19 nt, Homo sapiens
  misc_RNA (1)...(19): siRNA sense strand
gaaacaaggcaaacacauu

SEQ ID NO: 1743662 - RNA, 19 nt, Homo sapiens
  misc_RNA (1)...(19): siRNA sense strand
aaacuacucuggauaaauc

SEQ ID NO: 1743663 - RNA, 19 nt, Homo sapiens
  misc_RNA (1)...(19): siRNA sense strand
gaauacaggaucacaguuu

SEQ ID NO: 1743664 - RNA, 19 nt, Homo sapiens
  misc_RNA (1)...(19): siRNA sense strand
uauaaucucuccucugcua

SEQ ID NO: 1743665 - RNA, 19 nt, Homo sapiens
  misc_RNA (1)...(19): siRNA sense strand
gaaucuuguugacuacaua

SEQ ID NO: 1743666 - RNA, 19 nt, Homo sapiens
  misc_RNA (1)...(19): siRNA sense strand
gacaauaccgcuaagcuaa

SEQ ID NO: 1743667 - RNA, 19 nt, Homo sapiens
  misc_RNA (1)...(19): siRNA sense strand
ggaagaugauauguuugua

SEQ ID NO: 1743668 - RNA, 19 nt, Homo sapiens
  misc_RNA (1)...(19): siRNA sense strand
aaacaaggcaaacacauuu

SEQ ID NO: 1743669 - RNA, 19 nt, Homo sapiens
  misc_RNA (1)...(19): siRNA sense strand
ggaggcaacuacauugaau

SEQ ID NO: 1743670 - RNA, 19 nt, Homo sapiens
  misc_RNA (1)...(19): siRNA sense strand
gaugaaggagccauaagua

SEQ ID NO: 1743671 - RNA, 19 nt, Homo sapiens
  misc_RNA (1)...(19): siRNA sense strand
gacaagaaacuucgagaaa

SEQ ID NO: 1743672 - RNA, 19 nt, Homo sapiens
  misc_RNA (1)...(19): siRNA sense strand
gaugaggucaaacgacuua

SEQ ID NO: 1743673 - RNA, 19 nt, Homo sapiens
  misc_RNA (1)...(19): siRNA sense strand
gaacauauaaaggcaagaa

SEQ ID NO: 1743674 - RNA, 19 nt, Homo sapiens
  misc_RNA (1)...(19): siRNA sense strand
uaaguaugcuuucugacaa

SEQ ID NO: 1743675 - RNA, 19 nt, Homo sapiens
  misc_RNA (1)...(19): siRNA sense strand
uaaacaggguuaauuugga

SEQ ID NO: 1743676 - RNA, 19 nt, Homo sapiens
  misc_RNA (1)...(19): siRNA sense strand
caucagcuguuaguucuuu

SEQ ID NO: 1743677 - RNA, 19 nt, Homo sapiens
  misc_RNA (1)...(19): siRNA sense strand
aaacaggguuaauuuggaa

SEQ ID NO: 1743678 - RNA, 19 nt, Homo sapiens
  misc_RNA (1)...(19): siRNA sense strand
cagaaucaguucagcaaga

SEQ ID NO: 1743679 - RNA, 19 nt, Homo sapiens
  misc_RNA (1)...(19): siRNA sense strand
cgaaacugaugacuauaga

SEQ ID NO: 1743680 - RNA, 19 nt, Homo sapiens
  misc_RNA (1)...(19): siRNA sense strand
ugacagauuuggccaagau

SEQ ID NO: 1743681 - RNA, 19 nt, Homo sapiens
  misc_RNA (1)...(19): siRNA sense strand
gagguuguuucuuaucuau

SEQ ID NO: 1743682 - RNA, 19 nt, Homo sapiens
  misc_RNA (1)...(19): siRNA sense strand
gccaggaucuucgaaauca

SEQ ID NO: 1743683 - RNA, 19 nt, Homo sapiens
  misc_RNA (1)...(19): siRNA sense strand
gcaaacacauuuuauaugg

SEQ ID NO: 1743684 - RNA, 19 nt, Homo sapiens
  misc_RNA (1)...(19): siRNA sense strand
uuauggagaugaagucaaa

SEQ ID NO: 1743685 - RNA, 19 nt, Homo sapiens
  misc_RNA (1)...(19): siRNA sense strand
gaagaugaaggagccauaa

SEQ ID NO: 1743686 - RNA, 19 nt, Homo sapiens
  misc_RNA (1)...(19): siRNA sense strand
ggaaauggaaacuguuaug

SEQ ID NO: 1743687 - RNA, 19 nt, Homo sapiens
  misc_RNA (1)...(19): siRNA sense strand
aaacauagauuuggcaacu

SEQ ID NO: 1743688 - RNA, 19 nt, Homo sapiens
  misc_RNA (1)...(19): siRNA sense strand
gccauuaacaggccagaua

SEQ ID NO: 1743689 - RNA, 19 nt, Homo sapiens
  misc_RNA (1)...(19): siRNA sense strand
caucauacuuggacauauc

SEQ ID NO: 1743690 - RNA, 19 nt, Homo sapiens
  misc_RNA (1)...(19): siRNA sense strand
ugacagaaacauagauuug

SEQ ID NO: 1743691 - RNA, 19 nt, Homo sapiens
  misc_RNA (1)...(19): siRNA sense strand
gaaacuagacaagaaacuu

SEQ ID NO: 1743692 - RNA, 19 nt, Homo sapiens
  misc_RNA (1)...(19): siRNA sense strand
acacggaaauggaaacugu

SEQ ID NO: 1743693 - RNA, 19 nt, Homo sapiens
  misc_RNA (1)...(19): siRNA sense strand
uaaggagcuuguuucauau

SEQ ID NO: 1743694 - RNA, 19 nt, Homo sapiens
  misc_RNA (1)...(19): siRNA sense strand
cagugaaacuagacaagaa

SEQ ID NO: 1743695 - RNA, 19 nt, Homo sapiens
  misc_RNA (1)...(19): siRNA sense strand
gagauccuauuccagaugu

SEQ ID NO: 1743696 - RNA, 19 nt, Homo sapiens
  misc_RNA (1)...(19): siRNA sense strand
ugccagaacuccuugagaa

SEQ ID NO: 1743697 - RNA, 19 nt, Homo sapiens
  misc_RNA (1)...(19): siRNA sense strand
ggaagaugaaggagccaua

SEQ ID NO: 1743698 - RNA, 19 nt, Homo sapiens
  misc_RNA (1)...(19): siRNA sense strand
aaacuguuauggacacuau

SEQ ID NO: 1743699 - RNA, 19 nt, Homo sapiens
  misc_RNA (1)...(19): siRNA sense strand
acaggaagaugaggucaaa

SEQ ID NO: 1743700 - RNA, 19 nt, Homo sapiens
  misc_RNA (1)...(19): siRNA sense strand
gcucaguucccagaaauaa

SEQ ID NO: 1743701 - RNA, 19 nt, Homo sapiens
  misc_RNA (1)...(19): siRNA sense strand
gcaaaacuacucuggauaa

SEQ ID NO: 1743702 - RNA, 19 nt, Homo sapiens
  misc_RNA (1)...(19): siRNA sense strand
gcaagaaaauuggauguau

SEQ ID NO: 1743703 - RNA, 19 nt, Homo sapiens
  misc_RNA (1)...(19): siRNA sense strand
ggaggaggcaacuacauug

SEQ ID NO: 1743704 - RNA, 19 nt, Homo sapiens
  misc_RNA (1)...(19): siRNA sense strand
uaacacaaguagccaaggu

SEQ ID NO: 1743705 - RNA, 19 nt, Homo sapiens
  misc_RNA (1)...(19): siRNA sense strand
gcaggaacuccagaagaua

SEQ ID NO: 1743706 - RNA, 19 nt, Homo sapiens
  misc_RNA (1)...(19): siRNA sense strand
ggacauaucaagcauuggu

SEQ ID NO: 1743707 - RNA, 19 nt, Homo sapiens
  misc_RNA (1)...(19): siRNA sense strand
gcagaaaugguagcaguga

SEQ ID NO: 1743708 - RNA, 19 nt, Homo sapiens
  misc_RNA (1)...(19): siRNA sense strand
ucuaagagaugcaagaaac

SEQ ID NO: 1743709 - RNA, 19 nt, Homo sapiens
  misc_RNA (1)...(19): siRNA sense strand
gaauaucagaaucuuguug

SEQ ID NO: 1743710 - RNA, 19 nt, Homo sapiens
  misc_RNA (1)...(19): siRNA sense strand
agaaguaaacuggaagaua

SEQ ID NO: 1743711 - RNA, 19 nt, Homo sapiens
  misc_RNA (1)...(19): siRNA sense strand
cagauuuggccaagauaua

SEQ ID NO: 1743712 - RNA, 19 nt, Homo sapiens
  misc_RNA (1)...(19): siRNA sense strand
gggaggaggcaacuacauu

SEQ ID NO: 1743713 - RNA, 19 nt, Homo sapiens
  misc_RNA (1)...(19): siRNA sense strand
aggcugauuuggagcaaua

SEQ ID NO: 1743714 - RNA, 19 nt, Homo sapiens
  misc_RNA (1)...(19): siRNA sense strand
caagaaacuucgagaaaau

SEQ ID NO: 1743715 - RNA, 19 nt, Homo sapiens
  misc_RNA (1)...(19): siRNA sense strand
uggaagauauugcaaaugc

SEQ ID NO: 1743716 - RNA, 19 nt, Homo sapiens
  misc_RNA (1)...(19): siRNA sense strand
gcacuaccacuaaaccaau

SEQ ID NO: 1743717 - RNA, 19 nt, Homo sapiens
  misc_RNA (1)...(19): siRNA sense strand
caggaacuccagaagauaa

SEQ ID NO: 1743718 - RNA, 19 nt, Homo sapiens
  misc_RNA (1)...(19): siRNA sense strand
gcaguauacuuuguaaugc

SEQ ID NO: 1743719 - RNA, 19 nt, Homo sapiens
  misc_RNA (1)...(19): siRNA sense strand
ugacaauaccgcuaagcua

SEQ ID NO: 1743720 - RNA, 19 nt, Homo sapiens
  misc_RNA (1)...(19): siRNA sense strand
gcagugaaacuagacaaga

SEQ ID NO: 1743721 - RNA, 19 nt, Homo sapiens
  misc_RNA (1)...(19): siRNA sense strand
uuucauaucgugccauuaa

SEQ ID NO: 1743722 - RNA, 19 nt, Homo sapiens
  misc_RNA (1)...(19): siRNA sense strand
gaucuucgaaaucaacuau

SEQ ID NO: 1743723 - RNA, 19 nt, Homo sapiens
  misc_RNA (1)...(19): siRNA sense strand
uaacaggccagauaucaca

SEQ ID NO: 1743724 - RNA, 19 nt, Homo sapiens
  misc_RNA (1)...(19): siRNA sense strand
gagcaaaacuacucuggau

SEQ ID NO: 1743725 - RNA, 19 nt, Homo sapiens
  misc_RNA (1)...(19): siRNA sense strand
cccagaaguugcagaauca

SEQ ID NO: 1743726 - RNA, 19 nt, Homo sapiens
  misc_RNA (1)...(19): siRNA sense strand
ucacagacacggaaaugga

SEQ ID NO: 1743727 - RNA, 19 nt, Homo sapiens
  misc_RNA (1)...(19): siRNA sense strand
cagcucaguucccagaaau

SEQ ID NO: 1743728 - RNA, 19 nt, Homo sapiens
  misc_RNA (1)...(19): siRNA sense strand
agaaucaguucagcaagaa

SEQ ID NO: 1743729 - RNA, 19 nt, Homo sapiens
  misc_RNA (1)...(19): siRNA sense strand
gaaguccauucccagaagu

SEQ ID NO: 1743730 - RNA, 19 nt, Homo sapiens
  misc_RNA (1)...(19): siRNA sense strand
gaacagcagcagaaauggu

SEQ ID NO: 1743731 - RNA, 19 nt, Homo sapiens
  misc_RNA (1)...(19): siRNA sense strand
gggaaucacucugcaucug

SEQ ID NO: 1743732 - RNA, 19 nt, Homo sapiens
  misc_RNA (1)...(19): siRNA sense strand
ugagguuguuucuuaucua

SEQ ID NO: 1743733 - RNA, 19 nt, Homo sapiens
  misc_RNA (1)...(19): siRNA sense strand
caauaccgcuaagcuaaca

SEQ ID NO: 1743734 - RNA, 19 nt, Homo sapiens
  misc_RNA (1)...(19): siRNA sense strand
ugaaggagcuaagagacau

SEQ ID NO: 1743735 - RNA, 19 nt, Homo sapiens
  misc_RNA (1)...(19): siRNA sense strand
ucugcuauuucaagaagua

SEQ ID NO: 1743736 - RNA, 19 nt, Homo sapiens
  misc_RNA (1)...(19): siRNA sense strand
caacuacauugaauaucag

SEQ ID NO: 1743737 - RNA, 19 nt, Homo sapiens
  misc_RNA (1)...(19): siRNA sense strand
gaggaggcaacuacauuga

SEQ ID NO: 1743738 - RNA, 19 nt, Homo sapiens
  misc_RNA (1)...(19): siRNA sense strand
uggcagcacuaccacuaaa

SEQ ID NO: 1743739 - RNA, 19 nt, Homo sapiens
  misc_RNA (1)...(19): siRNA sense strand
ucaaacaguggaaggcuuu

SEQ ID NO: 1743740 - RNA, 19 nt, Homo sapiens
  misc_RNA (1)...(19): siRNA sense strand
cuggauaaaucucuucuag

SEQ ID NO: 1743741 - RNA, 19 nt, Homo sapiens
  misc_RNA (1)...(19): siRNA sense strand
auaaucagauguucaagag

SEQ ID NO: 1743742 - RNA, 19 nt, Homo sapiens
  misc_RNA (1)...(19): siRNA sense strand
gaaauggaaacuguuaugg

SEQ ID NO: 1743743 - RNA, 19 nt, Homo sapiens
  misc_RNA (1)...(19): siRNA sense strand
cagauguuccugcaguaua

SEQ ID NO: 1743744 - RNA, 19 nt, Homo sapiens
  misc_RNA (1)...(19): siRNA sense strand
gaggcaacuacauugaaua

SEQ ID NO: 1743745 - RNA, 19 nt, Homo sapiens
  misc_RNA (1)...(19): siRNA sense strand
uaucacgagucaugaauac

SEQ ID NO: 1743746 - RNA, 19 nt, Homo sapiens
  misc_RNA (1)...(19): siRNA sense strand
guuauggacacuauaguug

SEQ ID NO: 1743747 - RNA, 19 nt, Homo sapiens
  misc_RNA (1)...(19): siRNA sense strand
ggaaacaaggcaaacacau

SEQ ID NO: 1743748 - RNA, 19 nt, Homo sapiens
  misc_RNA (1)...(19): siRNA sense strand
aucagaaucuuguugacua

SEQ ID NO: 1743749 - RNA, 19 nt, Homo sapiens
  misc_RNA (1)...(19): siRNA sense strand
aauacaggaucacaguuug

SEQ ID NO: 1743750 - RNA, 19 nt, Homo sapiens
  misc_RNA (1)...(19): siRNA sense strand
ugcaggaacuccagaagau

SEQ ID NO: 1743751 - RNA, 19 nt, Homo sapiens
  misc_RNA (1)...(19): siRNA sense strand
ccagaggcccuuauuaguc

SEQ ID NO: 1743752 - RNA, 19 nt, Homo sapiens
  misc_RNA (1)...(19): siRNA sense strand
cagaaaugguagcagugaa

SEQ ID NO: 1743753 - RNA, 19 nt, Homo sapiens
  misc_RNA (1)...(19): siRNA sense strand
gugccaggaucuucgaaau

SEQ ID NO: 1743754 - RNA, 19 nt, Homo sapiens
  misc_RNA (1)...(19): siRNA sense strand
gaaguugcagaaucaguuc

SEQ ID NO: 1743755 - RNA, 19 nt, Homo sapiens
  misc_RNA (1)...(19): siRNA sense strand
caaaauaaggagcuuguuu

SEQ ID NO: 1743756 - RNA, 19 nt, Homo sapiens
  misc_RNA (1)...(19): siRNA sense strand
gaaguaaacuggaagauau

SEQ ID NO: 1743757 - RNA, 19 nt, Homo sapiens
  misc_RNA (1)...(19): siRNA sense strand
auaaggagcuuguuucaua

SEQ ID NO: 1743758 - RNA, 19 nt, Homo sapiens
  misc_RNA (1)...(19): siRNA sense strand
gcaacuacauugaauauca

SEQ ID NO: 1743759 - RNA, 19 nt, Homo sapiens
  misc_RNA (1)...(19): siRNA sense strand
uaacuccgguugauaaauu

SEQ ID NO: 1743760 - RNA, 19 nt, Homo sapiens
  misc_RNA (1)...(19): siRNA sense strand
gcaacuccuuuacaucaua

SEQ ID NO: 1743761 - RNA, 19 nt, Homo sapiens
  misc_RNA (1)...(19): siRNA sense strand
gaaacaaggcaaacacauu

SEQ ID NO: 1743762 - RNA, 19 nt, Homo sapiens
  misc_RNA (1)...(19): siRNA sense strand
aaacuacucuggauaaauc

SEQ ID NO: 1743763 - RNA, 19 nt, Homo sapiens
  misc_RNA (1)...(19): siRNA sense strand
gaauacaggaucacaguuu

SEQ ID NO: 1743764 - RNA, 19 nt, Homo sapiens
  misc_RNA (1)...(19): siRNA sense strand
gaaucuuguugacuacaua

SEQ ID NO: 1743765 - RNA, 19 nt, Homo sapiens
  misc_RNA (1)...(19): siRNA sense strand
gacaauaccgcuaagcuaa

SEQ ID NO: 1743766 - RNA, 19 nt, Homo sapiens
  misc_RNA (1)...(19): siRNA sense strand
ggaagaugauauguuugua

SEQ ID NO: 1743767 - RNA, 19 nt, Homo sapiens
  misc_RNA (1)...(19): siRNA sense strand
aaacaaggcaaacacauuu

SEQ ID NO: 1743768 - RNA, 19 nt, Homo sapiens
  misc_RNA (1)...(19): siRNA sense strand
ggaggcaacuacauugaau

SEQ ID NO: 1743769 - RNA, 19 nt, Homo sapiens
  misc_RNA (1)...(19): siRNA sense strand
gaugaaggagccauaagua

SEQ ID NO: 1743770 - RNA, 19 nt, Homo sapiens
  misc_RNA (1)...(19): siRNA sense strand
gacaagaaacuucgagaaa

SEQ ID NO: 1743771 - RNA, 19 nt, Homo sapiens
  misc_RNA (1)...(19): siRNA sense strand
gaugaggucaaacgacuua

SEQ ID NO: 1743772 - RNA, 19 nt, Homo sapiens
  misc_RNA (1)...(19): siRNA sense strand
gaacauauaaaggcaagaa

SEQ ID NO: 1743773 - RNA, 19 nt, Homo sapiens
  misc_RNA (1)...(19): siRNA sense strand
uaaguaugcuuucugacaa

SEQ ID NO: 1743774 - RNA, 19 nt, Homo sapiens
  misc_RNA (1)...(19): siRNA sense strand
uaaacaggguuaauuugga

SEQ ID NO: 1743775 - RNA, 19 nt, Homo sapiens
  misc_RNA (1)...(19): siRNA sense strand
caucagcuguuaguucuuu

SEQ ID NO: 1743776 - RNA, 19 nt, Homo sapiens
  misc_RNA (1)...(19): siRNA sense strand
aaacaggguuaauuuggaa

SEQ ID NO: 1743777 - RNA, 19 nt, Homo sapiens
  misc_RNA (1)...(19): siRNA sense strand
cagaaucaguucagcaaga

SEQ ID NO: 1743778 - RNA, 19 nt, Homo sapiens
  misc_RNA (1)...(19): siRNA sense strand
cgaaacugaugacuauaga

SEQ ID NO: 1743779 - RNA, 19 nt, Homo sapiens
  misc_RNA (1)...(19): siRNA sense strand
gagguuguuucuuaucuau

SEQ ID NO: 1743780 - RNA, 19 nt, Homo sapiens
  misc_RNA (1)...(19): siRNA sense strand
gccaggaucuucgaaauca

SEQ ID NO: 1743781 - RNA, 19 nt, Homo sapiens
  misc_RNA (1)...(19): siRNA sense strand
gcaaacacauuuuauaugg

SEQ ID NO: 1743782 - RNA, 19 nt, Homo sapiens
  misc_RNA (1)...(19): siRNA sense strand
uuauggagaugaagucaaa

SEQ ID NO: 1743783 - RNA, 19 nt, Homo sapiens
  misc_RNA (1)...(19): siRNA sense strand
gaagaugaaggagccauaa

SEQ ID NO: 1743784 - RNA, 19 nt, Homo sapiens
  misc_RNA (1)...(19): siRNA sense strand
ggaaauggaaacuguuaug

SEQ ID NO: 1743785 - RNA, 19 nt, Homo sapiens
  misc_RNA (1)...(19): siRNA sense strand
aaacauagauuuggcaacu

SEQ ID NO: 1743786 - RNA, 19 nt, Homo sapiens
  misc_RNA (1)...(19): siRNA sense strand
gccauuaacaggccagaua

SEQ ID NO: 1743787 - RNA, 19 nt, Homo sapiens
  misc_RNA (1)...(19): siRNA sense strand
caucauacuuggacauauc

SEQ ID NO: 1743788 - RNA, 19 nt, Homo sapiens
  misc_RNA (1)...(19): siRNA sense strand
ugacagaaacauagauuug

SEQ ID NO: 1743789 - RNA, 19 nt, Homo sapiens
  misc_RNA (1)...(19): siRNA sense strand
gaaacuagacaagaaacuu

SEQ ID NO: 1743790 - RNA, 19 nt, Homo sapiens
  misc_RNA (1)...(19): siRNA sense strand
acacggaaauggaaacugu

SEQ ID NO: 1743791 - RNA, 19 nt, Homo sapiens
  misc_RNA (1)...(19): siRNA sense strand
uaaggagcuuguuucauau

SEQ ID NO: 1743792 - RNA, 19 nt, Homo sapiens
  misc_RNA (1)...(19): siRNA sense strand
cagugaaacuagacaagaa

SEQ ID NO: 1743793 - RNA, 19 nt, Homo sapiens
  misc_RNA (1)...(19): siRNA sense strand
aaacuguuauggacacuau

SEQ ID NO: 1743794 - RNA, 19 nt, Homo sapiens
  misc_RNA (1)...(19): siRNA sense strand
ugccagaacuccuugagaa

SEQ ID NO: 1743795 - RNA, 19 nt, Homo sapiens
  misc_RNA (1)...(19): siRNA sense strand
gagauccuauuccagaugu

SEQ ID NO: 1743796 - RNA, 19 nt, Homo sapiens
  misc_RNA (1)...(19): siRNA sense strand
ggaagaugaaggagccaua

SEQ ID NO: 1743797 - RNA, 19 nt, Homo sapiens
  misc_RNA (1)...(19): siRNA sense strand
acaggaagaugaggucaaa

SEQ ID NO: 1743798 - RNA, 19 nt, Homo sapiens
  misc_RNA (1)...(19): siRNA sense strand
gcucaguucccagaaauaa

SEQ ID NO: 1743799 - RNA, 19 nt, Homo sapiens
  misc_RNA (1)...(19): siRNA sense strand
gcaaaacuacucuggauaa

SEQ ID NO: 1743800 - RNA, 19 nt, Homo sapiens
  misc_RNA (1)...(19): siRNA sense strand
gcaagaaaauuggauguau

SEQ ID NO: 1743801 - RNA, 19 nt, Homo sapiens
  misc_RNA (1)...(19): siRNA sense strand
ggaggaggcaacuacauug

SEQ ID NO: 1743802 - RNA, 19 nt, Homo sapiens
  misc_RNA (1)...(19): siRNA sense strand
uaacacaaguagccaaggu

SEQ ID NO: 1743803 - RNA, 19 nt, Homo sapiens
  misc_RNA (1)...(19): siRNA sense strand
gcaggaacuccagaagaua

SEQ ID NO: 1743804 - RNA, 19 nt, Homo sapiens
  misc_RNA (1)...(19): siRNA sense strand
ggacauaucaagcauuggu

SEQ ID NO: 1743805 - RNA, 19 nt, Homo sapiens
  misc_RNA (1)...(19): siRNA sense strand
gcagaaaugguagcaguga

SEQ ID NO: 1743806 - RNA, 19 nt, Homo sapiens
  misc_RNA (1)...(19): siRNA sense strand
ucuaagagaugcaagaaac

SEQ ID NO: 1743807 - RNA, 19 nt, Homo sapiens
  misc_RNA (1)...(19): siRNA sense strand
gaauaucagaaucuuguug

SEQ ID NO: 1743808 - RNA, 19 nt, Homo sapiens
  misc_RNA (1)...(19): siRNA sense strand
agaaguaaacuggaagaua

SEQ ID NO: 1743809 - RNA, 19 nt, Homo sapiens
  misc_RNA (1)...(19): siRNA sense strand
gggaggaggcaacuacauu

SEQ ID NO: 1743810 - RNA, 19 nt, Homo sapiens
  misc_RNA (1)...(19): siRNA sense strand
aggcugauuuggagcaaua

SEQ ID NO: 1743811 - RNA, 19 nt, Homo sapiens
  misc_RNA (1)...(19): siRNA sense strand
caagaaacuucgagaaaau

SEQ ID NO: 1743812 - RNA, 19 nt, Homo sapiens
  misc_RNA (1)...(19): siRNA sense strand
uggaagauauugcaaaugc

SEQ ID NO: 1743813 - RNA, 19 nt, Homo sapiens
  misc_RNA (1)...(19): siRNA sense strand
gcacuaccacuaaaccaau

SEQ ID NO: 1743814 - RNA, 19 nt, Homo sapiens
  misc_RNA (1)...(19): siRNA sense strand
caggaacuccagaagauaa

SEQ ID NO: 1743815 - RNA, 19 nt, Homo sapiens
  misc_RNA (1)...(19): siRNA sense strand
gaucuucgaaaucaacuau

SEQ ID NO: 1743816 - RNA, 19 nt, Homo sapiens
  misc_RNA (1)...(19): siRNA sense strand
ugacaauaccgcuaagcua

SEQ ID NO: 1743817 - RNA, 19 nt, Homo sapiens
  misc_RNA (1)...(19): siRNA sense strand
gcagugaaacuagacaaga

SEQ ID NO: 1743818 - RNA, 19 nt, Homo sapiens
  misc_RNA (1)...(19): siRNA sense strand
gcaguauacuuuguaaugc

SEQ ID NO: 1743819 - RNA, 19 nt, Homo sapiens
  misc_RNA (1)...(19): siRNA sense strand
uuucauaucgugccauuaa

SEQ ID NO: 1743820 - RNA, 19 nt, Homo sapiens
  misc_RNA (1)...(19): siRNA sense strand
uaacaggccagauaucaca

SEQ ID NO: 1743821 - RNA, 19 nt, Homo sapiens
  misc_RNA (1)...(19): siRNA sense strand
gagcaaaacuacucuggau

SEQ ID NO: 1743822 - RNA, 19 nt, Homo sapiens
  misc_RNA (1)...(19): siRNA sense strand
cccagaaguugcagaauca

SEQ ID NO: 1743823 - RNA, 19 nt, Homo sapiens
  misc_RNA (1)...(19): siRNA sense strand
ucacagacacggaaaugga

SEQ ID NO: 1743824 - RNA, 19 nt, Homo sapiens
  misc_RNA (1)...(19): siRNA sense strand
cagcucaguucccagaaau

SEQ ID NO: 1743825 - RNA, 19 nt, Homo sapiens
  misc_RNA (1)...(19): siRNA sense strand
agaaucaguucagcaagaa

SEQ ID NO: 1743826 - RNA, 19 nt, Homo sapiens
  misc_RNA (1)...(19): siRNA sense strand
gaaguccauucccagaagu

SEQ ID NO: 1743827 - RNA, 19 nt, Homo sapiens
  misc_RNA (1)...(19): siRNA sense strand
gaacagcagcagaaauggu

SEQ ID NO: 1743828 - RNA, 19 nt, Homo sapiens
  misc_RNA (1)...(19): siRNA sense strand
ugagguuguuucuuaucua

SEQ ID NO: 1743829 - RNA, 19 nt, Homo sapiens
  misc_RNA (1)...(19): siRNA sense strand
caauaccgcuaagcuaaca

SEQ ID NO: 1743830 - RNA, 19 nt, Homo sapiens
  misc_RNA (1)...(19): siRNA sense strand
gggaaucacucugcaucug

SEQ ID NO: 1743831 - RNA, 19 nt, Homo sapiens
  misc_RNA (1)...(19): siRNA sense strand
gaaauggaaacuguuaugg

SEQ ID NO: 1743832 - RNA, 19 nt, Homo sapiens
  misc_RNA (1)...(19): siRNA sense strand
caacuacauugaauaucag

SEQ ID NO: 1743833 - RNA, 19 nt, Homo sapiens
  misc_RNA (1)...(19): siRNA sense strand
gaggaggcaacuacauuga

SEQ ID NO: 1743834 - RNA, 19 nt, Homo sapiens
  misc_RNA (1)...(19): siRNA sense strand
uggcagcacuaccacuaaa

SEQ ID NO: 1743835 - RNA, 19 nt, Homo sapiens
  misc_RNA (1)...(19): siRNA sense strand
ucaaacaguggaaggcuuu

SEQ ID NO: 1743836 - RNA, 19 nt, Homo sapiens
  misc_RNA (1)...(19): siRNA sense strand
cuggauaaaucucuucuag

SEQ ID NO: 1743837 - RNA, 19 nt, Homo sapiens
  misc_RNA (1)...(19): siRNA sense strand
ucugcuauuucaagaagua

SEQ ID NO: 1743838 - RNA, 19 nt, Homo sapiens
  misc_RNA (1)...(19): siRNA sense strand
auaaucagauguucaagag

SEQ ID NO: 1743839 - RNA, 19 nt, Homo sapiens
  misc_RNA (1)...(19): siRNA sense strand
cagauguuccugcaguaua

SEQ ID NO: 1743840 - RNA, 19 nt, Homo sapiens
  misc_RNA (1)...(19): siRNA sense strand
gaggcaacuacauugaaua

SEQ ID NO: 1743841 - RNA, 19 nt, Homo sapiens
  misc_RNA (1)...(19): siRNA sense strand
uaucacgagucaugaauac

SEQ ID NO: 1743842 - RNA, 19 nt, Homo sapiens
  misc_RNA (1)...(19): siRNA sense strand
guuauggacacuauaguug

SEQ ID NO: 1743843 - RNA, 19 nt, Homo sapiens
  misc_RNA (1)...(19): siRNA sense strand
ggaaacaaggcaaacacau

SEQ ID NO: 1743844 - RNA, 19 nt, Homo sapiens
  misc_RNA (1)...(19): siRNA sense strand
aucagaaucuuguugacua

SEQ ID NO: 1743845 - RNA, 19 nt, Homo sapiens
  misc_RNA (1)...(19): siRNA sense strand
aauacaggaucacaguuug

SEQ ID NO: 1743846 - RNA, 19 nt, Homo sapiens
  misc_RNA (1)...(19): siRNA sense strand
ugcaggaacuccagaagau

SEQ ID NO: 1743847 - RNA, 19 nt, Homo sapiens
  misc_RNA (1)...(19): siRNA sense strand
ccagaggcccuuauuaguc

SEQ ID NO: 1743848 - RNA, 19 nt, Homo sapiens
  misc_RNA (1)...(19): siRNA sense strand
cagaaaugguagcagugaa

SEQ ID NO: 1743849 - RNA, 19 nt, Homo sapiens
  misc_RNA (1)...(19): siRNA sense strand
caaaauaaggagcuuguuu

SEQ ID NO: 1743850 - RNA, 19 nt, Homo sapiens
  misc_RNA (1)...(19): siRNA sense strand
gugccaggaucuucgaaau

SEQ ID NO: 1743851 - RNA, 19 nt, Homo sapiens
  misc_RNA (1)...(19): siRNA sense strand
gaaguugcagaaucaguuc

SEQ ID NO: 1743852 - RNA, 19 nt, Homo sapiens
  misc_RNA (1)...(19): siRNA sense strand
agaaaugguagcagugaaa

SEQ ID NO: 1743853 - RNA, 19 nt, Homo sapiens
  misc_RNA (1)...(19): siRNA sense strand
cagcaaaaucuaccuguua

SEQ ID NO: 1743854 - RNA, 19 nt, Homo sapiens
  misc_RNA (1)...(19): siRNA sense strand
ggugcuagaccaaagagaa

SEQ ID NO: 1743855 - RNA, 19 nt, Homo sapiens
  misc_RNA (1)...(19): siRNA sense strand
acaagaaacuucgagaaaa

SEQ ID NO: 1743856 - RNA, 19 nt, Homo sapiens
  misc_RNA (1)...(19): siRNA sense strand
gaaguaaacuggaagauau

SEQ ID NO: 1743857 - RNA, 19 nt, Homo sapiens
  misc_RNA (1)...(19): siRNA sense strand
auaaggagcuuguuucaua

SEQ ID NO: 1743858 - RNA, 19 nt, Homo sapiens
  misc_RNA (1)...(19): siRNA sense strand
gcaacuacauugaauauca

SEQ ID NO: 1743859 - RNA, 19 nt, Homo sapiens
  misc_RNA (1)...(19): siRNA sense strand
uaacuccgguugauaaauu

SEQ ID NO: 1743860 - RNA, 19 nt, Homo sapiens
  misc_RNA (1)...(19): siRNA sense strand
gcaacuccuuuacaucaua

SEQ ID NO: 1743861 - RNA, 19 nt, Homo sapiens
  misc_RNA (1)...(19): siRNA sense strand
gaaacaaggcaaacacauu

SEQ ID NO: 1743862 - RNA, 19 nt, Homo sapiens
  misc_RNA (1)...(19): siRNA sense strand
aaacuacucuggauaaauc

SEQ ID NO: 1743863 - RNA, 19 nt, Homo sapiens
  misc_RNA (1)...(19): siRNA sense strand
gaauacaggaucacaguuu

SEQ ID NO: 1743864 - RNA, 19 nt, Homo sapiens
  misc_RNA (1)...(19): siRNA sense strand
uauaaucucuccucugcua

SEQ ID NO: 1743865 - RNA, 19 nt, Homo sapiens
  misc_RNA (1)...(19): siRNA sense strand
gaaucuuguugacuacaua

SEQ ID NO: 1743866 - RNA, 19 nt, Homo sapiens
  misc_RNA (1)...(19): siRNA sense strand
gacaauaccgcuaagcuaa

SEQ ID NO: 1743867 - RNA, 19 nt, Homo sapiens
  misc_RNA (1)...(19): siRNA sense strand
ggaagaugauauguuugua

SEQ ID NO: 1743868 - RNA, 19 nt, Homo sapiens
  misc_RNA (1)...(19): siRNA sense strand
aaacaaggcaaacacauuu

SEQ ID NO: 1743869 - RNA, 19 nt, Homo sapiens
  misc_RNA (1)...(19): siRNA sense strand
ggaggcaacuacauugaau

SEQ ID NO: 1743870 - RNA, 19 nt, Homo sapiens
  misc_RNA (1)...(19): siRNA sense strand
gaugaaggagccauaagua

SEQ ID NO: 1743871 - RNA, 19 nt, Homo sapiens
  misc_RNA (1)...(19): siRNA sense strand
gacaagaaacuucgagaaa

SEQ ID NO: 1743872 - RNA, 19 nt, Homo sapiens
  misc_RNA (1)...(19): siRNA sense strand
gaugaggucaaacgacuua

SEQ ID NO: 1743873 - RNA, 19 nt, Homo sapiens
  misc_RNA (1)...(19): siRNA sense strand
gaacauauaaaggcaagaa

SEQ ID NO: 1743874 - RNA, 19 nt, Homo sapiens
  misc_RNA (1)...(19): siRNA sense strand
uaaguaugcuuucugacaa

SEQ ID NO: 1743875 - RNA, 19 nt, Homo sapiens
  misc_RNA (1)...(19): siRNA sense strand
uaaacaggguuaauuugga

SEQ ID NO: 1743876 - RNA, 19 nt, Homo sapiens
  misc_RNA (1)...(19): siRNA sense strand
caucagcuguuaguucuuu

SEQ ID NO: 1743877 - RNA, 19 nt, Homo sapiens
  misc_RNA (1)...(19): siRNA sense strand
aaacaggguuaauuuggaa

SEQ ID NO: 1743878 - RNA, 19 nt, Homo sapiens
  misc_RNA (1)...(19): siRNA sense strand
cagaaucaguucagcaaga

SEQ ID NO: 1743879 - RNA, 19 nt, Homo sapiens
  misc_RNA (1)...(19): siRNA sense strand
cgaaacugaugacuauaga

SEQ ID NO: 1743880 - RNA, 19 nt, Homo sapiens
  misc_RNA (1)...(19): siRNA sense strand
ugacagauuuggccaagau

SEQ ID NO: 1743881 - RNA, 19 nt, Homo sapiens
  misc_RNA (1)...(19): siRNA sense strand
gagguuguuucuuaucuau

SEQ ID NO: 1743882 - RNA, 19 nt, Homo sapiens
  misc_RNA (1)...(19): siRNA sense strand
gccaggaucuucgaaauca

SEQ ID NO: 1743883 - RNA, 19 nt, Homo sapiens
  misc_RNA (1)...(19): siRNA sense strand
gcaaacacauuuuauaugg

SEQ ID NO: 1743884 - RNA, 19 nt, Homo sapiens
  misc_RNA (1)...(19): siRNA sense strand
uuauggagaugaagucaaa

SEQ ID NO: 1743885 - RNA, 19 nt, Homo sapiens
  misc_RNA (1)...(19): siRNA sense strand
gaagaugaaggagccauaa

SEQ ID NO: 1743886 - RNA, 19 nt, Homo sapiens
  misc_RNA (1)...(19): siRNA sense strand
ggaaauggaaacuguuaug

SEQ ID NO: 1743887 - RNA, 19 nt, Homo sapiens
  misc_RNA (1)...(19): siRNA sense strand
aaacauagauuuggcaacu

SEQ ID NO: 1743888 - RNA, 19 nt, Homo sapiens
  misc_RNA (1)...(19): siRNA sense strand
gccauuaacaggccagaua

SEQ ID NO: 1743889 - RNA, 19 nt, Homo sapiens
  misc_RNA (1)...(19): siRNA sense strand
caucauacuuggacauauc

SEQ ID NO: 1743890 - RNA, 19 nt, Homo sapiens
  misc_RNA (1)...(19): siRNA sense strand
ugacagaaacauagauuug

SEQ ID NO: 1743891 - RNA, 19 nt, Homo sapiens
  misc_RNA (1)...(19): siRNA sense strand
gaaacuagacaagaaacuu

SEQ ID NO: 1743892 - RNA, 19 nt, Homo sapiens
  misc_RNA (1)...(19): siRNA sense strand
acacggaaauggaaacugu

SEQ ID NO: 1743893 - RNA, 19 nt, Homo sapiens
  misc_RNA (1)...(19): siRNA sense strand
uaaggagcuuguuucauau

SEQ ID NO: 1743894 - RNA, 19 nt, Homo sapiens
  misc_RNA (1)...(19): siRNA sense strand
cagugaaacuagacaagaa

SEQ ID NO: 1743895 - RNA, 19 nt, Homo sapiens
  misc_RNA (1)...(19): siRNA sense strand
gagauccuauuccagaugu

SEQ ID NO: 1743896 - RNA, 19 nt, Homo sapiens
  misc_RNA (1)...(19): siRNA sense strand
ugccagaacuccuugagaa

SEQ ID NO: 1743897 - RNA, 19 nt, Homo sapiens
  misc_RNA (1)...(19): siRNA sense strand
ggaagaugaaggagccaua

SEQ ID NO: 1743898 - RNA, 19 nt, Homo sapiens
  misc_RNA (1)...(19): siRNA sense strand
aaacuguuauggacacuau

SEQ ID NO: 1743899 - RNA, 19 nt, Homo sapiens
  misc_RNA (1)...(19): siRNA sense strand
acaggaagaugaggucaaa

SEQ ID NO: 1743900 - RNA, 19 nt, Homo sapiens
  misc_RNA (1)...(19): siRNA sense strand
gcucaguucccagaaauaa

SEQ ID NO: 1743901 - RNA, 19 nt, Homo sapiens
  misc_RNA (1)...(19): siRNA sense strand
gcaaaacuacucuggauaa

SEQ ID NO: 1743902 - RNA, 19 nt, Homo sapiens
  misc_RNA (1)...(19): siRNA sense strand
gcaagaaaauuggauguau

SEQ ID NO: 1743903 - RNA, 19 nt, Homo sapiens
  misc_RNA (1)...(19): siRNA sense strand
ggaggaggcaacuacauug

SEQ ID NO: 1743904 - RNA, 19 nt, Homo sapiens
  misc_RNA (1)...(19): siRNA sense strand
uaacacaaguagccaaggu

SEQ ID NO: 1743905 - RNA, 19 nt, Homo sapiens
  misc_RNA (1)...(19): siRNA sense strand
gcaggaacuccagaagaua

SEQ ID NO: 1743906 - RNA, 19 nt, Homo sapiens
  misc_RNA (1)...(19): siRNA sense strand
ggacauaucaagcauuggu

SEQ ID NO: 1743907 - RNA, 19 nt, Homo sapiens
  misc_RNA (1)...(19): siRNA sense strand
gcagaaaugguagcaguga

SEQ ID NO: 1743908 - RNA, 19 nt, Homo sapiens
  misc_RNA (1)...(19): siRNA sense strand
ucuaagagaugcaagaaac

SEQ ID NO: 1743909 - RNA, 19 nt, Homo sapiens
  misc_RNA (1)...(19): siRNA sense strand
gaauaucagaaucuuguug

SEQ ID NO: 1743910 - RNA, 19 nt, Homo sapiens
  misc_RNA (1)...(19): siRNA sense strand
agaaguaaacuggaagaua

SEQ ID NO: 1743911 - RNA, 19 nt, Homo sapiens
  misc_RNA (1)...(19): siRNA sense strand
cagauuuggccaagauaua

SEQ ID NO: 1743912 - RNA, 19 nt, Homo sapiens
  misc_RNA (1)...(19): siRNA sense strand
gggaggaggcaacuacauu

SEQ ID NO: 1743913 - RNA, 19 nt, Homo sapiens
  misc_RNA (1)...(19): siRNA sense strand
aggcugauuuggagcaaua

SEQ ID NO: 1743914 - RNA, 19 nt, Homo sapiens
  misc_RNA (1)...(19): siRNA sense strand
caagaaacuucgagaaaau

SEQ ID NO: 1743915 - RNA, 19 nt, Homo sapiens
  misc_RNA (1)...(19): siRNA sense strand
uggaagauauugcaaaugc

SEQ ID NO: 1743916 - RNA, 19 nt, Homo sapiens
  misc_RNA (1)...(19): siRNA sense strand
gcacuaccacuaaaccaau

SEQ ID NO: 1743917 - RNA, 19 nt, Homo sapiens
  misc_RNA (1)...(19): siRNA sense strand
caggaacuccagaagauaa

SEQ ID NO: 1743918 - RNA, 19 nt, Homo sapiens
  misc_RNA (1)...(19): siRNA sense strand
gcaguauacuuuguaaugc

SEQ ID NO: 1743919 - RNA, 19 nt, Homo sapiens
  misc_RNA (1)...(19): siRNA sense strand
ugacaauaccgcuaagcua

SEQ ID NO: 1743920 - RNA, 19 nt, Homo sapiens
  misc_RNA (1)...(19): siRNA sense strand
gcagugaaacuagacaaga

SEQ ID NO: 1743921 - RNA, 19 nt, Homo sapiens
  misc_RNA (1)...(19): siRNA sense strand
uuucauaucgugccauuaa

SEQ ID NO: 1743922 - RNA, 19 nt, Homo sapiens
  misc_RNA (1)...(19): siRNA sense strand
gaucuucgaaaucaacuau

SEQ ID NO: 1743923 - RNA, 19 nt, Homo sapiens
  misc_RNA (1)...(19): siRNA sense strand
uaacaggccagauaucaca

SEQ ID NO: 1743924 - RNA, 19 nt, Homo sapiens
  misc_RNA (1)...(19): siRNA sense strand
gagcaaaacuacucuggau

SEQ ID NO: 1743925 - RNA, 19 nt, Homo sapiens
  misc_RNA (1)...(19): siRNA sense strand
cccagaaguugcagaauca

SEQ ID NO: 1743926 - RNA, 19 nt, Homo sapiens
  misc_RNA (1)...(19): siRNA sense strand
ucacagacacggaaaugga

SEQ ID NO: 1743927 - RNA, 19 nt, Homo sapiens
  misc_RNA (1)...(19): siRNA sense strand
cagcucaguucccagaaau

SEQ ID NO: 1743928 - RNA, 19 nt, Homo sapiens
  misc_RNA (1)...(19): siRNA sense strand
agaaucaguucagcaagaa

SEQ ID NO: 1743929 - RNA, 19 nt, Homo sapiens
  misc_RNA (1)...(19): siRNA sense strand
gaaguccauucccagaagu

SEQ ID NO: 1743930 - RNA, 19 nt, Homo sapiens
  misc_RNA (1)...(19): siRNA sense strand
gaacagcagcagaaauggu

SEQ ID NO: 1743931 - RNA, 19 nt, Homo sapiens
  misc_RNA (1)...(19): siRNA sense strand
gggaaucacucugcaucug

SEQ ID NO: 1743932 - RNA, 19 nt, Homo sapiens
  misc_RNA (1)...(19): siRNA sense strand
ugagguuguuucuuaucua

SEQ ID NO: 1743933 - RNA, 19 nt, Homo sapiens
  misc_RNA (1)...(19): siRNA sense strand
caauaccgcuaagcuaaca

SEQ ID NO: 1743934 - RNA, 19 nt, Homo sapiens
  misc_RNA (1)...(19): siRNA sense strand
ugaaggagcuaagagacau

SEQ ID NO: 1743935 - RNA, 19 nt, Homo sapiens
  misc_RNA (1)...(19): siRNA sense strand
ucugcuauuucaagaagua

SEQ ID NO: 1743936 - RNA, 19 nt, Homo sapiens
  misc_RNA (1)...(19): siRNA sense strand
caacuacauugaauaucag

SEQ ID NO: 1743937 - RNA, 19 nt, Homo sapiens
  misc_RNA (1)...(19): siRNA sense strand
gaggaggcaacuacauuga

SEQ ID NO: 1743938 - RNA, 19 nt, Homo sapiens
  misc_RNA (1)...(19): siRNA sense strand
uggcagcacuaccacuaaa

SEQ ID NO: 1743939 - RNA, 19 nt, Homo sapiens
  misc_RNA (1)...(19): siRNA sense strand
ucaaacaguggaaggcuuu

SEQ ID NO: 1743940 - RNA, 19 nt, Homo sapiens
  misc_RNA (1)...(19): siRNA sense strand
cuggauaaaucucuucuag

SEQ ID NO: 1743941 - RNA, 19 nt, Homo sapiens
  misc_RNA (1)...(19): siRNA sense strand
auaaucagauguucaagag

SEQ ID NO: 1743942 - RNA, 19 nt, Homo sapiens
  misc_RNA (1)...(19): siRNA sense strand
gaaauggaaacuguuaugg

SEQ ID NO: 1743943 - RNA, 19 nt, Homo sapiens
  misc_RNA (1)...(19): siRNA sense strand
cagauguuccugcaguaua

SEQ ID NO: 1743944 - RNA, 19 nt, Homo sapiens
  misc_RNA (1)...(19): siRNA sense strand
gaggcaacuacauugaaua

SEQ ID NO: 1743945 - RNA, 19 nt, Homo sapiens
  misc_RNA (1)...(19): siRNA sense strand
uaucacgagucaugaauac

SEQ ID NO: 1743946 - RNA, 19 nt, Homo sapiens
  misc_RNA (1)...(19): siRNA sense strand
guuauggacacuauaguug

SEQ ID NO: 1743947 - RNA, 19 nt, Homo sapiens
  misc_RNA (1)...(19): siRNA sense strand
ggaaacaaggcaaacacau

SEQ ID NO: 1743948 - RNA, 19 nt, Homo sapiens
  misc_RNA (1)...(19): siRNA sense strand
aucagaaucuuguugacua

SEQ ID NO: 1743949 - RNA, 19 nt, Homo sapiens
  misc_RNA (1)...(19): siRNA sense strand
aauacaggaucacaguuug

SEQ ID NO: 1743950 - RNA, 19 nt, Homo sapiens
  misc_RNA (1)...(19): siRNA sense strand
ugcaggaacuccagaagau

SEQ ID NO: 1743951 - RNA, 19 nt, Homo sapiens
  misc_RNA (1)...(19): siRNA sense strand
ccagaggcccuuauuaguc

SEQ ID NO: 1743952 - RNA, 19 nt, Homo sapiens
  misc_RNA (1)...(19): siRNA sense strand
cagaaaugguagcagugaa

SEQ ID NO: 1743953 - RNA, 19 nt, Homo sapiens
  misc_RNA (1)...(19): siRNA sense strand
gugccaggaucuucgaaau

SEQ ID NO: 1743954 - RNA, 19 nt, Homo sapiens
  misc_RNA (1)...(19): siRNA sense strand
gaaguugcagaaucaguuc

SEQ ID NO: 1743955 - RNA, 19 nt, Homo sapiens
  misc_RNA (1)...(19): siRNA sense strand
caaaauaaggagcuuguuu

SEQ ID NO: 1743956 - RNA, 19 nt, Homo sapiens
  misc_RNA (1)...(19): siRNA sense strand
gagaggagcucaucaagaa

SEQ ID NO: 1743957 - RNA, 19 nt, Homo sapiens
  misc_RNA (1)...(19): siRNA sense strand
gaagagaaaucaagcaaag

SEQ ID NO: 1743958 - RNA, 19 nt, Homo sapiens
  misc_RNA (1)...(19): siRNA sense strand
ccaaagaccugccguggaa

SEQ ID NO: 1743959 - RNA, 19 nt, Homo sapiens
  misc_RNA (1)...(19): siRNA sense strand
aagcaaagauugacaagaa

SEQ ID NO: 1743960 - RNA, 19 nt, Homo sapiens
  misc_RNA (1)...(19): siRNA sense strand
cagaaggacugaugaagaa

SEQ ID NO: 1743961 - RNA, 19 nt, Homo sapiens
  misc_RNA (1)...(19): siRNA sense strand
gaucauaaauucugaacuc

SEQ ID NO: 1743962 - RNA, 19 nt, Homo sapiens
  misc_RNA (1)...(19): siRNA sense strand
ggaggaggcuuggagcuuu

SEQ ID NO: 1743963 - RNA, 19 nt, Homo sapiens
  misc_RNA (1)...(19): siRNA sense strand
gaagaaagaagagaaauca

SEQ ID NO: 1743964 - RNA, 19 nt, Homo sapiens
  misc_RNA (1)...(19): siRNA sense strand
cgucagcgcuggagaagaa

SEQ ID NO: 1743965 - RNA, 19 nt, Homo sapiens
  misc_RNA (1)...(19): siRNA sense strand
uaaagggucuccaaagaag

SEQ ID NO: 1743966 - RNA, 19 nt, Homo sapiens
  misc_RNA (1)...(19): siRNA sense strand
guaaugaaauggagguaca

SEQ ID NO: 1743967 - RNA, 19 nt, Homo sapiens
  misc_RNA (1)...(19): siRNA sense strand
cugaacgacuccauuauuu

SEQ ID NO: 1743968 - RNA, 19 nt, Homo sapiens
  misc_RNA (1)...(19): siRNA sense strand
caaagaagcggcuggaugu

SEQ ID NO: 1743969 - RNA, 19 nt, Homo sapiens
  misc_RNA (1)...(19): siRNA sense strand
gaaaguaaagggucuccaa

SEQ ID NO: 1743970 - RNA, 19 nt, Homo sapiens
  misc_RNA (1)...(19): siRNA sense strand
gagcuggagagaagaaaua

SEQ ID NO: 1743971 - RNA, 19 nt, Homo sapiens
  misc_RNA (1)...(19): siRNA sense strand
guaaagggucuccaaagaa

SEQ ID NO: 1743972 - RNA, 19 nt, Homo sapiens
  misc_RNA (1)...(19): siRNA sense strand
aggagaaccugaucauaaa

SEQ ID NO: 1743973 - RNA, 19 nt, Homo sapiens
  misc_RNA (1)...(19): siRNA sense strand
gcgcugaacgacuccauua

SEQ ID NO: 1743974 - RNA, 19 nt, Homo sapiens
  misc_RNA (1)...(19): siRNA sense strand
uggaagagcuggagagaag

SEQ ID NO: 1743975 - RNA, 19 nt, Homo sapiens
  misc_RNA (1)...(19): siRNA sense strand
gauaaggcagcaauucgua

SEQ ID NO: 1743976 - RNA, 19 nt, Homo sapiens
  misc_RNA (1)...(19): siRNA sense strand
aaggagaaccugaucauaa

SEQ ID NO: 1743977 - RNA, 19 nt, Homo sapiens
  misc_RNA (1)...(19): siRNA sense strand
gaacgacuccauuauuucu

SEQ ID NO: 1743978 - RNA, 19 nt, Homo sapiens
  misc_RNA (1)...(19): siRNA sense strand
gcaaacaggaacuagaaga

SEQ ID NO: 1743979 - RNA, 19 nt, Homo sapiens
  misc_RNA (1)...(19): siRNA sense strand
cuagaagaccggaacauuu

SEQ ID NO: 1743980 - RNA, 19 nt, Homo sapiens
  misc_RNA (1)...(19): siRNA sense strand
aguaaagggucuccaaaga

SEQ ID NO: 1743981 - RNA, 19 nt, Homo sapiens
  misc_RNA (1)...(19): siRNA sense strand
gagacccacuguugaugaa

SEQ ID NO: 1743982 - RNA, 19 nt, Homo sapiens
  misc_RNA (1)...(19): siRNA sense strand
gagaaccugaucauaaauu

SEQ ID NO: 1743983 - RNA, 19 nt, Homo sapiens
  misc_RNA (1)...(19): siRNA sense strand
gaacaaggagaaccugauc

SEQ ID NO: 1743984 - RNA, 19 nt, Homo sapiens
  misc_RNA (1)...(19): siRNA sense strand
gcugaacgacuccauuauu

SEQ ID NO: 1743985 - RNA, 19 nt, Homo sapiens
  misc_RNA (1)...(19): siRNA sense strand
guccucagcugcccacuug

SEQ ID NO: 1743986 - RNA, 19 nt, Homo sapiens
  misc_RNA (1)...(19): siRNA sense strand
gacccacuguugaugaauu

SEQ ID NO: 1743987 - RNA, 19 nt, Homo sapiens
  misc_RNA (1)...(19): siRNA sense strand
gaacugccgcuaaggaauc

SEQ ID NO: 1743988 - RNA, 19 nt, Homo sapiens
  misc_RNA (1)...(19): siRNA sense strand
ggcagcagaucgagaugaa

SEQ ID NO: 1743989 - RNA, 19 nt, Homo sapiens
  misc_RNA (1)...(19): siRNA sense strand
acaaaggaaugaucagaca

SEQ ID NO: 1743990 - RNA, 19 nt, Homo sapiens
  misc_RNA (1)...(19): siRNA sense strand
gaagagcuggagagaagaa

SEQ ID NO: 1743991 - RNA, 19 nt, Homo sapiens
  misc_RNA (1)...(19): siRNA sense strand
gcaggaagaaagaagagaa

SEQ ID NO: 1743992 - RNA, 19 nt, Homo sapiens
  misc_RNA (1)...(19): siRNA sense strand
caaaagcgcaggacuauga

SEQ ID NO: 1743993 - RNA, 19 nt, Homo sapiens
  misc_RNA (1)...(19): siRNA sense strand
aaucagagacccacuguug

SEQ ID NO: 1743994 - RNA, 19 nt, Homo sapiens
  misc_RNA (1)...(19): siRNA sense strand
ggaagaaagaagagaaauc

SEQ ID NO: 1743995 - RNA, 19 nt, Homo sapiens
  misc_RNA (1)...(19): siRNA sense strand
ccagaaggacugaugaaga

SEQ ID NO: 1743996 - RNA, 19 nt, Homo sapiens
  misc_RNA (1)...(19): siRNA sense strand
gaggaggcuuggagcuuug

SEQ ID NO: 1743997 - RNA, 19 nt, Homo sapiens
  misc_RNA (1)...(19): siRNA sense strand
gcagauaaggcagcaauuc

SEQ ID NO: 1743998 - RNA, 19 nt, Homo sapiens
  misc_RNA (1)...(19): siRNA sense strand
gaacacugccacggaaaug

SEQ ID NO: 1743999 - RNA, 19 nt, Homo sapiens
  misc_RNA (1)...(19): siRNA sense strand
acaagaaagcuuaaucaga

SEQ ID NO: 1744000 - RNA, 19 nt, Homo sapiens
  misc_RNA (1)...(19): siRNA sense strand
ggcagcaauucguaaagaa

SEQ ID NO: 1744001 - RNA, 19 nt, Homo sapiens
  misc_RNA (1)...(19): siRNA sense strand
caaggagaaccugaucaua

SEQ ID NO: 1744002 - RNA, 19 nt, Homo sapiens
  misc_RNA (1)...(19): siRNA sense strand
guugaugaauuaagagaca

SEQ ID NO: 1744003 - RNA, 19 nt, Homo sapiens
  misc_RNA (1)...(19): siRNA sense strand
ugacaagaaagcuuaauca

SEQ ID NO: 1744004 - RNA, 19 nt, Homo sapiens
  misc_RNA (1)...(19): siRNA sense strand
agacagagcaggaagaaag

SEQ ID NO: 1744005 - RNA, 19 nt, Homo sapiens
  misc_RNA (1)...(19): siRNA sense strand
uaaggaaucugaggagaac

SEQ ID NO: 1744006 - RNA, 19 nt, Homo sapiens
  misc_RNA (1)...(19): siRNA sense strand
ucaaggaagagaaaguaaa

SEQ ID NO: 1744007 - RNA, 19 nt, Homo sapiens
  misc_RNA (1)...(19): siRNA sense strand
caacgucagcgcuggagaa

SEQ ID NO: 1744008 - RNA, 19 nt, Homo sapiens
  misc_RNA (1)...(19): siRNA sense strand
caaggaagagaaaguaaag

SEQ ID NO: 1744009 - RNA, 19 nt, Homo sapiens
  misc_RNA (1)...(19): siRNA sense strand
agaugaagcuuuccaaacg

SEQ ID NO: 1744010 - RNA, 19 nt, Homo sapiens
  misc_RNA (1)...(19): siRNA sense strand
ugauacgauucagugauua

SEQ ID NO: 1744011 - RNA, 19 nt, Homo sapiens
  misc_RNA (1)...(19): siRNA sense strand
gcaaagauugacaagaaag

SEQ ID NO: 1744012 - RNA, 19 nt, Homo sapiens
  misc_RNA (1)...(19): siRNA sense strand
ggacugaugaagaaagaca

SEQ ID NO: 1744013 - RNA, 19 nt, Homo sapiens
  misc_RNA (1)...(19): siRNA sense strand
gaaauggagguacaugcau

SEQ ID NO: 1744014 - RNA, 19 nt, Homo sapiens
  misc_RNA (1)...(19): siRNA sense strand
ugaaacaaaggaaugauca

SEQ ID NO: 1744015 - RNA, 19 nt, Homo sapiens
  misc_RNA (1)...(19): siRNA sense strand
gagaugaagcuuuccaaac

SEQ ID NO: 1744016 - RNA, 19 nt, Homo sapiens
  misc_RNA (1)...(19): siRNA sense strand
gaucuucaaacccuggaaa

SEQ ID NO: 1744017 - RNA, 19 nt, Homo sapiens
  misc_RNA (1)...(19): siRNA sense strand
uaaggcagcaauucguaaa

SEQ ID NO: 1744018 - RNA, 19 nt, Homo sapiens
  misc_RNA (1)...(19): siRNA sense strand
acccacuguugaugaauua

SEQ ID NO: 1744019 - RNA, 19 nt, Homo sapiens
  misc_RNA (1)...(19): siRNA sense strand
aagcaaacaggaacuagaa

SEQ ID NO: 1744020 - RNA, 19 nt, Homo sapiens
  misc_RNA (1)...(19): siRNA sense strand
caagcaaacaggaacuaga

SEQ ID NO: 1744021 - RNA, 19 nt, Homo sapiens
  misc_RNA (1)...(19): siRNA sense strand
gaaccacccacucccaagu

SEQ ID NO: 1744022 - RNA, 19 nt, Homo sapiens
  misc_RNA (1)...(19): siRNA sense strand
uaucuggucucagggauuc

SEQ ID NO: 1744023 - RNA, 19 nt, Homo sapiens
  misc_RNA (1)...(19): siRNA sense strand
aaacaaaggaaugaucaga

SEQ ID NO: 1744024 - RNA, 19 nt, Homo sapiens
  misc_RNA (1)...(19): siRNA sense strand
gaaggacugaugaagaaag

SEQ ID NO: 1744025 - RNA, 19 nt, Homo sapiens
  misc_RNA (1)...(19): siRNA sense strand
gcgaacugccgcuaaggaa

SEQ ID NO: 1744026 - RNA, 19 nt, Homo sapiens
  misc_RNA (1)...(19): siRNA sense strand
cgagaggagcucaucaaga

SEQ ID NO: 1744027 - RNA, 19 nt, Homo sapiens
  misc_RNA (1)...(19): siRNA sense strand
ggaacacugccacggaaau

SEQ ID NO: 1744028 - RNA, 19 nt, Homo sapiens
  misc_RNA (1)...(19): siRNA sense strand
agaaccugaucauaaauuc

SEQ ID NO: 1744029 - RNA, 19 nt, Homo sapiens
  misc_RNA (1)...(19): siRNA sense strand
uuccaagccuccagcauga

SEQ ID NO: 1744030 - RNA, 19 nt, Homo sapiens
  misc_RNA (1)...(19): siRNA sense strand
ugacaggagggcagacaaa

SEQ ID NO: 1744031 - RNA, 19 nt, Homo sapiens
  misc_RNA (1)...(19): siRNA sense strand
agauugacaagaaagcuua

SEQ ID NO: 1744032 - RNA, 19 nt, Homo sapiens
  misc_RNA (1)...(19): siRNA sense strand
gaacuagaagaccggaaca

SEQ ID NO: 1744033 - RNA, 19 nt, Homo sapiens
  misc_RNA (1)...(19): siRNA sense strand
uaaggaaccggccaagcaa

SEQ ID NO: 1744034 - RNA, 19 nt, Homo sapiens
  misc_RNA (1)...(19): siRNA sense strand
aaaguaaagggucuccaaa

SEQ ID NO: 1744035 - RNA, 19 nt, Homo sapiens
  misc_RNA (1)...(19): siRNA sense strand
cgagaugaagcuuuccaaa

SEQ ID NO: 1744036 - RNA, 19 nt, Homo sapiens
  misc_RNA (1)...(19): siRNA sense strand
aaggacugaugaagaaaga

SEQ ID NO: 1744037 - RNA, 19 nt, Homo sapiens
  misc_RNA (1)...(19): siRNA sense strand
cuaaggaaccggccaagca

SEQ ID NO: 1744038 - RNA, 19 nt, Homo sapiens
  misc_RNA (1)...(19): siRNA sense strand
ggagaaccugaucauaaau

SEQ ID NO: 1744039 - RNA, 19 nt, Homo sapiens
  misc_RNA (1)...(19): siRNA sense strand
ggacaguuuucaaggaaga

SEQ ID NO: 1744040 - RNA, 19 nt, Homo sapiens
  misc_RNA (1)...(19): siRNA sense strand
caagauuccacaggccaua

SEQ ID NO: 1744041 - RNA, 19 nt, Homo sapiens
  misc_RNA (1)...(19): siRNA sense strand
aagaaagcuuaaucagaga

SEQ ID NO: 1744042 - RNA, 19 nt, Homo sapiens
  misc_RNA (1)...(19): siRNA sense strand
agaaagaagagaaaucaag

SEQ ID NO: 1744043 - RNA, 19 nt, Homo sapiens
  misc_RNA (1)...(19): siRNA sense strand
aaaggaaugaucagacaga

SEQ ID NO: 1744044 - RNA, 19 nt, Homo sapiens
  misc_RNA (1)...(19): siRNA sense strand
cuaaggaaucugaggagaa

SEQ ID NO: 1744045 - RNA, 19 nt, Homo sapiens
  misc_RNA (1)...(19): siRNA sense strand
cacuguugaugaauuaaga

SEQ ID NO: 1744046 - RNA, 19 nt, Homo sapiens
  misc_RNA (1)...(19): siRNA sense strand
agagaaaucaagcaaagau

SEQ ID NO: 1744047 - RNA, 19 nt, Homo sapiens
  misc_RNA (1)...(19): siRNA sense strand
caggaagaaagaagagaaa

SEQ ID NO: 1744048 - RNA, 19 nt, Homo sapiens
  misc_RNA (1)...(19): siRNA sense strand
gacagagcaggaagaaaga

SEQ ID NO: 1744049 - RNA, 19 nt, Homo sapiens
  misc_RNA (1)...(19): siRNA sense strand
agaucgagaugaagcuuuc

SEQ ID NO: 1744050 - RNA, 19 nt, Homo sapiens
  misc_RNA (1)...(19): siRNA sense strand
ucagagacccacuguugau

SEQ ID NO: 1744051 - RNA, 19 nt, Homo sapiens
  misc_RNA (1)...(19): siRNA sense strand
agcaaagauugacaagaaa

SEQ ID NO: 1744052 - RNA, 19 nt, Homo sapiens
  misc_RNA (1)...(19): siRNA sense strand
acucaaagacgacuugcuu

SEQ ID NO: 1744053 - RNA, 19 nt, Homo sapiens
  misc_RNA (1)...(19): siRNA sense strand
aggcagcaauucguaaaga

SEQ ID NO: 1744054 - RNA, 19 nt, Homo sapiens
  misc_RNA (1)...(19): siRNA sense strand
uagaagaccggaacauuuu

SEQ ID NO: 1744055 - RNA, 19 nt, Homo sapiens
  misc_RNA (1)...(19): siRNA sense strand
aaucugaggagaacaagga

SEQ ID NO: 1744056 - RNA, 19 nt, Homo sapiens
  misc_RNA (1)...(19): siRNA sense strand
gagaggagcucaucaagaa

SEQ ID NO: 1744057 - RNA, 19 nt, Homo sapiens
  misc_RNA (1)...(19): siRNA sense strand
gaagagaaaucaagcaaag

SEQ ID NO: 1744058 - RNA, 19 nt, Homo sapiens
  misc_RNA (1)...(19): siRNA sense strand
ccaaagaccugccguggaa

SEQ ID NO: 1744059 - RNA, 19 nt, Homo sapiens
  misc_RNA (1)...(19): siRNA sense strand
aagcaaagauugacaagaa

SEQ ID NO: 1744060 - RNA, 19 nt, Homo sapiens
  misc_RNA (1)...(19): siRNA sense strand
cagaaggacugaugaagaa

SEQ ID NO: 1744061 - RNA, 19 nt, Homo sapiens
  misc_RNA (1)...(19): siRNA sense strand
gaucauaaauucugaacuc

SEQ ID NO: 1744062 - RNA, 19 nt, Homo sapiens
  misc_RNA (1)...(19): siRNA sense strand
ggaggaggcuuggagcuuu

SEQ ID NO: 1744063 - RNA, 19 nt, Homo sapiens
  misc_RNA (1)...(19): siRNA sense strand
gaagaaagaagagaaauca

SEQ ID NO: 1744064 - RNA, 19 nt, Homo sapiens
  misc_RNA (1)...(19): siRNA sense strand
cgucagcgcuggagaagaa

SEQ ID NO: 1744065 - RNA, 19 nt, Homo sapiens
  misc_RNA (1)...(19): siRNA sense strand
uaaagggucuccaaagaag

SEQ ID NO: 1744066 - RNA, 19 nt, Homo sapiens
  misc_RNA (1)...(19): siRNA sense strand
guaaugaaauggagguaca

SEQ ID NO: 1744067 - RNA, 19 nt, Homo sapiens
  misc_RNA (1)...(19): siRNA sense strand
cugaacgacuccauuauuu

SEQ ID NO: 1744068 - RNA, 19 nt, Homo sapiens
  misc_RNA (1)...(19): siRNA sense strand
caaagaagcggcuggaugu

SEQ ID NO: 1744069 - RNA, 19 nt, Homo sapiens
  misc_RNA (1)...(19): siRNA sense strand
gaaaguaaagggucuccaa

SEQ ID NO: 1744070 - RNA, 19 nt, Homo sapiens
  misc_RNA (1)...(19): siRNA sense strand
gagcuggagagaagaaaua

SEQ ID NO: 1744071 - RNA, 19 nt, Homo sapiens
  misc_RNA (1)...(19): siRNA sense strand
guaaagggucuccaaagaa

SEQ ID NO: 1744072 - RNA, 19 nt, Homo sapiens
  misc_RNA (1)...(19): siRNA sense strand
aggagaaccugaucauaaa

SEQ ID NO: 1744073 - RNA, 19 nt, Homo sapiens
  misc_RNA (1)...(19): siRNA sense strand
gcgcugaacgacuccauua

SEQ ID NO: 1744074 - RNA, 19 nt, Homo sapiens
  misc_RNA (1)...(19): siRNA sense strand
uggaagagcuggagagaag

SEQ ID NO: 1744075 - RNA, 19 nt, Homo sapiens
  misc_RNA (1)...(19): siRNA sense strand
gauaaggcagcaauucgua

SEQ ID NO: 1744076 - RNA, 19 nt, Homo sapiens
  misc_RNA (1)...(19): siRNA sense strand
aaggagaaccugaucauaa

SEQ ID NO: 1744077 - RNA, 19 nt, Homo sapiens
  misc_RNA (1)...(19): siRNA sense strand
gaacgacuccauuauuucu

SEQ ID NO: 1744078 - RNA, 19 nt, Homo sapiens
  misc_RNA (1)...(19): siRNA sense strand
gcaaacaggaacuagaaga

SEQ ID NO: 1744079 - RNA, 19 nt, Homo sapiens
  misc_RNA (1)...(19): siRNA sense strand
cuagaagaccggaacauuu

SEQ ID NO: 1744080 - RNA, 19 nt, Homo sapiens
  misc_RNA (1)...(19): siRNA sense strand
aguaaagggucuccaaaga

SEQ ID NO: 1744081 - RNA, 19 nt, Homo sapiens
  misc_RNA (1)...(19): siRNA sense strand
gagacccacuguugaugaa

SEQ ID NO: 1744082 - RNA, 19 nt, Homo sapiens
  misc_RNA (1)...(19): siRNA sense strand
gagaaccugaucauaaauu

SEQ ID NO: 1744083 - RNA, 19 nt, Homo sapiens
  misc_RNA (1)...(19): siRNA sense strand
gaacaaggagaaccugauc

SEQ ID NO: 1744084 - RNA, 19 nt, Homo sapiens
  misc_RNA (1)...(19): siRNA sense strand
gcugaacgacuccauuauu

SEQ ID NO: 1744085 - RNA, 19 nt, Homo sapiens
  misc_RNA (1)...(19): siRNA sense strand
guccucagcugcccacuug

SEQ ID NO: 1744086 - RNA, 19 nt, Homo sapiens
  misc_RNA (1)...(19): siRNA sense strand
gacccacuguugaugaauu

SEQ ID NO: 1744087 - RNA, 19 nt, Homo sapiens
  misc_RNA (1)...(19): siRNA sense strand
gaacugccgcuaaggaauc

SEQ ID NO: 1744088 - RNA, 19 nt, Homo sapiens
  misc_RNA (1)...(19): siRNA sense strand
ggcagcagaucgagaugaa

SEQ ID NO: 1744089 - RNA, 19 nt, Homo sapiens
  misc_RNA (1)...(19): siRNA sense strand
acaaaggaaugaucagaca

SEQ ID NO: 1744090 - RNA, 19 nt, Homo sapiens
  misc_RNA (1)...(19): siRNA sense strand
gaagagcuggagagaagaa

SEQ ID NO: 1744091 - RNA, 19 nt, Homo sapiens
  misc_RNA (1)...(19): siRNA sense strand
gcaggaagaaagaagagaa

SEQ ID NO: 1744092 - RNA, 19 nt, Homo sapiens
  misc_RNA (1)...(19): siRNA sense strand
caaaagcgcaggacuauga

SEQ ID NO: 1744093 - RNA, 19 nt, Homo sapiens
  misc_RNA (1)...(19): siRNA sense strand
aaucagagacccacuguug

SEQ ID NO: 1744094 - RNA, 19 nt, Homo sapiens
  misc_RNA (1)...(19): siRNA sense strand
ggaagaaagaagagaaauc

SEQ ID NO: 1744095 - RNA, 19 nt, Homo sapiens
  misc_RNA (1)...(19): siRNA sense strand
ccagaaggacugaugaaga

SEQ ID NO: 1744096 - RNA, 19 nt, Homo sapiens
  misc_RNA (1)...(19): siRNA sense strand
gaggaggcuuggagcuuug

SEQ ID NO: 1744097 - RNA, 19 nt, Homo sapiens
  misc_RNA (1)...(19): siRNA sense strand
gcagauaaggcagcaauuc

SEQ ID NO: 1744098 - RNA, 19 nt, Homo sapiens
  misc_RNA (1)...(19): siRNA sense strand
gaacacugccacggaaaug

SEQ ID NO: 1744099 - RNA, 19 nt, Homo sapiens
  misc_RNA (1)...(19): siRNA sense strand
acaagaaagcuuaaucaga

SEQ ID NO: 1744100 - RNA, 19 nt, Homo sapiens
  misc_RNA (1)...(19): siRNA sense strand
ggcagcaauucguaaagaa

SEQ ID NO: 1744101 - RNA, 19 nt, Homo sapiens
  misc_RNA (1)...(19): siRNA sense strand
caaggagaaccugaucaua

SEQ ID NO: 1744102 - RNA, 19 nt, Homo sapiens
  misc_RNA (1)...(19): siRNA sense strand
guugaugaauuaagagaca

SEQ ID NO: 1744103 - RNA, 19 nt, Homo sapiens
  misc_RNA (1)...(19): siRNA sense strand
ugacaagaaagcuuaauca

SEQ ID NO: 1744104 - RNA, 19 nt, Homo sapiens
  misc_RNA (1)...(19): siRNA sense strand
agacagagcaggaagaaag

SEQ ID NO: 1744105 - RNA, 19 nt, Homo sapiens
  misc_RNA (1)...(19): siRNA sense strand
uaaggaaucugaggagaac

SEQ ID NO: 1744106 - RNA, 19 nt, Homo sapiens
  misc_RNA (1)...(19): siRNA sense strand
ucaaggaagagaaaguaaa

SEQ ID NO: 1744107 - RNA, 19 nt, Homo sapiens
  misc_RNA (1)...(19): siRNA sense strand
caacgucagcgcuggagaa

SEQ ID NO: 1744108 - RNA, 19 nt, Homo sapiens
  misc_RNA (1)...(19): siRNA sense strand
caaggaagagaaaguaaag

SEQ ID NO: 1744109 - RNA, 19 nt, Homo sapiens
  misc_RNA (1)...(19): siRNA sense strand
agaugaagcuuuccaaacg

SEQ ID NO: 1744110 - RNA, 19 nt, Homo sapiens
  misc_RNA (1)...(19): siRNA sense strand
ugauacgauucagugauua

SEQ ID NO: 1744111 - RNA, 19 nt, Homo sapiens
  misc_RNA (1)...(19): siRNA sense strand
gcaaagauugacaagaaag

SEQ ID NO: 1744112 - RNA, 19 nt, Homo sapiens
  misc_RNA (1)...(19): siRNA sense strand
ggacugaugaagaaagaca

SEQ ID NO: 1744113 - RNA, 19 nt, Homo sapiens
  misc_RNA (1)...(19): siRNA sense strand
gaaauggagguacaugcau

SEQ ID NO: 1744114 - RNA, 19 nt, Homo sapiens
  misc_RNA (1)...(19): siRNA sense strand
ugaaacaaaggaaugauca

SEQ ID NO: 1744115 - RNA, 19 nt, Homo sapiens
  misc_RNA (1)...(19): siRNA sense strand
gagaugaagcuuuccaaac

SEQ ID NO: 1744116 - RNA, 19 nt, Homo sapiens
  misc_RNA (1)...(19): siRNA sense strand
gaucuucaaacccuggaaa

SEQ ID NO: 1744117 - RNA, 19 nt, Homo sapiens
  misc_RNA (1)...(19): siRNA sense strand
uaaggcagcaauucguaaa

SEQ ID NO: 1744118 - RNA, 19 nt, Homo sapiens
  misc_RNA (1)...(19): siRNA sense strand
acccacuguugaugaauua

SEQ ID NO: 1744119 - RNA, 19 nt, Homo sapiens
  misc_RNA (1)...(19): siRNA sense strand
aagcaaacaggaacuagaa

SEQ ID NO: 1744120 - RNA, 19 nt, Homo sapiens
  misc_RNA (1)...(19): siRNA sense strand
caagcaaacaggaacuaga

SEQ ID NO: 1744121 - RNA, 19 nt, Homo sapiens
  misc_RNA (1)...(19): siRNA sense strand
gaaccacccacucccaagu

SEQ ID NO: 1744122 - RNA, 19 nt, Homo sapiens
  misc_RNA (1)...(19): siRNA sense strand
uaucuggucucagggauuc

SEQ ID NO: 1744123 - RNA, 19 nt, Homo sapiens
  misc_RNA (1)...(19): siRNA sense strand
aaacaaaggaaugaucaga

SEQ ID NO: 1744124 - RNA, 19 nt, Homo sapiens
  misc_RNA (1)...(19): siRNA sense strand
gaaggacugaugaagaaag

SEQ ID NO: 1744125 - RNA, 19 nt, Homo sapiens
  misc_RNA (1)...(19): siRNA sense strand
gcgaacugccgcuaaggaa

SEQ ID NO: 1744126 - RNA, 19 nt, Homo sapiens
  misc_RNA (1)...(19): siRNA sense strand
cgagaggagcucaucaaga

SEQ ID NO: 1744127 - RNA, 19 nt, Homo sapiens
  misc_RNA (1)...(19): siRNA sense strand
ggaacacugccacggaaau

SEQ ID NO: 1744128 - RNA, 19 nt, Homo sapiens
  misc_RNA (1)...(19): siRNA sense strand
agaaccugaucauaaauuc

SEQ ID NO: 1744129 - RNA, 19 nt, Homo sapiens
  misc_RNA (1)...(19): siRNA sense strand
uuccaagccuccagcauga

SEQ ID NO: 1744130 - RNA, 19 nt, Homo sapiens
  misc_RNA (1)...(19): siRNA sense strand
ugacaggagggcagacaaa

SEQ ID NO: 1744131 - RNA, 19 nt, Homo sapiens
  misc_RNA (1)...(19): siRNA sense strand
agauugacaagaaagcuua

SEQ ID NO: 1744132 - RNA, 19 nt, Homo sapiens
  misc_RNA (1)...(19): siRNA sense strand
gaacuagaagaccggaaca

SEQ ID NO: 1744133 - RNA, 19 nt, Homo sapiens
  misc_RNA (1)...(19): siRNA sense strand
uaaggaaccggccaagcaa

SEQ ID NO: 1744134 - RNA, 19 nt, Homo sapiens
  misc_RNA (1)...(19): siRNA sense strand
aaaguaaagggucuccaaa

SEQ ID NO: 1744135 - RNA, 19 nt, Homo sapiens
  misc_RNA (1)...(19): siRNA sense strand
cgagaugaagcuuuccaaa

SEQ ID NO: 1744136 - RNA, 19 nt, Homo sapiens
  misc_RNA (1)...(19): siRNA sense strand
aaggacugaugaagaaaga

SEQ ID NO: 1744137 - RNA, 19 nt, Homo sapiens
  misc_RNA (1)...(19): siRNA sense strand
cuaaggaaccggccaagca

SEQ ID NO: 1744138 - RNA, 19 nt, Homo sapiens
  misc_RNA (1)...(19): siRNA sense strand
ggagaaccugaucauaaau

SEQ ID NO: 1744139 - RNA, 19 nt, Homo sapiens
  misc_RNA (1)...(19): siRNA sense strand
ggacaguuuucaaggaaga

SEQ ID NO: 1744140 - RNA, 19 nt, Homo sapiens
  misc_RNA (1)...(19): siRNA sense strand
caagauuccacaggccaua

SEQ ID NO: 1744141 - RNA, 19 nt, Homo sapiens
  misc_RNA (1)...(19): siRNA sense strand
aagaaagcuuaaucagaga

SEQ ID NO: 1744142 - RNA, 19 nt, Homo sapiens
  misc_RNA (1)...(19): siRNA sense strand
agaaagaagagaaaucaag

SEQ ID NO: 1744143 - RNA, 19 nt, Homo sapiens
  misc_RNA (1)...(19): siRNA sense strand
aaaggaaugaucagacaga

SEQ ID NO: 1744144 - RNA, 19 nt, Homo sapiens
  misc_RNA (1)...(19): siRNA sense strand
cuaaggaaucugaggagaa

SEQ ID NO: 1744145 - RNA, 19 nt, Homo sapiens
  misc_RNA (1)...(19): siRNA sense strand
cacuguugaugaauuaaga

SEQ ID NO: 1744146 - RNA, 19 nt, Homo sapiens
  misc_RNA (1)...(19): siRNA sense strand
agagaaaucaagcaaagau

SEQ ID NO: 1744147 - RNA, 19 nt, Homo sapiens
  misc_RNA (1)...(19): siRNA sense strand
caggaagaaagaagagaaa

SEQ ID NO: 1744148 - RNA, 19 nt, Homo sapiens
  misc_RNA (1)...(19): siRNA sense strand
gacagagcaggaagaaaga

SEQ ID NO: 1744149 - RNA, 19 nt, Homo sapiens
  misc_RNA (1)...(19): siRNA sense strand
agaucgagaugaagcuuuc

SEQ ID NO: 1744150 - RNA, 19 nt, Homo sapiens
  misc_RNA (1)...(19): siRNA sense strand
ucagagacccacuguugau

SEQ ID NO: 1744151 - RNA, 19 nt, Homo sapiens
  misc_RNA (1)...(19): siRNA sense strand
agcaaagauugacaagaaa

SEQ ID NO: 1744152 - RNA, 19 nt, Homo sapiens
  misc_RNA (1)...(19): siRNA sense strand
acucaaagacgacuugcuu

SEQ ID NO: 1744153 - RNA, 19 nt, Homo sapiens
  misc_RNA (1)...(19): siRNA sense strand
aggcagcaauucguaaaga

SEQ ID NO: 1744154 - RNA, 19 nt, Homo sapiens
  misc_RNA (1)...(19): siRNA sense strand
uagaagaccggaacauuuu

SEQ ID NO: 1744155 - RNA, 19 nt, Homo sapiens
  misc_RNA (1)...(19): siRNA sense strand
aaucugaggagaacaagga

SEQ ID NO: 1744156 - RNA, 19 nt, Homo sapiens
  misc_RNA (1)...(19): siRNA sense strand
gagaggagcucaucaagaa

SEQ ID NO: 1744157 - RNA, 19 nt, Homo sapiens
  misc_RNA (1)...(19): siRNA sense strand
gaagagaaaucaagcaaag

SEQ ID NO: 1744158 - RNA, 19 nt, Homo sapiens
  misc_RNA (1)...(19): siRNA sense strand
ccaaagaccugccguggaa

SEQ ID NO: 1744159 - RNA, 19 nt, Homo sapiens
  misc_RNA (1)...(19): siRNA sense strand
aagcaaagauugacaagaa

SEQ ID NO: 1744160 - RNA, 19 nt, Homo sapiens
  misc_RNA (1)...(19): siRNA sense strand
cagaaggacugaugaagaa

SEQ ID NO: 1744161 - RNA, 19 nt, Homo sapiens
  misc_RNA (1)...(19): siRNA sense strand
gaucauaaauucugaacuc

SEQ ID NO: 1744162 - RNA, 19 nt, Homo sapiens
  misc_RNA (1)...(19): siRNA sense strand
ggaggaggcuuggagcuuu

SEQ ID NO: 1744163 - RNA, 19 nt, Homo sapiens
  misc_RNA (1)...(19): siRNA sense strand
gaagaaagaagagaaauca

SEQ ID NO: 1744164 - RNA, 19 nt, Homo sapiens
  misc_RNA (1)...(19): siRNA sense strand
cgucagcgcuggagaagaa

SEQ ID NO: 1744165 - RNA, 19 nt, Homo sapiens
  misc_RNA (1)...(19): siRNA sense strand
uaaagggucuccaaagaag

SEQ ID NO: 1744166 - RNA, 19 nt, Homo sapiens
  misc_RNA (1)...(19): siRNA sense strand
guaaugaaauggagguaca

SEQ ID NO: 1744167 - RNA, 19 nt, Homo sapiens
  misc_RNA (1)...(19): siRNA sense strand
cugaacgacuccauuauuu

SEQ ID NO: 1744168 - RNA, 19 nt, Homo sapiens
  misc_RNA (1)...(19): siRNA sense strand
caaagaagcggcuggaugu

SEQ ID NO: 1744169 - RNA, 19 nt, Homo sapiens
  misc_RNA (1)...(19): siRNA sense strand
gaaaguaaagggucuccaa

SEQ ID NO: 1744170 - RNA, 19 nt, Homo sapiens
  misc_RNA (1)...(19): siRNA sense strand
gagcuggagagaagaaaua

SEQ ID NO: 1744171 - RNA, 19 nt, Homo sapiens
  misc_RNA (1)...(19): siRNA sense strand
guaaagggucuccaaagaa

SEQ ID NO: 1744172 - RNA, 19 nt, Homo sapiens
  misc_RNA (1)...(19): siRNA sense strand
aggagaaccugaucauaaa

SEQ ID NO: 1744173 - RNA, 19 nt, Homo sapiens
  misc_RNA (1)...(19): siRNA sense strand
gcgcugaacgacuccauua

SEQ ID NO: 1744174 - RNA, 19 nt, Homo sapiens
  misc_RNA (1)...(19): siRNA sense strand
uggaagagcuggagagaag

SEQ ID NO: 1744175 - RNA, 19 nt, Homo sapiens
  misc_RNA (1)...(19): siRNA sense strand
gauaaggcagcaauucgua

SEQ ID NO: 1744176 - RNA, 19 nt, Homo sapiens
  misc_RNA (1)...(19): siRNA sense strand
aaggagaaccugaucauaa

SEQ ID NO: 1744177 - RNA, 19 nt, Homo sapiens
  misc_RNA (1)...(19): siRNA sense strand
gaacgacuccauuauuucu

SEQ ID NO: 1744178 - RNA, 19 nt, Homo sapiens
  misc_RNA (1)...(19): siRNA sense strand
gcaaacaggaacuagaaga

SEQ ID NO: 1744179 - RNA, 19 nt, Homo sapiens
  misc_RNA (1)...(19): siRNA sense strand
cuagaagaccggaacauuu

SEQ ID NO: 1744180 - RNA, 19 nt, Homo sapiens
  misc_RNA (1)...(19): siRNA sense strand
aguaaagggucuccaaaga

SEQ ID NO: 1744181 - RNA, 19 nt, Homo sapiens
  misc_RNA (1)...(19): siRNA sense strand
gagacccacuguugaugaa

SEQ ID NO: 1744182 - RNA, 19 nt, Homo sapiens
  misc_RNA (1)...(19): siRNA sense strand
gagaaccugaucauaaauu

SEQ ID NO: 1744183 - RNA, 19 nt, Homo sapiens
  misc_RNA (1)...(19): siRNA sense strand
gaacaaggagaaccugauc

SEQ ID NO: 1744184 - RNA, 19 nt, Homo sapiens
  misc_RNA (1)...(19): siRNA sense strand
gcugaacgacuccauuauu

SEQ ID NO: 1744185 - RNA, 19 nt, Homo sapiens
  misc_RNA (1)...(19): siRNA sense strand
guccucagcugcccacuug

SEQ ID NO: 1744186 - RNA, 19 nt, Homo sapiens
  misc_RNA (1)...(19): siRNA sense strand
gacccacuguugaugaauu

SEQ ID NO: 1744187 - RNA, 19 nt, Homo sapiens
  misc_RNA (1)...(19): siRNA sense strand
gaacugccgcuaaggaauc

SEQ ID NO: 1744188 - RNA, 19 nt, Homo sapiens
  misc_RNA (1)...(19): siRNA sense strand
ggcagcagaucgagaugaa

SEQ ID NO: 1744189 - RNA, 19 nt, Homo sapiens
  misc_RNA (1)...(19): siRNA sense strand
acaaaggaaugaucagaca

SEQ ID NO: 1744190 - RNA, 19 nt, Homo sapiens
  misc_RNA (1)...(19): siRNA sense strand
gaagagcuggagagaagaa

SEQ ID NO: 1744191 - RNA, 19 nt, Homo sapiens
  misc_RNA (1)...(19): siRNA sense strand
gcaggaagaaagaagagaa

SEQ ID NO: 1744192 - RNA, 19 nt, Homo sapiens
  misc_RNA (1)...(19): siRNA sense strand
caaaagcgcaggacuauga

SEQ ID NO: 1744193 - RNA, 19 nt, Homo sapiens
  misc_RNA (1)...(19): siRNA sense strand
aaucagagacccacuguug

SEQ ID NO: 1744194 - RNA, 19 nt, Homo sapiens
  misc_RNA (1)...(19): siRNA sense strand
ggaagaaagaagagaaauc

SEQ ID NO: 1744195 - RNA, 19 nt, Homo sapiens
  misc_RNA (1)...(19): siRNA sense strand
ccagaaggacugaugaaga

SEQ ID NO: 1744196 - RNA, 19 nt, Homo sapiens
  misc_RNA (1)...(19): siRNA sense strand
gaggaggcuuggagcuuug

SEQ ID NO: 1744197 - RNA, 19 nt, Homo sapiens
  misc_RNA (1)...(19): siRNA sense strand
gcagauaaggcagcaauuc

SEQ ID NO: 1744198 - RNA, 19 nt, Homo sapiens
  misc_RNA (1)...(19): siRNA sense strand
gaacacugccacggaaaug

SEQ ID NO: 1744199 - RNA, 19 nt, Homo sapiens
  misc_RNA (1)...(19): siRNA sense strand
acaagaaagcuuaaucaga

SEQ ID NO: 1744200 - RNA, 19 nt, Homo sapiens
  misc_RNA (1)...(19): siRNA sense strand
ggcagcaauucguaaagaa

SEQ ID NO: 1744201 - RNA, 19 nt, Homo sapiens
  misc_RNA (1)...(19): siRNA sense strand
caaggagaaccugaucaua

SEQ ID NO: 1744202 - RNA, 19 nt, Homo sapiens
  misc_RNA (1)...(19): siRNA sense strand
guugaugaauuaagagaca

SEQ ID NO: 1744203 - RNA, 19 nt, Homo sapiens
  misc_RNA (1)...(19): siRNA sense strand
ugacaagaaagcuuaauca

SEQ ID NO: 1744204 - RNA, 19 nt, Homo sapiens
  misc_RNA (1)...(19): siRNA sense strand
agacagagcaggaagaaag

SEQ ID NO: 1744205 - RNA, 19 nt, Homo sapiens
  misc_RNA (1)...(19): siRNA sense strand
uaaggaaucugaggagaac

SEQ ID NO: 1744206 - RNA, 19 nt, Homo sapiens
  misc_RNA (1)...(19): siRNA sense strand
ucaaggaagagaaaguaaa

SEQ ID NO: 1744207 - RNA, 19 nt, Homo sapiens
  misc_RNA (1)...(19): siRNA sense strand
caacgucagcgcuggagaa

SEQ ID NO: 1744208 - RNA, 19 nt, Homo sapiens
  misc_RNA (1)...(19): siRNA sense strand
caaggaagagaaaguaaag

SEQ ID NO: 1744209 - RNA, 19 nt, Homo sapiens
  misc_RNA (1)...(19): siRNA sense strand
agaugaagcuuuccaaacg

SEQ ID NO: 1744210 - RNA, 19 nt, Homo sapiens
  misc_RNA (1)...(19): siRNA sense strand
ugauacgauucagugauua

SEQ ID NO: 1744211 - RNA, 19 nt, Homo sapiens
  misc_RNA (1)...(19): siRNA sense strand
gcaaagauugacaagaaag

SEQ ID NO: 1744212 - RNA, 19 nt, Homo sapiens
  misc_RNA (1)...(19): siRNA sense strand
ggacugaugaagaaagaca

SEQ ID NO: 1744213 - RNA, 19 nt, Homo sapiens
  misc_RNA (1)...(19): siRNA sense strand
gaaauggagguacaugcau

SEQ ID NO: 1744214 - RNA, 19 nt, Homo sapiens
  misc_RNA (1)...(19): siRNA sense strand
ugaaacaaaggaaugauca

SEQ ID NO: 1744215 - RNA, 19 nt, Homo sapiens
  misc_RNA (1)...(19): siRNA sense strand
gagaugaagcuuuccaaac

SEQ ID NO: 1744216 - RNA, 19 nt, Homo sapiens
  misc_RNA (1)...(19): siRNA sense strand
gaucuucaaacccuggaaa

SEQ ID NO: 1744217 - RNA, 19 nt, Homo sapiens
  misc_RNA (1)...(19): siRNA sense strand
uaaggcagcaauucguaaa

SEQ ID NO: 1744218 - RNA, 19 nt, Homo sapiens
  misc_RNA (1)...(19): siRNA sense strand
acccacuguugaugaauua

SEQ ID NO: 1744219 - RNA, 19 nt, Homo sapiens
  misc_RNA (1)...(19): siRNA sense strand
aagcaaacaggaacuagaa

SEQ ID NO: 1744220 - RNA, 19 nt, Homo sapiens
  misc_RNA (1)...(19): siRNA sense strand
caagcaaacaggaacuaga

SEQ ID NO: 1744221 - RNA, 19 nt, Homo sapiens
  misc_RNA (1)...(19): siRNA sense strand
gaaccacccacucccaagu

SEQ ID NO: 1744222 - RNA, 19 nt, Homo sapiens
  misc_RNA (1)...(19): siRNA sense strand
uaucuggucucagggauuc

SEQ ID NO: 1744223 - RNA, 19 nt, Homo sapiens
  misc_RNA (1)...(19): siRNA sense strand
aaacaaaggaaugaucaga

SEQ ID NO: 1744224 - RNA, 19 nt, Homo sapiens
  misc_RNA (1)...(19): siRNA sense strand
gaaggacugaugaagaaag

SEQ ID NO: 1744225 - RNA, 19 nt, Homo sapiens
  misc_RNA (1)...(19): siRNA sense strand
gcgaacugccgcuaaggaa

SEQ ID NO: 1744226 - RNA, 19 nt, Homo sapiens
  misc_RNA (1)...(19): siRNA sense strand
cgagaggagcucaucaaga

SEQ ID NO: 1744227 - RNA, 19 nt, Homo sapiens
  misc_RNA (1)...(19): siRNA sense strand
ggaacacugccacggaaau

SEQ ID NO: 1744228 - RNA, 19 nt, Homo sapiens
  misc_RNA (1)...(19): siRNA sense strand
agaaccugaucauaaauuc

SEQ ID NO: 1744229 - RNA, 19 nt, Homo sapiens
  misc_RNA (1)...(19): siRNA sense strand
uuccaagccuccagcauga

SEQ ID NO: 1744230 - RNA, 19 nt, Homo sapiens
  misc_RNA (1)...(19): siRNA sense strand
ugacaggagggcagacaaa

SEQ ID NO: 1744231 - RNA, 19 nt, Homo sapiens
  misc_RNA (1)...(19): siRNA sense strand
agauugacaagaaagcuua

SEQ ID NO: 1744232 - RNA, 19 nt, Homo sapiens
  misc_RNA (1)...(19): siRNA sense strand
gaacuagaagaccggaaca

SEQ ID NO: 1744233 - RNA, 19 nt, Homo sapiens
  misc_RNA (1)...(19): siRNA sense strand
uaaggaaccggccaagcaa

SEQ ID NO: 1744234 - RNA, 19 nt, Homo sapiens
  misc_RNA (1)...(19): siRNA sense strand
aaaguaaagggucuccaaa

SEQ ID NO: 1744235 - RNA, 19 nt, Homo sapiens
  misc_RNA (1)...(19): siRNA sense strand
cgagaugaagcuuuccaaa

SEQ ID NO: 1744236 - RNA, 19 nt, Homo sapiens
  misc_RNA (1)...(19): siRNA sense strand
aaggacugaugaagaaaga

SEQ ID NO: 1744237 - RNA, 19 nt, Homo sapiens
  misc_RNA (1)...(19): siRNA sense strand
cuaaggaaccggccaagca

SEQ ID NO: 1744238 - RNA, 19 nt, Homo sapiens
  misc_RNA (1)...(19): siRNA sense strand
ggagaaccugaucauaaau

SEQ ID NO: 1744239 - RNA, 19 nt, Homo sapiens
  misc_RNA (1)...(19): siRNA sense strand
ggacaguuuucaaggaaga

SEQ ID NO: 1744240 - RNA, 19 nt, Homo sapiens
  misc_RNA (1)...(19): siRNA sense strand
caagauuccacaggccaua

SEQ ID NO: 1744241 - RNA, 19 nt, Homo sapiens
  misc_RNA (1)...(19): siRNA sense strand
aagaaagcuuaaucagaga

SEQ ID NO: 1744242 - RNA, 19 nt, Homo sapiens
  misc_RNA (1)...(19): siRNA sense strand
agaaagaagagaaaucaag

SEQ ID NO: 1744243 - RNA, 19 nt, Homo sapiens
  misc_RNA (1)...(19): siRNA sense strand
aaaggaaugaucagacaga

SEQ ID NO: 1744244 - RNA, 19 nt, Homo sapiens
  misc_RNA (1)...(19): siRNA sense strand
cuaaggaaucugaggagaa

SEQ ID NO: 1744245 - RNA, 19 nt, Homo sapiens
  misc_RNA (1)...(19): siRNA sense strand
cacuguugaugaauuaaga

SEQ ID NO: 1744246 - RNA, 19 nt, Homo sapiens
  misc_RNA (1)...(19): siRNA sense strand
agagaaaucaagcaaagau

SEQ ID NO: 1744247 - RNA, 19 nt, Homo sapiens
  misc_RNA (1)...(19): siRNA sense strand
caggaagaaagaagagaaa

SEQ ID NO: 1744248 - RNA, 19 nt, Homo sapiens
  misc_RNA (1)...(19): siRNA sense strand
gacagagcaggaagaaaga

SEQ ID NO: 1744249 - RNA, 19 nt, Homo sapiens
  misc_RNA (1)...(19): siRNA sense strand
agaucgagaugaagcuuuc

SEQ ID NO: 1744250 - RNA, 19 nt, Homo sapiens
  misc_RNA (1)...(19): siRNA sense strand
ucagagacccacuguugau

SEQ ID NO: 1744251 - RNA, 19 nt, Homo sapiens
  misc_RNA (1)...(19): siRNA sense strand
agcaaagauugacaagaaa

SEQ ID NO: 1744252 - RNA, 19 nt, Homo sapiens
  misc_RNA (1)...(19): siRNA sense strand
acucaaagacgacuugcuu

SEQ ID NO: 1744253 - RNA, 19 nt, Homo sapiens
  misc_RNA (1)...(19): siRNA sense strand
aggcagcaauucguaaaga

SEQ ID NO: 1744254 - RNA, 19 nt, Homo sapiens
  misc_RNA (1)...(19): siRNA sense strand
uagaagaccggaacauuuu

SEQ ID NO: 1744255 - RNA, 19 nt, Homo sapiens
  misc_RNA (1)...(19): siRNA sense strand
aaucugaggagaacaagga

SEQ ID NO: 1744256 - RNA, 19 nt, Homo sapiens
  misc_RNA (1)...(19): siRNA sense strand
gaacaccacuuauguauug

SEQ ID NO: 1744257 - RNA, 19 nt, Homo sapiens
  misc_RNA (1)...(19): siRNA sense strand
uaacauggcugacaaauau

SEQ ID NO: 1744258 - RNA, 19 nt, Homo sapiens
  misc_RNA (1)...(19): siRNA sense strand
ggacauagauauuaacaug

SEQ ID NO: 1744259 - RNA, 19 nt, Homo sapiens
  misc_RNA (1)...(19): siRNA sense strand
ggaaggaacuggaacuaaa

SEQ ID NO: 1744260 - RNA, 19 nt, Homo sapiens
  misc_RNA (1)...(19): siRNA sense strand
gcacugggcagcuuuauua

SEQ ID NO: 1744261 - RNA, 19 nt, Homo sapiens
  misc_RNA (1)...(19): siRNA sense strand
guaggaaacucugcucuua

SEQ ID NO: 1744262 - RNA, 19 nt, Homo sapiens
  misc_RNA (1)...(19): siRNA sense strand
gaacuaugcugagcuuaaa

SEQ ID NO: 1744263 - RNA, 19 nt, Homo sapiens
  misc_RNA (1)...(19): siRNA sense strand
gcaagagucuacagcauug

SEQ ID NO: 1744264 - RNA, 19 nt, Homo sapiens
  misc_RNA (1)...(19): siRNA sense strand
gacauucucuucuacauug

SEQ ID NO: 1744265 - RNA, 19 nt, Homo sapiens
  misc_RNA (1)...(19): siRNA sense strand
gcaaacagcucugcauugg

SEQ ID NO: 1744266 - RNA, 19 nt, Homo sapiens
  misc_RNA (1)...(19): siRNA sense strand
gaagaacagcuuugcauug

SEQ ID NO: 1744267 - RNA, 19 nt, Homo sapiens
  misc_RNA (1)...(19): siRNA sense strand
gaagaucaguuugggagaa

SEQ ID NO: 1744268 - RNA, 19 nt, Homo sapiens
  misc_RNA (1)...(19): siRNA sense strand
gaugauguccuuagaacua

SEQ ID NO: 1744269 - RNA, 19 nt, Homo sapiens
  misc_RNA (1)...(19): siRNA sense strand
uggaagagaugacuccuuu

SEQ ID NO: 1744270 - RNA, 19 nt, Homo sapiens
  misc_RNA (1)...(19): siRNA sense strand
gaaauaagucuggaacuau

SEQ ID NO: 1744271 - RNA, 19 nt, Homo sapiens
  misc_RNA (1)...(19): siRNA sense strand
ggagaacaccacuuaugua

SEQ ID NO: 1744272 - RNA, 19 nt, Homo sapiens
  misc_RNA (1)...(19): siRNA sense strand
gcaaaucuaugguuguucu

SEQ ID NO: 1744273 - RNA, 19 nt, Homo sapiens
  misc_RNA (1)...(19): siRNA sense strand
aauccaagcugucuacaaa

SEQ ID NO: 1744274 - RNA, 19 nt, Homo sapiens
  misc_RNA (1)...(19): siRNA sense strand
cagaguaacuuugcugaaa

SEQ ID NO: 1744275 - RNA, 19 nt, Homo sapiens
  misc_RNA (1)...(19): siRNA sense strand
gcacuaugcugcucagagu

SEQ ID NO: 1744276 - RNA, 19 nt, Homo sapiens
  misc_RNA (1)...(19): siRNA sense strand
agaaauaagucuggaacua

SEQ ID NO: 1744277 - RNA, 19 nt, Homo sapiens
  misc_RNA (1)...(19): siRNA sense strand
gcugcaauauaacgucuua

SEQ ID NO: 1744278 - RNA, 19 nt, Homo sapiens
  misc_RNA (1)...(19): siRNA sense strand
gcagauaauucagagagaa

SEQ ID NO: 1744279 - RNA, 19 nt, Homo sapiens
  misc_RNA (1)...(19): siRNA sense strand
agacaaagaagaucaguuu

SEQ ID NO: 1744280 - RNA, 19 nt, Homo sapiens
  misc_RNA (1)...(19): siRNA sense strand
caacagagucuuuacugaa

SEQ ID NO: 1744281 - RNA, 19 nt, Homo sapiens
  misc_RNA (1)...(19): siRNA sense strand
gaagugauccaguucaugu

SEQ ID NO: 1744282 - RNA, 19 nt, Homo sapiens
  misc_RNA (1)...(19): siRNA sense strand
ggaaaauaaugcucaagua

SEQ ID NO: 1744283 - RNA, 19 nt, Homo sapiens
  misc_RNA (1)...(19): siRNA sense strand
gaacuccucuucacuuugc

SEQ ID NO: 1744284 - RNA, 19 nt, Homo sapiens
  misc_RNA (1)...(19): siRNA sense strand
gggaggaaaugcugauguu

SEQ ID NO: 1744285 - RNA, 19 nt, Homo sapiens
  misc_RNA (1)...(19): siRNA sense strand
gagaacaccacuuauguau

SEQ ID NO: 1744286 - RNA, 19 nt, Homo sapiens
  misc_RNA (1)...(19): siRNA sense strand
gaaaauacaucauccuaca

SEQ ID NO: 1744287 - RNA, 19 nt, Homo sapiens
  misc_RNA (1)...(19): siRNA sense strand
gagaacagcccuccaucuu

SEQ ID NO: 1744288 - RNA, 19 nt, Homo sapiens
  misc_RNA (1)...(19): siRNA sense strand
gcacaaaguccaccaagca

SEQ ID NO: 1744289 - RNA, 19 nt, Homo sapiens
  misc_RNA (1)...(19): siRNA sense strand
caagcaugauucuaacauu

SEQ ID NO: 1744290 - RNA, 19 nt, Homo sapiens
  misc_RNA (1)...(19): siRNA sense strand
ggaguucccucuguugaga

SEQ ID NO: 1744291 - RNA, 19 nt, Homo sapiens
  misc_RNA (1)...(19): siRNA sense strand
ugacaaauauggagguaca

SEQ ID NO: 1744292 - RNA, 19 nt, Homo sapiens
  misc_RNA (1)...(19): siRNA sense strand
ccaacagagucuuuacuga

SEQ ID NO: 1744293 - RNA, 19 nt, Homo sapiens
  misc_RNA (1)...(19): siRNA sense strand
ggaagaacagcuuugcauu

SEQ ID NO: 1744294 - RNA, 19 nt, Homo sapiens
  misc_RNA (1)...(19): siRNA sense strand
aggaaacucugcucuuaaa

SEQ ID NO: 1744295 - RNA, 19 nt, Homo sapiens
  misc_RNA (1)...(19): siRNA sense strand
ggaaaacaaugaagagaga

SEQ ID NO: 1744296 - RNA, 19 nt, Homo sapiens
  misc_RNA (1)...(19): siRNA sense strand
gaccgugguugaugucuug

SEQ ID NO: 1744297 - RNA, 19 nt, Homo sapiens
  misc_RNA (1)...(19): siRNA sense strand
gaggaaaugcugauguuug

SEQ ID NO: 1744298 - RNA, 19 nt, Homo sapiens
  misc_RNA (1)...(19): siRNA sense strand
ggaacuaucccaucugaca

SEQ ID NO: 1744299 - RNA, 19 nt, Homo sapiens
  misc_RNA (1)...(19): siRNA sense strand
cguguuggcugacagauug

SEQ ID NO: 1744300 - RNA, 19 nt, Homo sapiens
  misc_RNA (1)...(19): siRNA sense strand
cagcauguuuccucagauu

SEQ ID NO: 1744301 - RNA, 19 nt, Homo sapiens
  misc_RNA (1)...(19): siRNA sense strand
gauguuugccagauauuaa

SEQ ID NO: 1744302 - RNA, 19 nt, Homo sapiens
  misc_RNA (1)...(19): siRNA sense strand
gccaugaagugauccaguu

SEQ ID NO: 1744303 - RNA, 19 nt, Homo sapiens
  misc_RNA (1)...(19): siRNA sense strand
uggagugccuacuacaaua

SEQ ID NO: 1744304 - RNA, 19 nt, Homo sapiens
  misc_RNA (1)...(19): siRNA sense strand
gcuuggagcuggagaugug

SEQ ID NO: 1744305 - RNA, 19 nt, Homo sapiens
  misc_RNA (1)...(19): siRNA sense strand
gagcuccgacugcagauaa

SEQ ID NO: 1744306 - RNA, 19 nt, Homo sapiens
  misc_RNA (1)...(19): siRNA sense strand
uaagaucaauccaaauguc

SEQ ID NO: 1744307 - RNA, 19 nt, Homo sapiens
  misc_RNA (1)...(19): siRNA sense strand
gcuguuugcugguucauca

SEQ ID NO: 1744308 - RNA, 19 nt, Homo sapiens
  misc_RNA (1)...(19): siRNA sense strand
gaaagaaauaagucuggaa

SEQ ID NO: 1744309 - RNA, 19 nt, Homo sapiens
  misc_RNA (1)...(19): siRNA sense strand
gcacaggagcccuaagugu

SEQ ID NO: 1744310 - RNA, 19 nt, Homo sapiens
  misc_RNA (1)...(19): siRNA sense strand
ugagaacaguggaagauca

SEQ ID NO: 1744311 - RNA, 19 nt, Homo sapiens
  misc_RNA (1)...(19): siRNA sense strand
ggacauucucuucuacauu

SEQ ID NO: 1744312 - RNA, 19 nt, Homo sapiens
  misc_RNA (1)...(19): siRNA sense strand
gagcaaggguagaucuagu

SEQ ID NO: 1744313 - RNA, 19 nt, Homo sapiens
  misc_RNA (1)...(19): siRNA sense strand
ucagagaaccugcuguuug

SEQ ID NO: 1744314 - RNA, 19 nt, Homo sapiens
  misc_RNA (1)...(19): siRNA sense strand
agagcaaacuggaugcaaa

SEQ ID NO: 1744315 - RNA, 19 nt, Homo sapiens
  misc_RNA (1)...(19): siRNA sense strand
gcugauguuugccagauau

SEQ ID NO: 1744316 - RNA, 19 nt, Homo sapiens
  misc_RNA (1)...(19): siRNA sense strand
gggcagcacugggaggaaa

SEQ ID NO: 1744317 - RNA, 19 nt, Homo sapiens
  misc_RNA (1)...(19): siRNA sense strand
caaaggcagugaugauguc

SEQ ID NO: 1744318 - RNA, 19 nt, Homo sapiens
  misc_RNA (1)...(19): siRNA sense strand
ggagugccuacuacaauaa

SEQ ID NO: 1744319 - RNA, 19 nt, Homo sapiens
  misc_RNA (1)...(19): siRNA sense strand
gcauugcuccuccagguuu

SEQ ID NO: 1744320 - RNA, 19 nt, Homo sapiens
  misc_RNA (1)...(19): siRNA sense strand
caaaugaaacagccagaga

SEQ ID NO: 1744321 - RNA, 19 nt, Homo sapiens
  misc_RNA (1)...(19): siRNA sense strand
ggaaggcggagcccagauu

SEQ ID NO: 1744322 - RNA, 19 nt, Homo sapiens
  misc_RNA (1)...(19): siRNA sense strand
gcaaaggcagugaugaugu

SEQ ID NO: 1744323 - RNA, 19 nt, Homo sapiens
  misc_RNA (1)...(19): siRNA sense strand
cagauuggauugugcagau

SEQ ID NO: 1744324 - RNA, 19 nt, Homo sapiens
  misc_RNA (1)...(19): siRNA sense strand
ugaccaagauggacauucu

SEQ ID NO: 1744325 - RNA, 19 nt, Homo sapiens
  misc_RNA (1)...(19): siRNA sense strand
gugaaguuauuacuggaaa

SEQ ID NO: 1744326 - RNA, 19 nt, Homo sapiens
  misc_RNA (1)...(19): siRNA sense strand
gucuugaccucauaugaaa

SEQ ID NO: 1744327 - RNA, 19 nt, Homo sapiens
  misc_RNA (1)...(19): siRNA sense strand
aagcaugauucuaacauug

SEQ ID NO: 1744328 - RNA, 19 nt, Homo sapiens
  misc_RNA (1)...(19): siRNA sense strand
gaaguggauacacaggaua

SEQ ID NO: 1744329 - RNA, 19 nt, Homo sapiens
  misc_RNA (1)...(19): siRNA sense strand
caggagaaguggauacaca

SEQ ID NO: 1744330 - RNA, 19 nt, Homo sapiens
  misc_RNA (1)...(19): siRNA sense strand
ggaaugugaccgugguuga

SEQ ID NO: 1744331 - RNA, 19 nt, Homo sapiens
  misc_RNA (1)...(19): siRNA sense strand
cagagaaccugcuguuugc

SEQ ID NO: 1744332 - RNA, 19 nt, Homo sapiens
  misc_RNA (1)...(19): siRNA sense strand
gaaacagccagagaacauu

SEQ ID NO: 1744333 - RNA, 19 nt, Homo sapiens
  misc_RNA (1)...(19): siRNA sense strand
gggagaacaccacuuaugu

SEQ ID NO: 1744334 - RNA, 19 nt, Homo sapiens
  misc_RNA (1)...(19): siRNA sense strand
aaauaagucuggaacuauc

SEQ ID NO: 1744335 - RNA, 19 nt, Homo sapiens
  misc_RNA (1)...(19): siRNA sense strand
aagcaaaucuaugguuguu

SEQ ID NO: 1744336 - RNA, 19 nt, Homo sapiens
  misc_RNA (1)...(19): siRNA sense strand
acaauaacccugagcaugu

SEQ ID NO: 1744337 - RNA, 19 nt, Homo sapiens
  misc_RNA (1)...(19): siRNA sense strand
ccaaaccacugcaguaagc

SEQ ID NO: 1744338 - RNA, 19 nt, Homo sapiens
  misc_RNA (1)...(19): siRNA sense strand
ccaaggcccugagccaaga

SEQ ID NO: 1744339 - RNA, 19 nt, Homo sapiens
  misc_RNA (1)...(19): siRNA sense strand
gagcagaugugaauaaaac

SEQ ID NO: 1744340 - RNA, 19 nt, Homo sapiens
  misc_RNA (1)...(19): siRNA sense strand
agauggacauucucuucua

SEQ ID NO: 1744341 - RNA, 19 nt, Homo sapiens
  misc_RNA (1)...(19): siRNA sense strand
gugauucagacacucauua

SEQ ID NO: 1744342 - RNA, 19 nt, Homo sapiens
  misc_RNA (1)...(19): siRNA sense strand
gagccacaccuuugcacua

SEQ ID NO: 1744343 - RNA, 19 nt, Homo sapiens
  misc_RNA (1)...(19): siRNA sense strand
ucgaacuccucuucacuuu

SEQ ID NO: 1744344 - RNA, 19 nt, Homo sapiens
  misc_RNA (1)...(19): siRNA sense strand
caauaacccugagcaugug

SEQ ID NO: 1744345 - RNA, 19 nt, Homo sapiens
  misc_RNA (1)...(19): siRNA sense strand
gaagagaugacuccuuugc

SEQ ID NO: 1744346 - RNA, 19 nt, Homo sapiens
  misc_RNA (1)...(19): siRNA sense strand
ucaugaaacucuuacuuac

SEQ ID NO: 1744347 - RNA, 19 nt, Homo sapiens
  misc_RNA (1)...(19): siRNA sense strand
gaugacuccuuugcacuug

SEQ ID NO: 1744348 - RNA, 19 nt, Homo sapiens
  misc_RNA (1)...(19): siRNA sense strand
gauaagggugcucuacaga

SEQ ID NO: 1744349 - RNA, 19 nt, Homo sapiens
  misc_RNA (1)...(19): siRNA sense strand
gcugacaaauauggaggua

SEQ ID NO: 1744350 - RNA, 19 nt, Homo sapiens
  misc_RNA (1)...(19): siRNA sense strand
cugaaacgguuaaaguguu

SEQ ID NO: 1744351 - RNA, 19 nt, Homo sapiens
  misc_RNA (1)...(19): siRNA sense strand
uuacugaacuggcaagacu

SEQ ID NO: 1744352 - RNA, 19 nt, Homo sapiens
  misc_RNA (1)...(19): siRNA sense strand
gauuguccaucuccuuuua

SEQ ID NO: 1744353 - RNA, 19 nt, Homo sapiens
  misc_RNA (1)...(19): siRNA sense strand
ggcaagagucuacagcauu

SEQ ID NO: 1744354 - RNA, 19 nt, Homo sapiens
  misc_RNA (1)...(19): siRNA sense strand
gaaggaggaaggagcuguu

SEQ ID NO: 1744355 - RNA, 19 nt, Homo sapiens
  misc_RNA (1)...(19): siRNA sense strand
gcauguuuccucagauuug

SEQ ID NO: 1744356 - RNA, 19 nt, Homo sapiens
  misc_RNA (1)...(19): siRNA sense strand
gaacaccacuuauguauug

SEQ ID NO: 1744357 - RNA, 19 nt, Homo sapiens
  misc_RNA (1)...(19): siRNA sense strand
uaacauggcugacaaauau

SEQ ID NO: 1744358 - RNA, 19 nt, Homo sapiens
  misc_RNA (1)...(19): siRNA sense strand
ggacauagauauuaacaug

SEQ ID NO: 1744359 - RNA, 19 nt, Homo sapiens
  misc_RNA (1)...(19): siRNA sense strand
ggaaggaacuggaacuaaa

SEQ ID NO: 1744360 - RNA, 19 nt, Homo sapiens
  misc_RNA (1)...(19): siRNA sense strand
gcacugggcagcuuuauua

SEQ ID NO: 1744361 - RNA, 19 nt, Homo sapiens
  misc_RNA (1)...(19): siRNA sense strand
guaggaaacucugcucuua

SEQ ID NO: 1744362 - RNA, 19 nt, Homo sapiens
  misc_RNA (1)...(19): siRNA sense strand
gaacuaugcugagcuuaaa

SEQ ID NO: 1744363 - RNA, 19 nt, Homo sapiens
  misc_RNA (1)...(19): siRNA sense strand
gcaagagucuacagcauug

SEQ ID NO: 1744364 - RNA, 19 nt, Homo sapiens
  misc_RNA (1)...(19): siRNA sense strand
gacauucucuucuacauug

SEQ ID NO: 1744365 - RNA, 19 nt, Homo sapiens
  misc_RNA (1)...(19): siRNA sense strand
gcaaacagcucugcauugg

SEQ ID NO: 1744366 - RNA, 19 nt, Homo sapiens
  misc_RNA (1)...(19): siRNA sense strand
gaagaacagcuuugcauug

SEQ ID NO: 1744367 - RNA, 19 nt, Homo sapiens
  misc_RNA (1)...(19): siRNA sense strand
gaagaucaguuugggagaa

SEQ ID NO: 1744368 - RNA, 19 nt, Homo sapiens
  misc_RNA (1)...(19): siRNA sense strand
gaugauguccuuagaacua

SEQ ID NO: 1744369 - RNA, 19 nt, Homo sapiens
  misc_RNA (1)...(19): siRNA sense strand
uggaagagaugacuccuuu

SEQ ID NO: 1744370 - RNA, 19 nt, Homo sapiens
  misc_RNA (1)...(19): siRNA sense strand
gaaauaagucuggaacuau

SEQ ID NO: 1744371 - RNA, 19 nt, Homo sapiens
  misc_RNA (1)...(19): siRNA sense strand
ggagaacaccacuuaugua

SEQ ID NO: 1744372 - RNA, 19 nt, Homo sapiens
  misc_RNA (1)...(19): siRNA sense strand
gcaaaucuaugguuguucu

SEQ ID NO: 1744373 - RNA, 19 nt, Homo sapiens
  misc_RNA (1)...(19): siRNA sense strand
aauccaagcugucuacaaa

SEQ ID NO: 1744374 - RNA, 19 nt, Homo sapiens
  misc_RNA (1)...(19): siRNA sense strand
cagaguaacuuugcugaaa

SEQ ID NO: 1744375 - RNA, 19 nt, Homo sapiens
  misc_RNA (1)...(19): siRNA sense strand
gcacuaugcugcucagagu

SEQ ID NO: 1744376 - RNA, 19 nt, Homo sapiens
  misc_RNA (1)...(19): siRNA sense strand
agaaauaagucuggaacua

SEQ ID NO: 1744377 - RNA, 19 nt, Homo sapiens
  misc_RNA (1)...(19): siRNA sense strand
gcugcaauauaacgucuua

SEQ ID NO: 1744378 - RNA, 19 nt, Homo sapiens
  misc_RNA (1)...(19): siRNA sense strand
gcagauaauucagagagaa

SEQ ID NO: 1744379 - RNA, 19 nt, Homo sapiens
  misc_RNA (1)...(19): siRNA sense strand
agacaaagaagaucaguuu

SEQ ID NO: 1744380 - RNA, 19 nt, Homo sapiens
  misc_RNA (1)...(19): siRNA sense strand
caacagagucuuuacugaa

SEQ ID NO: 1744381 - RNA, 19 nt, Homo sapiens
  misc_RNA (1)...(19): siRNA sense strand
gaagugauccaguucaugu

SEQ ID NO: 1744382 - RNA, 19 nt, Homo sapiens
  misc_RNA (1)...(19): siRNA sense strand
ggaaaauaaugcucaagua

SEQ ID NO: 1744383 - RNA, 19 nt, Homo sapiens
  misc_RNA (1)...(19): siRNA sense strand
gaacuccucuucacuuugc

SEQ ID NO: 1744384 - RNA, 19 nt, Homo sapiens
  misc_RNA (1)...(19): siRNA sense strand
gggaggaaaugcugauguu

SEQ ID NO: 1744385 - RNA, 19 nt, Homo sapiens
  misc_RNA (1)...(19): siRNA sense strand
gagaacaccacuuauguau

SEQ ID NO: 1744386 - RNA, 19 nt, Homo sapiens
  misc_RNA (1)...(19): siRNA sense strand
gaaaauacaucauccuaca

SEQ ID NO: 1744387 - RNA, 19 nt, Homo sapiens
  misc_RNA (1)...(19): siRNA sense strand
gagaacagcccuccaucuu

SEQ ID NO: 1744388 - RNA, 19 nt, Homo sapiens
  misc_RNA (1)...(19): siRNA sense strand
gcacaaaguccaccaagca

SEQ ID NO: 1744389 - RNA, 19 nt, Homo sapiens
  misc_RNA (1)...(19): siRNA sense strand
caagcaugauucuaacauu

SEQ ID NO: 1744390 - RNA, 19 nt, Homo sapiens
  misc_RNA (1)...(19): siRNA sense strand
ggaguucccucuguugaga

SEQ ID NO: 1744391 - RNA, 19 nt, Homo sapiens
  misc_RNA (1)...(19): siRNA sense strand
ugacaaauauggagguaca

SEQ ID NO: 1744392 - RNA, 19 nt, Homo sapiens
  misc_RNA (1)...(19): siRNA sense strand
ccaacagagucuuuacuga

SEQ ID NO: 1744393 - RNA, 19 nt, Homo sapiens
  misc_RNA (1)...(19): siRNA sense strand
ggaagaacagcuuugcauu

SEQ ID NO: 1744394 - RNA, 19 nt, Homo sapiens
  misc_RNA (1)...(19): siRNA sense strand
aggaaacucugcucuuaaa

SEQ ID NO: 1744395 - RNA, 19 nt, Homo sapiens
  misc_RNA (1)...(19): siRNA sense strand
ggaaaacaaugaagagaga

SEQ ID NO: 1744396 - RNA, 19 nt, Homo sapiens
  misc_RNA (1)...(19): siRNA sense strand
gaccgugguugaugucuug

SEQ ID NO: 1744397 - RNA, 19 nt, Homo sapiens
  misc_RNA (1)...(19): siRNA sense strand
gaggaaaugcugauguuug

SEQ ID NO: 1744398 - RNA, 19 nt, Homo sapiens
  misc_RNA (1)...(19): siRNA sense strand
ggaacuaucccaucugaca

SEQ ID NO: 1744399 - RNA, 19 nt, Homo sapiens
  misc_RNA (1)...(19): siRNA sense strand
cguguuggcugacagauug

SEQ ID NO: 1744400 - RNA, 19 nt, Homo sapiens
  misc_RNA (1)...(19): siRNA sense strand
cagcauguuuccucagauu

SEQ ID NO: 1744401 - RNA, 19 nt, Homo sapiens
  misc_RNA (1)...(19): siRNA sense strand
gauguuugccagauauuaa

SEQ ID NO: 1744402 - RNA, 19 nt, Homo sapiens
  misc_RNA (1)...(19): siRNA sense strand
gccaugaagugauccaguu

SEQ ID NO: 1744403 - RNA, 19 nt, Homo sapiens
  misc_RNA (1)...(19): siRNA sense strand
uggagugccuacuacaaua

SEQ ID NO: 1744404 - RNA, 19 nt, Homo sapiens
  misc_RNA (1)...(19): siRNA sense strand
gcuuggagcuggagaugug

SEQ ID NO: 1744405 - RNA, 19 nt, Homo sapiens
  misc_RNA (1)...(19): siRNA sense strand
gagcuccgacugcagauaa

SEQ ID NO: 1744406 - RNA, 19 nt, Homo sapiens
  misc_RNA (1)...(19): siRNA sense strand
uaagaucaauccaaauguc

SEQ ID NO: 1744407 - RNA, 19 nt, Homo sapiens
  misc_RNA (1)...(19): siRNA sense strand
gcuguuugcugguucauca

SEQ ID NO: 1744408 - RNA, 19 nt, Homo sapiens
  misc_RNA (1)...(19): siRNA sense strand
gaaagaaauaagucuggaa

SEQ ID NO: 1744409 - RNA, 19 nt, Homo sapiens
  misc_RNA (1)...(19): siRNA sense strand
gcacaggagcccuaagugu

SEQ ID NO: 1744410 - RNA, 19 nt, Homo sapiens
  misc_RNA (1)...(19): siRNA sense strand
ugagaacaguggaagauca

SEQ ID NO: 1744411 - RNA, 19 nt, Homo sapiens
  misc_RNA (1)...(19): siRNA sense strand
ggacauucucuucuacauu

SEQ ID NO: 1744412 - RNA, 19 nt, Homo sapiens
  misc_RNA (1)...(19): siRNA sense strand
gagcaaggguagaucuagu

SEQ ID NO: 1744413 - RNA, 19 nt, Homo sapiens
  misc_RNA (1)...(19): siRNA sense strand
ucagagaaccugcuguuug

SEQ ID NO: 1744414 - RNA, 19 nt, Homo sapiens
  misc_RNA (1)...(19): siRNA sense strand
agagcaaacuggaugcaaa

SEQ ID NO: 1744415 - RNA, 19 nt, Homo sapiens
  misc_RNA (1)...(19): siRNA sense strand
gcugauguuugccagauau

SEQ ID NO: 1744416 - RNA, 19 nt, Homo sapiens
  misc_RNA (1)...(19): siRNA sense strand
gggcagcacugggaggaaa

SEQ ID NO: 1744417 - RNA, 19 nt, Homo sapiens
  misc_RNA (1)...(19): siRNA sense strand
caaaggcagugaugauguc

SEQ ID NO: 1744418 - RNA, 19 nt, Homo sapiens
  misc_RNA (1)...(19): siRNA sense strand
ggagugccuacuacaauaa

SEQ ID NO: 1744419 - RNA, 19 nt, Homo sapiens
  misc_RNA (1)...(19): siRNA sense strand
gcauugcuccuccagguuu

SEQ ID NO: 1744420 - RNA, 19 nt, Homo sapiens
  misc_RNA (1)...(19): siRNA sense strand
caaaugaaacagccagaga

SEQ ID NO: 1744421 - RNA, 19 nt, Homo sapiens
  misc_RNA (1)...(19): siRNA sense strand
ggaaggcggagcccagauu

SEQ ID NO: 1744422 - RNA, 19 nt, Homo sapiens
  misc_RNA (1)...(19): siRNA sense strand
gcaaaggcagugaugaugu

SEQ ID NO: 1744423 - RNA, 19 nt, Homo sapiens
  misc_RNA (1)...(19): siRNA sense strand
cagauuggauugugcagau

SEQ ID NO: 1744424 - RNA, 19 nt, Homo sapiens
  misc_RNA (1)...(19): siRNA sense strand
ugaccaagauggacauucu

SEQ ID NO: 1744425 - RNA, 19 nt, Homo sapiens
  misc_RNA (1)...(19): siRNA sense strand
gugaaguuauuacuggaaa

SEQ ID NO: 1744426 - RNA, 19 nt, Homo sapiens
  misc_RNA (1)...(19): siRNA sense strand
gucuugaccucauaugaaa

SEQ ID NO: 1744427 - RNA, 19 nt, Homo sapiens
  misc_RNA (1)...(19): siRNA sense strand
aagcaugauucuaacauug

SEQ ID NO: 1744428 - RNA, 19 nt, Homo sapiens
  misc_RNA (1)...(19): siRNA sense strand
gaaguggauacacaggaua

SEQ ID NO: 1744429 - RNA, 19 nt, Homo sapiens
  misc_RNA (1)...(19): siRNA sense strand
caggagaaguggauacaca

SEQ ID NO: 1744430 - RNA, 19 nt, Homo sapiens
  misc_RNA (1)...(19): siRNA sense strand
ggaaugugaccgugguuga

SEQ ID NO: 1744431 - RNA, 19 nt, Homo sapiens
  misc_RNA (1)...(19): siRNA sense strand
cagagaaccugcuguuugc

SEQ ID NO: 1744432 - RNA, 19 nt, Homo sapiens
  misc_RNA (1)...(19): siRNA sense strand
gaaacagccagagaacauu

SEQ ID NO: 1744433 - RNA, 19 nt, Homo sapiens
  misc_RNA (1)...(19): siRNA sense strand
gggagaacaccacuuaugu

SEQ ID NO: 1744434 - RNA, 19 nt, Homo sapiens
  misc_RNA (1)...(19): siRNA sense strand
aaauaagucuggaacuauc

SEQ ID NO: 1744435 - RNA, 19 nt, Homo sapiens
  misc_RNA (1)...(19): siRNA sense strand
aagcaaaucuaugguuguu

SEQ ID NO: 1744436 - RNA, 19 nt, Homo sapiens
  misc_RNA (1)...(19): siRNA sense strand
acaauaacccugagcaugu

SEQ ID NO: 1744437 - RNA, 19 nt, Homo sapiens
  misc_RNA (1)...(19): siRNA sense strand
ccaaaccacugcaguaagc

SEQ ID NO: 1744438 - RNA, 19 nt, Homo sapiens
  misc_RNA (1)...(19): siRNA sense strand
ccaaggcccugagccaaga

SEQ ID NO: 1744439 - RNA, 19 nt, Homo sapiens
  misc_RNA (1)...(19): siRNA sense strand
gagcagaugugaauaaaac

SEQ ID NO: 1744440 - RNA, 19 nt, Homo sapiens
  misc_RNA (1)...(19): siRNA sense strand
agauggacauucucuucua

SEQ ID NO: 1744441 - RNA, 19 nt, Homo sapiens
  misc_RNA (1)...(19): siRNA sense strand
gugauucagacacucauua

SEQ ID NO: 1744442 - RNA, 19 nt, Homo sapiens
  misc_RNA (1)...(19): siRNA sense strand
gagccacaccuuugcacua

SEQ ID NO: 1744443 - RNA, 19 nt, Homo sapiens
  misc_RNA (1)...(19): siRNA sense strand
ucgaacuccucuucacuuu

SEQ ID NO: 1744444 - RNA, 19 nt, Homo sapiens
  misc_RNA (1)...(19): siRNA sense strand
caauaacccugagcaugug

SEQ ID NO: 1744445 - RNA, 19 nt, Homo sapiens
  misc_RNA (1)...(19): siRNA sense strand
gaagagaugacuccuuugc

SEQ ID NO: 1744446 - RNA, 19 nt, Homo sapiens
  misc_RNA (1)...(19): siRNA sense strand
ucaugaaacucuuacuuac

SEQ ID NO: 1744447 - RNA, 19 nt, Homo sapiens
  misc_RNA (1)...(19): siRNA sense strand
gaugacuccuuugcacuug

SEQ ID NO: 1744448 - RNA, 19 nt, Homo sapiens
  misc_RNA (1)...(19): siRNA sense strand
gauaagggugcucuacaga

SEQ ID NO: 1744449 - RNA, 19 nt, Homo sapiens
  misc_RNA (1)...(19): siRNA sense strand
gcugacaaauauggaggua

SEQ ID NO: 1744450 - RNA, 19 nt, Homo sapiens
  misc_RNA (1)...(19): siRNA sense strand
cugaaacgguuaaaguguu

SEQ ID NO: 1744451 - RNA, 19 nt, Homo sapiens
  misc_RNA (1)...(19): siRNA sense strand
uuacugaacuggcaagacu

SEQ ID NO: 1744452 - RNA, 19 nt, Homo sapiens
  misc_RNA (1)...(19): siRNA sense strand
gauuguccaucuccuuuua

SEQ ID NO: 1744453 - RNA, 19 nt, Homo sapiens
  misc_RNA (1)...(19): siRNA sense strand
ggcaagagucuacagcauu

SEQ ID NO: 1744454 - RNA, 19 nt, Homo sapiens
  misc_RNA (1)...(19): siRNA sense strand
gaaggaggaaggagcuguu

SEQ ID NO: 1744455 - RNA, 19 nt, Homo sapiens
  misc_RNA (1)...(19): siRNA sense strand
gcauguuuccucagauuug

SEQ ID NO: 1744456 - RNA, 19 nt, Homo sapiens
  misc_RNA (1)...(19): siRNA sense strand
ggugaaagcucgcgucauc

SEQ ID NO: 1744457 - RNA, 19 nt, Homo sapiens
  misc_RNA (1)...(19): siRNA sense strand
guuccuggaugacuccuuu

SEQ ID NO: 1744458 - RNA, 19 nt, Homo sapiens
  misc_RNA (1)...(19): siRNA sense strand
ucuaagcaguggcaucuga

SEQ ID NO: 1744459 - RNA, 19 nt, Homo sapiens
  misc_RNA (1)...(19): siRNA sense strand
ugaauuagccaccaaguac

SEQ ID NO: 1744460 - RNA, 19 nt, Homo sapiens
  misc_RNA (1)...(19): siRNA sense strand
uccugaaucuggacucuaa

SEQ ID NO: 1744461 - RNA, 19 nt, Homo sapiens
  misc_RNA (1)...(19): siRNA sense strand
gaugacuccuuucgcaagu

SEQ ID NO: 1744462 - RNA, 19 nt, Homo sapiens
  misc_RNA (1)...(19): siRNA sense strand
gggaguucgugccgccuuu

SEQ ID NO: 1744463 - RNA, 19 nt, Homo sapiens
  misc_RNA (1)...(19): siRNA sense strand
cacaauauccagcgagaga

SEQ ID NO: 1744464 - RNA, 19 nt, Homo sapiens
  misc_RNA (1)...(19): siRNA sense strand
gaucuaagcaguggcaucu

SEQ ID NO: 1744465 - RNA, 19 nt, Homo sapiens
  misc_RNA (1)...(19): siRNA sense strand
caauauccagcgagagaaa

SEQ ID NO: 1744466 - RNA, 19 nt, Homo sapiens
  misc_RNA (1)...(19): siRNA sense strand
gggcuagaauccgggaguu

SEQ ID NO: 1744467 - RNA, 19 nt, Homo sapiens
  misc_RNA (1)...(19): siRNA sense strand
ccagcgagagaaagaguuu

SEQ ID NO: 1744468 - RNA, 19 nt, Homo sapiens
  misc_RNA (1)...(19): siRNA sense strand
caagccagcacccauguuc

SEQ ID NO: 1744469 - RNA, 19 nt, Homo sapiens
  misc_RNA (1)...(19): siRNA sense strand
cguggaagcuacacuuacu

SEQ ID NO: 1744470 - RNA, 19 nt, Homo sapiens
  misc_RNA (1)...(19): siRNA sense strand
aagcucgcgucaucacuga

SEQ ID NO: 1744471 - RNA, 19 nt, Homo sapiens
  misc_RNA (1)...(19): siRNA sense strand
cugaauuagccaccaagua

SEQ ID NO: 1744472 - RNA, 19 nt, Homo sapiens
  misc_RNA (1)...(19): siRNA sense strand
gcuagcccucugccucuuu

SEQ ID NO: 1744473 - RNA, 19 nt, Homo sapiens
  misc_RNA (1)...(19): siRNA sense strand
uguauuauucugcguggaa

SEQ ID NO: 1744474 - RNA, 19 nt, Homo sapiens
  misc_RNA (1)...(19): siRNA sense strand
ugcggaagcuggugaaagc

SEQ ID NO: 1744475 - RNA, 19 nt, Homo sapiens
  misc_RNA (1)...(19): siRNA sense strand
ggugaaagcucgcgucauc

SEQ ID NO: 1744476 - RNA, 19 nt, Homo sapiens
  misc_RNA (1)...(19): siRNA sense strand
guuccuggaugacuccuuu

SEQ ID NO: 1744477 - RNA, 19 nt, Homo sapiens
  misc_RNA (1)...(19): siRNA sense strand
ucuaagcaguggcaucuga

SEQ ID NO: 1744478 - RNA, 19 nt, Homo sapiens
  misc_RNA (1)...(19): siRNA sense strand
ugaauuagccaccaaguac

SEQ ID NO: 1744479 - RNA, 19 nt, Homo sapiens
  misc_RNA (1)...(19): siRNA sense strand
uccugaaucuggacucuaa

SEQ ID NO: 1744480 - RNA, 19 nt, Homo sapiens
  misc_RNA (1)...(19): siRNA sense strand
gaugacuccuuucgcaagu

SEQ ID NO: 1744481 - RNA, 19 nt, Homo sapiens
  misc_RNA (1)...(19): siRNA sense strand
gggaguucgugccgccuuu

SEQ ID NO: 1744482 - RNA, 19 nt, Homo sapiens
  misc_RNA (1)...(19): siRNA sense strand
cacaauauccagcgagaga

SEQ ID NO: 1744483 - RNA, 19 nt, Homo sapiens
  misc_RNA (1)...(19): siRNA sense strand
gaucuaagcaguggcaucu

SEQ ID NO: 1744484 - RNA, 19 nt, Homo sapiens
  misc_RNA (1)...(19): siRNA sense strand
caauauccagcgagagaaa

SEQ ID NO: 1744485 - RNA, 19 nt, Homo sapiens
  misc_RNA (1)...(19): siRNA sense strand
gggcuagaauccgggaguu

SEQ ID NO: 1744486 - RNA, 19 nt, Homo sapiens
  misc_RNA (1)...(19): siRNA sense strand
ccagcgagagaaagaguuu

SEQ ID NO: 1744487 - RNA, 19 nt, Homo sapiens
  misc_RNA (1)...(19): siRNA sense strand
caagccagcacccauguuc

SEQ ID NO: 1744488 - RNA, 19 nt, Homo sapiens
  misc_RNA (1)...(19): siRNA sense strand
cguggaagcuacacuuacu

SEQ ID NO: 1744489 - RNA, 19 nt, Homo sapiens
  misc_RNA (1)...(19): siRNA sense strand
aagcucgcgucaucacuga

SEQ ID NO: 1744490 - RNA, 19 nt, Homo sapiens
  misc_RNA (1)...(19): siRNA sense strand
cugaauuagccaccaagua

SEQ ID NO: 1744491 - RNA, 19 nt, Homo sapiens
  misc_RNA (1)...(19): siRNA sense strand
gcuagcccucugccucuuu

SEQ ID NO: 1744492 - RNA, 19 nt, Homo sapiens
  misc_RNA (1)...(19): siRNA sense strand
uguauuauucugcguggaa

SEQ ID NO: 1744493 - RNA, 19 nt, Homo sapiens
  misc_RNA (1)...(19): siRNA sense strand
ugcggaagcuggugaaagc

SEQ ID NO: 1744494 - RNA, 19 nt, Homo sapiens
  misc_RNA (1)...(19): siRNA sense strand
ggugaaagcucgcgucauc

SEQ ID NO: 1744495 - RNA, 19 nt, Homo sapiens
  misc_RNA (1)...(19): siRNA sense strand
guuccuggaugacuccuuu

SEQ ID NO: 1744496 - RNA, 19 nt, Homo sapiens
  misc_RNA (1)...(19): siRNA sense strand
ucuaagcaguggcaucuga

SEQ ID NO: 1744497 - RNA, 19 nt, Homo sapiens
  misc_RNA (1)...(19): siRNA sense strand
ugaauuagccaccaaguac

SEQ ID NO: 1744498 - RNA, 19 nt, Homo sapiens
  misc_RNA (1)...(19): siRNA sense strand
uccugaaucuggacucuaa

SEQ ID NO: 1744499 - RNA, 19 nt, Homo sapiens
  misc_RNA (1)...(19): siRNA sense strand
gaugacuccuuucgcaagu

SEQ ID NO: 1744500 - RNA, 19 nt, Homo sapiens
  misc_RNA (1)...(19): siRNA sense strand
gggaguucgugccgccuuu

SEQ ID NO: 1744501 - RNA, 19 nt, Homo sapiens
  misc_RNA (1)...(19): siRNA sense strand
cacaauauccagcgagaga

SEQ ID NO: 1744502 - RNA, 19 nt, Homo sapiens
  misc_RNA (1)...(19): siRNA sense strand
gaucuaagcaguggcaucu

SEQ ID NO: 1744503 - RNA, 19 nt, Homo sapiens
  misc_RNA (1)...(19): siRNA sense strand
caauauccagcgagagaaa

SEQ ID NO: 1744504 - RNA, 19 nt, Homo sapiens
  misc_RNA (1)...(19): siRNA sense strand
gggcuagaauccgggaguu

SEQ ID NO: 1744505 - RNA, 19 nt, Homo sapiens
  misc_RNA (1)...(19): siRNA sense strand
ccagcgagagaaagaguuu

SEQ ID NO: 1744506 - RNA, 19 nt, Homo sapiens
  misc_RNA (1)...(19): siRNA sense strand
caagccagcacccauguuc

SEQ ID NO: 1744507 - RNA, 19 nt, Homo sapiens
  misc_RNA (1)...(19): siRNA sense strand
cguggaagcuacacuuacu

SEQ ID NO: 1744508 - RNA, 19 nt, Homo sapiens
  misc_RNA (1)...(19): siRNA sense strand
aagcucgcgucaucacuga

SEQ ID NO: 1744509 - RNA, 19 nt, Homo sapiens
  misc_RNA (1)...(19): siRNA sense strand
cugaauuagccaccaagua

SEQ ID NO: 1744510 - RNA, 19 nt, Homo sapiens
  misc_RNA (1)...(19): siRNA sense strand
gcuagcccucugccucuuu

SEQ ID NO: 1744511 - RNA, 19 nt, Homo sapiens
  misc_RNA (1)...(19): siRNA sense strand
uguauuauucugcguggaa

SEQ ID NO: 1744512 - RNA, 19 nt, Homo sapiens
  misc_RNA (1)...(19): siRNA sense strand
ugcggaagcuggugaaagc

SEQ ID NO: 1744513 - RNA, 19 nt, Homo sapiens
  misc_RNA (1)...(19): siRNA sense strand
ggugaaagcucgcgucauc

SEQ ID NO: 1744514 - RNA, 19 nt, Homo sapiens
  misc_RNA (1)...(19): siRNA sense strand
guuccuggaugacuccuuu

SEQ ID NO: 1744515 - RNA, 19 nt, Homo sapiens
  misc_RNA (1)...(19): siRNA sense strand
ugaauuagccaccaaguac

SEQ ID NO: 1744516 - RNA, 19 nt, Homo sapiens
  misc_RNA (1)...(19): siRNA sense strand
uccugaaucuggacucuaa

SEQ ID NO: 1744517 - RNA, 19 nt, Homo sapiens
  misc_RNA (1)...(19): siRNA sense strand
gaugacuccuuucgcaagu

SEQ ID NO: 1744518 - RNA, 19 nt, Homo sapiens
  misc_RNA (1)...(19): siRNA sense strand
gggaguucgugccgccuuu

SEQ ID NO: 1744519 - RNA, 19 nt, Homo sapiens
  misc_RNA (1)...(19): siRNA sense strand
cacaauauccagcgagaga

SEQ ID NO: 1744520 - RNA, 19 nt, Homo sapiens
  misc_RNA (1)...(19): siRNA sense strand
caauauccagcgagagaaa

SEQ ID NO: 1744521 - RNA, 19 nt, Homo sapiens
  misc_RNA (1)...(19): siRNA sense strand
gggcuagaauccgggaguu

SEQ ID NO: 1744522 - RNA, 19 nt, Homo sapiens
  misc_RNA (1)...(19): siRNA sense strand
ccagcgagagaaagaguuu

SEQ ID NO: 1744523 - RNA, 19 nt, Homo sapiens
  misc_RNA (1)...(19): siRNA sense strand
caagccagcacccauguuc

SEQ ID NO: 1744524 - RNA, 19 nt, Homo sapiens
  misc_RNA (1)...(19): siRNA sense strand
cguggaagcuacacuuacu

SEQ ID NO: 1744525 - RNA, 19 nt, Homo sapiens
  misc_RNA (1)...(19): siRNA sense strand
aagcucgcgucaucacuga

SEQ ID NO: 1744526 - RNA, 19 nt, Homo sapiens
  misc_RNA (1)...(19): siRNA sense strand
cugaauuagccaccaagua

SEQ ID NO: 1744527 - RNA, 19 nt, Homo sapiens
  misc_RNA (1)...(19): siRNA sense strand
gcuagcccucugccucuuu

SEQ ID NO: 1744528 - RNA, 19 nt, Homo sapiens
  misc_RNA (1)...(19): siRNA sense strand
uguauuauucugcguggaa

SEQ ID NO: 1744529 - RNA, 19 nt, Homo sapiens
  misc_RNA (1)...(19): siRNA sense strand
ugcggaagcuggugaaagc

SEQ ID NO: 1744530 - RNA, 19 nt, Homo sapiens
  misc_RNA (1)...(19): siRNA sense strand
ggugaaagcucgcgucauc

SEQ ID NO: 1744531 - RNA, 19 nt, Homo sapiens
  misc_RNA (1)...(19): siRNA sense strand
guuccuggaugacuccuuu

SEQ ID NO: 1744532 - RNA, 19 nt, Homo sapiens
  misc_RNA (1)...(19): siRNA sense strand
ucuaagcaguggcaucuga

SEQ ID NO: 1744533 - RNA, 19 nt, Homo sapiens
  misc_RNA (1)...(19): siRNA sense strand
ugaauuagccaccaaguac

SEQ ID NO: 1744534 - RNA, 19 nt, Homo sapiens
  misc_RNA (1)...(19): siRNA sense strand
uccugaaucuggacucuaa

SEQ ID NO: 1744535 - RNA, 19 nt, Homo sapiens
  misc_RNA (1)...(19): siRNA sense strand
gaugacuccuuucgcaagu

SEQ ID NO: 1744536 - RNA, 19 nt, Homo sapiens
  misc_RNA (1)...(19): siRNA sense strand
gggaguucgugccgccuuu

SEQ ID NO: 1744537 - RNA, 19 nt, Homo sapiens
  misc_RNA (1)...(19): siRNA sense strand
cacaauauccagcgagaga

SEQ ID NO: 1744538 - RNA, 19 nt, Homo sapiens
  misc_RNA (1)...(19): siRNA sense strand
gaucuaagcaguggcaucu

SEQ ID NO: 1744539 - RNA, 19 nt, Homo sapiens
  misc_RNA (1)...(19): siRNA sense strand
caauauccagcgagagaaa

SEQ ID NO: 1744540 - RNA, 19 nt, Homo sapiens
  misc_RNA (1)...(19): siRNA sense strand
gggcuagaauccgggaguu

SEQ ID NO: 1744541 - RNA, 19 nt, Homo sapiens
  misc_RNA (1)...(19): siRNA sense strand
ccagcgagagaaagaguuu

SEQ ID NO: 1744542 - RNA, 19 nt, Homo sapiens
  misc_RNA (1)...(19): siRNA sense strand
caagccagcacccauguuc

SEQ ID NO: 1744543 - RNA, 19 nt, Homo sapiens
  misc_RNA (1)...(19): siRNA sense strand
cguggaagcuacacuuacu

SEQ ID NO: 1744544 - RNA, 19 nt, Homo sapiens
  misc_RNA (1)...(19): siRNA sense strand
aagcucgcgucaucacuga

SEQ ID NO: 1744545 - RNA, 19 nt, Homo sapiens
  misc_RNA (1)...(19): siRNA sense strand
cugaauuagccaccaagua

SEQ ID NO: 1744546 - RNA, 19 nt, Homo sapiens
  misc_RNA (1)...(19): siRNA sense strand
gcuagcccucugccucuuu

SEQ ID NO: 1744547 - RNA, 19 nt, Homo sapiens
  misc_RNA (1)...(19): siRNA sense strand
uguauuauucugcguggaa

SEQ ID NO: 1744548 - RNA, 19 nt, Homo sapiens
  misc_RNA (1)...(19): siRNA sense strand
ugcggaagcuggugaaagc

SEQ ID NO: 1744549 - RNA, 19 nt, Homo sapiens
  misc_RNA (1)...(19): siRNA sense strand
ggugaaagcucgcgucauc

SEQ ID NO: 1744550 - RNA, 19 nt, Homo sapiens
  misc_RNA (1)...(19): siRNA sense strand
guuccuggaugacuccuuu

SEQ ID NO: 1744551 - RNA, 19 nt, Homo sapiens
  misc_RNA (1)...(19): siRNA sense strand
ugaauuagccaccaaguac

SEQ ID NO: 1744552 - RNA, 19 nt, Homo sapiens
  misc_RNA (1)...(19): siRNA sense strand
uccugaaucuggacucuaa

SEQ ID NO: 1744553 - RNA, 19 nt, Homo sapiens
  misc_RNA (1)...(19): siRNA sense strand
gaugacuccuuucgcaagu

SEQ ID NO: 1744554 - RNA, 19 nt, Homo sapiens
  misc_RNA (1)...(19): siRNA sense strand
gggaguucgugccgccuuu

SEQ ID NO: 1744555 - RNA, 19 nt, Homo sapiens
  misc_RNA (1)...(19): siRNA sense strand
cacaauauccagcgagaga

SEQ ID NO: 1744556 - RNA, 19 nt, Homo sapiens
  misc_RNA (1)...(19): siRNA sense strand
caauauccagcgagagaaa

SEQ ID NO: 1744557 - RNA, 19 nt, Homo sapiens
  misc_RNA (1)...(19): siRNA sense strand
gggcuagaauccgggaguu

SEQ ID NO: 1744558 - RNA, 19 nt, Homo sapiens
  misc_RNA (1)...(19): siRNA sense strand
ccagcgagagaaagaguuu

SEQ ID NO: 1744559 - RNA, 19 nt, Homo sapiens
  misc_RNA (1)...(19): siRNA sense strand
caagccagcacccauguuc

SEQ ID NO: 1744560 - RNA, 19 nt, Homo sapiens
  misc_RNA (1)...(19): siRNA sense strand
cguggaagcuacacuuacu

SEQ ID NO: 1744561 - RNA, 19 nt, Homo sapiens
  misc_RNA (1)...(19): siRNA sense strand
aagcucgcgucaucacuga

SEQ ID NO: 1744562 - RNA, 19 nt, Homo sapiens
  misc_RNA (1)...(19): siRNA sense strand
cugaauuagccaccaagua

SEQ ID NO: 1744563 - RNA, 19 nt, Homo sapiens
  misc_RNA (1)...(19): siRNA sense strand
gcuagcccucugccucuuu

SEQ ID NO: 1744564 - RNA, 19 nt, Homo sapiens
  misc_RNA (1)...(19): siRNA sense strand
uguauuauucugcguggaa

SEQ ID NO: 1744565 - RNA, 19 nt, Homo sapiens
  misc_RNA (1)...(19): siRNA sense strand
ugcggaagcuggugaaagc

SEQ ID NO: 1744566 - RNA, 19 nt, Homo sapiens
  misc_RNA (1)...(19): siRNA sense strand
ggugaaagcucgcgucauc

SEQ ID NO: 1744567 - RNA, 19 nt, Homo sapiens
  misc_RNA (1)...(19): siRNA sense strand
guuccuggaugacuccuuu

SEQ ID NO: 1744568 - RNA, 19 nt, Homo sapiens
  misc_RNA (1)...(19): siRNA sense strand
ucuaagcaguggcaucuga

SEQ ID NO: 1744569 - RNA, 19 nt, Homo sapiens
  misc_RNA (1)...(19): siRNA sense strand
ugaauuagccaccaaguac

SEQ ID NO: 1744570 - RNA, 19 nt, Homo sapiens
  misc_RNA (1)...(19): siRNA sense strand
uccugaaucuggacucuaa

SEQ ID NO: 1744571 - RNA, 19 nt, Homo sapiens
  misc_RNA (1)...(19): siRNA sense strand
gaugacuccuuucgcaagu

SEQ ID NO: 1744572 - RNA, 19 nt, Homo sapiens
  misc_RNA (1)...(19): siRNA sense strand
gggaguucgugccgccuuu

SEQ ID NO: 1744573 - RNA, 19 nt, Homo sapiens
  misc_RNA (1)...(19): siRNA sense strand
cacaauauccagcgagaga

SEQ ID NO: 1744574 - RNA, 19 nt, Homo sapiens
  misc_RNA (1)...(19): siRNA sense strand
gaucuaagcaguggcaucu

SEQ ID NO: 1744575 - RNA, 19 nt, Homo sapiens
  misc_RNA (1)...(19): siRNA sense strand
caauauccagcgagagaaa

SEQ ID NO: 1744576 - RNA, 19 nt, Homo sapiens
  misc_RNA (1)...(19): siRNA sense strand
gggcuagaauccgggaguu

SEQ ID NO: 1744577 - RNA, 19 nt, Homo sapiens
  misc_RNA (1)...(19): siRNA sense strand
ccagcgagagaaagaguuu

SEQ ID NO: 1744578 - RNA, 19 nt, Homo sapiens
  misc_RNA (1)...(19): siRNA sense strand
caagccagcacccauguuc

SEQ ID NO: 1744579 - RNA, 19 nt, Homo sapiens
  misc_RNA (1)...(19): siRNA sense strand
cguggaagcuacacuuacu

SEQ ID NO: 1744580 - RNA, 19 nt, Homo sapiens
  misc_RNA (1)...(19): siRNA sense strand
aagcucgcgucaucacuga

SEQ ID NO: 1744581 - RNA, 19 nt, Homo sapiens
  misc_RNA (1)...(19): siRNA sense strand
cugaauuagccaccaagua

SEQ ID NO: 1744582 - RNA, 19 nt, Homo sapiens
  misc_RNA (1)...(19): siRNA sense strand
gcuagcccucugccucuuu

SEQ ID NO: 1744583 - RNA, 19 nt, Homo sapiens
  misc_RNA (1)...(19): siRNA sense strand
uguauuauucugcguggaa

SEQ ID NO: 1744584 - RNA, 19 nt, Homo sapiens
  misc_RNA (1)...(19): siRNA sense strand
ugcggaagcuggugaaagc

SEQ ID NO: 1744585 - RNA, 19 nt, Homo sapiens
  misc_RNA (1)...(19): siRNA sense strand
ggugaaagcucgcgucauc

SEQ ID NO: 1744586 - RNA, 19 nt, Homo sapiens
  misc_RNA (1)...(19): siRNA sense strand
guuccuggaugacuccuuu

SEQ ID NO: 1744587 - RNA, 19 nt, Homo sapiens
  misc_RNA (1)...(19): siRNA sense strand
ucuaagcaguggcaucuga

SEQ ID NO: 1744588 - RNA, 19 nt, Homo sapiens
  misc_RNA (1)...(19): siRNA sense strand
ugaauuagccaccaaguac

SEQ ID NO: 1744589 - RNA, 19 nt, Homo sapiens
  misc_RNA (1)...(19): siRNA sense strand
uccugaaucuggacucuaa

SEQ ID NO: 1744590 - RNA, 19 nt, Homo sapiens
  misc_RNA (1)...(19): siRNA sense strand
gaugacuccuuucgcaagu

SEQ ID NO: 1744591 - RNA, 19 nt, Homo sapiens
  misc_RNA (1)...(19): siRNA sense strand
gggaguucgugccgccuuu

SEQ ID NO: 1744592 - RNA, 19 nt, Homo sapiens
  misc_RNA (1)...(19): siRNA sense strand
cacaauauccagcgagaga

SEQ ID NO: 1744593 - RNA, 19 nt, Homo sapiens
  misc_RNA (1)...(19): siRNA sense strand
gaucuaagcaguggcaucu

SEQ ID NO: 1744594 - RNA, 19 nt, Homo sapiens
  misc_RNA (1)...(19): siRNA sense strand
caauauccagcgagagaaa

SEQ ID NO: 1744595 - RNA, 19 nt, Homo sapiens
  misc_RNA (1)...(19): siRNA sense strand
gggcuagaauccgggaguu

SEQ ID NO: 1744596 - RNA, 19 nt, Homo sapiens
  misc_RNA (1)...(19): siRNA sense strand
ccagcgagagaaagaguuu

SEQ ID NO: 1744597 - RNA, 19 nt, Homo sapiens
  misc_RNA (1)...(19): siRNA sense strand
caagccagcacccauguuc

SEQ ID NO: 1744598 - RNA, 19 nt, Homo sapiens
  misc_RNA (1)...(19): siRNA sense strand
cguggaagcuacacuuacu

SEQ ID NO: 1744599 - RNA, 19 nt, Homo sapiens
  misc_RNA (1)...(19): siRNA sense strand
aagcucgcgucaucacuga

SEQ ID NO: 1744600 - RNA, 19 nt, Homo sapiens
  misc_RNA (1)...(19): siRNA sense strand
cugaauuagccaccaagua

SEQ ID NO: 1744601 - RNA, 19 nt, Homo sapiens
  misc_RNA (1)...(19): siRNA sense strand
gcuagcccucugccucuuu

SEQ ID NO: 1744602 - RNA, 19 nt, Homo sapiens
  misc_RNA (1)...(19): siRNA sense strand
uguauuauucugcguggaa

SEQ ID NO: 1744603 - RNA, 19 nt, Homo sapiens
  misc_RNA (1)...(19): siRNA sense strand
ugcggaagcuggugaaagc

SEQ ID NO: 1744604 - RNA, 19 nt, Homo sapiens
  misc_RNA (1)...(19): siRNA sense strand
ggugaaagcucgcgucauc

SEQ ID NO: 1744605 - RNA, 19 nt, Homo sapiens
  misc_RNA (1)...(19): siRNA sense strand
guuccuggaugacuccuuu

SEQ ID NO: 1744606 - RNA, 19 nt, Homo sapiens
  misc_RNA (1)...(19): siRNA sense strand
ugaauuagccaccaaguac

SEQ ID NO: 1744607 - RNA, 19 nt, Homo sapiens
  misc_RNA (1)...(19): siRNA sense strand
uccugaaucuggacucuaa

SEQ ID NO: 1744608 - RNA, 19 nt, Homo sapiens
  misc_RNA (1)...(19): siRNA sense strand
gaugacuccuuucgcaagu

SEQ ID NO: 1744609 - RNA, 19 nt, Homo sapiens
  misc_RNA (1)...(19): siRNA sense strand
gggaguucgugccgccuuu

SEQ ID NO: 1744610 - RNA, 19 nt, Homo sapiens
  misc_RNA (1)...(19): siRNA sense strand
cacaauauccagcgagaga

SEQ ID NO: 1744611 - RNA, 19 nt, Homo sapiens
  misc_RNA (1)...(19): siRNA sense strand
caauauccagcgagagaaa

SEQ ID NO: 1744612 - RNA, 19 nt, Homo sapiens
  misc_RNA (1)...(19): siRNA sense strand
gggcuagaauccgggaguu

SEQ ID NO: 1744613 - RNA, 19 nt, Homo sapiens
  misc_RNA (1)...(19): siRNA sense strand
ccagcgagagaaagaguuu

SEQ ID NO: 1744614 - RNA, 19 nt, Homo sapiens
  misc_RNA (1)...(19): siRNA sense strand
caagccagcacccauguuc

SEQ ID NO: 1744615 - RNA, 19 nt, Homo sapiens
  misc_RNA (1)...(19): siRNA sense strand
cguggaagcuacacuuacu

SEQ ID NO: 1744616 - RNA, 19 nt, Homo sapiens
  misc_RNA (1)...(19): siRNA sense strand
aagcucgcgucaucacuga

SEQ ID NO: 1744617 - RNA, 19 nt, Homo sapiens
  misc_RNA (1)...(19): siRNA sense strand
cugaauuagccaccaagua

SEQ ID NO: 1744618 - RNA, 19 nt, Homo sapiens
  misc_RNA (1)...(19): siRNA sense strand
gcuagcccucugccucuuu

SEQ ID NO: 1744619 - RNA, 19 nt, Homo sapiens
  misc_RNA (1)...(19): siRNA sense strand
uguauuauucugcguggaa

SEQ ID NO: 1744620 - RNA, 19 nt, Homo sapiens
  misc_RNA (1)...(19): siRNA sense strand
ugcggaagcuggugaaagc

SEQ ID NO: 1744621 - RNA, 19 nt, Homo sapiens
  misc_RNA (1)...(19): siRNA sense strand
ggugaaagcucgcgucauc

SEQ ID NO: 1744622 - RNA, 19 nt, Homo sapiens
  misc_RNA (1)...(19): siRNA sense strand
guuccuggaugacuccuuu

SEQ ID NO: 1744623 - RNA, 19 nt, Homo sapiens
  misc_RNA (1)...(19): siRNA sense strand
ucuaagcaguggcaucuga

SEQ ID NO: 1744624 - RNA, 19 nt, Homo sapiens
  misc_RNA (1)...(19): siRNA sense strand
ugaauuagccaccaaguac

SEQ ID NO: 1744625 - RNA, 19 nt, Homo sapiens
  misc_RNA (1)...(19): siRNA sense strand
uccugaaucuggacucuaa

SEQ ID NO: 1744626 - RNA, 19 nt, Homo sapiens
  misc_RNA (1)...(19): siRNA sense strand
gaugacuccuuucgcaagu

SEQ ID NO: 1744627 - RNA, 19 nt, Homo sapiens
  misc_RNA (1)...(19): siRNA sense strand
gggaguucgugccgccuuu

SEQ ID NO: 1744628 - RNA, 19 nt, Homo sapiens
  misc_RNA (1)...(19): siRNA sense strand
cacaauauccagcgagaga

SEQ ID NO: 1744629 - RNA, 19 nt, Homo sapiens
  misc_RNA (1)...(19): siRNA sense strand
gaucuaagcaguggcaucu

SEQ ID NO: 1744630 - RNA, 19 nt, Homo sapiens
  misc_RNA (1)...(19): siRNA sense strand
caauauccagcgagagaaa

SEQ ID NO: 1744631 - RNA, 19 nt, Homo sapiens
  misc_RNA (1)...(19): siRNA sense strand
gggcuagaauccgggaguu

SEQ ID NO: 1744632 - RNA, 19 nt, Homo sapiens
  misc_RNA (1)...(19): siRNA sense strand
ccagcgagagaaagaguuu

SEQ ID NO: 1744633 - RNA, 19 nt, Homo sapiens
  misc_RNA (1)...(19): siRNA sense strand
caagccagcacccauguuc

SEQ ID NO: 1744634 - RNA, 19 nt, Homo sapiens
  misc_RNA (1)...(19): siRNA sense strand
cguggaagcuacacuuacu

SEQ ID NO: 1744635 - RNA, 19 nt, Homo sapiens
  misc_RNA (1)...(19): siRNA sense strand
aagcucgcgucaucacuga

SEQ ID NO: 1744636 - RNA, 19 nt, Homo sapiens
  misc_RNA (1)...(19): siRNA sense strand
cugaauuagccaccaagua

SEQ ID NO: 1744637 - RNA, 19 nt, Homo sapiens
  misc_RNA (1)...(19): siRNA sense strand
gcuagcccucugccucuuu

SEQ ID NO: 1744638 - RNA, 19 nt, Homo sapiens
  misc_RNA (1)...(19): siRNA sense strand
uguauuauucugcguggaa

SEQ ID NO: 1744639 - RNA, 19 nt, Homo sapiens
  misc_RNA (1)...(19): siRNA sense strand
ugcggaagcuggugaaagc

SEQ ID NO: 1744640 - RNA, 19 nt, Homo sapiens
  misc_RNA (1)...(19): siRNA sense strand
guuccuggaugacuccuuu

SEQ ID NO: 1744641 - RNA, 19 nt, Homo sapiens
  misc_RNA (1)...(19): siRNA sense strand
ugaauuagccaccaaguac

SEQ ID NO: 1744642 - RNA, 19 nt, Homo sapiens
  misc_RNA (1)...(19): siRNA sense strand
uccugaaucuggacucuaa

SEQ ID NO: 1744643 - RNA, 19 nt, Homo sapiens
  misc_RNA (1)...(19): siRNA sense strand
gaugacuccuuucgcaagu

SEQ ID NO: 1744644 - RNA, 19 nt, Homo sapiens
  misc_RNA (1)...(19): siRNA sense strand
gggaguucgugccgccuuu

SEQ ID NO: 1744645 - RNA, 19 nt, Homo sapiens
  misc_RNA (1)...(19): siRNA sense strand
gggcuagaauccgggaguu

SEQ ID NO: 1744646 - RNA, 19 nt, Homo sapiens
  misc_RNA (1)...(19): siRNA sense strand
caagccagcacccauguuc

SEQ ID NO: 1744647 - RNA, 19 nt, Homo sapiens
  misc_RNA (1)...(19): siRNA sense strand
cguggaagcuacacuuacu

SEQ ID NO: 1744648 - RNA, 19 nt, Homo sapiens
  misc_RNA (1)...(19): siRNA sense strand
cugaauuagccaccaagua

SEQ ID NO: 1744649 - RNA, 19 nt, Homo sapiens
  misc_RNA (1)...(19): siRNA sense strand
gcuagcccucugccucuuu

SEQ ID NO: 1744650 - RNA, 19 nt, Homo sapiens
  misc_RNA (1)...(19): siRNA sense strand
uguauuauucugcguggaa

SEQ ID NO: 1744651 - RNA, 19 nt, Homo sapiens
  misc_RNA (1)...(19): siRNA sense strand
ggugaaagcucgcgucauc

SEQ ID NO: 1744652 - RNA, 19 nt, Homo sapiens
  misc_RNA (1)...(19): siRNA sense strand
guuccuggaugacuccuuu

SEQ ID NO: 1744653 - RNA, 19 nt, Homo sapiens
  misc_RNA (1)...(19): siRNA sense strand
ucuaagcaguggcaucuga

SEQ ID NO: 1744654 - RNA, 19 nt, Homo sapiens
  misc_RNA (1)...(19): siRNA sense strand
ugaauuagccaccaaguac

SEQ ID NO: 1744655 - RNA, 19 nt, Homo sapiens
  misc_RNA (1)...(19): siRNA sense strand
uccugaaucuggacucuaa

SEQ ID NO: 1744656 - RNA, 19 nt, Homo sapiens
  misc_RNA (1)...(19): siRNA sense strand
gaugacuccuuucgcaagu

SEQ ID NO: 1744657 - RNA, 19 nt, Homo sapiens
  misc_RNA (1)...(19): siRNA sense strand
gggaguucgugccgccuuu

SEQ ID NO: 1744658 - RNA, 19 nt, Homo sapiens
  misc_RNA (1)...(19): siRNA sense strand
cacaauauccagcgagaga

SEQ ID NO: 1744659 - RNA, 19 nt, Homo sapiens
  misc_RNA (1)...(19): siRNA sense strand
gaucuaagcaguggcaucu

SEQ ID NO: 1744660 - RNA, 19 nt, Homo sapiens
  misc_RNA (1)...(19): siRNA sense strand
caauauccagcgagagaaa

SEQ ID NO: 1744661 - RNA, 19 nt, Homo sapiens
  misc_RNA (1)...(19): siRNA sense strand
gggcuagaauccgggaguu

SEQ ID NO: 1744662 - RNA, 19 nt, Homo sapiens
  misc_RNA (1)...(19): siRNA sense strand
ccagcgagagaaagaguuu

SEQ ID NO: 1744663 - RNA, 19 nt, Homo sapiens
  misc_RNA (1)...(19): siRNA sense strand
caagccagcacccauguuc

SEQ ID NO: 1744664 - RNA, 19 nt, Homo sapiens
  misc_RNA (1)...(19): siRNA sense strand
cguggaagcuacacuuacu

SEQ ID NO: 1744665 - RNA, 19 nt, Homo sapiens
  misc_RNA (1)...(19): siRNA sense strand
aagcucgcgucaucacuga

SEQ ID NO: 1744666 - RNA, 19 nt, Homo sapiens
  misc_RNA (1)...(19): siRNA sense strand
cugaauuagccaccaagua

SEQ ID NO: 1744667 - RNA, 19 nt, Homo sapiens
  misc_RNA (1)...(19): siRNA sense strand
gcuagcccucugccucuuu

SEQ ID NO: 1744668 - RNA, 19 nt, Homo sapiens
  misc_RNA (1)...(19): siRNA sense strand
uguauuauucugcguggaa

SEQ ID NO: 1744669 - RNA, 19 nt, Homo sapiens
  misc_RNA (1)...(19): siRNA sense strand
ugcggaagcuggugaaagc

SEQ ID NO: 1744670 - RNA, 19 nt, Homo sapiens
  misc_RNA (1)...(19): siRNA sense strand
ggugaaagcucgcgucauc

SEQ ID NO: 1744671 - RNA, 19 nt, Homo sapiens
  misc_RNA (1)...(19): siRNA sense strand
guuccuggaugacuccuuu

SEQ ID NO: 1744672 - RNA, 19 nt, Homo sapiens
  misc_RNA (1)...(19): siRNA sense strand
ucuaagcaguggcaucuga

SEQ ID NO: 1744673 - RNA, 19 nt, Homo sapiens
  misc_RNA (1)...(19): siRNA sense strand
ugaauuagccaccaaguac

SEQ ID NO: 1744674 - RNA, 19 nt, Homo sapiens
  misc_RNA (1)...(19): siRNA sense strand
uccugaaucuggacucuaa

SEQ ID NO: 1744675 - RNA, 19 nt, Homo sapiens
  misc_RNA (1)...(19): siRNA sense strand
gaugacuccuuucgcaagu

SEQ ID NO: 1744676 - RNA, 19 nt, Homo sapiens
  misc_RNA (1)...(19): siRNA sense strand
gggaguucgugccgccuuu

SEQ ID NO: 1744677 - RNA, 19 nt, Homo sapiens
  misc_RNA (1)...(19): siRNA sense strand
cacaauauccagcgagaga

SEQ ID NO: 1744678 - RNA, 19 nt, Homo sapiens
  misc_RNA (1)...(19): siRNA sense strand
gaucuaagcaguggcaucu

SEQ ID NO: 1744679 - RNA, 19 nt, Homo sapiens
  misc_RNA (1)...(19): siRNA sense strand
caauauccagcgagagaaa

SEQ ID NO: 1744680 - RNA, 19 nt, Homo sapiens
  misc_RNA (1)...(19): siRNA sense strand
gggcuagaauccgggaguu

SEQ ID NO: 1744681 - RNA, 19 nt, Homo sapiens
  misc_RNA (1)...(19): siRNA sense strand
ccagcgagagaaagaguuu

SEQ ID NO: 1744682 - RNA, 19 nt, Homo sapiens
  misc_RNA (1)...(19): siRNA sense strand
caagccagcacccauguuc

SEQ ID NO: 1744683 - RNA, 19 nt, Homo sapiens
  misc_RNA (1)...(19): siRNA sense strand
cguggaagcuacacuuacu

SEQ ID NO: 1744684 - RNA, 19 nt, Homo sapiens
  misc_RNA (1)...(19): siRNA sense strand
aagcucgcgucaucacuga

SEQ ID NO: 1744685 - RNA, 19 nt, Homo sapiens
  misc_RNA (1)...(19): siRNA sense strand
cugaauuagccaccaagua

SEQ ID NO: 1744686 - RNA, 19 nt, Homo sapiens
  misc_RNA (1)...(19): siRNA sense strand
gcuagcccucugccucuuu

SEQ ID NO: 1744687 - RNA, 19 nt, Homo sapiens
  misc_RNA (1)...(19): siRNA sense strand
uguauuauucugcguggaa

SEQ ID NO: 1744688 - RNA, 19 nt, Homo sapiens
  misc_RNA (1)...(19): siRNA sense strand
ugcggaagcuggugaaagc

SEQ ID NO: 1744689 - RNA, 19 nt, Homo sapiens
  misc_RNA (1)...(19): siRNA sense strand
ggugaaagcucgcgucauc

SEQ ID NO: 1744690 - RNA, 19 nt, Homo sapiens
  misc_RNA (1)...(19): siRNA sense strand
guuccuggaugacuccuuu

SEQ ID NO: 1744691 - RNA, 19 nt, Homo sapiens
  misc_RNA (1)...(19): siRNA sense strand
ucuaagcaguggcaucuga

SEQ ID NO: 1744692 - RNA, 19 nt, Homo sapiens
  misc_RNA (1)...(19): siRNA sense strand
ugaauuagccaccaaguac

SEQ ID NO: 1744693 - RNA, 19 nt, Homo sapiens
  misc_RNA (1)...(19): siRNA sense strand
uccugaaucuggacucuaa

SEQ ID NO: 1744694 - RNA, 19 nt, Homo sapiens
  misc_RNA (1)...(19): siRNA sense strand
gaugacuccuuucgcaagu

SEQ ID NO: 1744695 - RNA, 19 nt, Homo sapiens
  misc_RNA (1)...(19): siRNA sense strand
gggaguucgugccgccuuu

SEQ ID NO: 1744696 - RNA, 19 nt, Homo sapiens
  misc_RNA (1)...(19): siRNA sense strand
cacaauauccagcgagaga

SEQ ID NO: 1744697 - RNA, 19 nt, Homo sapiens
  misc_RNA (1)...(19): siRNA sense strand
gaucuaagcaguggcaucu

SEQ ID NO: 1744698 - RNA, 19 nt, Homo sapiens
  misc_RNA (1)...(19): siRNA sense strand
caauauccagcgagagaaa

SEQ ID NO: 1744699 - RNA, 19 nt, Homo sapiens
  misc_RNA (1)...(19): siRNA sense strand
gggcuagaauccgggaguu

SEQ ID NO: 1744700 - RNA, 19 nt, Homo sapiens
  misc_RNA (1)...(19): siRNA sense strand
ccagcgagagaaagaguuu

SEQ ID NO: 1744701 - RNA, 19 nt, Homo sapiens
  misc_RNA (1)...(19): siRNA sense strand
caagccagcacccauguuc

SEQ ID NO: 1744702 - RNA, 19 nt, Homo sapiens
  misc_RNA (1)...(19): siRNA sense strand
cguggaagcuacacuuacu

SEQ ID NO: 1744703 - RNA, 19 nt, Homo sapiens
  misc_RNA (1)...(19): siRNA sense strand
aagcucgcgucaucacuga

SEQ ID NO: 1744704 - RNA, 19 nt, Homo sapiens
  misc_RNA (1)...(19): siRNA sense strand
cugaauuagccaccaagua

SEQ ID NO: 1744705 - RNA, 19 nt, Homo sapiens
  misc_RNA (1)...(19): siRNA sense strand
gcuagcccucugccucuuu

SEQ ID NO: 1744706 - RNA, 19 nt, Homo sapiens
  misc_RNA (1)...(19): siRNA sense strand
uguauuauucugcguggaa

SEQ ID NO: 1744707 - RNA, 19 nt, Homo sapiens
  misc_RNA (1)...(19): siRNA sense strand
ugcggaagcuggugaaagc

SEQ ID NO: 1744708 - RNA, 19 nt, Homo sapiens
  misc_RNA (1)...(19): siRNA sense strand
ggugaaagcucgcgucauc

SEQ ID NO: 1744709 - RNA, 19 nt, Homo sapiens
  misc_RNA (1)...(19): siRNA sense strand
guuccuggaugacuccuuu

SEQ ID NO: 1744710 - RNA, 19 nt, Homo sapiens
  misc_RNA (1)...(19): siRNA sense strand
ugaauuagccaccaaguac

SEQ ID NO: 1744711 - RNA, 19 nt, Homo sapiens
  misc_RNA (1)...(19): siRNA sense strand
uccugaaucuggacucuaa

SEQ ID NO: 1744712 - RNA, 19 nt, Homo sapiens
  misc_RNA (1)...(19): siRNA sense strand
gaugacuccuuucgcaagu

SEQ ID NO: 1744713 - RNA, 19 nt, Homo sapiens
  misc_RNA (1)...(19): siRNA sense strand
gggaguucgugccgccuuu

SEQ ID NO: 1744714 - RNA, 19 nt, Homo sapiens
  misc_RNA (1)...(19): siRNA sense strand
cacaauauccagcgagaga

SEQ ID NO: 1744715 - RNA, 19 nt, Homo sapiens
  misc_RNA (1)...(19): siRNA sense strand
caauauccagcgagagaaa

SEQ ID NO: 1744716 - RNA, 19 nt, Homo sapiens
  misc_RNA (1)...(19): siRNA sense strand
gggcuagaauccgggaguu

SEQ ID NO: 1744717 - RNA, 19 nt, Homo sapiens
  misc_RNA (1)...(19): siRNA sense strand
ccagcgagagaaagaguuu

SEQ ID NO: 1744718 - RNA, 19 nt, Homo sapiens
  misc_RNA (1)...(19): siRNA sense strand
caagccagcacccauguuc

SEQ ID NO: 1744719 - RNA, 19 nt, Homo sapiens
  misc_RNA (1)...(19): siRNA sense strand
cguggaagcuacacuuacu

SEQ ID NO: 1744720 - RNA, 19 nt, Homo sapiens
  misc_RNA (1)...(19): siRNA sense strand
aagcucgcgucaucacuga

SEQ ID NO: 1744721 - RNA, 19 nt, Homo sapiens
  misc_RNA (1)...(19): siRNA sense strand
cugaauuagccaccaagua

SEQ ID NO: 1744722 - RNA, 19 nt, Homo sapiens
  misc_RNA (1)...(19): siRNA sense strand
gcuagcccucugccucuuu

SEQ ID NO: 1744723 - RNA, 19 nt, Homo sapiens
  misc_RNA (1)...(19): siRNA sense strand
uguauuauucugcguggaa

SEQ ID NO: 1744724 - RNA, 19 nt, Homo sapiens
  misc_RNA (1)...(19): siRNA sense strand
ugcggaagcuggugaaagc

SEQ ID NO: 1744725 - RNA, 19 nt, Homo sapiens
  misc_RNA (1)...(19): siRNA sense strand
ggugaaagcucgcgucauc

SEQ ID NO: 1744726 - RNA, 19 nt, Homo sapiens
  misc_RNA (1)...(19): siRNA sense strand
guuccuggaugacuccuuu

SEQ ID NO: 1744727 - RNA, 19 nt, Homo sapiens
  misc_RNA (1)...(19): siRNA sense strand
ucuaagcaguggcaucuga

SEQ ID NO: 1744728 - RNA, 19 nt, Homo sapiens
  misc_RNA (1)...(19): siRNA sense strand
ugaauuagccaccaaguac

SEQ ID NO: 1744729 - RNA, 19 nt, Homo sapiens
  misc_RNA (1)...(19): siRNA sense strand
uccugaaucuggacucuaa

SEQ ID NO: 1744730 - RNA, 19 nt, Homo sapiens
  misc_RNA (1)...(19): siRNA sense strand
gaugacuccuuucgcaagu

SEQ ID NO: 1744731 - RNA, 19 nt, Homo sapiens
  misc_RNA (1)...(19): siRNA sense strand
gggaguucgugccgccuuu

SEQ ID NO: 1744732 - RNA, 19 nt, Homo sapiens
  misc_RNA (1)...(19): siRNA sense strand
cacaauauccagcgagaga

SEQ ID NO: 1744733 - RNA, 19 nt, Homo sapiens
  misc_RNA (1)...(19): siRNA sense strand
gaucuaagcaguggcaucu

SEQ ID NO: 1744734 - RNA, 19 nt, Homo sapiens
  misc_RNA (1)...(19): siRNA sense strand
caauauccagcgagagaaa

SEQ ID NO: 1744735 - RNA, 19 nt, Homo sapiens
  misc_RNA (1)...(19): siRNA sense strand
gggcuagaauccgggaguu

SEQ ID NO: 1744736 - RNA, 19 nt, Homo sapiens
  misc_RNA (1)...(19): siRNA sense strand
ccagcgagagaaagaguuu

SEQ ID NO: 1744737 - RNA, 19 nt, Homo sapiens
  misc_RNA (1)...(19): siRNA sense strand
caagccagcacccauguuc

SEQ ID NO: 1744738 - RNA, 19 nt, Homo sapiens
  misc_RNA (1)...(19): siRNA sense strand
cguggaagcuacacuuacu

SEQ ID NO: 1744739 - RNA, 19 nt, Homo sapiens
  misc_RNA (1)...(19): siRNA sense strand
aagcucgcgucaucacuga

SEQ ID NO: 1744740 - RNA, 19 nt, Homo sapiens
  misc_RNA (1)...(19): siRNA sense strand
cugaauuagccaccaagua

SEQ ID NO: 1744741 - RNA, 19 nt, Homo sapiens
  misc_RNA (1)...(19): siRNA sense strand
gcuagcccucugccucuuu

SEQ ID NO: 1744742 - RNA, 19 nt, Homo sapiens
  misc_RNA (1)...(19): siRNA sense strand
uguauuauucugcguggaa

SEQ ID NO: 1744743 - RNA, 19 nt, Homo sapiens
  misc_RNA (1)...(19): siRNA sense strand
ugcggaagcuggugaaagc

SEQ ID NO: 1744744 - RNA, 19 nt, Homo sapiens
  misc_RNA (1)...(19): siRNA sense strand
ggugaaagcucgcgucauc

SEQ ID NO: 1744745 - RNA, 19 nt, Homo sapiens
  misc_RNA (1)...(19): siRNA sense strand
guuccuggaugacuccuuu

SEQ ID NO: 1744746 - RNA, 19 nt, Homo sapiens
  misc_RNA (1)...(19): siRNA sense strand
ugaauuagccaccaaguac

SEQ ID NO: 1744747 - RNA, 19 nt, Homo sapiens
  misc_RNA (1)...(19): siRNA sense strand
uccugaaucuggacucuaa

SEQ ID NO: 1744748 - RNA, 19 nt, Homo sapiens
  misc_RNA (1)...(19): siRNA sense strand
gaugacuccuuucgcaagu

SEQ ID NO: 1744749 - RNA, 19 nt, Homo sapiens
  misc_RNA (1)...(19): siRNA sense strand
gggaguucgugccgccuuu

SEQ ID NO: 1744750 - RNA, 19 nt, Homo sapiens
  misc_RNA (1)...(19): siRNA sense strand
cacaauauccagcgagaga

SEQ ID NO: 1744751 - RNA, 19 nt, Homo sapiens
  misc_RNA (1)...(19): siRNA sense strand
caauauccagcgagagaaa

SEQ ID NO: 1744752 - RNA, 19 nt, Homo sapiens
  misc_RNA (1)...(19): siRNA sense strand
gggcuagaauccgggaguu

SEQ ID NO: 1744753 - RNA, 19 nt, Homo sapiens
  misc_RNA (1)...(19): siRNA sense strand
ccagcgagagaaagaguuu

SEQ ID NO: 1744754 - RNA, 19 nt, Homo sapiens
  misc_RNA (1)...(19): siRNA sense strand
caagccagcacccauguuc

SEQ ID NO: 1744755 - RNA, 19 nt, Homo sapiens
  misc_RNA (1)...(19): siRNA sense strand
cguggaagcuacacuuacu

SEQ ID NO: 1744756 - RNA, 19 nt, Homo sapiens
  misc_RNA (1)...(19): siRNA sense strand
aagcucgcgucaucacuga

SEQ ID NO: 1744757 - RNA, 19 nt, Homo sapiens
  misc_RNA (1)...(19): siRNA sense strand
cugaauuagccaccaagua

SEQ ID NO: 1744758 - RNA, 19 nt, Homo sapiens
  misc_RNA (1)...(19): siRNA sense strand
gcuagcccucugccucuuu

SEQ ID NO: 1744759 - RNA, 19 nt, Homo sapiens
  misc_RNA (1)...(19): siRNA sense strand
uguauuauucugcguggaa

SEQ ID NO: 1744760 - RNA, 19 nt, Homo sapiens
  misc_RNA (1)...(19): siRNA sense strand
ugcggaagcuggugaaagc

SEQ ID NO: 1744761 - RNA, 19 nt, Homo sapiens
  misc_RNA (1)...(19): siRNA sense strand
ggugaaagcucgcgucauc

SEQ ID NO: 1744762 - RNA, 19 nt, Homo sapiens
  misc_RNA (1)...(19): siRNA sense strand
guuccuggaugacuccuuu

SEQ ID NO: 1744763 - RNA, 19 nt, Homo sapiens
  misc_RNA (1)...(19): siRNA sense strand
ucuaagcaguggcaucuga

SEQ ID NO: 1744764 - RNA, 19 nt, Homo sapiens
  misc_RNA (1)...(19): siRNA sense strand
ugaauuagccaccaaguac

SEQ ID NO: 1744765 - RNA, 19 nt, Homo sapiens
  misc_RNA (1)...(19): siRNA sense strand
uccugaaucuggacucuaa

SEQ ID NO: 1744766 - RNA, 19 nt, Homo sapiens
  misc_RNA (1)...(19): siRNA sense strand
gaugacuccuuucgcaagu

SEQ ID NO: 1744767 - RNA, 19 nt, Homo sapiens
  misc_RNA (1)...(19): siRNA sense strand
gggaguucgugccgccuuu

SEQ ID NO: 1744768 - RNA, 19 nt, Homo sapiens
  misc_RNA (1)...(19): siRNA sense strand
cacaauauccagcgagaga

SEQ ID NO: 1744769 - RNA, 19 nt, Homo sapiens
  misc_RNA (1)...(19): siRNA sense strand
gaucuaagcaguggcaucu

SEQ ID NO: 1744770 - RNA, 19 nt, Homo sapiens
  misc_RNA (1)...(19): siRNA sense strand
caauauccagcgagagaaa

SEQ ID NO: 1744771 - RNA, 19 nt, Homo sapiens
  misc_RNA (1)...(19): siRNA sense strand
gggcuagaauccgggaguu

SEQ ID NO: 1744772 - RNA, 19 nt, Homo sapiens
  misc_RNA (1)...(19): siRNA sense strand
ccagcgagagaaagaguuu

SEQ ID NO: 1744773 - RNA, 19 nt, Homo sapiens
  misc_RNA (1)...(19): siRNA sense strand
caagccagcacccauguuc

SEQ ID NO: 1744774 - RNA, 19 nt, Homo sapiens
  misc_RNA (1)...(19): siRNA sense strand
cguggaagcuacacuuacu

SEQ ID NO: 1744775 - RNA, 19 nt, Homo sapiens
  misc_RNA (1)...(19): siRNA sense strand
aagcucgcgucaucacuga

SEQ ID NO: 1744776 - RNA, 19 nt, Homo sapiens
  misc_RNA (1)...(19): siRNA sense strand
cugaauuagccaccaagua

SEQ ID NO: 1744777 - RNA, 19 nt, Homo sapiens
  misc_RNA (1)...(19): siRNA sense strand
gcuagcccucugccucuuu

SEQ ID NO: 1744778 - RNA, 19 nt, Homo sapiens
  misc_RNA (1)...(19): siRNA sense strand
uguauuauucugcguggaa

SEQ ID NO: 1744779 - RNA, 19 nt, Homo sapiens
  misc_RNA (1)...(19): siRNA sense strand
ugcggaagcuggugaaagc

SEQ ID NO: 1744780 - RNA, 19 nt, Homo sapiens
  misc_RNA (1)...(19): siRNA sense strand
ggugaaagcucgcgucauc

SEQ ID NO: 1744781 - RNA, 19 nt, Homo sapiens
  misc_RNA (1)...(19): siRNA sense strand
guuccuggaugacuccuuu

SEQ ID NO: 1744782 - RNA, 19 nt, Homo sapiens
  misc_RNA (1)...(19): siRNA sense strand
ucuaagcaguggcaucuga

SEQ ID NO: 1744783 - RNA, 19 nt, Homo sapiens
  misc_RNA (1)...(19): siRNA sense strand
ugaauuagccaccaaguac

SEQ ID NO: 1744784 - RNA, 19 nt, Homo sapiens
  misc_RNA (1)...(19): siRNA sense strand
uccugaaucuggacucuaa

SEQ ID NO: 1744785 - RNA, 19 nt, Homo sapiens
  misc_RNA (1)...(19): siRNA sense strand
gaugacuccuuucgcaagu

SEQ ID NO: 1744786 - RNA, 19 nt, Homo sapiens
  misc_RNA (1)...(19): siRNA sense strand
gggaguucgugccgccuuu

SEQ ID NO: 1744787 - RNA, 19 nt, Homo sapiens
  misc_RNA (1)...(19): siRNA sense strand
cacaauauccagcgagaga

SEQ ID NO: 1744788 - RNA, 19 nt, Homo sapiens
  misc_RNA (1)...(19): siRNA sense strand
gaucuaagcaguggcaucu

SEQ ID NO: 1744789 - RNA, 19 nt, Homo sapiens
  misc_RNA (1)...(19): siRNA sense strand
caauauccagcgagagaaa

SEQ ID NO: 1744790 - RNA, 19 nt, Homo sapiens
  misc_RNA (1)...(19): siRNA sense strand
gggcuagaauccgggaguu

SEQ ID NO: 1744791 - RNA, 19 nt, Homo sapiens
  misc_RNA (1)...(19): siRNA sense strand
ccagcgagagaaagaguuu

SEQ ID NO: 1744792 - RNA, 19 nt, Homo sapiens
  misc_RNA (1)...(19): siRNA sense strand
caagccagcacccauguuc

SEQ ID NO: 1744793 - RNA, 19 nt, Homo sapiens
  misc_RNA (1)...(19): siRNA sense strand
cguggaagcuacacuuacu

SEQ ID NO: 1744794 - RNA, 19 nt, Homo sapiens
  misc_RNA (1)...(19): siRNA sense strand
aagcucgcgucaucacuga

SEQ ID NO: 1744795 - RNA, 19 nt, Homo sapiens
  misc_RNA (1)...(19): siRNA sense strand
cugaauuagccaccaagua

SEQ ID NO: 1744796 - RNA, 19 nt, Homo sapiens
  misc_RNA (1)...(19): siRNA sense strand
gcuagcccucugccucuuu

SEQ ID NO: 1744797 - RNA, 19 nt, Homo sapiens
  misc_RNA (1)...(19): siRNA sense strand
uguauuauucugcguggaa

SEQ ID NO: 1744798 - RNA, 19 nt, Homo sapiens
  misc_RNA (1)...(19): siRNA sense strand
ugcggaagcuggugaaagc

SEQ ID NO: 1744799 - RNA, 19 nt, Homo sapiens
  misc_RNA (1)...(19): siRNA sense strand
ggugaaagcucgcgucauc

SEQ ID NO: 1744800 - RNA, 19 nt, Homo sapiens
  misc_RNA (1)...(19): siRNA sense strand
guuccuggaugacuccuuu

SEQ ID NO: 1744801 - RNA, 19 nt, Homo sapiens
  misc_RNA (1)...(19): siRNA sense strand
ugaauuagccaccaaguac

SEQ ID NO: 1744802 - RNA, 19 nt, Homo sapiens
  misc_RNA (1)...(19): siRNA sense strand
uccugaaucuggacucuaa

SEQ ID NO: 1744803 - RNA, 19 nt, Homo sapiens
  misc_RNA (1)...(19): siRNA sense strand
gaugacuccuuucgcaagu

SEQ ID NO: 1744804 - RNA, 19 nt, Homo sapiens
  misc_RNA (1)...(19): siRNA sense strand
gggaguucgugccgccuuu

SEQ ID NO: 1744805 - RNA, 19 nt, Homo sapiens
  misc_RNA (1)...(19): siRNA sense strand
cacaauauccagcgagaga

SEQ ID NO: 1744806 - RNA, 19 nt, Homo sapiens
  misc_RNA (1)...(19): siRNA sense strand
caauauccagcgagagaaa

SEQ ID NO: 1744807 - RNA, 19 nt, Homo sapiens
  misc_RNA (1)...(19): siRNA sense strand
gggcuagaauccgggaguu

SEQ ID NO: 1744808 - RNA, 19 nt, Homo sapiens
  misc_RNA (1)...(19): siRNA sense strand
ccagcgagagaaagaguuu

SEQ ID NO: 1744809 - RNA, 19 nt, Homo sapiens
  misc_RNA (1)...(19): siRNA sense strand
caagccagcacccauguuc

SEQ ID NO: 1744810 - RNA, 19 nt, Homo sapiens
  misc_RNA (1)...(19): siRNA sense strand
cguggaagcuacacuuacu

SEQ ID NO: 1744811 - RNA, 19 nt, Homo sapiens
  misc_RNA (1)...(19): siRNA sense strand
aagcucgcgucaucacuga

SEQ ID NO: 1744812 - RNA, 19 nt, Homo sapiens
  misc_RNA (1)...(19): siRNA sense strand
cugaauuagccaccaagua

SEQ ID NO: 1744813 - RNA, 19 nt, Homo sapiens
  misc_RNA (1)...(19): siRNA sense strand
gcuagcccucugccucuuu

SEQ ID NO: 1744814 - RNA, 19 nt, Homo sapiens
  misc_RNA (1)...(19): siRNA sense strand
uguauuauucugcguggaa

SEQ ID NO: 1744815 - RNA, 19 nt, Homo sapiens
  misc_RNA (1)...(19): siRNA sense strand
ugcggaagcuggugaaagc

SEQ ID NO: 1744816 - RNA, 19 nt, Homo sapiens
  misc_RNA (1)...(19): siRNA sense strand
ggugaaagcucgcgucauc

SEQ ID NO: 1744817 - RNA, 19 nt, Homo sapiens
  misc_RNA (1)...(19): siRNA sense strand
guuccuggaugacuccuuu

SEQ ID NO: 1744818 - RNA, 19 nt, Homo sapiens
  misc_RNA (1)...(19): siRNA sense strand
ucuaagcaguggcaucuga

SEQ ID NO: 1744819 - RNA, 19 nt, Homo sapiens
  misc_RNA (1)...(19): siRNA sense strand
ugaauuagccaccaaguac

SEQ ID NO: 1744820 - RNA, 19 nt, Homo sapiens
  misc_RNA (1)...(19): siRNA sense strand
uccugaaucuggacucuaa

SEQ ID NO: 1744821 - RNA, 19 nt, Homo sapiens
  misc_RNA (1)...(19): siRNA sense strand
gaugacuccuuucgcaagu

SEQ ID NO: 1744822 - RNA, 19 nt, Homo sapiens
  misc_RNA (1)...(19): siRNA sense strand
gggaguucgugccgccuuu

SEQ ID NO: 1744823 - RNA, 19 nt, Homo sapiens
  misc_RNA (1)...(19): siRNA sense strand
cacaauauccagcgagaga

SEQ ID NO: 1744824 - RNA, 19 nt, Homo sapiens
  misc_RNA (1)...(19): siRNA sense strand
gaucuaagcaguggcaucu

SEQ ID NO: 1744825 - RNA, 19 nt, Homo sapiens
  misc_RNA (1)...(19): siRNA sense strand
caauauccagcgagagaaa

SEQ ID NO: 1744826 - RNA, 19 nt, Homo sapiens
  misc_RNA (1)...(19): siRNA sense strand
gggcuagaauccgggaguu

SEQ ID NO: 1744827 - RNA, 19 nt, Homo sapiens
  misc_RNA (1)...(19): siRNA sense strand
ccagcgagagaaagaguuu

SEQ ID NO: 1744828 - RNA, 19 nt, Homo sapiens
  misc_RNA (1)...(19): siRNA sense strand
caagccagcacccauguuc

SEQ ID NO: 1744829 - RNA, 19 nt, Homo sapiens
  misc_RNA (1)...(19): siRNA sense strand
cguggaagcuacacuuacu

SEQ ID NO: 1744830 - RNA, 19 nt, Homo sapiens
  misc_RNA (1)...(19): siRNA sense strand
aagcucgcgucaucacuga

SEQ ID NO: 1744831 - RNA, 19 nt, Homo sapiens
  misc_RNA (1)...(19): siRNA sense strand
cugaauuagccaccaagua

SEQ ID NO: 1744832 - RNA, 19 nt, Homo sapiens
  misc_RNA (1)...(19): siRNA sense strand
gcuagcccucugccucuuu

SEQ ID NO: 1744833 - RNA, 19 nt, Homo sapiens
  misc_RNA (1)...(19): siRNA sense strand
uguauuauucugcguggaa

SEQ ID NO: 1744834 - RNA, 19 nt, Homo sapiens
  misc_RNA (1)...(19): siRNA sense strand
ugcggaagcuggugaaagc

SEQ ID NO: 1744835 - RNA, 19 nt, Homo sapiens
  misc_RNA (1)...(19): siRNA sense strand
guuccuggaugacuccuuu

SEQ ID NO: 1744836 - RNA, 19 nt, Homo sapiens
  misc_RNA (1)...(19): siRNA sense strand
ugaauuagccaccaaguac

SEQ ID NO: 1744837 - RNA, 19 nt, Homo sapiens
  misc_RNA (1)...(19): siRNA sense strand
uccugaaucuggacucuaa

SEQ ID NO: 1744838 - RNA, 19 nt, Homo sapiens
  misc_RNA (1)...(19): siRNA sense strand
gaugacuccuuucgcaagu

SEQ ID NO: 1744839 - RNA, 19 nt, Homo sapiens
  misc_RNA (1)...(19): siRNA sense strand
gggaguucgugccgccuuu

SEQ ID NO: 1744840 - RNA, 19 nt, Homo sapiens
  misc_RNA (1)...(19): siRNA sense strand
gggcuagaauccgggaguu

SEQ ID NO: 1744841 - RNA, 19 nt, Homo sapiens
  misc_RNA (1)...(19): siRNA sense strand
caagccagcacccauguuc

SEQ ID NO: 1744842 - RNA, 19 nt, Homo sapiens
  misc_RNA (1)...(19): siRNA sense strand
cguggaagcuacacuuacu

SEQ ID NO: 1744843 - RNA, 19 nt, Homo sapiens
  misc_RNA (1)...(19): siRNA sense strand
cugaauuagccaccaagua

SEQ ID NO: 1744844 - RNA, 19 nt, Homo sapiens
  misc_RNA (1)...(19): siRNA sense strand
gcuagcccucugccucuuu

SEQ ID NO: 1744845 - RNA, 19 nt, Homo sapiens
  misc_RNA (1)...(19): siRNA sense strand
uguauuauucugcguggaa

SEQ ID NO: 1744846 - RNA, 19 nt, Homo sapiens
  misc_RNA (1)...(19): siRNA sense strand
gaagggagauuaccucaaa

SEQ ID NO: 1744847 - RNA, 19 nt, Homo sapiens
  misc_RNA (1)...(19): siRNA sense strand
gagauuaccucaaauauca

SEQ ID NO: 1744848 - RNA, 19 nt, Homo sapiens
  misc_RNA (1)...(19): siRNA sense strand
gaaacucgcuccuggcuuu

SEQ ID NO: 1744849 - RNA, 19 nt, Homo sapiens
  misc_RNA (1)...(19): siRNA sense strand
caaacacgaugaacucuaa

SEQ ID NO: 1744850 - RNA, 19 nt, Homo sapiens
  misc_RNA (1)...(19): siRNA sense strand
ccaauucagugcuucauuu

SEQ ID NO: 1744851 - RNA, 19 nt, Homo sapiens
  misc_RNA (1)...(19): siRNA sense strand
gguguuugauguugcauua

SEQ ID NO: 1744852 - RNA, 19 nt, Homo sapiens
  misc_RNA (1)...(19): siRNA sense strand
ggacggaacucuguuugau

SEQ ID NO: 1744853 - RNA, 19 nt, Homo sapiens
  misc_RNA (1)...(19): siRNA sense strand
gagaaguccuccuggaaga

SEQ ID NO: 1744854 - RNA, 19 nt, Homo sapiens
  misc_RNA (1)...(19): siRNA sense strand
ggucacagccgaggaauuu

SEQ ID NO: 1744855 - RNA, 19 nt, Homo sapiens
  misc_RNA (1)...(19): siRNA sense strand
gaaaacauaugacacguau

SEQ ID NO: 1744856 - RNA, 19 nt, Homo sapiens
  misc_RNA (1)...(19): siRNA sense strand
uggaagaguucucagagua

SEQ ID NO: 1744857 - RNA, 19 nt, Homo sapiens
  misc_RNA (1)...(19): siRNA sense strand
ccucaaauaucacuacaau

SEQ ID NO: 1744858 - RNA, 19 nt, Homo sapiens
  misc_RNA (1)...(19): siRNA sense strand
gacagagacuccacuuuca

SEQ ID NO: 1744859 - RNA, 19 nt, Homo sapiens
  misc_RNA (1)...(19): siRNA sense strand
gcauuuccauugagaacaa

SEQ ID NO: 1744860 - RNA, 19 nt, Homo sapiens
  misc_RNA (1)...(19): siRNA sense strand
cuacggaaaugaaggaguu

SEQ ID NO: 1744861 - RNA, 19 nt, Homo sapiens
  misc_RNA (1)...(19): siRNA sense strand
gagcugauugugaagaaua

SEQ ID NO: 1744862 - RNA, 19 nt, Homo sapiens
  misc_RNA (1)...(19): siRNA sense strand
gaaguucgacuccagcuau

SEQ ID NO: 1744863 - RNA, 19 nt, Homo sapiens
  misc_RNA (1)...(19): siRNA sense strand
gaugugcguuggcgagaaa

SEQ ID NO: 1744864 - RNA, 19 nt, Homo sapiens
  misc_RNA (1)...(19): siRNA sense strand
gaaggaguuucugguguga

SEQ ID NO: 1744865 - RNA, 19 nt, Homo sapiens
  misc_RNA (1)...(19): siRNA sense strand
ggaugaaggucuacuuggu

SEQ ID NO: 1744866 - RNA, 19 nt, Homo sapiens
  misc_RNA (1)...(19): siRNA sense strand
cgaggaauuuaaacucaaa

SEQ ID NO: 1744867 - RNA, 19 nt, Homo sapiens
  misc_RNA (1)...(19): siRNA sense strand
gaaggucuacuugguguuu

SEQ ID NO: 1744868 - RNA, 19 nt, Homo sapiens
  misc_RNA (1)...(19): siRNA sense strand
cgagagacguuucgugaag

SEQ ID NO: 1744869 - RNA, 19 nt, Homo sapiens
  misc_RNA (1)...(19): siRNA sense strand
ggacagcauuuccauugag

SEQ ID NO: 1744870 - RNA, 19 nt, Homo sapiens
  misc_RNA (1)...(19): siRNA sense strand
gaagaguucucagaguaca

SEQ ID NO: 1744871 - RNA, 19 nt, Homo sapiens
  misc_RNA (1)...(19): siRNA sense strand
ucaggcaucucugguguuu

SEQ ID NO: 1744872 - RNA, 19 nt, Homo sapiens
  misc_RNA (1)...(19): siRNA sense strand
gauggcacccucuuugauu

SEQ ID NO: 1744873 - RNA, 19 nt, Homo sapiens
  misc_RNA (1)...(19): siRNA sense strand
aggcaucucugguguuuga

SEQ ID NO: 1744874 - RNA, 19 nt, Homo sapiens
  misc_RNA (1)...(19): siRNA sense strand
ccauccaggugucugauuu

SEQ ID NO: 1744875 - RNA, 19 nt, Homo sapiens
  misc_RNA (1)...(19): siRNA sense strand
ugacagagacuccacuuuc

SEQ ID NO: 1744876 - RNA, 19 nt, Homo sapiens
  misc_RNA (1)...(19): siRNA sense strand
ggagauuaccucaaauauc

SEQ ID NO: 1744877 - RNA, 19 nt, Homo sapiens
  misc_RNA (1)...(19): siRNA sense strand
gaaggucacagccgaggaa

SEQ ID NO: 1744878 - RNA, 19 nt, Homo sapiens
  misc_RNA (1)...(19): siRNA sense strand
ugaagaaauugacaaggau

SEQ ID NO: 1744879 - RNA, 19 nt, Homo sapiens
  misc_RNA (1)...(19): siRNA sense strand
ucaaauaucacuacaaugc

SEQ ID NO: 1744880 - RNA, 19 nt, Homo sapiens
  misc_RNA (1)...(19): siRNA sense strand
gagagacguuucgugaaga

SEQ ID NO: 1744881 - RNA, 19 nt, Homo sapiens
  misc_RNA (1)...(19): siRNA sense strand
uugaagaaauugacaagga

SEQ ID NO: 1744882 - RNA, 19 nt, Homo sapiens
  misc_RNA (1)...(19): siRNA sense strand
ugaguaagaagggagauua

SEQ ID NO: 1744883 - RNA, 19 nt, Homo sapiens
  misc_RNA (1)...(19): siRNA sense strand
gggcagggcuacgugauuc

SEQ ID NO: 1744884 - RNA, 19 nt, Homo sapiens
  misc_RNA (1)...(19): siRNA sense strand
cggcugugcugguguuuga

SEQ ID NO: 1744885 - RNA, 19 nt, Homo sapiens
  misc_RNA (1)...(19): siRNA sense strand
gaaacggacagugaucauu

SEQ ID NO: 1744886 - RNA, 19 nt, Homo sapiens
  misc_RNA (1)...(19): siRNA sense strand
guacuucugauggauauuu

SEQ ID NO: 1744887 - RNA, 19 nt, Homo sapiens
  misc_RNA (1)...(19): siRNA sense strand
gcagugccguauuaguguu

SEQ ID NO: 1744888 - RNA, 19 nt, Homo sapiens
  misc_RNA (1)...(19): siRNA sense strand
gacagcauuuccauugaga

SEQ ID NO: 1744889 - RNA, 19 nt, Homo sapiens
  misc_RNA (1)...(19): siRNA sense strand
gaggaaggaagagggaaua

SEQ ID NO: 1744890 - RNA, 19 nt, Homo sapiens
  misc_RNA (1)...(19): siRNA sense strand
gccgaggaauuuaaacuca

SEQ ID NO: 1744891 - RNA, 19 nt, Homo sapiens
  misc_RNA (1)...(19): siRNA sense strand
ucacagccgaggaauuuaa

SEQ ID NO: 1744892 - RNA, 19 nt, Homo sapiens
  misc_RNA (1)...(19): siRNA sense strand
ucacuacaaugccucacuu

SEQ ID NO: 1744893 - RNA, 19 nt, Homo sapiens
  misc_RNA (1)...(19): siRNA sense strand
ucucagguaucauuacaau

SEQ ID NO: 1744894 - RNA, 19 nt, Homo sapiens
  misc_RNA (1)...(19): siRNA sense strand
guauuaguguuugacauug

SEQ ID NO: 1744895 - RNA, 19 nt, Homo sapiens
  misc_RNA (1)...(19): siRNA sense strand
ucaauguguuugugggaaa

SEQ ID NO: 1744896 - RNA, 19 nt, Homo sapiens
  misc_RNA (1)...(19): siRNA sense strand
gaaggaagagggaauaucc

SEQ ID NO: 1744897 - RNA, 19 nt, Homo sapiens
  misc_RNA (1)...(19): siRNA sense strand
gagucacaaucgcaugaaa

SEQ ID NO: 1744898 - RNA, 19 nt, Homo sapiens
  misc_RNA (1)...(19): siRNA sense strand
caucaccucccacuacaaa

SEQ ID NO: 1744899 - RNA, 19 nt, Homo sapiens
  misc_RNA (1)...(19): siRNA sense strand
gagcggauaagucaaagug

SEQ ID NO: 1744900 - RNA, 19 nt, Homo sapiens
  misc_RNA (1)...(19): siRNA sense strand
gauguacuucugauggaua

SEQ ID NO: 1744901 - RNA, 19 nt, Homo sapiens
  misc_RNA (1)...(19): siRNA sense strand
ugacacguaugugggaauu

SEQ ID NO: 1744902 - RNA, 19 nt, Homo sapiens
  misc_RNA (1)...(19): siRNA sense strand
gaagaccagguucagauuc

SEQ ID NO: 1744903 - RNA, 19 nt, Homo sapiens
  misc_RNA (1)...(19): siRNA sense strand
ugauggauauuuggaauuc

SEQ ID NO: 1744904 - RNA, 19 nt, Homo sapiens
  misc_RNA (1)...(19): siRNA sense strand
augcugagcugauugugaa

SEQ ID NO: 1744905 - RNA, 19 nt, Homo sapiens
  misc_RNA (1)...(19): siRNA sense strand
ggugagaagcgcaucauca

SEQ ID NO: 1744906 - RNA, 19 nt, Homo sapiens
  misc_RNA (1)...(19): siRNA sense strand
ggguacauguucauaugga

SEQ ID NO: 1744907 - RNA, 19 nt, Homo sapiens
  misc_RNA (1)...(19): siRNA sense strand
agacuccacuuucaaugug

SEQ ID NO: 1744908 - RNA, 19 nt, Homo sapiens
  misc_RNA (1)...(19): siRNA sense strand
acggaacucuguuugauuc

SEQ ID NO: 1744909 - RNA, 19 nt, Homo sapiens
  misc_RNA (1)...(19): siRNA sense strand
ggagaaaagcgaaggauug

SEQ ID NO: 1744910 - RNA, 19 nt, Homo sapiens
  misc_RNA (1)...(19): siRNA sense strand
ggauggagaugggaaagac

SEQ ID NO: 1744911 - RNA, 19 nt, Homo sapiens
  misc_RNA (1)...(19): siRNA sense strand
caaagaccaggaagccaaa

SEQ ID NO: 1744912 - RNA, 19 nt, Homo sapiens
  misc_RNA (1)...(19): siRNA sense strand
gagacuccacuuucaaugu

SEQ ID NO: 1744913 - RNA, 19 nt, Homo sapiens
  misc_RNA (1)...(19): siRNA sense strand
gguacauguucauauggaa

SEQ ID NO: 1744914 - RNA, 19 nt, Homo sapiens
  misc_RNA (1)...(19): siRNA sense strand
ggaacucuguuugauucga

SEQ ID NO: 1744915 - RNA, 19 nt, Homo sapiens
  misc_RNA (1)...(19): siRNA sense strand
aaacggacagugaucauuc

SEQ ID NO: 1744916 - RNA, 19 nt, Homo sapiens
  misc_RNA (1)...(19): siRNA sense strand
gggagauuaccucaaauau

SEQ ID NO: 1744917 - RNA, 19 nt, Homo sapiens
  misc_RNA (1)...(19): siRNA sense strand
gcucggcugugcugguguu

SEQ ID NO: 1744918 - RNA, 19 nt, Homo sapiens
  misc_RNA (1)...(19): siRNA sense strand
ugggauggaugaaggucua

SEQ ID NO: 1744919 - RNA, 19 nt, Homo sapiens
  misc_RNA (1)...(19): siRNA sense strand
ggaugugugugggugagaa

SEQ ID NO: 1744920 - RNA, 19 nt, Homo sapiens
  misc_RNA (1)...(19): siRNA sense strand
gaucugggcaaguuguguu

SEQ ID NO: 1744921 - RNA, 19 nt, Homo sapiens
  misc_RNA (1)...(19): siRNA sense strand
ccaaacacgaugaacucua

SEQ ID NO: 1744922 - RNA, 19 nt, Homo sapiens
  misc_RNA (1)...(19): siRNA sense strand
ccaggaagccaaacacgau

SEQ ID NO: 1744923 - RNA, 19 nt, Homo sapiens
  misc_RNA (1)...(19): siRNA sense strand
cguauuaguguuugacauu

SEQ ID NO: 1744924 - RNA, 19 nt, Homo sapiens
  misc_RNA (1)...(19): siRNA sense strand
ggcgagaaacggacaguga

SEQ ID NO: 1744925 - RNA, 19 nt, Homo sapiens
  misc_RNA (1)...(19): siRNA sense strand
aaggacagcauuuccauug

SEQ ID NO: 1744926 - RNA, 19 nt, Homo sapiens
  misc_RNA (1)...(19): siRNA sense strand
gagaaacggacagugauca

SEQ ID NO: 1744927 - RNA, 19 nt, Homo sapiens
  misc_RNA (1)...(19): siRNA sense strand
ggaauuuaggcaaaacuua

SEQ ID NO: 1744928 - RNA, 19 nt, Homo sapiens
  misc_RNA (1)...(19): siRNA sense strand
guauggagaggaaggaaga

SEQ ID NO: 1744929 - RNA, 19 nt, Homo sapiens
  misc_RNA (1)...(19): siRNA sense strand
ggaccauccaggugucuga

SEQ ID NO: 1744930 - RNA, 19 nt, Homo sapiens
  misc_RNA (1)...(19): siRNA sense strand
uggcguggauggagaagug

SEQ ID NO: 1744931 - RNA, 19 nt, Homo sapiens
  misc_RNA (1)...(19): siRNA sense strand
ggcaaaacuuacaauauug

SEQ ID NO: 1744932 - RNA, 19 nt, Homo sapiens
  misc_RNA (1)...(19): siRNA sense strand
guuugauguugcauuauug

SEQ ID NO: 1744933 - RNA, 19 nt, Homo sapiens
  misc_RNA (1)...(19): siRNA sense strand
gacggaacucuguuugauu

SEQ ID NO: 1744934 - RNA, 19 nt, Homo sapiens
  misc_RNA (1)...(19): siRNA sense strand
aagaccagguucagauuca

SEQ ID NO: 1744935 - RNA, 19 nt, Homo sapiens
  misc_RNA (1)...(19): siRNA sense strand
ggaagccaaacacgaugaa

SEQ ID NO: 1744936 - RNA, 19 nt, Homo sapiens
  misc_RNA (1)...(19): siRNA sense strand
ggaagaguucucagaguac

SEQ ID NO: 1744937 - RNA, 19 nt, Homo sapiens
  misc_RNA (1)...(19): siRNA sense strand
ucugggaucugggcaaguu

SEQ ID NO: 1744938 - RNA, 19 nt, Homo sapiens
  misc_RNA (1)...(19): siRNA sense strand
acgcggagcugcagaucga

SEQ ID NO: 1744939 - RNA, 19 nt, Homo sapiens
  misc_RNA (1)...(19): siRNA sense strand
gggacuuucucagguauca

SEQ ID NO: 1744940 - RNA, 19 nt, Homo sapiens
  misc_RNA (1)...(19): siRNA sense strand
cagauucacaccuauuuca

SEQ ID NO: 1744941 - RNA, 19 nt, Homo sapiens
  misc_RNA (1)...(19): siRNA sense strand
cacguggaauuuaggcaaa

SEQ ID NO: 1744942 - RNA, 19 nt, Homo sapiens
  misc_RNA (1)...(19): siRNA sense strand
ccgaggaauuuaaacucaa

SEQ ID NO: 1744943 - RNA, 19 nt, Homo sapiens
  misc_RNA (1)...(19): siRNA sense strand
gaugcugagcugauuguga

SEQ ID NO: 1744944 - RNA, 19 nt, Homo sapiens
  misc_RNA (1)...(19): siRNA sense strand
ggauggcacccucuuugau

SEQ ID NO: 1744945 - RNA, 19 nt, Homo sapiens
  misc_RNA (1)...(19): siRNA sense strand
ggaaggaagagggaauauc

SEQ ID NO: 1744946 - RNA, 19 nt, Homo sapiens
  misc_RNA (1)...(19): siRNA sense strand
gaggaugccugcuggauuu

SEQ ID NO: 1744947 - RNA, 19 nt, Homo sapiens
  misc_RNA (1)...(19): siRNA sense strand
gaagggauggcauacauug

SEQ ID NO: 1744948 - RNA, 19 nt, Homo sapiens
  misc_RNA (1)...(19): siRNA sense strand
acaugaagguggccauuaa

SEQ ID NO: 1744949 - RNA, 19 nt, Homo sapiens
  misc_RNA (1)...(19): siRNA sense strand
gagcugaucaagcacuaua

SEQ ID NO: 1744950 - RNA, 19 nt, Homo sapiens
  misc_RNA (1)...(19): siRNA sense strand
gcagacguguggucguuug

SEQ ID NO: 1744951 - RNA, 19 nt, Homo sapiens
  misc_RNA (1)...(19): siRNA sense strand
ccaaggagcccaucuacau

SEQ ID NO: 1744952 - RNA, 19 nt, Homo sapiens
  misc_RNA (1)...(19): siRNA sense strand
gagcccaucuacauuguca

SEQ ID NO: 1744953 - RNA, 19 nt, Homo sapiens
  misc_RNA (1)...(19): siRNA sense strand
ccaacauccuggugucuga

SEQ ID NO: 1744954 - RNA, 19 nt, Homo sapiens
  misc_RNA (1)...(19): siRNA sense strand
ggaaccaugucuccagaag

SEQ ID NO: 1744955 - RNA, 19 nt, Homo sapiens
  misc_RNA (1)...(19): siRNA sense strand
gcuccuuucuuaucagaga

SEQ ID NO: 1744956 - RNA, 19 nt, Homo sapiens
  misc_RNA (1)...(19): siRNA sense strand
cuggauggguuacuacaaa

SEQ ID NO: 1744957 - RNA, 19 nt, Homo sapiens
  misc_RNA (1)...(19): siRNA sense strand
caaggagcccaucuacauu

SEQ ID NO: 1744958 - RNA, 19 nt, Homo sapiens
  misc_RNA (1)...(19): siRNA sense strand
ggucagcgcccaagacaag

SEQ ID NO: 1744959 - RNA, 19 nt, Homo sapiens
  misc_RNA (1)...(19): siRNA sense strand
gaaacucgggucuggacaa

SEQ ID NO: 1744960 - RNA, 19 nt, Homo sapiens
  misc_RNA (1)...(19): siRNA sense strand
gggagcugaucaagcacua

SEQ ID NO: 1744961 - RNA, 19 nt, Homo sapiens
  misc_RNA (1)...(19): siRNA sense strand
uggcuuggcucgaaucauc

SEQ ID NO: 1744962 - RNA, 19 nt, Homo sapiens
  misc_RNA (1)...(19): siRNA sense strand
ugacuacaccgcuaugaau

SEQ ID NO: 1744963 - RNA, 19 nt, Homo sapiens
  misc_RNA (1)...(19): siRNA sense strand
acucgggucuggacaauuc

SEQ ID NO: 1744964 - RNA, 19 nt, Homo sapiens
  misc_RNA (1)...(19): siRNA sense strand
gugaauacacggcccaaga

SEQ ID NO: 1744965 - RNA, 19 nt, Homo sapiens
  misc_RNA (1)...(19): siRNA sense strand
ccauuaagacgcugaagga

SEQ ID NO: 1744966 - RNA, 19 nt, Homo sapiens
  misc_RNA (1)...(19): siRNA sense strand
ucagagagagugaaaccaa

SEQ ID NO: 1744967 - RNA, 19 nt, Homo sapiens
  misc_RNA (1)...(19): siRNA sense strand
gaugaagggagcagauugu

SEQ ID NO: 1744968 - RNA, 19 nt, Homo sapiens
  misc_RNA (1)...(19): siRNA sense strand
augaacaccuggaugaaga

SEQ ID NO: 1744969 - RNA, 19 nt, Homo sapiens
  misc_RNA (1)...(19): siRNA sense strand
acauugagcgcaugaauuc

SEQ ID NO: 1744970 - RNA, 19 nt, Homo sapiens
  misc_RNA (1)...(19): siRNA sense strand
ccgaugaacaccuggauga

SEQ ID NO: 1744971 - RNA, 19 nt, Homo sapiens
  misc_RNA (1)...(19): siRNA sense strand
gaaauggaaaggugguucu

SEQ ID NO: 1744972 - RNA, 19 nt, Homo sapiens
  misc_RNA (1)...(19): siRNA sense strand
gaaggacaagggccaaugg

SEQ ID NO: 1744973 - RNA, 19 nt, Homo sapiens
  misc_RNA (1)...(19): siRNA sense strand
uggauuuccugaagacaga

SEQ ID NO: 1744974 - RNA, 19 nt, Homo sapiens
  misc_RNA (1)...(19): siRNA sense strand
aagcagacguguggucguu

SEQ ID NO: 1744975 - RNA, 19 nt, Homo sapiens
  misc_RNA (1)...(19): siRNA sense strand
uggagagccuggaaaugga

SEQ ID NO: 1744976 - RNA, 19 nt, Homo sapiens
  misc_RNA (1)...(19): siRNA sense strand
cugaagggauggcauacau

SEQ ID NO: 1744977 - RNA, 19 nt, Homo sapiens
  misc_RNA (1)...(19): siRNA sense strand
gaaaagccgaucaaagaga

SEQ ID NO: 1744978 - RNA, 19 nt, Homo sapiens
  misc_RNA (1)...(19): siRNA sense strand
ggagagccuggaaauggaa

SEQ ID NO: 1744979 - RNA, 19 nt, Homo sapiens
  misc_RNA (1)...(19): siRNA sense strand
acaccuggaugaagacaag

SEQ ID NO: 1744980 - RNA, 19 nt, Homo sapiens
  misc_RNA (1)...(19): siRNA sense strand
ucccaaggcugauugacau

SEQ ID NO: 1744981 - RNA, 19 nt, Homo sapiens
  misc_RNA (1)...(19): siRNA sense strand
aaacucgggucuggacaau

SEQ ID NO: 1744982 - RNA, 19 nt, Homo sapiens
  misc_RNA (1)...(19): siRNA sense strand
gaucacagggucggaagga

SEQ ID NO: 1744983 - RNA, 19 nt, Homo sapiens
  misc_RNA (1)...(19): siRNA sense strand
uggaugaagacaagcauuu

SEQ ID NO: 1744984 - RNA, 19 nt, Homo sapiens
  misc_RNA (1)...(19): siRNA sense strand
ggaugaagacaagcauuuc

SEQ ID NO: 1744985 - RNA, 19 nt, Homo sapiens
  misc_RNA (1)...(19): siRNA sense strand
caacaugaagguggccauu

SEQ ID NO: 1744986 - RNA, 19 nt, Homo sapiens
  misc_RNA (1)...(19): siRNA sense strand
cuacaccgcuaugaaugau

SEQ ID NO: 1744987 - RNA, 19 nt, Homo sapiens
  misc_RNA (1)...(19): siRNA sense strand
gaucaaagagaaggacaag

SEQ ID NO: 1744988 - RNA, 19 nt, Homo sapiens
  misc_RNA (1)...(19): siRNA sense strand
ugacaugucggcgcagauu

SEQ ID NO: 1744989 - RNA, 19 nt, Homo sapiens
  misc_RNA (1)...(19): siRNA sense strand
ucaccaaggagcccaucua

SEQ ID NO: 1744990 - RNA, 19 nt, Homo sapiens
  misc_RNA (1)...(19): siRNA sense strand
guggagagccuggaaaugg

SEQ ID NO: 1744991 - RNA, 19 nt, Homo sapiens
  misc_RNA (1)...(19): siRNA sense strand
gaugaacaccuggaugaag

SEQ ID NO: 1744992 - RNA, 19 nt, Homo sapiens
  misc_RNA (1)...(19): siRNA sense strand
cgaaucaucgacagugaau

SEQ ID NO: 1744993 - RNA, 19 nt, Homo sapiens
  misc_RNA (1)...(19): siRNA sense strand
caaggcugauugacauguc

SEQ ID NO: 1744994 - RNA, 19 nt, Homo sapiens
  misc_RNA (1)...(19): siRNA sense strand
ugguggcucuguaugacua

SEQ ID NO: 1744995 - RNA, 19 nt, Homo sapiens
  misc_RNA (1)...(19): siRNA sense strand
gcgaagucuggauggguua

SEQ ID NO: 1744996 - RNA, 19 nt, Homo sapiens
  misc_RNA (1)...(19): siRNA sense strand
ugaucaagcacuauaagau

SEQ ID NO: 1744997 - RNA, 19 nt, Homo sapiens
  misc_RNA (1)...(19): siRNA sense strand
gagugaaaccaacaaaggu

SEQ ID NO: 1744998 - RNA, 19 nt, Homo sapiens
  misc_RNA (1)...(19): siRNA sense strand
gaguggagagccuggaaau

SEQ ID NO: 1744999 - RNA, 19 nt, Homo sapiens
  misc_RNA (1)...(19): siRNA sense strand
aaaagccgaucaaagagaa

SEQ ID NO: 1745000 - RNA, 19 nt, Homo sapiens
  misc_RNA (1)...(19): siRNA sense strand
ggucuucaccaucaaagca

SEQ ID NO: 1745001 - RNA, 19 nt, Homo sapiens
  misc_RNA (1)...(19): siRNA sense strand
gaaggagggaaccaugucu

SEQ ID NO: 1745002 - RNA, 19 nt, Homo sapiens
  misc_RNA (1)...(19): siRNA sense strand
gccggcuccuuucuuauca

SEQ ID NO: 1745003 - RNA, 19 nt, Homo sapiens
  misc_RNA (1)...(19): siRNA sense strand
gaaggucagcgcccaagac

SEQ ID NO: 1745004 - RNA, 19 nt, Homo sapiens
  misc_RNA (1)...(19): siRNA sense strand
gagagugaaaccaacaaag

SEQ ID NO: 1745005 - RNA, 19 nt, Homo sapiens
  misc_RNA (1)...(19): siRNA sense strand
gagagagugaaaccaacaa

SEQ ID NO: 1745006 - RNA, 19 nt, Homo sapiens
  misc_RNA (1)...(19): siRNA sense strand
gacuacaccgcuaugaaug

SEQ ID NO: 1745007 - RNA, 19 nt, Homo sapiens
  misc_RNA (1)...(19): siRNA sense strand
aggaaaagccgaucaaaga

SEQ ID NO: 1745008 - RNA, 19 nt, Homo sapiens
  misc_RNA (1)...(19): siRNA sense strand
aaggagcccaucuacauug

SEQ ID NO: 1745009 - RNA, 19 nt, Homo sapiens
  misc_RNA (1)...(19): siRNA sense strand
aaucaucgacagugaauac

SEQ ID NO: 1745010 - RNA, 19 nt, Homo sapiens
  misc_RNA (1)...(19): siRNA sense strand
gcauacauugagcgcauga

SEQ ID NO: 1745011 - RNA, 19 nt, Homo sapiens
  misc_RNA (1)...(19): siRNA sense strand
ucuacauugucaccgagua

SEQ ID NO: 1745012 - RNA, 19 nt, Homo sapiens
  misc_RNA (1)...(19): siRNA sense strand
gcagcuucuugcuccaauc

SEQ ID NO: 1745013 - RNA, 19 nt, Homo sapiens
  misc_RNA (1)...(19): siRNA sense strand
uacauugagcgcaugaauu

SEQ ID NO: 1745014 - RNA, 19 nt, Homo sapiens
  misc_RNA (1)...(19): siRNA sense strand
ugaagggauggcauacauu

SEQ ID NO: 1745015 - RNA, 19 nt, Homo sapiens
  misc_RNA (1)...(19): siRNA sense strand
agaggaugccugcuggauu

SEQ ID NO: 1745016 - RNA, 19 nt, Homo sapiens
  misc_RNA (1)...(19): siRNA sense strand
cagaugaagggagcagauu

SEQ ID NO: 1745017 - RNA, 19 nt, Homo sapiens
  misc_RNA (1)...(19): siRNA sense strand
cggcuccuuucuuaucaga

SEQ ID NO: 1745018 - RNA, 19 nt, Homo sapiens
  misc_RNA (1)...(19): siRNA sense strand
ugaauacacggcccaagag

SEQ ID NO: 1745019 - RNA, 19 nt, Homo sapiens
  misc_RNA (1)...(19): siRNA sense strand
gaaucaucgacagugaaua

SEQ ID NO: 1745020 - RNA, 19 nt, Homo sapiens
  misc_RNA (1)...(19): siRNA sense strand
gauuuuggcuuggcucgaa

SEQ ID NO: 1745021 - RNA, 19 nt, Homo sapiens
  misc_RNA (1)...(19): siRNA sense strand
gaaguaaacuggaagauau

SEQ ID NO: 1745022 - RNA, 19 nt, Homo sapiens
  misc_RNA (1)...(19): siRNA sense strand
auaaggagcuuguuucaua

SEQ ID NO: 1745023 - RNA, 19 nt, Homo sapiens
  misc_RNA (1)...(19): siRNA sense strand
gcaacuacauugaauauca

SEQ ID NO: 1745024 - RNA, 19 nt, Homo sapiens
  misc_RNA (1)...(19): siRNA sense strand
uaacuccgguugauaaauu

SEQ ID NO: 1745025 - RNA, 19 nt, Homo sapiens
  misc_RNA (1)...(19): siRNA sense strand
gcaacuccuuuacaucaua

SEQ ID NO: 1745026 - RNA, 19 nt, Homo sapiens
  misc_RNA (1)...(19): siRNA sense strand
gaaacaaggcaaacacauu

SEQ ID NO: 1745027 - RNA, 19 nt, Homo sapiens
  misc_RNA (1)...(19): siRNA sense strand
aaacuacucuggauaaauc

SEQ ID NO: 1745028 - RNA, 19 nt, Homo sapiens
  misc_RNA (1)...(19): siRNA sense strand
gaauacaggaucacaguuu

SEQ ID NO: 1745029 - RNA, 19 nt, Homo sapiens
  misc_RNA (1)...(19): siRNA sense strand
uauaaucucuccucugcua

SEQ ID NO: 1745030 - RNA, 19 nt, Homo sapiens
  misc_RNA (1)...(19): siRNA sense strand
gaaucuuguugacuacaua

SEQ ID NO: 1745031 - RNA, 19 nt, Homo sapiens
  misc_RNA (1)...(19): siRNA sense strand
gacaauaccgcuaagcuaa

SEQ ID NO: 1745032 - RNA, 19 nt, Homo sapiens
  misc_RNA (1)...(19): siRNA sense strand
ggaagaugauauguuugua

SEQ ID NO: 1745033 - RNA, 19 nt, Homo sapiens
  misc_RNA (1)...(19): siRNA sense strand
aaacaaggcaaacacauuu

SEQ ID NO: 1745034 - RNA, 19 nt, Homo sapiens
  misc_RNA (1)...(19): siRNA sense strand
ggaggcaacuacauugaau

SEQ ID NO: 1745035 - RNA, 19 nt, Homo sapiens
  misc_RNA (1)...(19): siRNA sense strand
gaugaaggagccauaagua

SEQ ID NO: 1745036 - RNA, 19 nt, Homo sapiens
  misc_RNA (1)...(19): siRNA sense strand
gacaagaaacuucgagaaa

SEQ ID NO: 1745037 - RNA, 19 nt, Homo sapiens
  misc_RNA (1)...(19): siRNA sense strand
gaugaggucaaacgacuua

SEQ ID NO: 1745038 - RNA, 19 nt, Homo sapiens
  misc_RNA (1)...(19): siRNA sense strand
gaacauauaaaggcaagaa

SEQ ID NO: 1745039 - RNA, 19 nt, Homo sapiens
  misc_RNA (1)...(19): siRNA sense strand
uaaguaugcuuucugacaa

SEQ ID NO: 1745040 - RNA, 19 nt, Homo sapiens
  misc_RNA (1)...(19): siRNA sense strand
uaaacaggguuaauuugga

SEQ ID NO: 1745041 - RNA, 19 nt, Homo sapiens
  misc_RNA (1)...(19): siRNA sense strand
caucagcuguuaguucuuu

SEQ ID NO: 1745042 - RNA, 19 nt, Homo sapiens
  misc_RNA (1)...(19): siRNA sense strand
aaacaggguuaauuuggaa

SEQ ID NO: 1745043 - RNA, 19 nt, Homo sapiens
  misc_RNA (1)...(19): siRNA sense strand
cagaaucaguucagcaaga

SEQ ID NO: 1745044 - RNA, 19 nt, Homo sapiens
  misc_RNA (1)...(19): siRNA sense strand
cgaaacugaugacuauaga

SEQ ID NO: 1745045 - RNA, 19 nt, Homo sapiens
  misc_RNA (1)...(19): siRNA sense strand
ugacagauuuggccaagau

SEQ ID NO: 1745046 - RNA, 19 nt, Homo sapiens
  misc_RNA (1)...(19): siRNA sense strand
gagguuguuucuuaucuau

SEQ ID NO: 1745047 - RNA, 19 nt, Homo sapiens
  misc_RNA (1)...(19): siRNA sense strand
gccaggaucuucgaaauca

SEQ ID NO: 1745048 - RNA, 19 nt, Homo sapiens
  misc_RNA (1)...(19): siRNA sense strand
gcaaacacauuuuauaugg

SEQ ID NO: 1745049 - RNA, 19 nt, Homo sapiens
  misc_RNA (1)...(19): siRNA sense strand
uuauggagaugaagucaaa

SEQ ID NO: 1745050 - RNA, 19 nt, Homo sapiens
  misc_RNA (1)...(19): siRNA sense strand
gaagaugaaggagccauaa

SEQ ID NO: 1745051 - RNA, 19 nt, Homo sapiens
  misc_RNA (1)...(19): siRNA sense strand
ggaaauggaaacuguuaug

SEQ ID NO: 1745052 - RNA, 19 nt, Homo sapiens
  misc_RNA (1)...(19): siRNA sense strand
aaacauagauuuggcaacu

SEQ ID NO: 1745053 - RNA, 19 nt, Homo sapiens
  misc_RNA (1)...(19): siRNA sense strand
gccauuaacaggccagaua

SEQ ID NO: 1745054 - RNA, 19 nt, Homo sapiens
  misc_RNA (1)...(19): siRNA sense strand
caucauacuuggacauauc

SEQ ID NO: 1745055 - RNA, 19 nt, Homo sapiens
  misc_RNA (1)...(19): siRNA sense strand
ugacagaaacauagauuug

SEQ ID NO: 1745056 - RNA, 19 nt, Homo sapiens
  misc_RNA (1)...(19): siRNA sense strand
gaaacuagacaagaaacuu

SEQ ID NO: 1745057 - RNA, 19 nt, Homo sapiens
  misc_RNA (1)...(19): siRNA sense strand
acacggaaauggaaacugu

SEQ ID NO: 1745058 - RNA, 19 nt, Homo sapiens
  misc_RNA (1)...(19): siRNA sense strand
uaaggagcuuguuucauau

SEQ ID NO: 1745059 - RNA, 19 nt, Homo sapiens
  misc_RNA (1)...(19): siRNA sense strand
cagugaaacuagacaagaa

SEQ ID NO: 1745060 - RNA, 19 nt, Homo sapiens
  misc_RNA (1)...(19): siRNA sense strand
gagauccuauuccagaugu

SEQ ID NO: 1745061 - RNA, 19 nt, Homo sapiens
  misc_RNA (1)...(19): siRNA sense strand
ugccagaacuccuugagaa

SEQ ID NO: 1745062 - RNA, 19 nt, Homo sapiens
  misc_RNA (1)...(19): siRNA sense strand
ggaagaugaaggagccaua

SEQ ID NO: 1745063 - RNA, 19 nt, Homo sapiens
  misc_RNA (1)...(19): siRNA sense strand
aaacuguuauggacacuau

SEQ ID NO: 1745064 - RNA, 19 nt, Homo sapiens
  misc_RNA (1)...(19): siRNA sense strand
acaggaagaugaggucaaa

SEQ ID NO: 1745065 - RNA, 19 nt, Homo sapiens
  misc_RNA (1)...(19): siRNA sense strand
gcucaguucccagaaauaa

SEQ ID NO: 1745066 - RNA, 19 nt, Homo sapiens
  misc_RNA (1)...(19): siRNA sense strand
gcaaaacuacucuggauaa

SEQ ID NO: 1745067 - RNA, 19 nt, Homo sapiens
  misc_RNA (1)...(19): siRNA sense strand
gcaagaaaauuggauguau

SEQ ID NO: 1745068 - RNA, 19 nt, Homo sapiens
  misc_RNA (1)...(19): siRNA sense strand
ggaggaggcaacuacauug

SEQ ID NO: 1745069 - RNA, 19 nt, Homo sapiens
  misc_RNA (1)...(19): siRNA sense strand
uaacacaaguagccaaggu

SEQ ID NO: 1745070 - RNA, 19 nt, Homo sapiens
  misc_RNA (1)...(19): siRNA sense strand
gcaggaacuccagaagaua

SEQ ID NO: 1745071 - RNA, 19 nt, Homo sapiens
  misc_RNA (1)...(19): siRNA sense strand
ggacauaucaagcauuggu

SEQ ID NO: 1745072 - RNA, 19 nt, Homo sapiens
  misc_RNA (1)...(19): siRNA sense strand
gcagaaaugguagcaguga

SEQ ID NO: 1745073 - RNA, 19 nt, Homo sapiens
  misc_RNA (1)...(19): siRNA sense strand
ucuaagagaugcaagaaac

SEQ ID NO: 1745074 - RNA, 19 nt, Homo sapiens
  misc_RNA (1)...(19): siRNA sense strand
gaauaucagaaucuuguug

SEQ ID NO: 1745075 - RNA, 19 nt, Homo sapiens
  misc_RNA (1)...(19): siRNA sense strand
agaaguaaacuggaagaua

SEQ ID NO: 1745076 - RNA, 19 nt, Homo sapiens
  misc_RNA (1)...(19): siRNA sense strand
cagauuuggccaagauaua

SEQ ID NO: 1745077 - RNA, 19 nt, Homo sapiens
  misc_RNA (1)...(19): siRNA sense strand
gggaggaggcaacuacauu

SEQ ID NO: 1745078 - RNA, 19 nt, Homo sapiens
  misc_RNA (1)...(19): siRNA sense strand
aggcugauuuggagcaaua

SEQ ID NO: 1745079 - RNA, 19 nt, Homo sapiens
  misc_RNA (1)...(19): siRNA sense strand
caagaaacuucgagaaaau

SEQ ID NO: 1745080 - RNA, 19 nt, Homo sapiens
  misc_RNA (1)...(19): siRNA sense strand
uggaagauauugcaaaugc

SEQ ID NO: 1745081 - RNA, 19 nt, Homo sapiens
  misc_RNA (1)...(19): siRNA sense strand
gcacuaccacuaaaccaau

SEQ ID NO: 1745082 - RNA, 19 nt, Homo sapiens
  misc_RNA (1)...(19): siRNA sense strand
caggaacuccagaagauaa

SEQ ID NO: 1745083 - RNA, 19 nt, Homo sapiens
  misc_RNA (1)...(19): siRNA sense strand
gcaguauacuuuguaaugc

SEQ ID NO: 1745084 - RNA, 19 nt, Homo sapiens
  misc_RNA (1)...(19): siRNA sense strand
ugacaauaccgcuaagcua

SEQ ID NO: 1745085 - RNA, 19 nt, Homo sapiens
  misc_RNA (1)...(19): siRNA sense strand
gcagugaaacuagacaaga

SEQ ID NO: 1745086 - RNA, 19 nt, Homo sapiens
  misc_RNA (1)...(19): siRNA sense strand
uuucauaucgugccauuaa

SEQ ID NO: 1745087 - RNA, 19 nt, Homo sapiens
  misc_RNA (1)...(19): siRNA sense strand
gaucuucgaaaucaacuau

SEQ ID NO: 1745088 - RNA, 19 nt, Homo sapiens
  misc_RNA (1)...(19): siRNA sense strand
uaacaggccagauaucaca

SEQ ID NO: 1745089 - RNA, 19 nt, Homo sapiens
  misc_RNA (1)...(19): siRNA sense strand
gagcaaaacuacucuggau

SEQ ID NO: 1745090 - RNA, 19 nt, Homo sapiens
  misc_RNA (1)...(19): siRNA sense strand
cccagaaguugcagaauca

SEQ ID NO: 1745091 - RNA, 19 nt, Homo sapiens
  misc_RNA (1)...(19): siRNA sense strand
ucacagacacggaaaugga

SEQ ID NO: 1745092 - RNA, 19 nt, Homo sapiens
  misc_RNA (1)...(19): siRNA sense strand
cagcucaguucccagaaau

SEQ ID NO: 1745093 - RNA, 19 nt, Homo sapiens
  misc_RNA (1)...(19): siRNA sense strand
agaaucaguucagcaagaa

SEQ ID NO: 1745094 - RNA, 19 nt, Homo sapiens
  misc_RNA (1)...(19): siRNA sense strand
gaaguccauucccagaagu

SEQ ID NO: 1745095 - RNA, 19 nt, Homo sapiens
  misc_RNA (1)...(19): siRNA sense strand
gaacagcagcagaaauggu

SEQ ID NO: 1745096 - RNA, 19 nt, Homo sapiens
  misc_RNA (1)...(19): siRNA sense strand
gggaaucacucugcaucug

SEQ ID NO: 1745097 - RNA, 19 nt, Homo sapiens
  misc_RNA (1)...(19): siRNA sense strand
ugagguuguuucuuaucua

SEQ ID NO: 1745098 - RNA, 19 nt, Homo sapiens
  misc_RNA (1)...(19): siRNA sense strand
caauaccgcuaagcuaaca

SEQ ID NO: 1745099 - RNA, 19 nt, Homo sapiens
  misc_RNA (1)...(19): siRNA sense strand
ugaaggagcuaagagacau

SEQ ID NO: 1745100 - RNA, 19 nt, Homo sapiens
  misc_RNA (1)...(19): siRNA sense strand
ucugcuauuucaagaagua

SEQ ID NO: 1745101 - RNA, 19 nt, Homo sapiens
  misc_RNA (1)...(19): siRNA sense strand
caacuacauugaauaucag

SEQ ID NO: 1745102 - RNA, 19 nt, Homo sapiens
  misc_RNA (1)...(19): siRNA sense strand
gaggaggcaacuacauuga

SEQ ID NO: 1745103 - RNA, 19 nt, Homo sapiens
  misc_RNA (1)...(19): siRNA sense strand
uggcagcacuaccacuaaa

SEQ ID NO: 1745104 - RNA, 19 nt, Homo sapiens
  misc_RNA (1)...(19): siRNA sense strand
ucaaacaguggaaggcuuu

SEQ ID NO: 1745105 - RNA, 19 nt, Homo sapiens
  misc_RNA (1)...(19): siRNA sense strand
cuggauaaaucucuucuag

SEQ ID NO: 1745106 - RNA, 19 nt, Homo sapiens
  misc_RNA (1)...(19): siRNA sense strand
auaaucagauguucaagag

SEQ ID NO: 1745107 - RNA, 19 nt, Homo sapiens
  misc_RNA (1)...(19): siRNA sense strand
gaaauggaaacuguuaugg

SEQ ID NO: 1745108 - RNA, 19 nt, Homo sapiens
  misc_RNA (1)...(19): siRNA sense strand
cagauguuccugcaguaua

SEQ ID NO: 1745109 - RNA, 19 nt, Homo sapiens
  misc_RNA (1)...(19): siRNA sense strand
gaggcaacuacauugaaua

SEQ ID NO: 1745110 - RNA, 19 nt, Homo sapiens
  misc_RNA (1)...(19): siRNA sense strand
uaucacgagucaugaauac

SEQ ID NO: 1745111 - RNA, 19 nt, Homo sapiens
  misc_RNA (1)...(19): siRNA sense strand
guuauggacacuauaguug

SEQ ID NO: 1745112 - RNA, 19 nt, Homo sapiens
  misc_RNA (1)...(19): siRNA sense strand
ggaaacaaggcaaacacau

SEQ ID NO: 1745113 - RNA, 19 nt, Homo sapiens
  misc_RNA (1)...(19): siRNA sense strand
aucagaaucuuguugacua

SEQ ID NO: 1745114 - RNA, 19 nt, Homo sapiens
  misc_RNA (1)...(19): siRNA sense strand
aauacaggaucacaguuug

SEQ ID NO: 1745115 - RNA, 19 nt, Homo sapiens
  misc_RNA (1)...(19): siRNA sense strand
ugcaggaacuccagaagau

SEQ ID NO: 1745116 - RNA, 19 nt, Homo sapiens
  misc_RNA (1)...(19): siRNA sense strand
ccagaggcccuuauuaguc

SEQ ID NO: 1745117 - RNA, 19 nt, Homo sapiens
  misc_RNA (1)...(19): siRNA sense strand
cagaaaugguagcagugaa

SEQ ID NO: 1745118 - RNA, 19 nt, Homo sapiens
  misc_RNA (1)...(19): siRNA sense strand
gugccaggaucuucgaaau

SEQ ID NO: 1745119 - RNA, 19 nt, Homo sapiens
  misc_RNA (1)...(19): siRNA sense strand
gaaguugcagaaucaguuc

SEQ ID NO: 1745120 - RNA, 19 nt, Homo sapiens
  misc_RNA (1)...(19): siRNA sense strand
caaaauaaggagcuuguuu

SEQ ID NO: 1745121 - RNA, 19 nt, Homo sapiens
  misc_RNA (1)...(19): siRNA sense strand
gaaguaaacuggaagauau

SEQ ID NO: 1745122 - RNA, 19 nt, Homo sapiens
  misc_RNA (1)...(19): siRNA sense strand
auaaggagcuuguuucaua

SEQ ID NO: 1745123 - RNA, 19 nt, Homo sapiens
  misc_RNA (1)...(19): siRNA sense strand
gcaacuacauugaauauca

SEQ ID NO: 1745124 - RNA, 19 nt, Homo sapiens
  misc_RNA (1)...(19): siRNA sense strand
uaacuccgguugauaaauu

SEQ ID NO: 1745125 - RNA, 19 nt, Homo sapiens
  misc_RNA (1)...(19): siRNA sense strand
gcaacuccuuuacaucaua

SEQ ID NO: 1745126 - RNA, 19 nt, Homo sapiens
  misc_RNA (1)...(19): siRNA sense strand
gaaacaaggcaaacacauu

SEQ ID NO: 1745127 - RNA, 19 nt, Homo sapiens
  misc_RNA (1)...(19): siRNA sense strand
aaacuacucuggauaaauc

SEQ ID NO: 1745128 - RNA, 19 nt, Homo sapiens
  misc_RNA (1)...(19): siRNA sense strand
gaauacaggaucacaguuu

SEQ ID NO: 1745129 - RNA, 19 nt, Homo sapiens
  misc_RNA (1)...(19): siRNA sense strand
gaaucuuguugacuacaua

SEQ ID NO: 1745130 - RNA, 19 nt, Homo sapiens
  misc_RNA (1)...(19): siRNA sense strand
gacaauaccgcuaagcuaa

SEQ ID NO: 1745131 - RNA, 19 nt, Homo sapiens
  misc_RNA (1)...(19): siRNA sense strand
ggaagaugauauguuugua

SEQ ID NO: 1745132 - RNA, 19 nt, Homo sapiens
  misc_RNA (1)...(19): siRNA sense strand
aaacaaggcaaacacauuu

SEQ ID NO: 1745133 - RNA, 19 nt, Homo sapiens
  misc_RNA (1)...(19): siRNA sense strand
ggaggcaacuacauugaau

SEQ ID NO: 1745134 - RNA, 19 nt, Homo sapiens
  misc_RNA (1)...(19): siRNA sense strand
gaugaaggagccauaagua

SEQ ID NO: 1745135 - RNA, 19 nt, Homo sapiens
  misc_RNA (1)...(19): siRNA sense strand
gacaagaaacuucgagaaa

SEQ ID NO: 1745136 - RNA, 19 nt, Homo sapiens
  misc_RNA (1)...(19): siRNA sense strand
gaugaggucaaacgacuua

SEQ ID NO: 1745137 - RNA, 19 nt, Homo sapiens
  misc_RNA (1)...(19): siRNA sense strand
gaacauauaaaggcaagaa

SEQ ID NO: 1745138 - RNA, 19 nt, Homo sapiens
  misc_RNA (1)...(19): siRNA sense strand
uaaguaugcuuucugacaa

SEQ ID NO: 1745139 - RNA, 19 nt, Homo sapiens
  misc_RNA (1)...(19): siRNA sense strand
uaaacaggguuaauuugga

SEQ ID NO: 1745140 - RNA, 19 nt, Homo sapiens
  misc_RNA (1)...(19): siRNA sense strand
caucagcuguuaguucuuu

SEQ ID NO: 1745141 - RNA, 19 nt, Homo sapiens
  misc_RNA (1)...(19): siRNA sense strand
aaacaggguuaauuuggaa

SEQ ID NO: 1745142 - RNA, 19 nt, Homo sapiens
  misc_RNA (1)...(19): siRNA sense strand
cagaaucaguucagcaaga

SEQ ID NO: 1745143 - RNA, 19 nt, Homo sapiens
  misc_RNA (1)...(19): siRNA sense strand
cgaaacugaugacuauaga

SEQ ID NO: 1745144 - RNA, 19 nt, Homo sapiens
  misc_RNA (1)...(19): siRNA sense strand
gagguuguuucuuaucuau

SEQ ID NO: 1745145 - RNA, 19 nt, Homo sapiens
  misc_RNA (1)...(19): siRNA sense strand
gccaggaucuucgaaauca

SEQ ID NO: 1745146 - RNA, 19 nt, Homo sapiens
  misc_RNA (1)...(19): siRNA sense strand
gcaaacacauuuuauaugg

SEQ ID NO: 1745147 - RNA, 19 nt, Homo sapiens
  misc_RNA (1)...(19): siRNA sense strand
uuauggagaugaagucaaa

SEQ ID NO: 1745148 - RNA, 19 nt, Homo sapiens
  misc_RNA (1)...(19): siRNA sense strand
gaagaugaaggagccauaa

SEQ ID NO: 1745149 - RNA, 19 nt, Homo sapiens
  misc_RNA (1)...(19): siRNA sense strand
ggaaauggaaacuguuaug

SEQ ID NO: 1745150 - RNA, 19 nt, Homo sapiens
  misc_RNA (1)...(19): siRNA sense strand
aaacauagauuuggcaacu

SEQ ID NO: 1745151 - RNA, 19 nt, Homo sapiens
  misc_RNA (1)...(19): siRNA sense strand
gccauuaacaggccagaua

SEQ ID NO: 1745152 - RNA, 19 nt, Homo sapiens
  misc_RNA (1)...(19): siRNA sense strand
caucauacuuggacauauc

SEQ ID NO: 1745153 - RNA, 19 nt, Homo sapiens
  misc_RNA (1)...(19): siRNA sense strand
ugacagaaacauagauuug

SEQ ID NO: 1745154 - RNA, 19 nt, Homo sapiens
  misc_RNA (1)...(19): siRNA sense strand
gaaacuagacaagaaacuu

SEQ ID NO: 1745155 - RNA, 19 nt, Homo sapiens
  misc_RNA (1)...(19): siRNA sense strand
acacggaaauggaaacugu

SEQ ID NO: 1745156 - RNA, 19 nt, Homo sapiens
  misc_RNA (1)...(19): siRNA sense strand
uaaggagcuuguuucauau

SEQ ID NO: 1745157 - RNA, 19 nt, Homo sapiens
  misc_RNA (1)...(19): siRNA sense strand
cagugaaacuagacaagaa

SEQ ID NO: 1745158 - RNA, 19 nt, Homo sapiens
  misc_RNA (1)...(19): siRNA sense strand
aaacuguuauggacacuau

SEQ ID NO: 1745159 - RNA, 19 nt, Homo sapiens
  misc_RNA (1)...(19): siRNA sense strand
ugccagaacuccuugagaa

SEQ ID NO: 1745160 - RNA, 19 nt, Homo sapiens
  misc_RNA (1)...(19): siRNA sense strand
gagauccuauuccagaugu

SEQ ID NO: 1745161 - RNA, 19 nt, Homo sapiens
  misc_RNA (1)...(19): siRNA sense strand
ggaagaugaaggagccaua

SEQ ID NO: 1745162 - RNA, 19 nt, Homo sapiens
  misc_RNA (1)...(19): siRNA sense strand
acaggaagaugaggucaaa

SEQ ID NO: 1745163 - RNA, 19 nt, Homo sapiens
  misc_RNA (1)...(19): siRNA sense strand
gcucaguucccagaaauaa

SEQ ID NO: 1745164 - RNA, 19 nt, Homo sapiens
  misc_RNA (1)...(19): siRNA sense strand
gcaaaacuacucuggauaa

SEQ ID NO: 1745165 - RNA, 19 nt, Homo sapiens
  misc_RNA (1)...(19): siRNA sense strand
gcaagaaaauuggauguau

SEQ ID NO: 1745166 - RNA, 19 nt, Homo sapiens
  misc_RNA (1)...(19): siRNA sense strand
ggaggaggcaacuacauug

SEQ ID NO: 1745167 - RNA, 19 nt, Homo sapiens
  misc_RNA (1)...(19): siRNA sense strand
uaacacaaguagccaaggu

SEQ ID NO: 1745168 - RNA, 19 nt, Homo sapiens
  misc_RNA (1)...(19): siRNA sense strand
gcaggaacuccagaagaua

SEQ ID NO: 1745169 - RNA, 19 nt, Homo sapiens
  misc_RNA (1)...(19): siRNA sense strand
ggacauaucaagcauuggu

SEQ ID NO: 1745170 - RNA, 19 nt, Homo sapiens
  misc_RNA (1)...(19): siRNA sense strand
gcagaaaugguagcaguga

SEQ ID NO: 1745171 - RNA, 19 nt, Homo sapiens
  misc_RNA (1)...(19): siRNA sense strand
ucuaagagaugcaagaaac

SEQ ID NO: 1745172 - RNA, 19 nt, Homo sapiens
  misc_RNA (1)...(19): siRNA sense strand
gaauaucagaaucuuguug

SEQ ID NO: 1745173 - RNA, 19 nt, Homo sapiens
  misc_RNA (1)...(19): siRNA sense strand
agaaguaaacuggaagaua

SEQ ID NO: 1745174 - RNA, 19 nt, Homo sapiens
  misc_RNA (1)...(19): siRNA sense strand
gggaggaggcaacuacauu

SEQ ID NO: 1745175 - RNA, 19 nt, Homo sapiens
  misc_RNA (1)...(19): siRNA sense strand
aggcugauuuggagcaaua

SEQ ID NO: 1745176 - RNA, 19 nt, Homo sapiens
  misc_RNA (1)...(19): siRNA sense strand
caagaaacuucgagaaaau

SEQ ID NO: 1745177 - RNA, 19 nt, Homo sapiens
  misc_RNA (1)...(19): siRNA sense strand
uggaagauauugcaaaugc

SEQ ID NO: 1745178 - RNA, 19 nt, Homo sapiens
  misc_RNA (1)...(19): siRNA sense strand
gcacuaccacuaaaccaau

SEQ ID NO: 1745179 - RNA, 19 nt, Homo sapiens
  misc_RNA (1)...(19): siRNA sense strand
caggaacuccagaagauaa

SEQ ID NO: 1745180 - RNA, 19 nt, Homo sapiens
  misc_RNA (1)...(19): siRNA sense strand
gaucuucgaaaucaacuau

SEQ ID NO: 1745181 - RNA, 19 nt, Homo sapiens
  misc_RNA (1)...(19): siRNA sense strand
ugacaauaccgcuaagcua

SEQ ID NO: 1745182 - RNA, 19 nt, Homo sapiens
  misc_RNA (1)...(19): siRNA sense strand
gcagugaaacuagacaaga

SEQ ID NO: 1745183 - RNA, 19 nt, Homo sapiens
  misc_RNA (1)...(19): siRNA sense strand
gcaguauacuuuguaaugc

SEQ ID NO: 1745184 - RNA, 19 nt, Homo sapiens
  misc_RNA (1)...(19): siRNA sense strand
uuucauaucgugccauuaa

SEQ ID NO: 1745185 - RNA, 19 nt, Homo sapiens
  misc_RNA (1)...(19): siRNA sense strand
uaacaggccagauaucaca

SEQ ID NO: 1745186 - RNA, 19 nt, Homo sapiens
  misc_RNA (1)...(19): siRNA sense strand
gagcaaaacuacucuggau

SEQ ID NO: 1745187 - RNA, 19 nt, Homo sapiens
  misc_RNA (1)...(19): siRNA sense strand
cccagaaguugcagaauca

SEQ ID NO: 1745188 - RNA, 19 nt, Homo sapiens
  misc_RNA (1)...(19): siRNA sense strand
ucacagacacggaaaugga

SEQ ID NO: 1745189 - RNA, 19 nt, Homo sapiens
  misc_RNA (1)...(19): siRNA sense strand
cagcucaguucccagaaau

SEQ ID NO: 1745190 - RNA, 19 nt, Homo sapiens
  misc_RNA (1)...(19): siRNA sense strand
agaaucaguucagcaagaa

SEQ ID NO: 1745191 - RNA, 19 nt, Homo sapiens
  misc_RNA (1)...(19): siRNA sense strand
gaaguccauucccagaagu

SEQ ID NO: 1745192 - RNA, 19 nt, Homo sapiens
  misc_RNA (1)...(19): siRNA sense strand
gaacagcagcagaaauggu

SEQ ID NO: 1745193 - RNA, 19 nt, Homo sapiens
  misc_RNA (1)...(19): siRNA sense strand
ugagguuguuucuuaucua

SEQ ID NO: 1745194 - RNA, 19 nt, Homo sapiens
  misc_RNA (1)...(19): siRNA sense strand
caauaccgcuaagcuaaca

SEQ ID NO: 1745195 - RNA, 19 nt, Homo sapiens
  misc_RNA (1)...(19): siRNA sense strand
gggaaucacucugcaucug

SEQ ID NO: 1745196 - RNA, 19 nt, Homo sapiens
  misc_RNA (1)...(19): siRNA sense strand
gaaauggaaacuguuaugg

SEQ ID NO: 1745197 - RNA, 19 nt, Homo sapiens
  misc_RNA (1)...(19): siRNA sense strand
caacuacauugaauaucag

SEQ ID NO: 1745198 - RNA, 19 nt, Homo sapiens
  misc_RNA (1)...(19): siRNA sense strand
gaggaggcaacuacauuga

SEQ ID NO: 1745199 - RNA, 19 nt, Homo sapiens
  misc_RNA (1)...(19): siRNA sense strand
uggcagcacuaccacuaaa

SEQ ID NO: 1745200 - RNA, 19 nt, Homo sapiens
  misc_RNA (1)...(19): siRNA sense strand
ucaaacaguggaaggcuuu

SEQ ID NO: 1745201 - RNA, 19 nt, Homo sapiens
  misc_RNA (1)...(19): siRNA sense strand
cuggauaaaucucuucuag

SEQ ID NO: 1745202 - RNA, 19 nt, Homo sapiens
  misc_RNA (1)...(19): siRNA sense strand
ucugcuauuucaagaagua

SEQ ID NO: 1745203 - RNA, 19 nt, Homo sapiens
  misc_RNA (1)...(19): siRNA sense strand
auaaucagauguucaagag

SEQ ID NO: 1745204 - RNA, 19 nt, Homo sapiens
  misc_RNA (1)...(19): siRNA sense strand
cagauguuccugcaguaua

SEQ ID NO: 1745205 - RNA, 19 nt, Homo sapiens
  misc_RNA (1)...(19): siRNA sense strand
gaggcaacuacauugaaua

SEQ ID NO: 1745206 - RNA, 19 nt, Homo sapiens
  misc_RNA (1)...(19): siRNA sense strand
uaucacgagucaugaauac

SEQ ID NO: 1745207 - RNA, 19 nt, Homo sapiens
  misc_RNA (1)...(19): siRNA sense strand
guuauggacacuauaguug

SEQ ID NO: 1745208 - RNA, 19 nt, Homo sapiens
  misc_RNA (1)...(19): siRNA sense strand
ggaaacaaggcaaacacau

SEQ ID NO: 1745209 - RNA, 19 nt, Homo sapiens
  misc_RNA (1)...(19): siRNA sense strand
aucagaaucuuguugacua

SEQ ID NO: 1745210 - RNA, 19 nt, Homo sapiens
  misc_RNA (1)...(19): siRNA sense strand
aauacaggaucacaguuug

SEQ ID NO: 1745211 - RNA, 19 nt, Homo sapiens
  misc_RNA (1)...(19): siRNA sense strand
ugcaggaacuccagaagau

SEQ ID NO: 1745212 - RNA, 19 nt, Homo sapiens
  misc_RNA (1)...(19): siRNA sense strand
ccagaggcccuuauuaguc

SEQ ID NO: 1745213 - RNA, 19 nt, Homo sapiens
  misc_RNA (1)...(19): siRNA sense strand
cagaaaugguagcagugaa

SEQ ID NO: 1745214 - RNA, 19 nt, Homo sapiens
  misc_RNA (1)...(19): siRNA sense strand
caaaauaaggagcuuguuu

SEQ ID NO: 1745215 - RNA, 19 nt, Homo sapiens
  misc_RNA (1)...(19): siRNA sense strand
gugccaggaucuucgaaau

SEQ ID NO: 1745216 - RNA, 19 nt, Homo sapiens
  misc_RNA (1)...(19): siRNA sense strand
gaaguugcagaaucaguuc

SEQ ID NO: 1745217 - RNA, 19 nt, Homo sapiens
  misc_RNA (1)...(19): siRNA sense strand
agaaaugguagcagugaaa

SEQ ID NO: 1745218 - RNA, 19 nt, Homo sapiens
  misc_RNA (1)...(19): siRNA sense strand
cagcaaaaucuaccuguua

SEQ ID NO: 1745219 - RNA, 19 nt, Homo sapiens
  misc_RNA (1)...(19): siRNA sense strand
ggugcuagaccaaagagaa

SEQ ID NO: 1745220 - RNA, 19 nt, Homo sapiens
  misc_RNA (1)...(19): siRNA sense strand
acaagaaacuucgagaaaa

SEQ ID NO: 1745221 - RNA, 19 nt, Homo sapiens
  misc_RNA (1)...(19): siRNA sense strand
gaaguaaacuggaagauau

SEQ ID NO: 1745222 - RNA, 19 nt, Homo sapiens
  misc_RNA (1)...(19): siRNA sense strand
auaaggagcuuguuucaua

SEQ ID NO: 1745223 - RNA, 19 nt, Homo sapiens
  misc_RNA (1)...(19): siRNA sense strand
gcaacuacauugaauauca

SEQ ID NO: 1745224 - RNA, 19 nt, Homo sapiens
  misc_RNA (1)...(19): siRNA sense strand
uaacuccgguugauaaauu

SEQ ID NO: 1745225 - RNA, 19 nt, Homo sapiens
  misc_RNA (1)...(19): siRNA sense strand
gcaacuccuuuacaucaua

SEQ ID NO: 1745226 - RNA, 19 nt, Homo sapiens
  misc_RNA (1)...(19): siRNA sense strand
gaaacaaggcaaacacauu

SEQ ID NO: 1745227 - RNA, 19 nt, Homo sapiens
  misc_RNA (1)...(19): siRNA sense strand
aaacuacucuggauaaauc

SEQ ID NO: 1745228 - RNA, 19 nt, Homo sapiens
  misc_RNA (1)...(19): siRNA sense strand
gaauacaggaucacaguuu

SEQ ID NO: 1745229 - RNA, 19 nt, Homo sapiens
  misc_RNA (1)...(19): siRNA sense strand
uauaaucucuccucugcua

SEQ ID NO: 1745230 - RNA, 19 nt, Homo sapiens
  misc_RNA (1)...(19): siRNA sense strand
gaaucuuguugacuacaua

SEQ ID NO: 1745231 - RNA, 19 nt, Homo sapiens
  misc_RNA (1)...(19): siRNA sense strand
gacaauaccgcuaagcuaa

SEQ ID NO: 1745232 - RNA, 19 nt, Homo sapiens
  misc_RNA (1)...(19): siRNA sense strand
ggaagaugauauguuugua

SEQ ID NO: 1745233 - RNA, 19 nt, Homo sapiens
  misc_RNA (1)...(19): siRNA sense strand
aaacaaggcaaacacauuu

SEQ ID NO: 1745234 - RNA, 19 nt, Homo sapiens
  misc_RNA (1)...(19): siRNA sense strand
ggaggcaacuacauugaau

SEQ ID NO: 1745235 - RNA, 19 nt, Homo sapiens
  misc_RNA (1)...(19): siRNA sense strand
gaugaaggagccauaagua

SEQ ID NO: 1745236 - RNA, 19 nt, Homo sapiens
  misc_RNA (1)...(19): siRNA sense strand
gacaagaaacuucgagaaa

SEQ ID NO: 1745237 - RNA, 19 nt, Homo sapiens
  misc_RNA (1)...(19): siRNA sense strand
gaugaggucaaacgacuua

SEQ ID NO: 1745238 - RNA, 19 nt, Homo sapiens
  misc_RNA (1)...(19): siRNA sense strand
gaacauauaaaggcaagaa

SEQ ID NO: 1745239 - RNA, 19 nt, Homo sapiens
  misc_RNA (1)...(19): siRNA sense strand
uaaguaugcuuucugacaa

SEQ ID NO: 1745240 - RNA, 19 nt, Homo sapiens
  misc_RNA (1)...(19): siRNA sense strand
uaaacaggguuaauuugga

SEQ ID NO: 1745241 - RNA, 19 nt, Homo sapiens
  misc_RNA (1)...(19): siRNA sense strand
caucagcuguuaguucuuu

SEQ ID NO: 1745242 - RNA, 19 nt, Homo sapiens
  misc_RNA (1)...(19): siRNA sense strand
aaacaggguuaauuuggaa

SEQ ID NO: 1745243 - RNA, 19 nt, Homo sapiens
  misc_RNA (1)...(19): siRNA sense strand
cagaaucaguucagcaaga

SEQ ID NO: 1745244 - RNA, 19 nt, Homo sapiens
  misc_RNA (1)...(19): siRNA sense strand
cgaaacugaugacuauaga

SEQ ID NO: 1745245 - RNA, 19 nt, Homo sapiens
  misc_RNA (1)...(19): siRNA sense strand
ugacagauuuggccaagau

SEQ ID NO: 1745246 - RNA, 19 nt, Homo sapiens
  misc_RNA (1)...(19): siRNA sense strand
gagguuguuucuuaucuau

SEQ ID NO: 1745247 - RNA, 19 nt, Homo sapiens
  misc_RNA (1)...(19): siRNA sense strand
gccaggaucuucgaaauca

SEQ ID NO: 1745248 - RNA, 19 nt, Homo sapiens
  misc_RNA (1)...(19): siRNA sense strand
gcaaacacauuuuauaugg

SEQ ID NO: 1745249 - RNA, 19 nt, Homo sapiens
  misc_RNA (1)...(19): siRNA sense strand
uuauggagaugaagucaaa

SEQ ID NO: 1745250 - RNA, 19 nt, Homo sapiens
  misc_RNA (1)...(19): siRNA sense strand
gaagaugaaggagccauaa

SEQ ID NO: 1745251 - RNA, 19 nt, Homo sapiens
  misc_RNA (1)...(19): siRNA sense strand
ggaaauggaaacuguuaug

SEQ ID NO: 1745252 - RNA, 19 nt, Homo sapiens
  misc_RNA (1)...(19): siRNA sense strand
aaacauagauuuggcaacu

SEQ ID NO: 1745253 - RNA, 19 nt, Homo sapiens
  misc_RNA (1)...(19): siRNA sense strand
gccauuaacaggccagaua

SEQ ID NO: 1745254 - RNA, 19 nt, Homo sapiens
  misc_RNA (1)...(19): siRNA sense strand
caucauacuuggacauauc

SEQ ID NO: 1745255 - RNA, 19 nt, Homo sapiens
  misc_RNA (1)...(19): siRNA sense strand
ugacagaaacauagauuug

SEQ ID NO: 1745256 - RNA, 19 nt, Homo sapiens
  misc_RNA (1)...(19): siRNA sense strand
gaaacuagacaagaaacuu

SEQ ID NO: 1745257 - RNA, 19 nt, Homo sapiens
  misc_RNA (1)...(19): siRNA sense strand
acacggaaauggaaacugu

SEQ ID NO: 1745258 - RNA, 19 nt, Homo sapiens
  misc_RNA (1)...(19): siRNA sense strand
uaaggagcuuguuucauau

SEQ ID NO: 1745259 - RNA, 19 nt, Homo sapiens
  misc_RNA (1)...(19): siRNA sense strand
cagugaaacuagacaagaa

SEQ ID NO: 1745260 - RNA, 19 nt, Homo sapiens
  misc_RNA (1)...(19): siRNA sense strand
gagauccuauuccagaugu

SEQ ID NO: 1745261 - RNA, 19 nt, Homo sapiens
  misc_RNA (1)...(19): siRNA sense strand
ugccagaacuccuugagaa

SEQ ID NO: 1745262 - RNA, 19 nt, Homo sapiens
  misc_RNA (1)...(19): siRNA sense strand
ggaagaugaaggagccaua

SEQ ID NO: 1745263 - RNA, 19 nt, Homo sapiens
  misc_RNA (1)...(19): siRNA sense strand
aaacuguuauggacacuau

SEQ ID NO: 1745264 - RNA, 19 nt, Homo sapiens
  misc_RNA (1)...(19): siRNA sense strand
acaggaagaugaggucaaa

SEQ ID NO: 1745265 - RNA, 19 nt, Homo sapiens
  misc_RNA (1)...(19): siRNA sense strand
gcucaguucccagaaauaa

SEQ ID NO: 1745266 - RNA, 19 nt, Homo sapiens
  misc_RNA (1)...(19): siRNA sense strand
gcaaaacuacucuggauaa

SEQ ID NO: 1745267 - RNA, 19 nt, Homo sapiens
  misc_RNA (1)...(19): siRNA sense strand
gcaagaaaauuggauguau

SEQ ID NO: 1745268 - RNA, 19 nt, Homo sapiens
  misc_RNA (1)...(19): siRNA sense strand
ggaggaggcaacuacauug

SEQ ID NO: 1745269 - RNA, 19 nt, Homo sapiens
  misc_RNA (1)...(19): siRNA sense strand
uaacacaaguagccaaggu

SEQ ID NO: 1745270 - RNA, 19 nt, Homo sapiens
  misc_RNA (1)...(19): siRNA sense strand
gcaggaacuccagaagaua

SEQ ID NO: 1745271 - RNA, 19 nt, Homo sapiens
  misc_RNA (1)...(19): siRNA sense strand
ggacauaucaagcauuggu

SEQ ID NO: 1745272 - RNA, 19 nt, Homo sapiens
  misc_RNA (1)...(19): siRNA sense strand
gcagaaaugguagcaguga

SEQ ID NO: 1745273 - RNA, 19 nt, Homo sapiens
  misc_RNA (1)...(19): siRNA sense strand
ucuaagagaugcaagaaac

SEQ ID NO: 1745274 - RNA, 19 nt, Homo sapiens
  misc_RNA (1)...(19): siRNA sense strand
gaauaucagaaucuuguug

SEQ ID NO: 1745275 - RNA, 19 nt, Homo sapiens
  misc_RNA (1)...(19): siRNA sense strand
agaaguaaacuggaagaua

SEQ ID NO: 1745276 - RNA, 19 nt, Homo sapiens
  misc_RNA (1)...(19): siRNA sense strand
cagauuuggccaagauaua

SEQ ID NO: 1745277 - RNA, 19 nt, Homo sapiens
  misc_RNA (1)...(19): siRNA sense strand
gggaggaggcaacuacauu

SEQ ID NO: 1745278 - RNA, 19 nt, Homo sapiens
  misc_RNA (1)...(19): siRNA sense strand
aggcugauuuggagcaaua

SEQ ID NO: 1745279 - RNA, 19 nt, Homo sapiens
  misc_RNA (1)...(19): siRNA sense strand
caagaaacuucgagaaaau

SEQ ID NO: 1745280 - RNA, 19 nt, Homo sapiens
  misc_RNA (1)...(19): siRNA sense strand
uggaagauauugcaaaugc

SEQ ID NO: 1745281 - RNA, 19 nt, Homo sapiens
  misc_RNA (1)...(19): siRNA sense strand
gcacuaccacuaaaccaau

SEQ ID NO: 1745282 - RNA, 19 nt, Homo sapiens
  misc_RNA (1)...(19): siRNA sense strand
caggaacuccagaagauaa

SEQ ID NO: 1745283 - RNA, 19 nt, Homo sapiens
  misc_RNA (1)...(19): siRNA sense strand
gcaguauacuuuguaaugc

SEQ ID NO: 1745284 - RNA, 19 nt, Homo sapiens
  misc_RNA (1)...(19): siRNA sense strand
ugacaauaccgcuaagcua

SEQ ID NO: 1745285 - RNA, 19 nt, Homo sapiens
  misc_RNA (1)...(19): siRNA sense strand
gcagugaaacuagacaaga

SEQ ID NO: 1745286 - RNA, 19 nt, Homo sapiens
  misc_RNA (1)...(19): siRNA sense strand
uuucauaucgugccauuaa

SEQ ID NO: 1745287 - RNA, 19 nt, Homo sapiens
  misc_RNA (1)...(19): siRNA sense strand
gaucuucgaaaucaacuau

SEQ ID NO: 1745288 - RNA, 19 nt, Homo sapiens
  misc_RNA (1)...(19): siRNA sense strand
uaacaggccagauaucaca

SEQ ID NO: 1745289 - RNA, 19 nt, Homo sapiens
  misc_RNA (1)...(19): siRNA sense strand
gagcaaaacuacucuggau

SEQ ID NO: 1745290 - RNA, 19 nt, Homo sapiens
  misc_RNA (1)...(19): siRNA sense strand
cccagaaguugcagaauca

SEQ ID NO: 1745291 - RNA, 19 nt, Homo sapiens
  misc_RNA (1)...(19): siRNA sense strand
ucacagacacggaaaugga

SEQ ID NO: 1745292 - RNA, 19 nt, Homo sapiens
  misc_RNA (1)...(19): siRNA sense strand
cagcucaguucccagaaau

SEQ ID NO: 1745293 - RNA, 19 nt, Homo sapiens
  misc_RNA (1)...(19): siRNA sense strand
agaaucaguucagcaagaa

SEQ ID NO: 1745294 - RNA, 19 nt, Homo sapiens
  misc_RNA (1)...(19): siRNA sense strand
gaaguccauucccagaagu

SEQ ID NO: 1745295 - RNA, 19 nt, Homo sapiens
  misc_RNA (1)...(19): siRNA sense strand
gaacagcagcagaaauggu

SEQ ID NO: 1745296 - RNA, 19 nt, Homo sapiens
  misc_RNA (1)...(19): siRNA sense strand
gggaaucacucugcaucug

SEQ ID NO: 1745297 - RNA, 19 nt, Homo sapiens
  misc_RNA (1)...(19): siRNA sense strand
ugagguuguuucuuaucua

SEQ ID NO: 1745298 - RNA, 19 nt, Homo sapiens
  misc_RNA (1)...(19): siRNA sense strand
caauaccgcuaagcuaaca

SEQ ID NO: 1745299 - RNA, 19 nt, Homo sapiens
  misc_RNA (1)...(19): siRNA sense strand
ugaaggagcuaagagacau

SEQ ID NO: 1745300 - RNA, 19 nt, Homo sapiens
  misc_RNA (1)...(19): siRNA sense strand
ucugcuauuucaagaagua

SEQ ID NO: 1745301 - RNA, 19 nt, Homo sapiens
  misc_RNA (1)...(19): siRNA sense strand
caacuacauugaauaucag

SEQ ID NO: 1745302 - RNA, 19 nt, Homo sapiens
  misc_RNA (1)...(19): siRNA sense strand
gaggaggcaacuacauuga

SEQ ID NO: 1745303 - RNA, 19 nt, Homo sapiens
  misc_RNA (1)...(19): siRNA sense strand
uggcagcacuaccacuaaa

SEQ ID NO: 1745304 - RNA, 19 nt, Homo sapiens
  misc_RNA (1)...(19): siRNA sense strand
ucaaacaguggaaggcuuu

SEQ ID NO: 1745305 - RNA, 19 nt, Homo sapiens
  misc_RNA (1)...(19): siRNA sense strand
cuggauaaaucucuucuag

SEQ ID NO: 1745306 - RNA, 19 nt, Homo sapiens
  misc_RNA (1)...(19): siRNA sense strand
auaaucagauguucaagag

SEQ ID NO: 1745307 - RNA, 19 nt, Homo sapiens
  misc_RNA (1)...(19): siRNA sense strand
gaaauggaaacuguuaugg

SEQ ID NO: 1745308 - RNA, 19 nt, Homo sapiens
  misc_RNA (1)...(19): siRNA sense strand
cagauguuccugcaguaua

SEQ ID NO: 1745309 - RNA, 19 nt, Homo sapiens
  misc_RNA (1)...(19): siRNA sense strand
gaggcaacuacauugaaua

SEQ ID NO: 1745310 - RNA, 19 nt, Homo sapiens
  misc_RNA (1)...(19): siRNA sense strand
uaucacgagucaugaauac

SEQ ID NO: 1745311 - RNA, 19 nt, Homo sapiens
  misc_RNA (1)...(19): siRNA sense strand
guuauggacacuauaguug

SEQ ID NO: 1745312 - RNA, 19 nt, Homo sapiens
  misc_RNA (1)...(19): siRNA sense strand
ggaaacaaggcaaacacau

SEQ ID NO: 1745313 - RNA, 19 nt, Homo sapiens
  misc_RNA (1)...(19): siRNA sense strand
aucagaaucuuguugacua

SEQ ID NO: 1745314 - RNA, 19 nt, Homo sapiens
  misc_RNA (1)...(19): siRNA sense strand
aauacaggaucacaguuug

SEQ ID NO: 1745315 - RNA, 19 nt, Homo sapiens
  misc_RNA (1)...(19): siRNA sense strand
ugcaggaacuccagaagau

SEQ ID NO: 1745316 - RNA, 19 nt, Homo sapiens
  misc_RNA (1)...(19): siRNA sense strand
ccagaggcccuuauuaguc

SEQ ID NO: 1745317 - RNA, 19 nt, Homo sapiens
  misc_RNA (1)...(19): siRNA sense strand
cagaaaugguagcagugaa

SEQ ID NO: 1745318 - RNA, 19 nt, Homo sapiens
  misc_RNA (1)...(19): siRNA sense strand
gugccaggaucuucgaaau

SEQ ID NO: 1745319 - RNA, 19 nt, Homo sapiens
  misc_RNA (1)...(19): siRNA sense strand
gaaguugcagaaucaguuc

SEQ ID NO: 1745320 - RNA, 19 nt, Homo sapiens
  misc_RNA (1)...(19): siRNA sense strand
caaaauaaggagcuuguuu

SEQ ID NO: 1745321 - RNA, 19 nt, Homo sapiens
  misc_RNA (1)...(19): siRNA sense strand
ccacagugcugcagucuga

SEQ ID NO: 1745322 - RNA, 19 nt, Homo sapiens
  misc_RNA (1)...(19): siRNA sense strand
gagaauagcgugcucaaga

SEQ ID NO: 1745323 - RNA, 19 nt, Homo sapiens
  misc_RNA (1)...(19): siRNA sense strand
gcaccuggcucacaaggau

SEQ ID NO: 1745324 - RNA, 19 nt, Homo sapiens
  misc_RNA (1)...(19): siRNA sense strand
aauaaauggugccugcuua

SEQ ID NO: 1745325 - RNA, 19 nt, Homo sapiens
  misc_RNA (1)...(19): siRNA sense strand
agaaggagacccugcagua

SEQ ID NO: 1745326 - RNA, 19 nt, Homo sapiens
  misc_RNA (1)...(19): siRNA sense strand
ggccagugauaaugccaua

SEQ ID NO: 1745327 - RNA, 19 nt, Homo sapiens
  misc_RNA (1)...(19): siRNA sense strand
gagcuggaauccuguaagg

SEQ ID NO: 1745328 - RNA, 19 nt, Homo sapiens
  misc_RNA (1)...(19): siRNA sense strand
gaauaaauggugccugcuu

SEQ ID NO: 1745329 - RNA, 19 nt, Homo sapiens
  misc_RNA (1)...(19): siRNA sense strand
gcuggagccugagaauaaa

SEQ ID NO: 1745330 - RNA, 19 nt, Homo sapiens
  misc_RNA (1)...(19): siRNA sense strand
gcagugcuccagccucuug

SEQ ID NO: 1745331 - RNA, 19 nt, Homo sapiens
  misc_RNA (1)...(19): siRNA sense strand
caggcgauguccagaaaga

SEQ ID NO: 1745332 - RNA, 19 nt, Homo sapiens
  misc_RNA (1)...(19): siRNA sense strand
gaauagcgugcucaagaug

SEQ ID NO: 1745333 - RNA, 19 nt, Homo sapiens
  misc_RNA (1)...(19): siRNA sense strand
agaauagcgugcucaagau

SEQ ID NO: 1745334 - RNA, 19 nt, Homo sapiens
  misc_RNA (1)...(19): siRNA sense strand
gagcuggagccugagaaua

SEQ ID NO: 1745335 - RNA, 19 nt, Homo sapiens
  misc_RNA (1)...(19): siRNA sense strand
cgacagacgagcagcuauu

SEQ ID NO: 1745336 - RNA, 19 nt, Homo sapiens
  misc_RNA (1)...(19): siRNA sense strand
ccagaaagaaugcgugcuu

SEQ ID NO: 1745337 - RNA, 19 nt, Homo sapiens
  misc_RNA (1)...(19): siRNA sense strand
uggaacagcugcucuuggu

SEQ ID NO: 1745338 - RNA, 19 nt, Homo sapiens
  misc_RNA (1)...(19): siRNA sense strand
gggcaacguaucuggauga

SEQ ID NO: 1745339 - RNA, 19 nt, Homo sapiens
  misc_RNA (1)...(19): siRNA sense strand
acauacauuucgcgucauu

SEQ ID NO: 1745340 - RNA, 19 nt, Homo sapiens
  misc_RNA (1)...(19): siRNA sense strand
ucacccaucuugacuuguc

SEQ ID NO: 1745341 - RNA, 19 nt, Homo sapiens
  misc_RNA (1)...(19): siRNA sense strand
ugacagugcucugccaucu

SEQ ID NO: 1745342 - RNA, 19 nt, Homo sapiens
  misc_RNA (1)...(19): siRNA sense strand
gaaggagacccugcaguac

SEQ ID NO: 1745343 - RNA, 19 nt, Homo sapiens
  misc_RNA (1)...(19): siRNA sense strand
uagcagcguccucaccuaa

SEQ ID NO: 1745344 - RNA, 19 nt, Homo sapiens
  misc_RNA (1)...(19): siRNA sense strand
ccagugauaaugccauaga

SEQ ID NO: 1745345 - RNA, 19 nt, Homo sapiens
  misc_RNA (1)...(19): siRNA sense strand
aggagacccugcaguacuu

SEQ ID NO: 1745346 - RNA, 19 nt, Homo sapiens
  misc_RNA (1)...(19): siRNA sense strand
gagcugcuacugugcaaca

SEQ ID NO: 1745347 - RNA, 19 nt, Homo sapiens
  misc_RNA (1)...(19): siRNA sense strand
gccaagcggugggcaucuu

SEQ ID NO: 1745348 - RNA, 19 nt, Homo sapiens
  misc_RNA (1)...(19): siRNA sense strand
agcaggcgauguccagaaa

SEQ ID NO: 1745349 - RNA, 19 nt, Homo sapiens
  misc_RNA (1)...(19): siRNA sense strand
agcuggagccugagaauaa

SEQ ID NO: 1745350 - RNA, 19 nt, Homo sapiens
  misc_RNA (1)...(19): siRNA sense strand
gcugcagucugagcuggaa

SEQ ID NO: 1745351 - RNA, 19 nt, Homo sapiens
  misc_RNA (1)...(19): siRNA sense strand
aagaaugcgugcuuuuaaa

SEQ ID NO: 1745352 - RNA, 19 nt, Homo sapiens
  misc_RNA (1)...(19): siRNA sense strand
gugcugcaggccagugaua

SEQ ID NO: 1745353 - RNA, 19 nt, Homo sapiens
  misc_RNA (1)...(19): siRNA sense strand
uggaugaccugcgcagcaa

SEQ ID NO: 1745354 - RNA, 19 nt, Homo sapiens
  misc_RNA (1)...(19): siRNA sense strand
ggagcuggagccugagaau

SEQ ID NO: 1745355 - RNA, 19 nt, Homo sapiens
  misc_RNA (1)...(19): siRNA sense strand
gaucuugcugcucaugguu

SEQ ID NO: 1745356 - RNA, 19 nt, Homo sapiens
  misc_RNA (1)...(19): siRNA sense strand
gcgauguccagaaagaaug

SEQ ID NO: 1745357 - RNA, 19 nt, Homo sapiens
  misc_RNA (1)...(19): siRNA sense strand
auacauuucgcgucauuug

SEQ ID NO: 1745358 - RNA, 19 nt, Homo sapiens
  misc_RNA (1)...(19): siRNA sense strand
gacagacgagcagcuauuc

SEQ ID NO: 1745359 - RNA, 19 nt, Homo sapiens
  misc_RNA (1)...(19): siRNA sense strand
ggcgauguccagaaagaau

SEQ ID NO: 1745360 - RNA, 19 nt, Homo sapiens
  misc_RNA (1)...(19): siRNA sense strand
uuagcagcguccucaccua

SEQ ID NO: 1745361 - RNA, 19 nt, Homo sapiens
  misc_RNA (1)...(19): siRNA sense strand
cagcaggcgauguccagaa

SEQ ID NO: 1745362 - RNA, 19 nt, Homo sapiens
  misc_RNA (1)...(19): siRNA sense strand
uggagcaacuggcugaacu

SEQ ID NO: 1745363 - RNA, 19 nt, Homo sapiens
  misc_RNA (1)...(19): siRNA sense strand
ccacagugcugcagucuga

SEQ ID NO: 1745364 - RNA, 19 nt, Homo sapiens
  misc_RNA (1)...(19): siRNA sense strand
gagaauagcgugcucaaga

SEQ ID NO: 1745365 - RNA, 19 nt, Homo sapiens
  misc_RNA (1)...(19): siRNA sense strand
gcaccuggcucacaaggau

SEQ ID NO: 1745366 - RNA, 19 nt, Homo sapiens
  misc_RNA (1)...(19): siRNA sense strand
aauaaauggugccugcuua

SEQ ID NO: 1745367 - RNA, 19 nt, Homo sapiens
  misc_RNA (1)...(19): siRNA sense strand
gaacugacaagccagauuc

SEQ ID NO: 1745368 - RNA, 19 nt, Homo sapiens
  misc_RNA (1)...(19): siRNA sense strand
gagcuagccuucacugaca

SEQ ID NO: 1745369 - RNA, 19 nt, Homo sapiens
  misc_RNA (1)...(19): siRNA sense strand
agaaggagacccugcagua

SEQ ID NO: 1745370 - RNA, 19 nt, Homo sapiens
  misc_RNA (1)...(19): siRNA sense strand
ggccagugauaaugccaua

SEQ ID NO: 1745371 - RNA, 19 nt, Homo sapiens
  misc_RNA (1)...(19): siRNA sense strand
gagcuggaauccuguaagg

SEQ ID NO: 1745372 - RNA, 19 nt, Homo sapiens
  misc_RNA (1)...(19): siRNA sense strand
gaauaaauggugccugcuu

SEQ ID NO: 1745373 - RNA, 19 nt, Homo sapiens
  misc_RNA (1)...(19): siRNA sense strand
gcuggagccugagaauaaa

SEQ ID NO: 1745374 - RNA, 19 nt, Homo sapiens
  misc_RNA (1)...(19): siRNA sense strand
ggacgaggccugucugacu

SEQ ID NO: 1745375 - RNA, 19 nt, Homo sapiens
  misc_RNA (1)...(19): siRNA sense strand
gcagugcuccagccucuug

SEQ ID NO: 1745376 - RNA, 19 nt, Homo sapiens
  misc_RNA (1)...(19): siRNA sense strand
caggcgauguccagaaaga

SEQ ID NO: 1745377 - RNA, 19 nt, Homo sapiens
  misc_RNA (1)...(19): siRNA sense strand
gaauagcgugcucaagaug

SEQ ID NO: 1745378 - RNA, 19 nt, Homo sapiens
  misc_RNA (1)...(19): siRNA sense strand
agaauagcgugcucaagau

SEQ ID NO: 1745379 - RNA, 19 nt, Homo sapiens
  misc_RNA (1)...(19): siRNA sense strand
gagcuggagccugagaaua

SEQ ID NO: 1745380 - RNA, 19 nt, Homo sapiens
  misc_RNA (1)...(19): siRNA sense strand
cgacagacgagcagcuauu

SEQ ID NO: 1745381 - RNA, 19 nt, Homo sapiens
  misc_RNA (1)...(19): siRNA sense strand
ggaacugacaagccagauu

SEQ ID NO: 1745382 - RNA, 19 nt, Homo sapiens
  misc_RNA (1)...(19): siRNA sense strand
ccagaaagaaugcgugcuu

SEQ ID NO: 1745383 - RNA, 19 nt, Homo sapiens
  misc_RNA (1)...(19): siRNA sense strand
aggaugugcugcucaaaga

SEQ ID NO: 1745384 - RNA, 19 nt, Homo sapiens
  misc_RNA (1)...(19): siRNA sense strand
cccgaaacuucuccaacua

SEQ ID NO: 1745385 - RNA, 19 nt, Homo sapiens
  misc_RNA (1)...(19): siRNA sense strand
uggaacagcugcucuuggu

SEQ ID NO: 1745386 - RNA, 19 nt, Homo sapiens
  misc_RNA (1)...(19): siRNA sense strand
gggcaacguaucuggauga

SEQ ID NO: 1745387 - RNA, 19 nt, Homo sapiens
  misc_RNA (1)...(19): siRNA sense strand
ggagcucugugcccguuuc

SEQ ID NO: 1745388 - RNA, 19 nt, Homo sapiens
  misc_RNA (1)...(19): siRNA sense strand
acauacauuucgcgucauu

SEQ ID NO: 1745389 - RNA, 19 nt, Homo sapiens
  misc_RNA (1)...(19): siRNA sense strand
ucacccaucuugacuuguc

SEQ ID NO: 1745390 - RNA, 19 nt, Homo sapiens
  misc_RNA (1)...(19): siRNA sense strand
ugacagugcucugccaucu

SEQ ID NO: 1745391 - RNA, 19 nt, Homo sapiens
  misc_RNA (1)...(19): siRNA sense strand
ccucaucacccgaaacuuc

SEQ ID NO: 1745392 - RNA, 19 nt, Homo sapiens
  misc_RNA (1)...(19): siRNA sense strand
gaaggagacccugcaguac

SEQ ID NO: 1745393 - RNA, 19 nt, Homo sapiens
  misc_RNA (1)...(19): siRNA sense strand
uagcagcguccucaccuaa

SEQ ID NO: 1745394 - RNA, 19 nt, Homo sapiens
  misc_RNA (1)...(19): siRNA sense strand
ccagugauaaugccauaga

SEQ ID NO: 1745395 - RNA, 19 nt, Homo sapiens
  misc_RNA (1)...(19): siRNA sense strand
uggaugagcggaacuuuca

SEQ ID NO: 1745396 - RNA, 19 nt, Homo sapiens
  misc_RNA (1)...(19): siRNA sense strand
aggagacccugcaguacuu

SEQ ID NO: 1745397 - RNA, 19 nt, Homo sapiens
  misc_RNA (1)...(19): siRNA sense strand
cauuaccgcuccugucucu

SEQ ID NO: 1745398 - RNA, 19 nt, Homo sapiens
  misc_RNA (1)...(19): siRNA sense strand
gagcugcuacugugcaaca

SEQ ID NO: 1745399 - RNA, 19 nt, Homo sapiens
  misc_RNA (1)...(19): siRNA sense strand
cgaaacuucuccaacuacu

SEQ ID NO: 1745400 - RNA, 19 nt, Homo sapiens
  misc_RNA (1)...(19): siRNA sense strand
gaggaugugcugcucaaag

SEQ ID NO: 1745401 - RNA, 19 nt, Homo sapiens
  misc_RNA (1)...(19): siRNA sense strand
gccaagcggugggcaucuu

SEQ ID NO: 1745402 - RNA, 19 nt, Homo sapiens
  misc_RNA (1)...(19): siRNA sense strand
agcaggcgauguccagaaa

SEQ ID NO: 1745403 - RNA, 19 nt, Homo sapiens
  misc_RNA (1)...(19): siRNA sense strand
agcuggagccugagaauaa

SEQ ID NO: 1745404 - RNA, 19 nt, Homo sapiens
  misc_RNA (1)...(19): siRNA sense strand
aaacuucuccaacuacucu

SEQ ID NO: 1745405 - RNA, 19 nt, Homo sapiens
  misc_RNA (1)...(19): siRNA sense strand
gcugcagucugagcuggaa

SEQ ID NO: 1745406 - RNA, 19 nt, Homo sapiens
  misc_RNA (1)...(19): siRNA sense strand
aagaaugcgugcuuuuaaa

SEQ ID NO: 1745407 - RNA, 19 nt, Homo sapiens
  misc_RNA (1)...(19): siRNA sense strand
ggaugaguccgugcuggaa

SEQ ID NO: 1745408 - RNA, 19 nt, Homo sapiens
  misc_RNA (1)...(19): siRNA sense strand
gugcugcaggccagugaua

SEQ ID NO: 1745409 - RNA, 19 nt, Homo sapiens
  misc_RNA (1)...(19): siRNA sense strand
uggaugaccugcgcagcaa

SEQ ID NO: 1745410 - RNA, 19 nt, Homo sapiens
  misc_RNA (1)...(19): siRNA sense strand
gaucuugcugcucaugguu

SEQ ID NO: 1745411 - RNA, 19 nt, Homo sapiens
  misc_RNA (1)...(19): siRNA sense strand
ggagcuggagccugagaau

SEQ ID NO: 1745412 - RNA, 19 nt, Homo sapiens
  misc_RNA (1)...(19): siRNA sense strand
uuaccgcuccugucucuug

SEQ ID NO: 1745413 - RNA, 19 nt, Homo sapiens
  misc_RNA (1)...(19): siRNA sense strand
ggugaagacgucagaagag

SEQ ID NO: 1745414 - RNA, 19 nt, Homo sapiens
  misc_RNA (1)...(19): siRNA sense strand
gcgauguccagaaagaaug

SEQ ID NO: 1745415 - RNA, 19 nt, Homo sapiens
  misc_RNA (1)...(19): siRNA sense strand
auacauuucgcgucauuug

SEQ ID NO: 1745416 - RNA, 19 nt, Homo sapiens
  misc_RNA (1)...(19): siRNA sense strand
gacagacgagcagcuauuc

SEQ ID NO: 1745417 - RNA, 19 nt, Homo sapiens
  misc_RNA (1)...(19): siRNA sense strand
gaaggugaagacgucagaa

SEQ ID NO: 1745418 - RNA, 19 nt, Homo sapiens
  misc_RNA (1)...(19): siRNA sense strand
uuagcagcguccucaccua

SEQ ID NO: 1745419 - RNA, 19 nt, Homo sapiens
  misc_RNA (1)...(19): siRNA sense strand
ggcuagagcgagagcagaa

SEQ ID NO: 1745420 - RNA, 19 nt, Homo sapiens
  misc_RNA (1)...(19): siRNA sense strand
ggcgauguccagaaagaau

SEQ ID NO: 1745421 - RNA, 19 nt, Homo sapiens
  misc_RNA (1)...(19): siRNA sense strand
cagcaggcgauguccagaa

SEQ ID NO: 1745422 - RNA, 19 nt, Homo sapiens
  misc_RNA (1)...(19): siRNA sense strand
uggagcaacuggcugaacu

SEQ ID NO: 1745423 - RNA, 19 nt, Homo sapiens
  misc_RNA (1)...(19): siRNA sense strand
gagaggagcucaucaagaa

SEQ ID NO: 1745424 - RNA, 19 nt, Homo sapiens
  misc_RNA (1)...(19): siRNA sense strand
gaagagaaaucaagcaaag

SEQ ID NO: 1745425 - RNA, 19 nt, Homo sapiens
  misc_RNA (1)...(19): siRNA sense strand
ccaaagaccugccguggaa

SEQ ID NO: 1745426 - RNA, 19 nt, Homo sapiens
  misc_RNA (1)...(19): siRNA sense strand
aagcaaagauugacaagaa

SEQ ID NO: 1745427 - RNA, 19 nt, Homo sapiens
  misc_RNA (1)...(19): siRNA sense strand
cagaaggacugaugaagaa

SEQ ID NO: 1745428 - RNA, 19 nt, Homo sapiens
  misc_RNA (1)...(19): siRNA sense strand
gaucauaaauucugaacuc

SEQ ID NO: 1745429 - RNA, 19 nt, Homo sapiens
  misc_RNA (1)...(19): siRNA sense strand
ggaggaggcuuggagcuuu

SEQ ID NO: 1745430 - RNA, 19 nt, Homo sapiens
  misc_RNA (1)...(19): siRNA sense strand
gaagaaagaagagaaauca

SEQ ID NO: 1745431 - RNA, 19 nt, Homo sapiens
  misc_RNA (1)...(19): siRNA sense strand
cgucagcgcuggagaagaa

SEQ ID NO: 1745432 - RNA, 19 nt, Homo sapiens
  misc_RNA (1)...(19): siRNA sense strand
uaaagggucuccaaagaag

SEQ ID NO: 1745433 - RNA, 19 nt, Homo sapiens
  misc_RNA (1)...(19): siRNA sense strand
guaaugaaauggagguaca

SEQ ID NO: 1745434 - RNA, 19 nt, Homo sapiens
  misc_RNA (1)...(19): siRNA sense strand
cugaacgacuccauuauuu

SEQ ID NO: 1745435 - RNA, 19 nt, Homo sapiens
  misc_RNA (1)...(19): siRNA sense strand
caaagaagcggcuggaugu

SEQ ID NO: 1745436 - RNA, 19 nt, Homo sapiens
  misc_RNA (1)...(19): siRNA sense strand
gaaaguaaagggucuccaa

SEQ ID NO: 1745437 - RNA, 19 nt, Homo sapiens
  misc_RNA (1)...(19): siRNA sense strand
gagcuggagagaagaaaua

SEQ ID NO: 1745438 - RNA, 19 nt, Homo sapiens
  misc_RNA (1)...(19): siRNA sense strand
guaaagggucuccaaagaa

SEQ ID NO: 1745439 - RNA, 19 nt, Homo sapiens
  misc_RNA (1)...(19): siRNA sense strand
aggagaaccugaucauaaa

SEQ ID NO: 1745440 - RNA, 19 nt, Homo sapiens
  misc_RNA (1)...(19): siRNA sense strand
gcgcugaacgacuccauua

SEQ ID NO: 1745441 - RNA, 19 nt, Homo sapiens
  misc_RNA (1)...(19): siRNA sense strand
uggaagagcuggagagaag

SEQ ID NO: 1745442 - RNA, 19 nt, Homo sapiens
  misc_RNA (1)...(19): siRNA sense strand
gauaaggcagcaauucgua

SEQ ID NO: 1745443 - RNA, 19 nt, Homo sapiens
  misc_RNA (1)...(19): siRNA sense strand
aaggagaaccugaucauaa

SEQ ID NO: 1745444 - RNA, 19 nt, Homo sapiens
  misc_RNA (1)...(19): siRNA sense strand
gaacgacuccauuauuucu

SEQ ID NO: 1745445 - RNA, 19 nt, Homo sapiens
  misc_RNA (1)...(19): siRNA sense strand
gcaaacaggaacuagaaga

SEQ ID NO: 1745446 - RNA, 19 nt, Homo sapiens
  misc_RNA (1)...(19): siRNA sense strand
cuagaagaccggaacauuu

SEQ ID NO: 1745447 - RNA, 19 nt, Homo sapiens
  misc_RNA (1)...(19): siRNA sense strand
aguaaagggucuccaaaga

SEQ ID NO: 1745448 - RNA, 19 nt, Homo sapiens
  misc_RNA (1)...(19): siRNA sense strand
gagacccacuguugaugaa

SEQ ID NO: 1745449 - RNA, 19 nt, Homo sapiens
  misc_RNA (1)...(19): siRNA sense strand
gagaaccugaucauaaauu

SEQ ID NO: 1745450 - RNA, 19 nt, Homo sapiens
  misc_RNA (1)...(19): siRNA sense strand
gaacaaggagaaccugauc

SEQ ID NO: 1745451 - RNA, 19 nt, Homo sapiens
  misc_RNA (1)...(19): siRNA sense strand
gcugaacgacuccauuauu

SEQ ID NO: 1745452 - RNA, 19 nt, Homo sapiens
  misc_RNA (1)...(19): siRNA sense strand
guccucagcugcccacuug

SEQ ID NO: 1745453 - RNA, 19 nt, Homo sapiens
  misc_RNA (1)...(19): siRNA sense strand
gacccacuguugaugaauu

SEQ ID NO: 1745454 - RNA, 19 nt, Homo sapiens
  misc_RNA (1)...(19): siRNA sense strand
gaacugccgcuaaggaauc

SEQ ID NO: 1745455 - RNA, 19 nt, Homo sapiens
  misc_RNA (1)...(19): siRNA sense strand
ggcagcagaucgagaugaa

SEQ ID NO: 1745456 - RNA, 19 nt, Homo sapiens
  misc_RNA (1)...(19): siRNA sense strand
acaaaggaaugaucagaca

SEQ ID NO: 1745457 - RNA, 19 nt, Homo sapiens
  misc_RNA (1)...(19): siRNA sense strand
gaagagcuggagagaagaa

SEQ ID NO: 1745458 - RNA, 19 nt, Homo sapiens
  misc_RNA (1)...(19): siRNA sense strand
gcaggaagaaagaagagaa

SEQ ID NO: 1745459 - RNA, 19 nt, Homo sapiens
  misc_RNA (1)...(19): siRNA sense strand
caaaagcgcaggacuauga

SEQ ID NO: 1745460 - RNA, 19 nt, Homo sapiens
  misc_RNA (1)...(19): siRNA sense strand
aaucagagacccacuguug

SEQ ID NO: 1745461 - RNA, 19 nt, Homo sapiens
  misc_RNA (1)...(19): siRNA sense strand
ggaagaaagaagagaaauc

SEQ ID NO: 1745462 - RNA, 19 nt, Homo sapiens
  misc_RNA (1)...(19): siRNA sense strand
ccagaaggacugaugaaga

SEQ ID NO: 1745463 - RNA, 19 nt, Homo sapiens
  misc_RNA (1)...(19): siRNA sense strand
gaggaggcuuggagcuuug

SEQ ID NO: 1745464 - RNA, 19 nt, Homo sapiens
  misc_RNA (1)...(19): siRNA sense strand
gcagauaaggcagcaauuc

SEQ ID NO: 1745465 - RNA, 19 nt, Homo sapiens
  misc_RNA (1)...(19): siRNA sense strand
gaacacugccacggaaaug

SEQ ID NO: 1745466 - RNA, 19 nt, Homo sapiens
  misc_RNA (1)...(19): siRNA sense strand
acaagaaagcuuaaucaga

SEQ ID NO: 1745467 - RNA, 19 nt, Homo sapiens
  misc_RNA (1)...(19): siRNA sense strand
ggcagcaauucguaaagaa

SEQ ID NO: 1745468 - RNA, 19 nt, Homo sapiens
  misc_RNA (1)...(19): siRNA sense strand
caaggagaaccugaucaua

SEQ ID NO: 1745469 - RNA, 19 nt, Homo sapiens
  misc_RNA (1)...(19): siRNA sense strand
guugaugaauuaagagaca

SEQ ID NO: 1745470 - RNA, 19 nt, Homo sapiens
  misc_RNA (1)...(19): siRNA sense strand
ugacaagaaagcuuaauca

SEQ ID NO: 1745471 - RNA, 19 nt, Homo sapiens
  misc_RNA (1)...(19): siRNA sense strand
agacagagcaggaagaaag

SEQ ID NO: 1745472 - RNA, 19 nt, Homo sapiens
  misc_RNA (1)...(19): siRNA sense strand
uaaggaaucugaggagaac

SEQ ID NO: 1745473 - RNA, 19 nt, Homo sapiens
  misc_RNA (1)...(19): siRNA sense strand
ucaaggaagagaaaguaaa

SEQ ID NO: 1745474 - RNA, 19 nt, Homo sapiens
  misc_RNA (1)...(19): siRNA sense strand
caacgucagcgcuggagaa

SEQ ID NO: 1745475 - RNA, 19 nt, Homo sapiens
  misc_RNA (1)...(19): siRNA sense strand
caaggaagagaaaguaaag

SEQ ID NO: 1745476 - RNA, 19 nt, Homo sapiens
  misc_RNA (1)...(19): siRNA sense strand
agaugaagcuuuccaaacg

SEQ ID NO: 1745477 - RNA, 19 nt, Homo sapiens
  misc_RNA (1)...(19): siRNA sense strand
ugauacgauucagugauua

SEQ ID NO: 1745478 - RNA, 19 nt, Homo sapiens
  misc_RNA (1)...(19): siRNA sense strand
gcaaagauugacaagaaag

SEQ ID NO: 1745479 - RNA, 19 nt, Homo sapiens
  misc_RNA (1)...(19): siRNA sense strand
ggacugaugaagaaagaca

SEQ ID NO: 1745480 - RNA, 19 nt, Homo sapiens
  misc_RNA (1)...(19): siRNA sense strand
gaaauggagguacaugcau

SEQ ID NO: 1745481 - RNA, 19 nt, Homo sapiens
  misc_RNA (1)...(19): siRNA sense strand
ugaaacaaaggaaugauca

SEQ ID NO: 1745482 - RNA, 19 nt, Homo sapiens
  misc_RNA (1)...(19): siRNA sense strand
gagaugaagcuuuccaaac

SEQ ID NO: 1745483 - RNA, 19 nt, Homo sapiens
  misc_RNA (1)...(19): siRNA sense strand
gaucuucaaacccuggaaa

SEQ ID NO: 1745484 - RNA, 19 nt, Homo sapiens
  misc_RNA (1)...(19): siRNA sense strand
uaaggcagcaauucguaaa

SEQ ID NO: 1745485 - RNA, 19 nt, Homo sapiens
  misc_RNA (1)...(19): siRNA sense strand
acccacuguugaugaauua

SEQ ID NO: 1745486 - RNA, 19 nt, Homo sapiens
  misc_RNA (1)...(19): siRNA sense strand
aagcaaacaggaacuagaa

SEQ ID NO: 1745487 - RNA, 19 nt, Homo sapiens
  misc_RNA (1)...(19): siRNA sense strand
caagcaaacaggaacuaga

SEQ ID NO: 1745488 - RNA, 19 nt, Homo sapiens
  misc_RNA (1)...(19): siRNA sense strand
gaaccacccacucccaagu

SEQ ID NO: 1745489 - RNA, 19 nt, Homo sapiens
  misc_RNA (1)...(19): siRNA sense strand
uaucuggucucagggauuc

SEQ ID NO: 1745490 - RNA, 19 nt, Homo sapiens
  misc_RNA (1)...(19): siRNA sense strand
aaacaaaggaaugaucaga

SEQ ID NO: 1745491 - RNA, 19 nt, Homo sapiens
  misc_RNA (1)...(19): siRNA sense strand
gaaggacugaugaagaaag

SEQ ID NO: 1745492 - RNA, 19 nt, Homo sapiens
  misc_RNA (1)...(19): siRNA sense strand
gcgaacugccgcuaaggaa

SEQ ID NO: 1745493 - RNA, 19 nt, Homo sapiens
  misc_RNA (1)...(19): siRNA sense strand
cgagaggagcucaucaaga

SEQ ID NO: 1745494 - RNA, 19 nt, Homo sapiens
  misc_RNA (1)...(19): siRNA sense strand
ggaacacugccacggaaau

SEQ ID NO: 1745495 - RNA, 19 nt, Homo sapiens
  misc_RNA (1)...(19): siRNA sense strand
agaaccugaucauaaauuc

SEQ ID NO: 1745496 - RNA, 19 nt, Homo sapiens
  misc_RNA (1)...(19): siRNA sense strand
uuccaagccuccagcauga

SEQ ID NO: 1745497 - RNA, 19 nt, Homo sapiens
  misc_RNA (1)...(19): siRNA sense strand
ugacaggagggcagacaaa

SEQ ID NO: 1745498 - RNA, 19 nt, Homo sapiens
  misc_RNA (1)...(19): siRNA sense strand
agauugacaagaaagcuua

SEQ ID NO: 1745499 - RNA, 19 nt, Homo sapiens
  misc_RNA (1)...(19): siRNA sense strand
gaacuagaagaccggaaca

SEQ ID NO: 1745500 - RNA, 19 nt, Homo sapiens
  misc_RNA (1)...(19): siRNA sense strand
uaaggaaccggccaagcaa

SEQ ID NO: 1745501 - RNA, 19 nt, Homo sapiens
  misc_RNA (1)...(19): siRNA sense strand
aaaguaaagggucuccaaa

SEQ ID NO: 1745502 - RNA, 19 nt, Homo sapiens
  misc_RNA (1)...(19): siRNA sense strand
cgagaugaagcuuuccaaa

SEQ ID NO: 1745503 - RNA, 19 nt, Homo sapiens
  misc_RNA (1)...(19): siRNA sense strand
aaggacugaugaagaaaga

SEQ ID NO: 1745504 - RNA, 19 nt, Homo sapiens
  misc_RNA (1)...(19): siRNA sense strand
cuaaggaaccggccaagca

SEQ ID NO: 1745505 - RNA, 19 nt, Homo sapiens
  misc_RNA (1)...(19): siRNA sense strand
ggagaaccugaucauaaau

SEQ ID NO: 1745506 - RNA, 19 nt, Homo sapiens
  misc_RNA (1)...(19): siRNA sense strand
ggacaguuuucaaggaaga

SEQ ID NO: 1745507 - RNA, 19 nt, Homo sapiens
  misc_RNA (1)...(19): siRNA sense strand
caagauuccacaggccaua

SEQ ID NO: 1745508 - RNA, 19 nt, Homo sapiens
  misc_RNA (1)...(19): siRNA sense strand
aagaaagcuuaaucagaga

SEQ ID NO: 1745509 - RNA, 19 nt, Homo sapiens
  misc_RNA (1)...(19): siRNA sense strand
agaaagaagagaaaucaag

SEQ ID NO: 1745510 - RNA, 19 nt, Homo sapiens
  misc_RNA (1)...(19): siRNA sense strand
aaaggaaugaucagacaga

SEQ ID NO: 1745511 - RNA, 19 nt, Homo sapiens
  misc_RNA (1)...(19): siRNA sense strand
cuaaggaaucugaggagaa

SEQ ID NO: 1745512 - RNA, 19 nt, Homo sapiens
  misc_RNA (1)...(19): siRNA sense strand
cacuguugaugaauuaaga

SEQ ID NO: 1745513 - RNA, 19 nt, Homo sapiens
  misc_RNA (1)...(19): siRNA sense strand
agagaaaucaagcaaagau

SEQ ID NO: 1745514 - RNA, 19 nt, Homo sapiens
  misc_RNA (1)...(19): siRNA sense strand
caggaagaaagaagagaaa

SEQ ID NO: 1745515 - RNA, 19 nt, Homo sapiens
  misc_RNA (1)...(19): siRNA sense strand
gacagagcaggaagaaaga

SEQ ID NO: 1745516 - RNA, 19 nt, Homo sapiens
  misc_RNA (1)...(19): siRNA sense strand
agaucgagaugaagcuuuc

SEQ ID NO: 1745517 - RNA, 19 nt, Homo sapiens
  misc_RNA (1)...(19): siRNA sense strand
ucagagacccacuguugau

SEQ ID NO: 1745518 - RNA, 19 nt, Homo sapiens
  misc_RNA (1)...(19): siRNA sense strand
agcaaagauugacaagaaa

SEQ ID NO: 1745519 - RNA, 19 nt, Homo sapiens
  misc_RNA (1)...(19): siRNA sense strand
acucaaagacgacuugcuu

SEQ ID NO: 1745520 - RNA, 19 nt, Homo sapiens
  misc_RNA (1)...(19): siRNA sense strand
aggcagcaauucguaaaga

SEQ ID NO: 1745521 - RNA, 19 nt, Homo sapiens
  misc_RNA (1)...(19): siRNA sense strand
uagaagaccggaacauuuu

SEQ ID NO: 1745522 - RNA, 19 nt, Homo sapiens
  misc_RNA (1)...(19): siRNA sense strand
aaucugaggagaacaagga

SEQ ID NO: 1745523 - RNA, 19 nt, Homo sapiens
  misc_RNA (1)...(19): siRNA sense strand
gagaggagcucaucaagaa

SEQ ID NO: 1745524 - RNA, 19 nt, Homo sapiens
  misc_RNA (1)...(19): siRNA sense strand
gaagagaaaucaagcaaag

SEQ ID NO: 1745525 - RNA, 19 nt, Homo sapiens
  misc_RNA (1)...(19): siRNA sense strand
ccaaagaccugccguggaa

SEQ ID NO: 1745526 - RNA, 19 nt, Homo sapiens
  misc_RNA (1)...(19): siRNA sense strand
aagcaaagauugacaagaa

SEQ ID NO: 1745527 - RNA, 19 nt, Homo sapiens
  misc_RNA (1)...(19): siRNA sense strand
cagaaggacugaugaagaa

SEQ ID NO: 1745528 - RNA, 19 nt, Homo sapiens
  misc_RNA (1)...(19): siRNA sense strand
gaucauaaauucugaacuc

SEQ ID NO: 1745529 - RNA, 19 nt, Homo sapiens
  misc_RNA (1)...(19): siRNA sense strand
ggaggaggcuuggagcuuu

SEQ ID NO: 1745530 - RNA, 19 nt, Homo sapiens
  misc_RNA (1)...(19): siRNA sense strand
gaagaaagaagagaaauca

SEQ ID NO: 1745531 - RNA, 19 nt, Homo sapiens
  misc_RNA (1)...(19): siRNA sense strand
cgucagcgcuggagaagaa

SEQ ID NO: 1745532 - RNA, 19 nt, Homo sapiens
  misc_RNA (1)...(19): siRNA sense strand
uaaagggucuccaaagaag

SEQ ID NO: 1745533 - RNA, 19 nt, Homo sapiens
  misc_RNA (1)...(19): siRNA sense strand
guaaugaaauggagguaca

SEQ ID NO: 1745534 - RNA, 19 nt, Homo sapiens
  misc_RNA (1)...(19): siRNA sense strand
cugaacgacuccauuauuu

SEQ ID NO: 1745535 - RNA, 19 nt, Homo sapiens
  misc_RNA (1)...(19): siRNA sense strand
caaagaagcggcuggaugu

SEQ ID NO: 1745536 - RNA, 19 nt, Homo sapiens
  misc_RNA (1)...(19): siRNA sense strand
gaaaguaaagggucuccaa

SEQ ID NO: 1745537 - RNA, 19 nt, Homo sapiens
  misc_RNA (1)...(19): siRNA sense strand
gagcuggagagaagaaaua

SEQ ID NO: 1745538 - RNA, 19 nt, Homo sapiens
  misc_RNA (1)...(19): siRNA sense strand
guaaagggucuccaaagaa

SEQ ID NO: 1745539 - RNA, 19 nt, Homo sapiens
  misc_RNA (1)...(19): siRNA sense strand
aggagaaccugaucauaaa

SEQ ID NO: 1745540 - RNA, 19 nt, Homo sapiens
  misc_RNA (1)...(19): siRNA sense strand
gcgcugaacgacuccauua

SEQ ID NO: 1745541 - RNA, 19 nt, Homo sapiens
  misc_RNA (1)...(19): siRNA sense strand
uggaagagcuggagagaag

SEQ ID NO: 1745542 - RNA, 19 nt, Homo sapiens
  misc_RNA (1)...(19): siRNA sense strand
gauaaggcagcaauucgua

SEQ ID NO: 1745543 - RNA, 19 nt, Homo sapiens
  misc_RNA (1)...(19): siRNA sense strand
aaggagaaccugaucauaa

SEQ ID NO: 1745544 - RNA, 19 nt, Homo sapiens
  misc_RNA (1)...(19): siRNA sense strand
gaacgacuccauuauuucu

SEQ ID NO: 1745545 - RNA, 19 nt, Homo sapiens
  misc_RNA (1)...(19): siRNA sense strand
gcaaacaggaacuagaaga

SEQ ID NO: 1745546 - RNA, 19 nt, Homo sapiens
  misc_RNA (1)...(19): siRNA sense strand
cuagaagaccggaacauuu

SEQ ID NO: 1745547 - RNA, 19 nt, Homo sapiens
  misc_RNA (1)...(19): siRNA sense strand
aguaaagggucuccaaaga

SEQ ID NO: 1745548 - RNA, 19 nt, Homo sapiens
  misc_RNA (1)...(19): siRNA sense strand
gagacccacuguugaugaa

SEQ ID NO: 1745549 - RNA, 19 nt, Homo sapiens
  misc_RNA (1)...(19): siRNA sense strand
gagaaccugaucauaaauu

SEQ ID NO: 1745550 - RNA, 19 nt, Homo sapiens
  misc_RNA (1)...(19): siRNA sense strand
gaacaaggagaaccugauc

SEQ ID NO: 1745551 - RNA, 19 nt, Homo sapiens
  misc_RNA (1)...(19): siRNA sense strand
gcugaacgacuccauuauu

SEQ ID NO: 1745552 - RNA, 19 nt, Homo sapiens
  misc_RNA (1)...(19): siRNA sense strand
guccucagcugcccacuug

SEQ ID NO: 1745553 - RNA, 19 nt, Homo sapiens
  misc_RNA (1)...(19): siRNA sense strand
gacccacuguugaugaauu

SEQ ID NO: 1745554 - RNA, 19 nt, Homo sapiens
  misc_RNA (1)...(19): siRNA sense strand
gaacugccgcuaaggaauc

SEQ ID NO: 1745555 - RNA, 19 nt, Homo sapiens
  misc_RNA (1)...(19): siRNA sense strand
ggcagcagaucgagaugaa

SEQ ID NO: 1745556 - RNA, 19 nt, Homo sapiens
  misc_RNA (1)...(19): siRNA sense strand
acaaaggaaugaucagaca

SEQ ID NO: 1745557 - RNA, 19 nt, Homo sapiens
  misc_RNA (1)...(19): siRNA sense strand
gaagagcuggagagaagaa

SEQ ID NO: 1745558 - RNA, 19 nt, Homo sapiens
  misc_RNA (1)...(19): siRNA sense strand
gcaggaagaaagaagagaa

SEQ ID NO: 1745559 - RNA, 19 nt, Homo sapiens
  misc_RNA (1)...(19): siRNA sense strand
caaaagcgcaggacuauga

SEQ ID NO: 1745560 - RNA, 19 nt, Homo sapiens
  misc_RNA (1)...(19): siRNA sense strand
aaucagagacccacuguug

SEQ ID NO: 1745561 - RNA, 19 nt, Homo sapiens
  misc_RNA (1)...(19): siRNA sense strand
ggaagaaagaagagaaauc

SEQ ID NO: 1745562 - RNA, 19 nt, Homo sapiens
  misc_RNA (1)...(19): siRNA sense strand
ccagaaggacugaugaaga

SEQ ID NO: 1745563 - RNA, 19 nt, Homo sapiens
  misc_RNA (1)...(19): siRNA sense strand
gaggaggcuuggagcuuug

SEQ ID NO: 1745564 - RNA, 19 nt, Homo sapiens
  misc_RNA (1)...(19): siRNA sense strand
gcagauaaggcagcaauuc

SEQ ID NO: 1745565 - RNA, 19 nt, Homo sapiens
  misc_RNA (1)...(19): siRNA sense strand
gaacacugccacggaaaug

SEQ ID NO: 1745566 - RNA, 19 nt, Homo sapiens
  misc_RNA (1)...(19): siRNA sense strand
acaagaaagcuuaaucaga

SEQ ID NO: 1745567 - RNA, 19 nt, Homo sapiens
  misc_RNA (1)...(19): siRNA sense strand
ggcagcaauucguaaagaa

SEQ ID NO: 1745568 - RNA, 19 nt, Homo sapiens
  misc_RNA (1)...(19): siRNA sense strand
caaggagaaccugaucaua

SEQ ID NO: 1745569 - RNA, 19 nt, Homo sapiens
  misc_RNA (1)...(19): siRNA sense strand
guugaugaauuaagagaca

SEQ ID NO: 1745570 - RNA, 19 nt, Homo sapiens
  misc_RNA (1)...(19): siRNA sense strand
ugacaagaaagcuuaauca

SEQ ID NO: 1745571 - RNA, 19 nt, Homo sapiens
  misc_RNA (1)...(19): siRNA sense strand
agacagagcaggaagaaag

SEQ ID NO: 1745572 - RNA, 19 nt, Homo sapiens
  misc_RNA (1)...(19): siRNA sense strand
uaaggaaucugaggagaac

SEQ ID NO: 1745573 - RNA, 19 nt, Homo sapiens
  misc_RNA (1)...(19): siRNA sense strand
ucaaggaagagaaaguaaa

SEQ ID NO: 1745574 - RNA, 19 nt, Homo sapiens
  misc_RNA (1)...(19): siRNA sense strand
caacgucagcgcuggagaa

SEQ ID NO: 1745575 - RNA, 19 nt, Homo sapiens
  misc_RNA (1)...(19): siRNA sense strand
caaggaagagaaaguaaag

SEQ ID NO: 1745576 - RNA, 19 nt, Homo sapiens
  misc_RNA (1)...(19): siRNA sense strand
agaugaagcuuuccaaacg

SEQ ID NO: 1745577 - RNA, 19 nt, Homo sapiens
  misc_RNA (1)...(19): siRNA sense strand
ugauacgauucagugauua

SEQ ID NO: 1745578 - RNA, 19 nt, Homo sapiens
  misc_RNA (1)...(19): siRNA sense strand
gcaaagauugacaagaaag

SEQ ID NO: 1745579 - RNA, 19 nt, Homo sapiens
  misc_RNA (1)...(19): siRNA sense strand
ggacugaugaagaaagaca

SEQ ID NO: 1745580 - RNA, 19 nt, Homo sapiens
  misc_RNA (1)...(19): siRNA sense strand
gaaauggagguacaugcau

SEQ ID NO: 1745581 - RNA, 19 nt, Homo sapiens
  misc_RNA (1)...(19): siRNA sense strand
ugaaacaaaggaaugauca

SEQ ID NO: 1745582 - RNA, 19 nt, Homo sapiens
  misc_RNA (1)...(19): siRNA sense strand
gagaugaagcuuuccaaac

SEQ ID NO: 1745583 - RNA, 19 nt, Homo sapiens
  misc_RNA (1)...(19): siRNA sense strand
gaucuucaaacccuggaaa

SEQ ID NO: 1745584 - RNA, 19 nt, Homo sapiens
  misc_RNA (1)...(19): siRNA sense strand
uaaggcagcaauucguaaa

SEQ ID NO: 1745585 - RNA, 19 nt, Homo sapiens
  misc_RNA (1)...(19): siRNA sense strand
acccacuguugaugaauua

SEQ ID NO: 1745586 - RNA, 19 nt, Homo sapiens
  misc_RNA (1)...(19): siRNA sense strand
aagcaaacaggaacuagaa

SEQ ID NO: 1745587 - RNA, 19 nt, Homo sapiens
  misc_RNA (1)...(19): siRNA sense strand
caagcaaacaggaacuaga

SEQ ID NO: 1745588 - RNA, 19 nt, Homo sapiens
  misc_RNA (1)...(19): siRNA sense strand
gaaccacccacucccaagu

SEQ ID NO: 1745589 - RNA, 19 nt, Homo sapiens
  misc_RNA (1)...(19): siRNA sense strand
uaucuggucucagggauuc

SEQ ID NO: 1745590 - RNA, 19 nt, Homo sapiens
  misc_RNA (1)...(19): siRNA sense strand
aaacaaaggaaugaucaga

SEQ ID NO: 1745591 - RNA, 19 nt, Homo sapiens
  misc_RNA (1)...(19): siRNA sense strand
gaaggacugaugaagaaag

SEQ ID NO: 1745592 - RNA, 19 nt, Homo sapiens
  misc_RNA (1)...(19): siRNA sense strand
gcgaacugccgcuaaggaa

SEQ ID NO: 1745593 - RNA, 19 nt, Homo sapiens
  misc_RNA (1)...(19): siRNA sense strand
cgagaggagcucaucaaga

SEQ ID NO: 1745594 - RNA, 19 nt, Homo sapiens
  misc_RNA (1)...(19): siRNA sense strand
ggaacacugccacggaaau

SEQ ID NO: 1745595 - RNA, 19 nt, Homo sapiens
  misc_RNA (1)...(19): siRNA sense strand
agaaccugaucauaaauuc

SEQ ID NO: 1745596 - RNA, 19 nt, Homo sapiens
  misc_RNA (1)...(19): siRNA sense strand
uuccaagccuccagcauga

SEQ ID NO: 1745597 - RNA, 19 nt, Homo sapiens
  misc_RNA (1)...(19): siRNA sense strand
ugacaggagggcagacaaa

SEQ ID NO: 1745598 - RNA, 19 nt, Homo sapiens
  misc_RNA (1)...(19): siRNA sense strand
agauugacaagaaagcuua

SEQ ID NO: 1745599 - RNA, 19 nt, Homo sapiens
  misc_RNA (1)...(19): siRNA sense strand
gaacuagaagaccggaaca

SEQ ID NO: 1745600 - RNA, 19 nt, Homo sapiens
  misc_RNA (1)...(19): siRNA sense strand
uaaggaaccggccaagcaa

SEQ ID NO: 1745601 - RNA, 19 nt, Homo sapiens
  misc_RNA (1)...(19): siRNA sense strand
aaaguaaagggucuccaaa

SEQ ID NO: 1745602 - RNA, 19 nt, Homo sapiens
  misc_RNA (1)...(19): siRNA sense strand
cgagaugaagcuuuccaaa

SEQ ID NO: 1745603 - RNA, 19 nt, Homo sapiens
  misc_RNA (1)...(19): siRNA sense strand
aaggacugaugaagaaaga

SEQ ID NO: 1745604 - RNA, 19 nt, Homo sapiens
  misc_RNA (1)...(19): siRNA sense strand
cuaaggaaccggccaagca

SEQ ID NO: 1745605 - RNA, 19 nt, Homo sapiens
  misc_RNA (1)...(19): siRNA sense strand
ggagaaccugaucauaaau

SEQ ID NO: 1745606 - RNA, 19 nt, Homo sapiens
  misc_RNA (1)...(19): siRNA sense strand
ggacaguuuucaaggaaga

SEQ ID NO: 1745607 - RNA, 19 nt, Homo sapiens
  misc_RNA (1)...(19): siRNA sense strand
caagauuccacaggccaua

SEQ ID NO: 1745608 - RNA, 19 nt, Homo sapiens
  misc_RNA (1)...(19): siRNA sense strand
aagaaagcuuaaucagaga

SEQ ID NO: 1745609 - RNA, 19 nt, Homo sapiens
  misc_RNA (1)...(19): siRNA sense strand
agaaagaagagaaaucaag

SEQ ID NO: 1745610 - RNA, 19 nt, Homo sapiens
  misc_RNA (1)...(19): siRNA sense strand
aaaggaaugaucagacaga

SEQ ID NO: 1745611 - RNA, 19 nt, Homo sapiens
  misc_RNA (1)...(19): siRNA sense strand
cuaaggaaucugaggagaa

SEQ ID NO: 1745612 - RNA, 19 nt, Homo sapiens
  misc_RNA (1)...(19): siRNA sense strand
cacuguugaugaauuaaga

SEQ ID NO: 1745613 - RNA, 19 nt, Homo sapiens
  misc_RNA (1)...(19): siRNA sense strand
agagaaaucaagcaaagau

SEQ ID NO: 1745614 - RNA, 19 nt, Homo sapiens
  misc_RNA (1)...(19): siRNA sense strand
caggaagaaagaagagaaa

SEQ ID NO: 1745615 - RNA, 19 nt, Homo sapiens
  misc_RNA (1)...(19): siRNA sense strand
gacagagcaggaagaaaga

SEQ ID NO: 1745616 - RNA, 19 nt, Homo sapiens
  misc_RNA (1)...(19): siRNA sense strand
agaucgagaugaagcuuuc

SEQ ID NO: 1745617 - RNA, 19 nt, Homo sapiens
  misc_RNA (1)...(19): siRNA sense strand
ucagagacccacuguugau

SEQ ID NO: 1745618 - RNA, 19 nt, Homo sapiens
  misc_RNA (1)...(19): siRNA sense strand
agcaaagauugacaagaaa

SEQ ID NO: 1745619 - RNA, 19 nt, Homo sapiens
  misc_RNA (1)...(19): siRNA sense strand
acucaaagacgacuugcuu

SEQ ID NO: 1745620 - RNA, 19 nt, Homo sapiens
  misc_RNA (1)...(19): siRNA sense strand
aggcagcaauucguaaaga

SEQ ID NO: 1745621 - RNA, 19 nt, Homo sapiens
  misc_RNA (1)...(19): siRNA sense strand
uagaagaccggaacauuuu

SEQ ID NO: 1745622 - RNA, 19 nt, Homo sapiens
  misc_RNA (1)...(19): siRNA sense strand
aaucugaggagaacaagga

SEQ ID NO: 1745623 - RNA, 19 nt, Homo sapiens
  misc_RNA (1)...(19): siRNA sense strand
gagaggagcucaucaagaa

SEQ ID NO: 1745624 - RNA, 19 nt, Homo sapiens
  misc_RNA (1)...(19): siRNA sense strand
gaagagaaaucaagcaaag

SEQ ID NO: 1745625 - RNA, 19 nt, Homo sapiens
  misc_RNA (1)...(19): siRNA sense strand
ccaaagaccugccguggaa

SEQ ID NO: 1745626 - RNA, 19 nt, Homo sapiens
  misc_RNA (1)...(19): siRNA sense strand
aagcaaagauugacaagaa

SEQ ID NO: 1745627 - RNA, 19 nt, Homo sapiens
  misc_RNA (1)...(19): siRNA sense strand
cagaaggacugaugaagaa

SEQ ID NO: 1745628 - RNA, 19 nt, Homo sapiens
  misc_RNA (1)...(19): siRNA sense strand
gaucauaaauucugaacuc

SEQ ID NO: 1745629 - RNA, 19 nt, Homo sapiens
  misc_RNA (1)...(19): siRNA sense strand
ggaggaggcuuggagcuuu

SEQ ID NO: 1745630 - RNA, 19 nt, Homo sapiens
  misc_RNA (1)...(19): siRNA sense strand
gaagaaagaagagaaauca

SEQ ID NO: 1745631 - RNA, 19 nt, Homo sapiens
  misc_RNA (1)...(19): siRNA sense strand
cgucagcgcuggagaagaa

SEQ ID NO: 1745632 - RNA, 19 nt, Homo sapiens
  misc_RNA (1)...(19): siRNA sense strand
uaaagggucuccaaagaag

SEQ ID NO: 1745633 - RNA, 19 nt, Homo sapiens
  misc_RNA (1)...(19): siRNA sense strand
guaaugaaauggagguaca

SEQ ID NO: 1745634 - RNA, 19 nt, Homo sapiens
  misc_RNA (1)...(19): siRNA sense strand
cugaacgacuccauuauuu

SEQ ID NO: 1745635 - RNA, 19 nt, Homo sapiens
  misc_RNA (1)...(19): siRNA sense strand
caaagaagcggcuggaugu

SEQ ID NO: 1745636 - RNA, 19 nt, Homo sapiens
  misc_RNA (1)...(19): siRNA sense strand
gaaaguaaagggucuccaa

SEQ ID NO: 1745637 - RNA, 19 nt, Homo sapiens
  misc_RNA (1)...(19): siRNA sense strand
gagcuggagagaagaaaua

SEQ ID NO: 1745638 - RNA, 19 nt, Homo sapiens
  misc_RNA (1)...(19): siRNA sense strand
guaaagggucuccaaagaa

SEQ ID NO: 1745639 - RNA, 19 nt, Homo sapiens
  misc_RNA (1)...(19): siRNA sense strand
aggagaaccugaucauaaa

SEQ ID NO: 1745640 - RNA, 19 nt, Homo sapiens
  misc_RNA (1)...(19): siRNA sense strand
gcgcugaacgacuccauua

SEQ ID NO: 1745641 - RNA, 19 nt, Homo sapiens
  misc_RNA (1)...(19): siRNA sense strand
uggaagagcuggagagaag

SEQ ID NO: 1745642 - RNA, 19 nt, Homo sapiens
  misc_RNA (1)...(19): siRNA sense strand
gauaaggcagcaauucgua

SEQ ID NO: 1745643 - RNA, 19 nt, Homo sapiens
  misc_RNA (1)...(19): siRNA sense strand
aaggagaaccugaucauaa

SEQ ID NO: 1745644 - RNA, 19 nt, Homo sapiens
  misc_RNA (1)...(19): siRNA sense strand
gaacgacuccauuauuucu

SEQ ID NO: 1745645 - RNA, 19 nt, Homo sapiens
  misc_RNA (1)...(19): siRNA sense strand
gcaaacaggaacuagaaga

SEQ ID NO: 1745646 - RNA, 19 nt, Homo sapiens
  misc_RNA (1)...(19): siRNA sense strand
cuagaagaccggaacauuu

SEQ ID NO: 1745647 - RNA, 19 nt, Homo sapiens
  misc_RNA (1)...(19): siRNA sense strand
aguaaagggucuccaaaga

SEQ ID NO: 1745648 - RNA, 19 nt, Homo sapiens
  misc_RNA (1)...(19): siRNA sense strand
gagacccacuguugaugaa

SEQ ID NO: 1745649 - RNA, 19 nt, Homo sapiens
  misc_RNA (1)...(19): siRNA sense strand
gagaaccugaucauaaauu

SEQ ID NO: 1745650 - RNA, 19 nt, Homo sapiens
  misc_RNA (1)...(19): siRNA sense strand
gaacaaggagaaccugauc

SEQ ID NO: 1745651 - RNA, 19 nt, Homo sapiens
  misc_RNA (1)...(19): siRNA sense strand
gcugaacgacuccauuauu

SEQ ID NO: 1745652 - RNA, 19 nt, Homo sapiens
  misc_RNA (1)...(19): siRNA sense strand
guccucagcugcccacuug

SEQ ID NO: 1745653 - RNA, 19 nt, Homo sapiens
  misc_RNA (1)...(19): siRNA sense strand
gacccacuguugaugaauu

SEQ ID NO: 1745654 - RNA, 19 nt, Homo sapiens
  misc_RNA (1)...(19): siRNA sense strand
gaacugccgcuaaggaauc

SEQ ID NO: 1745655 - RNA, 19 nt, Homo sapiens
  misc_RNA (1)...(19): siRNA sense strand
ggcagcagaucgagaugaa

SEQ ID NO: 1745656 - RNA, 19 nt, Homo sapiens
  misc_RNA (1)...(19): siRNA sense strand
acaaaggaaugaucagaca

SEQ ID NO: 1745657 - RNA, 19 nt, Homo sapiens
  misc_RNA (1)...(19): siRNA sense strand
gaagagcuggagagaagaa

SEQ ID NO: 1745658 - RNA, 19 nt, Homo sapiens
  misc_RNA (1)...(19): siRNA sense strand
gcaggaagaaagaagagaa

SEQ ID NO: 1745659 - RNA, 19 nt, Homo sapiens
  misc_RNA (1)...(19): siRNA sense strand
caaaagcgcaggacuauga

SEQ ID NO: 1745660 - RNA, 19 nt, Homo sapiens
  misc_RNA (1)...(19): siRNA sense strand
aaucagagacccacuguug

SEQ ID NO: 1745661 - RNA, 19 nt, Homo sapiens
  misc_RNA (1)...(19): siRNA sense strand
ggaagaaagaagagaaauc

SEQ ID NO: 1745662 - RNA, 19 nt, Homo sapiens
  misc_RNA (1)...(19): siRNA sense strand
ccagaaggacugaugaaga

SEQ ID NO: 1745663 - RNA, 19 nt, Homo sapiens
  misc_RNA (1)...(19): siRNA sense strand
gaggaggcuuggagcuuug

SEQ ID NO: 1745664 - RNA, 19 nt, Homo sapiens
  misc_RNA (1)...(19): siRNA sense strand
gcagauaaggcagcaauuc

SEQ ID NO: 1745665 - RNA, 19 nt, Homo sapiens
  misc_RNA (1)...(19): siRNA sense strand
gaacacugccacggaaaug

SEQ ID NO: 1745666 - RNA, 19 nt, Homo sapiens
  misc_RNA (1)...(19): siRNA sense strand
acaagaaagcuuaaucaga

SEQ ID NO: 1745667 - RNA, 19 nt, Homo sapiens
  misc_RNA (1)...(19): siRNA sense strand
ggcagcaauucguaaagaa

SEQ ID NO: 1745668 - RNA, 19 nt, Homo sapiens
  misc_RNA (1)...(19): siRNA sense strand
caaggagaaccugaucaua

SEQ ID NO: 1745669 - RNA, 19 nt, Homo sapiens
  misc_RNA (1)...(19): siRNA sense strand
guugaugaauuaagagaca

SEQ ID NO: 1745670 - RNA, 19 nt, Homo sapiens
  misc_RNA (1)...(19): siRNA sense strand
ugacaagaaagcuuaauca

SEQ ID NO: 1745671 - RNA, 19 nt, Homo sapiens
  misc_RNA (1)...(19): siRNA sense strand
agacagagcaggaagaaag

SEQ ID NO: 1745672 - RNA, 19 nt, Homo sapiens
  misc_RNA (1)...(19): siRNA sense strand
uaaggaaucugaggagaac

SEQ ID NO: 1745673 - RNA, 19 nt, Homo sapiens
  misc_RNA (1)...(19): siRNA sense strand
ucaaggaagagaaaguaaa

SEQ ID NO: 1745674 - RNA, 19 nt, Homo sapiens
  misc_RNA (1)...(19): siRNA sense strand
caacgucagcgcuggagaa

SEQ ID NO: 1745675 - RNA, 19 nt, Homo sapiens
  misc_RNA (1)...(19): siRNA sense strand
caaggaagagaaaguaaag

SEQ ID NO: 1745676 - RNA, 19 nt, Homo sapiens
  misc_RNA (1)...(19): siRNA sense strand
agaugaagcuuuccaaacg

SEQ ID NO: 1745677 - RNA, 19 nt, Homo sapiens
  misc_RNA (1)...(19): siRNA sense strand
ugauacgauucagugauua

SEQ ID NO: 1745678 - RNA, 19 nt, Homo sapiens
  misc_RNA (1)...(19): siRNA sense strand
gcaaagauugacaagaaag

SEQ ID NO: 1745679 - RNA, 19 nt, Homo sapiens
  misc_RNA (1)...(19): siRNA sense strand
ggacugaugaagaaagaca

SEQ ID NO: 1745680 - RNA, 19 nt, Homo sapiens
  misc_RNA (1)...(19): siRNA sense strand
gaaauggagguacaugcau

SEQ ID NO: 1745681 - RNA, 19 nt, Homo sapiens
  misc_RNA (1)...(19): siRNA sense strand
ugaaacaaaggaaugauca

SEQ ID NO: 1745682 - RNA, 19 nt, Homo sapiens
  misc_RNA (1)...(19): siRNA sense strand
gagaugaagcuuuccaaac

SEQ ID NO: 1745683 - RNA, 19 nt, Homo sapiens
  misc_RNA (1)...(19): siRNA sense strand
gaucuucaaacccuggaaa

SEQ ID NO: 1745684 - RNA, 19 nt, Homo sapiens
  misc_RNA (1)...(19): siRNA sense strand
uaaggcagcaauucguaaa

SEQ ID NO: 1745685 - RNA, 19 nt, Homo sapiens
  misc_RNA (1)...(19): siRNA sense strand
acccacuguugaugaauua

SEQ ID NO: 1745686 - RNA, 19 nt, Homo sapiens
  misc_RNA (1)...(19): siRNA sense strand
aagcaaacaggaacuagaa

SEQ ID NO: 1745687 - RNA, 19 nt, Homo sapiens
  misc_RNA (1)...(19): siRNA sense strand
caagcaaacaggaacuaga

SEQ ID NO: 1745688 - RNA, 19 nt, Homo sapiens
  misc_RNA (1)...(19): siRNA sense strand
gaaccacccacucccaagu

SEQ ID NO: 1745689 - RNA, 19 nt, Homo sapiens
  misc_RNA (1)...(19): siRNA sense strand
uaucuggucucagggauuc

SEQ ID NO: 1745690 - RNA, 19 nt, Homo sapiens
  misc_RNA (1)...(19): siRNA sense strand
aaacaaaggaaugaucaga

SEQ ID NO: 1745691 - RNA, 19 nt, Homo sapiens
  misc_RNA (1)...(19): siRNA sense strand
gaaggacugaugaagaaag

SEQ ID NO: 1745692 - RNA, 19 nt, Homo sapiens
  misc_RNA (1)...(19): siRNA sense strand
gcgaacugccgcuaaggaa

SEQ ID NO: 1745693 - RNA, 19 nt, Homo sapiens
  misc_RNA (1)...(19): siRNA sense strand
cgagaggagcucaucaaga

SEQ ID NO: 1745694 - RNA, 19 nt, Homo sapiens
  misc_RNA (1)...(19): siRNA sense strand
ggaacacugccacggaaau

SEQ ID NO: 1745695 - RNA, 19 nt, Homo sapiens
  misc_RNA (1)...(19): siRNA sense strand
agaaccugaucauaaauuc

SEQ ID NO: 1745696 - RNA, 19 nt, Homo sapiens
  misc_RNA (1)...(19): siRNA sense strand
uuccaagccuccagcauga

SEQ ID NO: 1745697 - RNA, 19 nt, Homo sapiens
  misc_RNA (1)...(19): siRNA sense strand
ugacaggagggcagacaaa

SEQ ID NO: 1745698 - RNA, 19 nt, Homo sapiens
  misc_RNA (1)...(19): siRNA sense strand
agauugacaagaaagcuua

SEQ ID NO: 1745699 - RNA, 19 nt, Homo sapiens
  misc_RNA (1)...(19): siRNA sense strand
gaacuagaagaccggaaca

SEQ ID NO: 1745700 - RNA, 19 nt, Homo sapiens
  misc_RNA (1)...(19): siRNA sense strand
uaaggaaccggccaagcaa

SEQ ID NO: 1745701 - RNA, 19 nt, Homo sapiens
  misc_RNA (1)...(19): siRNA sense strand
aaaguaaagggucuccaaa

SEQ ID NO: 1745702 - RNA, 19 nt, Homo sapiens
  misc_RNA (1)...(19): siRNA sense strand
cgagaugaagcuuuccaaa

SEQ ID NO: 1745703 - RNA, 19 nt, Homo sapiens
  misc_RNA (1)...(19): siRNA sense strand
aaggacugaugaagaaaga

SEQ ID NO: 1745704 - RNA, 19 nt, Homo sapiens
  misc_RNA (1)...(19): siRNA sense strand
cuaaggaaccggccaagca

SEQ ID NO: 1745705 - RNA, 19 nt, Homo sapiens
  misc_RNA (1)...(19): siRNA sense strand
ggagaaccugaucauaaau

SEQ ID NO: 1745706 - RNA, 19 nt, Homo sapiens
  misc_RNA (1)...(19): siRNA sense strand
ggacaguuuucaaggaaga

SEQ ID NO: 1745707 - RNA, 19 nt, Homo sapiens
  misc_RNA (1)...(19): siRNA sense strand
caagauuccacaggccaua

SEQ ID NO: 1745708 - RNA, 19 nt, Homo sapiens
  misc_RNA (1)...(19): siRNA sense strand
aagaaagcuuaaucagaga

SEQ ID NO: 1745709 - RNA, 19 nt, Homo sapiens
  misc_RNA (1)...(19): siRNA sense strand
agaaagaagagaaaucaag

SEQ ID NO: 1745710 - RNA, 19 nt, Homo sapiens
  misc_RNA (1)...(19): siRNA sense strand
aaaggaaugaucagacaga

SEQ ID NO: 1745711 - RNA, 19 nt, Homo sapiens
  misc_RNA (1)...(19): siRNA sense strand
cuaaggaaucugaggagaa

SEQ ID NO: 1745712 - RNA, 19 nt, Homo sapiens
  misc_RNA (1)...(19): siRNA sense strand
cacuguugaugaauuaaga

SEQ ID NO: 1745713 - RNA, 19 nt, Homo sapiens
  misc_RNA (1)...(19): siRNA sense strand
agagaaaucaagcaaagau

SEQ ID NO: 1745714 - RNA, 19 nt, Homo sapiens
  misc_RNA (1)...(19): siRNA sense strand
caggaagaaagaagagaaa

SEQ ID NO: 1745715 - RNA, 19 nt, Homo sapiens
  misc_RNA (1)...(19): siRNA sense strand
gacagagcaggaagaaaga

SEQ ID NO: 1745716 - RNA, 19 nt, Homo sapiens
  misc_RNA (1)...(19): siRNA sense strand
agaucgagaugaagcuuuc

SEQ ID NO: 1745717 - RNA, 19 nt, Homo sapiens
  misc_RNA (1)...(19): siRNA sense strand
ucagagacccacuguugau

SEQ ID NO: 1745718 - RNA, 19 nt, Homo sapiens
  misc_RNA (1)...(19): siRNA sense strand
agcaaagauugacaagaaa

SEQ ID NO: 1745719 - RNA, 19 nt, Homo sapiens
  misc_RNA (1)...(19): siRNA sense strand
acucaaagacgacuugcuu

SEQ ID NO: 1745720 - RNA, 19 nt, Homo sapiens
  misc_RNA (1)...(19): siRNA sense strand
aggcagcaauucguaaaga

SEQ ID NO: 1745721 - RNA, 19 nt, Homo sapiens
  misc_RNA (1)...(19): siRNA sense strand
uagaagaccggaacauuuu

SEQ ID NO: 1745722 - RNA, 19 nt, Homo sapiens
  misc_RNA (1)...(19): siRNA sense strand
aaucugaggagaacaagga

SEQ ID NO: 1745723 - RNA, 19 nt, Homo sapiens
  misc_RNA (1)...(19): siRNA sense strand
gaagagagccgccacguaa

SEQ ID NO: 1745724 - RNA, 19 nt, Homo sapiens
  misc_RNA (1)...(19): siRNA sense strand
gaaugucccucuuaugaaa

SEQ ID NO: 1745725 - RNA, 19 nt, Homo sapiens
  misc_RNA (1)...(19): siRNA sense strand
agaagaagaugaagguuaa

SEQ ID NO: 1745726 - RNA, 19 nt, Homo sapiens
  misc_RNA (1)...(19): siRNA sense strand
ggacgcauaucaagaugaa

SEQ ID NO: 1745727 - RNA, 19 nt, Homo sapiens
  misc_RNA (1)...(19): siRNA sense strand
gaaagaagaagaugaaggu

SEQ ID NO: 1745728 - RNA, 19 nt, Homo sapiens
  misc_RNA (1)...(19): siRNA sense strand
gagcgaggauggaguggaa

SEQ ID NO: 1745729 - RNA, 19 nt, Homo sapiens
  misc_RNA (1)...(19): siRNA sense strand
ggagaaacauaugaggauu

SEQ ID NO: 1745730 - RNA, 19 nt, Homo sapiens
  misc_RNA (1)...(19): siRNA sense strand
gaaagagggaagaaagaaa

SEQ ID NO: 1745731 - RNA, 19 nt, Homo sapiens
  misc_RNA (1)...(19): siRNA sense strand
cagacacaaugcuguauuu

SEQ ID NO: 1745732 - RNA, 19 nt, Homo sapiens
  misc_RNA (1)...(19): siRNA sense strand
acacaaugcuguauuucuu

SEQ ID NO: 1745733 - RNA, 19 nt, Homo sapiens
  misc_RNA (1)...(19): siRNA sense strand
acagagcaguucaccauuu

SEQ ID NO: 1745734 - RNA, 19 nt, Homo sapiens
  misc_RNA (1)...(19): siRNA sense strand
gaacaggggucagaucauu

SEQ ID NO: 1745735 - RNA, 19 nt, Homo sapiens
  misc_RNA (1)...(19): siRNA sense strand
gaagaguguucucggcaau

SEQ ID NO: 1745736 - RNA, 19 nt, Homo sapiens
  misc_RNA (1)...(19): siRNA sense strand
uaaauugacugcagaugag

SEQ ID NO: 1745737 - RNA, 19 nt, Homo sapiens
  misc_RNA (1)...(19): siRNA sense strand
gcagaccauugcccaaaga

SEQ ID NO: 1745738 - RNA, 19 nt, Homo sapiens
  misc_RNA (1)...(19): siRNA sense strand
ggaaugaagcgcucugugu

SEQ ID NO: 1745739 - RNA, 19 nt, Homo sapiens
  misc_RNA (1)...(19): siRNA sense strand
guucaccauuugcauuaua

SEQ ID NO: 1745740 - RNA, 19 nt, Homo sapiens
  misc_RNA (1)...(19): siRNA sense strand
gagaaacauaugaggauuu

SEQ ID NO: 1745741 - RNA, 19 nt, Homo sapiens
  misc_RNA (1)...(19): siRNA sense strand
gaagaaacaacccaaaggu

SEQ ID NO: 1745742 - RNA, 19 nt, Homo sapiens
  misc_RNA (1)...(19): siRNA sense strand
ugaagaccauacaauauuc

SEQ ID NO: 1745743 - RNA, 19 nt, Homo sapiens
  misc_RNA (1)...(19): siRNA sense strand
cagagcaguucaccauuug

SEQ ID NO: 1745744 - RNA, 19 nt, Homo sapiens
  misc_RNA (1)...(19): siRNA sense strand
gcaaggaagagcaggagaa

SEQ ID NO: 1745745 - RNA, 19 nt, Homo sapiens
  misc_RNA (1)...(19): siRNA sense strand
gugaagggcguuaugguuu

SEQ ID NO: 1745746 - RNA, 19 nt, Homo sapiens
  misc_RNA (1)...(19): siRNA sense strand
caaggucucuggguccauu

SEQ ID NO: 1745747 - RNA, 19 nt, Homo sapiens
  misc_RNA (1)...(19): siRNA sense strand
aagaagaagaugaagguua

SEQ ID NO: 1745748 - RNA, 19 nt, Homo sapiens
  misc_RNA (1)...(19): siRNA sense strand
gagaagagugggaccgaaa

SEQ ID NO: 1745749 - RNA, 19 nt, Homo sapiens
  misc_RNA (1)...(19): siRNA sense strand
cagaugagcuguggaaagg

SEQ ID NO: 1745750 - RNA, 19 nt, Homo sapiens
  misc_RNA (1)...(19): siRNA sense strand
gaaaucgauccgugucuug

SEQ ID NO: 1745751 - RNA, 19 nt, Homo sapiens
  misc_RNA (1)...(19): siRNA sense strand
aaacuggacugggaagaug

SEQ ID NO: 1745752 - RNA, 19 nt, Homo sapiens
  misc_RNA (1)...(19): siRNA sense strand
gcaguucaccauuugcauu

SEQ ID NO: 1745753 - RNA, 19 nt, Homo sapiens
  misc_RNA (1)...(19): siRNA sense strand
gaagguggaggcagacaug

SEQ ID NO: 1745754 - RNA, 19 nt, Homo sapiens
  misc_RNA (1)...(19): siRNA sense strand
uaagaagggccuccauguu

SEQ ID NO: 1745755 - RNA, 19 nt, Homo sapiens
  misc_RNA (1)...(19): siRNA sense strand
aagaagggccuccauguug

SEQ ID NO: 1745756 - RNA, 19 nt, Homo sapiens
  misc_RNA (1)...(19): siRNA sense strand
cuaaauugacugcagauga

SEQ ID NO: 1745757 - RNA, 19 nt, Homo sapiens
  misc_RNA (1)...(19): siRNA sense strand
ggauggaugcuuucaggaa

SEQ ID NO: 1745758 - RNA, 19 nt, Homo sapiens
  misc_RNA (1)...(19): siRNA sense strand
gcagacacaaugcuguauu

SEQ ID NO: 1745759 - RNA, 19 nt, Homo sapiens
  misc_RNA (1)...(19): siRNA sense strand
gaaaaggagcugcagguuu

SEQ ID NO: 1745760 - RNA, 19 nt, Homo sapiens
  misc_RNA (1)...(19): siRNA sense strand
cugaaugucccucuuauga

SEQ ID NO: 1745761 - RNA, 19 nt, Homo sapiens
  misc_RNA (1)...(19): siRNA sense strand
gaagagugggaccgaaaga

SEQ ID NO: 1745762 - RNA, 19 nt, Homo sapiens
  misc_RNA (1)...(19): siRNA sense strand
caggauacuugagguaaga

SEQ ID NO: 1745763 - RNA, 19 nt, Homo sapiens
  misc_RNA (1)...(19): siRNA sense strand
gacugaaugucccucuuau

SEQ ID NO: 1745764 - RNA, 19 nt, Homo sapiens
  misc_RNA (1)...(19): siRNA sense strand
cgaaagagggaagaaagaa

SEQ ID NO: 1745765 - RNA, 19 nt, Homo sapiens
  misc_RNA (1)...(19): siRNA sense strand
gcgaaagagggaagaaaga

SEQ ID NO: 1745766 - RNA, 19 nt, Homo sapiens
  misc_RNA (1)...(19): siRNA sense strand
agaagggccuccauguugu

SEQ ID NO: 1745767 - RNA, 19 nt, Homo sapiens
  misc_RNA (1)...(19): siRNA sense strand
caguucaccauuugcauua

SEQ ID NO: 1745768 - RNA, 19 nt, Homo sapiens
  misc_RNA (1)...(19): siRNA sense strand
ggugaagggcguuaugguu

SEQ ID NO: 1745769 - RNA, 19 nt, Homo sapiens
  misc_RNA (1)...(19): siRNA sense strand
gaugaagaaacaacccaaa

SEQ ID NO: 1745770 - RNA, 19 nt, Homo sapiens
  misc_RNA (1)...(19): siRNA sense strand
gcagaugagcuguggaaag

SEQ ID NO: 1745771 - RNA, 19 nt, Homo sapiens
  misc_RNA (1)...(19): siRNA sense strand
ggacugggaagaugugaag

SEQ ID NO: 1745772 - RNA, 19 nt, Homo sapiens
  misc_RNA (1)...(19): siRNA sense strand
gucucuggguccauuaaua

SEQ ID NO: 1745773 - RNA, 19 nt, Homo sapiens
  misc_RNA (1)...(19): siRNA sense strand
cugaugagccagcaguaua

SEQ ID NO: 1745774 - RNA, 19 nt, Homo sapiens
  misc_RNA (1)...(19): siRNA sense strand
ggaaauccgggaggaaugu

SEQ ID NO: 1745775 - RNA, 19 nt, Homo sapiens
  misc_RNA (1)...(19): siRNA sense strand
ucacuaugacugcgaaaga

SEQ ID NO: 1745776 - RNA, 19 nt, Homo sapiens
  misc_RNA (1)...(19): siRNA sense strand
aaaggacgcauaucaagau

SEQ ID NO: 1745777 - RNA, 19 nt, Homo sapiens
  misc_RNA (1)...(19): siRNA sense strand
aaagagggaagaaagaaau

SEQ ID NO: 1745778 - RNA, 19 nt, Homo sapiens
  misc_RNA (1)...(19): siRNA sense strand
ggaagaggcaaaagaacua

SEQ ID NO: 1745779 - RNA, 19 nt, Homo sapiens
  misc_RNA (1)...(19): siRNA sense strand
gcucuguguggucuaauuu

SEQ ID NO: 1745780 - RNA, 19 nt, Homo sapiens
  misc_RNA (1)...(19): siRNA sense strand
ugaaugucccucuuaugaa

SEQ ID NO: 1745781 - RNA, 19 nt, Homo sapiens
  misc_RNA (1)...(19): siRNA sense strand
ugaagagagccgccacgua

SEQ ID NO: 1745782 - RNA, 19 nt, Homo sapiens
  misc_RNA (1)...(19): siRNA sense strand
agaaaucgauccgugucuu

SEQ ID NO: 1745783 - RNA, 19 nt, Homo sapiens
  misc_RNA (1)...(19): siRNA sense strand
gaccgaaagaagaagauga

SEQ ID NO: 1745784 - RNA, 19 nt, Homo sapiens
  misc_RNA (1)...(19): siRNA sense strand
gacaggaaacccaucaaca

SEQ ID NO: 1745785 - RNA, 19 nt, Homo sapiens
  misc_RNA (1)...(19): siRNA sense strand
ccagcaguauagaccauau

SEQ ID NO: 1745786 - RNA, 19 nt, Homo sapiens
  misc_RNA (1)...(19): siRNA sense strand
gaagaagaugaagguuaaa

SEQ ID NO: 1745787 - RNA, 19 nt, Homo sapiens
  misc_RNA (1)...(19): siRNA sense strand
gagugggaccgaaagaaga

SEQ ID NO: 1745788 - RNA, 19 nt, Homo sapiens
  misc_RNA (1)...(19): siRNA sense strand
ucuguguggucuaauuuga

SEQ ID NO: 1745789 - RNA, 19 nt, Homo sapiens
  misc_RNA (1)...(19): siRNA sense strand
cugaucggauggaugcuuu

SEQ ID NO: 1745790 - RNA, 19 nt, Homo sapiens
  misc_RNA (1)...(19): siRNA sense strand
ggaggcaguguucccuaaa

SEQ ID NO: 1745791 - RNA, 19 nt, Homo sapiens
  misc_RNA (1)...(19): siRNA sense strand
agaacgauaugaagaccau

SEQ ID NO: 1745792 - RNA, 19 nt, Homo sapiens
  misc_RNA (1)...(19): siRNA sense strand
gaagacugcacagggaaug

SEQ ID NO: 1745793 - RNA, 19 nt, Homo sapiens
  misc_RNA (1)...(19): siRNA sense strand
aaagaaaggaucugaacag

SEQ ID NO: 1745794 - RNA, 19 nt, Homo sapiens
  misc_RNA (1)...(19): siRNA sense strand
ggucagaucauuggugaag

SEQ ID NO: 1745795 - RNA, 19 nt, Homo sapiens
  misc_RNA (1)...(19): siRNA sense strand
gaagggccuccauguugug

SEQ ID NO: 1745796 - RNA, 19 nt, Homo sapiens
  misc_RNA (1)...(19): siRNA sense strand
ccaggauacuugagguaag

SEQ ID NO: 1745797 - RNA, 19 nt, Homo sapiens
  misc_RNA (1)...(19): siRNA sense strand
gaaaagaaaggaucugaac

SEQ ID NO: 1745798 - RNA, 19 nt, Homo sapiens
  misc_RNA (1)...(19): siRNA sense strand
gaggcaguguucccuaaac

SEQ ID NO: 1745799 - RNA, 19 nt, Homo sapiens
  misc_RNA (1)...(19): siRNA sense strand
ugaagggcguuaugguuuu

SEQ ID NO: 1745800 - RNA, 19 nt, Homo sapiens
  misc_RNA (1)...(19): siRNA sense strand
uagaccauauaguuucuuc

SEQ ID NO: 1745801 - RNA, 19 nt, Homo sapiens
  misc_RNA (1)...(19): siRNA sense strand
caggaaagcaaagaacaga

SEQ ID NO: 1745802 - RNA, 19 nt, Homo sapiens
  misc_RNA (1)...(19): siRNA sense strand
ccuggucccuguggagaaa

SEQ ID NO: 1745803 - RNA, 19 nt, Homo sapiens
  misc_RNA (1)...(19): siRNA sense strand
gugcagaccauugcccaaa

SEQ ID NO: 1745804 - RNA, 19 nt, Homo sapiens
  misc_RNA (1)...(19): siRNA sense strand
ucucuggguccauuaauau

SEQ ID NO: 1745805 - RNA, 19 nt, Homo sapiens
  misc_RNA (1)...(19): siRNA sense strand
ggauuuugauaccaggaua

SEQ ID NO: 1745806 - RNA, 19 nt, Homo sapiens
  misc_RNA (1)...(19): siRNA sense strand
gagcagugcagaccauugc

SEQ ID NO: 1745807 - RNA, 19 nt, Homo sapiens
  misc_RNA (1)...(19): siRNA sense strand
caaacuggacugggaagau

SEQ ID NO: 1745808 - RNA, 19 nt, Homo sapiens
  misc_RNA (1)...(19): siRNA sense strand
gaaggauccagagccagaa

SEQ ID NO: 1745809 - RNA, 19 nt, Homo sapiens
  misc_RNA (1)...(19): siRNA sense strand
gcauaucaagaugaagaaa

SEQ ID NO: 1745810 - RNA, 19 nt, Homo sapiens
  misc_RNA (1)...(19): siRNA sense strand
uuugauaccaggauacuug

SEQ ID NO: 1745811 - RNA, 19 nt, Homo sapiens
  misc_RNA (1)...(19): siRNA sense strand
ggagcagugcagaccauug

SEQ ID NO: 1745812 - RNA, 19 nt, Homo sapiens
  misc_RNA (1)...(19): siRNA sense strand
ugaagaaacaacccaaagg

SEQ ID NO: 1745813 - RNA, 19 nt, Homo sapiens
  misc_RNA (1)...(19): siRNA sense strand
gagcaguucaccauuugca

SEQ ID NO: 1745814 - RNA, 19 nt, Homo sapiens
  misc_RNA (1)...(19): siRNA sense strand
gacacaaugcuguauuucu

SEQ ID NO: 1745815 - RNA, 19 nt, Homo sapiens
  misc_RNA (1)...(19): siRNA sense strand
gguggaggcagacaugauc

SEQ ID NO: 1745816 - RNA, 19 nt, Homo sapiens
  misc_RNA (1)...(19): siRNA sense strand
gagggaagaaagaaaucga

SEQ ID NO: 1745817 - RNA, 19 nt, Homo sapiens
  misc_RNA (1)...(19): siRNA sense strand
ggauacuugagguaagaaa

SEQ ID NO: 1745818 - RNA, 19 nt, Homo sapiens
  misc_RNA (1)...(19): siRNA sense strand
acaaugcuguauuucuucu

SEQ ID NO: 1745819 - RNA, 19 nt, Homo sapiens
  misc_RNA (1)...(19): siRNA sense strand
gccagaagaugagguucca

SEQ ID NO: 1745820 - RNA, 19 nt, Homo sapiens
  misc_RNA (1)...(19): siRNA sense strand
ccagacaggaaacccauca

SEQ ID NO: 1745821 - RNA, 19 nt, Homo sapiens
  misc_RNA (1)...(19): siRNA sense strand
acgcauaucaagaugaaga

SEQ ID NO: 1745822 - RNA, 19 nt, Homo sapiens
  misc_RNA (1)...(19): siRNA sense strand
accauacaauauuccauga

SEQ ID NO: 1745823 - RNA, 19 nt, Homo sapiens
  misc_RNA (1)...(19): siRNA sense strand
ggugaaagcucgcgucauc

SEQ ID NO: 1745824 - RNA, 19 nt, Homo sapiens
  misc_RNA (1)...(19): siRNA sense strand
guuccuggaugacuccuuu

SEQ ID NO: 1745825 - RNA, 19 nt, Homo sapiens
  misc_RNA (1)...(19): siRNA sense strand
ucuaagcaguggcaucuga

SEQ ID NO: 1745826 - RNA, 19 nt, Homo sapiens
  misc_RNA (1)...(19): siRNA sense strand
ugaauuagccaccaaguac

SEQ ID NO: 1745827 - RNA, 19 nt, Homo sapiens
  misc_RNA (1)...(19): siRNA sense strand
uccugaaucuggacucuaa

SEQ ID NO: 1745828 - RNA, 19 nt, Homo sapiens
  misc_RNA (1)...(19): siRNA sense strand
gaugacuccuuucgcaagu

SEQ ID NO: 1745829 - RNA, 19 nt, Homo sapiens
  misc_RNA (1)...(19): siRNA sense strand
gggaguucgugccgccuuu

SEQ ID NO: 1745830 - RNA, 19 nt, Homo sapiens
  misc_RNA (1)...(19): siRNA sense strand
cacaauauccagcgagaga

SEQ ID NO: 1745831 - RNA, 19 nt, Homo sapiens
  misc_RNA (1)...(19): siRNA sense strand
gaucuaagcaguggcaucu

SEQ ID NO: 1745832 - RNA, 19 nt, Homo sapiens
  misc_RNA (1)...(19): siRNA sense strand
caauauccagcgagagaaa

SEQ ID NO: 1745833 - RNA, 19 nt, Homo sapiens
  misc_RNA (1)...(19): siRNA sense strand
gggcuagaauccgggaguu

SEQ ID NO: 1745834 - RNA, 19 nt, Homo sapiens
  misc_RNA (1)...(19): siRNA sense strand
ccagcgagagaaagaguuu

SEQ ID NO: 1745835 - RNA, 19 nt, Homo sapiens
  misc_RNA (1)...(19): siRNA sense strand
caagccagcacccauguuc

SEQ ID NO: 1745836 - RNA, 19 nt, Homo sapiens
  misc_RNA (1)...(19): siRNA sense strand
cguggaagcuacacuuacu

SEQ ID NO: 1745837 - RNA, 19 nt, Homo sapiens
  misc_RNA (1)...(19): siRNA sense strand
aagcucgcgucaucacuga

SEQ ID NO: 1745838 - RNA, 19 nt, Homo sapiens
  misc_RNA (1)...(19): siRNA sense strand
cugaauuagccaccaagua

SEQ ID NO: 1745839 - RNA, 19 nt, Homo sapiens
  misc_RNA (1)...(19): siRNA sense strand
gcuagcccucugccucuuu

SEQ ID NO: 1745840 - RNA, 19 nt, Homo sapiens
  misc_RNA (1)...(19): siRNA sense strand
uguauuauucugcguggaa

SEQ ID NO: 1745841 - RNA, 19 nt, Homo sapiens
  misc_RNA (1)...(19): siRNA sense strand
ugcggaagcuggugaaagc

SEQ ID NO: 1745842 - RNA, 19 nt, Homo sapiens
  misc_RNA (1)...(19): siRNA sense strand
ggugaaagcucgcgucauc

SEQ ID NO: 1745843 - RNA, 19 nt, Homo sapiens
  misc_RNA (1)...(19): siRNA sense strand
guuccuggaugacuccuuu

SEQ ID NO: 1745844 - RNA, 19 nt, Homo sapiens
  misc_RNA (1)...(19): siRNA sense strand
ucuaagcaguggcaucuga

SEQ ID NO: 1745845 - RNA, 19 nt, Homo sapiens
  misc_RNA (1)...(19): siRNA sense strand
ugaauuagccaccaaguac

SEQ ID NO: 1745846 - RNA, 19 nt, Homo sapiens
  misc_RNA (1)...(19): siRNA sense strand
uccugaaucuggacucuaa

SEQ ID NO: 1745847 - RNA, 19 nt, Homo sapiens
  misc_RNA (1)...(19): siRNA sense strand
gaugacuccuuucgcaagu

SEQ ID NO: 1745848 - RNA, 19 nt, Homo sapiens
  misc_RNA (1)...(19): siRNA sense strand
gggaguucgugccgccuuu

SEQ ID NO: 1745849 - RNA, 19 nt, Homo sapiens
  misc_RNA (1)...(19): siRNA sense strand
cacaauauccagcgagaga

SEQ ID NO: 1745850 - RNA, 19 nt, Homo sapiens
  misc_RNA (1)...(19): siRNA sense strand
gaucuaagcaguggcaucu

SEQ ID NO: 1745851 - RNA, 19 nt, Homo sapiens
  misc_RNA (1)...(19): siRNA sense strand
caauauccagcgagagaaa

SEQ ID NO: 1745852 - RNA, 19 nt, Homo sapiens
  misc_RNA (1)...(19): siRNA sense strand
gggcuagaauccgggaguu

SEQ ID NO: 1745853 - RNA, 19 nt, Homo sapiens
  misc_RNA (1)...(19): siRNA sense strand
ccagcgagagaaagaguuu

SEQ ID NO: 1745854 - RNA, 19 nt, Homo sapiens
  misc_RNA (1)...(19): siRNA sense strand
caagccagcacccauguuc

SEQ ID NO: 1745855 - RNA, 19 nt, Homo sapiens
  misc_RNA (1)...(19): siRNA sense strand
cguggaagcuacacuuacu

SEQ ID NO: 1745856 - RNA, 19 nt, Homo sapiens
  misc_RNA (1)...(19): siRNA sense strand
aagcucgcgucaucacuga

SEQ ID NO: 1745857 - RNA, 19 nt, Homo sapiens
  misc_RNA (1)...(19): siRNA sense strand
cugaauuagccaccaagua

SEQ ID NO: 1745858 - RNA, 19 nt, Homo sapiens
  misc_RNA (1)...(19): siRNA sense strand
gcuagcccucugccucuuu

SEQ ID NO: 1745859 - RNA, 19 nt, Homo sapiens
  misc_RNA (1)...(19): siRNA sense strand
uguauuauucugcguggaa

SEQ ID NO: 1745860 - RNA, 19 nt, Homo sapiens
  misc_RNA (1)...(19): siRNA sense strand
ugcggaagcuggugaaagc

SEQ ID NO: 1745861 - RNA, 19 nt, Homo sapiens
  misc_RNA (1)...(19): siRNA sense strand
ggugaaagcucgcgucauc

SEQ ID NO: 1745862 - RNA, 19 nt, Homo sapiens
  misc_RNA (1)...(19): siRNA sense strand
guuccuggaugacuccuuu

SEQ ID NO: 1745863 - RNA, 19 nt, Homo sapiens
  misc_RNA (1)...(19): siRNA sense strand
ucuaagcaguggcaucuga

SEQ ID NO: 1745864 - RNA, 19 nt, Homo sapiens
  misc_RNA (1)...(19): siRNA sense strand
ugaauuagccaccaaguac

SEQ ID NO: 1745865 - RNA, 19 nt, Homo sapiens
  misc_RNA (1)...(19): siRNA sense strand
uccugaaucuggacucuaa

SEQ ID NO: 1745866 - RNA, 19 nt, Homo sapiens
  misc_RNA (1)...(19): siRNA sense strand
gaugacuccuuucgcaagu

SEQ ID NO: 1745867 - RNA, 19 nt, Homo sapiens
  misc_RNA (1)...(19): siRNA sense strand
gggaguucgugccgccuuu

SEQ ID NO: 1745868 - RNA, 19 nt, Homo sapiens
  misc_RNA (1)...(19): siRNA sense strand
cacaauauccagcgagaga

SEQ ID NO: 1745869 - RNA, 19 nt, Homo sapiens
  misc_RNA (1)...(19): siRNA sense strand
gaucuaagcaguggcaucu

SEQ ID NO: 1745870 - RNA, 19 nt, Homo sapiens
  misc_RNA (1)...(19): siRNA sense strand
caauauccagcgagagaaa

SEQ ID NO: 1745871 - RNA, 19 nt, Homo sapiens
  misc_RNA (1)...(19): siRNA sense strand
gggcuagaauccgggaguu

SEQ ID NO: 1745872 - RNA, 19 nt, Homo sapiens
  misc_RNA (1)...(19): siRNA sense strand
ccagcgagagaaagaguuu

SEQ ID NO: 1745873 - RNA, 19 nt, Homo sapiens
  misc_RNA (1)...(19): siRNA sense strand
caagccagcacccauguuc

SEQ ID NO: 1745874 - RNA, 19 nt, Homo sapiens
  misc_RNA (1)...(19): siRNA sense strand
cguggaagcuacacuuacu

SEQ ID NO: 1745875 - RNA, 19 nt, Homo sapiens
  misc_RNA (1)...(19): siRNA sense strand
aagcucgcgucaucacuga

SEQ ID NO: 1745876 - RNA, 19 nt, Homo sapiens
  misc_RNA (1)...(19): siRNA sense strand
cugaauuagccaccaagua

SEQ ID NO: 1745877 - RNA, 19 nt, Homo sapiens
  misc_RNA (1)...(19): siRNA sense strand
gcuagcccucugccucuuu

SEQ ID NO: 1745878 - RNA, 19 nt, Homo sapiens
  misc_RNA (1)...(19): siRNA sense strand
uguauuauucugcguggaa

SEQ ID NO: 1745879 - RNA, 19 nt, Homo sapiens
  misc_RNA (1)...(19): siRNA sense strand
ugcggaagcuggugaaagc

SEQ ID NO: 1745880 - RNA, 19 nt, Homo sapiens
  misc_RNA (1)...(19): siRNA sense strand
ggugaaagcucgcgucauc

SEQ ID NO: 1745881 - RNA, 19 nt, Homo sapiens
  misc_RNA (1)...(19): siRNA sense strand
guuccuggaugacuccuuu

SEQ ID NO: 1745882 - RNA, 19 nt, Homo sapiens
  misc_RNA (1)...(19): siRNA sense strand
ugaauuagccaccaaguac

SEQ ID NO: 1745883 - RNA, 19 nt, Homo sapiens
  misc_RNA (1)...(19): siRNA sense strand
uccugaaucuggacucuaa

SEQ ID NO: 1745884 - RNA, 19 nt, Homo sapiens
  misc_RNA (1)...(19): siRNA sense strand
gaugacuccuuucgcaagu

SEQ ID NO: 1745885 - RNA, 19 nt, Homo sapiens
  misc_RNA (1)...(19): siRNA sense strand
gggaguucgugccgccuuu

SEQ ID NO: 1745886 - RNA, 19 nt, Homo sapiens
  misc_RNA (1)...(19): siRNA sense strand
cacaauauccagcgagaga

SEQ ID NO: 1745887 - RNA, 19 nt, Homo sapiens
  misc_RNA (1)...(19): siRNA sense strand
caauauccagcgagagaaa

SEQ ID NO: 1745888 - RNA, 19 nt, Homo sapiens
  misc_RNA (1)...(19): siRNA sense strand
gggcuagaauccgggaguu

SEQ ID NO: 1745889 - RNA, 19 nt, Homo sapiens
  misc_RNA (1)...(19): siRNA sense strand
ccagcgagagaaagaguuu

SEQ ID NO: 1745890 - RNA, 19 nt, Homo sapiens
  misc_RNA (1)...(19): siRNA sense strand
caagccagcacccauguuc

SEQ ID NO: 1745891 - RNA, 19 nt, Homo sapiens
  misc_RNA (1)...(19): siRNA sense strand
cguggaagcuacacuuacu

SEQ ID NO: 1745892 - RNA, 19 nt, Homo sapiens
  misc_RNA (1)...(19): siRNA sense strand
aagcucgcgucaucacuga

SEQ ID NO: 1745893 - RNA, 19 nt, Homo sapiens
  misc_RNA (1)...(19): siRNA sense strand
cugaauuagccaccaagua

SEQ ID NO: 1745894 - RNA, 19 nt, Homo sapiens
  misc_RNA (1)...(19): siRNA sense strand
gcuagcccucugccucuuu

SEQ ID NO: 1745895 - RNA, 19 nt, Homo sapiens
  misc_RNA (1)...(19): siRNA sense strand
uguauuauucugcguggaa

SEQ ID NO: 1745896 - RNA, 19 nt, Homo sapiens
  misc_RNA (1)...(19): siRNA sense strand
ugcggaagcuggugaaagc

SEQ ID NO: 1745897 - RNA, 19 nt, Homo sapiens
  misc_RNA (1)...(19): siRNA sense strand
ggugaaagcucgcgucauc

SEQ ID NO: 1745898 - RNA, 19 nt, Homo sapiens
  misc_RNA (1)...(19): siRNA sense strand
guuccuggaugacuccuuu

SEQ ID NO: 1745899 - RNA, 19 nt, Homo sapiens
  misc_RNA (1)...(19): siRNA sense strand
ucuaagcaguggcaucuga

SEQ ID NO: 1745900 - RNA, 19 nt, Homo sapiens
  misc_RNA (1)...(19): siRNA sense strand
ugaauuagccaccaaguac

SEQ ID NO: 1745901 - RNA, 19 nt, Homo sapiens
  misc_RNA (1)...(19): siRNA sense strand
uccugaaucuggacucuaa

SEQ ID NO: 1745902 - RNA, 19 nt, Homo sapiens
  misc_RNA (1)...(19): siRNA sense strand
gaugacuccuuucgcaagu

SEQ ID NO: 1745903 - RNA, 19 nt, Homo sapiens
  misc_RNA (1)...(19): siRNA sense strand
gggaguucgugccgccuuu

SEQ ID NO: 1745904 - RNA, 19 nt, Homo sapiens
  misc_RNA (1)...(19): siRNA sense strand
cacaauauccagcgagaga

SEQ ID NO: 1745905 - RNA, 19 nt, Homo sapiens
  misc_RNA (1)...(19): siRNA sense strand
gaucuaagcaguggcaucu

SEQ ID NO: 1745906 - RNA, 19 nt, Homo sapiens
  misc_RNA (1)...(19): siRNA sense strand
caauauccagcgagagaaa

SEQ ID NO: 1745907 - RNA, 19 nt, Homo sapiens
  misc_RNA (1)...(19): siRNA sense strand
gggcuagaauccgggaguu

SEQ ID NO: 1745908 - RNA, 19 nt, Homo sapiens
  misc_RNA (1)...(19): siRNA sense strand
ccagcgagagaaagaguuu

SEQ ID NO: 1745909 - RNA, 19 nt, Homo sapiens
  misc_RNA (1)...(19): siRNA sense strand
caagccagcacccauguuc

SEQ ID NO: 1745910 - RNA, 19 nt, Homo sapiens
  misc_RNA (1)...(19): siRNA sense strand
cguggaagcuacacuuacu

SEQ ID NO: 1745911 - RNA, 19 nt, Homo sapiens
  misc_RNA (1)...(19): siRNA sense strand
aagcucgcgucaucacuga

SEQ ID NO: 1745912 - RNA, 19 nt, Homo sapiens
  misc_RNA (1)...(19): siRNA sense strand
cugaauuagccaccaagua

SEQ ID NO: 1745913 - RNA, 19 nt, Homo sapiens
  misc_RNA (1)...(19): siRNA sense strand
gcuagcccucugccucuuu

SEQ ID NO: 1745914 - RNA, 19 nt, Homo sapiens
  misc_RNA (1)...(19): siRNA sense strand
uguauuauucugcguggaa

SEQ ID NO: 1745915 - RNA, 19 nt, Homo sapiens
  misc_RNA (1)...(19): siRNA sense strand
ugcggaagcuggugaaagc

SEQ ID NO: 1745916 - RNA, 19 nt, Homo sapiens
  misc_RNA (1)...(19): siRNA sense strand
ggugaaagcucgcgucauc

SEQ ID NO: 1745917 - RNA, 19 nt, Homo sapiens
  misc_RNA (1)...(19): siRNA sense strand
guuccuggaugacuccuuu

SEQ ID NO: 1745918 - RNA, 19 nt, Homo sapiens
  misc_RNA (1)...(19): siRNA sense strand
ugaauuagccaccaaguac

SEQ ID NO: 1745919 - RNA, 19 nt, Homo sapiens
  misc_RNA (1)...(19): siRNA sense strand
uccugaaucuggacucuaa

SEQ ID NO: 1745920 - RNA, 19 nt, Homo sapiens
  misc_RNA (1)...(19): siRNA sense strand
gaugacuccuuucgcaagu

SEQ ID NO: 1745921 - RNA, 19 nt, Homo sapiens
  misc_RNA (1)...(19): siRNA sense strand
gggaguucgugccgccuuu

SEQ ID NO: 1745922 - RNA, 19 nt, Homo sapiens
  misc_RNA (1)...(19): siRNA sense strand
cacaauauccagcgagaga

SEQ ID NO: 1745923 - RNA, 19 nt, Homo sapiens
  misc_RNA (1)...(19): siRNA sense strand
caauauccagcgagagaaa

SEQ ID NO: 1745924 - RNA, 19 nt, Homo sapiens
  misc_RNA (1)...(19): siRNA sense strand
gggcuagaauccgggaguu

SEQ ID NO: 1745925 - RNA, 19 nt, Homo sapiens
  misc_RNA (1)...(19): siRNA sense strand
ccagcgagagaaagaguuu

SEQ ID NO: 1745926 - RNA, 19 nt, Homo sapiens
  misc_RNA (1)...(19): siRNA sense strand
caagccagcacccauguuc

SEQ ID NO: 1745927 - RNA, 19 nt, Homo sapiens
  misc_RNA (1)...(19): siRNA sense strand
cguggaagcuacacuuacu

SEQ ID NO: 1745928 - RNA, 19 nt, Homo sapiens
  misc_RNA (1)...(19): siRNA sense strand
aagcucgcgucaucacuga

SEQ ID NO: 1745929 - RNA, 19 nt, Homo sapiens
  misc_RNA (1)...(19): siRNA sense strand
cugaauuagccaccaagua

SEQ ID NO: 1745930 - RNA, 19 nt, Homo sapiens
  misc_RNA (1)...(19): siRNA sense strand
gcuagcccucugccucuuu

SEQ ID NO: 1745931 - RNA, 19 nt, Homo sapiens
  misc_RNA (1)...(19): siRNA sense strand
uguauuauucugcguggaa

SEQ ID NO: 1745932 - RNA, 19 nt, Homo sapiens
  misc_RNA (1)...(19): siRNA sense strand
ugcggaagcuggugaaagc

SEQ ID NO: 1745933 - RNA, 19 nt, Homo sapiens
  misc_RNA (1)...(19): siRNA sense strand
ggugaaagcucgcgucauc

SEQ ID NO: 1745934 - RNA, 19 nt, Homo sapiens
  misc_RNA (1)...(19): siRNA sense strand
guuccuggaugacuccuuu

SEQ ID NO: 1745935 - RNA, 19 nt, Homo sapiens
  misc_RNA (1)...(19): siRNA sense strand
ucuaagcaguggcaucuga

SEQ ID NO: 1745936 - RNA, 19 nt, Homo sapiens
  misc_RNA (1)...(19): siRNA sense strand
ugaauuagccaccaaguac

SEQ ID NO: 1745937 - RNA, 19 nt, Homo sapiens
  misc_RNA (1)...(19): siRNA sense strand
uccugaaucuggacucuaa

SEQ ID NO: 1745938 - RNA, 19 nt, Homo sapiens
  misc_RNA (1)...(19): siRNA sense strand
gaugacuccuuucgcaagu

SEQ ID NO: 1745939 - RNA, 19 nt, Homo sapiens
  misc_RNA (1)...(19): siRNA sense strand
gggaguucgugccgccuuu

SEQ ID NO: 1745940 - RNA, 19 nt, Homo sapiens
  misc_RNA (1)...(19): siRNA sense strand
cacaauauccagcgagaga

SEQ ID NO: 1745941 - RNA, 19 nt, Homo sapiens
  misc_RNA (1)...(19): siRNA sense strand
gaucuaagcaguggcaucu

SEQ ID NO: 1745942 - RNA, 19 nt, Homo sapiens
  misc_RNA (1)...(19): siRNA sense strand
caauauccagcgagagaaa

SEQ ID NO: 1745943 - RNA, 19 nt, Homo sapiens
  misc_RNA (1)...(19): siRNA sense strand
gggcuagaauccgggaguu

SEQ ID NO: 1745944 - RNA, 19 nt, Homo sapiens
  misc_RNA (1)...(19): siRNA sense strand
ccagcgagagaaagaguuu

SEQ ID NO: 1745945 - RNA, 19 nt, Homo sapiens
  misc_RNA (1)...(19): siRNA sense strand
caagccagcacccauguuc

SEQ ID NO: 1745946 - RNA, 19 nt, Homo sapiens
  misc_RNA (1)...(19): siRNA sense strand
cguggaagcuacacuuacu

SEQ ID NO: 1745947 - RNA, 19 nt, Homo sapiens
  misc_RNA (1)...(19): siRNA sense strand
aagcucgcgucaucacuga

SEQ ID NO: 1745948 - RNA, 19 nt, Homo sapiens
  misc_RNA (1)...(19): siRNA sense strand
cugaauuagccaccaagua

SEQ ID NO: 1745949 - RNA, 19 nt, Homo sapiens
  misc_RNA (1)...(19): siRNA sense strand
gcuagcccucugccucuuu

SEQ ID NO: 1745950 - RNA, 19 nt, Homo sapiens
  misc_RNA (1)...(19): siRNA sense strand
uguauuauucugcguggaa

SEQ ID NO: 1745951 - RNA, 19 nt, Homo sapiens
  misc_RNA (1)...(19): siRNA sense strand
ugcggaagcuggugaaagc

SEQ ID NO: 1745952 - RNA, 19 nt, Homo sapiens
  misc_RNA (1)...(19): siRNA sense strand
ggugaaagcucgcgucauc

SEQ ID NO: 1745953 - RNA, 19 nt, Homo sapiens
  misc_RNA (1)...(19): siRNA sense strand
guuccuggaugacuccuuu

SEQ ID NO: 1745954 - RNA, 19 nt, Homo sapiens
  misc_RNA (1)...(19): siRNA sense strand
ucuaagcaguggcaucuga

SEQ ID NO: 1745955 - RNA, 19 nt, Homo sapiens
  misc_RNA (1)...(19): siRNA sense strand
ugaauuagccaccaaguac

SEQ ID NO: 1745956 - RNA, 19 nt, Homo sapiens
  misc_RNA (1)...(19): siRNA sense strand
uccugaaucuggacucuaa

SEQ ID NO: 1745957 - RNA, 19 nt, Homo sapiens
  misc_RNA (1)...(19): siRNA sense strand
gaugacuccuuucgcaagu

SEQ ID NO: 1745958 - RNA, 19 nt, Homo sapiens
  misc_RNA (1)...(19): siRNA sense strand
gggaguucgugccgccuuu

SEQ ID NO: 1745959 - RNA, 19 nt, Homo sapiens
  misc_RNA (1)...(19): siRNA sense strand
cacaauauccagcgagaga

SEQ ID NO: 1745960 - RNA, 19 nt, Homo sapiens
  misc_RNA (1)...(19): siRNA sense strand
gaucuaagcaguggcaucu

SEQ ID NO: 1745961 - RNA, 19 nt, Homo sapiens
  misc_RNA (1)...(19): siRNA sense strand
caauauccagcgagagaaa

SEQ ID NO: 1745962 - RNA, 19 nt, Homo sapiens
  misc_RNA (1)...(19): siRNA sense strand
gggcuagaauccgggaguu

SEQ ID NO: 1745963 - RNA, 19 nt, Homo sapiens
  misc_RNA (1)...(19): siRNA sense strand
ccagcgagagaaagaguuu

SEQ ID NO: 1745964 - RNA, 19 nt, Homo sapiens
  misc_RNA (1)...(19): siRNA sense strand
caagccagcacccauguuc

SEQ ID NO: 1745965 - RNA, 19 nt, Homo sapiens
  misc_RNA (1)...(19): siRNA sense strand
cguggaagcuacacuuacu

SEQ ID NO: 1745966 - RNA, 19 nt, Homo sapiens
  misc_RNA (1)...(19): siRNA sense strand
aagcucgcgucaucacuga

SEQ ID NO: 1745967 - RNA, 19 nt, Homo sapiens
  misc_RNA (1)...(19): siRNA sense strand
cugaauuagccaccaagua

SEQ ID NO: 1745968 - RNA, 19 nt, Homo sapiens
  misc_RNA (1)...(19): siRNA sense strand
gcuagcccucugccucuuu

SEQ ID NO: 1745969 - RNA, 19 nt, Homo sapiens
  misc_RNA (1)...(19): siRNA sense strand
uguauuauucugcguggaa

SEQ ID NO: 1745970 - RNA, 19 nt, Homo sapiens
  misc_RNA (1)...(19): siRNA sense strand
ugcggaagcuggugaaagc

SEQ ID NO: 1745971 - RNA, 19 nt, Homo sapiens
  misc_RNA (1)...(19): siRNA sense strand
ggugaaagcucgcgucauc

SEQ ID NO: 1745972 - RNA, 19 nt, Homo sapiens
  misc_RNA (1)...(19): siRNA sense strand
guuccuggaugacuccuuu

SEQ ID NO: 1745973 - RNA, 19 nt, Homo sapiens
  misc_RNA (1)...(19): siRNA sense strand
ugaauuagccaccaaguac

SEQ ID NO: 1745974 - RNA, 19 nt, Homo sapiens
  misc_RNA (1)...(19): siRNA sense strand
uccugaaucuggacucuaa

SEQ ID NO: 1745975 - RNA, 19 nt, Homo sapiens
  misc_RNA (1)...(19): siRNA sense strand
gaugacuccuuucgcaagu

SEQ ID NO: 1745976 - RNA, 19 nt, Homo sapiens
  misc_RNA (1)...(19): siRNA sense strand
gggaguucgugccgccuuu

SEQ ID NO: 1745977 - RNA, 19 nt, Homo sapiens
  misc_RNA (1)...(19): siRNA sense strand
cacaauauccagcgagaga

SEQ ID NO: 1745978 - RNA, 19 nt, Homo sapiens
  misc_RNA (1)...(19): siRNA sense strand
caauauccagcgagagaaa

SEQ ID NO: 1745979 - RNA, 19 nt, Homo sapiens
  misc_RNA (1)...(19): siRNA sense strand
gggcuagaauccgggaguu

SEQ ID NO: 1745980 - RNA, 19 nt, Homo sapiens
  misc_RNA (1)...(19): siRNA sense strand
ccagcgagagaaagaguuu

SEQ ID NO: 1745981 - RNA, 19 nt, Homo sapiens
  misc_RNA (1)...(19): siRNA sense strand
caagccagcacccauguuc

SEQ ID NO: 1745982 - RNA, 19 nt, Homo sapiens
  misc_RNA (1)...(19): siRNA sense strand
cguggaagcuacacuuacu

SEQ ID NO: 1745983 - RNA, 19 nt, Homo sapiens
  misc_RNA (1)...(19): siRNA sense strand
aagcucgcgucaucacuga

SEQ ID NO: 1745984 - RNA, 19 nt, Homo sapiens
  misc_RNA (1)...(19): siRNA sense strand
cugaauuagccaccaagua

SEQ ID NO: 1745985 - RNA, 19 nt, Homo sapiens
  misc_RNA (1)...(19): siRNA sense strand
gcuagcccucugccucuuu

SEQ ID NO: 1745986 - RNA, 19 nt, Homo sapiens
  misc_RNA (1)...(19): siRNA sense strand
uguauuauucugcguggaa

SEQ ID NO: 1745987 - RNA, 19 nt, Homo sapiens
  misc_RNA (1)...(19): siRNA sense strand
ugcggaagcuggugaaagc

SEQ ID NO: 1745988 - RNA, 19 nt, Homo sapiens
  misc_RNA (1)...(19): siRNA sense strand
ggugaaagcucgcgucauc

SEQ ID NO: 1745989 - RNA, 19 nt, Homo sapiens
  misc_RNA (1)...(19): siRNA sense strand
guuccuggaugacuccuuu

SEQ ID NO: 1745990 - RNA, 19 nt, Homo sapiens
  misc_RNA (1)...(19): siRNA sense strand
ucuaagcaguggcaucuga

SEQ ID NO: 1745991 - RNA, 19 nt, Homo sapiens
  misc_RNA (1)...(19): siRNA sense strand
ugaauuagccaccaaguac

SEQ ID NO: 1745992 - RNA, 19 nt, Homo sapiens
  misc_RNA (1)...(19): siRNA sense strand
uccugaaucuggacucuaa

SEQ ID NO: 1745993 - RNA, 19 nt, Homo sapiens
  misc_RNA (1)...(19): siRNA sense strand
gaugacuccuuucgcaagu

SEQ ID NO: 1745994 - RNA, 19 nt, Homo sapiens
  misc_RNA (1)...(19): siRNA sense strand
gggaguucgugccgccuuu

SEQ ID NO: 1745995 - RNA, 19 nt, Homo sapiens
  misc_RNA (1)...(19): siRNA sense strand
cacaauauccagcgagaga

SEQ ID NO: 1745996 - RNA, 19 nt, Homo sapiens
  misc_RNA (1)...(19): siRNA sense strand
gaucuaagcaguggcaucu

SEQ ID NO: 1745997 - RNA, 19 nt, Homo sapiens
  misc_RNA (1)...(19): siRNA sense strand
caauauccagcgagagaaa

SEQ ID NO: 1745998 - RNA, 19 nt, Homo sapiens
  misc_RNA (1)...(19): siRNA sense strand
gggcuagaauccgggaguu

SEQ ID NO: 1745999 - RNA, 19 nt, Homo sapiens
  misc_RNA (1)...(19): siRNA sense strand
ccagcgagagaaagaguuu

SEQ ID NO: 1746000 - RNA, 19 nt, Homo sapiens
  misc_RNA (1)...(19): siRNA sense strand
caagccagcacccauguuc

SEQ ID NO: 1746001 - RNA, 19 nt, Homo sapiens
  misc_RNA (1)...(19): siRNA sense strand
cguggaagcuacacuuacu

SEQ ID NO: 1746002 - RNA, 19 nt, Homo sapiens
  misc_RNA (1)...(19): siRNA sense strand
aagcucgcgucaucacuga

SEQ ID NO: 1746003 - RNA, 19 nt, Homo sapiens
  misc_RNA (1)...(19): siRNA sense strand
cugaauuagccaccaagua

SEQ ID NO: 1746004 - RNA, 19 nt, Homo sapiens
  misc_RNA (1)...(19): siRNA sense strand
gcuagcccucugccucuuu

SEQ ID NO: 1746005 - RNA, 19 nt, Homo sapiens
  misc_RNA (1)...(19): siRNA sense strand
uguauuauucugcguggaa

SEQ ID NO: 1746006 - RNA, 19 nt, Homo sapiens
  misc_RNA (1)...(19): siRNA sense strand
ugcggaagcuggugaaagc

SEQ ID NO: 1746007 - RNA, 19 nt, Homo sapiens
  misc_RNA (1)...(19): siRNA sense strand
guuccuggaugacuccuuu

SEQ ID NO: 1746008 - RNA, 19 nt, Homo sapiens
  misc_RNA (1)...(19): siRNA sense strand
ugaauuagccaccaaguac

SEQ ID NO: 1746009 - RNA, 19 nt, Homo sapiens
  misc_RNA (1)...(19): siRNA sense strand
uccugaaucuggacucuaa

SEQ ID NO: 1746010 - RNA, 19 nt, Homo sapiens
  misc_RNA (1)...(19): siRNA sense strand
gaugacuccuuucgcaagu

SEQ ID NO: 1746011 - RNA, 19 nt, Homo sapiens
  misc_RNA (1)...(19): siRNA sense strand
gggaguucgugccgccuuu

SEQ ID NO: 1746012 - RNA, 19 nt, Homo sapiens
  misc_RNA (1)...(19): siRNA sense strand
gggcuagaauccgggaguu

SEQ ID NO: 1746013 - RNA, 19 nt, Homo sapiens
  misc_RNA (1)...(19): siRNA sense strand
caagccagcacccauguuc

SEQ ID NO: 1746014 - RNA, 19 nt, Homo sapiens
  misc_RNA (1)...(19): siRNA sense strand
cguggaagcuacacuuacu

SEQ ID NO: 1746015 - RNA, 19 nt, Homo sapiens
  misc_RNA (1)...(19): siRNA sense strand
cugaauuagccaccaagua

SEQ ID NO: 1746016 - RNA, 19 nt, Homo sapiens
  misc_RNA (1)...(19): siRNA sense strand
gcuagcccucugccucuuu

SEQ ID NO: 1746017 - RNA, 19 nt, Homo sapiens
  misc_RNA (1)...(19): siRNA sense strand
uguauuauucugcguggaa

SEQ ID NO: 1746018 - RNA, 19 nt, Homo sapiens
  misc_RNA (1)...(19): siRNA sense strand
ggugaaagcucgcgucauc

SEQ ID NO: 1746019 - RNA, 19 nt, Homo sapiens
  misc_RNA (1)...(19): siRNA sense strand
guuccuggaugacuccuuu

SEQ ID NO: 1746020 - RNA, 19 nt, Homo sapiens
  misc_RNA (1)...(19): siRNA sense strand
ucuaagcaguggcaucuga

SEQ ID NO: 1746021 - RNA, 19 nt, Homo sapiens
  misc_RNA (1)...(19): siRNA sense strand
ugaauuagccaccaaguac

SEQ ID NO: 1746022 - RNA, 19 nt, Homo sapiens
  misc_RNA (1)...(19): siRNA sense strand
uccugaaucuggacucuaa

SEQ ID NO: 1746023 - RNA, 19 nt, Homo sapiens
  misc_RNA (1)...(19): siRNA sense strand
gaugacuccuuucgcaagu

SEQ ID NO: 1746024 - RNA, 19 nt, Homo sapiens
  misc_RNA (1)...(19): siRNA sense strand
gggaguucgugccgccuuu

SEQ ID NO: 1746025 - RNA, 19 nt, Homo sapiens
  misc_RNA (1)...(19): siRNA sense strand
cacaauauccagcgagaga

SEQ ID NO: 1746026 - RNA, 19 nt, Homo sapiens
  misc_RNA (1)...(19): siRNA sense strand
gaucuaagcaguggcaucu

SEQ ID NO: 1746027 - RNA, 19 nt, Homo sapiens
  misc_RNA (1)...(19): siRNA sense strand
caauauccagcgagagaaa

SEQ ID NO: 1746028 - RNA, 19 nt, Homo sapiens
  misc_RNA (1)...(19): siRNA sense strand
gggcuagaauccgggaguu

SEQ ID NO: 1746029 - RNA, 19 nt, Homo sapiens
  misc_RNA (1)...(19): siRNA sense strand
ccagcgagagaaagaguuu

SEQ ID NO: 1746030 - RNA, 19 nt, Homo sapiens
  misc_RNA (1)...(19): siRNA sense strand
caagccagcacccauguuc

SEQ ID NO: 1746031 - RNA, 19 nt, Homo sapiens
  misc_RNA (1)...(19): siRNA sense strand
cguggaagcuacacuuacu

SEQ ID NO: 1746032 - RNA, 19 nt, Homo sapiens
  misc_RNA (1)...(19): siRNA sense strand
aagcucgcgucaucacuga

SEQ ID NO: 1746033 - RNA, 19 nt, Homo sapiens
  misc_RNA (1)...(19): siRNA sense strand
cugaauuagccaccaagua

SEQ ID NO: 1746034 - RNA, 19 nt, Homo sapiens
  misc_RNA (1)...(19): siRNA sense strand
gcuagcccucugccucuuu

SEQ ID NO: 1746035 - RNA, 19 nt, Homo sapiens
  misc_RNA (1)...(19): siRNA sense strand
uguauuauucugcguggaa

SEQ ID NO: 1746036 - RNA, 19 nt, Homo sapiens
  misc_RNA (1)...(19): siRNA sense strand
ugcggaagcuggugaaagc

SEQ ID NO: 1746037 - RNA, 19 nt, Homo sapiens
  misc_RNA (1)...(19): siRNA sense strand
ggugaaagcucgcgucauc

SEQ ID NO: 1746038 - RNA, 19 nt, Homo sapiens
  misc_RNA (1)...(19): siRNA sense strand
guuccuggaugacuccuuu

SEQ ID NO: 1746039 - RNA, 19 nt, Homo sapiens
  misc_RNA (1)...(19): siRNA sense strand
ucuaagcaguggcaucuga

SEQ ID NO: 1746040 - RNA, 19 nt, Homo sapiens
  misc_RNA (1)...(19): siRNA sense strand
ugaauuagccaccaaguac

SEQ ID NO: 1746041 - RNA, 19 nt, Homo sapiens
  misc_RNA (1)...(19): siRNA sense strand
uccugaaucuggacucuaa

SEQ ID NO: 1746042 - RNA, 19 nt, Homo sapiens
  misc_RNA (1)...(19): siRNA sense strand
gaugacuccuuucgcaagu

SEQ ID NO: 1746043 - RNA, 19 nt, Homo sapiens
  misc_RNA (1)...(19): siRNA sense strand
gggaguucgugccgccuuu

SEQ ID NO: 1746044 - RNA, 19 nt, Homo sapiens
  misc_RNA (1)...(19): siRNA sense strand
cacaauauccagcgagaga

SEQ ID NO: 1746045 - RNA, 19 nt, Homo sapiens
  misc_RNA (1)...(19): siRNA sense strand
gaucuaagcaguggcaucu

SEQ ID NO: 1746046 - RNA, 19 nt, Homo sapiens
  misc_RNA (1)...(19): siRNA sense strand
caauauccagcgagagaaa

SEQ ID NO: 1746047 - RNA, 19 nt, Homo sapiens
  misc_RNA (1)...(19): siRNA sense strand
gggcuagaauccgggaguu

SEQ ID NO: 1746048 - RNA, 19 nt, Homo sapiens
  misc_RNA (1)...(19): siRNA sense strand
ccagcgagagaaagaguuu

SEQ ID NO: 1746049 - RNA, 19 nt, Homo sapiens
  misc_RNA (1)...(19): siRNA sense strand
caagccagcacccauguuc

SEQ ID NO: 1746050 - RNA, 19 nt, Homo sapiens
  misc_RNA (1)...(19): siRNA sense strand
cguggaagcuacacuuacu

SEQ ID NO: 1746051 - RNA, 19 nt, Homo sapiens
  misc_RNA (1)...(19): siRNA sense strand
aagcucgcgucaucacuga

SEQ ID NO: 1746052 - RNA, 19 nt, Homo sapiens
  misc_RNA (1)...(19): siRNA sense strand
cugaauuagccaccaagua

SEQ ID NO: 1746053 - RNA, 19 nt, Homo sapiens
  misc_RNA (1)...(19): siRNA sense strand
gcuagcccucugccucuuu

SEQ ID NO: 1746054 - RNA, 19 nt, Homo sapiens
  misc_RNA (1)...(19): siRNA sense strand
uguauuauucugcguggaa

SEQ ID NO: 1746055 - RNA, 19 nt, Homo sapiens
  misc_RNA (1)...(19): siRNA sense strand
ugcggaagcuggugaaagc

SEQ ID NO: 1746056 - RNA, 19 nt, Homo sapiens
  misc_RNA (1)...(19): siRNA sense strand
ggugaaagcucgcgucauc

SEQ ID NO: 1746057 - RNA, 19 nt, Homo sapiens
  misc_RNA (1)...(19): siRNA sense strand
guuccuggaugacuccuuu

SEQ ID NO: 1746058 - RNA, 19 nt, Homo sapiens
  misc_RNA (1)...(19): siRNA sense strand
ucuaagcaguggcaucuga

SEQ ID NO: 1746059 - RNA, 19 nt, Homo sapiens
  misc_RNA (1)...(19): siRNA sense strand
ugaauuagccaccaaguac

SEQ ID NO: 1746060 - RNA, 19 nt, Homo sapiens
  misc_RNA (1)...(19): siRNA sense strand
uccugaaucuggacucuaa

SEQ ID NO: 1746061 - RNA, 19 nt, Homo sapiens
  misc_RNA (1)...(19): siRNA sense strand
gaugacuccuuucgcaagu

SEQ ID NO: 1746062 - RNA, 19 nt, Homo sapiens
  misc_RNA (1)...(19): siRNA sense strand
gggaguucgugccgccuuu

SEQ ID NO: 1746063 - RNA, 19 nt, Homo sapiens
  misc_RNA (1)...(19): siRNA sense strand
cacaauauccagcgagaga

SEQ ID NO: 1746064 - RNA, 19 nt, Homo sapiens
  misc_RNA (1)...(19): siRNA sense strand
gaucuaagcaguggcaucu

SEQ ID NO: 1746065 - RNA, 19 nt, Homo sapiens
  misc_RNA (1)...(19): siRNA sense strand
caauauccagcgagagaaa

SEQ ID NO: 1746066 - RNA, 19 nt, Homo sapiens
  misc_RNA (1)...(19): siRNA sense strand
gggcuagaauccgggaguu

SEQ ID NO: 1746067 - RNA, 19 nt, Homo sapiens
  misc_RNA (1)...(19): siRNA sense strand
ccagcgagagaaagaguuu

SEQ ID NO: 1746068 - RNA, 19 nt, Homo sapiens
  misc_RNA (1)...(19): siRNA sense strand
caagccagcacccauguuc

SEQ ID NO: 1746069 - RNA, 19 nt, Homo sapiens
  misc_RNA (1)...(19): siRNA sense strand
cguggaagcuacacuuacu

SEQ ID NO: 1746070 - RNA, 19 nt, Homo sapiens
  misc_RNA (1)...(19): siRNA sense strand
aagcucgcgucaucacuga

SEQ ID NO: 1746071 - RNA, 19 nt, Homo sapiens
  misc_RNA (1)...(19): siRNA sense strand
cugaauuagccaccaagua

SEQ ID NO: 1746072 - RNA, 19 nt, Homo sapiens
  misc_RNA (1)...(19): siRNA sense strand
gcuagcccucugccucuuu

SEQ ID NO: 1746073 - RNA, 19 nt, Homo sapiens
  misc_RNA (1)...(19): siRNA sense strand
uguauuauucugcguggaa

SEQ ID NO: 1746074 - RNA, 19 nt, Homo sapiens
  misc_RNA (1)...(19): siRNA sense strand
ugcggaagcuggugaaagc

SEQ ID NO: 1746075 - RNA, 19 nt, Homo sapiens
  misc_RNA (1)...(19): siRNA sense strand
ggugaaagcucgcgucauc

SEQ ID NO: 1746076 - RNA, 19 nt, Homo sapiens
  misc_RNA (1)...(19): siRNA sense strand
guuccuggaugacuccuuu

SEQ ID NO: 1746077 - RNA, 19 nt, Homo sapiens
  misc_RNA (1)...(19): siRNA sense strand
ugaauuagccaccaaguac

SEQ ID NO: 1746078 - RNA, 19 nt, Homo sapiens
  misc_RNA (1)...(19): siRNA sense strand
uccugaaucuggacucuaa

SEQ ID NO: 1746079 - RNA, 19 nt, Homo sapiens
  misc_RNA (1)...(19): siRNA sense strand
gaugacuccuuucgcaagu

SEQ ID NO: 1746080 - RNA, 19 nt, Homo sapiens
  misc_RNA (1)...(19): siRNA sense strand
gggaguucgugccgccuuu

SEQ ID NO: 1746081 - RNA, 19 nt, Homo sapiens
  misc_RNA (1)...(19): siRNA sense strand
cacaauauccagcgagaga

SEQ ID NO: 1746082 - RNA, 19 nt, Homo sapiens
  misc_RNA (1)...(19): siRNA sense strand
caauauccagcgagagaaa

SEQ ID NO: 1746083 - RNA, 19 nt, Homo sapiens
  misc_RNA (1)...(19): siRNA sense strand
gggcuagaauccgggaguu

SEQ ID NO: 1746084 - RNA, 19 nt, Homo sapiens
  misc_RNA (1)...(19): siRNA sense strand
ccagcgagagaaagaguuu

SEQ ID NO: 1746085 - RNA, 19 nt, Homo sapiens
  misc_RNA (1)...(19): siRNA sense strand
caagccagcacccauguuc

SEQ ID NO: 1746086 - RNA, 19 nt, Homo sapiens
  misc_RNA (1)...(19): siRNA sense strand
cguggaagcuacacuuacu

SEQ ID NO: 1746087 - RNA, 19 nt, Homo sapiens
  misc_RNA (1)...(19): siRNA sense strand
aagcucgcgucaucacuga

SEQ ID NO: 1746088 - RNA, 19 nt, Homo sapiens
  misc_RNA (1)...(19): siRNA sense strand
cugaauuagccaccaagua

SEQ ID NO: 1746089 - RNA, 19 nt, Homo sapiens
  misc_RNA (1)...(19): siRNA sense strand
gcuagcccucugccucuuu

SEQ ID NO: 1746090 - RNA, 19 nt, Homo sapiens
  misc_RNA (1)...(19): siRNA sense strand
uguauuauucugcguggaa

SEQ ID NO: 1746091 - RNA, 19 nt, Homo sapiens
  misc_RNA (1)...(19): siRNA sense strand
ugcggaagcuggugaaagc

SEQ ID NO: 1746092 - RNA, 19 nt, Homo sapiens
  misc_RNA (1)...(19): siRNA sense strand
ggugaaagcucgcgucauc

SEQ ID NO: 1746093 - RNA, 19 nt, Homo sapiens
  misc_RNA (1)...(19): siRNA sense strand
guuccuggaugacuccuuu

SEQ ID NO: 1746094 - RNA, 19 nt, Homo sapiens
  misc_RNA (1)...(19): siRNA sense strand
ucuaagcaguggcaucuga

SEQ ID NO: 1746095 - RNA, 19 nt, Homo sapiens
  misc_RNA (1)...(19): siRNA sense strand
ugaauuagccaccaaguac

SEQ ID NO: 1746096 - RNA, 19 nt, Homo sapiens
  misc_RNA (1)...(19): siRNA sense strand
uccugaaucuggacucuaa

SEQ ID NO: 1746097 - RNA, 19 nt, Homo sapiens
  misc_RNA (1)...(19): siRNA sense strand
gaugacuccuuucgcaagu

SEQ ID NO: 1746098 - RNA, 19 nt, Homo sapiens
  misc_RNA (1)...(19): siRNA sense strand
gggaguucgugccgccuuu

SEQ ID NO: 1746099 - RNA, 19 nt, Homo sapiens
  misc_RNA (1)...(19): siRNA sense strand
cacaauauccagcgagaga

SEQ ID NO: 1746100 - RNA, 19 nt, Homo sapiens
  misc_RNA (1)...(19): siRNA sense strand
gaucuaagcaguggcaucu

SEQ ID NO: 1746101 - RNA, 19 nt, Homo sapiens
  misc_RNA (1)...(19): siRNA sense strand
caauauccagcgagagaaa

SEQ ID NO: 1746102 - RNA, 19 nt, Homo sapiens
  misc_RNA (1)...(19): siRNA sense strand
gggcuagaauccgggaguu

SEQ ID NO: 1746103 - RNA, 19 nt, Homo sapiens
  misc_RNA (1)...(19): siRNA sense strand
ccagcgagagaaagaguuu

SEQ ID NO: 1746104 - RNA, 19 nt, Homo sapiens
  misc_RNA (1)...(19): siRNA sense strand
caagccagcacccauguuc

SEQ ID NO: 1746105 - RNA, 19 nt, Homo sapiens
  misc_RNA (1)...(19): siRNA sense strand
cguggaagcuacacuuacu

SEQ ID NO: 1746106 - RNA, 19 nt, Homo sapiens
  misc_RNA (1)...(19): siRNA sense strand
aagcucgcgucaucacuga

SEQ ID NO: 1746107 - RNA, 19 nt, Homo sapiens
  misc_RNA (1)...(19): siRNA sense strand
cugaauuagccaccaagua

SEQ ID NO: 1746108 - RNA, 19 nt, Homo sapiens
  misc_RNA (1)...(19): siRNA sense strand
gcuagcccucugccucuuu

SEQ ID NO: 1746109 - RNA, 19 nt, Homo sapiens
  misc_RNA (1)...(19): siRNA sense strand
uguauuauucugcguggaa

SEQ ID NO: 1746110 - RNA, 19 nt, Homo sapiens
  misc_RNA (1)...(19): siRNA sense strand
ugcggaagcuggugaaagc

SEQ ID NO: 1746111 - RNA, 19 nt, Homo sapiens
  misc_RNA (1)...(19): siRNA sense strand
ggugaaagcucgcgucauc

SEQ ID NO: 1746112 - RNA, 19 nt, Homo sapiens
  misc_RNA (1)...(19): siRNA sense strand
guuccuggaugacuccuuu

SEQ ID NO: 1746113 - RNA, 19 nt, Homo sapiens
  misc_RNA (1)...(19): siRNA sense strand
ugaauuagccaccaaguac

SEQ ID NO: 1746114 - RNA, 19 nt, Homo sapiens
  misc_RNA (1)...(19): siRNA sense strand
uccugaaucuggacucuaa

SEQ ID NO: 1746115 - RNA, 19 nt, Homo sapiens
  misc_RNA (1)...(19): siRNA sense strand
gaugacuccuuucgcaagu

SEQ ID NO: 1746116 - RNA, 19 nt, Homo sapiens
  misc_RNA (1)...(19): siRNA sense strand
gggaguucgugccgccuuu

SEQ ID NO: 1746117 - RNA, 19 nt, Homo sapiens
  misc_RNA (1)...(19): siRNA sense strand
cacaauauccagcgagaga

SEQ ID NO: 1746118 - RNA, 19 nt, Homo sapiens
  misc_RNA (1)...(19): siRNA sense strand
caauauccagcgagagaaa

SEQ ID NO: 1746119 - RNA, 19 nt, Homo sapiens
  misc_RNA (1)...(19): siRNA sense strand
gggcuagaauccgggaguu

SEQ ID NO: 1746120 - RNA, 19 nt, Homo sapiens
  misc_RNA (1)...(19): siRNA sense strand
ccagcgagagaaagaguuu

SEQ ID NO: 1746121 - RNA, 19 nt, Homo sapiens
  misc_RNA (1)...(19): siRNA sense strand
caagccagcacccauguuc

SEQ ID NO: 1746122 - RNA, 19 nt, Homo sapiens
  misc_RNA (1)...(19): siRNA sense strand
cguggaagcuacacuuacu

SEQ ID NO: 1746123 - RNA, 19 nt, Homo sapiens
  misc_RNA (1)...(19): siRNA sense strand
aagcucgcgucaucacuga

SEQ ID NO: 1746124 - RNA, 19 nt, Homo sapiens
  misc_RNA (1)...(19): siRNA sense strand
cugaauuagccaccaagua

SEQ ID NO: 1746125 - RNA, 19 nt, Homo sapiens
  misc_RNA (1)...(19): siRNA sense strand
gcuagcccucugccucuuu

SEQ ID NO: 1746126 - RNA, 19 nt, Homo sapiens
  misc_RNA (1)...(19): siRNA sense strand
uguauuauucugcguggaa

SEQ ID NO: 1746127 - RNA, 19 nt, Homo sapiens
  misc_RNA (1)...(19): siRNA sense strand
ugcggaagcuggugaaagc

SEQ ID NO: 1746128 - RNA, 19 nt, Homo sapiens
  misc_RNA (1)...(19): siRNA sense strand
ggugaaagcucgcgucauc

SEQ ID NO: 1746129 - RNA, 19 nt, Homo sapiens
  misc_RNA (1)...(19): siRNA sense strand
guuccuggaugacuccuuu

SEQ ID NO: 1746130 - RNA, 19 nt, Homo sapiens
  misc_RNA (1)...(19): siRNA sense strand
ucuaagcaguggcaucuga

SEQ ID NO: 1746131 - RNA, 19 nt, Homo sapiens
  misc_RNA (1)...(19): siRNA sense strand
ugaauuagccaccaaguac

SEQ ID NO: 1746132 - RNA, 19 nt, Homo sapiens
  misc_RNA (1)...(19): siRNA sense strand
uccugaaucuggacucuaa

SEQ ID NO: 1746133 - RNA, 19 nt, Homo sapiens
  misc_RNA (1)...(19): siRNA sense strand
gaugacuccuuucgcaagu

SEQ ID NO: 1746134 - RNA, 19 nt, Homo sapiens
  misc_RNA (1)...(19): siRNA sense strand
gggaguucgugccgccuuu

SEQ ID NO: 1746135 - RNA, 19 nt, Homo sapiens
  misc_RNA (1)...(19): siRNA sense strand
cacaauauccagcgagaga

SEQ ID NO: 1746136 - RNA, 19 nt, Homo sapiens
  misc_RNA (1)...(19): siRNA sense strand
gaucuaagcaguggcaucu

SEQ ID NO: 1746137 - RNA, 19 nt, Homo sapiens
  misc_RNA (1)...(19): siRNA sense strand
caauauccagcgagagaaa

SEQ ID NO: 1746138 - RNA, 19 nt, Homo sapiens
  misc_RNA (1)...(19): siRNA sense strand
gggcuagaauccgggaguu

SEQ ID NO: 1746139 - RNA, 19 nt, Homo sapiens
  misc_RNA (1)...(19): siRNA sense strand
ccagcgagagaaagaguuu

SEQ ID NO: 1746140 - RNA, 19 nt, Homo sapiens
  misc_RNA (1)...(19): siRNA sense strand
caagccagcacccauguuc

SEQ ID NO: 1746141 - RNA, 19 nt, Homo sapiens
  misc_RNA (1)...(19): siRNA sense strand
cguggaagcuacacuuacu

SEQ ID NO: 1746142 - RNA, 19 nt, Homo sapiens
  misc_RNA (1)...(19): siRNA sense strand
aagcucgcgucaucacuga

SEQ ID NO: 1746143 - RNA, 19 nt, Homo sapiens
  misc_RNA (1)...(19): siRNA sense strand
cugaauuagccaccaagua

SEQ ID NO: 1746144 - RNA, 19 nt, Homo sapiens
  misc_RNA (1)...(19): siRNA sense strand
gcuagcccucugccucuuu

SEQ ID NO: 1746145 - RNA, 19 nt, Homo sapiens
  misc_RNA (1)...(19): siRNA sense strand
uguauuauucugcguggaa

SEQ ID NO: 1746146 - RNA, 19 nt, Homo sapiens
  misc_RNA (1)...(19): siRNA sense strand
ugcggaagcuggugaaagc

SEQ ID NO: 1746147 - RNA, 19 nt, Homo sapiens
  misc_RNA (1)...(19): siRNA sense strand
ggugaaagcucgcgucauc

SEQ ID NO: 1746148 - RNA, 19 nt, Homo sapiens
  misc_RNA (1)...(19): siRNA sense strand
guuccuggaugacuccuuu

SEQ ID NO: 1746149 - RNA, 19 nt, Homo sapiens
  misc_RNA (1)...(19): siRNA sense strand
ucuaagcaguggcaucuga

SEQ ID NO: 1746150 - RNA, 19 nt, Homo sapiens
  misc_RNA (1)...(19): siRNA sense strand
ugaauuagccaccaaguac

SEQ ID NO: 1746151 - RNA, 19 nt, Homo sapiens
  misc_RNA (1)...(19): siRNA sense strand
uccugaaucuggacucuaa

SEQ ID NO: 1746152 - RNA, 19 nt, Homo sapiens
  misc_RNA (1)...(19): siRNA sense strand
gaugacuccuuucgcaagu

SEQ ID NO: 1746153 - RNA, 19 nt, Homo sapiens
  misc_RNA (1)...(19): siRNA sense strand
gggaguucgugccgccuuu

SEQ ID NO: 1746154 - RNA, 19 nt, Homo sapiens
  misc_RNA (1)...(19): siRNA sense strand
cacaauauccagcgagaga

SEQ ID NO: 1746155 - RNA, 19 nt, Homo sapiens
  misc_RNA (1)...(19): siRNA sense strand
gaucuaagcaguggcaucu

SEQ ID NO: 1746156 - RNA, 19 nt, Homo sapiens
  misc_RNA (1)...(19): siRNA sense strand
caauauccagcgagagaaa

SEQ ID NO: 1746157 - RNA, 19 nt, Homo sapiens
  misc_RNA (1)...(19): siRNA sense strand
gggcuagaauccgggaguu

SEQ ID NO: 1746158 - RNA, 19 nt, Homo sapiens
  misc_RNA (1)...(19): siRNA sense strand
ccagcgagagaaagaguuu

SEQ ID NO: 1746159 - RNA, 19 nt, Homo sapiens
  misc_RNA (1)...(19): siRNA sense strand
caagccagcacccauguuc

SEQ ID NO: 1746160 - RNA, 19 nt, Homo sapiens
  misc_RNA (1)...(19): siRNA sense strand
cguggaagcuacacuuacu

SEQ ID NO: 1746161 - RNA, 19 nt, Homo sapiens
  misc_RNA (1)...(19): siRNA sense strand
aagcucgcgucaucacuga

SEQ ID NO: 1746162 - RNA, 19 nt, Homo sapiens
  misc_RNA (1)...(19): siRNA sense strand
cugaauuagccaccaagua

SEQ ID NO: 1746163 - RNA, 19 nt, Homo sapiens
  misc_RNA (1)...(19): siRNA sense strand
gcuagcccucugccucuuu

SEQ ID NO: 1746164 - RNA, 19 nt, Homo sapiens
  misc_RNA (1)...(19): siRNA sense strand
uguauuauucugcguggaa

SEQ ID NO: 1746165 - RNA, 19 nt, Homo sapiens
  misc_RNA (1)...(19): siRNA sense strand
ugcggaagcuggugaaagc

SEQ ID NO: 1746166 - RNA, 19 nt, Homo sapiens
  misc_RNA (1)...(19): siRNA sense strand
ggugaaagcucgcgucauc

SEQ ID NO: 1746167 - RNA, 19 nt, Homo sapiens
  misc_RNA (1)...(19): siRNA sense strand
guuccuggaugacuccuuu

SEQ ID NO: 1746168 - RNA, 19 nt, Homo sapiens
  misc_RNA (1)...(19): siRNA sense strand
ugaauuagccaccaaguac

SEQ ID NO: 1746169 - RNA, 19 nt, Homo sapiens
  misc_RNA (1)...(19): siRNA sense strand
uccugaaucuggacucuaa

SEQ ID NO: 1746170 - RNA, 19 nt, Homo sapiens
  misc_RNA (1)...(19): siRNA sense strand
gaugacuccuuucgcaagu

SEQ ID NO: 1746171 - RNA, 19 nt, Homo sapiens
  misc_RNA (1)...(19): siRNA sense strand
gggaguucgugccgccuuu

SEQ ID NO: 1746172 - RNA, 19 nt, Homo sapiens
  misc_RNA (1)...(19): siRNA sense strand
cacaauauccagcgagaga

SEQ ID NO: 1746173 - RNA, 19 nt, Homo sapiens
  misc_RNA (1)...(19): siRNA sense strand
caauauccagcgagagaaa

SEQ ID NO: 1746174 - RNA, 19 nt, Homo sapiens
  misc_RNA (1)...(19): siRNA sense strand
gggcuagaauccgggaguu

SEQ ID NO: 1746175 - RNA, 19 nt, Homo sapiens
  misc_RNA (1)...(19): siRNA sense strand
ccagcgagagaaagaguuu

SEQ ID NO: 1746176 - RNA, 19 nt, Homo sapiens
  misc_RNA (1)...(19): siRNA sense strand
caagccagcacccauguuc

SEQ ID NO: 1746177 - RNA, 19 nt, Homo sapiens
  misc_RNA (1)...(19): siRNA sense strand
cguggaagcuacacuuacu

SEQ ID NO: 1746178 - RNA, 19 nt, Homo sapiens
  misc_RNA (1)...(19): siRNA sense strand
aagcucgcgucaucacuga

SEQ ID NO: 1746179 - RNA, 19 nt, Homo sapiens
  misc_RNA (1)...(19): siRNA sense strand
cugaauuagccaccaagua

SEQ ID NO: 1746180 - RNA, 19 nt, Homo sapiens
  misc_RNA (1)...(19): siRNA sense strand
gcuagcccucugccucuuu

SEQ ID NO: 1746181 - RNA, 19 nt, Homo sapiens
  misc_RNA (1)...(19): siRNA sense strand
uguauuauucugcguggaa

SEQ ID NO: 1746182 - RNA, 19 nt, Homo sapiens
  misc_RNA (1)...(19): siRNA sense strand
ugcggaagcuggugaaagc

SEQ ID NO: 1746183 - RNA, 19 nt, Homo sapiens
  misc_RNA (1)...(19): siRNA sense strand
ggugaaagcucgcgucauc

SEQ ID NO: 1746184 - RNA, 19 nt, Homo sapiens
  misc_RNA (1)...(19): siRNA sense strand
guuccuggaugacuccuuu

SEQ ID NO: 1746185 - RNA, 19 nt, Homo sapiens
  misc_RNA (1)...(19): siRNA sense strand
ucuaagcaguggcaucuga

SEQ ID NO: 1746186 - RNA, 19 nt, Homo sapiens
  misc_RNA (1)...(19): siRNA sense strand
ugaauuagccaccaaguac

SEQ ID NO: 1746187 - RNA, 19 nt, Homo sapiens
  misc_RNA (1)...(19): siRNA sense strand
uccugaaucuggacucuaa

SEQ ID NO: 1746188 - RNA, 19 nt, Homo sapiens
  misc_RNA (1)...(19): siRNA sense strand
gaugacuccuuucgcaagu

SEQ ID NO: 1746189 - RNA, 19 nt, Homo sapiens
  misc_RNA (1)...(19): siRNA sense strand
gggaguucgugccgccuuu

SEQ ID NO: 1746190 - RNA, 19 nt, Homo sapiens
  misc_RNA (1)...(19): siRNA sense strand
cacaauauccagcgagaga

SEQ ID NO: 1746191 - RNA, 19 nt, Homo sapiens
  misc_RNA (1)...(19): siRNA sense strand
gaucuaagcaguggcaucu

SEQ ID NO: 1746192 - RNA, 19 nt, Homo sapiens
  misc_RNA (1)...(19): siRNA sense strand
caauauccagcgagagaaa

SEQ ID NO: 1746193 - RNA, 19 nt, Homo sapiens
  misc_RNA (1)...(19): siRNA sense strand
gggcuagaauccgggaguu

SEQ ID NO: 1746194 - RNA, 19 nt, Homo sapiens
  misc_RNA (1)...(19): siRNA sense strand
ccagcgagagaaagaguuu

SEQ ID NO: 1746195 - RNA, 19 nt, Homo sapiens
  misc_RNA (1)...(19): siRNA sense strand
caagccagcacccauguuc

SEQ ID NO: 1746196 - RNA, 19 nt, Homo sapiens
  misc_RNA (1)...(19): siRNA sense strand
cguggaagcuacacuuacu

SEQ ID NO: 1746197 - RNA, 19 nt, Homo sapiens
  misc_RNA (1)...(19): siRNA sense strand
aagcucgcgucaucacuga

SEQ ID NO: 1746198 - RNA, 19 nt, Homo sapiens
  misc_RNA (1)...(19): siRNA sense strand
cugaauuagccaccaagua

SEQ ID NO: 1746199 - RNA, 19 nt, Homo sapiens
  misc_RNA (1)...(19): siRNA sense strand
gcuagcccucugccucuuu

SEQ ID NO: 1746200 - RNA, 19 nt, Homo sapiens
  misc_RNA (1)...(19): siRNA sense strand
uguauuauucugcguggaa

SEQ ID NO: 1746201 - RNA, 19 nt, Homo sapiens
  misc_RNA (1)...(19): siRNA sense strand
ugcggaagcuggugaaagc

SEQ ID NO: 1746202 - RNA, 19 nt, Homo sapiens
  misc_RNA (1)...(19): siRNA sense strand
guuccuggaugacuccuuu

SEQ ID NO: 1746203 - RNA, 19 nt, Homo sapiens
  misc_RNA (1)...(19): siRNA sense strand
ugaauuagccaccaaguac

SEQ ID NO: 1746204 - RNA, 19 nt, Homo sapiens
  misc_RNA (1)...(19): siRNA sense strand
uccugaaucuggacucuaa

SEQ ID NO: 1746205 - RNA, 19 nt, Homo sapiens
  misc_RNA (1)...(19): siRNA sense strand
gaugacuccuuucgcaagu

SEQ ID NO: 1746206 - RNA, 19 nt, Homo sapiens
  misc_RNA (1)...(19): siRNA sense strand
gggaguucgugccgccuuu

SEQ ID NO: 1746207 - RNA, 19 nt, Homo sapiens
  misc_RNA (1)...(19): siRNA sense strand
gggcuagaauccgggaguu

SEQ ID NO: 1746208 - RNA, 19 nt, Homo sapiens
  misc_RNA (1)...(19): siRNA sense strand
caagccagcacccauguuc

SEQ ID NO: 1746209 - RNA, 19 nt, Homo sapiens
  misc_RNA (1)...(19): siRNA sense strand
cguggaagcuacacuuacu

SEQ ID NO: 1746210 - RNA, 19 nt, Homo sapiens
  misc_RNA (1)...(19): siRNA sense strand
cugaauuagccaccaagua

SEQ ID NO: 1746211 - RNA, 19 nt, Homo sapiens
  misc_RNA (1)...(19): siRNA sense strand
gcuagcccucugccucuuu

SEQ ID NO: 1746212 - RNA, 19 nt, Homo sapiens
  misc_RNA (1)...(19): siRNA sense strand
uguauuauucugcguggaa

SEQ ID NO: 1746213 - RNA, 19 nt, Homo sapiens
  misc_RNA (1)...(19): siRNA sense strand
ccacagugcugcagucuga

SEQ ID NO: 1746214 - RNA, 19 nt, Homo sapiens
  misc_RNA (1)...(19): siRNA sense strand
gagaauagcgugcucaaga

SEQ ID NO: 1746215 - RNA, 19 nt, Homo sapiens
  misc_RNA (1)...(19): siRNA sense strand
gcaccuggcucacaaggau

SEQ ID NO: 1746216 - RNA, 19 nt, Homo sapiens
  misc_RNA (1)...(19): siRNA sense strand
aauaaauggugccugcuua

SEQ ID NO: 1746217 - RNA, 19 nt, Homo sapiens
  misc_RNA (1)...(19): siRNA sense strand
agaaggagacccugcagua

SEQ ID NO: 1746218 - RNA, 19 nt, Homo sapiens
  misc_RNA (1)...(19): siRNA sense strand
ggccagugauaaugccaua

SEQ ID NO: 1746219 - RNA, 19 nt, Homo sapiens
  misc_RNA (1)...(19): siRNA sense strand
gagcuggaauccuguaagg

SEQ ID NO: 1746220 - RNA, 19 nt, Homo sapiens
  misc_RNA (1)...(19): siRNA sense strand
gaauaaauggugccugcuu

SEQ ID NO: 1746221 - RNA, 19 nt, Homo sapiens
  misc_RNA (1)...(19): siRNA sense strand
gcuggagccugagaauaaa

SEQ ID NO: 1746222 - RNA, 19 nt, Homo sapiens
  misc_RNA (1)...(19): siRNA sense strand
gcagugcuccagccucuug

SEQ ID NO: 1746223 - RNA, 19 nt, Homo sapiens
  misc_RNA (1)...(19): siRNA sense strand
caggcgauguccagaaaga

SEQ ID NO: 1746224 - RNA, 19 nt, Homo sapiens
  misc_RNA (1)...(19): siRNA sense strand
gaauagcgugcucaagaug

SEQ ID NO: 1746225 - RNA, 19 nt, Homo sapiens
  misc_RNA (1)...(19): siRNA sense strand
agaauagcgugcucaagau

SEQ ID NO: 1746226 - RNA, 19 nt, Homo sapiens
  misc_RNA (1)...(19): siRNA sense strand
gagcuggagccugagaaua

SEQ ID NO: 1746227 - RNA, 19 nt, Homo sapiens
  misc_RNA (1)...(19): siRNA sense strand
cgacagacgagcagcuauu

SEQ ID NO: 1746228 - RNA, 19 nt, Homo sapiens
  misc_RNA (1)...(19): siRNA sense strand
ccagaaagaaugcgugcuu

SEQ ID NO: 1746229 - RNA, 19 nt, Homo sapiens
  misc_RNA (1)...(19): siRNA sense strand
uggaacagcugcucuuggu

SEQ ID NO: 1746230 - RNA, 19 nt, Homo sapiens
  misc_RNA (1)...(19): siRNA sense strand
gggcaacguaucuggauga

SEQ ID NO: 1746231 - RNA, 19 nt, Homo sapiens
  misc_RNA (1)...(19): siRNA sense strand
acauacauuucgcgucauu

SEQ ID NO: 1746232 - RNA, 19 nt, Homo sapiens
  misc_RNA (1)...(19): siRNA sense strand
ucacccaucuugacuuguc

SEQ ID NO: 1746233 - RNA, 19 nt, Homo sapiens
  misc_RNA (1)...(19): siRNA sense strand
ugacagugcucugccaucu

SEQ ID NO: 1746234 - RNA, 19 nt, Homo sapiens
  misc_RNA (1)...(19): siRNA sense strand
gaaggagacccugcaguac

SEQ ID NO: 1746235 - RNA, 19 nt, Homo sapiens
  misc_RNA (1)...(19): siRNA sense strand
uagcagcguccucaccuaa

SEQ ID NO: 1746236 - RNA, 19 nt, Homo sapiens
  misc_RNA (1)...(19): siRNA sense strand
ccagugauaaugccauaga

SEQ ID NO: 1746237 - RNA, 19 nt, Homo sapiens
  misc_RNA (1)...(19): siRNA sense strand
aggagacccugcaguacuu

SEQ ID NO: 1746238 - RNA, 19 nt, Homo sapiens
  misc_RNA (1)...(19): siRNA sense strand
gagcugcuacugugcaaca

SEQ ID NO: 1746239 - RNA, 19 nt, Homo sapiens
  misc_RNA (1)...(19): siRNA sense strand
gccaagcggugggcaucuu

SEQ ID NO: 1746240 - RNA, 19 nt, Homo sapiens
  misc_RNA (1)...(19): siRNA sense strand
agcaggcgauguccagaaa

SEQ ID NO: 1746241 - RNA, 19 nt, Homo sapiens
  misc_RNA (1)...(19): siRNA sense strand
agcuggagccugagaauaa

SEQ ID NO: 1746242 - RNA, 19 nt, Homo sapiens
  misc_RNA (1)...(19): siRNA sense strand
gcugcagucugagcuggaa

SEQ ID NO: 1746243 - RNA, 19 nt, Homo sapiens
  misc_RNA (1)...(19): siRNA sense strand
aagaaugcgugcuuuuaaa

SEQ ID NO: 1746244 - RNA, 19 nt, Homo sapiens
  misc_RNA (1)...(19): siRNA sense strand
gugcugcaggccagugaua

SEQ ID NO: 1746245 - RNA, 19 nt, Homo sapiens
  misc_RNA (1)...(19): siRNA sense strand
uggaugaccugcgcagcaa

SEQ ID NO: 1746246 - RNA, 19 nt, Homo sapiens
  misc_RNA (1)...(19): siRNA sense strand
ggagcuggagccugagaau

SEQ ID NO: 1746247 - RNA, 19 nt, Homo sapiens
  misc_RNA (1)...(19): siRNA sense strand
gaucuugcugcucaugguu

SEQ ID NO: 1746248 - RNA, 19 nt, Homo sapiens
  misc_RNA (1)...(19): siRNA sense strand
gcgauguccagaaagaaug

SEQ ID NO: 1746249 - RNA, 19 nt, Homo sapiens
  misc_RNA (1)...(19): siRNA sense strand
auacauuucgcgucauuug

SEQ ID NO: 1746250 - RNA, 19 nt, Homo sapiens
  misc_RNA (1)...(19): siRNA sense strand
gacagacgagcagcuauuc

SEQ ID NO: 1746251 - RNA, 19 nt, Homo sapiens
  misc_RNA (1)...(19): siRNA sense strand
ggcgauguccagaaagaau

SEQ ID NO: 1746252 - RNA, 19 nt, Homo sapiens
  misc_RNA (1)...(19): siRNA sense strand
uuagcagcguccucaccua

SEQ ID NO: 1746253 - RNA, 19 nt, Homo sapiens
  misc_RNA (1)...(19): siRNA sense strand
cagcaggcgauguccagaa

SEQ ID NO: 1746254 - RNA, 19 nt, Homo sapiens
  misc_RNA (1)...(19): siRNA sense strand
uggagcaacuggcugaacu

SEQ ID NO: 1746255 - RNA, 19 nt, Homo sapiens
  misc_RNA (1)...(19): siRNA sense strand
ccacagugcugcagucuga

SEQ ID NO: 1746256 - RNA, 19 nt, Homo sapiens
  misc_RNA (1)...(19): siRNA sense strand
gagaauagcgugcucaaga

SEQ ID NO: 1746257 - RNA, 19 nt, Homo sapiens
  misc_RNA (1)...(19): siRNA sense strand
gcaccuggcucacaaggau

SEQ ID NO: 1746258 - RNA, 19 nt, Homo sapiens
  misc_RNA (1)...(19): siRNA sense strand
aauaaauggugccugcuua

SEQ ID NO: 1746259 - RNA, 19 nt, Homo sapiens
  misc_RNA (1)...(19): siRNA sense strand
gaacugacaagccagauuc

SEQ ID NO: 1746260 - RNA, 19 nt, Homo sapiens
  misc_RNA (1)...(19): siRNA sense strand
gagcuagccuucacugaca

SEQ ID NO: 1746261 - RNA, 19 nt, Homo sapiens
  misc_RNA (1)...(19): siRNA sense strand
agaaggagacccugcagua

SEQ ID NO: 1746262 - RNA, 19 nt, Homo sapiens
  misc_RNA (1)...(19): siRNA sense strand
ggccagugauaaugccaua

SEQ ID NO: 1746263 - RNA, 19 nt, Homo sapiens
  misc_RNA (1)...(19): siRNA sense strand
gagcuggaauccuguaagg

SEQ ID NO: 1746264 - RNA, 19 nt, Homo sapiens
  misc_RNA (1)...(19): siRNA sense strand
gaauaaauggugccugcuu

SEQ ID NO: 1746265 - RNA, 19 nt, Homo sapiens
  misc_RNA (1)...(19): siRNA sense strand
gcuggagccugagaauaaa

SEQ ID NO: 1746266 - RNA, 19 nt, Homo sapiens
  misc_RNA (1)...(19): siRNA sense strand
ggacgaggccugucugacu

SEQ ID NO: 1746267 - RNA, 19 nt, Homo sapiens
  misc_RNA (1)...(19): siRNA sense strand
gcagugcuccagccucuug

SEQ ID NO: 1746268 - RNA, 19 nt, Homo sapiens
  misc_RNA (1)...(19): siRNA sense strand
caggcgauguccagaaaga

SEQ ID NO: 1746269 - RNA, 19 nt, Homo sapiens
  misc_RNA (1)...(19): siRNA sense strand
gaauagcgugcucaagaug

SEQ ID NO: 1746270 - RNA, 19 nt, Homo sapiens
  misc_RNA (1)...(19): siRNA sense strand
agaauagcgugcucaagau

SEQ ID NO: 1746271 - RNA, 19 nt, Homo sapiens
  misc_RNA (1)...(19): siRNA sense strand
gagcuggagccugagaaua

SEQ ID NO: 1746272 - RNA, 19 nt, Homo sapiens
  misc_RNA (1)...(19): siRNA sense strand
cgacagacgagcagcuauu

SEQ ID NO: 1746273 - RNA, 19 nt, Homo sapiens
  misc_RNA (1)...(19): siRNA sense strand
ggaacugacaagccagauu

SEQ ID NO: 1746274 - RNA, 19 nt, Homo sapiens
  misc_RNA (1)...(19): siRNA sense strand
ccagaaagaaugcgugcuu

SEQ ID NO: 1746275 - RNA, 19 nt, Homo sapiens
  misc_RNA (1)...(19): siRNA sense strand
aggaugugcugcucaaaga

SEQ ID NO: 1746276 - RNA, 19 nt, Homo sapiens
  misc_RNA (1)...(19): siRNA sense strand
cccgaaacuucuccaacua

SEQ ID NO: 1746277 - RNA, 19 nt, Homo sapiens
  misc_RNA (1)...(19): siRNA sense strand
uggaacagcugcucuuggu

SEQ ID NO: 1746278 - RNA, 19 nt, Homo sapiens
  misc_RNA (1)...(19): siRNA sense strand
gggcaacguaucuggauga

SEQ ID NO: 1746279 - RNA, 19 nt, Homo sapiens
  misc_RNA (1)...(19): siRNA sense strand
ggagcucugugcccguuuc

SEQ ID NO: 1746280 - RNA, 19 nt, Homo sapiens
  misc_RNA (1)...(19): siRNA sense strand
acauacauuucgcgucauu

SEQ ID NO: 1746281 - RNA, 19 nt, Homo sapiens
  misc_RNA (1)...(19): siRNA sense strand
ucacccaucuugacuuguc

SEQ ID NO: 1746282 - RNA, 19 nt, Homo sapiens
  misc_RNA (1)...(19): siRNA sense strand
ugacagugcucugccaucu

SEQ ID NO: 1746283 - RNA, 19 nt, Homo sapiens
  misc_RNA (1)...(19): siRNA sense strand
ccucaucacccgaaacuuc

SEQ ID NO: 1746284 - RNA, 19 nt, Homo sapiens
  misc_RNA (1)...(19): siRNA sense strand
gaaggagacccugcaguac

SEQ ID NO: 1746285 - RNA, 19 nt, Homo sapiens
  misc_RNA (1)...(19): siRNA sense strand
uagcagcguccucaccuaa

SEQ ID NO: 1746286 - RNA, 19 nt, Homo sapiens
  misc_RNA (1)...(19): siRNA sense strand
ccagugauaaugccauaga

SEQ ID NO: 1746287 - RNA, 19 nt, Homo sapiens
  misc_RNA (1)...(19): siRNA sense strand
uggaugagcggaacuuuca

SEQ ID NO: 1746288 - RNA, 19 nt, Homo sapiens
  misc_RNA (1)...(19): siRNA sense strand
aggagacccugcaguacuu

SEQ ID NO: 1746289 - RNA, 19 nt, Homo sapiens
  misc_RNA (1)...(19): siRNA sense strand
cauuaccgcuccugucucu

SEQ ID NO: 1746290 - RNA, 19 nt, Homo sapiens
  misc_RNA (1)...(19): siRNA sense strand
gagcugcuacugugcaaca

SEQ ID NO: 1746291 - RNA, 19 nt, Homo sapiens
  misc_RNA (1)...(19): siRNA sense strand
cgaaacuucuccaacuacu

SEQ ID NO: 1746292 - RNA, 19 nt, Homo sapiens
  misc_RNA (1)...(19): siRNA sense strand
gaggaugugcugcucaaag

SEQ ID NO: 1746293 - RNA, 19 nt, Homo sapiens
  misc_RNA (1)...(19): siRNA sense strand
gccaagcggugggcaucuu

SEQ ID NO: 1746294 - RNA, 19 nt, Homo sapiens
  misc_RNA (1)...(19): siRNA sense strand
agcaggcgauguccagaaa

SEQ ID NO: 1746295 - RNA, 19 nt, Homo sapiens
  misc_RNA (1)...(19): siRNA sense strand
agcuggagccugagaauaa

SEQ ID NO: 1746296 - RNA, 19 nt, Homo sapiens
  misc_RNA (1)...(19): siRNA sense strand
aaacuucuccaacuacucu

SEQ ID NO: 1746297 - RNA, 19 nt, Homo sapiens
  misc_RNA (1)...(19): siRNA sense strand
gcugcagucugagcuggaa

SEQ ID NO: 1746298 - RNA, 19 nt, Homo sapiens
  misc_RNA (1)...(19): siRNA sense strand
aagaaugcgugcuuuuaaa

SEQ ID NO: 1746299 - RNA, 19 nt, Homo sapiens
  misc_RNA (1)...(19): siRNA sense strand
ggaugaguccgugcuggaa

SEQ ID NO: 1746300 - RNA, 19 nt, Homo sapiens
  misc_RNA (1)...(19): siRNA sense strand
gugcugcaggccagugaua

SEQ ID NO: 1746301 - RNA, 19 nt, Homo sapiens
  misc_RNA (1)...(19): siRNA sense strand
uggaugaccugcgcagcaa

SEQ ID NO: 1746302 - RNA, 19 nt, Homo sapiens
  misc_RNA (1)...(19): siRNA sense strand
gaucuugcugcucaugguu

SEQ ID NO: 1746303 - RNA, 19 nt, Homo sapiens
  misc_RNA (1)...(19): siRNA sense strand
ggagcuggagccugagaau

SEQ ID NO: 1746304 - RNA, 19 nt, Homo sapiens
  misc_RNA (1)...(19): siRNA sense strand
uuaccgcuccugucucuug

SEQ ID NO: 1746305 - RNA, 19 nt, Homo sapiens
  misc_RNA (1)...(19): siRNA sense strand
ggugaagacgucagaagag

SEQ ID NO: 1746306 - RNA, 19 nt, Homo sapiens
  misc_RNA (1)...(19): siRNA sense strand
gcgauguccagaaagaaug

SEQ ID NO: 1746307 - RNA, 19 nt, Homo sapiens
  misc_RNA (1)...(19): siRNA sense strand
auacauuucgcgucauuug

SEQ ID NO: 1746308 - RNA, 19 nt, Homo sapiens
  misc_RNA (1)...(19): siRNA sense strand
gacagacgagcagcuauuc

SEQ ID NO: 1746309 - RNA, 19 nt, Homo sapiens
  misc_RNA (1)...(19): siRNA sense strand
gaaggugaagacgucagaa

SEQ ID NO: 1746310 - RNA, 19 nt, Homo sapiens
  misc_RNA (1)...(19): siRNA sense strand
uuagcagcguccucaccua

SEQ ID NO: 1746311 - RNA, 19 nt, Homo sapiens
  misc_RNA (1)...(19): siRNA sense strand
ggcuagagcgagagcagaa

SEQ ID NO: 1746312 - RNA, 19 nt, Homo sapiens
  misc_RNA (1)...(19): siRNA sense strand
ggcgauguccagaaagaau

SEQ ID NO: 1746313 - RNA, 19 nt, Homo sapiens
  misc_RNA (1)...(19): siRNA sense strand
cagcaggcgauguccagaa

SEQ ID NO: 1746314 - RNA, 19 nt, Homo sapiens
  misc_RNA (1)...(19): siRNA sense strand
uggagcaacuggcugaacu

SEQ ID NO: 1746315 - RNA, 19 nt, Homo sapiens
  misc_RNA (1)...(19): siRNA sense strand
caacagaccuccagucaga

SEQ ID NO: 1746316 - RNA, 19 nt, Homo sapiens
  misc_RNA (1)...(19): siRNA sense strand
ggacaugaccaucuuauga

SEQ ID NO: 1746317 - RNA, 19 nt, Homo sapiens
  misc_RNA (1)...(19): siRNA sense strand
gaaauugaucucacugaua

SEQ ID NO: 1746318 - RNA, 19 nt, Homo sapiens
  misc_RNA (1)...(19): siRNA sense strand
ggacaaaugggaugaacua

SEQ ID NO: 1746319 - RNA, 19 nt, Homo sapiens
  misc_RNA (1)...(19): siRNA sense strand
caaaugggaugaacuaaag

SEQ ID NO: 1746320 - RNA, 19 nt, Homo sapiens
  misc_RNA (1)...(19): siRNA sense strand
ggagaccucuucugagaug

SEQ ID NO: 1746321 - RNA, 19 nt, Homo sapiens
  misc_RNA (1)...(19): siRNA sense strand
gagcagaagauacaacaaa

SEQ ID NO: 1746322 - RNA, 19 nt, Homo sapiens
  misc_RNA (1)...(19): siRNA sense strand
gagaguaacugggcaaagu

SEQ ID NO: 1746323 - RNA, 19 nt, Homo sapiens
  misc_RNA (1)...(19): siRNA sense strand
gcauacggcuggcaucugu

SEQ ID NO: 1746324 - RNA, 19 nt, Homo sapiens
  misc_RNA (1)...(19): siRNA sense strand
cagaggagcugcagacagu

SEQ ID NO: 1746325 - RNA, 19 nt, Homo sapiens
  misc_RNA (1)...(19): siRNA sense strand
caucauggcuacagauaca

SEQ ID NO: 1746326 - RNA, 19 nt, Homo sapiens
  misc_RNA (1)...(19): siRNA sense strand
gcagacaccacuacaguug

SEQ ID NO: 1746327 - RNA, 19 nt, Homo sapiens
  misc_RNA (1)...(19): siRNA sense strand
gaauggagcagaagauaca

SEQ ID NO: 1746328 - RNA, 19 nt, Homo sapiens
  misc_RNA (1)...(19): siRNA sense strand
ccaacaagcucgggacaug

SEQ ID NO: 1746329 - RNA, 19 nt, Homo sapiens
  misc_RNA (1)...(19): siRNA sense strand
gugaggaucuugagacaca

SEQ ID NO: 1746330 - RNA, 19 nt, Homo sapiens
  misc_RNA (1)...(19): siRNA sense strand
gaaaucacuauucacacua

SEQ ID NO: 1746331 - RNA, 19 nt, Homo sapiens
  misc_RNA (1)...(19): siRNA sense strand
ucgguuaucucgcaaagaa

SEQ ID NO: 1746332 - RNA, 19 nt, Homo sapiens
  misc_RNA (1)...(19): siRNA sense strand
agaagcagcucguccugaa

SEQ ID NO: 1746333 - RNA, 19 nt, Homo sapiens
  misc_RNA (1)...(19): siRNA sense strand
gacaugaccaucuuaugaa

SEQ ID NO: 1746334 - RNA, 19 nt, Homo sapiens
  misc_RNA (1)...(19): siRNA sense strand
caagauaagugcggcauac

SEQ ID NO: 1746335 - RNA, 19 nt, Homo sapiens
  misc_RNA (1)...(19): siRNA sense strand
ggaagacacacaccucuag

SEQ ID NO: 1746336 - RNA, 19 nt, Homo sapiens
  misc_RNA (1)...(19): siRNA sense strand
ggacucaucuaacaaaaca

SEQ ID NO: 1746337 - RNA, 19 nt, Homo sapiens
  misc_RNA (1)...(19): siRNA sense strand
gcgcuucggaugagaaauu

SEQ ID NO: 1746338 - RNA, 19 nt, Homo sapiens
  misc_RNA (1)...(19): siRNA sense strand
caucaacuacccaccgaua

SEQ ID NO: 1746339 - RNA, 19 nt, Homo sapiens
  misc_RNA (1)...(19): siRNA sense strand
cuacuacggacucaucuaa

SEQ ID NO: 1746340 - RNA, 19 nt, Homo sapiens
  misc_RNA (1)...(19): siRNA sense strand
cagaauggagcagaagaua

SEQ ID NO: 1746341 - RNA, 19 nt, Homo sapiens
  misc_RNA (1)...(19): siRNA sense strand
agaaaucacuauucacacu

SEQ ID NO: 1746342 - RNA, 19 nt, Homo sapiens
  misc_RNA (1)...(19): siRNA sense strand
acaugaccaucuuaugaaa

SEQ ID NO: 1746343 - RNA, 19 nt, Homo sapiens
  misc_RNA (1)...(19): siRNA sense strand
agacaguggagaaugguua

SEQ ID NO: 1746344 - RNA, 19 nt, Homo sapiens
  misc_RNA (1)...(19): siRNA sense strand
acaaaugggaugaacuaaa

SEQ ID NO: 1746345 - RNA, 19 nt, Homo sapiens
  misc_RNA (1)...(19): siRNA sense strand
caaagugugaggaucuuga

SEQ ID NO: 1746346 - RNA, 19 nt, Homo sapiens
  misc_RNA (1)...(19): siRNA sense strand
ccaaggacgaccuggauga

SEQ ID NO: 1746347 - RNA, 19 nt, Homo sapiens
  misc_RNA (1)...(19): siRNA sense strand
uggacaaccugaccaagga

SEQ ID NO: 1746348 - RNA, 19 nt, Homo sapiens
  misc_RNA (1)...(19): siRNA sense strand
gauaugccgagcagucaaa

SEQ ID NO: 1746349 - RNA, 19 nt, Homo sapiens
  misc_RNA (1)...(19): siRNA sense strand
agaaauugaucucacugau

SEQ ID NO: 1746350 - RNA, 19 nt, Homo sapiens
  misc_RNA (1)...(19): siRNA sense strand
agacacagacacagaguga

SEQ ID NO: 1746351 - RNA, 19 nt, Homo sapiens
  misc_RNA (1)...(19): siRNA sense strand
ugauggagaccucuucuga

SEQ ID NO: 1746352 - RNA, 19 nt, Homo sapiens
  misc_RNA (1)...(19): siRNA sense strand
gaccucacauccacuaagg

SEQ ID NO: 1746353 - RNA, 19 nt, Homo sapiens
  misc_RNA (1)...(19): siRNA sense strand
guaacugggcaaaguguga

SEQ ID NO: 1746354 - RNA, 19 nt, Homo sapiens
  misc_RNA (1)...(19): siRNA sense strand
uaagcucccugccaaggau

SEQ ID NO: 1746355 - RNA, 19 nt, Homo sapiens
  misc_RNA (1)...(19): siRNA sense strand
auggagaccucuucugaga

SEQ ID NO: 1746356 - RNA, 19 nt, Homo sapiens
  misc_RNA (1)...(19): siRNA sense strand
cgaccuggaugaggaggaa

SEQ ID NO: 1746357 - RNA, 19 nt, Homo sapiens
  misc_RNA (1)...(19): siRNA sense strand
caacaagcucgggacauga

SEQ ID NO: 1746358 - RNA, 19 nt, Homo sapiens
  misc_RNA (1)...(19): siRNA sense strand
cgucaaagaaaucacuauu

SEQ ID NO: 1746359 - RNA, 19 nt, Homo sapiens
  misc_RNA (1)...(19): siRNA sense strand
cagccagaauggagcagaa

SEQ ID NO: 1746360 - RNA, 19 nt, Homo sapiens
  misc_RNA (1)...(19): siRNA sense strand
gcaacggcauugagaacac

SEQ ID NO: 1746361 - RNA, 19 nt, Homo sapiens
  misc_RNA (1)...(19): siRNA sense strand
ucgcaaagaacucaacaga

SEQ ID NO: 1746362 - RNA, 19 nt, Homo sapiens
  misc_RNA (1)...(19): siRNA sense strand
ccacuaaggcagaacaucu

SEQ ID NO: 1746363 - RNA, 19 nt, Homo sapiens
  misc_RNA (1)...(19): siRNA sense strand
acacagacacagagugaga

SEQ ID NO: 1746364 - RNA, 19 nt, Homo sapiens
  misc_RNA (1)...(19): siRNA sense strand
gaccaaggacgaccuggau

SEQ ID NO: 1746365 - RNA, 19 nt, Homo sapiens
  misc_RNA (1)...(19): siRNA sense strand
gaaggacaaaugggaugaa

SEQ ID NO: 1746366 - RNA, 19 nt, Homo sapiens
  misc_RNA (1)...(19): siRNA sense strand
ccaccacccuaccgucauc

SEQ ID NO: 1746367 - RNA, 19 nt, Homo sapiens
  misc_RNA (1)...(19): siRNA sense strand
ugacaacccaacacuggaa

SEQ ID NO: 1746368 - RNA, 19 nt, Homo sapiens
  misc_RNA (1)...(19): siRNA sense strand
cagaaugcaacccagacua

SEQ ID NO: 1746369 - RNA, 19 nt, Homo sapiens
  misc_RNA (1)...(19): siRNA sense strand
gaagugauggagaccucuu

SEQ ID NO: 1746370 - RNA, 19 nt, Homo sapiens
  misc_RNA (1)...(19): siRNA sense strand
acaccuacccugccagaga

SEQ ID NO: 1746371 - RNA, 19 nt, Homo sapiens
  misc_RNA (1)...(19): siRNA sense strand
aaaccuaacaccacaagca

SEQ ID NO: 1746372 - RNA, 19 nt, Homo sapiens
  misc_RNA (1)...(19): siRNA sense strand
ggcaaagugugaggaucuu

SEQ ID NO: 1746373 - RNA, 19 nt, Homo sapiens
  misc_RNA (1)...(19): siRNA sense strand
gggcaaagugugaggaucu

SEQ ID NO: 1746374 - RNA, 19 nt, Homo sapiens
  misc_RNA (1)...(19): siRNA sense strand
gugcagacaccacuacagu

SEQ ID NO: 1746375 - RNA, 19 nt, Homo sapiens
  misc_RNA (1)...(19): siRNA sense strand
ccaagauaagugcggcaua

SEQ ID NO: 1746376 - RNA, 19 nt, Homo sapiens
  misc_RNA (1)...(19): siRNA sense strand
guucaagcacuguggcuau

SEQ ID NO: 1746377 - RNA, 19 nt, Homo sapiens
  misc_RNA (1)...(19): siRNA sense strand
ccacaagcagccagaaugg

SEQ ID NO: 1746378 - RNA, 19 nt, Homo sapiens
  misc_RNA (1)...(19): siRNA sense strand
agacaccacuacaguugca

SEQ ID NO: 1746379 - RNA, 19 nt, Homo sapiens
  misc_RNA (1)...(19): siRNA sense strand
acuacggacucaucuaaca

SEQ ID NO: 1746380 - RNA, 19 nt, Homo sapiens
  misc_RNA (1)...(19): siRNA sense strand
gucaaagaaaucacuauuc

SEQ ID NO: 1746381 - RNA, 19 nt, Homo sapiens
  misc_RNA (1)...(19): siRNA sense strand
cagaagauacaacaaacuc

SEQ ID NO: 1746382 - RNA, 19 nt, Homo sapiens
  misc_RNA (1)...(19): siRNA sense strand
gcagaagauacaacaaacu

SEQ ID NO: 1746383 - RNA, 19 nt, Homo sapiens
  misc_RNA (1)...(19): siRNA sense strand
cagccacagcuaaaccuaa

SEQ ID NO: 1746384 - RNA, 19 nt, Homo sapiens
  misc_RNA (1)...(19): siRNA sense strand
gacaaaugggaugaacuaa

SEQ ID NO: 1746385 - RNA, 19 nt, Homo sapiens
  misc_RNA (1)...(19): siRNA sense strand
gcagucaaagccaccuuca

SEQ ID NO: 1746386 - RNA, 19 nt, Homo sapiens
  misc_RNA (1)...(19): siRNA sense strand
agacacagagugagaagca

SEQ ID NO: 1746387 - RNA, 19 nt, Homo sapiens
  misc_RNA (1)...(19): siRNA sense strand
gugugaggaucuugagaca

SEQ ID NO: 1746388 - RNA, 19 nt, Homo sapiens
  misc_RNA (1)...(19): siRNA sense strand
cacuguggcucaugagagu

SEQ ID NO: 1746389 - RNA, 19 nt, Homo sapiens
  misc_RNA (1)...(19): siRNA sense strand
caucgguuaucucgcaaag

SEQ ID NO: 1746390 - RNA, 19 nt, Homo sapiens
  misc_RNA (1)...(19): siRNA sense strand
ggaugaggaggaagacaca

SEQ ID NO: 1746391 - RNA, 19 nt, Homo sapiens
  misc_RNA (1)...(19): siRNA sense strand
gcaaagugugaggaucuug

SEQ ID NO: 1746392 - RNA, 19 nt, Homo sapiens
  misc_RNA (1)...(19): siRNA sense strand
acgagcggcugaaggacaa

SEQ ID NO: 1746393 - RNA, 19 nt, Homo sapiens
  misc_RNA (1)...(19): siRNA sense strand
ccacagcagcaucaacuac

SEQ ID NO: 1746394 - RNA, 19 nt, Homo sapiens
  misc_RNA (1)...(19): siRNA sense strand
ccagaauggagcagaagau

SEQ ID NO: 1746395 - RNA, 19 nt, Homo sapiens
  misc_RNA (1)...(19): siRNA sense strand
gaguaacugggcaaagugu

SEQ ID NO: 1746396 - RNA, 19 nt, Homo sapiens
  misc_RNA (1)...(19): siRNA sense strand
acagaccucacauccacua

SEQ ID NO: 1746397 - RNA, 19 nt, Homo sapiens
  misc_RNA (1)...(19): siRNA sense strand
ccaaggccaacgaaaucuu

SEQ ID NO: 1746398 - RNA, 19 nt, Homo sapiens
  misc_RNA (1)...(19): siRNA sense strand
aaugcaacccagacuacua

SEQ ID NO: 1746399 - RNA, 19 nt, Homo sapiens
  misc_RNA (1)...(19): siRNA sense strand
cggcgcugcugcuacuguu

SEQ ID NO: 1746400 - RNA, 19 nt, Homo sapiens
  misc_RNA (1)...(19): siRNA sense strand
cuacggacucaucuaacaa

SEQ ID NO: 1746401 - RNA, 19 nt, Homo sapiens
  misc_RNA (1)...(19): siRNA sense strand
gggacaugaccaucuuaug

SEQ ID NO: 1746402 - RNA, 19 nt, Homo sapiens
  misc_RNA (1)...(19): siRNA sense strand
uaaacagaauccucacuau

SEQ ID NO: 1746403 - RNA, 19 nt, Homo sapiens
  misc_RNA (1)...(19): siRNA sense strand
caucggcgguauuaugaga

SEQ ID NO: 1746404 - RNA, 19 nt, Homo sapiens
  misc_RNA (1)...(19): siRNA sense strand
cuaaacagaauccucacua

SEQ ID NO: 1746405 - RNA, 19 nt, Homo sapiens
  misc_RNA (1)...(19): siRNA sense strand
gcgcauacaggacccuaaa

SEQ ID NO: 1746406 - RNA, 19 nt, Homo sapiens
  misc_RNA (1)...(19): siRNA sense strand
uuaagcaucggcgguauua

SEQ ID NO: 1746407 - RNA, 19 nt, Homo sapiens
  misc_RNA (1)...(19): siRNA sense strand
gcauacaggacccuaaaca

SEQ ID NO: 1746408 - RNA, 19 nt, Homo sapiens
  misc_RNA (1)...(19): siRNA sense strand
aaacagaauccucacuaug

SEQ ID NO: 1746409 - RNA, 19 nt, Homo sapiens
  misc_RNA (1)...(19): siRNA sense strand
acagaauccucacuaugga

SEQ ID NO: 1746410 - RNA, 19 nt, Homo sapiens
  misc_RNA (1)...(19): siRNA sense strand
cgccaggacugugauggua

SEQ ID NO: 1746411 - RNA, 19 nt, Homo sapiens
  misc_RNA (1)...(19): siRNA sense strand
gaacguggaaagcgcauac

SEQ ID NO: 1746412 - RNA, 19 nt, Homo sapiens
  misc_RNA (1)...(19): siRNA sense strand
auacaggacccuaaacaga

SEQ ID NO: 1746413 - RNA, 19 nt, Homo sapiens
  misc_RNA (1)...(19): siRNA sense strand
cgacagagggaaagcuaug

SEQ ID NO: 1746414 - RNA, 19 nt, Homo sapiens
  misc_RNA (1)...(19): siRNA sense strand
uacaggacccuaaacagaa

SEQ ID NO: 1746415 - RNA, 19 nt, Homo sapiens
  misc_RNA (1)...(19): siRNA sense strand
acaggacccuaaacagaau

SEQ ID NO: 1746416 - RNA, 19 nt, Homo sapiens
  misc_RNA (1)...(19): siRNA sense strand
gagggaaagcuaugaaagg

SEQ ID NO: 1746417 - RNA, 19 nt, Homo sapiens
  misc_RNA (1)...(19): siRNA sense strand
gcgaaagaaucgggcagau

SEQ ID NO: 1746418 - RNA, 19 nt, Homo sapiens
  misc_RNA (1)...(19): siRNA sense strand
ccaggacugugaugguaca

SEQ ID NO: 1746419 - RNA, 19 nt, Homo sapiens
  misc_RNA (1)...(19): siRNA sense strand
aagcaucggcgguauuaug

SEQ ID NO: 1746420 - RNA, 19 nt, Homo sapiens
  misc_RNA (1)...(19): siRNA sense strand
cagagggaaagcuaugaaa

SEQ ID NO: 1746421 - RNA, 19 nt, Homo sapiens
  misc_RNA (1)...(19): siRNA sense strand
cacuauggaugggcucauu

SEQ ID NO: 1746422 - RNA, 19 nt, Homo sapiens
  misc_RNA (1)...(19): siRNA sense strand
aacagaauccucacuaugg

SEQ ID NO: 1746423 - RNA, 19 nt, Homo sapiens
  misc_RNA (1)...(19): siRNA sense strand
agggaaagcuaugaaaggu

SEQ ID NO: 1746424 - RNA, 19 nt, Homo sapiens
  misc_RNA (1)...(19): siRNA sense strand
gacagagggaaagcuauga

SEQ ID NO: 1746425 - RNA, 19 nt, Homo sapiens
  misc_RNA (1)...(19): siRNA sense strand
cgaaagaaucgggcagauc

SEQ ID NO: 1746426 - RNA, 19 nt, Homo sapiens
  misc_RNA (1)...(19): siRNA sense strand
ggcaaaacaucugaaguuc

SEQ ID NO: 1746427 - RNA, 19 nt, Homo sapiens
  misc_RNA (1)...(19): siRNA sense strand
ucauugaggacauuaagca

SEQ ID NO: 1746428 - RNA, 19 nt, Homo sapiens
  misc_RNA (1)...(19): siRNA sense strand
uaaacagaauccucacuau

SEQ ID NO: 1746429 - RNA, 19 nt, Homo sapiens
  misc_RNA (1)...(19): siRNA sense strand
caucggcgguauuaugaga

SEQ ID NO: 1746430 - RNA, 19 nt, Homo sapiens
  misc_RNA (1)...(19): siRNA sense strand
cuaaacagaauccucacua

SEQ ID NO: 1746431 - RNA, 19 nt, Homo sapiens
  misc_RNA (1)...(19): siRNA sense strand
gcgcauacaggacccuaaa

SEQ ID NO: 1746432 - RNA, 19 nt, Homo sapiens
  misc_RNA (1)...(19): siRNA sense strand
uuaagcaucggcgguauua

SEQ ID NO: 1746433 - RNA, 19 nt, Homo sapiens
  misc_RNA (1)...(19): siRNA sense strand
gcauacaggacccuaaaca

SEQ ID NO: 1746434 - RNA, 19 nt, Homo sapiens
  misc_RNA (1)...(19): siRNA sense strand
aaacagaauccucacuaug

SEQ ID NO: 1746435 - RNA, 19 nt, Homo sapiens
  misc_RNA (1)...(19): siRNA sense strand
acagaauccucacuaugga

SEQ ID NO: 1746436 - RNA, 19 nt, Homo sapiens
  misc_RNA (1)...(19): siRNA sense strand
cgccaggacugugauggua

SEQ ID NO: 1746437 - RNA, 19 nt, Homo sapiens
  misc_RNA (1)...(19): siRNA sense strand
gaacguggaaagcgcauac

SEQ ID NO: 1746438 - RNA, 19 nt, Homo sapiens
  misc_RNA (1)...(19): siRNA sense strand
auacaggacccuaaacaga

SEQ ID NO: 1746439 - RNA, 19 nt, Homo sapiens
  misc_RNA (1)...(19): siRNA sense strand
cgacagagggaaagcuaug

SEQ ID NO: 1746440 - RNA, 19 nt, Homo sapiens
  misc_RNA (1)...(19): siRNA sense strand
uacaggacccuaaacagaa

SEQ ID NO: 1746441 - RNA, 19 nt, Homo sapiens
  misc_RNA (1)...(19): siRNA sense strand
acaggacccuaaacagaau

SEQ ID NO: 1746442 - RNA, 19 nt, Homo sapiens
  misc_RNA (1)...(19): siRNA sense strand
gagggaaagcuaugaaagg

SEQ ID NO: 1746443 - RNA, 19 nt, Homo sapiens
  misc_RNA (1)...(19): siRNA sense strand
gcgaaagaaucgggcagau

SEQ ID NO: 1746444 - RNA, 19 nt, Homo sapiens
  misc_RNA (1)...(19): siRNA sense strand
ccaggacugugaugguaca

SEQ ID NO: 1746445 - RNA, 19 nt, Homo sapiens
  misc_RNA (1)...(19): siRNA sense strand
aagcaucggcgguauuaug

SEQ ID NO: 1746446 - RNA, 19 nt, Homo sapiens
  misc_RNA (1)...(19): siRNA sense strand
cagagggaaagcuaugaaa

SEQ ID NO: 1746447 - RNA, 19 nt, Homo sapiens
  misc_RNA (1)...(19): siRNA sense strand
cacuauggaugggcucauu

SEQ ID NO: 1746448 - RNA, 19 nt, Homo sapiens
  misc_RNA (1)...(19): siRNA sense strand
aacagaauccucacuaugg

SEQ ID NO: 1746449 - RNA, 19 nt, Homo sapiens
  misc_RNA (1)...(19): siRNA sense strand
agggaaagcuaugaaaggu

SEQ ID NO: 1746450 - RNA, 19 nt, Homo sapiens
  misc_RNA (1)...(19): siRNA sense strand
gacagagggaaagcuauga

SEQ ID NO: 1746451 - RNA, 19 nt, Homo sapiens
  misc_RNA (1)...(19): siRNA sense strand
cgaaagaaucgggcagauc

SEQ ID NO: 1746452 - RNA, 19 nt, Homo sapiens
  misc_RNA (1)...(19): siRNA sense strand
ggcaaaacaucugaaguuc

SEQ ID NO: 1746453 - RNA, 19 nt, Homo sapiens
  misc_RNA (1)...(19): siRNA sense strand
ucauugaggacauuaagca

SEQ ID NO: 1746454 - RNA, 19 nt, Homo sapiens
  misc_RNA (1)...(19): siRNA sense strand
caacacggcugccaggaua

SEQ ID NO: 1746455 - RNA, 19 nt, Homo sapiens
  misc_RNA (1)...(19): siRNA sense strand
gcaccgaccugaagaagaa

SEQ ID NO: 1746456 - RNA, 19 nt, Homo sapiens
  misc_RNA (1)...(19): siRNA sense strand
ggaauucgguguaucagau

SEQ ID NO: 1746457 - RNA, 19 nt, Homo sapiens
  misc_RNA (1)...(19): siRNA sense strand
gacaaaggauccauucaga

SEQ ID NO: 1746458 - RNA, 19 nt, Homo sapiens
  misc_RNA (1)...(19): siRNA sense strand
gaagcugccuaucgucaau

SEQ ID NO: 1746459 - RNA, 19 nt, Homo sapiens
  misc_RNA (1)...(19): siRNA sense strand
gcacugcuguguacaaggu

SEQ ID NO: 1746460 - RNA, 19 nt, Homo sapiens
  misc_RNA (1)...(19): siRNA sense strand
gaaagaggcaaaugagauc

SEQ ID NO: 1746461 - RNA, 19 nt, Homo sapiens
  misc_RNA (1)...(19): siRNA sense strand
gggugcggcucaagaagua

SEQ ID NO: 1746462 - RNA, 19 nt, Homo sapiens
  misc_RNA (1)...(19): siRNA sense strand
gaugggagguauugguuuc

SEQ ID NO: 1746463 - RNA, 19 nt, Homo sapiens
  misc_RNA (1)...(19): siRNA sense strand
gcgaguacuucuucucaga

SEQ ID NO: 1746464 - RNA, 19 nt, Homo sapiens
  misc_RNA (1)...(19): siRNA sense strand
gccaagaaccugauugaug

SEQ ID NO: 1746465 - RNA, 19 nt, Homo sapiens
  misc_RNA (1)...(19): siRNA sense strand
uccauggccugcacucuua

SEQ ID NO: 1746466 - RNA, 19 nt, Homo sapiens
  misc_RNA (1)...(19): siRNA sense strand
cuacaacgacuuccugauu

SEQ ID NO: 1746467 - RNA, 19 nt, Homo sapiens
  misc_RNA (1)...(19): siRNA sense strand
ggccugcacucuuacgaaa

SEQ ID NO: 1746468 - RNA, 19 nt, Homo sapiens
  misc_RNA (1)...(19): siRNA sense strand
cagcaggugugacguugaa

SEQ ID NO: 1746469 - RNA, 19 nt, Homo sapiens
  misc_RNA (1)...(19): siRNA sense strand
uguacaagguggcugagua

SEQ ID NO: 1746470 - RNA, 19 nt, Homo sapiens
  misc_RNA (1)...(19): siRNA sense strand
cauggugcauuacaucaaa

SEQ ID NO: 1746471 - RNA, 19 nt, Homo sapiens
  misc_RNA (1)...(19): siRNA sense strand
caaaggauccauucagaag

SEQ ID NO: 1746472 - RNA, 19 nt, Homo sapiens
  misc_RNA (1)...(19): siRNA sense strand
guucgugcccuaccucaua

SEQ ID NO: 1746473 - RNA, 19 nt, Homo sapiens
  misc_RNA (1)...(19): siRNA sense strand
acaccacccuccucaguga

SEQ ID NO: 1746474 - RNA, 19 nt, Homo sapiens
  misc_RNA (1)...(19): siRNA sense strand
ggacaaaggauccauucag

SEQ ID NO: 1746475 - RNA, 19 nt, Homo sapiens
  misc_RNA (1)...(19): siRNA sense strand
ccaagggaauucgguguau

SEQ ID NO: 1746476 - RNA, 19 nt, Homo sapiens
  misc_RNA (1)...(19): siRNA sense strand
aaggauccauucagaaguu

SEQ ID NO: 1746477 - RNA, 19 nt, Homo sapiens
  misc_RNA (1)...(19): siRNA sense strand
guacaagguggcugaguau

SEQ ID NO: 1746478 - RNA, 19 nt, Homo sapiens
  misc_RNA (1)...(19): siRNA sense strand
gcagcagccagaaacgaua

SEQ ID NO: 1746479 - RNA, 19 nt, Homo sapiens
  misc_RNA (1)...(19): siRNA sense strand
ugaaagaggcaaaugagau

SEQ ID NO: 1746480 - RNA, 19 nt, Homo sapiens
  misc_RNA (1)...(19): siRNA sense strand
ccucuggccuccaaggauu

SEQ ID NO: 1746481 - RNA, 19 nt, Homo sapiens
  misc_RNA (1)...(19): siRNA sense strand
uacaacgacuuccugauuc

SEQ ID NO: 1746482 - RNA, 19 nt, Homo sapiens
  misc_RNA (1)...(19): siRNA sense strand
gagcagcagcagccagaaa

SEQ ID NO: 1746483 - RNA, 19 nt, Homo sapiens
  misc_RNA (1)...(19): siRNA sense strand
ugcauuacaucaaacagaa

SEQ ID NO: 1746484 - RNA, 19 nt, Homo sapiens
  misc_RNA (1)...(19): siRNA sense strand
gggagguauugguuucauu

SEQ ID NO: 1746485 - RNA, 19 nt, Homo sapiens
  misc_RNA (1)...(19): siRNA sense strand
ggagguauugguuucauuc

SEQ ID NO: 1746486 - RNA, 19 nt, Homo sapiens
  misc_RNA (1)...(19): siRNA sense strand
ccagggcacugcuguguac

SEQ ID NO: 1746487 - RNA, 19 nt, Homo sapiens
  misc_RNA (1)...(19): siRNA sense strand
agaucgccauggugcauua

SEQ ID NO: 1746488 - RNA, 19 nt, Homo sapiens
  misc_RNA (1)...(19): siRNA sense strand
ccucauagcaggcauccaa

SEQ ID NO: 1746489 - RNA, 19 nt, Homo sapiens
  misc_RNA (1)...(19): siRNA sense strand
cgagacaucgacuuucuug

SEQ ID NO: 1746490 - RNA, 19 nt, Homo sapiens
  misc_RNA (1)...(19): siRNA sense strand
gugaugacgccaaggauug

SEQ ID NO: 1746491 - RNA, 19 nt, Homo sapiens
  misc_RNA (1)...(19): siRNA sense strand
cggaagaucacgcugaaga

SEQ ID NO: 1746492 - RNA, 19 nt, Homo sapiens
  misc_RNA (1)...(19): siRNA sense strand
gauucucccaggauucaua

SEQ ID NO: 1746493 - RNA, 19 nt, Homo sapiens
  misc_RNA (1)...(19): siRNA sense strand
cagcagcccaggccaagaa

SEQ ID NO: 1746494 - RNA, 19 nt, Homo sapiens
  misc_RNA (1)...(19): siRNA sense strand
guccuucgguccaugaugu

SEQ ID NO: 1746495 - RNA, 19 nt, Homo sapiens
  misc_RNA (1)...(19): siRNA sense strand
gcccugacccggaagauca

SEQ ID NO: 1746496 - RNA, 19 nt, Homo sapiens
  misc_RNA (1)...(19): siRNA sense strand
ggugaugacgccaaggauu

SEQ ID NO: 1746497 - RNA, 19 nt, Homo sapiens
  misc_RNA (1)...(19): siRNA sense strand
cccgugaggaugacaaaua

SEQ ID NO: 1746498 - RNA, 19 nt, Homo sapiens
  misc_RNA (1)...(19): siRNA sense strand
ggaagcugccuaucgucaa

SEQ ID NO: 1746499 - RNA, 19 nt, Homo sapiens
  misc_RNA (1)...(19): siRNA sense strand
gcucugaugggagguauug

SEQ ID NO: 1746500 - RNA, 19 nt, Homo sapiens
  misc_RNA (1)...(19): siRNA sense strand
gauugagggugguguccau

SEQ ID NO: 1746501 - RNA, 19 nt, Homo sapiens
  misc_RNA (1)...(19): siRNA sense strand
gggcaugggcucacuggau

SEQ ID NO: 1746502 - RNA, 19 nt, Homo sapiens
  misc_RNA (1)...(19): siRNA sense strand
gaggugaugacgccaagga

SEQ ID NO: 1746503 - RNA, 19 nt, Homo sapiens
  misc_RNA (1)...(19): siRNA sense strand
acaaaggauccauucagaa

SEQ ID NO: 1746504 - RNA, 19 nt, Homo sapiens
  misc_RNA (1)...(19): siRNA sense strand
agaaagggaagcugccuau

SEQ ID NO: 1746505 - RNA, 19 nt, Homo sapiens
  misc_RNA (1)...(19): siRNA sense strand
gggcacugcuguguacaag

SEQ ID NO: 1746506 - RNA, 19 nt, Homo sapiens
  misc_RNA (1)...(19): siRNA sense strand
caagggaauucgguguauc

SEQ ID NO: 1746507 - RNA, 19 nt, Homo sapiens
  misc_RNA (1)...(19): siRNA sense strand
aagggaagcugccuaucgu

SEQ ID NO: 1746508 - RNA, 19 nt, Homo sapiens
  misc_RNA (1)...(19): siRNA sense strand
gugcauuacaucaaacaga

SEQ ID NO: 1746509 - RNA, 19 nt, Homo sapiens
  misc_RNA (1)...(19): siRNA sense strand
ccacaccacccuccucagu

SEQ ID NO: 1746510 - RNA, 19 nt, Homo sapiens
  misc_RNA (1)...(19): siRNA sense strand
cccggaagaucacgcugaa

SEQ ID NO: 1746511 - RNA, 19 nt, Homo sapiens
  misc_RNA (1)...(19): siRNA sense strand
ccaaggauucccagaagca

SEQ ID NO: 1746512 - RNA, 19 nt, Homo sapiens
  misc_RNA (1)...(19): siRNA sense strand
ccgugaggaugacaaauac

SEQ ID NO: 1746513 - RNA, 19 nt, Homo sapiens
  misc_RNA (1)...(19): siRNA sense strand
acaacgacuuccugauucu

SEQ ID NO: 1746514 - RNA, 19 nt, Homo sapiens
  misc_RNA (1)...(19): siRNA sense strand
caggugugacguugaaaga

SEQ ID NO: 1746515 - RNA, 19 nt, Homo sapiens
  misc_RNA (1)...(19): siRNA sense strand
uguaucagaucgccauggu

SEQ ID NO: 1746516 - RNA, 19 nt, Homo sapiens
  misc_RNA (1)...(19): siRNA sense strand
gggaauucgguguaucaga

SEQ ID NO: 1746517 - RNA, 19 nt, Homo sapiens
  misc_RNA (1)...(19): siRNA sense strand
cccgagacaucgacuuucu

SEQ ID NO: 1746518 - RNA, 19 nt, Homo sapiens
  misc_RNA (1)...(19): siRNA sense strand
ucaggagagcucaaguuug

SEQ ID NO: 1746519 - RNA, 19 nt, Homo sapiens
  misc_RNA (1)...(19): siRNA sense strand
cucaggagagcucaaguuu

SEQ ID NO: 1746520 - RNA, 19 nt, Homo sapiens
  misc_RNA (1)...(19): siRNA sense strand
gcaggugugacguugaaag

SEQ ID NO: 1746521 - RNA, 19 nt, Homo sapiens
  misc_RNA (1)...(19): siRNA sense strand
gaaagggaagcugccuauc

SEQ ID NO: 1746522 - RNA, 19 nt, Homo sapiens
  misc_RNA (1)...(19): siRNA sense strand
guccauggccugcacucuu

SEQ ID NO: 1746523 - RNA, 19 nt, Homo sapiens
  misc_RNA (1)...(19): siRNA sense strand
cuccaaggauucccagaag

SEQ ID NO: 1746524 - RNA, 19 nt, Homo sapiens
  misc_RNA (1)...(19): siRNA sense strand
ggaagaucacgcugaagac

SEQ ID NO: 1746525 - RNA, 19 nt, Homo sapiens
  misc_RNA (1)...(19): siRNA sense strand
ccaggacaaaggauccauu

SEQ ID NO: 1746526 - RNA, 19 nt, Homo sapiens
  misc_RNA (1)...(19): siRNA sense strand
gaauucgguguaucagauc

SEQ ID NO: 1746527 - RNA, 19 nt, Homo sapiens
  misc_RNA (1)...(19): siRNA sense strand
cugccuaucgucaaugauu

SEQ ID NO: 1746528 - RNA, 19 nt, Homo sapiens
  misc_RNA (1)...(19): siRNA sense strand
guugaaagaggcaaaugag

SEQ ID NO: 1746529 - RNA, 19 nt, Homo sapiens
  misc_RNA (1)...(19): siRNA sense strand
caacacggcugccaggaua

SEQ ID NO: 1746530 - RNA, 19 nt, Homo sapiens
  misc_RNA (1)...(19): siRNA sense strand
gcaccgaccugaagaagaa

SEQ ID NO: 1746531 - RNA, 19 nt, Homo sapiens
  misc_RNA (1)...(19): siRNA sense strand
ggaauucgguguaucagau

SEQ ID NO: 1746532 - RNA, 19 nt, Homo sapiens
  misc_RNA (1)...(19): siRNA sense strand
gacaaaggauccauucaga

SEQ ID NO: 1746533 - RNA, 19 nt, Homo sapiens
  misc_RNA (1)...(19): siRNA sense strand
gaagcugccuaucgucaau

SEQ ID NO: 1746534 - RNA, 19 nt, Homo sapiens
  misc_RNA (1)...(19): siRNA sense strand
gcacugcuguguacaaggu

SEQ ID NO: 1746535 - RNA, 19 nt, Homo sapiens
  misc_RNA (1)...(19): siRNA sense strand
gaaagaggcaaaugagauc

SEQ ID NO: 1746536 - RNA, 19 nt, Homo sapiens
  misc_RNA (1)...(19): siRNA sense strand
gggugcggcucaagaagua

SEQ ID NO: 1746537 - RNA, 19 nt, Homo sapiens
  misc_RNA (1)...(19): siRNA sense strand
gaugggagguauugguuuc

SEQ ID NO: 1746538 - RNA, 19 nt, Homo sapiens
  misc_RNA (1)...(19): siRNA sense strand
gcgaguacuucuucucaga

SEQ ID NO: 1746539 - RNA, 19 nt, Homo sapiens
  misc_RNA (1)...(19): siRNA sense strand
gccaagaaccugauugaug

SEQ ID NO: 1746540 - RNA, 19 nt, Homo sapiens
  misc_RNA (1)...(19): siRNA sense strand
uccauggccugcacucuua

SEQ ID NO: 1746541 - RNA, 19 nt, Homo sapiens
  misc_RNA (1)...(19): siRNA sense strand
cuacaacgacuuccugauu

SEQ ID NO: 1746542 - RNA, 19 nt, Homo sapiens
  misc_RNA (1)...(19): siRNA sense strand
ggccugcacucuuacgaaa

SEQ ID NO: 1746543 - RNA, 19 nt, Homo sapiens
  misc_RNA (1)...(19): siRNA sense strand
cagcaggugugacguugaa

SEQ ID NO: 1746544 - RNA, 19 nt, Homo sapiens
  misc_RNA (1)...(19): siRNA sense strand
uguacaagguggcugagua

SEQ ID NO: 1746545 - RNA, 19 nt, Homo sapiens
  misc_RNA (1)...(19): siRNA sense strand
cauggugcauuacaucaaa

SEQ ID NO: 1746546 - RNA, 19 nt, Homo sapiens
  misc_RNA (1)...(19): siRNA sense strand
caaaggauccauucagaag

SEQ ID NO: 1746547 - RNA, 19 nt, Homo sapiens
  misc_RNA (1)...(19): siRNA sense strand
guucgugcccuaccucaua

SEQ ID NO: 1746548 - RNA, 19 nt, Homo sapiens
  misc_RNA (1)...(19): siRNA sense strand
acaccacccuccucaguga

SEQ ID NO: 1746549 - RNA, 19 nt, Homo sapiens
  misc_RNA (1)...(19): siRNA sense strand
ggacaaaggauccauucag

SEQ ID NO: 1746550 - RNA, 19 nt, Homo sapiens
  misc_RNA (1)...(19): siRNA sense strand
ccaagggaauucgguguau

SEQ ID NO: 1746551 - RNA, 19 nt, Homo sapiens
  misc_RNA (1)...(19): siRNA sense strand
aaggauccauucagaaguu

SEQ ID NO: 1746552 - RNA, 19 nt, Homo sapiens
  misc_RNA (1)...(19): siRNA sense strand
guacaagguggcugaguau

SEQ ID NO: 1746553 - RNA, 19 nt, Homo sapiens
  misc_RNA (1)...(19): siRNA sense strand
gcagcagccagaaacgaua

SEQ ID NO: 1746554 - RNA, 19 nt, Homo sapiens
  misc_RNA (1)...(19): siRNA sense strand
ugaaagaggcaaaugagau

SEQ ID NO: 1746555 - RNA, 19 nt, Homo sapiens
  misc_RNA (1)...(19): siRNA sense strand
ccucuggccuccaaggauu

SEQ ID NO: 1746556 - RNA, 19 nt, Homo sapiens
  misc_RNA (1)...(19): siRNA sense strand
uacaacgacuuccugauuc

SEQ ID NO: 1746557 - RNA, 19 nt, Homo sapiens
  misc_RNA (1)...(19): siRNA sense strand
gagcagcagcagccagaaa

SEQ ID NO: 1746558 - RNA, 19 nt, Homo sapiens
  misc_RNA (1)...(19): siRNA sense strand
ugcauuacaucaaacagaa

SEQ ID NO: 1746559 - RNA, 19 nt, Homo sapiens
  misc_RNA (1)...(19): siRNA sense strand
gggagguauugguuucauu

SEQ ID NO: 1746560 - RNA, 19 nt, Homo sapiens
  misc_RNA (1)...(19): siRNA sense strand
ggagguauugguuucauuc

SEQ ID NO: 1746561 - RNA, 19 nt, Homo sapiens
  misc_RNA (1)...(19): siRNA sense strand
ccagggcacugcuguguac

SEQ ID NO: 1746562 - RNA, 19 nt, Homo sapiens
  misc_RNA (1)...(19): siRNA sense strand
agaucgccauggugcauua

SEQ ID NO: 1746563 - RNA, 19 nt, Homo sapiens
  misc_RNA (1)...(19): siRNA sense strand
ccucauagcaggcauccaa

SEQ ID NO: 1746564 - RNA, 19 nt, Homo sapiens
  misc_RNA (1)...(19): siRNA sense strand
cgagacaucgacuuucuug

SEQ ID NO: 1746565 - RNA, 19 nt, Homo sapiens
  misc_RNA (1)...(19): siRNA sense strand
gugaugacgccaaggauug

SEQ ID NO: 1746566 - RNA, 19 nt, Homo sapiens
  misc_RNA (1)...(19): siRNA sense strand
cggaagaucacgcugaaga

SEQ ID NO: 1746567 - RNA, 19 nt, Homo sapiens
  misc_RNA (1)...(19): siRNA sense strand
gauucucccaggauucaua

SEQ ID NO: 1746568 - RNA, 19 nt, Homo sapiens
  misc_RNA (1)...(19): siRNA sense strand
cagcagcccaggccaagaa

SEQ ID NO: 1746569 - RNA, 19 nt, Homo sapiens
  misc_RNA (1)...(19): siRNA sense strand
guccuucgguccaugaugu

SEQ ID NO: 1746570 - RNA, 19 nt, Homo sapiens
  misc_RNA (1)...(19): siRNA sense strand
gcccugacccggaagauca

SEQ ID NO: 1746571 - RNA, 19 nt, Homo sapiens
  misc_RNA (1)...(19): siRNA sense strand
ggugaugacgccaaggauu

SEQ ID NO: 1746572 - RNA, 19 nt, Homo sapiens
  misc_RNA (1)...(19): siRNA sense strand
cccgugaggaugacaaaua

SEQ ID NO: 1746573 - RNA, 19 nt, Homo sapiens
  misc_RNA (1)...(19): siRNA sense strand
ggaagcugccuaucgucaa

SEQ ID NO: 1746574 - RNA, 19 nt, Homo sapiens
  misc_RNA (1)...(19): siRNA sense strand
gcucugaugggagguauug

SEQ ID NO: 1746575 - RNA, 19 nt, Homo sapiens
  misc_RNA (1)...(19): siRNA sense strand
gauugagggugguguccau

SEQ ID NO: 1746576 - RNA, 19 nt, Homo sapiens
  misc_RNA (1)...(19): siRNA sense strand
gggcaugggcucacuggau

SEQ ID NO: 1746577 - RNA, 19 nt, Homo sapiens
  misc_RNA (1)...(19): siRNA sense strand
gaggugaugacgccaagga

SEQ ID NO: 1746578 - RNA, 19 nt, Homo sapiens
  misc_RNA (1)...(19): siRNA sense strand
acaaaggauccauucagaa

SEQ ID NO: 1746579 - RNA, 19 nt, Homo sapiens
  misc_RNA (1)...(19): siRNA sense strand
agaaagggaagcugccuau

SEQ ID NO: 1746580 - RNA, 19 nt, Homo sapiens
  misc_RNA (1)...(19): siRNA sense strand
gggcacugcuguguacaag

SEQ ID NO: 1746581 - RNA, 19 nt, Homo sapiens
  misc_RNA (1)...(19): siRNA sense strand
caagggaauucgguguauc

SEQ ID NO: 1746582 - RNA, 19 nt, Homo sapiens
  misc_RNA (1)...(19): siRNA sense strand
aagggaagcugccuaucgu

SEQ ID NO: 1746583 - RNA, 19 nt, Homo sapiens
  misc_RNA (1)...(19): siRNA sense strand
gugcauuacaucaaacaga

SEQ ID NO: 1746584 - RNA, 19 nt, Homo sapiens
  misc_RNA (1)...(19): siRNA sense strand
ccacaccacccuccucagu

SEQ ID NO: 1746585 - RNA, 19 nt, Homo sapiens
  misc_RNA (1)...(19): siRNA sense strand
cccggaagaucacgcugaa

SEQ ID NO: 1746586 - RNA, 19 nt, Homo sapiens
  misc_RNA (1)...(19): siRNA sense strand
ccaaggauucccagaagca

SEQ ID NO: 1746587 - RNA, 19 nt, Homo sapiens
  misc_RNA (1)...(19): siRNA sense strand
ccgugaggaugacaaauac

SEQ ID NO: 1746588 - RNA, 19 nt, Homo sapiens
  misc_RNA (1)...(19): siRNA sense strand
acaacgacuuccugauucu

SEQ ID NO: 1746589 - RNA, 19 nt, Homo sapiens
  misc_RNA (1)...(19): siRNA sense strand
caggugugacguugaaaga

SEQ ID NO: 1746590 - RNA, 19 nt, Homo sapiens
  misc_RNA (1)...(19): siRNA sense strand
uguaucagaucgccauggu

SEQ ID NO: 1746591 - RNA, 19 nt, Homo sapiens
  misc_RNA (1)...(19): siRNA sense strand
gggaauucgguguaucaga

SEQ ID NO: 1746592 - RNA, 19 nt, Homo sapiens
  misc_RNA (1)...(19): siRNA sense strand
cccgagacaucgacuuucu

SEQ ID NO: 1746593 - RNA, 19 nt, Homo sapiens
  misc_RNA (1)...(19): siRNA sense strand
ucaggagagcucaaguuug

SEQ ID NO: 1746594 - RNA, 19 nt, Homo sapiens
  misc_RNA (1)...(19): siRNA sense strand
cucaggagagcucaaguuu

SEQ ID NO: 1746595 - RNA, 19 nt, Homo sapiens
  misc_RNA (1)...(19): siRNA sense strand
gcaggugugacguugaaag

SEQ ID NO: 1746596 - RNA, 19 nt, Homo sapiens
  misc_RNA (1)...(19): siRNA sense strand
gaaagggaagcugccuauc

SEQ ID NO: 1746597 - RNA, 19 nt, Homo sapiens
  misc_RNA (1)...(19): siRNA sense strand
guccauggccugcacucuu

SEQ ID NO: 1746598 - RNA, 19 nt, Homo sapiens
  misc_RNA (1)...(19): siRNA sense strand
cuccaaggauucccagaag

SEQ ID NO: 1746599 - RNA, 19 nt, Homo sapiens
  misc_RNA (1)...(19): siRNA sense strand
ggaagaucacgcugaagac

SEQ ID NO: 1746600 - RNA, 19 nt, Homo sapiens
  misc_RNA (1)...(19): siRNA sense strand
ccaggacaaaggauccauu

SEQ ID NO: 1746601 - RNA, 19 nt, Homo sapiens
  misc_RNA (1)...(19): siRNA sense strand
gaauucgguguaucagauc

SEQ ID NO: 1746602 - RNA, 19 nt, Homo sapiens
  misc_RNA (1)...(19): siRNA sense strand
cugccuaucgucaaugauu

SEQ ID NO: 1746603 - RNA, 19 nt, Homo sapiens
  misc_RNA (1)...(19): siRNA sense strand
guugaaagaggcaaaugag

SEQ ID NO: 1746604 - RNA, 19 nt, Homo sapiens
  misc_RNA (1)...(19): siRNA sense strand
ggugaaagcucgcgucauc

SEQ ID NO: 1746605 - RNA, 19 nt, Homo sapiens
  misc_RNA (1)...(19): siRNA sense strand
guuccuggaugacuccuuu

SEQ ID NO: 1746606 - RNA, 19 nt, Homo sapiens
  misc_RNA (1)...(19): siRNA sense strand
ucuaagcaguggcaucuga

SEQ ID NO: 1746607 - RNA, 19 nt, Homo sapiens
  misc_RNA (1)...(19): siRNA sense strand
ugaauuagccaccaaguac

SEQ ID NO: 1746608 - RNA, 19 nt, Homo sapiens
  misc_RNA (1)...(19): siRNA sense strand
uccugaaucuggacucuaa

SEQ ID NO: 1746609 - RNA, 19 nt, Homo sapiens
  misc_RNA (1)...(19): siRNA sense strand
gaugacuccuuucgcaagu

SEQ ID NO: 1746610 - RNA, 19 nt, Homo sapiens
  misc_RNA (1)...(19): siRNA sense strand
gggaguucgugccgccuuu

SEQ ID NO: 1746611 - RNA, 19 nt, Homo sapiens
  misc_RNA (1)...(19): siRNA sense strand
cacaauauccagcgagaga

SEQ ID NO: 1746612 - RNA, 19 nt, Homo sapiens
  misc_RNA (1)...(19): siRNA sense strand
gaucuaagcaguggcaucu

SEQ ID NO: 1746613 - RNA, 19 nt, Homo sapiens
  misc_RNA (1)...(19): siRNA sense strand
caauauccagcgagagaaa

SEQ ID NO: 1746614 - RNA, 19 nt, Homo sapiens
  misc_RNA (1)...(19): siRNA sense strand
gggcuagaauccgggaguu

SEQ ID NO: 1746615 - RNA, 19 nt, Homo sapiens
  misc_RNA (1)...(19): siRNA sense strand
ccagcgagagaaagaguuu

SEQ ID NO: 1746616 - RNA, 19 nt, Homo sapiens
  misc_RNA (1)...(19): siRNA sense strand
caagccagcacccauguuc

SEQ ID NO: 1746617 - RNA, 19 nt, Homo sapiens
  misc_RNA (1)...(19): siRNA sense strand
cguggaagcuacacuuacu

SEQ ID NO: 1746618 - RNA, 19 nt, Homo sapiens
  misc_RNA (1)...(19): siRNA sense strand
aagcucgcgucaucacuga

SEQ ID NO: 1746619 - RNA, 19 nt, Homo sapiens
  misc_RNA (1)...(19): siRNA sense strand
cugaauuagccaccaagua

SEQ ID NO: 1746620 - RNA, 19 nt, Homo sapiens
  misc_RNA (1)...(19): siRNA sense strand
gcuagcccucugccucuuu

SEQ ID NO: 1746621 - RNA, 19 nt, Homo sapiens
  misc_RNA (1)...(19): siRNA sense strand
uguauuauucugcguggaa

SEQ ID NO: 1746622 - RNA, 19 nt, Homo sapiens
  misc_RNA (1)...(19): siRNA sense strand
ugcggaagcuggugaaagc

SEQ ID NO: 1746623 - RNA, 19 nt, Homo sapiens
  misc_RNA (1)...(19): siRNA sense strand
ggugaaagcucgcgucauc

SEQ ID NO: 1746624 - RNA, 19 nt, Homo sapiens
  misc_RNA (1)...(19): siRNA sense strand
guuccuggaugacuccuuu

SEQ ID NO: 1746625 - RNA, 19 nt, Homo sapiens
  misc_RNA (1)...(19): siRNA sense strand
ucuaagcaguggcaucuga

SEQ ID NO: 1746626 - RNA, 19 nt, Homo sapiens
  misc_RNA (1)...(19): siRNA sense strand
ugaauuagccaccaaguac

SEQ ID NO: 1746627 - RNA, 19 nt, Homo sapiens
  misc_RNA (1)...(19): siRNA sense strand
uccugaaucuggacucuaa

SEQ ID NO: 1746628 - RNA, 19 nt, Homo sapiens
  misc_RNA (1)...(19): siRNA sense strand
gaugacuccuuucgcaagu

SEQ ID NO: 1746629 - RNA, 19 nt, Homo sapiens
  misc_RNA (1)...(19): siRNA sense strand
gggaguucgugccgccuuu

SEQ ID NO: 1746630 - RNA, 19 nt, Homo sapiens
  misc_RNA (1)...(19): siRNA sense strand
cacaauauccagcgagaga

SEQ ID NO: 1746631 - RNA, 19 nt, Homo sapiens
  misc_RNA (1)...(19): siRNA sense strand
gaucuaagcaguggcaucu

SEQ ID NO: 1746632 - RNA, 19 nt, Homo sapiens
  misc_RNA (1)...(19): siRNA sense strand
caauauccagcgagagaaa

SEQ ID NO: 1746633 - RNA, 19 nt, Homo sapiens
  misc_RNA (1)...(19): siRNA sense strand
gggcuagaauccgggaguu

SEQ ID NO: 1746634 - RNA, 19 nt, Homo sapiens
  misc_RNA (1)...(19): siRNA sense strand
ccagcgagagaaagaguuu

SEQ ID NO: 1746635 - RNA, 19 nt, Homo sapiens
  misc_RNA (1)...(19): siRNA sense strand
caagccagcacccauguuc

SEQ ID NO: 1746636 - RNA, 19 nt, Homo sapiens
  misc_RNA (1)...(19): siRNA sense strand
cguggaagcuacacuuacu

SEQ ID NO: 1746637 - RNA, 19 nt, Homo sapiens
  misc_RNA (1)...(19): siRNA sense strand
aagcucgcgucaucacuga

SEQ ID NO: 1746638 - RNA, 19 nt, Homo sapiens
  misc_RNA (1)...(19): siRNA sense strand
cugaauuagccaccaagua

SEQ ID NO: 1746639 - RNA, 19 nt, Homo sapiens
  misc_RNA (1)...(19): siRNA sense strand
gcuagcccucugccucuuu

SEQ ID NO: 1746640 - RNA, 19 nt, Homo sapiens
  misc_RNA (1)...(19): siRNA sense strand
uguauuauucugcguggaa

SEQ ID NO: 1746641 - RNA, 19 nt, Homo sapiens
  misc_RNA (1)...(19): siRNA sense strand
ugcggaagcuggugaaagc

SEQ ID NO: 1746642 - RNA, 19 nt, Homo sapiens
  misc_RNA (1)...(19): siRNA sense strand
ggugaaagcucgcgucauc

SEQ ID NO: 1746643 - RNA, 19 nt, Homo sapiens
  misc_RNA (1)...(19): siRNA sense strand
guuccuggaugacuccuuu

SEQ ID NO: 1746644 - RNA, 19 nt, Homo sapiens
  misc_RNA (1)...(19): siRNA sense strand
ucuaagcaguggcaucuga

SEQ ID NO: 1746645 - RNA, 19 nt, Homo sapiens
  misc_RNA (1)...(19): siRNA sense strand
ugaauuagccaccaaguac

SEQ ID NO: 1746646 - RNA, 19 nt, Homo sapiens
  misc_RNA (1)...(19): siRNA sense strand
uccugaaucuggacucuaa

SEQ ID NO: 1746647 - RNA, 19 nt, Homo sapiens
  misc_RNA (1)...(19): siRNA sense strand
gaugacuccuuucgcaagu

SEQ ID NO: 1746648 - RNA, 19 nt, Homo sapiens
  misc_RNA (1)...(19): siRNA sense strand
gggaguucgugccgccuuu

SEQ ID NO: 1746649 - RNA, 19 nt, Homo sapiens
  misc_RNA (1)...(19): siRNA sense strand
cacaauauccagcgagaga

SEQ ID NO: 1746650 - RNA, 19 nt, Homo sapiens
  misc_RNA (1)...(19): siRNA sense strand
gaucuaagcaguggcaucu

SEQ ID NO: 1746651 - RNA, 19 nt, Homo sapiens
  misc_RNA (1)...(19): siRNA sense strand
caauauccagcgagagaaa

SEQ ID NO: 1746652 - RNA, 19 nt, Homo sapiens
  misc_RNA (1)...(19): siRNA sense strand
gggcuagaauccgggaguu

SEQ ID NO: 1746653 - RNA, 19 nt, Homo sapiens
  misc_RNA (1)...(19): siRNA sense strand
ccagcgagagaaagaguuu

SEQ ID NO: 1746654 - RNA, 19 nt, Homo sapiens
  misc_RNA (1)...(19): siRNA sense strand
caagccagcacccauguuc

SEQ ID NO: 1746655 - RNA, 19 nt, Homo sapiens
  misc_RNA (1)...(19): siRNA sense strand
cguggaagcuacacuuacu

SEQ ID NO: 1746656 - RNA, 19 nt, Homo sapiens
  misc_RNA (1)...(19): siRNA sense strand
aagcucgcgucaucacuga

SEQ ID NO: 1746657 - RNA, 19 nt, Homo sapiens
  misc_RNA (1)...(19): siRNA sense strand
cugaauuagccaccaagua

SEQ ID NO: 1746658 - RNA, 19 nt, Homo sapiens
  misc_RNA (1)...(19): siRNA sense strand
gcuagcccucugccucuuu

SEQ ID NO: 1746659 - RNA, 19 nt, Homo sapiens
  misc_RNA (1)...(19): siRNA sense strand
uguauuauucugcguggaa

SEQ ID NO: 1746660 - RNA, 19 nt, Homo sapiens
  misc_RNA (1)...(19): siRNA sense strand
ugcggaagcuggugaaagc

SEQ ID NO: 1746661 - RNA, 19 nt, Homo sapiens
  misc_RNA (1)...(19): siRNA sense strand
ggugaaagcucgcgucauc

SEQ ID NO: 1746662 - RNA, 19 nt, Homo sapiens
  misc_RNA (1)...(19): siRNA sense strand
guuccuggaugacuccuuu

SEQ ID NO: 1746663 - RNA, 19 nt, Homo sapiens
  misc_RNA (1)...(19): siRNA sense strand
ugaauuagccaccaaguac

SEQ ID NO: 1746664 - RNA, 19 nt, Homo sapiens
  misc_RNA (1)...(19): siRNA sense strand
uccugaaucuggacucuaa

SEQ ID NO: 1746665 - RNA, 19 nt, Homo sapiens
  misc_RNA (1)...(19): siRNA sense strand
gaugacuccuuucgcaagu

SEQ ID NO: 1746666 - RNA, 19 nt, Homo sapiens
  misc_RNA (1)...(19): siRNA sense strand
gggaguucgugccgccuuu

SEQ ID NO: 1746667 - RNA, 19 nt, Homo sapiens
  misc_RNA (1)...(19): siRNA sense strand
cacaauauccagcgagaga

SEQ ID NO: 1746668 - RNA, 19 nt, Homo sapiens
  misc_RNA (1)...(19): siRNA sense strand
caauauccagcgagagaaa

SEQ ID NO: 1746669 - RNA, 19 nt, Homo sapiens
  misc_RNA (1)...(19): siRNA sense strand
gggcuagaauccgggaguu

SEQ ID NO: 1746670 - RNA, 19 nt, Homo sapiens
  misc_RNA (1)...(19): siRNA sense strand
ccagcgagagaaagaguuu

SEQ ID NO: 1746671 - RNA, 19 nt, Homo sapiens
  misc_RNA (1)...(19): siRNA sense strand
caagccagcacccauguuc

SEQ ID NO: 1746672 - RNA, 19 nt, Homo sapiens
  misc_RNA (1)...(19): siRNA sense strand
cguggaagcuacacuuacu

SEQ ID NO: 1746673 - RNA, 19 nt, Homo sapiens
  misc_RNA (1)...(19): siRNA sense strand
aagcucgcgucaucacuga

SEQ ID NO: 1746674 - RNA, 19 nt, Homo sapiens
  misc_RNA (1)...(19): siRNA sense strand
cugaauuagccaccaagua

SEQ ID NO: 1746675 - RNA, 19 nt, Homo sapiens
  misc_RNA (1)...(19): siRNA sense strand
gcuagcccucugccucuuu

SEQ ID NO: 1746676 - RNA, 19 nt, Homo sapiens
  misc_RNA (1)...(19): siRNA sense strand
uguauuauucugcguggaa

SEQ ID NO: 1746677 - RNA, 19 nt, Homo sapiens
  misc_RNA (1)...(19): siRNA sense strand
ugcggaagcuggugaaagc

SEQ ID NO: 1746678 - RNA, 19 nt, Homo sapiens
  misc_RNA (1)...(19): siRNA sense strand
ggugaaagcucgcgucauc

SEQ ID NO: 1746679 - RNA, 19 nt, Homo sapiens
  misc_RNA (1)...(19): siRNA sense strand
guuccuggaugacuccuuu

SEQ ID NO: 1746680 - RNA, 19 nt, Homo sapiens
  misc_RNA (1)...(19): siRNA sense strand
ucuaagcaguggcaucuga

SEQ ID NO: 1746681 - RNA, 19 nt, Homo sapiens
  misc_RNA (1)...(19): siRNA sense strand
ugaauuagccaccaaguac

SEQ ID NO: 1746682 - RNA, 19 nt, Homo sapiens
  misc_RNA (1)...(19): siRNA sense strand
uccugaaucuggacucuaa

SEQ ID NO: 1746683 - RNA, 19 nt, Homo sapiens
  misc_RNA (1)...(19): siRNA sense strand
gaugacuccuuucgcaagu

SEQ ID NO: 1746684 - RNA, 19 nt, Homo sapiens
  misc_RNA (1)...(19): siRNA sense strand
gggaguucgugccgccuuu

SEQ ID NO: 1746685 - RNA, 19 nt, Homo sapiens
  misc_RNA (1)...(19): siRNA sense strand
cacaauauccagcgagaga

SEQ ID NO: 1746686 - RNA, 19 nt, Homo sapiens
  misc_RNA (1)...(19): siRNA sense strand
gaucuaagcaguggcaucu

SEQ ID NO: 1746687 - RNA, 19 nt, Homo sapiens
  misc_RNA (1)...(19): siRNA sense strand
caauauccagcgagagaaa

SEQ ID NO: 1746688 - RNA, 19 nt, Homo sapiens
  misc_RNA (1)...(19): siRNA sense strand
gggcuagaauccgggaguu

SEQ ID NO: 1746689 - RNA, 19 nt, Homo sapiens
  misc_RNA (1)...(19): siRNA sense strand
ccagcgagagaaagaguuu

SEQ ID NO: 1746690 - RNA, 19 nt, Homo sapiens
  misc_RNA (1)...(19): siRNA sense strand
caagccagcacccauguuc

SEQ ID NO: 1746691 - RNA, 19 nt, Homo sapiens
  misc_RNA (1)...(19): siRNA sense strand
cguggaagcuacacuuacu

SEQ ID NO: 1746692 - RNA, 19 nt, Homo sapiens
  misc_RNA (1)...(19): siRNA sense strand
aagcucgcgucaucacuga

SEQ ID NO: 1746693 - RNA, 19 nt, Homo sapiens
  misc_RNA (1)...(19): siRNA sense strand
cugaauuagccaccaagua

SEQ ID NO: 1746694 - RNA, 19 nt, Homo sapiens
  misc_RNA (1)...(19): siRNA sense strand
gcuagcccucugccucuuu

SEQ ID NO: 1746695 - RNA, 19 nt, Homo sapiens
  misc_RNA (1)...(19): siRNA sense strand
uguauuauucugcguggaa

SEQ ID NO: 1746696 - RNA, 19 nt, Homo sapiens
  misc_RNA (1)...(19): siRNA sense strand
ugcggaagcuggugaaagc

SEQ ID NO: 1746697 - RNA, 19 nt, Homo sapiens
  misc_RNA (1)...(19): siRNA sense strand
ggugaaagcucgcgucauc

SEQ ID NO: 1746698 - RNA, 19 nt, Homo sapiens
  misc_RNA (1)...(19): siRNA sense strand
guuccuggaugacuccuuu

SEQ ID NO: 1746699 - RNA, 19 nt, Homo sapiens
  misc_RNA (1)...(19): siRNA sense strand
ugaauuagccaccaaguac

SEQ ID NO: 1746700 - RNA, 19 nt, Homo sapiens
  misc_RNA (1)...(19): siRNA sense strand
uccugaaucuggacucuaa

SEQ ID NO: 1746701 - RNA, 19 nt, Homo sapiens
  misc_RNA (1)...(19): siRNA sense strand
gaugacuccuuucgcaagu

SEQ ID NO: 1746702 - RNA, 19 nt, Homo sapiens
  misc_RNA (1)...(19): siRNA sense strand
gggaguucgugccgccuuu

SEQ ID NO: 1746703 - RNA, 19 nt, Homo sapiens
  misc_RNA (1)...(19): siRNA sense strand
cacaauauccagcgagaga

SEQ ID NO: 1746704 - RNA, 19 nt, Homo sapiens
  misc_RNA (1)...(19): siRNA sense strand
caauauccagcgagagaaa

SEQ ID NO: 1746705 - RNA, 19 nt, Homo sapiens
  misc_RNA (1)...(19): siRNA sense strand
gggcuagaauccgggaguu

SEQ ID NO: 1746706 - RNA, 19 nt, Homo sapiens
  misc_RNA (1)...(19): siRNA sense strand
ccagcgagagaaagaguuu

SEQ ID NO: 1746707 - RNA, 19 nt, Homo sapiens
  misc_RNA (1)...(19): siRNA sense strand
caagccagcacccauguuc

SEQ ID NO: 1746708 - RNA, 19 nt, Homo sapiens
  misc_RNA (1)...(19): siRNA sense strand
cguggaagcuacacuuacu

SEQ ID NO: 1746709 - RNA, 19 nt, Homo sapiens
  misc_RNA (1)...(19): siRNA sense strand
aagcucgcgucaucacuga

SEQ ID NO: 1746710 - RNA, 19 nt, Homo sapiens
  misc_RNA (1)...(19): siRNA sense strand
cugaauuagccaccaagua

SEQ ID NO: 1746711 - RNA, 19 nt, Homo sapiens
  misc_RNA (1)...(19): siRNA sense strand
gcuagcccucugccucuuu

SEQ ID NO: 1746712 - RNA, 19 nt, Homo sapiens
  misc_RNA (1)...(19): siRNA sense strand
uguauuauucugcguggaa

SEQ ID NO: 1746713 - RNA, 19 nt, Homo sapiens
  misc_RNA (1)...(19): siRNA sense strand
ugcggaagcuggugaaagc

SEQ ID NO: 1746714 - RNA, 19 nt, Homo sapiens
  misc_RNA (1)...(19): siRNA sense strand
ggugaaagcucgcgucauc

SEQ ID NO: 1746715 - RNA, 19 nt, Homo sapiens
  misc_RNA (1)...(19): siRNA sense strand
guuccuggaugacuccuuu

SEQ ID NO: 1746716 - RNA, 19 nt, Homo sapiens
  misc_RNA (1)...(19): siRNA sense strand
ucuaagcaguggcaucuga

SEQ ID NO: 1746717 - RNA, 19 nt, Homo sapiens
  misc_RNA (1)...(19): siRNA sense strand
ugaauuagccaccaaguac

SEQ ID NO: 1746718 - RNA, 19 nt, Homo sapiens
  misc_RNA (1)...(19): siRNA sense strand
uccugaaucuggacucuaa

SEQ ID NO: 1746719 - RNA, 19 nt, Homo sapiens
  misc_RNA (1)...(19): siRNA sense strand
gaugacuccuuucgcaagu

SEQ ID NO: 1746720 - RNA, 19 nt, Homo sapiens
  misc_RNA (1)...(19): siRNA sense strand
gggaguucgugccgccuuu

SEQ ID NO: 1746721 - RNA, 19 nt, Homo sapiens
  misc_RNA (1)...(19): siRNA sense strand
cacaauauccagcgagaga

SEQ ID NO: 1746722 - RNA, 19 nt, Homo sapiens
  misc_RNA (1)...(19): siRNA sense strand
gaucuaagcaguggcaucu

SEQ ID NO: 1746723 - RNA, 19 nt, Homo sapiens
  misc_RNA (1)...(19): siRNA sense strand
caauauccagcgagagaaa

SEQ ID NO: 1746724 - RNA, 19 nt, Homo sapiens
  misc_RNA (1)...(19): siRNA sense strand
gggcuagaauccgggaguu

SEQ ID NO: 1746725 - RNA, 19 nt, Homo sapiens
  misc_RNA (1)...(19): siRNA sense strand
ccagcgagagaaagaguuu

SEQ ID NO: 1746726 - RNA, 19 nt, Homo sapiens
  misc_RNA (1)...(19): siRNA sense strand
caagccagcacccauguuc

SEQ ID NO: 1746727 - RNA, 19 nt, Homo sapiens
  misc_RNA (1)...(19): siRNA sense strand
cguggaagcuacacuuacu

SEQ ID NO: 1746728 - RNA, 19 nt, Homo sapiens
  misc_RNA (1)...(19): siRNA sense strand
aagcucgcgucaucacuga

SEQ ID NO: 1746729 - RNA, 19 nt, Homo sapiens
  misc_RNA (1)...(19): siRNA sense strand
cugaauuagccaccaagua

SEQ ID NO: 1746730 - RNA, 19 nt, Homo sapiens
  misc_RNA (1)...(19): siRNA sense strand
gcuagcccucugccucuuu

SEQ ID NO: 1746731 - RNA, 19 nt, Homo sapiens
  misc_RNA (1)...(19): siRNA sense strand
uguauuauucugcguggaa

SEQ ID NO: 1746732 - RNA, 19 nt, Homo sapiens
  misc_RNA (1)...(19): siRNA sense strand
ugcggaagcuggugaaagc

SEQ ID NO: 1746733 - RNA, 19 nt, Homo sapiens
  misc_RNA (1)...(19): siRNA sense strand
ggugaaagcucgcgucauc

SEQ ID NO: 1746734 - RNA, 19 nt, Homo sapiens
  misc_RNA (1)...(19): siRNA sense strand
guuccuggaugacuccuuu

SEQ ID NO: 1746735 - RNA, 19 nt, Homo sapiens
  misc_RNA (1)...(19): siRNA sense strand
ucuaagcaguggcaucuga

SEQ ID NO: 1746736 - RNA, 19 nt, Homo sapiens
  misc_RNA (1)...(19): siRNA sense strand
ugaauuagccaccaaguac

SEQ ID NO: 1746737 - RNA, 19 nt, Homo sapiens
  misc_RNA (1)...(19): siRNA sense strand
uccugaaucuggacucuaa

SEQ ID NO: 1746738 - RNA, 19 nt, Homo sapiens
  misc_RNA (1)...(19): siRNA sense strand
gaugacuccuuucgcaagu

SEQ ID NO: 1746739 - RNA, 19 nt, Homo sapiens
  misc_RNA (1)...(19): siRNA sense strand
gggaguucgugccgccuuu

SEQ ID NO: 1746740 - RNA, 19 nt, Homo sapiens
  misc_RNA (1)...(19): siRNA sense strand
cacaauauccagcgagaga

SEQ ID NO: 1746741 - RNA, 19 nt, Homo sapiens
  misc_RNA (1)...(19): siRNA sense strand
gaucuaagcaguggcaucu

SEQ ID NO: 1746742 - RNA, 19 nt, Homo sapiens
  misc_RNA (1)...(19): siRNA sense strand
caauauccagcgagagaaa

SEQ ID NO: 1746743 - RNA, 19 nt, Homo sapiens
  misc_RNA (1)...(19): siRNA sense strand
gggcuagaauccgggaguu

SEQ ID NO: 1746744 - RNA, 19 nt, Homo sapiens
  misc_RNA (1)...(19): siRNA sense strand
ccagcgagagaaagaguuu

SEQ ID NO: 1746745 - RNA, 19 nt, Homo sapiens
  misc_RNA (1)...(19): siRNA sense strand
caagccagcacccauguuc

SEQ ID NO: 1746746 - RNA, 19 nt, Homo sapiens
  misc_RNA (1)...(19): siRNA sense strand
cguggaagcuacacuuacu

SEQ ID NO: 1746747 - RNA, 19 nt, Homo sapiens
  misc_RNA (1)...(19): siRNA sense strand
aagcucgcgucaucacuga

SEQ ID NO: 1746748 - RNA, 19 nt, Homo sapiens
  misc_RNA (1)...(19): siRNA sense strand
cugaauuagccaccaagua

SEQ ID NO: 1746749 - RNA, 19 nt, Homo sapiens
  misc_RNA (1)...(19): siRNA sense strand
gcuagcccucugccucuuu

SEQ ID NO: 1746750 - RNA, 19 nt, Homo sapiens
  misc_RNA (1)...(19): siRNA sense strand
uguauuauucugcguggaa

SEQ ID NO: 1746751 - RNA, 19 nt, Homo sapiens
  misc_RNA (1)...(19): siRNA sense strand
ugcggaagcuggugaaagc

SEQ ID NO: 1746752 - RNA, 19 nt, Homo sapiens
  misc_RNA (1)...(19): siRNA sense strand
ggugaaagcucgcgucauc

SEQ ID NO: 1746753 - RNA, 19 nt, Homo sapiens
  misc_RNA (1)...(19): siRNA sense strand
guuccuggaugacuccuuu

SEQ ID NO: 1746754 - RNA, 19 nt, Homo sapiens
  misc_RNA (1)...(19): siRNA sense strand
ugaauuagccaccaaguac

SEQ ID NO: 1746755 - RNA, 19 nt, Homo sapiens
  misc_RNA (1)...(19): siRNA sense strand
uccugaaucuggacucuaa

SEQ ID NO: 1746756 - RNA, 19 nt, Homo sapiens
  misc_RNA (1)...(19): siRNA sense strand
gaugacuccuuucgcaagu

SEQ ID NO: 1746757 - RNA, 19 nt, Homo sapiens
  misc_RNA (1)...(19): siRNA sense strand
gggaguucgugccgccuuu

SEQ ID NO: 1746758 - RNA, 19 nt, Homo sapiens
  misc_RNA (1)...(19): siRNA sense strand
cacaauauccagcgagaga

SEQ ID NO: 1746759 - RNA, 19 nt, Homo sapiens
  misc_RNA (1)...(19): siRNA sense strand
caauauccagcgagagaaa

SEQ ID NO: 1746760 - RNA, 19 nt, Homo sapiens
  misc_RNA (1)...(19): siRNA sense strand
gggcuagaauccgggaguu

SEQ ID NO: 1746761 - RNA, 19 nt, Homo sapiens
  misc_RNA (1)...(19): siRNA sense strand
ccagcgagagaaagaguuu

SEQ ID NO: 1746762 - RNA, 19 nt, Homo sapiens
  misc_RNA (1)...(19): siRNA sense strand
caagccagcacccauguuc

SEQ ID NO: 1746763 - RNA, 19 nt, Homo sapiens
  misc_RNA (1)...(19): siRNA sense strand
cguggaagcuacacuuacu

SEQ ID NO: 1746764 - RNA, 19 nt, Homo sapiens
  misc_RNA (1)...(19): siRNA sense strand
aagcucgcgucaucacuga

SEQ ID NO: 1746765 - RNA, 19 nt, Homo sapiens
  misc_RNA (1)...(19): siRNA sense strand
cugaauuagccaccaagua

SEQ ID NO: 1746766 - RNA, 19 nt, Homo sapiens
  misc_RNA (1)...(19): siRNA sense strand
gcuagcccucugccucuuu

SEQ ID NO: 1746767 - RNA, 19 nt, Homo sapiens
  misc_RNA (1)...(19): siRNA sense strand
uguauuauucugcguggaa

SEQ ID NO: 1746768 - RNA, 19 nt, Homo sapiens
  misc_RNA (1)...(19): siRNA sense strand
ugcggaagcuggugaaagc

SEQ ID NO: 1746769 - RNA, 19 nt, Homo sapiens
  misc_RNA (1)...(19): siRNA sense strand
ggugaaagcucgcgucauc

SEQ ID NO: 1746770 - RNA, 19 nt, Homo sapiens
  misc_RNA (1)...(19): siRNA sense strand
guuccuggaugacuccuuu

SEQ ID NO: 1746771 - RNA, 19 nt, Homo sapiens
  misc_RNA (1)...(19): siRNA sense strand
ucuaagcaguggcaucuga

SEQ ID NO: 1746772 - RNA, 19 nt, Homo sapiens
  misc_RNA (1)...(19): siRNA sense strand
ugaauuagccaccaaguac

SEQ ID NO: 1746773 - RNA, 19 nt, Homo sapiens
  misc_RNA (1)...(19): siRNA sense strand
uccugaaucuggacucuaa

SEQ ID NO: 1746774 - RNA, 19 nt, Homo sapiens
  misc_RNA (1)...(19): siRNA sense strand
gaugacuccuuucgcaagu

SEQ ID NO: 1746775 - RNA, 19 nt, Homo sapiens
  misc_RNA (1)...(19): siRNA sense strand
gggaguucgugccgccuuu

SEQ ID NO: 1746776 - RNA, 19 nt, Homo sapiens
  misc_RNA (1)...(19): siRNA sense strand
cacaauauccagcgagaga

SEQ ID NO: 1746777 - RNA, 19 nt, Homo sapiens
  misc_RNA (1)...(19): siRNA sense strand
gaucuaagcaguggcaucu

SEQ ID NO: 1746778 - RNA, 19 nt, Homo sapiens
  misc_RNA (1)...(19): siRNA sense strand
caauauccagcgagagaaa

SEQ ID NO: 1746779 - RNA, 19 nt, Homo sapiens
  misc_RNA (1)...(19): siRNA sense strand
gggcuagaauccgggaguu

SEQ ID NO: 1746780 - RNA, 19 nt, Homo sapiens
  misc_RNA (1)...(19): siRNA sense strand
ccagcgagagaaagaguuu

SEQ ID NO: 1746781 - RNA, 19 nt, Homo sapiens
  misc_RNA (1)...(19): siRNA sense strand
caagccagcacccauguuc

SEQ ID NO: 1746782 - RNA, 19 nt, Homo sapiens
  misc_RNA (1)...(19): siRNA sense strand
cguggaagcuacacuuacu

SEQ ID NO: 1746783 - RNA, 19 nt, Homo sapiens
  misc_RNA (1)...(19): siRNA sense strand
aagcucgcgucaucacuga

SEQ ID NO: 1746784 - RNA, 19 nt, Homo sapiens
  misc_RNA (1)...(19): siRNA sense strand
cugaauuagccaccaagua

SEQ ID NO: 1746785 - RNA, 19 nt, Homo sapiens
  misc_RNA (1)...(19): siRNA sense strand
gcuagcccucugccucuuu

SEQ ID NO: 1746786 - RNA, 19 nt, Homo sapiens
  misc_RNA (1)...(19): siRNA sense strand
uguauuauucugcguggaa

SEQ ID NO: 1746787 - RNA, 19 nt, Homo sapiens
  misc_RNA (1)...(19): siRNA sense strand
ugcggaagcuggugaaagc

SEQ ID NO: 1746788 - RNA, 19 nt, Homo sapiens
  misc_RNA (1)...(19): siRNA sense strand
guuccuggaugacuccuuu

SEQ ID NO: 1746789 - RNA, 19 nt, Homo sapiens
  misc_RNA (1)...(19): siRNA sense strand
ugaauuagccaccaaguac

SEQ ID NO: 1746790 - RNA, 19 nt, Homo sapiens
  misc_RNA (1)...(19): siRNA sense strand
uccugaaucuggacucuaa

SEQ ID NO: 1746791 - RNA, 19 nt, Homo sapiens
  misc_RNA (1)...(19): siRNA sense strand
gaugacuccuuucgcaagu

SEQ ID NO: 1746792 - RNA, 19 nt, Homo sapiens
  misc_RNA (1)...(19): siRNA sense strand
gggaguucgugccgccuuu

SEQ ID NO: 1746793 - RNA, 19 nt, Homo sapiens
  misc_RNA (1)...(19): siRNA sense strand
gggcuagaauccgggaguu

SEQ ID NO: 1746794 - RNA, 19 nt, Homo sapiens
  misc_RNA (1)...(19): siRNA sense strand
caagccagcacccauguuc

SEQ ID NO: 1746795 - RNA, 19 nt, Homo sapiens
  misc_RNA (1)...(19): siRNA sense strand
cguggaagcuacacuuacu

SEQ ID NO: 1746796 - RNA, 19 nt, Homo sapiens
  misc_RNA (1)...(19): siRNA sense strand
cugaauuagccaccaagua

SEQ ID NO: 1746797 - RNA, 19 nt, Homo sapiens
  misc_RNA (1)...(19): siRNA sense strand
gcuagcccucugccucuuu

SEQ ID NO: 1746798 - RNA, 19 nt, Homo sapiens
  misc_RNA (1)...(19): siRNA sense strand
uguauuauucugcguggaa

SEQ ID NO: 1746799 - RNA, 19 nt, Homo sapiens
  misc_RNA (1)...(19): siRNA sense strand
ggugaaagcucgcgucauc

SEQ ID NO: 1746800 - RNA, 19 nt, Homo sapiens
  misc_RNA (1)...(19): siRNA sense strand
guuccuggaugacuccuuu

SEQ ID NO: 1746801 - RNA, 19 nt, Homo sapiens
  misc_RNA (1)...(19): siRNA sense strand
ucuaagcaguggcaucuga

SEQ ID NO: 1746802 - RNA, 19 nt, Homo sapiens
  misc_RNA (1)...(19): siRNA sense strand
ugaauuagccaccaaguac

SEQ ID NO: 1746803 - RNA, 19 nt, Homo sapiens
  misc_RNA (1)...(19): siRNA sense strand
uccugaaucuggacucuaa

SEQ ID NO: 1746804 - RNA, 19 nt, Homo sapiens
  misc_RNA (1)...(19): siRNA sense strand
gaugacuccuuucgcaagu

SEQ ID NO: 1746805 - RNA, 19 nt, Homo sapiens
  misc_RNA (1)...(19): siRNA sense strand
gggaguucgugccgccuuu

SEQ ID NO: 1746806 - RNA, 19 nt, Homo sapiens
  misc_RNA (1)...(19): siRNA sense strand
cacaauauccagcgagaga

SEQ ID NO: 1746807 - RNA, 19 nt, Homo sapiens
  misc_RNA (1)...(19): siRNA sense strand
gaucuaagcaguggcaucu

SEQ ID NO: 1746808 - RNA, 19 nt, Homo sapiens
  misc_RNA (1)...(19): siRNA sense strand
caauauccagcgagagaaa

SEQ ID NO: 1746809 - RNA, 19 nt, Homo sapiens
  misc_RNA (1)...(19): siRNA sense strand
gggcuagaauccgggaguu

SEQ ID NO: 1746810 - RNA, 19 nt, Homo sapiens
  misc_RNA (1)...(19): siRNA sense strand
ccagcgagagaaagaguuu

SEQ ID NO: 1746811 - RNA, 19 nt, Homo sapiens
  misc_RNA (1)...(19): siRNA sense strand
caagccagcacccauguuc

SEQ ID NO: 1746812 - RNA, 19 nt, Homo sapiens
  misc_RNA (1)...(19): siRNA sense strand
cguggaagcuacacuuacu

SEQ ID NO: 1746813 - RNA, 19 nt, Homo sapiens
  misc_RNA (1)...(19): siRNA sense strand
aagcucgcgucaucacuga

SEQ ID NO: 1746814 - RNA, 19 nt, Homo sapiens
  misc_RNA (1)...(19): siRNA sense strand
cugaauuagccaccaagua

SEQ ID NO: 1746815 - RNA, 19 nt, Homo sapiens
  misc_RNA (1)...(19): siRNA sense strand
gcuagcccucugccucuuu

SEQ ID NO: 1746816 - RNA, 19 nt, Homo sapiens
  misc_RNA (1)...(19): siRNA sense strand
uguauuauucugcguggaa

SEQ ID NO: 1746817 - RNA, 19 nt, Homo sapiens
  misc_RNA (1)...(19): siRNA sense strand
ugcggaagcuggugaaagc

SEQ ID NO: 1746818 - RNA, 19 nt, Homo sapiens
  misc_RNA (1)...(19): siRNA sense strand
ggugaaagcucgcgucauc

SEQ ID NO: 1746819 - RNA, 19 nt, Homo sapiens
  misc_RNA (1)...(19): siRNA sense strand
guuccuggaugacuccuuu

SEQ ID NO: 1746820 - RNA, 19 nt, Homo sapiens
  misc_RNA (1)...(19): siRNA sense strand
ucuaagcaguggcaucuga

SEQ ID NO: 1746821 - RNA, 19 nt, Homo sapiens
  misc_RNA (1)...(19): siRNA sense strand
ugaauuagccaccaaguac

SEQ ID NO: 1746822 - RNA, 19 nt, Homo sapiens
  misc_RNA (1)...(19): siRNA sense strand
uccugaaucuggacucuaa

SEQ ID NO: 1746823 - RNA, 19 nt, Homo sapiens
  misc_RNA (1)...(19): siRNA sense strand
gaugacuccuuucgcaagu

SEQ ID NO: 1746824 - RNA, 19 nt, Homo sapiens
  misc_RNA (1)...(19): siRNA sense strand
gggaguucgugccgccuuu

SEQ ID NO: 1746825 - RNA, 19 nt, Homo sapiens
  misc_RNA (1)...(19): siRNA sense strand
cacaauauccagcgagaga

SEQ ID NO: 1746826 - RNA, 19 nt, Homo sapiens
  misc_RNA (1)...(19): siRNA sense strand
gaucuaagcaguggcaucu

SEQ ID NO: 1746827 - RNA, 19 nt, Homo sapiens
  misc_RNA (1)...(19): siRNA sense strand
caauauccagcgagagaaa

SEQ ID NO: 1746828 - RNA, 19 nt, Homo sapiens
  misc_RNA (1)...(19): siRNA sense strand
gggcuagaauccgggaguu

SEQ ID NO: 1746829 - RNA, 19 nt, Homo sapiens
  misc_RNA (1)...(19): siRNA sense strand
ccagcgagagaaagaguuu

SEQ ID NO: 1746830 - RNA, 19 nt, Homo sapiens
  misc_RNA (1)...(19): siRNA sense strand
caagccagcacccauguuc

SEQ ID NO: 1746831 - RNA, 19 nt, Homo sapiens
  misc_RNA (1)...(19): siRNA sense strand
cguggaagcuacacuuacu

SEQ ID NO: 1746832 - RNA, 19 nt, Homo sapiens
  misc_RNA (1)...(19): siRNA sense strand
aagcucgcgucaucacuga

SEQ ID NO: 1746833 - RNA, 19 nt, Homo sapiens
  misc_RNA (1)...(19): siRNA sense strand
cugaauuagccaccaagua

SEQ ID NO: 1746834 - RNA, 19 nt, Homo sapiens
  misc_RNA (1)...(19): siRNA sense strand
gcuagcccucugccucuuu

SEQ ID NO: 1746835 - RNA, 19 nt, Homo sapiens
  misc_RNA (1)...(19): siRNA sense strand
uguauuauucugcguggaa

SEQ ID NO: 1746836 - RNA, 19 nt, Homo sapiens
  misc_RNA (1)...(19): siRNA sense strand
ugcggaagcuggugaaagc

SEQ ID NO: 1746837 - RNA, 19 nt, Homo sapiens
  misc_RNA (1)...(19): siRNA sense strand
ggugaaagcucgcgucauc

SEQ ID NO: 1746838 - RNA, 19 nt, Homo sapiens
  misc_RNA (1)...(19): siRNA sense strand
guuccuggaugacuccuuu

SEQ ID NO: 1746839 - RNA, 19 nt, Homo sapiens
  misc_RNA (1)...(19): siRNA sense strand
ucuaagcaguggcaucuga

SEQ ID NO: 1746840 - RNA, 19 nt, Homo sapiens
  misc_RNA (1)...(19): siRNA sense strand
ugaauuagccaccaaguac

SEQ ID NO: 1746841 - RNA, 19 nt, Homo sapiens
  misc_RNA (1)...(19): siRNA sense strand
uccugaaucuggacucuaa

SEQ ID NO: 1746842 - RNA, 19 nt, Homo sapiens
  misc_RNA (1)...(19): siRNA sense strand
gaugacuccuuucgcaagu

SEQ ID NO: 1746843 - RNA, 19 nt, Homo sapiens
  misc_RNA (1)...(19): siRNA sense strand
gggaguucgugccgccuuu

SEQ ID NO: 1746844 - RNA, 19 nt, Homo sapiens
  misc_RNA (1)...(19): siRNA sense strand
cacaauauccagcgagaga

SEQ ID NO: 1746845 - RNA, 19 nt, Homo sapiens
  misc_RNA (1)...(19): siRNA sense strand
gaucuaagcaguggcaucu

SEQ ID NO: 1746846 - RNA, 19 nt, Homo sapiens
  misc_RNA (1)...(19): siRNA sense strand
caauauccagcgagagaaa

SEQ ID NO: 1746847 - RNA, 19 nt, Homo sapiens
  misc_RNA (1)...(19): siRNA sense strand
gggcuagaauccgggaguu

SEQ ID NO: 1746848 - RNA, 19 nt, Homo sapiens
  misc_RNA (1)...(19): siRNA sense strand
ccagcgagagaaagaguuu

SEQ ID NO: 1746849 - RNA, 19 nt, Homo sapiens
  misc_RNA (1)...(19): siRNA sense strand
caagccagcacccauguuc

SEQ ID NO: 1746850 - RNA, 19 nt, Homo sapiens
  misc_RNA (1)...(19): siRNA sense strand
cguggaagcuacacuuacu

SEQ ID NO: 1746851 - RNA, 19 nt, Homo sapiens
  misc_RNA (1)...(19): siRNA sense strand
aagcucgcgucaucacuga

SEQ ID NO: 1746852 - RNA, 19 nt, Homo sapiens
  misc_RNA (1)...(19): siRNA sense strand
cugaauuagccaccaagua

SEQ ID NO: 1746853 - RNA, 19 nt, Homo sapiens
  misc_RNA (1)...(19): siRNA sense strand
gcuagcccucugccucuuu

SEQ ID NO: 1746854 - RNA, 19 nt, Homo sapiens
  misc_RNA (1)...(19): siRNA sense strand
uguauuauucugcguggaa

SEQ ID NO: 1746855 - RNA, 19 nt, Homo sapiens
  misc_RNA (1)...(19): siRNA sense strand
ugcggaagcuggugaaagc

SEQ ID NO: 1746856 - RNA, 19 nt, Homo sapiens
  misc_RNA (1)...(19): siRNA sense strand
ggugaaagcucgcgucauc

SEQ ID NO: 1746857 - RNA, 19 nt, Homo sapiens
  misc_RNA (1)...(19): siRNA sense strand
guuccuggaugacuccuuu

SEQ ID NO: 1746858 - RNA, 19 nt, Homo sapiens
  misc_RNA (1)...(19): siRNA sense strand
ugaauuagccaccaaguac

SEQ ID NO: 1746859 - RNA, 19 nt, Homo sapiens
  misc_RNA (1)...(19): siRNA sense strand
uccugaaucuggacucuaa

SEQ ID NO: 1746860 - RNA, 19 nt, Homo sapiens
  misc_RNA (1)...(19): siRNA sense strand
gaugacuccuuucgcaagu

SEQ ID NO: 1746861 - RNA, 19 nt, Homo sapiens
  misc_RNA (1)...(19): siRNA sense strand
gggaguucgugccgccuuu

SEQ ID NO: 1746862 - RNA, 19 nt, Homo sapiens
  misc_RNA (1)...(19): siRNA sense strand
cacaauauccagcgagaga

SEQ ID NO: 1746863 - RNA, 19 nt, Homo sapiens
  misc_RNA (1)...(19): siRNA sense strand
caauauccagcgagagaaa

SEQ ID NO: 1746864 - RNA, 19 nt, Homo sapiens
  misc_RNA (1)...(19): siRNA sense strand
gggcuagaauccgggaguu

SEQ ID NO: 1746865 - RNA, 19 nt, Homo sapiens
  misc_RNA (1)...(19): siRNA sense strand
ccagcgagagaaagaguuu

SEQ ID NO: 1746866 - RNA, 19 nt, Homo sapiens
  misc_RNA (1)...(19): siRNA sense strand
caagccagcacccauguuc

SEQ ID NO: 1746867 - RNA, 19 nt, Homo sapiens
  misc_RNA (1)...(19): siRNA sense strand
cguggaagcuacacuuacu

SEQ ID NO: 1746868 - RNA, 19 nt, Homo sapiens
  misc_RNA (1)...(19): siRNA sense strand
aagcucgcgucaucacuga

SEQ ID NO: 1746869 - RNA, 19 nt, Homo sapiens
  misc_RNA (1)...(19): siRNA sense strand
cugaauuagccaccaagua

SEQ ID NO: 1746870 - RNA, 19 nt, Homo sapiens
  misc_RNA (1)...(19): siRNA sense strand
gcuagcccucugccucuuu

SEQ ID NO: 1746871 - RNA, 19 nt, Homo sapiens
  misc_RNA (1)...(19): siRNA sense strand
uguauuauucugcguggaa

SEQ ID NO: 1746872 - RNA, 19 nt, Homo sapiens
  misc_RNA (1)...(19): siRNA sense strand
ugcggaagcuggugaaagc

SEQ ID NO: 1746873 - RNA, 19 nt, Homo sapiens
  misc_RNA (1)...(19): siRNA sense strand
ggugaaagcucgcgucauc

SEQ ID NO: 1746874 - RNA, 19 nt, Homo sapiens
  misc_RNA (1)...(19): siRNA sense strand
guuccuggaugacuccuuu

SEQ ID NO: 1746875 - RNA, 19 nt, Homo sapiens
  misc_RNA (1)...(19): siRNA sense strand
ucuaagcaguggcaucuga

SEQ ID NO: 1746876 - RNA, 19 nt, Homo sapiens
  misc_RNA (1)...(19): siRNA sense strand
ugaauuagccaccaaguac

SEQ ID NO: 1746877 - RNA, 19 nt, Homo sapiens
  misc_RNA (1)...(19): siRNA sense strand
uccugaaucuggacucuaa

SEQ ID NO: 1746878 - RNA, 19 nt, Homo sapiens
  misc_RNA (1)...(19): siRNA sense strand
gaugacuccuuucgcaagu

SEQ ID NO: 1746879 - RNA, 19 nt, Homo sapiens
  misc_RNA (1)...(19): siRNA sense strand
gggaguucgugccgccuuu

SEQ ID NO: 1746880 - RNA, 19 nt, Homo sapiens
  misc_RNA (1)...(19): siRNA sense strand
cacaauauccagcgagaga

SEQ ID NO: 1746881 - RNA, 19 nt, Homo sapiens
  misc_RNA (1)...(19): siRNA sense strand
gaucuaagcaguggcaucu

SEQ ID NO: 1746882 - RNA, 19 nt, Homo sapiens
  misc_RNA (1)...(19): siRNA sense strand
caauauccagcgagagaaa

SEQ ID NO: 1746883 - RNA, 19 nt, Homo sapiens
  misc_RNA (1)...(19): siRNA sense strand
gggcuagaauccgggaguu

SEQ ID NO: 1746884 - RNA, 19 nt, Homo sapiens
  misc_RNA (1)...(19): siRNA sense strand
ccagcgagagaaagaguuu

SEQ ID NO: 1746885 - RNA, 19 nt, Homo sapiens
  misc_RNA (1)...(19): siRNA sense strand
caagccagcacccauguuc

SEQ ID NO: 1746886 - RNA, 19 nt, Homo sapiens
  misc_RNA (1)...(19): siRNA sense strand
cguggaagcuacacuuacu

SEQ ID NO: 1746887 - RNA, 19 nt, Homo sapiens
  misc_RNA (1)...(19): siRNA sense strand
aagcucgcgucaucacuga

SEQ ID NO: 1746888 - RNA, 19 nt, Homo sapiens
  misc_RNA (1)...(19): siRNA sense strand
cugaauuagccaccaagua

SEQ ID NO: 1746889 - RNA, 19 nt, Homo sapiens
  misc_RNA (1)...(19): siRNA sense strand
gcuagcccucugccucuuu

SEQ ID NO: 1746890 - RNA, 19 nt, Homo sapiens
  misc_RNA (1)...(19): siRNA sense strand
uguauuauucugcguggaa

SEQ ID NO: 1746891 - RNA, 19 nt, Homo sapiens
  misc_RNA (1)...(19): siRNA sense strand
ugcggaagcuggugaaagc

SEQ ID NO: 1746892 - RNA, 19 nt, Homo sapiens
  misc_RNA (1)...(19): siRNA sense strand
ggugaaagcucgcgucauc

SEQ ID NO: 1746893 - RNA, 19 nt, Homo sapiens
  misc_RNA (1)...(19): siRNA sense strand
guuccuggaugacuccuuu

SEQ ID NO: 1746894 - RNA, 19 nt, Homo sapiens
  misc_RNA (1)...(19): siRNA sense strand
ugaauuagccaccaaguac

SEQ ID NO: 1746895 - RNA, 19 nt, Homo sapiens
  misc_RNA (1)...(19): siRNA sense strand
uccugaaucuggacucuaa

SEQ ID NO: 1746896 - RNA, 19 nt, Homo sapiens
  misc_RNA (1)...(19): siRNA sense strand
gaugacuccuuucgcaagu

SEQ ID NO: 1746897 - RNA, 19 nt, Homo sapiens
  misc_RNA (1)...(19): siRNA sense strand
gggaguucgugccgccuuu

SEQ ID NO: 1746898 - RNA, 19 nt, Homo sapiens
  misc_RNA (1)...(19): siRNA sense strand
cacaauauccagcgagaga

SEQ ID NO: 1746899 - RNA, 19 nt, Homo sapiens
  misc_RNA (1)...(19): siRNA sense strand
caauauccagcgagagaaa

SEQ ID NO: 1746900 - RNA, 19 nt, Homo sapiens
  misc_RNA (1)...(19): siRNA sense strand
gggcuagaauccgggaguu

SEQ ID NO: 1746901 - RNA, 19 nt, Homo sapiens
  misc_RNA (1)...(19): siRNA sense strand
ccagcgagagaaagaguuu

SEQ ID NO: 1746902 - RNA, 19 nt, Homo sapiens
  misc_RNA (1)...(19): siRNA sense strand
caagccagcacccauguuc

SEQ ID NO: 1746903 - RNA, 19 nt, Homo sapiens
  misc_RNA (1)...(19): siRNA sense strand
cguggaagcuacacuuacu

SEQ ID NO: 1746904 - RNA, 19 nt, Homo sapiens
  misc_RNA (1)...(19): siRNA sense strand
aagcucgcgucaucacuga

SEQ ID NO: 1746905 - RNA, 19 nt, Homo sapiens
  misc_RNA (1)...(19): siRNA sense strand
cugaauuagccaccaagua

SEQ ID NO: 1746906 - RNA, 19 nt, Homo sapiens
  misc_RNA (1)...(19): siRNA sense strand
gcuagcccucugccucuuu

SEQ ID NO: 1746907 - RNA, 19 nt, Homo sapiens
  misc_RNA (1)...(19): siRNA sense strand
uguauuauucugcguggaa

SEQ ID NO: 1746908 - RNA, 19 nt, Homo sapiens
  misc_RNA (1)...(19): siRNA sense strand
ugcggaagcuggugaaagc

SEQ ID NO: 1746909 - RNA, 19 nt, Homo sapiens
  misc_RNA (1)...(19): siRNA sense strand
ggugaaagcucgcgucauc

SEQ ID NO: 1746910 - RNA, 19 nt, Homo sapiens
  misc_RNA (1)...(19): siRNA sense strand
guuccuggaugacuccuuu

SEQ ID NO: 1746911 - RNA, 19 nt, Homo sapiens
  misc_RNA (1)...(19): siRNA sense strand
ucuaagcaguggcaucuga

SEQ ID NO: 1746912 - RNA, 19 nt, Homo sapiens
  misc_RNA (1)...(19): siRNA sense strand
ugaauuagccaccaaguac

SEQ ID NO: 1746913 - RNA, 19 nt, Homo sapiens
  misc_RNA (1)...(19): siRNA sense strand
uccugaaucuggacucuaa

SEQ ID NO: 1746914 - RNA, 19 nt, Homo sapiens
  misc_RNA (1)...(19): siRNA sense strand
gaugacuccuuucgcaagu

SEQ ID NO: 1746915 - RNA, 19 nt, Homo sapiens
  misc_RNA (1)...(19): siRNA sense strand
gggaguucgugccgccuuu

SEQ ID NO: 1746916 - RNA, 19 nt, Homo sapiens
  misc_RNA (1)...(19): siRNA sense strand
cacaauauccagcgagaga

SEQ ID NO: 1746917 - RNA, 19 nt, Homo sapiens
  misc_RNA (1)...(19): siRNA sense strand
gaucuaagcaguggcaucu

SEQ ID NO: 1746918 - RNA, 19 nt, Homo sapiens
  misc_RNA (1)...(19): siRNA sense strand
caauauccagcgagagaaa

SEQ ID NO: 1746919 - RNA, 19 nt, Homo sapiens
  misc_RNA (1)...(19): siRNA sense strand
gggcuagaauccgggaguu

SEQ ID NO: 1746920 - RNA, 19 nt, Homo sapiens
  misc_RNA (1)...(19): siRNA sense strand
ccagcgagagaaagaguuu

SEQ ID NO: 1746921 - RNA, 19 nt, Homo sapiens
  misc_RNA (1)...(19): siRNA sense strand
caagccagcacccauguuc

SEQ ID NO: 1746922 - RNA, 19 nt, Homo sapiens
  misc_RNA (1)...(19): siRNA sense strand
cguggaagcuacacuuacu

SEQ ID NO: 1746923 - RNA, 19 nt, Homo sapiens
  misc_RNA (1)...(19): siRNA sense strand
aagcucgcgucaucacuga

SEQ ID NO: 1746924 - RNA, 19 nt, Homo sapiens
  misc_RNA (1)...(19): siRNA sense strand
cugaauuagccaccaagua

SEQ ID NO: 1746925 - RNA, 19 nt, Homo sapiens
  misc_RNA (1)...(19): siRNA sense strand
gcuagcccucugccucuuu

SEQ ID NO: 1746926 - RNA, 19 nt, Homo sapiens
  misc_RNA (1)...(19): siRNA sense strand
uguauuauucugcguggaa

SEQ ID NO: 1746927 - RNA, 19 nt, Homo sapiens
  misc_RNA (1)...(19): siRNA sense strand
ugcggaagcuggugaaagc

SEQ ID NO: 1746928 - RNA, 19 nt, Homo sapiens
  misc_RNA (1)...(19): siRNA sense strand
ggugaaagcucgcgucauc

SEQ ID NO: 1746929 - RNA, 19 nt, Homo sapiens
  misc_RNA (1)...(19): siRNA sense strand
guuccuggaugacuccuuu

SEQ ID NO: 1746930 - RNA, 19 nt, Homo sapiens
  misc_RNA (1)...(19): siRNA sense strand
ucuaagcaguggcaucuga

SEQ ID NO: 1746931 - RNA, 19 nt, Homo sapiens
  misc_RNA (1)...(19): siRNA sense strand
ugaauuagccaccaaguac

SEQ ID NO: 1746932 - RNA, 19 nt, Homo sapiens
  misc_RNA (1)...(19): siRNA sense strand
uccugaaucuggacucuaa

SEQ ID NO: 1746933 - RNA, 19 nt, Homo sapiens
  misc_RNA (1)...(19): siRNA sense strand
gaugacuccuuucgcaagu

SEQ ID NO: 1746934 - RNA, 19 nt, Homo sapiens
  misc_RNA (1)...(19): siRNA sense strand
gggaguucgugccgccuuu

SEQ ID NO: 1746935 - RNA, 19 nt, Homo sapiens
  misc_RNA (1)...(19): siRNA sense strand
cacaauauccagcgagaga

SEQ ID NO: 1746936 - RNA, 19 nt, Homo sapiens
  misc_RNA (1)...(19): siRNA sense strand
gaucuaagcaguggcaucu

SEQ ID NO: 1746937 - RNA, 19 nt, Homo sapiens
  misc_RNA (1)...(19): siRNA sense strand
caauauccagcgagagaaa

SEQ ID NO: 1746938 - RNA, 19 nt, Homo sapiens
  misc_RNA (1)...(19): siRNA sense strand
gggcuagaauccgggaguu

SEQ ID NO: 1746939 - RNA, 19 nt, Homo sapiens
  misc_RNA (1)...(19): siRNA sense strand
ccagcgagagaaagaguuu

SEQ ID NO: 1746940 - RNA, 19 nt, Homo sapiens
  misc_RNA (1)...(19): siRNA sense strand
caagccagcacccauguuc

SEQ ID NO: 1746941 - RNA, 19 nt, Homo sapiens
  misc_RNA (1)...(19): siRNA sense strand
cguggaagcuacacuuacu

SEQ ID NO: 1746942 - RNA, 19 nt, Homo sapiens
  misc_RNA (1)...(19): siRNA sense strand
aagcucgcgucaucacuga

SEQ ID NO: 1746943 - RNA, 19 nt, Homo sapiens
  misc_RNA (1)...(19): siRNA sense strand
cugaauuagccaccaagua

SEQ ID NO: 1746944 - RNA, 19 nt, Homo sapiens
  misc_RNA (1)...(19): siRNA sense strand
gcuagcccucugccucuuu

SEQ ID NO: 1746945 - RNA, 19 nt, Homo sapiens
  misc_RNA (1)...(19): siRNA sense strand
uguauuauucugcguggaa

SEQ ID NO: 1746946 - RNA, 19 nt, Homo sapiens
  misc_RNA (1)...(19): siRNA sense strand
ugcggaagcuggugaaagc

SEQ ID NO: 1746947 - RNA, 19 nt, Homo sapiens
  misc_RNA (1)...(19): siRNA sense strand
ggugaaagcucgcgucauc

SEQ ID NO: 1746948 - RNA, 19 nt, Homo sapiens
  misc_RNA (1)...(19): siRNA sense strand
guuccuggaugacuccuuu

SEQ ID NO: 1746949 - RNA, 19 nt, Homo sapiens
  misc_RNA (1)...(19): siRNA sense strand
ugaauuagccaccaaguac

SEQ ID NO: 1746950 - RNA, 19 nt, Homo sapiens
  misc_RNA (1)...(19): siRNA sense strand
uccugaaucuggacucuaa

SEQ ID NO: 1746951 - RNA, 19 nt, Homo sapiens
  misc_RNA (1)...(19): siRNA sense strand
gaugacuccuuucgcaagu

SEQ ID NO: 1746952 - RNA, 19 nt, Homo sapiens
  misc_RNA (1)...(19): siRNA sense strand
gggaguucgugccgccuuu

SEQ ID NO: 1746953 - RNA, 19 nt, Homo sapiens
  misc_RNA (1)...(19): siRNA sense strand
cacaauauccagcgagaga

SEQ ID NO: 1746954 - RNA, 19 nt, Homo sapiens
  misc_RNA (1)...(19): siRNA sense strand
caauauccagcgagagaaa

SEQ ID NO: 1746955 - RNA, 19 nt, Homo sapiens
  misc_RNA (1)...(19): siRNA sense strand
gggcuagaauccgggaguu

SEQ ID NO: 1746956 - RNA, 19 nt, Homo sapiens
  misc_RNA (1)...(19): siRNA sense strand
ccagcgagagaaagaguuu

SEQ ID NO: 1746957 - RNA, 19 nt, Homo sapiens
  misc_RNA (1)...(19): siRNA sense strand
caagccagcacccauguuc

SEQ ID NO: 1746958 - RNA, 19 nt, Homo sapiens
  misc_RNA (1)...(19): siRNA sense strand
cguggaagcuacacuuacu

SEQ ID NO: 1746959 - RNA, 19 nt, Homo sapiens
  misc_RNA (1)...(19): siRNA sense strand
aagcucgcgucaucacuga

SEQ ID NO: 1746960 - RNA, 19 nt, Homo sapiens
  misc_RNA (1)...(19): siRNA sense strand
cugaauuagccaccaagua

SEQ ID NO: 1746961 - RNA, 19 nt, Homo sapiens
  misc_RNA (1)...(19): siRNA sense strand
gcuagcccucugccucuuu

SEQ ID NO: 1746962 - RNA, 19 nt, Homo sapiens
  misc_RNA (1)...(19): siRNA sense strand
uguauuauucugcguggaa

SEQ ID NO: 1746963 - RNA, 19 nt, Homo sapiens
  misc_RNA (1)...(19): siRNA sense strand
ugcggaagcuggugaaagc

SEQ ID NO: 1746964 - RNA, 19 nt, Homo sapiens
  misc_RNA (1)...(19): siRNA sense strand
ggugaaagcucgcgucauc

SEQ ID NO: 1746965 - RNA, 19 nt, Homo sapiens
  misc_RNA (1)...(19): siRNA sense strand
guuccuggaugacuccuuu

SEQ ID NO: 1746966 - RNA, 19 nt, Homo sapiens
  misc_RNA (1)...(19): siRNA sense strand
ucuaagcaguggcaucuga

SEQ ID NO: 1746967 - RNA, 19 nt, Homo sapiens
  misc_RNA (1)...(19): siRNA sense strand
ugaauuagccaccaaguac

SEQ ID NO: 1746968 - RNA, 19 nt, Homo sapiens
  misc_RNA (1)...(19): siRNA sense strand
uccugaaucuggacucuaa

SEQ ID NO: 1746969 - RNA, 19 nt, Homo sapiens
  misc_RNA (1)...(19): siRNA sense strand
gaugacuccuuucgcaagu

SEQ ID NO: 1746970 - RNA, 19 nt, Homo sapiens
  misc_RNA (1)...(19): siRNA sense strand
gggaguucgugccgccuuu

SEQ ID NO: 1746971 - RNA, 19 nt, Homo sapiens
  misc_RNA (1)...(19): siRNA sense strand
cacaauauccagcgagaga

SEQ ID NO: 1746972 - RNA, 19 nt, Homo sapiens
  misc_RNA (1)...(19): siRNA sense strand
gaucuaagcaguggcaucu

SEQ ID NO: 1746973 - RNA, 19 nt, Homo sapiens
  misc_RNA (1)...(19): siRNA sense strand
caauauccagcgagagaaa

SEQ ID NO: 1746974 - RNA, 19 nt, Homo sapiens
  misc_RNA (1)...(19): siRNA sense strand
gggcuagaauccgggaguu

SEQ ID NO: 1746975 - RNA, 19 nt, Homo sapiens
  misc_RNA (1)...(19): siRNA sense strand
ccagcgagagaaagaguuu

SEQ ID NO: 1746976 - RNA, 19 nt, Homo sapiens
  misc_RNA (1)...(19): siRNA sense strand
caagccagcacccauguuc

SEQ ID NO: 1746977 - RNA, 19 nt, Homo sapiens
  misc_RNA (1)...(19): siRNA sense strand
cguggaagcuacacuuacu

SEQ ID NO: 1746978 - RNA, 19 nt, Homo sapiens
  misc_RNA (1)...(19): siRNA sense strand
aagcucgcgucaucacuga

SEQ ID NO: 1746979 - RNA, 19 nt, Homo sapiens
  misc_RNA (1)...(19): siRNA sense strand
cugaauuagccaccaagua

SEQ ID NO: 1746980 - RNA, 19 nt, Homo sapiens
  misc_RNA (1)...(19): siRNA sense strand
gcuagcccucugccucuuu

SEQ ID NO: 1746981 - RNA, 19 nt, Homo sapiens
  misc_RNA (1)...(19): siRNA sense strand
uguauuauucugcguggaa

SEQ ID NO: 1746982 - RNA, 19 nt, Homo sapiens
  misc_RNA (1)...(19): siRNA sense strand
ugcggaagcuggugaaagc

SEQ ID NO: 1746983 - RNA, 19 nt, Homo sapiens
  misc_RNA (1)...(19): siRNA sense strand
guuccuggaugacuccuuu

SEQ ID NO: 1746984 - RNA, 19 nt, Homo sapiens
  misc_RNA (1)...(19): siRNA sense strand
ugaauuagccaccaaguac

SEQ ID NO: 1746985 - RNA, 19 nt, Homo sapiens
  misc_RNA (1)...(19): siRNA sense strand
uccugaaucuggacucuaa

SEQ ID NO: 1746986 - RNA, 19 nt, Homo sapiens
  misc_RNA (1)...(19): siRNA sense strand
gaugacuccuuucgcaagu

SEQ ID NO: 1746987 - RNA, 19 nt, Homo sapiens
  misc_RNA (1)...(19): siRNA sense strand
gggaguucgugccgccuuu

SEQ ID NO: 1746988 - RNA, 19 nt, Homo sapiens
  misc_RNA (1)...(19): siRNA sense strand
gggcuagaauccgggaguu

SEQ ID NO: 1746989 - RNA, 19 nt, Homo sapiens
  misc_RNA (1)...(19): siRNA sense strand
caagccagcacccauguuc

SEQ ID NO: 1746990 - RNA, 19 nt, Homo sapiens
  misc_RNA (1)...(19): siRNA sense strand
cguggaagcuacacuuacu

SEQ ID NO: 1746991 - RNA, 19 nt, Homo sapiens
  misc_RNA (1)...(19): siRNA sense strand
cugaauuagccaccaagua

SEQ ID NO: 1746992 - RNA, 19 nt, Homo sapiens
  misc_RNA (1)...(19): siRNA sense strand
gcuagcccucugccucuuu

SEQ ID NO: 1746993 - RNA, 19 nt, Homo sapiens
  misc_RNA (1)...(19): siRNA sense strand
uguauuauucugcguggaa

SEQ ID NO: 1746994 - RNA, 19 nt, Homo sapiens
  misc_RNA (1)...(19): siRNA sense strand
gcacagaaauagcaaaguu

SEQ ID NO: 1746995 - RNA, 19 nt, Homo sapiens
  misc_RNA (1)...(19): siRNA sense strand
ggaagaugaugaugaggaa

SEQ ID NO: 1746996 - RNA, 19 nt, Homo sapiens
  misc_RNA (1)...(19): siRNA sense strand
ggaagaaguucgccaugga

SEQ ID NO: 1746997 - RNA, 19 nt, Homo sapiens
  misc_RNA (1)...(19): siRNA sense strand
gcaaaguucuugaaagucu

SEQ ID NO: 1746998 - RNA, 19 nt, Homo sapiens
  misc_RNA (1)...(19): siRNA sense strand
ggaagaagacgacuuggaa

SEQ ID NO: 1746999 - RNA, 19 nt, Homo sapiens
  misc_RNA (1)...(19): siRNA sense strand
gccaacauauuaaaggaua

SEQ ID NO: 1747000 - RNA, 19 nt, Homo sapiens
  misc_RNA (1)...(19): siRNA sense strand
aaacagaccuggccaagag

SEQ ID NO: 1747001 - RNA, 19 nt, Homo sapiens
  misc_RNA (1)...(19): siRNA sense strand
gcaguuugcuccggaauau

SEQ ID NO: 1747002 - RNA, 19 nt, Homo sapiens
  misc_RNA (1)...(19): siRNA sense strand
gagcaaguuuauagaagaa

SEQ ID NO: 1747003 - RNA, 19 nt, Homo sapiens
  misc_RNA (1)...(19): siRNA sense strand
ggaggaagaugaugaugag

SEQ ID NO: 1747004 - RNA, 19 nt, Homo sapiens
  misc_RNA (1)...(19): siRNA sense strand
ccaaggacuucccugagua

SEQ ID NO: 1747005 - RNA, 19 nt, Homo sapiens
  misc_RNA (1)...(19): siRNA sense strand
ccuaaaugaugcaaacuuu

SEQ ID NO: 1747006 - RNA, 19 nt, Homo sapiens
  misc_RNA (1)...(19): siRNA sense strand
uagcaaaguucuugaaagu

SEQ ID NO: 1747007 - RNA, 19 nt, Homo sapiens
  misc_RNA (1)...(19): siRNA sense strand
gaaauuccaguccaaguau

SEQ ID NO: 1747008 - RNA, 19 nt, Homo sapiens
  misc_RNA (1)...(19): siRNA sense strand
ccaucaagauccuuaagaa

SEQ ID NO: 1747009 - RNA, 19 nt, Homo sapiens
  misc_RNA (1)...(19): siRNA sense strand
uaaugcagccugagaaauu

SEQ ID NO: 1747010 - RNA, 19 nt, Homo sapiens
  misc_RNA (1)...(19): siRNA sense strand
acacagugcugcuggaguu

SEQ ID NO: 1747011 - RNA, 19 nt, Homo sapiens
  misc_RNA (1)...(19): siRNA sense strand
ggacgaggauucuucuaac

SEQ ID NO: 1747012 - RNA, 19 nt, Homo sapiens
  misc_RNA (1)...(19): siRNA sense strand
ugaagcagguccaggaguu

SEQ ID NO: 1747013 - RNA, 19 nt, Homo sapiens
  misc_RNA (1)...(19): siRNA sense strand
gaguacaccuuugccauug

SEQ ID NO: 1747014 - RNA, 19 nt, Homo sapiens
  misc_RNA (1)...(19): siRNA sense strand
uugaugaaguugugaauga

SEQ ID NO: 1747015 - RNA, 19 nt, Homo sapiens
  misc_RNA (1)...(19): siRNA sense strand
uagaagaacaugccacaaa

SEQ ID NO: 1747016 - RNA, 19 nt, Homo sapiens
  misc_RNA (1)...(19): siRNA sense strand
gagcauuugagcaaguuua

SEQ ID NO: 1747017 - RNA, 19 nt, Homo sapiens
  misc_RNA (1)...(19): siRNA sense strand
caagcguucuccuccaauu

SEQ ID NO: 1747018 - RNA, 19 nt, Homo sapiens
  misc_RNA (1)...(19): siRNA sense strand
gaacaugccacaaaacuga

SEQ ID NO: 1747019 - RNA, 19 nt, Homo sapiens
  misc_RNA (1)...(19): siRNA sense strand
ugagcaaguuuauagaaga

SEQ ID NO: 1747020 - RNA, 19 nt, Homo sapiens
  misc_RNA (1)...(19): siRNA sense strand
cgaggauucuucuaacaga

SEQ ID NO: 1747021 - RNA, 19 nt, Homo sapiens
  misc_RNA (1)...(19): siRNA sense strand
gaaauagcaaaguucuuga

SEQ ID NO: 1747022 - RNA, 19 nt, Homo sapiens
  misc_RNA (1)...(19): siRNA sense strand
gcaaguuuauagaagaaca

SEQ ID NO: 1747023 - RNA, 19 nt, Homo sapiens
  misc_RNA (1)...(19): siRNA sense strand
ggacauugcaagcaguuug

SEQ ID NO: 1747024 - RNA, 19 nt, Homo sapiens
  misc_RNA (1)...(19): siRNA sense strand
gcgaguuugucacugcuuu

SEQ ID NO: 1747025 - RNA, 19 nt, Homo sapiens
  misc_RNA (1)...(19): siRNA sense strand
gaacccaguuaaauuugag

SEQ ID NO: 1747026 - RNA, 19 nt, Homo sapiens
  misc_RNA (1)...(19): siRNA sense strand
acaacagccuggccaagaa

SEQ ID NO: 1747027 - RNA, 19 nt, Homo sapiens
  misc_RNA (1)...(19): siRNA sense strand
gagucuugguccuaaauga

SEQ ID NO: 1747028 - RNA, 19 nt, Homo sapiens
  misc_RNA (1)...(19): siRNA sense strand
cuaacaaccugagagaaga

SEQ ID NO: 1747029 - RNA, 19 nt, Homo sapiens
  misc_RNA (1)...(19): siRNA sense strand
gccaaggacuucccugagu

SEQ ID NO: 1747030 - RNA, 19 nt, Homo sapiens
  misc_RNA (1)...(19): siRNA sense strand
gaaacagaccuggccaaga

SEQ ID NO: 1747031 - RNA, 19 nt, Homo sapiens
  misc_RNA (1)...(19): siRNA sense strand
agaaauuccaguccaagua

SEQ ID NO: 1747032 - RNA, 19 nt, Homo sapiens
  misc_RNA (1)...(19): siRNA sense strand
gauaaagauccucccauuc

SEQ ID NO: 1747033 - RNA, 19 nt, Homo sapiens
  misc_RNA (1)...(19): siRNA sense strand
ggacuucagcuuugauuac

SEQ ID NO: 1747034 - RNA, 19 nt, Homo sapiens
  misc_RNA (1)...(19): siRNA sense strand
ucaaggacuucgugcugaa

SEQ ID NO: 1747035 - RNA, 19 nt, Homo sapiens
  misc_RNA (1)...(19): siRNA sense strand
acaaauuucaccacacuuu

SEQ ID NO: 1747036 - RNA, 19 nt, Homo sapiens
  misc_RNA (1)...(19): siRNA sense strand
gccaagagguuugaugucu

SEQ ID NO: 1747037 - RNA, 19 nt, Homo sapiens
  misc_RNA (1)...(19): siRNA sense strand
gccagcagguuugauguga

SEQ ID NO: 1747038 - RNA, 19 nt, Homo sapiens
  misc_RNA (1)...(19): siRNA sense strand
gacgaggauucuucuaaca

SEQ ID NO: 1747039 - RNA, 19 nt, Homo sapiens
  misc_RNA (1)...(19): siRNA sense strand
gcuaacaaccugagagaag

SEQ ID NO: 1747040 - RNA, 19 nt, Homo sapiens
  misc_RNA (1)...(19): siRNA sense strand
ccugagagaagauuacaaa

SEQ ID NO: 1747041 - RNA, 19 nt, Homo sapiens
  misc_RNA (1)...(19): siRNA sense strand
caccagaagucacgcuugu

SEQ ID NO: 1747042 - RNA, 19 nt, Homo sapiens
  misc_RNA (1)...(19): siRNA sense strand
ugaagccagucaucaaauc

SEQ ID NO: 1747043 - RNA, 19 nt, Homo sapiens
  misc_RNA (1)...(19): siRNA sense strand
ggacgagagugggaagaag

SEQ ID NO: 1747044 - RNA, 19 nt, Homo sapiens
  misc_RNA (1)...(19): siRNA sense strand
gguccuaaaugaugcaaac

SEQ ID NO: 1747045 - RNA, 19 nt, Homo sapiens
  misc_RNA (1)...(19): siRNA sense strand
ggaccaaggaagagcuuug

SEQ ID NO: 1747046 - RNA, 19 nt, Homo sapiens
  misc_RNA (1)...(19): siRNA sense strand
agaacccaguuaaauuuga

SEQ ID NO: 1747047 - RNA, 19 nt, Homo sapiens
  misc_RNA (1)...(19): siRNA sense strand
ugaggaagaagacgacuug

SEQ ID NO: 1747048 - RNA, 19 nt, Homo sapiens
  misc_RNA (1)...(19): siRNA sense strand
gaagucacgcuuguguuga

SEQ ID NO: 1747049 - RNA, 19 nt, Homo sapiens
  misc_RNA (1)...(19): siRNA sense strand
gaacccaggaagaaauugu

SEQ ID NO: 1747050 - RNA, 19 nt, Homo sapiens
  misc_RNA (1)...(19): siRNA sense strand
gauccucccauuccuguug

SEQ ID NO: 1747051 - RNA, 19 nt, Homo sapiens
  misc_RNA (1)...(19): siRNA sense strand
cuacaacggcccacgagaa

SEQ ID NO: 1747052 - RNA, 19 nt, Homo sapiens
  misc_RNA (1)...(19): siRNA sense strand
uuacaaauuucaccacacu

SEQ ID NO: 1747053 - RNA, 19 nt, Homo sapiens
  misc_RNA (1)...(19): siRNA sense strand
caacaagggacccgucaag

SEQ ID NO: 1747054 - RNA, 19 nt, Homo sapiens
  misc_RNA (1)...(19): siRNA sense strand
gacuucagcuuugauuaca

SEQ ID NO: 1747055 - RNA, 19 nt, Homo sapiens
  misc_RNA (1)...(19): siRNA sense strand
agaagaacaugccacaaaa

SEQ ID NO: 1747056 - RNA, 19 nt, Homo sapiens
  misc_RNA (1)...(19): siRNA sense strand
ugaguacaccuuugccauu

SEQ ID NO: 1747057 - RNA, 19 nt, Homo sapiens
  misc_RNA (1)...(19): siRNA sense strand
cagcagguuugaugugagu

SEQ ID NO: 1747058 - RNA, 19 nt, Homo sapiens
  misc_RNA (1)...(19): siRNA sense strand
gcauuugagcaaguuuaua

SEQ ID NO: 1747059 - RNA, 19 nt, Homo sapiens
  misc_RNA (1)...(19): siRNA sense strand
ucaaggucguggugggaaa

SEQ ID NO: 1747060 - RNA, 19 nt, Homo sapiens
  misc_RNA (1)...(19): siRNA sense strand
ccagaacccaggaagaaau

SEQ ID NO: 1747061 - RNA, 19 nt, Homo sapiens
  misc_RNA (1)...(19): siRNA sense strand
agaagucacgcuuguguug

SEQ ID NO: 1747062 - RNA, 19 nt, Homo sapiens
  misc_RNA (1)...(19): siRNA sense strand
ggacgaagaggacuaugcu

SEQ ID NO: 1747063 - RNA, 19 nt, Homo sapiens
  misc_RNA (1)...(19): siRNA sense strand
ccugaaggauggagacgau

SEQ ID NO: 1747064 - RNA, 19 nt, Homo sapiens
  misc_RNA (1)...(19): siRNA sense strand
aggaaggccuuaugacuac

SEQ ID NO: 1747065 - RNA, 19 nt, Homo sapiens
  misc_RNA (1)...(19): siRNA sense strand
cggacgaggauucuucuaa

SEQ ID NO: 1747066 - RNA, 19 nt, Homo sapiens
  misc_RNA (1)...(19): siRNA sense strand
gaccaaggaagagcuuuga

SEQ ID NO: 1747067 - RNA, 19 nt, Homo sapiens
  misc_RNA (1)...(19): siRNA sense strand
ccauggagccagaggaguu

SEQ ID NO: 1747068 - RNA, 19 nt, Homo sapiens
  misc_RNA (1)...(19): siRNA sense strand
cuucagcuuugauuacaga

SEQ ID NO: 1747069 - RNA, 19 nt, Homo sapiens
  misc_RNA (1)...(19): siRNA sense strand
aauggagucuugguccuaa

SEQ ID NO: 1747070 - RNA, 19 nt, Homo sapiens
  misc_RNA (1)...(19): siRNA sense strand
ggaggaggaagaugaugau

SEQ ID NO: 1747071 - RNA, 19 nt, Homo sapiens
  misc_RNA (1)...(19): siRNA sense strand
ccagaagucacgcuugugu

SEQ ID NO: 1747072 - RNA, 19 nt, Homo sapiens
  misc_RNA (1)...(19): siRNA sense strand
cagaacccaggaagaaauu

SEQ ID NO: 1747073 - RNA, 19 nt, Homo sapiens
  misc_RNA (1)...(19): siRNA sense strand
cauuugagcaaguuuauag

SEQ ID NO: 1747074 - RNA, 19 nt, Homo sapiens
  misc_RNA (1)...(19): siRNA sense strand
gagaaauuccaguccaagu

SEQ ID NO: 1747075 - RNA, 19 nt, Homo sapiens
  misc_RNA (1)...(19): siRNA sense strand
caaauuucaccacacuuuc

SEQ ID NO: 1747076 - RNA, 19 nt, Homo sapiens
  misc_RNA (1)...(19): siRNA sense strand
uacaacggcccacgagaaa

SEQ ID NO: 1747077 - RNA, 19 nt, Homo sapiens
  misc_RNA (1)...(19): siRNA sense strand
gaugaaguugugaaugaug

SEQ ID NO: 1747078 - RNA, 19 nt, Homo sapiens
  misc_RNA (1)...(19): siRNA sense strand
ggaggaggaggaagaugau

SEQ ID NO: 1747079 - RNA, 19 nt, Homo sapiens
  misc_RNA (1)...(19): siRNA sense strand
cuacuacaguguggacuuc

SEQ ID NO: 1747080 - RNA, 19 nt, Homo sapiens
  misc_RNA (1)...(19): siRNA sense strand
ugacccagccuaccagcaa

SEQ ID NO: 1747081 - RNA, 19 nt, Homo sapiens
  misc_RNA (1)...(19): siRNA sense strand
aguguggacuucagcuuug

SEQ ID NO: 1747082 - RNA, 19 nt, Homo sapiens
  misc_RNA (1)...(19): siRNA sense strand
cgacgccaccgcagaaaca

SEQ ID NO: 1747083 - RNA, 19 nt, Homo sapiens
  misc_RNA (1)...(19): siRNA sense strand
ggacguccucaucgaguuc

SEQ ID NO: 1747084 - RNA, 19 nt, Homo sapiens
  misc_RNA (1)...(19): siRNA sense strand
gaaggccuuaugacuacaa

SEQ ID NO: 1747085 - RNA, 19 nt, Homo sapiens
  misc_RNA (1)...(19): siRNA sense strand
ugugaaugaugcagauauc

SEQ ID NO: 1747086 - RNA, 19 nt, Homo sapiens
  misc_RNA (1)...(19): siRNA sense strand
gcagcuagagcccguguac

SEQ ID NO: 1747087 - RNA, 19 nt, Homo sapiens
  misc_RNA (1)...(19): siRNA sense strand
ugacacccuccgcgaguuu

SEQ ID NO: 1747088 - RNA, 19 nt, Homo sapiens
  misc_RNA (1)...(19): siRNA sense strand
guaaugcagccugagaaau

SEQ ID NO: 1747089 - RNA, 19 nt, Homo sapiens
  misc_RNA (1)...(19): siRNA sense strand
gacccagccuaccagcaau

SEQ ID NO: 1747090 - RNA, 19 nt, Homo sapiens
  misc_RNA (1)...(19): siRNA sense strand
uaaagauccucccauuccu

SEQ ID NO: 1747091 - RNA, 19 nt, Homo sapiens
  misc_RNA (1)...(19): siRNA sense strand
ggcaguugguuguaaugca

SEQ ID NO: 1747092 - RNA, 19 nt, Homo sapiens
  misc_RNA (1)...(19): siRNA sense strand
caguguggacuucagcuuu

SEQ ID NO: 1747093 - RNA, 19 nt, Homo sapiens
  misc_RNA (1)...(19): siRNA sense strand
cugagaaauuccaguccaa

SEQ ID NO: 1747094 - RNA, 19 nt, Homo sapiens
  misc_RNA (1)...(19): siRNA sense strand
acaaguacauguuucagaa

SEQ ID NO: 1747095 - RNA, 19 nt, Homo sapiens
  misc_RNA (1)...(19): siRNA sense strand
gaaaggcucggcucauguu

SEQ ID NO: 1747096 - RNA, 19 nt, Homo sapiens
  misc_RNA (1)...(19): siRNA sense strand
gggaaaggcucggcucaug

SEQ ID NO: 1747097 - RNA, 19 nt, Homo sapiens
  misc_RNA (1)...(19): siRNA sense strand
ccaagcaggcguuugagaa

SEQ ID NO: 1747098 - RNA, 19 nt, Homo sapiens
  misc_RNA (1)...(19): siRNA sense strand
gcucauguucugggacuua

SEQ ID NO: 1747099 - RNA, 19 nt, Homo sapiens
  misc_RNA (1)...(19): siRNA sense strand
ggacuuaggagggcaggaa

SEQ ID NO: 1747100 - RNA, 19 nt, Homo sapiens
  misc_RNA (1)...(19): siRNA sense strand
ggaaaggcucggcucaugu

SEQ ID NO: 1747101 - RNA, 19 nt, Homo sapiens
  misc_RNA (1)...(19): siRNA sense strand
aaacccgauuuaacaagaa

SEQ ID NO: 1747102 - RNA, 19 nt, Homo sapiens
  misc_RNA (1)...(19): siRNA sense strand
gcacuguggaugugggaaa

SEQ ID NO: 1747103 - RNA, 19 nt, Homo sapiens
  misc_RNA (1)...(19): siRNA sense strand
ucgaguggauggugaagug

SEQ ID NO: 1747104 - RNA, 19 nt, Homo sapiens
  misc_RNA (1)...(19): siRNA sense strand
gcgagggcaucgaguggau

SEQ ID NO: 1747105 - RNA, 19 nt, Homo sapiens
  misc_RNA (1)...(19): siRNA sense strand
caaguauuaugcggagugu

SEQ ID NO: 1747106 - RNA, 19 nt, Homo sapiens
  misc_RNA (1)...(19): siRNA sense strand
aaacaucggcacuguggau

SEQ ID NO: 1747107 - RNA, 19 nt, Homo sapiens
  misc_RNA (1)...(19): siRNA sense strand
ggcagagggacaucacgua

SEQ ID NO: 1747108 - RNA, 19 nt, Homo sapiens
  misc_RNA (1)...(19): siRNA sense strand
ggcgucaucuacgucauug

SEQ ID NO: 1747109 - RNA, 19 nt, Homo sapiens
  misc_RNA (1)...(19): siRNA sense strand
cucaaucccugacaucaag

SEQ ID NO: 1747110 - RNA, 19 nt, Homo sapiens
  misc_RNA (1)...(19): siRNA sense strand
caagcaggcguuugagaag

SEQ ID NO: 1747111 - RNA, 19 nt, Homo sapiens
  misc_RNA (1)...(19): siRNA sense strand
cgacugcaccagcaagauc

SEQ ID NO: 1747112 - RNA, 19 nt, Homo sapiens
  misc_RNA (1)...(19): siRNA sense strand
gccuaaacaucggcacugu

SEQ ID NO: 1747113 - RNA, 19 nt, Homo sapiens
  misc_RNA (1)...(19): siRNA sense strand
aguccaagcaggcguuuga

SEQ ID NO: 1747114 - RNA, 19 nt, Homo sapiens
  misc_RNA (1)...(19): siRNA sense strand
aaaacccgauuuaacaaga

SEQ ID NO: 1747115 - RNA, 19 nt, Homo sapiens
  misc_RNA (1)...(19): siRNA sense strand
gaagcaggcugaagaggaa

SEQ ID NO: 1747116 - RNA, 19 nt, Homo sapiens
  misc_RNA (1)...(19): siRNA sense strand
gcagaaggaucaagaaugc

SEQ ID NO: 1747117 - RNA, 19 nt, Homo sapiens
  misc_RNA (1)...(19): siRNA sense strand
ggaggaaccugaguaugag

SEQ ID NO: 1747118 - RNA, 19 nt, Homo sapiens
  misc_RNA (1)...(19): siRNA sense strand
augcaagccuggauucuuu

SEQ ID NO: 1747119 - RNA, 19 nt, Homo sapiens
  misc_RNA (1)...(19): siRNA sense strand
gaaccugaguaugagaaug

SEQ ID NO: 1747120 - RNA, 19 nt, Homo sapiens
  misc_RNA (1)...(19): siRNA sense strand
gagcuaccguguccaggau

SEQ ID NO: 1747121 - RNA, 19 nt, Homo sapiens
  misc_RNA (1)...(19): siRNA sense strand
ggaggcagaaggaucaaga

SEQ ID NO: 1747122 - RNA, 19 nt, Homo sapiens
  misc_RNA (1)...(19): siRNA sense strand
aggaggaaccugaguauga

SEQ ID NO: 1747123 - RNA, 19 nt, Homo sapiens
  misc_RNA (1)...(19): siRNA sense strand
ccagaaagacgaggugugu

SEQ ID NO: 1747124 - RNA, 19 nt, Homo sapiens
  misc_RNA (1)...(19): siRNA sense strand
gcuaccguguccaggauga

SEQ ID NO: 1747125 - RNA, 19 nt, Homo sapiens
  misc_RNA (1)...(19): siRNA sense strand
uuugguagcuuccagaaag

SEQ ID NO: 1747126 - RNA, 19 nt, Homo sapiens
  misc_RNA (1)...(19): siRNA sense strand
ggcagaaggaucaagaaug

SEQ ID NO: 1747127 - RNA, 19 nt, Homo sapiens
  misc_RNA (1)...(19): siRNA sense strand
ugagguuccugccuacugu

SEQ ID NO: 1747128 - RNA, 19 nt, Homo sapiens
  misc_RNA (1)...(19): siRNA sense strand
gaugcaagccuggauucuu

SEQ ID NO: 1747129 - RNA, 19 nt, Homo sapiens
  misc_RNA (1)...(19): siRNA sense strand
agaaagacgaggugugugu

SEQ ID NO: 1747130 - RNA, 19 nt, Homo sapiens
  misc_RNA (1)...(19): siRNA sense strand
gcuggaggcagaaggauca

SEQ ID NO: 1747131 - RNA, 19 nt, Homo sapiens
  misc_RNA (1)...(19): siRNA sense strand
gccgugcucuccagacaca

SEQ ID NO: 1747132 - RNA, 19 nt, Homo sapiens
  misc_RNA (1)...(19): siRNA sense strand
gcacguggaagccauugag

SEQ ID NO: 1747133 - RNA, 19 nt, Homo sapiens
  misc_RNA (1)...(19): siRNA sense strand
ggacaggccagcgagagau

SEQ ID NO: 1747134 - RNA, 19 nt, Homo sapiens
  misc_RNA (1)...(19): siRNA sense strand
caaagggcagcacgucugu

SEQ ID NO: 1747135 - RNA, 19 nt, Homo sapiens
  misc_RNA (1)...(19): siRNA sense strand
gcucugucuuccgccauuu

SEQ ID NO: 1747136 - RNA, 19 nt, Homo sapiens
  misc_RNA (1)...(19): siRNA sense strand
ccacagagucgccgaagcu

SEQ ID NO: 1747137 - RNA, 19 nt, Homo sapiens
  misc_RNA (1)...(19): siRNA sense strand
caaguuugcaccacagagu

SEQ ID NO: 1747138 - RNA, 19 nt, Homo sapiens
  misc_RNA (1)...(19): siRNA sense strand
cccagaagcaggcugaaga

SEQ ID NO: 1747139 - RNA, 19 nt, Homo sapiens
  misc_RNA (1)...(19): siRNA sense strand
gagaauguuguacccaucu

SEQ ID NO: 1747140 - RNA, 19 nt, Homo sapiens
  misc_RNA (1)...(19): siRNA sense strand
gaggcagaaggaucaagaa

SEQ ID NO: 1747141 - RNA, 19 nt, Homo sapiens
  misc_RNA (1)...(19): siRNA sense strand
ugaccacgaucuacaugcu

SEQ ID NO: 1747142 - RNA, 19 nt, Homo sapiens
  misc_RNA (1)...(19): siRNA sense strand
aagacgaggugugugugaa

SEQ ID NO: 1747143 - RNA, 19 nt, Homo sapiens
  misc_RNA (1)...(19): siRNA sense strand
aaagacgagguguguguga

SEQ ID NO: 1747144 - RNA, 19 nt, Homo sapiens
  misc_RNA (1)...(19): siRNA sense strand
ggaggccugugagccagau

SEQ ID NO: 1747145 - RNA, 19 nt, Homo sapiens
  misc_RNA (1)...(19): siRNA sense strand
ugaguaugagaauguugua

SEQ ID NO: 1747146 - RNA, 19 nt, Homo sapiens
  misc_RNA (1)...(19): siRNA sense strand
ggaaccugaguaugagaau

SEQ ID NO: 1747147 - RNA, 19 nt, Homo sapiens
  misc_RNA (1)...(19): siRNA sense strand
uggagaggcagaugagguu

SEQ ID NO: 1747148 - RNA, 19 nt, Homo sapiens
  misc_RNA (1)...(19): siRNA sense strand
gcagaaggaucaagaaugc

SEQ ID NO: 1747149 - RNA, 19 nt, Homo sapiens
  misc_RNA (1)...(19): siRNA sense strand
augcaagccuggauucuuu

SEQ ID NO: 1747150 - RNA, 19 nt, Homo sapiens
  misc_RNA (1)...(19): siRNA sense strand
ggaggcagaaggaucaaga

SEQ ID NO: 1747151 - RNA, 19 nt, Homo sapiens
  misc_RNA (1)...(19): siRNA sense strand
ccagaaagacgaggugugu

SEQ ID NO: 1747152 - RNA, 19 nt, Homo sapiens
  misc_RNA (1)...(19): siRNA sense strand
ggcagaaggaucaagaaug

SEQ ID NO: 1747153 - RNA, 19 nt, Homo sapiens
  misc_RNA (1)...(19): siRNA sense strand
gaugcaagccuggauucuu

SEQ ID NO: 1747154 - RNA, 19 nt, Homo sapiens
  misc_RNA (1)...(19): siRNA sense strand
agaaagacgaggugugugu

SEQ ID NO: 1747155 - RNA, 19 nt, Homo sapiens
  misc_RNA (1)...(19): siRNA sense strand
gcuggaggcagaaggauca

SEQ ID NO: 1747156 - RNA, 19 nt, Homo sapiens
  misc_RNA (1)...(19): siRNA sense strand
gccgugcucuccagacaca

SEQ ID NO: 1747157 - RNA, 19 nt, Homo sapiens
  misc_RNA (1)...(19): siRNA sense strand
caaagggcagcacgucugu

SEQ ID NO: 1747158 - RNA, 19 nt, Homo sapiens
  misc_RNA (1)...(19): siRNA sense strand
gaggcagaaggaucaagaa

SEQ ID NO: 1747159 - RNA, 19 nt, Homo sapiens
  misc_RNA (1)...(19): siRNA sense strand
aaagacgagguguguguga

SEQ ID NO: 1747160 - RNA, 19 nt, Homo sapiens
  misc_RNA (1)...(19): siRNA sense strand
aagacgaggugugugugaa

SEQ ID NO: 1747161 - RNA, 19 nt, Homo sapiens
  misc_RNA (1)...(19): siRNA sense strand
ggaggccugugagccagau

SEQ ID NO: 1747162 - RNA, 19 nt, Homo sapiens
  misc_RNA (1)...(19): siRNA sense strand
gcagaaggaucaagaaugc

SEQ ID NO: 1747163 - RNA, 19 nt, Homo sapiens
  misc_RNA (1)...(19): siRNA sense strand
augcaagccuggauucuuu

SEQ ID NO: 1747164 - RNA, 19 nt, Homo sapiens
  misc_RNA (1)...(19): siRNA sense strand
gagcuaccguguccaggau

SEQ ID NO: 1747165 - RNA, 19 nt, Homo sapiens
  misc_RNA (1)...(19): siRNA sense strand
ggaggcagaaggaucaaga

SEQ ID NO: 1747166 - RNA, 19 nt, Homo sapiens
  misc_RNA (1)...(19): siRNA sense strand
ccagaaagacgaggugugu

SEQ ID NO: 1747167 - RNA, 19 nt, Homo sapiens
  misc_RNA (1)...(19): siRNA sense strand
gcuaccguguccaggauga

SEQ ID NO: 1747168 - RNA, 19 nt, Homo sapiens
  misc_RNA (1)...(19): siRNA sense strand
ggcagaaggaucaagaaug

SEQ ID NO: 1747169 - RNA, 19 nt, Homo sapiens
  misc_RNA (1)...(19): siRNA sense strand
ugagguuccugccuacugu

SEQ ID NO: 1747170 - RNA, 19 nt, Homo sapiens
  misc_RNA (1)...(19): siRNA sense strand
gaugcaagccuggauucuu

SEQ ID NO: 1747171 - RNA, 19 nt, Homo sapiens
  misc_RNA (1)...(19): siRNA sense strand
agaaagacgaggugugugu

SEQ ID NO: 1747172 - RNA, 19 nt, Homo sapiens
  misc_RNA (1)...(19): siRNA sense strand
gcuggaggcagaaggauca

SEQ ID NO: 1747173 - RNA, 19 nt, Homo sapiens
  misc_RNA (1)...(19): siRNA sense strand
gccgugcucuccagacaca

SEQ ID NO: 1747174 - RNA, 19 nt, Homo sapiens
  misc_RNA (1)...(19): siRNA sense strand
ggacaggccagcgagagau

SEQ ID NO: 1747175 - RNA, 19 nt, Homo sapiens
  misc_RNA (1)...(19): siRNA sense strand
caaagggcagcacgucugu

SEQ ID NO: 1747176 - RNA, 19 nt, Homo sapiens
  misc_RNA (1)...(19): siRNA sense strand
gaggcagaaggaucaagaa

SEQ ID NO: 1747177 - RNA, 19 nt, Homo sapiens
  misc_RNA (1)...(19): siRNA sense strand
aaagacgagguguguguga

SEQ ID NO: 1747178 - RNA, 19 nt, Homo sapiens
  misc_RNA (1)...(19): siRNA sense strand
aagacgaggugugugugaa

SEQ ID NO: 1747179 - RNA, 19 nt, Homo sapiens
  misc_RNA (1)...(19): siRNA sense strand
ggaggccugugagccagau

SEQ ID NO: 1747180 - RNA, 19 nt, Homo sapiens
  misc_RNA (1)...(19): siRNA sense strand
uggagaggcagaugagguu

SEQ ID NO: 1747181 - RNA, 19 nt, Homo sapiens
  misc_RNA (1)...(19): siRNA sense strand
gcagaaggaucaagaaugc

SEQ ID NO: 1747182 - RNA, 19 nt, Homo sapiens
  misc_RNA (1)...(19): siRNA sense strand
augcaagccuggauucuuu

SEQ ID NO: 1747183 - RNA, 19 nt, Homo sapiens
  misc_RNA (1)...(19): siRNA sense strand
ggaggcagaaggaucaaga

SEQ ID NO: 1747184 - RNA, 19 nt, Homo sapiens
  misc_RNA (1)...(19): siRNA sense strand
ccagaaagacgaggugugu

SEQ ID NO: 1747185 - RNA, 19 nt, Homo sapiens
  misc_RNA (1)...(19): siRNA sense strand
ggcagaaggaucaagaaug

SEQ ID NO: 1747186 - RNA, 19 nt, Homo sapiens
  misc_RNA (1)...(19): siRNA sense strand
gaugcaagccuggauucuu

SEQ ID NO: 1747187 - RNA, 19 nt, Homo sapiens
  misc_RNA (1)...(19): siRNA sense strand
agaaagacgaggugugugu

SEQ ID NO: 1747188 - RNA, 19 nt, Homo sapiens
  misc_RNA (1)...(19): siRNA sense strand
gcuggaggcagaaggauca

SEQ ID NO: 1747189 - RNA, 19 nt, Homo sapiens
  misc_RNA (1)...(19): siRNA sense strand
gccgugcucuccagacaca

SEQ ID NO: 1747190 - RNA, 19 nt, Homo sapiens
  misc_RNA (1)...(19): siRNA sense strand
caaagggcagcacgucugu

SEQ ID NO: 1747191 - RNA, 19 nt, Homo sapiens
  misc_RNA (1)...(19): siRNA sense strand
gaggcagaaggaucaagaa

SEQ ID NO: 1747192 - RNA, 19 nt, Homo sapiens
  misc_RNA (1)...(19): siRNA sense strand
aaagacgagguguguguga

SEQ ID NO: 1747193 - RNA, 19 nt, Homo sapiens
  misc_RNA (1)...(19): siRNA sense strand
aagacgaggugugugugaa

SEQ ID NO: 1747194 - RNA, 19 nt, Homo sapiens
  misc_RNA (1)...(19): siRNA sense strand
ggaggccugugagccagau

SEQ ID NO: 1747195 - RNA, 19 nt, Homo sapiens
  misc_RNA (1)...(19): siRNA sense strand
gaagcaggcugaagaggaa

SEQ ID NO: 1747196 - RNA, 19 nt, Homo sapiens
  misc_RNA (1)...(19): siRNA sense strand
gcagaaggaucaagaaugc

SEQ ID NO: 1747197 - RNA, 19 nt, Homo sapiens
  misc_RNA (1)...(19): siRNA sense strand
ggaggaaccugaguaugag

SEQ ID NO: 1747198 - RNA, 19 nt, Homo sapiens
  misc_RNA (1)...(19): siRNA sense strand
augcaagccuggauucuuu

SEQ ID NO: 1747199 - RNA, 19 nt, Homo sapiens
  misc_RNA (1)...(19): siRNA sense strand
gaaccugaguaugagaaug

SEQ ID NO: 1747200 - RNA, 19 nt, Homo sapiens
  misc_RNA (1)...(19): siRNA sense strand
gagcuaccguguccaggau

SEQ ID NO: 1747201 - RNA, 19 nt, Homo sapiens
  misc_RNA (1)...(19): siRNA sense strand
ggaggcagaaggaucaaga

SEQ ID NO: 1747202 - RNA, 19 nt, Homo sapiens
  misc_RNA (1)...(19): siRNA sense strand
aggaggaaccugaguauga

SEQ ID NO: 1747203 - RNA, 19 nt, Homo sapiens
  misc_RNA (1)...(19): siRNA sense strand
ccagaaagacgaggugugu

SEQ ID NO: 1747204 - RNA, 19 nt, Homo sapiens
  misc_RNA (1)...(19): siRNA sense strand
gcuaccguguccaggauga

SEQ ID NO: 1747205 - RNA, 19 nt, Homo sapiens
  misc_RNA (1)...(19): siRNA sense strand
uuugguagcuuccagaaag

SEQ ID NO: 1747206 - RNA, 19 nt, Homo sapiens
  misc_RNA (1)...(19): siRNA sense strand
ggcagaaggaucaagaaug

SEQ ID NO: 1747207 - RNA, 19 nt, Homo sapiens
  misc_RNA (1)...(19): siRNA sense strand
ugagguuccugccuacugu

SEQ ID NO: 1747208 - RNA, 19 nt, Homo sapiens
  misc_RNA (1)...(19): siRNA sense strand
gaugcaagccuggauucuu

SEQ ID NO: 1747209 - RNA, 19 nt, Homo sapiens
  misc_RNA (1)...(19): siRNA sense strand
agaaagacgaggugugugu

SEQ ID NO: 1747210 - RNA, 19 nt, Homo sapiens
  misc_RNA (1)...(19): siRNA sense strand
gcuggaggcagaaggauca

SEQ ID NO: 1747211 - RNA, 19 nt, Homo sapiens
  misc_RNA (1)...(19): siRNA sense strand
gccgugcucuccagacaca

SEQ ID NO: 1747212 - RNA, 19 nt, Homo sapiens
  misc_RNA (1)...(19): siRNA sense strand
gcacguggaagccauugag

SEQ ID NO: 1747213 - RNA, 19 nt, Homo sapiens
  misc_RNA (1)...(19): siRNA sense strand
ggacaggccagcgagagau

SEQ ID NO: 1747214 - RNA, 19 nt, Homo sapiens
  misc_RNA (1)...(19): siRNA sense strand
caaagggcagcacgucugu

SEQ ID NO: 1747215 - RNA, 19 nt, Homo sapiens
  misc_RNA (1)...(19): siRNA sense strand
gcucugucuuccgccauuu

SEQ ID NO: 1747216 - RNA, 19 nt, Homo sapiens
  misc_RNA (1)...(19): siRNA sense strand
ccacagagucgccgaagcu

SEQ ID NO: 1747217 - RNA, 19 nt, Homo sapiens
  misc_RNA (1)...(19): siRNA sense strand
caaguuugcaccacagagu

SEQ ID NO: 1747218 - RNA, 19 nt, Homo sapiens
  misc_RNA (1)...(19): siRNA sense strand
cccagaagcaggcugaaga

SEQ ID NO: 1747219 - RNA, 19 nt, Homo sapiens
  misc_RNA (1)...(19): siRNA sense strand
gagaauguuguacccaucu

SEQ ID NO: 1747220 - RNA, 19 nt, Homo sapiens
  misc_RNA (1)...(19): siRNA sense strand
gaggcagaaggaucaagaa

SEQ ID NO: 1747221 - RNA, 19 nt, Homo sapiens
  misc_RNA (1)...(19): siRNA sense strand
ugaccacgaucuacaugcu

SEQ ID NO: 1747222 - RNA, 19 nt, Homo sapiens
  misc_RNA (1)...(19): siRNA sense strand
aagacgaggugugugugaa

SEQ ID NO: 1747223 - RNA, 19 nt, Homo sapiens
  misc_RNA (1)...(19): siRNA sense strand
aaagacgagguguguguga

SEQ ID NO: 1747224 - RNA, 19 nt, Homo sapiens
  misc_RNA (1)...(19): siRNA sense strand
ggaggccugugagccagau

SEQ ID NO: 1747225 - RNA, 19 nt, Homo sapiens
  misc_RNA (1)...(19): siRNA sense strand
ugaguaugagaauguugua

SEQ ID NO: 1747226 - RNA, 19 nt, Homo sapiens
  misc_RNA (1)...(19): siRNA sense strand
ggaaccugaguaugagaau

SEQ ID NO: 1747227 - RNA, 19 nt, Homo sapiens
  misc_RNA (1)...(19): siRNA sense strand
uggagaggcagaugagguu

SEQ ID NO: 1747228 - RNA, 19 nt, Homo sapiens
  misc_RNA (1)...(19): siRNA sense strand
ggugaaagcucgcgucauc

SEQ ID NO: 1747229 - RNA, 19 nt, Homo sapiens
  misc_RNA (1)...(19): siRNA sense strand
guuccuggaugacuccuuu

SEQ ID NO: 1747230 - RNA, 19 nt, Homo sapiens
  misc_RNA (1)...(19): siRNA sense strand
ucuaagcaguggcaucuga

SEQ ID NO: 1747231 - RNA, 19 nt, Homo sapiens
  misc_RNA (1)...(19): siRNA sense strand
ugaauuagccaccaaguac

SEQ ID NO: 1747232 - RNA, 19 nt, Homo sapiens
  misc_RNA (1)...(19): siRNA sense strand
uccugaaucuggacucuaa

SEQ ID NO: 1747233 - RNA, 19 nt, Homo sapiens
  misc_RNA (1)...(19): siRNA sense strand
gaugacuccuuucgcaagu

SEQ ID NO: 1747234 - RNA, 19 nt, Homo sapiens
  misc_RNA (1)...(19): siRNA sense strand
gggaguucgugccgccuuu

SEQ ID NO: 1747235 - RNA, 19 nt, Homo sapiens
  misc_RNA (1)...(19): siRNA sense strand
cacaauauccagcgagaga

SEQ ID NO: 1747236 - RNA, 19 nt, Homo sapiens
  misc_RNA (1)...(19): siRNA sense strand
gaucuaagcaguggcaucu

SEQ ID NO: 1747237 - RNA, 19 nt, Homo sapiens
  misc_RNA (1)...(19): siRNA sense strand
caauauccagcgagagaaa

SEQ ID NO: 1747238 - RNA, 19 nt, Homo sapiens
  misc_RNA (1)...(19): siRNA sense strand
gggcuagaauccgggaguu

SEQ ID NO: 1747239 - RNA, 19 nt, Homo sapiens
  misc_RNA (1)...(19): siRNA sense strand
ccagcgagagaaagaguuu

SEQ ID NO: 1747240 - RNA, 19 nt, Homo sapiens
  misc_RNA (1)...(19): siRNA sense strand
caagccagcacccauguuc

SEQ ID NO: 1747241 - RNA, 19 nt, Homo sapiens
  misc_RNA (1)...(19): siRNA sense strand
cguggaagcuacacuuacu

SEQ ID NO: 1747242 - RNA, 19 nt, Homo sapiens
  misc_RNA (1)...(19): siRNA sense strand
aagcucgcgucaucacuga

SEQ ID NO: 1747243 - RNA, 19 nt, Homo sapiens
  misc_RNA (1)...(19): siRNA sense strand
cugaauuagccaccaagua

SEQ ID NO: 1747244 - RNA, 19 nt, Homo sapiens
  misc_RNA (1)...(19): siRNA sense strand
gcuagcccucugccucuuu

SEQ ID NO: 1747245 - RNA, 19 nt, Homo sapiens
  misc_RNA (1)...(19): siRNA sense strand
uguauuauucugcguggaa

SEQ ID NO: 1747246 - RNA, 19 nt, Homo sapiens
  misc_RNA (1)...(19): siRNA sense strand
ugcggaagcuggugaaagc

SEQ ID NO: 1747247 - RNA, 19 nt, Homo sapiens
  misc_RNA (1)...(19): siRNA sense strand
ggugaaagcucgcgucauc

SEQ ID NO: 1747248 - RNA, 19 nt, Homo sapiens
  misc_RNA (1)...(19): siRNA sense strand
guuccuggaugacuccuuu

SEQ ID NO: 1747249 - RNA, 19 nt, Homo sapiens
  misc_RNA (1)...(19): siRNA sense strand
ucuaagcaguggcaucuga

SEQ ID NO: 1747250 - RNA, 19 nt, Homo sapiens
  misc_RNA (1)...(19): siRNA sense strand
ugaauuagccaccaaguac

SEQ ID NO: 1747251 - RNA, 19 nt, Homo sapiens
  misc_RNA (1)...(19): siRNA sense strand
uccugaaucuggacucuaa

SEQ ID NO: 1747252 - RNA, 19 nt, Homo sapiens
  misc_RNA (1)...(19): siRNA sense strand
gaugacuccuuucgcaagu

SEQ ID NO: 1747253 - RNA, 19 nt, Homo sapiens
  misc_RNA (1)...(19): siRNA sense strand
gggaguucgugccgccuuu

SEQ ID NO: 1747254 - RNA, 19 nt, Homo sapiens
  misc_RNA (1)...(19): siRNA sense strand
cacaauauccagcgagaga

SEQ ID NO: 1747255 - RNA, 19 nt, Homo sapiens
  misc_RNA (1)...(19): siRNA sense strand
gaucuaagcaguggcaucu

SEQ ID NO: 1747256 - RNA, 19 nt, Homo sapiens
  misc_RNA (1)...(19): siRNA sense strand
caauauccagcgagagaaa

SEQ ID NO: 1747257 - RNA, 19 nt, Homo sapiens
  misc_RNA (1)...(19): siRNA sense strand
gggcuagaauccgggaguu

SEQ ID NO: 1747258 - RNA, 19 nt, Homo sapiens
  misc_RNA (1)...(19): siRNA sense strand
ccagcgagagaaagaguuu

SEQ ID NO: 1747259 - RNA, 19 nt, Homo sapiens
  misc_RNA (1)...(19): siRNA sense strand
caagccagcacccauguuc

SEQ ID NO: 1747260 - RNA, 19 nt, Homo sapiens
  misc_RNA (1)...(19): siRNA sense strand
cguggaagcuacacuuacu

SEQ ID NO: 1747261 - RNA, 19 nt, Homo sapiens
  misc_RNA (1)...(19): siRNA sense strand
aagcucgcgucaucacuga

SEQ ID NO: 1747262 - RNA, 19 nt, Homo sapiens
  misc_RNA (1)...(19): siRNA sense strand
cugaauuagccaccaagua

SEQ ID NO: 1747263 - RNA, 19 nt, Homo sapiens
  misc_RNA (1)...(19): siRNA sense strand
gcuagcccucugccucuuu

SEQ ID NO: 1747264 - RNA, 19 nt, Homo sapiens
  misc_RNA (1)...(19): siRNA sense strand
uguauuauucugcguggaa

SEQ ID NO: 1747265 - RNA, 19 nt, Homo sapiens
  misc_RNA (1)...(19): siRNA sense strand
ugcggaagcuggugaaagc

SEQ ID NO: 1747266 - RNA, 19 nt, Homo sapiens
  misc_RNA (1)...(19): siRNA sense strand
ggugaaagcucgcgucauc

SEQ ID NO: 1747267 - RNA, 19 nt, Homo sapiens
  misc_RNA (1)...(19): siRNA sense strand
guuccuggaugacuccuuu

SEQ ID NO: 1747268 - RNA, 19 nt, Homo sapiens
  misc_RNA (1)...(19): siRNA sense strand
ucuaagcaguggcaucuga

SEQ ID NO: 1747269 - RNA, 19 nt, Homo sapiens
  misc_RNA (1)...(19): siRNA sense strand
ugaauuagccaccaaguac

SEQ ID NO: 1747270 - RNA, 19 nt, Homo sapiens
  misc_RNA (1)...(19): siRNA sense strand
uccugaaucuggacucuaa

SEQ ID NO: 1747271 - RNA, 19 nt, Homo sapiens
  misc_RNA (1)...(19): siRNA sense strand
gaugacuccuuucgcaagu

SEQ ID NO: 1747272 - RNA, 19 nt, Homo sapiens
  misc_RNA (1)...(19): siRNA sense strand
gggaguucgugccgccuuu

SEQ ID NO: 1747273 - RNA, 19 nt, Homo sapiens
  misc_RNA (1)...(19): siRNA sense strand
cacaauauccagcgagaga

SEQ ID NO: 1747274 - RNA, 19 nt, Homo sapiens
  misc_RNA (1)...(19): siRNA sense strand
gaucuaagcaguggcaucu

SEQ ID NO: 1747275 - RNA, 19 nt, Homo sapiens
  misc_RNA (1)...(19): siRNA sense strand
caauauccagcgagagaaa

SEQ ID NO: 1747276 - RNA, 19 nt, Homo sapiens
  misc_RNA (1)...(19): siRNA sense strand
gggcuagaauccgggaguu

SEQ ID NO: 1747277 - RNA, 19 nt, Homo sapiens
  misc_RNA (1)...(19): siRNA sense strand
ccagcgagagaaagaguuu

SEQ ID NO: 1747278 - RNA, 19 nt, Homo sapiens
  misc_RNA (1)...(19): siRNA sense strand
caagccagcacccauguuc

SEQ ID NO: 1747279 - RNA, 19 nt, Homo sapiens
  misc_RNA (1)...(19): siRNA sense strand
cguggaagcuacacuuacu

SEQ ID NO: 1747280 - RNA, 19 nt, Homo sapiens
  misc_RNA (1)...(19): siRNA sense strand
aagcucgcgucaucacuga

SEQ ID NO: 1747281 - RNA, 19 nt, Homo sapiens
  misc_RNA (1)...(19): siRNA sense strand
cugaauuagccaccaagua

SEQ ID NO: 1747282 - RNA, 19 nt, Homo sapiens
  misc_RNA (1)...(19): siRNA sense strand
gcuagcccucugccucuuu

SEQ ID NO: 1747283 - RNA, 19 nt, Homo sapiens
  misc_RNA (1)...(19): siRNA sense strand
uguauuauucugcguggaa

SEQ ID NO: 1747284 - RNA, 19 nt, Homo sapiens
  misc_RNA (1)...(19): siRNA sense strand
ugcggaagcuggugaaagc

SEQ ID NO: 1747285 - RNA, 19 nt, Homo sapiens
  misc_RNA (1)...(19): siRNA sense strand
ggugaaagcucgcgucauc

SEQ ID NO: 1747286 - RNA, 19 nt, Homo sapiens
  misc_RNA (1)...(19): siRNA sense strand
guuccuggaugacuccuuu

SEQ ID NO: 1747287 - RNA, 19 nt, Homo sapiens
  misc_RNA (1)...(19): siRNA sense strand
ugaauuagccaccaaguac

SEQ ID NO: 1747288 - RNA, 19 nt, Homo sapiens
  misc_RNA (1)...(19): siRNA sense strand
uccugaaucuggacucuaa

SEQ ID NO: 1747289 - RNA, 19 nt, Homo sapiens
  misc_RNA (1)...(19): siRNA sense strand
gaugacuccuuucgcaagu

SEQ ID NO: 1747290 - RNA, 19 nt, Homo sapiens
  misc_RNA (1)...(19): siRNA sense strand
gggaguucgugccgccuuu

SEQ ID NO: 1747291 - RNA, 19 nt, Homo sapiens
  misc_RNA (1)...(19): siRNA sense strand
cacaauauccagcgagaga

SEQ ID NO: 1747292 - RNA, 19 nt, Homo sapiens
  misc_RNA (1)...(19): siRNA sense strand
caauauccagcgagagaaa

SEQ ID NO: 1747293 - RNA, 19 nt, Homo sapiens
  misc_RNA (1)...(19): siRNA sense strand
gggcuagaauccgggaguu

SEQ ID NO: 1747294 - RNA, 19 nt, Homo sapiens
  misc_RNA (1)...(19): siRNA sense strand
ccagcgagagaaagaguuu

SEQ ID NO: 1747295 - RNA, 19 nt, Homo sapiens
  misc_RNA (1)...(19): siRNA sense strand
caagccagcacccauguuc

SEQ ID NO: 1747296 - RNA, 19 nt, Homo sapiens
  misc_RNA (1)...(19): siRNA sense strand
cguggaagcuacacuuacu

SEQ ID NO: 1747297 - RNA, 19 nt, Homo sapiens
  misc_RNA (1)...(19): siRNA sense strand
aagcucgcgucaucacuga

SEQ ID NO: 1747298 - RNA, 19 nt, Homo sapiens
  misc_RNA (1)...(19): siRNA sense strand
cugaauuagccaccaagua

SEQ ID NO: 1747299 - RNA, 19 nt, Homo sapiens
  misc_RNA (1)...(19): siRNA sense strand
gcuagcccucugccucuuu

SEQ ID NO: 1747300 - RNA, 19 nt, Homo sapiens
  misc_RNA (1)...(19): siRNA sense strand
uguauuauucugcguggaa

SEQ ID NO: 1747301 - RNA, 19 nt, Homo sapiens
  misc_RNA (1)...(19): siRNA sense strand
ugcggaagcuggugaaagc

SEQ ID NO: 1747302 - RNA, 19 nt, Homo sapiens
  misc_RNA (1)...(19): siRNA sense strand
ggugaaagcucgcgucauc

SEQ ID NO: 1747303 - RNA, 19 nt, Homo sapiens
  misc_RNA (1)...(19): siRNA sense strand
guuccuggaugacuccuuu

SEQ ID NO: 1747304 - RNA, 19 nt, Homo sapiens
  misc_RNA (1)...(19): siRNA sense strand
ucuaagcaguggcaucuga

SEQ ID NO: 1747305 - RNA, 19 nt, Homo sapiens
  misc_RNA (1)...(19): siRNA sense strand
ugaauuagccaccaaguac

SEQ ID NO: 1747306 - RNA, 19 nt, Homo sapiens
  misc_RNA (1)...(19): siRNA sense strand
uccugaaucuggacucuaa

SEQ ID NO: 1747307 - RNA, 19 nt, Homo sapiens
  misc_RNA (1)...(19): siRNA sense strand
gaugacuccuuucgcaagu

SEQ ID NO: 1747308 - RNA, 19 nt, Homo sapiens
  misc_RNA (1)...(19): siRNA sense strand
gggaguucgugccgccuuu

SEQ ID NO: 1747309 - RNA, 19 nt, Homo sapiens
  misc_RNA (1)...(19): siRNA sense strand
cacaauauccagcgagaga

SEQ ID NO: 1747310 - RNA, 19 nt, Homo sapiens
  misc_RNA (1)...(19): siRNA sense strand
gaucuaagcaguggcaucu

SEQ ID NO: 1747311 - RNA, 19 nt, Homo sapiens
  misc_RNA (1)...(19): siRNA sense strand
caauauccagcgagagaaa

SEQ ID NO: 1747312 - RNA, 19 nt, Homo sapiens
  misc_RNA (1)...(19): siRNA sense strand
gggcuagaauccgggaguu

SEQ ID NO: 1747313 - RNA, 19 nt, Homo sapiens
  misc_RNA (1)...(19): siRNA sense strand
ccagcgagagaaagaguuu

SEQ ID NO: 1747314 - RNA, 19 nt, Homo sapiens
  misc_RNA (1)...(19): siRNA sense strand
caagccagcacccauguuc

SEQ ID NO: 1747315 - RNA, 19 nt, Homo sapiens
  misc_RNA (1)...(19): siRNA sense strand
cguggaagcuacacuuacu

SEQ ID NO: 1747316 - RNA, 19 nt, Homo sapiens
  misc_RNA (1)...(19): siRNA sense strand
aagcucgcgucaucacuga

SEQ ID NO: 1747317 - RNA, 19 nt, Homo sapiens
  misc_RNA (1)...(19): siRNA sense strand
cugaauuagccaccaagua

SEQ ID NO: 1747318 - RNA, 19 nt, Homo sapiens
  misc_RNA (1)...(19): siRNA sense strand
gcuagcccucugccucuuu

SEQ ID NO: 1747319 - RNA, 19 nt, Homo sapiens
  misc_RNA (1)...(19): siRNA sense strand
uguauuauucugcguggaa

SEQ ID NO: 1747320 - RNA, 19 nt, Homo sapiens
  misc_RNA (1)...(19): siRNA sense strand
ugcggaagcuggugaaagc

SEQ ID NO: 1747321 - RNA, 19 nt, Homo sapiens
  misc_RNA (1)...(19): siRNA sense strand
ggugaaagcucgcgucauc

SEQ ID NO: 1747322 - RNA, 19 nt, Homo sapiens
  misc_RNA (1)...(19): siRNA sense strand
guuccuggaugacuccuuu

SEQ ID NO: 1747323 - RNA, 19 nt, Homo sapiens
  misc_RNA (1)...(19): siRNA sense strand
ugaauuagccaccaaguac

SEQ ID NO: 1747324 - RNA, 19 nt, Homo sapiens
  misc_RNA (1)...(19): siRNA sense strand
uccugaaucuggacucuaa

SEQ ID NO: 1747325 - RNA, 19 nt, Homo sapiens
  misc_RNA (1)...(19): siRNA sense strand
gaugacuccuuucgcaagu

SEQ ID NO: 1747326 - RNA, 19 nt, Homo sapiens
  misc_RNA (1)...(19): siRNA sense strand
gggaguucgugccgccuuu

SEQ ID NO: 1747327 - RNA, 19 nt, Homo sapiens
  misc_RNA (1)...(19): siRNA sense strand
cacaauauccagcgagaga

SEQ ID NO: 1747328 - RNA, 19 nt, Homo sapiens
  misc_RNA (1)...(19): siRNA sense strand
caauauccagcgagagaaa

SEQ ID NO: 1747329 - RNA, 19 nt, Homo sapiens
  misc_RNA (1)...(19): siRNA sense strand
gggcuagaauccgggaguu

SEQ ID NO: 1747330 - RNA, 19 nt, Homo sapiens
  misc_RNA (1)...(19): siRNA sense strand
ccagcgagagaaagaguuu

SEQ ID NO: 1747331 - RNA, 19 nt, Homo sapiens
  misc_RNA (1)...(19): siRNA sense strand
caagccagcacccauguuc

SEQ ID NO: 1747332 - RNA, 19 nt, Homo sapiens
  misc_RNA (1)...(19): siRNA sense strand
cguggaagcuacacuuacu

SEQ ID NO: 1747333 - RNA, 19 nt, Homo sapiens
  misc_RNA (1)...(19): siRNA sense strand
aagcucgcgucaucacuga

SEQ ID NO: 1747334 - RNA, 19 nt, Homo sapiens
  misc_RNA (1)...(19): siRNA sense strand
cugaauuagccaccaagua

SEQ ID NO: 1747335 - RNA, 19 nt, Homo sapiens
  misc_RNA (1)...(19): siRNA sense strand
gcuagcccucugccucuuu

SEQ ID NO: 1747336 - RNA, 19 nt, Homo sapiens
  misc_RNA (1)...(19): siRNA sense strand
uguauuauucugcguggaa

SEQ ID NO: 1747337 - RNA, 19 nt, Homo sapiens
  misc_RNA (1)...(19): siRNA sense strand
ugcggaagcuggugaaagc

SEQ ID NO: 1747338 - RNA, 19 nt, Homo sapiens
  misc_RNA (1)...(19): siRNA sense strand
ggugaaagcucgcgucauc

SEQ ID NO: 1747339 - RNA, 19 nt, Homo sapiens
  misc_RNA (1)...(19): siRNA sense strand
guuccuggaugacuccuuu

SEQ ID NO: 1747340 - RNA, 19 nt, Homo sapiens
  misc_RNA (1)...(19): siRNA sense strand
ucuaagcaguggcaucuga

SEQ ID NO: 1747341 - RNA, 19 nt, Homo sapiens
  misc_RNA (1)...(19): siRNA sense strand
ugaauuagccaccaaguac

SEQ ID NO: 1747342 - RNA, 19 nt, Homo sapiens
  misc_RNA (1)...(19): siRNA sense strand
uccugaaucuggacucuaa

SEQ ID NO: 1747343 - RNA, 19 nt, Homo sapiens
  misc_RNA (1)...(19): siRNA sense strand
gaugacuccuuucgcaagu

SEQ ID NO: 1747344 - RNA, 19 nt, Homo sapiens
  misc_RNA (1)...(19): siRNA sense strand
gggaguucgugccgccuuu

SEQ ID NO: 1747345 - RNA, 19 nt, Homo sapiens
  misc_RNA (1)...(19): siRNA sense strand
cacaauauccagcgagaga

SEQ ID NO: 1747346 - RNA, 19 nt, Homo sapiens
  misc_RNA (1)...(19): siRNA sense strand
gaucuaagcaguggcaucu

SEQ ID NO: 1747347 - RNA, 19 nt, Homo sapiens
  misc_RNA (1)...(19): siRNA sense strand
caauauccagcgagagaaa

SEQ ID NO: 1747348 - RNA, 19 nt, Homo sapiens
  misc_RNA (1)...(19): siRNA sense strand
gggcuagaauccgggaguu

SEQ ID NO: 1747349 - RNA, 19 nt, Homo sapiens
  misc_RNA (1)...(19): siRNA sense strand
ccagcgagagaaagaguuu

SEQ ID NO: 1747350 - RNA, 19 nt, Homo sapiens
  misc_RNA (1)...(19): siRNA sense strand
caagccagcacccauguuc

SEQ ID NO: 1747351 - RNA, 19 nt, Homo sapiens
  misc_RNA (1)...(19): siRNA sense strand
cguggaagcuacacuuacu

SEQ ID NO: 1747352 - RNA, 19 nt, Homo sapiens
  misc_RNA (1)...(19): siRNA sense strand
aagcucgcgucaucacuga

SEQ ID NO: 1747353 - RNA, 19 nt, Homo sapiens
  misc_RNA (1)...(19): siRNA sense strand
cugaauuagccaccaagua

SEQ ID NO: 1747354 - RNA, 19 nt, Homo sapiens
  misc_RNA (1)...(19): siRNA sense strand
gcuagcccucugccucuuu

SEQ ID NO: 1747355 - RNA, 19 nt, Homo sapiens
  misc_RNA (1)...(19): siRNA sense strand
uguauuauucugcguggaa

SEQ ID NO: 1747356 - RNA, 19 nt, Homo sapiens
  misc_RNA (1)...(19): siRNA sense strand
ugcggaagcuggugaaagc

SEQ ID NO: 1747357 - RNA, 19 nt, Homo sapiens
  misc_RNA (1)...(19): siRNA sense strand
ggugaaagcucgcgucauc

SEQ ID NO: 1747358 - RNA, 19 nt, Homo sapiens
  misc_RNA (1)...(19): siRNA sense strand
guuccuggaugacuccuuu

SEQ ID NO: 1747359 - RNA, 19 nt, Homo sapiens
  misc_RNA (1)...(19): siRNA sense strand
ucuaagcaguggcaucuga

SEQ ID NO: 1747360 - RNA, 19 nt, Homo sapiens
  misc_RNA (1)...(19): siRNA sense strand
ugaauuagccaccaaguac

SEQ ID NO: 1747361 - RNA, 19 nt, Homo sapiens
  misc_RNA (1)...(19): siRNA sense strand
uccugaaucuggacucuaa

SEQ ID NO: 1747362 - RNA, 19 nt, Homo sapiens
  misc_RNA (1)...(19): siRNA sense strand
gaugacuccuuucgcaagu

SEQ ID NO: 1747363 - RNA, 19 nt, Homo sapiens
  misc_RNA (1)...(19): siRNA sense strand
gggaguucgugccgccuuu

SEQ ID NO: 1747364 - RNA, 19 nt, Homo sapiens
  misc_RNA (1)...(19): siRNA sense strand
cacaauauccagcgagaga

SEQ ID NO: 1747365 - RNA, 19 nt, Homo sapiens
  misc_RNA (1)...(19): siRNA sense strand
gaucuaagcaguggcaucu

SEQ ID NO: 1747366 - RNA, 19 nt, Homo sapiens
  misc_RNA (1)...(19): siRNA sense strand
caauauccagcgagagaaa

SEQ ID NO: 1747367 - RNA, 19 nt, Homo sapiens
  misc_RNA (1)...(19): siRNA sense strand
gggcuagaauccgggaguu

SEQ ID NO: 1747368 - RNA, 19 nt, Homo sapiens
  misc_RNA (1)...(19): siRNA sense strand
ccagcgagagaaagaguuu

SEQ ID NO: 1747369 - RNA, 19 nt, Homo sapiens
  misc_RNA (1)...(19): siRNA sense strand
caagccagcacccauguuc

SEQ ID NO: 1747370 - RNA, 19 nt, Homo sapiens
  misc_RNA (1)...(19): siRNA sense strand
cguggaagcuacacuuacu

SEQ ID NO: 1747371 - RNA, 19 nt, Homo sapiens
  misc_RNA (1)...(19): siRNA sense strand
aagcucgcgucaucacuga

SEQ ID NO: 1747372 - RNA, 19 nt, Homo sapiens
  misc_RNA (1)...(19): siRNA sense strand
cugaauuagccaccaagua

SEQ ID NO: 1747373 - RNA, 19 nt, Homo sapiens
  misc_RNA (1)...(19): siRNA sense strand
gcuagcccucugccucuuu

SEQ ID NO: 1747374 - RNA, 19 nt, Homo sapiens
  misc_RNA (1)...(19): siRNA sense strand
uguauuauucugcguggaa

SEQ ID NO: 1747375 - RNA, 19 nt, Homo sapiens
  misc_RNA (1)...(19): siRNA sense strand
ugcggaagcuggugaaagc

SEQ ID NO: 1747376 - RNA, 19 nt, Homo sapiens
  misc_RNA (1)...(19): siRNA sense strand
ggugaaagcucgcgucauc

SEQ ID NO: 1747377 - RNA, 19 nt, Homo sapiens
  misc_RNA (1)...(19): siRNA sense strand
guuccuggaugacuccuuu

SEQ ID NO: 1747378 - RNA, 19 nt, Homo sapiens
  misc_RNA (1)...(19): siRNA sense strand
ugaauuagccaccaaguac

SEQ ID NO: 1747379 - RNA, 19 nt, Homo sapiens
  misc_RNA (1)...(19): siRNA sense strand
uccugaaucuggacucuaa

SEQ ID NO: 1747380 - RNA, 19 nt, Homo sapiens
  misc_RNA (1)...(19): siRNA sense strand
gaugacuccuuucgcaagu

SEQ ID NO: 1747381 - RNA, 19 nt, Homo sapiens
  misc_RNA (1)...(19): siRNA sense strand
gggaguucgugccgccuuu

SEQ ID NO: 1747382 - RNA, 19 nt, Homo sapiens
  misc_RNA (1)...(19): siRNA sense strand
cacaauauccagcgagaga

SEQ ID NO: 1747383 - RNA, 19 nt, Homo sapiens
  misc_RNA (1)...(19): siRNA sense strand
caauauccagcgagagaaa

SEQ ID NO: 1747384 - RNA, 19 nt, Homo sapiens
  misc_RNA (1)...(19): siRNA sense strand
gggcuagaauccgggaguu

SEQ ID NO: 1747385 - RNA, 19 nt, Homo sapiens
  misc_RNA (1)...(19): siRNA sense strand
ccagcgagagaaagaguuu

SEQ ID NO: 1747386 - RNA, 19 nt, Homo sapiens
  misc_RNA (1)...(19): siRNA sense strand
caagccagcacccauguuc

SEQ ID NO: 1747387 - RNA, 19 nt, Homo sapiens
  misc_RNA (1)...(19): siRNA sense strand
cguggaagcuacacuuacu

SEQ ID NO: 1747388 - RNA, 19 nt, Homo sapiens
  misc_RNA (1)...(19): siRNA sense strand
aagcucgcgucaucacuga

SEQ ID NO: 1747389 - RNA, 19 nt, Homo sapiens
  misc_RNA (1)...(19): siRNA sense strand
cugaauuagccaccaagua

SEQ ID NO: 1747390 - RNA, 19 nt, Homo sapiens
  misc_RNA (1)...(19): siRNA sense strand
gcuagcccucugccucuuu

SEQ ID NO: 1747391 - RNA, 19 nt, Homo sapiens
  misc_RNA (1)...(19): siRNA sense strand
uguauuauucugcguggaa

SEQ ID NO: 1747392 - RNA, 19 nt, Homo sapiens
  misc_RNA (1)...(19): siRNA sense strand
ugcggaagcuggugaaagc

SEQ ID NO: 1747393 - RNA, 19 nt, Homo sapiens
  misc_RNA (1)...(19): siRNA sense strand
ggugaaagcucgcgucauc

SEQ ID NO: 1747394 - RNA, 19 nt, Homo sapiens
  misc_RNA (1)...(19): siRNA sense strand
guuccuggaugacuccuuu

SEQ ID NO: 1747395 - RNA, 19 nt, Homo sapiens
  misc_RNA (1)...(19): siRNA sense strand
ucuaagcaguggcaucuga

SEQ ID NO: 1747396 - RNA, 19 nt, Homo sapiens
  misc_RNA (1)...(19): siRNA sense strand
ugaauuagccaccaaguac

SEQ ID NO: 1747397 - RNA, 19 nt, Homo sapiens
  misc_RNA (1)...(19): siRNA sense strand
uccugaaucuggacucuaa

SEQ ID NO: 1747398 - RNA, 19 nt, Homo sapiens
  misc_RNA (1)...(19): siRNA sense strand
gaugacuccuuucgcaagu

SEQ ID NO: 1747399 - RNA, 19 nt, Homo sapiens
  misc_RNA (1)...(19): siRNA sense strand
gggaguucgugccgccuuu

SEQ ID NO: 1747400 - RNA, 19 nt, Homo sapiens
  misc_RNA (1)...(19): siRNA sense strand
cacaauauccagcgagaga

SEQ ID NO: 1747401 - RNA, 19 nt, Homo sapiens
  misc_RNA (1)...(19): siRNA sense strand
gaucuaagcaguggcaucu

SEQ ID NO: 1747402 - RNA, 19 nt, Homo sapiens
  misc_RNA (1)...(19): siRNA sense strand
caauauccagcgagagaaa

SEQ ID NO: 1747403 - RNA, 19 nt, Homo sapiens
  misc_RNA (1)...(19): siRNA sense strand
gggcuagaauccgggaguu

SEQ ID NO: 1747404 - RNA, 19 nt, Homo sapiens
  misc_RNA (1)...(19): siRNA sense strand
ccagcgagagaaagaguuu

SEQ ID NO: 1747405 - RNA, 19 nt, Homo sapiens
  misc_RNA (1)...(19): siRNA sense strand
caagccagcacccauguuc

SEQ ID NO: 1747406 - RNA, 19 nt, Homo sapiens
  misc_RNA (1)...(19): siRNA sense strand
cguggaagcuacacuuacu

SEQ ID NO: 1747407 - RNA, 19 nt, Homo sapiens
  misc_RNA (1)...(19): siRNA sense strand
aagcucgcgucaucacuga

SEQ ID NO: 1747408 - RNA, 19 nt, Homo sapiens
  misc_RNA (1)...(19): siRNA sense strand
cugaauuagccaccaagua

SEQ ID NO: 1747409 - RNA, 19 nt, Homo sapiens
  misc_RNA (1)...(19): siRNA sense strand
gcuagcccucugccucuuu

SEQ ID NO: 1747410 - RNA, 19 nt, Homo sapiens
  misc_RNA (1)...(19): siRNA sense strand
uguauuauucugcguggaa

SEQ ID NO: 1747411 - RNA, 19 nt, Homo sapiens
  misc_RNA (1)...(19): siRNA sense strand
ugcggaagcuggugaaagc

SEQ ID NO: 1747412 - RNA, 19 nt, Homo sapiens
  misc_RNA (1)...(19): siRNA sense strand
guuccuggaugacuccuuu

SEQ ID NO: 1747413 - RNA, 19 nt, Homo sapiens
  misc_RNA (1)...(19): siRNA sense strand
ugaauuagccaccaaguac

SEQ ID NO: 1747414 - RNA, 19 nt, Homo sapiens
  misc_RNA (1)...(19): siRNA sense strand
uccugaaucuggacucuaa

SEQ ID NO: 1747415 - RNA, 19 nt, Homo sapiens
  misc_RNA (1)...(19): siRNA sense strand
gaugacuccuuucgcaagu

SEQ ID NO: 1747416 - RNA, 19 nt, Homo sapiens
  misc_RNA (1)...(19): siRNA sense strand
gggaguucgugccgccuuu

SEQ ID NO: 1747417 - RNA, 19 nt, Homo sapiens
  misc_RNA (1)...(19): siRNA sense strand
gggcuagaauccgggaguu

SEQ ID NO: 1747418 - RNA, 19 nt, Homo sapiens
  misc_RNA (1)...(19): siRNA sense strand
caagccagcacccauguuc

SEQ ID NO: 1747419 - RNA, 19 nt, Homo sapiens
  misc_RNA (1)...(19): siRNA sense strand
cguggaagcuacacuuacu

SEQ ID NO: 1747420 - RNA, 19 nt, Homo sapiens
  misc_RNA (1)...(19): siRNA sense strand
cugaauuagccaccaagua

SEQ ID NO: 1747421 - RNA, 19 nt, Homo sapiens
  misc_RNA (1)...(19): siRNA sense strand
gcuagcccucugccucuuu

SEQ ID NO: 1747422 - RNA, 19 nt, Homo sapiens
  misc_RNA (1)...(19): siRNA sense strand
uguauuauucugcguggaa

SEQ ID NO: 1747423 - RNA, 19 nt, Homo sapiens
  misc_RNA (1)...(19): siRNA sense strand
ggugaaagcucgcgucauc

SEQ ID NO: 1747424 - RNA, 19 nt, Homo sapiens
  misc_RNA (1)...(19): siRNA sense strand
guuccuggaugacuccuuu

SEQ ID NO: 1747425 - RNA, 19 nt, Homo sapiens
  misc_RNA (1)...(19): siRNA sense strand
ucuaagcaguggcaucuga

SEQ ID NO: 1747426 - RNA, 19 nt, Homo sapiens
  misc_RNA (1)...(19): siRNA sense strand
ugaauuagccaccaaguac

SEQ ID NO: 1747427 - RNA, 19 nt, Homo sapiens
  misc_RNA (1)...(19): siRNA sense strand
uccugaaucuggacucuaa

SEQ ID NO: 1747428 - RNA, 19 nt, Homo sapiens
  misc_RNA (1)...(19): siRNA sense strand
gaugacuccuuucgcaagu

SEQ ID NO: 1747429 - RNA, 19 nt, Homo sapiens
  misc_RNA (1)...(19): siRNA sense strand
gggaguucgugccgccuuu

SEQ ID NO: 1747430 - RNA, 19 nt, Homo sapiens
  misc_RNA (1)...(19): siRNA sense strand
cacaauauccagcgagaga

SEQ ID NO: 1747431 - RNA, 19 nt, Homo sapiens
  misc_RNA (1)...(19): siRNA sense strand
gaucuaagcaguggcaucu

SEQ ID NO: 1747432 - RNA, 19 nt, Homo sapiens
  misc_RNA (1)...(19): siRNA sense strand
caauauccagcgagagaaa

SEQ ID NO: 1747433 - RNA, 19 nt, Homo sapiens
  misc_RNA (1)...(19): siRNA sense strand
gggcuagaauccgggaguu

SEQ ID NO: 1747434 - RNA, 19 nt, Homo sapiens
  misc_RNA (1)...(19): siRNA sense strand
ccagcgagagaaagaguuu

SEQ ID NO: 1747435 - RNA, 19 nt, Homo sapiens
  misc_RNA (1)...(19): siRNA sense strand
caagccagcacccauguuc

SEQ ID NO: 1747436 - RNA, 19 nt, Homo sapiens
  misc_RNA (1)...(19): siRNA sense strand
cguggaagcuacacuuacu

SEQ ID NO: 1747437 - RNA, 19 nt, Homo sapiens
  misc_RNA (1)...(19): siRNA sense strand
aagcucgcgucaucacuga

SEQ ID NO: 1747438 - RNA, 19 nt, Homo sapiens
  misc_RNA (1)...(19): siRNA sense strand
cugaauuagccaccaagua

SEQ ID NO: 1747439 - RNA, 19 nt, Homo sapiens
  misc_RNA (1)...(19): siRNA sense strand
gcuagcccucugccucuuu

SEQ ID NO: 1747440 - RNA, 19 nt, Homo sapiens
  misc_RNA (1)...(19): siRNA sense strand
uguauuauucugcguggaa

SEQ ID NO: 1747441 - RNA, 19 nt, Homo sapiens
  misc_RNA (1)...(19): siRNA sense strand
ugcggaagcuggugaaagc

SEQ ID NO: 1747442 - RNA, 19 nt, Homo sapiens
  misc_RNA (1)...(19): siRNA sense strand
ggugaaagcucgcgucauc

SEQ ID NO: 1747443 - RNA, 19 nt, Homo sapiens
  misc_RNA (1)...(19): siRNA sense strand
guuccuggaugacuccuuu

SEQ ID NO: 1747444 - RNA, 19 nt, Homo sapiens
  misc_RNA (1)...(19): siRNA sense strand
ucuaagcaguggcaucuga

SEQ ID NO: 1747445 - RNA, 19 nt, Homo sapiens
  misc_RNA (1)...(19): siRNA sense strand
ugaauuagccaccaaguac

SEQ ID NO: 1747446 - RNA, 19 nt, Homo sapiens
  misc_RNA (1)...(19): siRNA sense strand
uccugaaucuggacucuaa

SEQ ID NO: 1747447 - RNA, 19 nt, Homo sapiens
  misc_RNA (1)...(19): siRNA sense strand
gaugacuccuuucgcaagu

SEQ ID NO: 1747448 - RNA, 19 nt, Homo sapiens
  misc_RNA (1)...(19): siRNA sense strand
gggaguucgugccgccuuu

SEQ ID NO: 1747449 - RNA, 19 nt, Homo sapiens
  misc_RNA (1)...(19): siRNA sense strand
cacaauauccagcgagaga

SEQ ID NO: 1747450 - RNA, 19 nt, Homo sapiens
  misc_RNA (1)...(19): siRNA sense strand
gaucuaagcaguggcaucu

SEQ ID NO: 1747451 - RNA, 19 nt, Homo sapiens
  misc_RNA (1)...(19): siRNA sense strand
caauauccagcgagagaaa

SEQ ID NO: 1747452 - RNA, 19 nt, Homo sapiens
  misc_RNA (1)...(19): siRNA sense strand
gggcuagaauccgggaguu

SEQ ID NO: 1747453 - RNA, 19 nt, Homo sapiens
  misc_RNA (1)...(19): siRNA sense strand
ccagcgagagaaagaguuu

SEQ ID NO: 1747454 - RNA, 19 nt, Homo sapiens
  misc_RNA (1)...(19): siRNA sense strand
caagccagcacccauguuc

SEQ ID NO: 1747455 - RNA, 19 nt, Homo sapiens
  misc_RNA (1)...(19): siRNA sense strand
cguggaagcuacacuuacu

SEQ ID NO: 1747456 - RNA, 19 nt, Homo sapiens
  misc_RNA (1)...(19): siRNA sense strand
aagcucgcgucaucacuga

SEQ ID NO: 1747457 - RNA, 19 nt, Homo sapiens
  misc_RNA (1)...(19): siRNA sense strand
cugaauuagccaccaagua

SEQ ID NO: 1747458 - RNA, 19 nt, Homo sapiens
  misc_RNA (1)...(19): siRNA sense strand
gcuagcccucugccucuuu

SEQ ID NO: 1747459 - RNA, 19 nt, Homo sapiens
  misc_RNA (1)...(19): siRNA sense strand
uguauuauucugcguggaa

SEQ ID NO: 1747460 - RNA, 19 nt, Homo sapiens
  misc_RNA (1)...(19): siRNA sense strand
ugcggaagcuggugaaagc

SEQ ID NO: 1747461 - RNA, 19 nt, Homo sapiens
  misc_RNA (1)...(19): siRNA sense strand
ggugaaagcucgcgucauc

SEQ ID NO: 1747462 - RNA, 19 nt, Homo sapiens
  misc_RNA (1)...(19): siRNA sense strand
guuccuggaugacuccuuu

SEQ ID NO: 1747463 - RNA, 19 nt, Homo sapiens
  misc_RNA (1)...(19): siRNA sense strand
ucuaagcaguggcaucuga

SEQ ID NO: 1747464 - RNA, 19 nt, Homo sapiens
  misc_RNA (1)...(19): siRNA sense strand
ugaauuagccaccaaguac

SEQ ID NO: 1747465 - RNA, 19 nt, Homo sapiens
  misc_RNA (1)...(19): siRNA sense strand
uccugaaucuggacucuaa

SEQ ID NO: 1747466 - RNA, 19 nt, Homo sapiens
  misc_RNA (1)...(19): siRNA sense strand
gaugacuccuuucgcaagu

SEQ ID NO: 1747467 - RNA, 19 nt, Homo sapiens
  misc_RNA (1)...(19): siRNA sense strand
gggaguucgugccgccuuu

SEQ ID NO: 1747468 - RNA, 19 nt, Homo sapiens
  misc_RNA (1)...(19): siRNA sense strand
cacaauauccagcgagaga

SEQ ID NO: 1747469 - RNA, 19 nt, Homo sapiens
  misc_RNA (1)...(19): siRNA sense strand
gaucuaagcaguggcaucu

SEQ ID NO: 1747470 - RNA, 19 nt, Homo sapiens
  misc_RNA (1)...(19): siRNA sense strand
caauauccagcgagagaaa

SEQ ID NO: 1747471 - RNA, 19 nt, Homo sapiens
  misc_RNA (1)...(19): siRNA sense strand
gggcuagaauccgggaguu

SEQ ID NO: 1747472 - RNA, 19 nt, Homo sapiens
  misc_RNA (1)...(19): siRNA sense strand
ccagcgagagaaagaguuu

SEQ ID NO: 1747473 - RNA, 19 nt, Homo sapiens
  misc_RNA (1)...(19): siRNA sense strand
caagccagcacccauguuc

SEQ ID NO: 1747474 - RNA, 19 nt, Homo sapiens
  misc_RNA (1)...(19): siRNA sense strand
cguggaagcuacacuuacu

SEQ ID NO: 1747475 - RNA, 19 nt, Homo sapiens
  misc_RNA (1)...(19): siRNA sense strand
aagcucgcgucaucacuga

SEQ ID NO: 1747476 - RNA, 19 nt, Homo sapiens
  misc_RNA (1)...(19): siRNA sense strand
cugaauuagccaccaagua

SEQ ID NO: 1747477 - RNA, 19 nt, Homo sapiens
  misc_RNA (1)...(19): siRNA sense strand
gcuagcccucugccucuuu

SEQ ID NO: 1747478 - RNA, 19 nt, Homo sapiens
  misc_RNA (1)...(19): siRNA sense strand
uguauuauucugcguggaa

SEQ ID NO: 1747479 - RNA, 19 nt, Homo sapiens
  misc_RNA (1)...(19): siRNA sense strand
ugcggaagcuggugaaagc

SEQ ID NO: 1747480 - RNA, 19 nt, Homo sapiens
  misc_RNA (1)...(19): siRNA sense strand
ggugaaagcucgcgucauc

SEQ ID NO: 1747481 - RNA, 19 nt, Homo sapiens
  misc_RNA (1)...(19): siRNA sense strand
guuccuggaugacuccuuu

SEQ ID NO: 1747482 - RNA, 19 nt, Homo sapiens
  misc_RNA (1)...(19): siRNA sense strand
ugaauuagccaccaaguac

SEQ ID NO: 1747483 - RNA, 19 nt, Homo sapiens
  misc_RNA (1)...(19): siRNA sense strand
uccugaaucuggacucuaa

SEQ ID NO: 1747484 - RNA, 19 nt, Homo sapiens
  misc_RNA (1)...(19): siRNA sense strand
gaugacuccuuucgcaagu

SEQ ID NO: 1747485 - RNA, 19 nt, Homo sapiens
  misc_RNA (1)...(19): siRNA sense strand
gggaguucgugccgccuuu

SEQ ID NO: 1747486 - RNA, 19 nt, Homo sapiens
  misc_RNA (1)...(19): siRNA sense strand
cacaauauccagcgagaga

SEQ ID NO: 1747487 - RNA, 19 nt, Homo sapiens
  misc_RNA (1)...(19): siRNA sense strand
caauauccagcgagagaaa

SEQ ID NO: 1747488 - RNA, 19 nt, Homo sapiens
  misc_RNA (1)...(19): siRNA sense strand
gggcuagaauccgggaguu

SEQ ID NO: 1747489 - RNA, 19 nt, Homo sapiens
  misc_RNA (1)...(19): siRNA sense strand
ccagcgagagaaagaguuu

SEQ ID NO: 1747490 - RNA, 19 nt, Homo sapiens
  misc_RNA (1)...(19): siRNA sense strand
caagccagcacccauguuc

SEQ ID NO: 1747491 - RNA, 19 nt, Homo sapiens
  misc_RNA (1)...(19): siRNA sense strand
cguggaagcuacacuuacu

SEQ ID NO: 1747492 - RNA, 19 nt, Homo sapiens
  misc_RNA (1)...(19): siRNA sense strand
aagcucgcgucaucacuga

SEQ ID NO: 1747493 - RNA, 19 nt, Homo sapiens
  misc_RNA (1)...(19): siRNA sense strand
cugaauuagccaccaagua

SEQ ID NO: 1747494 - RNA, 19 nt, Homo sapiens
  misc_RNA (1)...(19): siRNA sense strand
gcuagcccucugccucuuu

SEQ ID NO: 1747495 - RNA, 19 nt, Homo sapiens
  misc_RNA (1)...(19): siRNA sense strand
uguauuauucugcguggaa

SEQ ID NO: 1747496 - RNA, 19 nt, Homo sapiens
  misc_RNA (1)...(19): siRNA sense strand
ugcggaagcuggugaaagc

SEQ ID NO: 1747497 - RNA, 19 nt, Homo sapiens
  misc_RNA (1)...(19): siRNA sense strand
ggugaaagcucgcgucauc

SEQ ID NO: 1747498 - RNA, 19 nt, Homo sapiens
  misc_RNA (1)...(19): siRNA sense strand
guuccuggaugacuccuuu

SEQ ID NO: 1747499 - RNA, 19 nt, Homo sapiens
  misc_RNA (1)...(19): siRNA sense strand
ucuaagcaguggcaucuga

SEQ ID NO: 1747500 - RNA, 19 nt, Homo sapiens
  misc_RNA (1)...(19): siRNA sense strand
ugaauuagccaccaaguac

SEQ ID NO: 1747501 - RNA, 19 nt, Homo sapiens
  misc_RNA (1)...(19): siRNA sense strand
uccugaaucuggacucuaa

SEQ ID NO: 1747502 - RNA, 19 nt, Homo sapiens
  misc_RNA (1)...(19): siRNA sense strand
gaugacuccuuucgcaagu

SEQ ID NO: 1747503 - RNA, 19 nt, Homo sapiens
  misc_RNA (1)...(19): siRNA sense strand
gggaguucgugccgccuuu

SEQ ID NO: 1747504 - RNA, 19 nt, Homo sapiens
  misc_RNA (1)...(19): siRNA sense strand
cacaauauccagcgagaga

SEQ ID NO: 1747505 - RNA, 19 nt, Homo sapiens
  misc_RNA (1)...(19): siRNA sense strand
gaucuaagcaguggcaucu

SEQ ID NO: 1747506 - RNA, 19 nt, Homo sapiens
  misc_RNA (1)...(19): siRNA sense strand
caauauccagcgagagaaa

SEQ ID NO: 1747507 - RNA, 19 nt, Homo sapiens
  misc_RNA (1)...(19): siRNA sense strand
gggcuagaauccgggaguu

SEQ ID NO: 1747508 - RNA, 19 nt, Homo sapiens
  misc_RNA (1)...(19): siRNA sense strand
ccagcgagagaaagaguuu

SEQ ID NO: 1747509 - RNA, 19 nt, Homo sapiens
  misc_RNA (1)...(19): siRNA sense strand
caagccagcacccauguuc

SEQ ID NO: 1747510 - RNA, 19 nt, Homo sapiens
  misc_RNA (1)...(19): siRNA sense strand
cguggaagcuacacuuacu

SEQ ID NO: 1747511 - RNA, 19 nt, Homo sapiens
  misc_RNA (1)...(19): siRNA sense strand
aagcucgcgucaucacuga

SEQ ID NO: 1747512 - RNA, 19 nt, Homo sapiens
  misc_RNA (1)...(19): siRNA sense strand
cugaauuagccaccaagua

SEQ ID NO: 1747513 - RNA, 19 nt, Homo sapiens
  misc_RNA (1)...(19): siRNA sense strand
gcuagcccucugccucuuu

SEQ ID NO: 1747514 - RNA, 19 nt, Homo sapiens
  misc_RNA (1)...(19): siRNA sense strand
uguauuauucugcguggaa

SEQ ID NO: 1747515 - RNA, 19 nt, Homo sapiens
  misc_RNA (1)...(19): siRNA sense strand
ugcggaagcuggugaaagc

SEQ ID NO: 1747516 - RNA, 19 nt, Homo sapiens
  misc_RNA (1)...(19): siRNA sense strand
ggugaaagcucgcgucauc

SEQ ID NO: 1747517 - RNA, 19 nt, Homo sapiens
  misc_RNA (1)...(19): siRNA sense strand
guuccuggaugacuccuuu

SEQ ID NO: 1747518 - RNA, 19 nt, Homo sapiens
  misc_RNA (1)...(19): siRNA sense strand
ugaauuagccaccaaguac

SEQ ID NO: 1747519 - RNA, 19 nt, Homo sapiens
  misc_RNA (1)...(19): siRNA sense strand
uccugaaucuggacucuaa

SEQ ID NO: 1747520 - RNA, 19 nt, Homo sapiens
  misc_RNA (1)...(19): siRNA sense strand
gaugacuccuuucgcaagu

SEQ ID NO: 1747521 - RNA, 19 nt, Homo sapiens
  misc_RNA (1)...(19): siRNA sense strand
gggaguucgugccgccuuu

SEQ ID NO: 1747522 - RNA, 19 nt, Homo sapiens
  misc_RNA (1)...(19): siRNA sense strand
cacaauauccagcgagaga

SEQ ID NO: 1747523 - RNA, 19 nt, Homo sapiens
  misc_RNA (1)...(19): siRNA sense strand
caauauccagcgagagaaa

SEQ ID NO: 1747524 - RNA, 19 nt, Homo sapiens
  misc_RNA (1)...(19): siRNA sense strand
gggcuagaauccgggaguu

SEQ ID NO: 1747525 - RNA, 19 nt, Homo sapiens
  misc_RNA (1)...(19): siRNA sense strand
ccagcgagagaaagaguuu

SEQ ID NO: 1747526 - RNA, 19 nt, Homo sapiens
  misc_RNA (1)...(19): siRNA sense strand
caagccagcacccauguuc

SEQ ID NO: 1747527 - RNA, 19 nt, Homo sapiens
  misc_RNA (1)...(19): siRNA sense strand
cguggaagcuacacuuacu

SEQ ID NO: 1747528 - RNA, 19 nt, Homo sapiens
  misc_RNA (1)...(19): siRNA sense strand
aagcucgcgucaucacuga

SEQ ID NO: 1747529 - RNA, 19 nt, Homo sapiens
  misc_RNA (1)...(19): siRNA sense strand
cugaauuagccaccaagua

SEQ ID NO: 1747530 - RNA, 19 nt, Homo sapiens
  misc_RNA (1)...(19): siRNA sense strand
gcuagcccucugccucuuu

SEQ ID NO: 1747531 - RNA, 19 nt, Homo sapiens
  misc_RNA (1)...(19): siRNA sense strand
uguauuauucugcguggaa

SEQ ID NO: 1747532 - RNA, 19 nt, Homo sapiens
  misc_RNA (1)...(19): siRNA sense strand
ugcggaagcuggugaaagc

SEQ ID NO: 1747533 - RNA, 19 nt, Homo sapiens
  misc_RNA (1)...(19): siRNA sense strand
ggugaaagcucgcgucauc

SEQ ID NO: 1747534 - RNA, 19 nt, Homo sapiens
  misc_RNA (1)...(19): siRNA sense strand
guuccuggaugacuccuuu

SEQ ID NO: 1747535 - RNA, 19 nt, Homo sapiens
  misc_RNA (1)...(19): siRNA sense strand
ucuaagcaguggcaucuga

SEQ ID NO: 1747536 - RNA, 19 nt, Homo sapiens
  misc_RNA (1)...(19): siRNA sense strand
ugaauuagccaccaaguac

SEQ ID NO: 1747537 - RNA, 19 nt, Homo sapiens
  misc_RNA (1)...(19): siRNA sense strand
uccugaaucuggacucuaa

SEQ ID NO: 1747538 - RNA, 19 nt, Homo sapiens
  misc_RNA (1)...(19): siRNA sense strand
gaugacuccuuucgcaagu

SEQ ID NO: 1747539 - RNA, 19 nt, Homo sapiens
  misc_RNA (1)...(19): siRNA sense strand
gggaguucgugccgccuuu

SEQ ID NO: 1747540 - RNA, 19 nt, Homo sapiens
  misc_RNA (1)...(19): siRNA sense strand
cacaauauccagcgagaga

SEQ ID NO: 1747541 - RNA, 19 nt, Homo sapiens
  misc_RNA (1)...(19): siRNA sense strand
gaucuaagcaguggcaucu

SEQ ID NO: 1747542 - RNA, 19 nt, Homo sapiens
  misc_RNA (1)...(19): siRNA sense strand
caauauccagcgagagaaa

SEQ ID NO: 1747543 - RNA, 19 nt, Homo sapiens
  misc_RNA (1)...(19): siRNA sense strand
gggcuagaauccgggaguu

SEQ ID NO: 1747544 - RNA, 19 nt, Homo sapiens
  misc_RNA (1)...(19): siRNA sense strand
ccagcgagagaaagaguuu

SEQ ID NO: 1747545 - RNA, 19 nt, Homo sapiens
  misc_RNA (1)...(19): siRNA sense strand
caagccagcacccauguuc

SEQ ID NO: 1747546 - RNA, 19 nt, Homo sapiens
  misc_RNA (1)...(19): siRNA sense strand
cguggaagcuacacuuacu

SEQ ID NO: 1747547 - RNA, 19 nt, Homo sapiens
  misc_RNA (1)...(19): siRNA sense strand
aagcucgcgucaucacuga

SEQ ID NO: 1747548 - RNA, 19 nt, Homo sapiens
  misc_RNA (1)...(19): siRNA sense strand
cugaauuagccaccaagua

SEQ ID NO: 1747549 - RNA, 19 nt, Homo sapiens
  misc_RNA (1)...(19): siRNA sense strand
gcuagcccucugccucuuu

SEQ ID NO: 1747550 - RNA, 19 nt, Homo sapiens
  misc_RNA (1)...(19): siRNA sense strand
uguauuauucugcguggaa

SEQ ID NO: 1747551 - RNA, 19 nt, Homo sapiens
  misc_RNA (1)...(19): siRNA sense strand
ugcggaagcuggugaaagc

SEQ ID NO: 1747552 - RNA, 19 nt, Homo sapiens
  misc_RNA (1)...(19): siRNA sense strand
ggugaaagcucgcgucauc

SEQ ID NO: 1747553 - RNA, 19 nt, Homo sapiens
  misc_RNA (1)...(19): siRNA sense strand
guuccuggaugacuccuuu

SEQ ID NO: 1747554 - RNA, 19 nt, Homo sapiens
  misc_RNA (1)...(19): siRNA sense strand
ucuaagcaguggcaucuga

SEQ ID NO: 1747555 - RNA, 19 nt, Homo sapiens
  misc_RNA (1)...(19): siRNA sense strand
ugaauuagccaccaaguac

SEQ ID NO: 1747556 - RNA, 19 nt, Homo sapiens
  misc_RNA (1)...(19): siRNA sense strand
uccugaaucuggacucuaa

SEQ ID NO: 1747557 - RNA, 19 nt, Homo sapiens
  misc_RNA (1)...(19): siRNA sense strand
gaugacuccuuucgcaagu

SEQ ID NO: 1747558 - RNA, 19 nt, Homo sapiens
  misc_RNA (1)...(19): siRNA sense strand
gggaguucgugccgccuuu

SEQ ID NO: 1747559 - RNA, 19 nt, Homo sapiens
  misc_RNA (1)...(19): siRNA sense strand
cacaauauccagcgagaga

SEQ ID NO: 1747560 - RNA, 19 nt, Homo sapiens
  misc_RNA (1)...(19): siRNA sense strand
gaucuaagcaguggcaucu

SEQ ID NO: 1747561 - RNA, 19 nt, Homo sapiens
  misc_RNA (1)...(19): siRNA sense strand
caauauccagcgagagaaa

SEQ ID NO: 1747562 - RNA, 19 nt, Homo sapiens
  misc_RNA (1)...(19): siRNA sense strand
gggcuagaauccgggaguu

SEQ ID NO: 1747563 - RNA, 19 nt, Homo sapiens
  misc_RNA (1)...(19): siRNA sense strand
ccagcgagagaaagaguuu

SEQ ID NO: 1747564 - RNA, 19 nt, Homo sapiens
  misc_RNA (1)...(19): siRNA sense strand
caagccagcacccauguuc

SEQ ID NO: 1747565 - RNA, 19 nt, Homo sapiens
  misc_RNA (1)...(19): siRNA sense strand
cguggaagcuacacuuacu

SEQ ID NO: 1747566 - RNA, 19 nt, Homo sapiens
  misc_RNA (1)...(19): siRNA sense strand
aagcucgcgucaucacuga

SEQ ID NO: 1747567 - RNA, 19 nt, Homo sapiens
  misc_RNA (1)...(19): siRNA sense strand
cugaauuagccaccaagua

SEQ ID NO: 1747568 - RNA, 19 nt, Homo sapiens
  misc_RNA (1)...(19): siRNA sense strand
gcuagcccucugccucuuu

SEQ ID NO: 1747569 - RNA, 19 nt, Homo sapiens
  misc_RNA (1)...(19): siRNA sense strand
uguauuauucugcguggaa

SEQ ID NO: 1747570 - RNA, 19 nt, Homo sapiens
  misc_RNA (1)...(19): siRNA sense strand
ugcggaagcuggugaaagc

SEQ ID NO: 1747571 - RNA, 19 nt, Homo sapiens
  misc_RNA (1)...(19): siRNA sense strand
ggugaaagcucgcgucauc

SEQ ID NO: 1747572 - RNA, 19 nt, Homo sapiens
  misc_RNA (1)...(19): siRNA sense strand
guuccuggaugacuccuuu

SEQ ID NO: 1747573 - RNA, 19 nt, Homo sapiens
  misc_RNA (1)...(19): siRNA sense strand
ugaauuagccaccaaguac

SEQ ID NO: 1747574 - RNA, 19 nt, Homo sapiens
  misc_RNA (1)...(19): siRNA sense strand
uccugaaucuggacucuaa

SEQ ID NO: 1747575 - RNA, 19 nt, Homo sapiens
  misc_RNA (1)...(19): siRNA sense strand
gaugacuccuuucgcaagu

SEQ ID NO: 1747576 - RNA, 19 nt, Homo sapiens
  misc_RNA (1)...(19): siRNA sense strand
gggaguucgugccgccuuu

SEQ ID NO: 1747577 - RNA, 19 nt, Homo sapiens
  misc_RNA (1)...(19): siRNA sense strand
cacaauauccagcgagaga

SEQ ID NO: 1747578 - RNA, 19 nt, Homo sapiens
  misc_RNA (1)...(19): siRNA sense strand
caauauccagcgagagaaa

SEQ ID NO: 1747579 - RNA, 19 nt, Homo sapiens
  misc_RNA (1)...(19): siRNA sense strand
gggcuagaauccgggaguu

SEQ ID NO: 1747580 - RNA, 19 nt, Homo sapiens
  misc_RNA (1)...(19): siRNA sense strand
ccagcgagagaaagaguuu

SEQ ID NO: 1747581 - RNA, 19 nt, Homo sapiens
  misc_RNA (1)...(19): siRNA sense strand
caagccagcacccauguuc

SEQ ID NO: 1747582 - RNA, 19 nt, Homo sapiens
  misc_RNA (1)...(19): siRNA sense strand
cguggaagcuacacuuacu

SEQ ID NO: 1747583 - RNA, 19 nt, Homo sapiens
  misc_RNA (1)...(19): siRNA sense strand
aagcucgcgucaucacuga

SEQ ID NO: 1747584 - RNA, 19 nt, Homo sapiens
  misc_RNA (1)...(19): siRNA sense strand
cugaauuagccaccaagua

SEQ ID NO: 1747585 - RNA, 19 nt, Homo sapiens
  misc_RNA (1)...(19): siRNA sense strand
gcuagcccucugccucuuu

SEQ ID NO: 1747586 - RNA, 19 nt, Homo sapiens
  misc_RNA (1)...(19): siRNA sense strand
uguauuauucugcguggaa

SEQ ID NO: 1747587 - RNA, 19 nt, Homo sapiens
  misc_RNA (1)...(19): siRNA sense strand
ugcggaagcuggugaaagc

SEQ ID NO: 1747588 - RNA, 19 nt, Homo sapiens
  misc_RNA (1)...(19): siRNA sense strand
ggugaaagcucgcgucauc

SEQ ID NO: 1747589 - RNA, 19 nt, Homo sapiens
  misc_RNA (1)...(19): siRNA sense strand
guuccuggaugacuccuuu

SEQ ID NO: 1747590 - RNA, 19 nt, Homo sapiens
  misc_RNA (1)...(19): siRNA sense strand
ucuaagcaguggcaucuga

SEQ ID NO: 1747591 - RNA, 19 nt, Homo sapiens
  misc_RNA (1)...(19): siRNA sense strand
ugaauuagccaccaaguac

SEQ ID NO: 1747592 - RNA, 19 nt, Homo sapiens
  misc_RNA (1)...(19): siRNA sense strand
uccugaaucuggacucuaa

SEQ ID NO: 1747593 - RNA, 19 nt, Homo sapiens
  misc_RNA (1)...(19): siRNA sense strand
gaugacuccuuucgcaagu

SEQ ID NO: 1747594 - RNA, 19 nt, Homo sapiens
  misc_RNA (1)...(19): siRNA sense strand
gggaguucgugccgccuuu

SEQ ID NO: 1747595 - RNA, 19 nt, Homo sapiens
  misc_RNA (1)...(19): siRNA sense strand
cacaauauccagcgagaga

SEQ ID NO: 1747596 - RNA, 19 nt, Homo sapiens
  misc_RNA (1)...(19): siRNA sense strand
gaucuaagcaguggcaucu

SEQ ID NO: 1747597 - RNA, 19 nt, Homo sapiens
  misc_RNA (1)...(19): siRNA sense strand
caauauccagcgagagaaa

SEQ ID NO: 1747598 - RNA, 19 nt, Homo sapiens
  misc_RNA (1)...(19): siRNA sense strand
gggcuagaauccgggaguu

SEQ ID NO: 1747599 - RNA, 19 nt, Homo sapiens
  misc_RNA (1)...(19): siRNA sense strand
ccagcgagagaaagaguuu

SEQ ID NO: 1747600 - RNA, 19 nt, Homo sapiens
  misc_RNA (1)...(19): siRNA sense strand
caagccagcacccauguuc

SEQ ID NO: 1747601 - RNA, 19 nt, Homo sapiens
  misc_RNA (1)...(19): siRNA sense strand
cguggaagcuacacuuacu

SEQ ID NO: 1747602 - RNA, 19 nt, Homo sapiens
  misc_RNA (1)...(19): siRNA sense strand
aagcucgcgucaucacuga

SEQ ID NO: 1747603 - RNA, 19 nt, Homo sapiens
  misc_RNA (1)...(19): siRNA sense strand
cugaauuagccaccaagua

SEQ ID NO: 1747604 - RNA, 19 nt, Homo sapiens
  misc_RNA (1)...(19): siRNA sense strand
gcuagcccucugccucuuu

SEQ ID NO: 1747605 - RNA, 19 nt, Homo sapiens
  misc_RNA (1)...(19): siRNA sense strand
uguauuauucugcguggaa

SEQ ID NO: 1747606 - RNA, 19 nt, Homo sapiens
  misc_RNA (1)...(19): siRNA sense strand
ugcggaagcuggugaaagc

SEQ ID NO: 1747607 - RNA, 19 nt, Homo sapiens
  misc_RNA (1)...(19): siRNA sense strand
guuccuggaugacuccuuu

SEQ ID NO: 1747608 - RNA, 19 nt, Homo sapiens
  misc_RNA (1)...(19): siRNA sense strand
ugaauuagccaccaaguac

SEQ ID NO: 1747609 - RNA, 19 nt, Homo sapiens
  misc_RNA (1)...(19): siRNA sense strand
uccugaaucuggacucuaa

SEQ ID NO: 1747610 - RNA, 19 nt, Homo sapiens
  misc_RNA (1)...(19): siRNA sense strand
gaugacuccuuucgcaagu

SEQ ID NO: 1747611 - RNA, 19 nt, Homo sapiens
  misc_RNA (1)...(19): siRNA sense strand
gggaguucgugccgccuuu

SEQ ID NO: 1747612 - RNA, 19 nt, Homo sapiens
  misc_RNA (1)...(19): siRNA sense strand
gggcuagaauccgggaguu

SEQ ID NO: 1747613 - RNA, 19 nt, Homo sapiens
  misc_RNA (1)...(19): siRNA sense strand
caagccagcacccauguuc

SEQ ID NO: 1747614 - RNA, 19 nt, Homo sapiens
  misc_RNA (1)...(19): siRNA sense strand
cguggaagcuacacuuacu

SEQ ID NO: 1747615 - RNA, 19 nt, Homo sapiens
  misc_RNA (1)...(19): siRNA sense strand
cugaauuagccaccaagua

SEQ ID NO: 1747616 - RNA, 19 nt, Homo sapiens
  misc_RNA (1)...(19): siRNA sense strand
gcuagcccucugccucuuu

SEQ ID NO: 1747617 - RNA, 19 nt, Homo sapiens
  misc_RNA (1)...(19): siRNA sense strand
uguauuauucugcguggaa

SEQ ID NO: 1747618 - RNA, 19 nt, Homo sapiens
  misc_RNA (1)...(19): siRNA sense strand
ggaaagagaucuccauggu

SEQ ID NO: 1747619 - RNA, 19 nt, Homo sapiens
  misc_RNA (1)...(19): siRNA sense strand
gguccuagaugucuucuuu

SEQ ID NO: 1747620 - RNA, 19 nt, Homo sapiens
  misc_RNA (1)...(19): siRNA sense strand
caacuucucuguggucuau

SEQ ID NO: 1747621 - RNA, 19 nt, Homo sapiens
  misc_RNA (1)...(19): siRNA sense strand
cuuaagagcugcaacuuca

SEQ ID NO: 1747622 - RNA, 19 nt, Homo sapiens
  misc_RNA (1)...(19): siRNA sense strand
caaauuugcugaggaggau

SEQ ID NO: 1747623 - RNA, 19 nt, Homo sapiens
  misc_RNA (1)...(19): siRNA sense strand
cagaugggccuguucauug

SEQ ID NO: 1747624 - RNA, 19 nt, Homo sapiens
  misc_RNA (1)...(19): siRNA sense strand
gcugucacccucugcaaua

SEQ ID NO: 1747625 - RNA, 19 nt, Homo sapiens
  misc_RNA (1)...(19): siRNA sense strand
gcaguggccuggagaucau

SEQ ID NO: 1747626 - RNA, 19 nt, Homo sapiens
  misc_RNA (1)...(19): siRNA sense strand
gauccucgacuacaucuau

SEQ ID NO: 1747627 - RNA, 19 nt, Homo sapiens
  misc_RNA (1)...(19): siRNA sense strand
cccagagccugacauggua

SEQ ID NO: 1747628 - RNA, 19 nt, Homo sapiens
  misc_RNA (1)...(19): siRNA sense strand
cccaggaggucucuuugaa

SEQ ID NO: 1747629 - RNA, 19 nt, Homo sapiens
  misc_RNA (1)...(19): siRNA sense strand
gaucgagauugugugcaaa

SEQ ID NO: 1747630 - RNA, 19 nt, Homo sapiens
  misc_RNA (1)...(19): siRNA sense strand
cgaucgagauugugugcaa

SEQ ID NO: 1747631 - RNA, 19 nt, Homo sapiens
  misc_RNA (1)...(19): siRNA sense strand
gaacuuccugguccuagau

SEQ ID NO: 1747632 - RNA, 19 nt, Homo sapiens
  misc_RNA (1)...(19): siRNA sense strand
guauggaggcgucccaaga

SEQ ID NO: 1747633 - RNA, 19 nt, Homo sapiens
  misc_RNA (1)...(19): siRNA sense strand
agacaaaugagacgucguu

SEQ ID NO: 1747634 - RNA, 19 nt, Homo sapiens
  misc_RNA (1)...(19): siRNA sense strand
uccuagaugucuucuuuga

SEQ ID NO: 1747635 - RNA, 19 nt, Homo sapiens
  misc_RNA (1)...(19): siRNA sense strand
gggccagcauccucacguu

SEQ ID NO: 1747636 - RNA, 19 nt, Homo sapiens
  misc_RNA (1)...(19): siRNA sense strand
ggagauccucgacuacauc

SEQ ID NO: 1747637 - RNA, 19 nt, Homo sapiens
  misc_RNA (1)...(19): siRNA sense strand
ccgcaacgagaccuacaua

SEQ ID NO: 1747638 - RNA, 19 nt, Homo sapiens
  misc_RNA (1)...(19): siRNA sense strand
gcaacgagaccuacauacg

SEQ ID NO: 1747639 - RNA, 19 nt, Homo sapiens
  misc_RNA (1)...(19): siRNA sense strand
ggaaguacaaccgcaacga

SEQ ID NO: 1747640 - RNA, 19 nt, Homo sapiens
  misc_RNA (1)...(19): siRNA sense strand
ggagaacuuccugguccua

SEQ ID NO: 1747641 - RNA, 19 nt, Homo sapiens
  misc_RNA (1)...(19): siRNA sense strand
gcugugcuggugcugauaa

SEQ ID NO: 1747642 - RNA, 19 nt, Homo sapiens
  misc_RNA (1)...(19): siRNA sense strand
gucacccucugcaauauca

SEQ ID NO: 1747643 - RNA, 19 nt, Homo sapiens
  misc_RNA (1)...(19): siRNA sense strand
gacagaugccgaucgagau

SEQ ID NO: 1747644 - RNA, 19 nt, Homo sapiens
  misc_RNA (1)...(19): siRNA sense strand
aggaguaccugcccaucug

SEQ ID NO: 1747645 - RNA, 19 nt, Homo sapiens
  misc_RNA (1)...(19): siRNA sense strand
agaacuuccugguccuaga

SEQ ID NO: 1747646 - RNA, 19 nt, Homo sapiens
  misc_RNA (1)...(19): siRNA sense strand
guccugggaucgacugaag

SEQ ID NO: 1747647 - RNA, 19 nt, Homo sapiens
  misc_RNA (1)...(19): siRNA sense strand
cgaaacccaaggagaagga

SEQ ID NO: 1747648 - RNA, 19 nt, Homo sapiens
  misc_RNA (1)...(19): siRNA sense strand
gcuacucggccuacagugu

SEQ ID NO: 1747649 - RNA, 19 nt, Homo sapiens
  misc_RNA (1)...(19): siRNA sense strand
gcuuaagagcugcaacuuc

SEQ ID NO: 1747650 - RNA, 19 nt, Homo sapiens
  misc_RNA (1)...(19): siRNA sense strand
acagaugccgaucgagauu

SEQ ID NO: 1747651 - RNA, 19 nt, Homo sapiens
  misc_RNA (1)...(19): siRNA sense strand
ugcuggagauccucgacua

SEQ ID NO: 1747652 - RNA, 19 nt, Homo sapiens
  misc_RNA (1)...(19): siRNA sense strand
agaugggccuguucauugg

SEQ ID NO: 1747653 - RNA, 19 nt, Homo sapiens
  misc_RNA (1)...(19): siRNA sense strand
gaggaguaccugcccaucu

SEQ ID NO: 1747654 - RNA, 19 nt, Homo sapiens
  misc_RNA (1)...(19): siRNA sense strand
ccagcucgccgacaugcuu

SEQ ID NO: 1747655 - RNA, 19 nt, Homo sapiens
  misc_RNA (1)...(19): siRNA sense strand
ccaccuggccaaucugaca

SEQ ID NO: 1747656 - RNA, 19 nt, Homo sapiens
  misc_RNA (1)...(19): siRNA sense strand
cagcucgccgacaugcuua

SEQ ID NO: 1747657 - RNA, 19 nt, Homo sapiens
  misc_RNA (1)...(19): siRNA sense strand
cuacauacgggagaacuuc

SEQ ID NO: 1747658 - RNA, 19 nt, Homo sapiens
  misc_RNA (1)...(19): siRNA sense strand
uaagagcugcaacuucagu

SEQ ID NO: 1747659 - RNA, 19 nt, Homo sapiens
  misc_RNA (1)...(19): siRNA sense strand
cgacugaagcggguaugga

SEQ ID NO: 1747660 - RNA, 19 nt, Homo sapiens
  misc_RNA (1)...(19): siRNA sense strand
ucacguugcuggagauccu

SEQ ID NO: 1747661 - RNA, 19 nt, Homo sapiens
  misc_RNA (1)...(19): siRNA sense strand
gagcagcgagcagccuaug

SEQ ID NO: 1747662 - RNA, 19 nt, Homo sapiens
  misc_RNA (1)...(19): siRNA sense strand
ccgcuugcccugaguuuag

SEQ ID NO: 1747663 - RNA, 19 nt, Homo sapiens
  misc_RNA (1)...(19): siRNA sense strand
gaucgaggagagagacaag

SEQ ID NO: 1747664 - RNA, 19 nt, Homo sapiens
  misc_RNA (1)...(19): siRNA sense strand
gaagccacaaggagacgau

SEQ ID NO: 1747665 - RNA, 19 nt, Homo sapiens
  misc_RNA (1)...(19): siRNA sense strand
agaugccgaucgagauugu

SEQ ID NO: 1747666 - RNA, 19 nt, Homo sapiens
  misc_RNA (1)...(19): siRNA sense strand
agaccuacauacgggagaa

SEQ ID NO: 1747667 - RNA, 19 nt, Homo sapiens
  misc_RNA (1)...(19): siRNA sense strand
ggcaguggccuggagauca

SEQ ID NO: 1747668 - RNA, 19 nt, Homo sapiens
  misc_RNA (1)...(19): siRNA sense strand
ggaaagagaucuccauggu

SEQ ID NO: 1747669 - RNA, 19 nt, Homo sapiens
  misc_RNA (1)...(19): siRNA sense strand
gguccuagaugucuucuuu

SEQ ID NO: 1747670 - RNA, 19 nt, Homo sapiens
  misc_RNA (1)...(19): siRNA sense strand
caacuucucuguggucuau

SEQ ID NO: 1747671 - RNA, 19 nt, Homo sapiens
  misc_RNA (1)...(19): siRNA sense strand
cuuaagagcugcaacuuca

SEQ ID NO: 1747672 - RNA, 19 nt, Homo sapiens
  misc_RNA (1)...(19): siRNA sense strand
caaauuugcugaggaggau

SEQ ID NO: 1747673 - RNA, 19 nt, Homo sapiens
  misc_RNA (1)...(19): siRNA sense strand
cagaugggccuguucauug

SEQ ID NO: 1747674 - RNA, 19 nt, Homo sapiens
  misc_RNA (1)...(19): siRNA sense strand
gcugucacccucugcaaua

SEQ ID NO: 1747675 - RNA, 19 nt, Homo sapiens
  misc_RNA (1)...(19): siRNA sense strand
gcaguggccuggagaucau

SEQ ID NO: 1747676 - RNA, 19 nt, Homo sapiens
  misc_RNA (1)...(19): siRNA sense strand
gauccucgacuacaucuau

SEQ ID NO: 1747677 - RNA, 19 nt, Homo sapiens
  misc_RNA (1)...(19): siRNA sense strand
cccagagccugacauggua

SEQ ID NO: 1747678 - RNA, 19 nt, Homo sapiens
  misc_RNA (1)...(19): siRNA sense strand
cccaggaggucucuuugaa

SEQ ID NO: 1747679 - RNA, 19 nt, Homo sapiens
  misc_RNA (1)...(19): siRNA sense strand
gaucgagauugugugcaaa

SEQ ID NO: 1747680 - RNA, 19 nt, Homo sapiens
  misc_RNA (1)...(19): siRNA sense strand
cgaucgagauugugugcaa

SEQ ID NO: 1747681 - RNA, 19 nt, Homo sapiens
  misc_RNA (1)...(19): siRNA sense strand
gaacuuccugguccuagau

SEQ ID NO: 1747682 - RNA, 19 nt, Homo sapiens
  misc_RNA (1)...(19): siRNA sense strand
guauggaggcgucccaaga

SEQ ID NO: 1747683 - RNA, 19 nt, Homo sapiens
  misc_RNA (1)...(19): siRNA sense strand
agacaaaugagacgucguu

SEQ ID NO: 1747684 - RNA, 19 nt, Homo sapiens
  misc_RNA (1)...(19): siRNA sense strand
uccuagaugucuucuuuga

SEQ ID NO: 1747685 - RNA, 19 nt, Homo sapiens
  misc_RNA (1)...(19): siRNA sense strand
gggccagcauccucacguu

SEQ ID NO: 1747686 - RNA, 19 nt, Homo sapiens
  misc_RNA (1)...(19): siRNA sense strand
ggagauccucgacuacauc

SEQ ID NO: 1747687 - RNA, 19 nt, Homo sapiens
  misc_RNA (1)...(19): siRNA sense strand
ccgcaacgagaccuacaua

SEQ ID NO: 1747688 - RNA, 19 nt, Homo sapiens
  misc_RNA (1)...(19): siRNA sense strand
gcaacgagaccuacauacg

SEQ ID NO: 1747689 - RNA, 19 nt, Homo sapiens
  misc_RNA (1)...(19): siRNA sense strand
ggaaguacaaccgcaacga

SEQ ID NO: 1747690 - RNA, 19 nt, Homo sapiens
  misc_RNA (1)...(19): siRNA sense strand
ggagaacuuccugguccua

SEQ ID NO: 1747691 - RNA, 19 nt, Homo sapiens
  misc_RNA (1)...(19): siRNA sense strand
gcugugcuggugcugauaa

SEQ ID NO: 1747692 - RNA, 19 nt, Homo sapiens
  misc_RNA (1)...(19): siRNA sense strand
gucacccucugcaauauca

SEQ ID NO: 1747693 - RNA, 19 nt, Homo sapiens
  misc_RNA (1)...(19): siRNA sense strand
gacagaugccgaucgagau

SEQ ID NO: 1747694 - RNA, 19 nt, Homo sapiens
  misc_RNA (1)...(19): siRNA sense strand
aggaguaccugcccaucug

SEQ ID NO: 1747695 - RNA, 19 nt, Homo sapiens
  misc_RNA (1)...(19): siRNA sense strand
agaacuuccugguccuaga

SEQ ID NO: 1747696 - RNA, 19 nt, Homo sapiens
  misc_RNA (1)...(19): siRNA sense strand
guccugggaucgacugaag

SEQ ID NO: 1747697 - RNA, 19 nt, Homo sapiens
  misc_RNA (1)...(19): siRNA sense strand
cgaaacccaaggagaagga

SEQ ID NO: 1747698 - RNA, 19 nt, Homo sapiens
  misc_RNA (1)...(19): siRNA sense strand
gcuacucggccuacagugu

SEQ ID NO: 1747699 - RNA, 19 nt, Homo sapiens
  misc_RNA (1)...(19): siRNA sense strand
gcuuaagagcugcaacuuc

SEQ ID NO: 1747700 - RNA, 19 nt, Homo sapiens
  misc_RNA (1)...(19): siRNA sense strand
acagaugccgaucgagauu

SEQ ID NO: 1747701 - RNA, 19 nt, Homo sapiens
  misc_RNA (1)...(19): siRNA sense strand
ugcuggagauccucgacua

SEQ ID NO: 1747702 - RNA, 19 nt, Homo sapiens
  misc_RNA (1)...(19): siRNA sense strand
agaugggccuguucauugg

SEQ ID NO: 1747703 - RNA, 19 nt, Homo sapiens
  misc_RNA (1)...(19): siRNA sense strand
gaggaguaccugcccaucu

SEQ ID NO: 1747704 - RNA, 19 nt, Homo sapiens
  misc_RNA (1)...(19): siRNA sense strand
ccagcucgccgacaugcuu

SEQ ID NO: 1747705 - RNA, 19 nt, Homo sapiens
  misc_RNA (1)...(19): siRNA sense strand
ccaccuggccaaucugaca

SEQ ID NO: 1747706 - RNA, 19 nt, Homo sapiens
  misc_RNA (1)...(19): siRNA sense strand
cagcucgccgacaugcuua

SEQ ID NO: 1747707 - RNA, 19 nt, Homo sapiens
  misc_RNA (1)...(19): siRNA sense strand
cuacauacgggagaacuuc

SEQ ID NO: 1747708 - RNA, 19 nt, Homo sapiens
  misc_RNA (1)...(19): siRNA sense strand
uaagagcugcaacuucagu

SEQ ID NO: 1747709 - RNA, 19 nt, Homo sapiens
  misc_RNA (1)...(19): siRNA sense strand
cgacugaagcggguaugga

SEQ ID NO: 1747710 - RNA, 19 nt, Homo sapiens
  misc_RNA (1)...(19): siRNA sense strand
ucacguugcuggagauccu

SEQ ID NO: 1747711 - RNA, 19 nt, Homo sapiens
  misc_RNA (1)...(19): siRNA sense strand
gagcagcgagcagccuaug

SEQ ID NO: 1747712 - RNA, 19 nt, Homo sapiens
  misc_RNA (1)...(19): siRNA sense strand
ccgcuugcccugaguuuag

SEQ ID NO: 1747713 - RNA, 19 nt, Homo sapiens
  misc_RNA (1)...(19): siRNA sense strand
gaucgaggagagagacaag

SEQ ID NO: 1747714 - RNA, 19 nt, Homo sapiens
  misc_RNA (1)...(19): siRNA sense strand
gaagccacaaggagacgau

SEQ ID NO: 1747715 - RNA, 19 nt, Homo sapiens
  misc_RNA (1)...(19): siRNA sense strand
agaugccgaucgagauugu

SEQ ID NO: 1747716 - RNA, 19 nt, Homo sapiens
  misc_RNA (1)...(19): siRNA sense strand
agaccuacauacgggagaa

SEQ ID NO: 1747717 - RNA, 19 nt, Homo sapiens
  misc_RNA (1)...(19): siRNA sense strand
ggcaguggccuggagauca

SEQ ID NO: 1747718 - RNA, 19 nt, Homo sapiens
  misc_RNA (1)...(19): siRNA sense strand
ggaaagagaucuccauggu

SEQ ID NO: 1747719 - RNA, 19 nt, Homo sapiens
  misc_RNA (1)...(19): siRNA sense strand
gguccuagaugucuucuuu

SEQ ID NO: 1747720 - RNA, 19 nt, Homo sapiens
  misc_RNA (1)...(19): siRNA sense strand
caacuucucuguggucuau

SEQ ID NO: 1747721 - RNA, 19 nt, Homo sapiens
  misc_RNA (1)...(19): siRNA sense strand
cuuaagagcugcaacuuca

SEQ ID NO: 1747722 - RNA, 19 nt, Homo sapiens
  misc_RNA (1)...(19): siRNA sense strand
caaauuugcugaggaggau

SEQ ID NO: 1747723 - RNA, 19 nt, Homo sapiens
  misc_RNA (1)...(19): siRNA sense strand
cagaugggccuguucauug

SEQ ID NO: 1747724 - RNA, 19 nt, Homo sapiens
  misc_RNA (1)...(19): siRNA sense strand
gcugucacccucugcaaua

SEQ ID NO: 1747725 - RNA, 19 nt, Homo sapiens
  misc_RNA (1)...(19): siRNA sense strand
gcaguggccuggagaucau

SEQ ID NO: 1747726 - RNA, 19 nt, Homo sapiens
  misc_RNA (1)...(19): siRNA sense strand
gauccucgacuacaucuau

SEQ ID NO: 1747727 - RNA, 19 nt, Homo sapiens
  misc_RNA (1)...(19): siRNA sense strand
cccagagccugacauggua

SEQ ID NO: 1747728 - RNA, 19 nt, Homo sapiens
  misc_RNA (1)...(19): siRNA sense strand
cccaggaggucucuuugaa

SEQ ID NO: 1747729 - RNA, 19 nt, Homo sapiens
  misc_RNA (1)...(19): siRNA sense strand
gaucgagauugugugcaaa

SEQ ID NO: 1747730 - RNA, 19 nt, Homo sapiens
  misc_RNA (1)...(19): siRNA sense strand
cgaucgagauugugugcaa

SEQ ID NO: 1747731 - RNA, 19 nt, Homo sapiens
  misc_RNA (1)...(19): siRNA sense strand
gaacuuccugguccuagau

SEQ ID NO: 1747732 - RNA, 19 nt, Homo sapiens
  misc_RNA (1)...(19): siRNA sense strand
guauggaggcgucccaaga

SEQ ID NO: 1747733 - RNA, 19 nt, Homo sapiens
  misc_RNA (1)...(19): siRNA sense strand
agacaaaugagacgucguu

SEQ ID NO: 1747734 - RNA, 19 nt, Homo sapiens
  misc_RNA (1)...(19): siRNA sense strand
uccuagaugucuucuuuga

SEQ ID NO: 1747735 - RNA, 19 nt, Homo sapiens
  misc_RNA (1)...(19): siRNA sense strand
gggccagcauccucacguu

SEQ ID NO: 1747736 - RNA, 19 nt, Homo sapiens
  misc_RNA (1)...(19): siRNA sense strand
ggagauccucgacuacauc

SEQ ID NO: 1747737 - RNA, 19 nt, Homo sapiens
  misc_RNA (1)...(19): siRNA sense strand
ccgcaacgagaccuacaua

SEQ ID NO: 1747738 - RNA, 19 nt, Homo sapiens
  misc_RNA (1)...(19): siRNA sense strand
gcaacgagaccuacauacg

SEQ ID NO: 1747739 - RNA, 19 nt, Homo sapiens
  misc_RNA (1)...(19): siRNA sense strand
ggaaguacaaccgcaacga

SEQ ID NO: 1747740 - RNA, 19 nt, Homo sapiens
  misc_RNA (1)...(19): siRNA sense strand
ggagaacuuccugguccua

SEQ ID NO: 1747741 - RNA, 19 nt, Homo sapiens
  misc_RNA (1)...(19): siRNA sense strand
gcugugcuggugcugauaa

SEQ ID NO: 1747742 - RNA, 19 nt, Homo sapiens
  misc_RNA (1)...(19): siRNA sense strand
gucacccucugcaauauca

SEQ ID NO: 1747743 - RNA, 19 nt, Homo sapiens
  misc_RNA (1)...(19): siRNA sense strand
gacagaugccgaucgagau

SEQ ID NO: 1747744 - RNA, 19 nt, Homo sapiens
  misc_RNA (1)...(19): siRNA sense strand
aggaguaccugcccaucug

SEQ ID NO: 1747745 - RNA, 19 nt, Homo sapiens
  misc_RNA (1)...(19): siRNA sense strand
agaacuuccugguccuaga

SEQ ID NO: 1747746 - RNA, 19 nt, Homo sapiens
  misc_RNA (1)...(19): siRNA sense strand
guccugggaucgacugaag

SEQ ID NO: 1747747 - RNA, 19 nt, Homo sapiens
  misc_RNA (1)...(19): siRNA sense strand
cgaaacccaaggagaagga

SEQ ID NO: 1747748 - RNA, 19 nt, Homo sapiens
  misc_RNA (1)...(19): siRNA sense strand
gcuacucggccuacagugu

SEQ ID NO: 1747749 - RNA, 19 nt, Homo sapiens
  misc_RNA (1)...(19): siRNA sense strand
gcuuaagagcugcaacuuc

SEQ ID NO: 1747750 - RNA, 19 nt, Homo sapiens
  misc_RNA (1)...(19): siRNA sense strand
acagaugccgaucgagauu

SEQ ID NO: 1747751 - RNA, 19 nt, Homo sapiens
  misc_RNA (1)...(19): siRNA sense strand
ugcuggagauccucgacua

SEQ ID NO: 1747752 - RNA, 19 nt, Homo sapiens
  misc_RNA (1)...(19): siRNA sense strand
agaugggccuguucauugg

SEQ ID NO: 1747753 - RNA, 19 nt, Homo sapiens
  misc_RNA (1)...(19): siRNA sense strand
gaggaguaccugcccaucu

SEQ ID NO: 1747754 - RNA, 19 nt, Homo sapiens
  misc_RNA (1)...(19): siRNA sense strand
ccagcucgccgacaugcuu

SEQ ID NO: 1747755 - RNA, 19 nt, Homo sapiens
  misc_RNA (1)...(19): siRNA sense strand
ccaccuggccaaucugaca

SEQ ID NO: 1747756 - RNA, 19 nt, Homo sapiens
  misc_RNA (1)...(19): siRNA sense strand
cagcucgccgacaugcuua

SEQ ID NO: 1747757 - RNA, 19 nt, Homo sapiens
  misc_RNA (1)...(19): siRNA sense strand
cuacauacgggagaacuuc

SEQ ID NO: 1747758 - RNA, 19 nt, Homo sapiens
  misc_RNA (1)...(19): siRNA sense strand
uaagagcugcaacuucagu

SEQ ID NO: 1747759 - RNA, 19 nt, Homo sapiens
  misc_RNA (1)...(19): siRNA sense strand
cgacugaagcggguaugga

SEQ ID NO: 1747760 - RNA, 19 nt, Homo sapiens
  misc_RNA (1)...(19): siRNA sense strand
ucacguugcuggagauccu

SEQ ID NO: 1747761 - RNA, 19 nt, Homo sapiens
  misc_RNA (1)...(19): siRNA sense strand
gagcagcgagcagccuaug

SEQ ID NO: 1747762 - RNA, 19 nt, Homo sapiens
  misc_RNA (1)...(19): siRNA sense strand
ccgcuugcccugaguuuag

SEQ ID NO: 1747763 - RNA, 19 nt, Homo sapiens
  misc_RNA (1)...(19): siRNA sense strand
gaucgaggagagagacaag

SEQ ID NO: 1747764 - RNA, 19 nt, Homo sapiens
  misc_RNA (1)...(19): siRNA sense strand
gaagccacaaggagacgau

SEQ ID NO: 1747765 - RNA, 19 nt, Homo sapiens
  misc_RNA (1)...(19): siRNA sense strand
agaugccgaucgagauugu

SEQ ID NO: 1747766 - RNA, 19 nt, Homo sapiens
  misc_RNA (1)...(19): siRNA sense strand
agaccuacauacgggagaa

SEQ ID NO: 1747767 - RNA, 19 nt, Homo sapiens
  misc_RNA (1)...(19): siRNA sense strand
ggcaguggccuggagauca

SEQ ID NO: 1747768 - RNA, 19 nt, Homo sapiens
  misc_RNA (1)...(19): siRNA sense strand
ggaaagagaucuccauggu

SEQ ID NO: 1747769 - RNA, 19 nt, Homo sapiens
  misc_RNA (1)...(19): siRNA sense strand
gguccuagaugucuucuuu

SEQ ID NO: 1747770 - RNA, 19 nt, Homo sapiens
  misc_RNA (1)...(19): siRNA sense strand
caacuucucuguggucuau

SEQ ID NO: 1747771 - RNA, 19 nt, Homo sapiens
  misc_RNA (1)...(19): siRNA sense strand
cuuaagagcugcaacuuca

SEQ ID NO: 1747772 - RNA, 19 nt, Homo sapiens
  misc_RNA (1)...(19): siRNA sense strand
caaauuugcugaggaggau

SEQ ID NO: 1747773 - RNA, 19 nt, Homo sapiens
  misc_RNA (1)...(19): siRNA sense strand
cagaugggccuguucauug

SEQ ID NO: 1747774 - RNA, 19 nt, Homo sapiens
  misc_RNA (1)...(19): siRNA sense strand
gcugucacccucugcaaua

SEQ ID NO: 1747775 - RNA, 19 nt, Homo sapiens
  misc_RNA (1)...(19): siRNA sense strand
gcaguggccuggagaucau

SEQ ID NO: 1747776 - RNA, 19 nt, Homo sapiens
  misc_RNA (1)...(19): siRNA sense strand
gauccucgacuacaucuau

SEQ ID NO: 1747777 - RNA, 19 nt, Homo sapiens
  misc_RNA (1)...(19): siRNA sense strand
cccagagccugacauggua

SEQ ID NO: 1747778 - RNA, 19 nt, Homo sapiens
  misc_RNA (1)...(19): siRNA sense strand
cccaggaggucucuuugaa

SEQ ID NO: 1747779 - RNA, 19 nt, Homo sapiens
  misc_RNA (1)...(19): siRNA sense strand
gaucgagauugugugcaaa

SEQ ID NO: 1747780 - RNA, 19 nt, Homo sapiens
  misc_RNA (1)...(19): siRNA sense strand
cgaucgagauugugugcaa

SEQ ID NO: 1747781 - RNA, 19 nt, Homo sapiens
  misc_RNA (1)...(19): siRNA sense strand
gaacuuccugguccuagau

SEQ ID NO: 1747782 - RNA, 19 nt, Homo sapiens
  misc_RNA (1)...(19): siRNA sense strand
guauggaggcgucccaaga

SEQ ID NO: 1747783 - RNA, 19 nt, Homo sapiens
  misc_RNA (1)...(19): siRNA sense strand
agacaaaugagacgucguu

SEQ ID NO: 1747784 - RNA, 19 nt, Homo sapiens
  misc_RNA (1)...(19): siRNA sense strand
uccuagaugucuucuuuga

SEQ ID NO: 1747785 - RNA, 19 nt, Homo sapiens
  misc_RNA (1)...(19): siRNA sense strand
gggccagcauccucacguu

SEQ ID NO: 1747786 - RNA, 19 nt, Homo sapiens
  misc_RNA (1)...(19): siRNA sense strand
ggagauccucgacuacauc

SEQ ID NO: 1747787 - RNA, 19 nt, Homo sapiens
  misc_RNA (1)...(19): siRNA sense strand
ccgcaacgagaccuacaua

SEQ ID NO: 1747788 - RNA, 19 nt, Homo sapiens
  misc_RNA (1)...(19): siRNA sense strand
gcaacgagaccuacauacg

SEQ ID NO: 1747789 - RNA, 19 nt, Homo sapiens
  misc_RNA (1)...(19): siRNA sense strand
ggaaguacaaccgcaacga

SEQ ID NO: 1747790 - RNA, 19 nt, Homo sapiens
  misc_RNA (1)...(19): siRNA sense strand
ggagaacuuccugguccua

SEQ ID NO: 1747791 - RNA, 19 nt, Homo sapiens
  misc_RNA (1)...(19): siRNA sense strand
gcugugcuggugcugauaa

SEQ ID NO: 1747792 - RNA, 19 nt, Homo sapiens
  misc_RNA (1)...(19): siRNA sense strand
gucacccucugcaauauca

SEQ ID NO: 1747793 - RNA, 19 nt, Homo sapiens
  misc_RNA (1)...(19): siRNA sense strand
gacagaugccgaucgagau

SEQ ID NO: 1747794 - RNA, 19 nt, Homo sapiens
  misc_RNA (1)...(19): siRNA sense strand
aggaguaccugcccaucug

SEQ ID NO: 1747795 - RNA, 19 nt, Homo sapiens
  misc_RNA (1)...(19): siRNA sense strand
agaacuuccugguccuaga

SEQ ID NO: 1747796 - RNA, 19 nt, Homo sapiens
  misc_RNA (1)...(19): siRNA sense strand
guccugggaucgacugaag

SEQ ID NO: 1747797 - RNA, 19 nt, Homo sapiens
  misc_RNA (1)...(19): siRNA sense strand
cgaaacccaaggagaagga

SEQ ID NO: 1747798 - RNA, 19 nt, Homo sapiens
  misc_RNA (1)...(19): siRNA sense strand
gcuacucggccuacagugu

SEQ ID NO: 1747799 - RNA, 19 nt, Homo sapiens
  misc_RNA (1)...(19): siRNA sense strand
gcuuaagagcugcaacuuc

SEQ ID NO: 1747800 - RNA, 19 nt, Homo sapiens
  misc_RNA (1)...(19): siRNA sense strand
acagaugccgaucgagauu

SEQ ID NO: 1747801 - RNA, 19 nt, Homo sapiens
  misc_RNA (1)...(19): siRNA sense strand
ugcuggagauccucgacua

SEQ ID NO: 1747802 - RNA, 19 nt, Homo sapiens
  misc_RNA (1)...(19): siRNA sense strand
agaugggccuguucauugg

SEQ ID NO: 1747803 - RNA, 19 nt, Homo sapiens
  misc_RNA (1)...(19): siRNA sense strand
gaggaguaccugcccaucu

SEQ ID NO: 1747804 - RNA, 19 nt, Homo sapiens
  misc_RNA (1)...(19): siRNA sense strand
ccagcucgccgacaugcuu

SEQ ID NO: 1747805 - RNA, 19 nt, Homo sapiens
  misc_RNA (1)...(19): siRNA sense strand
ccaccuggccaaucugaca

SEQ ID NO: 1747806 - RNA, 19 nt, Homo sapiens
  misc_RNA (1)...(19): siRNA sense strand
cagcucgccgacaugcuua

SEQ ID NO: 1747807 - RNA, 19 nt, Homo sapiens
  misc_RNA (1)...(19): siRNA sense strand
cuacauacgggagaacuuc

SEQ ID NO: 1747808 - RNA, 19 nt, Homo sapiens
  misc_RNA (1)...(19): siRNA sense strand
uaagagcugcaacuucagu

SEQ ID NO: 1747809 - RNA, 19 nt, Homo sapiens
  misc_RNA (1)...(19): siRNA sense strand
cgacugaagcggguaugga

SEQ ID NO: 1747810 - RNA, 19 nt, Homo sapiens
  misc_RNA (1)...(19): siRNA sense strand
ucacguugcuggagauccu

SEQ ID NO: 1747811 - RNA, 19 nt, Homo sapiens
  misc_RNA (1)...(19): siRNA sense strand
gagcagcgagcagccuaug

SEQ ID NO: 1747812 - RNA, 19 nt, Homo sapiens
  misc_RNA (1)...(19): siRNA sense strand
ccgcuugcccugaguuuag

SEQ ID NO: 1747813 - RNA, 19 nt, Homo sapiens
  misc_RNA (1)...(19): siRNA sense strand
gaucgaggagagagacaag

SEQ ID NO: 1747814 - RNA, 19 nt, Homo sapiens
  misc_RNA (1)...(19): siRNA sense strand
gaagccacaaggagacgau

SEQ ID NO: 1747815 - RNA, 19 nt, Homo sapiens
  misc_RNA (1)...(19): siRNA sense strand
agaugccgaucgagauugu

SEQ ID NO: 1747816 - RNA, 19 nt, Homo sapiens
  misc_RNA (1)...(19): siRNA sense strand
agaccuacauacgggagaa

SEQ ID NO: 1747817 - RNA, 19 nt, Homo sapiens
  misc_RNA (1)...(19): siRNA sense strand
ggcaguggccuggagauca

SEQ ID NO: 1747818 - RNA, 19 nt, Homo sapiens
  misc_RNA (1)...(19): siRNA sense strand
gaacgucucuaucaagaau

SEQ ID NO: 1747819 - RNA, 19 nt, Homo sapiens
  misc_RNA (1)...(19): siRNA sense strand
gaagauauauacucagcaa

SEQ ID NO: 1747820 - RNA, 19 nt, Homo sapiens
  misc_RNA (1)...(19): siRNA sense strand
gaauugaccucuaugaaag

SEQ ID NO: 1747821 - RNA, 19 nt, Homo sapiens
  misc_RNA (1)...(19): siRNA sense strand
gaagaaaguacuagaagaa

SEQ ID NO: 1747822 - RNA, 19 nt, Homo sapiens
  misc_RNA (1)...(19): siRNA sense strand
ggacauaucagguacauca

SEQ ID NO: 1747823 - RNA, 19 nt, Homo sapiens
  misc_RNA (1)...(19): siRNA sense strand
gaagacaugcugcuuugua

SEQ ID NO: 1747824 - RNA, 19 nt, Homo sapiens
  misc_RNA (1)...(19): siRNA sense strand
agaccucacuauccuauua

SEQ ID NO: 1747825 - RNA, 19 nt, Homo sapiens
  misc_RNA (1)...(19): siRNA sense strand
gaccagagaucguguugga

SEQ ID NO: 1747826 - RNA, 19 nt, Homo sapiens
  misc_RNA (1)...(19): siRNA sense strand
aagcaaggauguagaauug

SEQ ID NO: 1747827 - RNA, 19 nt, Homo sapiens
  misc_RNA (1)...(19): siRNA sense strand
ugaaacagauggagaagau

SEQ ID NO: 1747828 - RNA, 19 nt, Homo sapiens
  misc_RNA (1)...(19): siRNA sense strand
uagcagggccuucaaagua

SEQ ID NO: 1747829 - RNA, 19 nt, Homo sapiens
  misc_RNA (1)...(19): siRNA sense strand
gagaucguguuggacauua

SEQ ID NO: 1747830 - RNA, 19 nt, Homo sapiens
  misc_RNA (1)...(19): siRNA sense strand
gcauggcaguggugaguuu

SEQ ID NO: 1747831 - RNA, 19 nt, Homo sapiens
  misc_RNA (1)...(19): siRNA sense strand
uaauacaccuguucgaaau

SEQ ID NO: 1747832 - RNA, 19 nt, Homo sapiens
  misc_RNA (1)...(19): siRNA sense strand
gugaagacaugcugcuuug

SEQ ID NO: 1747833 - RNA, 19 nt, Homo sapiens
  misc_RNA (1)...(19): siRNA sense strand
ugaagaaaguacuagaaga

SEQ ID NO: 1747834 - RNA, 19 nt, Homo sapiens
  misc_RNA (1)...(19): siRNA sense strand
guucuuggcuucccauuag

SEQ ID NO: 1747835 - RNA, 19 nt, Homo sapiens
  misc_RNA (1)...(19): siRNA sense strand
gaaaguacuagaagaauac

SEQ ID NO: 1747836 - RNA, 19 nt, Homo sapiens
  misc_RNA (1)...(19): siRNA sense strand
cgaaacaucacuauugcua

SEQ ID NO: 1747837 - RNA, 19 nt, Homo sapiens
  misc_RNA (1)...(19): siRNA sense strand
cuacgaaacaucacuauug

SEQ ID NO: 1747838 - RNA, 19 nt, Homo sapiens
  misc_RNA (1)...(19): siRNA sense strand
gaaacaucacuauugcuaa

SEQ ID NO: 1747839 - RNA, 19 nt, Homo sapiens
  misc_RNA (1)...(19): siRNA sense strand
gcagggccuucaaaguaaa

SEQ ID NO: 1747840 - RNA, 19 nt, Homo sapiens
  misc_RNA (1)...(19): siRNA sense strand
gaaagugucgcaucaaacu

SEQ ID NO: 1747841 - RNA, 19 nt, Homo sapiens
  misc_RNA (1)...(19): siRNA sense strand
gauaauacaccuguucgaa

SEQ ID NO: 1747842 - RNA, 19 nt, Homo sapiens
  misc_RNA (1)...(19): siRNA sense strand
ggagcgcaaucgucaguau

SEQ ID NO: 1747843 - RNA, 19 nt, Homo sapiens
  misc_RNA (1)...(19): siRNA sense strand
ucagaggaauauaaagcua

SEQ ID NO: 1747844 - RNA, 19 nt, Homo sapiens
  misc_RNA (1)...(19): siRNA sense strand
uaucgaaagugucgcauca

SEQ ID NO: 1747845 - RNA, 19 nt, Homo sapiens
  misc_RNA (1)...(19): siRNA sense strand
agaauugaccucuaugaaa

SEQ ID NO: 1747846 - RNA, 19 nt, Homo sapiens
  misc_RNA (1)...(19): siRNA sense strand
ggaauauaaagcuauggua

SEQ ID NO: 1747847 - RNA, 19 nt, Homo sapiens
  misc_RNA (1)...(19): siRNA sense strand
aagacaugcugcuuuguaa

SEQ ID NO: 1747848 - RNA, 19 nt, Homo sapiens
  misc_RNA (1)...(19): siRNA sense strand
gacaugcugcuuuguaauu

SEQ ID NO: 1747849 - RNA, 19 nt, Homo sapiens
  misc_RNA (1)...(19): siRNA sense strand
gcaaggauguagaauugac

SEQ ID NO: 1747850 - RNA, 19 nt, Homo sapiens
  misc_RNA (1)...(19): siRNA sense strand
caaacucucuggcuaugca

SEQ ID NO: 1747851 - RNA, 19 nt, Homo sapiens
  misc_RNA (1)...(19): siRNA sense strand
ucgaaagugucgcaucaaa

SEQ ID NO: 1747852 - RNA, 19 nt, Homo sapiens
  misc_RNA (1)...(19): siRNA sense strand
cuggaaagcuagauauugu

SEQ ID NO: 1747853 - RNA, 19 nt, Homo sapiens
  misc_RNA (1)...(19): siRNA sense strand
uggagaagauauauacuca

SEQ ID NO: 1747854 - RNA, 19 nt, Homo sapiens
  misc_RNA (1)...(19): siRNA sense strand
acaugcugcuuuguaauua

SEQ ID NO: 1747855 - RNA, 19 nt, Homo sapiens
  misc_RNA (1)...(19): siRNA sense strand
ucaggaacgucucuaucaa

SEQ ID NO: 1747856 - RNA, 19 nt, Homo sapiens
  misc_RNA (1)...(19): siRNA sense strand
gcaaauacaaagcaaggau

SEQ ID NO: 1747857 - RNA, 19 nt, Homo sapiens
  misc_RNA (1)...(19): siRNA sense strand
aaacaucacuauugcuaac

SEQ ID NO: 1747858 - RNA, 19 nt, Homo sapiens
  misc_RNA (1)...(19): siRNA sense strand
caaguuuccuuuggauaau

SEQ ID NO: 1747859 - RNA, 19 nt, Homo sapiens
  misc_RNA (1)...(19): siRNA sense strand
uuuagucgcucaccagcua

SEQ ID NO: 1747860 - RNA, 19 nt, Homo sapiens
  misc_RNA (1)...(19): siRNA sense strand
aaacagauggagaagauau

SEQ ID NO: 1747861 - RNA, 19 nt, Homo sapiens
  misc_RNA (1)...(19): siRNA sense strand
cuccaaggccucuaugaua

SEQ ID NO: 1747862 - RNA, 19 nt, Homo sapiens
  misc_RNA (1)...(19): siRNA sense strand
gaaacagauggagaagaua

SEQ ID NO: 1747863 - RNA, 19 nt, Homo sapiens
  misc_RNA (1)...(19): siRNA sense strand
cgauggagauggagauuuu

SEQ ID NO: 1747864 - RNA, 19 nt, Homo sapiens
  misc_RNA (1)...(19): siRNA sense strand
ggagaccucacuauccuau

SEQ ID NO: 1747865 - RNA, 19 nt, Homo sapiens
  misc_RNA (1)...(19): siRNA sense strand
uguccugccugcaacagua

SEQ ID NO: 1747866 - RNA, 19 nt, Homo sapiens
  misc_RNA (1)...(19): siRNA sense strand
agcagggccuucaaaguaa

SEQ ID NO: 1747867 - RNA, 19 nt, Homo sapiens
  misc_RNA (1)...(19): siRNA sense strand
aaagcaaggauguagaauu

SEQ ID NO: 1747868 - RNA, 19 nt, Homo sapiens
  misc_RNA (1)...(19): siRNA sense strand
guccaucagaggaauauaa

SEQ ID NO: 1747869 - RNA, 19 nt, Homo sapiens
  misc_RNA (1)...(19): siRNA sense strand
aggaacgucucuaucaaga

SEQ ID NO: 1747870 - RNA, 19 nt, Homo sapiens
  misc_RNA (1)...(19): siRNA sense strand
gcgcuggccuucuggacau

SEQ ID NO: 1747871 - RNA, 19 nt, Homo sapiens
  misc_RNA (1)...(19): siRNA sense strand
agaggaauauaaagcuaug

SEQ ID NO: 1747872 - RNA, 19 nt, Homo sapiens
  misc_RNA (1)...(19): siRNA sense strand
cuugaaccauccaugauug

SEQ ID NO: 1747873 - RNA, 19 nt, Homo sapiens
  misc_RNA (1)...(19): siRNA sense strand
aaaguucagugacaucucu

SEQ ID NO: 1747874 - RNA, 19 nt, Homo sapiens
  misc_RNA (1)...(19): siRNA sense strand
acaaagcaaggauguagaa

SEQ ID NO: 1747875 - RNA, 19 nt, Homo sapiens
  misc_RNA (1)...(19): siRNA sense strand
gauauuguccgcacagaac

SEQ ID NO: 1747876 - RNA, 19 nt, Homo sapiens
  misc_RNA (1)...(19): siRNA sense strand
caucaaacucucuggcuau

SEQ ID NO: 1747877 - RNA, 19 nt, Homo sapiens
  misc_RNA (1)...(19): siRNA sense strand
ucacuauccuauuaugucu

SEQ ID NO: 1747878 - RNA, 19 nt, Homo sapiens
  misc_RNA (1)...(19): siRNA sense strand
caugaagaaaguacuagaa

SEQ ID NO: 1747879 - RNA, 19 nt, Homo sapiens
  misc_RNA (1)...(19): siRNA sense strand
auaauacaccuguucgaaa

SEQ ID NO: 1747880 - RNA, 19 nt, Homo sapiens
  misc_RNA (1)...(19): siRNA sense strand
cagauggagaagauauaua

SEQ ID NO: 1747881 - RNA, 19 nt, Homo sapiens
  misc_RNA (1)...(19): siRNA sense strand
guacuagaagaauacaaga

SEQ ID NO: 1747882 - RNA, 19 nt, Homo sapiens
  misc_RNA (1)...(19): siRNA sense strand
ucacuauugcuaaccauga

SEQ ID NO: 1747883 - RNA, 19 nt, Homo sapiens
  misc_RNA (1)...(19): siRNA sense strand
caucuucugugaucagcau

SEQ ID NO: 1747884 - RNA, 19 nt, Homo sapiens
  misc_RNA (1)...(19): siRNA sense strand
ggaacgucucuaucaagaa

SEQ ID NO: 1747885 - RNA, 19 nt, Homo sapiens
  misc_RNA (1)...(19): siRNA sense strand
uuaccuccaugaagaaagu

SEQ ID NO: 1747886 - RNA, 19 nt, Homo sapiens
  misc_RNA (1)...(19): siRNA sense strand
caugcugcuuuguaauuau

SEQ ID NO: 1747887 - RNA, 19 nt, Homo sapiens
  misc_RNA (1)...(19): siRNA sense strand
cacuauugcuaaccaugaa

SEQ ID NO: 1747888 - RNA, 19 nt, Homo sapiens
  misc_RNA (1)...(19): siRNA sense strand
aacaguacccuuucuggaa

SEQ ID NO: 1747889 - RNA, 19 nt, Homo sapiens
  misc_RNA (1)...(19): siRNA sense strand
gagcagcagcaaguuucua

SEQ ID NO: 1747890 - RNA, 19 nt, Homo sapiens
  misc_RNA (1)...(19): siRNA sense strand
gcuacgaaacaucacuauu

SEQ ID NO: 1747891 - RNA, 19 nt, Homo sapiens
  misc_RNA (1)...(19): siRNA sense strand
gcuccaaggccucuaugau

SEQ ID NO: 1747892 - RNA, 19 nt, Homo sapiens
  misc_RNA (1)...(19): siRNA sense strand
ugccugcucucacaucuuc

SEQ ID NO: 1747893 - RNA, 19 nt, Homo sapiens
  misc_RNA (1)...(19): siRNA sense strand
gcgcaaucgucaguaucaa

SEQ ID NO: 1747894 - RNA, 19 nt, Homo sapiens
  misc_RNA (1)...(19): siRNA sense strand
gcaccugaacccagcaaca

SEQ ID NO: 1747895 - RNA, 19 nt, Homo sapiens
  misc_RNA (1)...(19): siRNA sense strand
uacgaaacaucacuauugc

SEQ ID NO: 1747896 - RNA, 19 nt, Homo sapiens
  misc_RNA (1)...(19): siRNA sense strand
gcaaucgucaguaucaaaa

SEQ ID NO: 1747897 - RNA, 19 nt, Homo sapiens
  misc_RNA (1)...(19): siRNA sense strand
gaacccagcaacagcuuuu

SEQ ID NO: 1747898 - RNA, 19 nt, Homo sapiens
  misc_RNA (1)...(19): siRNA sense strand
cagaggaauauaaagcuau

SEQ ID NO: 1747899 - RNA, 19 nt, Homo sapiens
  misc_RNA (1)...(19): siRNA sense strand
uuagagcagcagcaaguuu

SEQ ID NO: 1747900 - RNA, 19 nt, Homo sapiens
  misc_RNA (1)...(19): siRNA sense strand
caucagaggaauauaaagc

SEQ ID NO: 1747901 - RNA, 19 nt, Homo sapiens
  misc_RNA (1)...(19): siRNA sense strand
uagagcagcagcaaguuuc

SEQ ID NO: 1747902 - RNA, 19 nt, Homo sapiens
  misc_RNA (1)...(19): siRNA sense strand
ugaauuagagcagcagcaa

SEQ ID NO: 1747903 - RNA, 19 nt, Homo sapiens
  misc_RNA (1)...(19): siRNA sense strand
gcgauggagauggagauuu

SEQ ID NO: 1747904 - RNA, 19 nt, Homo sapiens
  misc_RNA (1)...(19): siRNA sense strand
ugugaagacaugcugcuuu

SEQ ID NO: 1747905 - RNA, 19 nt, Homo sapiens
  misc_RNA (1)...(19): siRNA sense strand
cuucuggacauaucaggua

SEQ ID NO: 1747906 - RNA, 19 nt, Homo sapiens
  misc_RNA (1)...(19): siRNA sense strand
ccuugaaccauccaugauu

SEQ ID NO: 1747907 - RNA, 19 nt, Homo sapiens
  misc_RNA (1)...(19): siRNA sense strand
gaccucacuauccuauuau

SEQ ID NO: 1747908 - RNA, 19 nt, Homo sapiens
  misc_RNA (1)...(19): siRNA sense strand
cucuccaagucgugaauua

SEQ ID NO: 1747909 - RNA, 19 nt, Homo sapiens
  misc_RNA (1)...(19): siRNA sense strand
ggauaauacaccuguucga

SEQ ID NO: 1747910 - RNA, 19 nt, Homo sapiens
  misc_RNA (1)...(19): siRNA sense strand
caucaggaacgucucuauc

SEQ ID NO: 1747911 - RNA, 19 nt, Homo sapiens
  misc_RNA (1)...(19): siRNA sense strand
gcacagucugguguucuug

SEQ ID NO: 1747912 - RNA, 19 nt, Homo sapiens
  misc_RNA (1)...(19): siRNA sense strand
agauggagaagauauauac

SEQ ID NO: 1747913 - RNA, 19 nt, Homo sapiens
  misc_RNA (1)...(19): siRNA sense strand
gcugagggccaucugaaac

SEQ ID NO: 1747914 - RNA, 19 nt, Homo sapiens
  misc_RNA (1)...(19): siRNA sense strand
ucagguacaucaggaacgu

SEQ ID NO: 1747915 - RNA, 19 nt, Homo sapiens
  misc_RNA (1)...(19): siRNA sense strand
agauggagauuuucaguuc

SEQ ID NO: 1747916 - RNA, 19 nt, Homo sapiens
  misc_RNA (1)...(19): siRNA sense strand
aaacuuauggagcgcaauc

SEQ ID NO: 1747917 - RNA, 19 nt, Homo sapiens
  misc_RNA (1)...(19): siRNA sense strand
aaauacaaagcaaggaugu

SEQ ID NO: 1747918 - RNA, 19 nt, Homo sapiens
  misc_RNA (1)...(19): siRNA sense strand
gaacgucucuaucaagaau

SEQ ID NO: 1747919 - RNA, 19 nt, Homo sapiens
  misc_RNA (1)...(19): siRNA sense strand
gaagauauauacucagcaa

SEQ ID NO: 1747920 - RNA, 19 nt, Homo sapiens
  misc_RNA (1)...(19): siRNA sense strand
gaauugaccucuaugaaag

SEQ ID NO: 1747921 - RNA, 19 nt, Homo sapiens
  misc_RNA (1)...(19): siRNA sense strand
gaagaaaguacuagaagaa

SEQ ID NO: 1747922 - RNA, 19 nt, Homo sapiens
  misc_RNA (1)...(19): siRNA sense strand
ggacauaucagguacauca

SEQ ID NO: 1747923 - RNA, 19 nt, Homo sapiens
  misc_RNA (1)...(19): siRNA sense strand
gaagacaugcugcuuugua

SEQ ID NO: 1747924 - RNA, 19 nt, Homo sapiens
  misc_RNA (1)...(19): siRNA sense strand
gaccagagaucguguugga

SEQ ID NO: 1747925 - RNA, 19 nt, Homo sapiens
  misc_RNA (1)...(19): siRNA sense strand
aagcaaggauguagaauug

SEQ ID NO: 1747926 - RNA, 19 nt, Homo sapiens
  misc_RNA (1)...(19): siRNA sense strand
ugaaacagauggagaagau

SEQ ID NO: 1747927 - RNA, 19 nt, Homo sapiens
  misc_RNA (1)...(19): siRNA sense strand
uagcagggccuucaaagua

SEQ ID NO: 1747928 - RNA, 19 nt, Homo sapiens
  misc_RNA (1)...(19): siRNA sense strand
gagaucguguuggacauua

SEQ ID NO: 1747929 - RNA, 19 nt, Homo sapiens
  misc_RNA (1)...(19): siRNA sense strand
gcauggcaguggugaguuu

SEQ ID NO: 1747930 - RNA, 19 nt, Homo sapiens
  misc_RNA (1)...(19): siRNA sense strand
uaauacaccuguucgaaau

SEQ ID NO: 1747931 - RNA, 19 nt, Homo sapiens
  misc_RNA (1)...(19): siRNA sense strand
gugaagacaugcugcuuug

SEQ ID NO: 1747932 - RNA, 19 nt, Homo sapiens
  misc_RNA (1)...(19): siRNA sense strand
ugaagaaaguacuagaaga

SEQ ID NO: 1747933 - RNA, 19 nt, Homo sapiens
  misc_RNA (1)...(19): siRNA sense strand
guucuuggcuucccauuag

SEQ ID NO: 1747934 - RNA, 19 nt, Homo sapiens
  misc_RNA (1)...(19): siRNA sense strand
gaaaguacuagaagaauac

SEQ ID NO: 1747935 - RNA, 19 nt, Homo sapiens
  misc_RNA (1)...(19): siRNA sense strand
cgaaacaucacuauugcua

SEQ ID NO: 1747936 - RNA, 19 nt, Homo sapiens
  misc_RNA (1)...(19): siRNA sense strand
cuacgaaacaucacuauug

SEQ ID NO: 1747937 - RNA, 19 nt, Homo sapiens
  misc_RNA (1)...(19): siRNA sense strand
gaaacaucacuauugcuaa

SEQ ID NO: 1747938 - RNA, 19 nt, Homo sapiens
  misc_RNA (1)...(19): siRNA sense strand
gcagggccuucaaaguaaa

SEQ ID NO: 1747939 - RNA, 19 nt, Homo sapiens
  misc_RNA (1)...(19): siRNA sense strand
ggagcgcaaucgucaguau

SEQ ID NO: 1747940 - RNA, 19 nt, Homo sapiens
  misc_RNA (1)...(19): siRNA sense strand
gauaauacaccuguucgaa

SEQ ID NO: 1747941 - RNA, 19 nt, Homo sapiens
  misc_RNA (1)...(19): siRNA sense strand
gaaagugucgcaucaaacu

SEQ ID NO: 1747942 - RNA, 19 nt, Homo sapiens
  misc_RNA (1)...(19): siRNA sense strand
ucagaggaauauaaagcua

SEQ ID NO: 1747943 - RNA, 19 nt, Homo sapiens
  misc_RNA (1)...(19): siRNA sense strand
ggaauauaaagcuauggua

SEQ ID NO: 1747944 - RNA, 19 nt, Homo sapiens
  misc_RNA (1)...(19): siRNA sense strand
uaucgaaagugucgcauca

SEQ ID NO: 1747945 - RNA, 19 nt, Homo sapiens
  misc_RNA (1)...(19): siRNA sense strand
agaauugaccucuaugaaa

SEQ ID NO: 1747946 - RNA, 19 nt, Homo sapiens
  misc_RNA (1)...(19): siRNA sense strand
aagacaugcugcuuuguaa

SEQ ID NO: 1747947 - RNA, 19 nt, Homo sapiens
  misc_RNA (1)...(19): siRNA sense strand
gacaugcugcuuuguaauu

SEQ ID NO: 1747948 - RNA, 19 nt, Homo sapiens
  misc_RNA (1)...(19): siRNA sense strand
caaacucucuggcuaugca

SEQ ID NO: 1747949 - RNA, 19 nt, Homo sapiens
  misc_RNA (1)...(19): siRNA sense strand
gcaaggauguagaauugac

SEQ ID NO: 1747950 - RNA, 19 nt, Homo sapiens
  misc_RNA (1)...(19): siRNA sense strand
cuggaaagcuagauauugu

SEQ ID NO: 1747951 - RNA, 19 nt, Homo sapiens
  misc_RNA (1)...(19): siRNA sense strand
ucgaaagugucgcaucaaa

SEQ ID NO: 1747952 - RNA, 19 nt, Homo sapiens
  misc_RNA (1)...(19): siRNA sense strand
uggagaagauauauacuca

SEQ ID NO: 1747953 - RNA, 19 nt, Homo sapiens
  misc_RNA (1)...(19): siRNA sense strand
acaugcugcuuuguaauua

SEQ ID NO: 1747954 - RNA, 19 nt, Homo sapiens
  misc_RNA (1)...(19): siRNA sense strand
ucaggaacgucucuaucaa

SEQ ID NO: 1747955 - RNA, 19 nt, Homo sapiens
  misc_RNA (1)...(19): siRNA sense strand
gcaaauacaaagcaaggau

SEQ ID NO: 1747956 - RNA, 19 nt, Homo sapiens
  misc_RNA (1)...(19): siRNA sense strand
aaacaucacuauugcuaac

SEQ ID NO: 1747957 - RNA, 19 nt, Homo sapiens
  misc_RNA (1)...(19): siRNA sense strand
caaguuuccuuuggauaau

SEQ ID NO: 1747958 - RNA, 19 nt, Homo sapiens
  misc_RNA (1)...(19): siRNA sense strand
uuuagucgcucaccagcua

SEQ ID NO: 1747959 - RNA, 19 nt, Homo sapiens
  misc_RNA (1)...(19): siRNA sense strand
aaacagauggagaagauau

SEQ ID NO: 1747960 - RNA, 19 nt, Homo sapiens
  misc_RNA (1)...(19): siRNA sense strand
cuccaaggccucuaugaua

SEQ ID NO: 1747961 - RNA, 19 nt, Homo sapiens
  misc_RNA (1)...(19): siRNA sense strand
gaaacagauggagaagaua

SEQ ID NO: 1747962 - RNA, 19 nt, Homo sapiens
  misc_RNA (1)...(19): siRNA sense strand
cgauggagauggagauuuu

SEQ ID NO: 1747963 - RNA, 19 nt, Homo sapiens
  misc_RNA (1)...(19): siRNA sense strand
uguccugccugcaacagua

SEQ ID NO: 1747964 - RNA, 19 nt, Homo sapiens
  misc_RNA (1)...(19): siRNA sense strand
agcagggccuucaaaguaa

SEQ ID NO: 1747965 - RNA, 19 nt, Homo sapiens
  misc_RNA (1)...(19): siRNA sense strand
aaagcaaggauguagaauu

SEQ ID NO: 1747966 - RNA, 19 nt, Homo sapiens
  misc_RNA (1)...(19): siRNA sense strand
guccaucagaggaauauaa

SEQ ID NO: 1747967 - RNA, 19 nt, Homo sapiens
  misc_RNA (1)...(19): siRNA sense strand
aggaacgucucuaucaaga

SEQ ID NO: 1747968 - RNA, 19 nt, Homo sapiens
  misc_RNA (1)...(19): siRNA sense strand
gcgcuggccuucuggacau

SEQ ID NO: 1747969 - RNA, 19 nt, Homo sapiens
  misc_RNA (1)...(19): siRNA sense strand
agaggaauauaaagcuaug

SEQ ID NO: 1747970 - RNA, 19 nt, Homo sapiens
  misc_RNA (1)...(19): siRNA sense strand
cuugaaccauccaugauug

SEQ ID NO: 1747971 - RNA, 19 nt, Homo sapiens
  misc_RNA (1)...(19): siRNA sense strand
aaaguucagugacaucucu

SEQ ID NO: 1747972 - RNA, 19 nt, Homo sapiens
  misc_RNA (1)...(19): siRNA sense strand
acaaagcaaggauguagaa

SEQ ID NO: 1747973 - RNA, 19 nt, Homo sapiens
  misc_RNA (1)...(19): siRNA sense strand
gauauuguccgcacagaac

SEQ ID NO: 1747974 - RNA, 19 nt, Homo sapiens
  misc_RNA (1)...(19): siRNA sense strand
caucaaacucucuggcuau

SEQ ID NO: 1747975 - RNA, 19 nt, Homo sapiens
  misc_RNA (1)...(19): siRNA sense strand
caugaagaaaguacuagaa

SEQ ID NO: 1747976 - RNA, 19 nt, Homo sapiens
  misc_RNA (1)...(19): siRNA sense strand
auaauacaccuguucgaaa

SEQ ID NO: 1747977 - RNA, 19 nt, Homo sapiens
  misc_RNA (1)...(19): siRNA sense strand
cagauggagaagauauaua

SEQ ID NO: 1747978 - RNA, 19 nt, Homo sapiens
  misc_RNA (1)...(19): siRNA sense strand
guacuagaagaauacaaga

SEQ ID NO: 1747979 - RNA, 19 nt, Homo sapiens
  misc_RNA (1)...(19): siRNA sense strand
caucuucugugaucagcau

SEQ ID NO: 1747980 - RNA, 19 nt, Homo sapiens
  misc_RNA (1)...(19): siRNA sense strand
ucacuauugcuaaccauga

SEQ ID NO: 1747981 - RNA, 19 nt, Homo sapiens
  misc_RNA (1)...(19): siRNA sense strand
ggaacgucucuaucaagaa

SEQ ID NO: 1747982 - RNA, 19 nt, Homo sapiens
  misc_RNA (1)...(19): siRNA sense strand
caugcugcuuuguaauuau

SEQ ID NO: 1747983 - RNA, 19 nt, Homo sapiens
  misc_RNA (1)...(19): siRNA sense strand
cacuauugcuaaccaugaa

SEQ ID NO: 1747984 - RNA, 19 nt, Homo sapiens
  misc_RNA (1)...(19): siRNA sense strand
uuaccuccaugaagaaagu

SEQ ID NO: 1747985 - RNA, 19 nt, Homo sapiens
  misc_RNA (1)...(19): siRNA sense strand
ugccugcucucacaucuuc

SEQ ID NO: 1747986 - RNA, 19 nt, Homo sapiens
  misc_RNA (1)...(19): siRNA sense strand
gagcagcagcaaguuucua

SEQ ID NO: 1747987 - RNA, 19 nt, Homo sapiens
  misc_RNA (1)...(19): siRNA sense strand
aacaguacccuuucuggaa

SEQ ID NO: 1747988 - RNA, 19 nt, Homo sapiens
  misc_RNA (1)...(19): siRNA sense strand
gcuacgaaacaucacuauu

SEQ ID NO: 1747989 - RNA, 19 nt, Homo sapiens
  misc_RNA (1)...(19): siRNA sense strand
gcuccaaggccucuaugau

SEQ ID NO: 1747990 - RNA, 19 nt, Homo sapiens
  misc_RNA (1)...(19): siRNA sense strand
gcgcaaucgucaguaucaa

SEQ ID NO: 1747991 - RNA, 19 nt, Homo sapiens
  misc_RNA (1)...(19): siRNA sense strand
gcaccugaacccagcaaca

SEQ ID NO: 1747992 - RNA, 19 nt, Homo sapiens
  misc_RNA (1)...(19): siRNA sense strand
uacgaaacaucacuauugc

SEQ ID NO: 1747993 - RNA, 19 nt, Homo sapiens
  misc_RNA (1)...(19): siRNA sense strand
gcaaucgucaguaucaaaa

SEQ ID NO: 1747994 - RNA, 19 nt, Homo sapiens
  misc_RNA (1)...(19): siRNA sense strand
gaacccagcaacagcuuuu

SEQ ID NO: 1747995 - RNA, 19 nt, Homo sapiens
  misc_RNA (1)...(19): siRNA sense strand
cagaggaauauaaagcuau

SEQ ID NO: 1747996 - RNA, 19 nt, Homo sapiens
  misc_RNA (1)...(19): siRNA sense strand
uuagagcagcagcaaguuu

SEQ ID NO: 1747997 - RNA, 19 nt, Homo sapiens
  misc_RNA (1)...(19): siRNA sense strand
caucagaggaauauaaagc

SEQ ID NO: 1747998 - RNA, 19 nt, Homo sapiens
  misc_RNA (1)...(19): siRNA sense strand
uagagcagcagcaaguuuc

SEQ ID NO: 1747999 - RNA, 19 nt, Homo sapiens
  misc_RNA (1)...(19): siRNA sense strand
ugaauuagagcagcagcaa

SEQ ID NO: 1748000 - RNA, 19 nt, Homo sapiens
  misc_RNA (1)...(19): siRNA sense strand
gcgauggagauggagauuu

SEQ ID NO: 1748001 - RNA, 19 nt, Homo sapiens
  misc_RNA (1)...(19): siRNA sense strand
ugugaagacaugcugcuuu

SEQ ID NO: 1748002 - RNA, 19 nt, Homo sapiens
  misc_RNA (1)...(19): siRNA sense strand
cuucuggacauaucaggua

SEQ ID NO: 1748003 - RNA, 19 nt, Homo sapiens
  misc_RNA (1)...(19): siRNA sense strand
ccuugaaccauccaugauu

SEQ ID NO: 1748004 - RNA, 19 nt, Homo sapiens
  misc_RNA (1)...(19): siRNA sense strand
cucuccaagucgugaauua

SEQ ID NO: 1748005 - RNA, 19 nt, Homo sapiens
  misc_RNA (1)...(19): siRNA sense strand
ggauaauacaccuguucga

SEQ ID NO: 1748006 - RNA, 19 nt, Homo sapiens
  misc_RNA (1)...(19): siRNA sense strand
caucaggaacgucucuauc

SEQ ID NO: 1748007 - RNA, 19 nt, Homo sapiens
  misc_RNA (1)...(19): siRNA sense strand
gcacagucugguguucuug

SEQ ID NO: 1748008 - RNA, 19 nt, Homo sapiens
  misc_RNA (1)...(19): siRNA sense strand
agauggagaagauauauac

SEQ ID NO: 1748009 - RNA, 19 nt, Homo sapiens
  misc_RNA (1)...(19): siRNA sense strand
gcugagggccaucugaaac

SEQ ID NO: 1748010 - RNA, 19 nt, Homo sapiens
  misc_RNA (1)...(19): siRNA sense strand
ucagguacaucaggaacgu

SEQ ID NO: 1748011 - RNA, 19 nt, Homo sapiens
  misc_RNA (1)...(19): siRNA sense strand
agauggagauuuucaguuc

SEQ ID NO: 1748012 - RNA, 19 nt, Homo sapiens
  misc_RNA (1)...(19): siRNA sense strand
aaacuuauggagcgcaauc

SEQ ID NO: 1748013 - RNA, 19 nt, Homo sapiens
  misc_RNA (1)...(19): siRNA sense strand
aaauacaaagcaaggaugu

SEQ ID NO: 1748014 - RNA, 19 nt, Homo sapiens
  misc_RNA (1)...(19): siRNA sense strand
gaacgucucuaucaagaau

SEQ ID NO: 1748015 - RNA, 19 nt, Homo sapiens
  misc_RNA (1)...(19): siRNA sense strand
gaagauauauacucagcaa

SEQ ID NO: 1748016 - RNA, 19 nt, Homo sapiens
  misc_RNA (1)...(19): siRNA sense strand
gaauugaccucuaugaaag

SEQ ID NO: 1748017 - RNA, 19 nt, Homo sapiens
  misc_RNA (1)...(19): siRNA sense strand
gaagaaaguacuagaagaa

SEQ ID NO: 1748018 - RNA, 19 nt, Homo sapiens
  misc_RNA (1)...(19): siRNA sense strand
ggacauaucagguacauca

SEQ ID NO: 1748019 - RNA, 19 nt, Homo sapiens
  misc_RNA (1)...(19): siRNA sense strand
gaagacaugcugcuuugua

SEQ ID NO: 1748020 - RNA, 19 nt, Homo sapiens
  misc_RNA (1)...(19): siRNA sense strand
gaccagagaucguguugga

SEQ ID NO: 1748021 - RNA, 19 nt, Homo sapiens
  misc_RNA (1)...(19): siRNA sense strand
aagcaaggauguagaauug

SEQ ID NO: 1748022 - RNA, 19 nt, Homo sapiens
  misc_RNA (1)...(19): siRNA sense strand
ugaaacagauggagaagau

SEQ ID NO: 1748023 - RNA, 19 nt, Homo sapiens
  misc_RNA (1)...(19): siRNA sense strand
uagcagggccuucaaagua

SEQ ID NO: 1748024 - RNA, 19 nt, Homo sapiens
  misc_RNA (1)...(19): siRNA sense strand
gagaucguguuggacauua

SEQ ID NO: 1748025 - RNA, 19 nt, Homo sapiens
  misc_RNA (1)...(19): siRNA sense strand
gcauggcaguggugaguuu

SEQ ID NO: 1748026 - RNA, 19 nt, Homo sapiens
  misc_RNA (1)...(19): siRNA sense strand
uaauacaccuguucgaaau

SEQ ID NO: 1748027 - RNA, 19 nt, Homo sapiens
  misc_RNA (1)...(19): siRNA sense strand
gugaagacaugcugcuuug

SEQ ID NO: 1748028 - RNA, 19 nt, Homo sapiens
  misc_RNA (1)...(19): siRNA sense strand
ugaagaaaguacuagaaga

SEQ ID NO: 1748029 - RNA, 19 nt, Homo sapiens
  misc_RNA (1)...(19): siRNA sense strand
guucuuggcuucccauuag

SEQ ID NO: 1748030 - RNA, 19 nt, Homo sapiens
  misc_RNA (1)...(19): siRNA sense strand
gaaaguacuagaagaauac

SEQ ID NO: 1748031 - RNA, 19 nt, Homo sapiens
  misc_RNA (1)...(19): siRNA sense strand
cgaaacaucacuauugcua

SEQ ID NO: 1748032 - RNA, 19 nt, Homo sapiens
  misc_RNA (1)...(19): siRNA sense strand
cuacgaaacaucacuauug

SEQ ID NO: 1748033 - RNA, 19 nt, Homo sapiens
  misc_RNA (1)...(19): siRNA sense strand
gaaacaucacuauugcuaa

SEQ ID NO: 1748034 - RNA, 19 nt, Homo sapiens
  misc_RNA (1)...(19): siRNA sense strand
gcagggccuucaaaguaaa

SEQ ID NO: 1748035 - RNA, 19 nt, Homo sapiens
  misc_RNA (1)...(19): siRNA sense strand
ggagcgcaaucgucaguau

SEQ ID NO: 1748036 - RNA, 19 nt, Homo sapiens
  misc_RNA (1)...(19): siRNA sense strand
gauaauacaccuguucgaa

SEQ ID NO: 1748037 - RNA, 19 nt, Homo sapiens
  misc_RNA (1)...(19): siRNA sense strand
gaaagugucgcaucaaacu

SEQ ID NO: 1748038 - RNA, 19 nt, Homo sapiens
  misc_RNA (1)...(19): siRNA sense strand
ucagaggaauauaaagcua

SEQ ID NO: 1748039 - RNA, 19 nt, Homo sapiens
  misc_RNA (1)...(19): siRNA sense strand
ggaauauaaagcuauggua

SEQ ID NO: 1748040 - RNA, 19 nt, Homo sapiens
  misc_RNA (1)...(19): siRNA sense strand
uaucgaaagugucgcauca

SEQ ID NO: 1748041 - RNA, 19 nt, Homo sapiens
  misc_RNA (1)...(19): siRNA sense strand
agaauugaccucuaugaaa

SEQ ID NO: 1748042 - RNA, 19 nt, Homo sapiens
  misc_RNA (1)...(19): siRNA sense strand
aagacaugcugcuuuguaa

SEQ ID NO: 1748043 - RNA, 19 nt, Homo sapiens
  misc_RNA (1)...(19): siRNA sense strand
gacaugcugcuuuguaauu

SEQ ID NO: 1748044 - RNA, 19 nt, Homo sapiens
  misc_RNA (1)...(19): siRNA sense strand
caaacucucuggcuaugca

SEQ ID NO: 1748045 - RNA, 19 nt, Homo sapiens
  misc_RNA (1)...(19): siRNA sense strand
gcaaggauguagaauugac

SEQ ID NO: 1748046 - RNA, 19 nt, Homo sapiens
  misc_RNA (1)...(19): siRNA sense strand
cuggaaagcuagauauugu

SEQ ID NO: 1748047 - RNA, 19 nt, Homo sapiens
  misc_RNA (1)...(19): siRNA sense strand
ucgaaagugucgcaucaaa

SEQ ID NO: 1748048 - RNA, 19 nt, Homo sapiens
  misc_RNA (1)...(19): siRNA sense strand
uggagaagauauauacuca

SEQ ID NO: 1748049 - RNA, 19 nt, Homo sapiens
  misc_RNA (1)...(19): siRNA sense strand
acaugcugcuuuguaauua

SEQ ID NO: 1748050 - RNA, 19 nt, Homo sapiens
  misc_RNA (1)...(19): siRNA sense strand
ucaggaacgucucuaucaa

SEQ ID NO: 1748051 - RNA, 19 nt, Homo sapiens
  misc_RNA (1)...(19): siRNA sense strand
gcaaauacaaagcaaggau

SEQ ID NO: 1748052 - RNA, 19 nt, Homo sapiens
  misc_RNA (1)...(19): siRNA sense strand
aaacaucacuauugcuaac

SEQ ID NO: 1748053 - RNA, 19 nt, Homo sapiens
  misc_RNA (1)...(19): siRNA sense strand
caaguuuccuuuggauaau

SEQ ID NO: 1748054 - RNA, 19 nt, Homo sapiens
  misc_RNA (1)...(19): siRNA sense strand
uuuagucgcucaccagcua

SEQ ID NO: 1748055 - RNA, 19 nt, Homo sapiens
  misc_RNA (1)...(19): siRNA sense strand
aaacagauggagaagauau

SEQ ID NO: 1748056 - RNA, 19 nt, Homo sapiens
  misc_RNA (1)...(19): siRNA sense strand
cuccaaggccucuaugaua

SEQ ID NO: 1748057 - RNA, 19 nt, Homo sapiens
  misc_RNA (1)...(19): siRNA sense strand
gaaacagauggagaagaua

SEQ ID NO: 1748058 - RNA, 19 nt, Homo sapiens
  misc_RNA (1)...(19): siRNA sense strand
cgauggagauggagauuuu

SEQ ID NO: 1748059 - RNA, 19 nt, Homo sapiens
  misc_RNA (1)...(19): siRNA sense strand
uguccugccugcaacagua

SEQ ID NO: 1748060 - RNA, 19 nt, Homo sapiens
  misc_RNA (1)...(19): siRNA sense strand
agcagggccuucaaaguaa

SEQ ID NO: 1748061 - RNA, 19 nt, Homo sapiens
  misc_RNA (1)...(19): siRNA sense strand
aaagcaaggauguagaauu

SEQ ID NO: 1748062 - RNA, 19 nt, Homo sapiens
  misc_RNA (1)...(19): siRNA sense strand
guccaucagaggaauauaa

SEQ ID NO: 1748063 - RNA, 19 nt, Homo sapiens
  misc_RNA (1)...(19): siRNA sense strand
aggaacgucucuaucaaga

SEQ ID NO: 1748064 - RNA, 19 nt, Homo sapiens
  misc_RNA (1)...(19): siRNA sense strand
gcgcuggccuucuggacau

SEQ ID NO: 1748065 - RNA, 19 nt, Homo sapiens
  misc_RNA (1)...(19): siRNA sense strand
agaggaauauaaagcuaug

SEQ ID NO: 1748066 - RNA, 19 nt, Homo sapiens
  misc_RNA (1)...(19): siRNA sense strand
cuugaaccauccaugauug

SEQ ID NO: 1748067 - RNA, 19 nt, Homo sapiens
  misc_RNA (1)...(19): siRNA sense strand
aaaguucagugacaucucu

SEQ ID NO: 1748068 - RNA, 19 nt, Homo sapiens
  misc_RNA (1)...(19): siRNA sense strand
acaaagcaaggauguagaa

SEQ ID NO: 1748069 - RNA, 19 nt, Homo sapiens
  misc_RNA (1)...(19): siRNA sense strand
gauauuguccgcacagaac

SEQ ID NO: 1748070 - RNA, 19 nt, Homo sapiens
  misc_RNA (1)...(19): siRNA sense strand
caucaaacucucuggcuau

SEQ ID NO: 1748071 - RNA, 19 nt, Homo sapiens
  misc_RNA (1)...(19): siRNA sense strand
caugaagaaaguacuagaa

SEQ ID NO: 1748072 - RNA, 19 nt, Homo sapiens
  misc_RNA (1)...(19): siRNA sense strand
auaauacaccuguucgaaa

SEQ ID NO: 1748073 - RNA, 19 nt, Homo sapiens
  misc_RNA (1)...(19): siRNA sense strand
cagauggagaagauauaua

SEQ ID NO: 1748074 - RNA, 19 nt, Homo sapiens
  misc_RNA (1)...(19): siRNA sense strand
guacuagaagaauacaaga

SEQ ID NO: 1748075 - RNA, 19 nt, Homo sapiens
  misc_RNA (1)...(19): siRNA sense strand
caucuucugugaucagcau

SEQ ID NO: 1748076 - RNA, 19 nt, Homo sapiens
  misc_RNA (1)...(19): siRNA sense strand
ucacuauugcuaaccauga

SEQ ID NO: 1748077 - RNA, 19 nt, Homo sapiens
  misc_RNA (1)...(19): siRNA sense strand
ggaacgucucuaucaagaa

SEQ ID NO: 1748078 - RNA, 19 nt, Homo sapiens
  misc_RNA (1)...(19): siRNA sense strand
caugcugcuuuguaauuau

SEQ ID NO: 1748079 - RNA, 19 nt, Homo sapiens
  misc_RNA (1)...(19): siRNA sense strand
cacuauugcuaaccaugaa

SEQ ID NO: 1748080 - RNA, 19 nt, Homo sapiens
  misc_RNA (1)...(19): siRNA sense strand
uuaccuccaugaagaaagu

SEQ ID NO: 1748081 - RNA, 19 nt, Homo sapiens
  misc_RNA (1)...(19): siRNA sense strand
ugccugcucucacaucuuc

SEQ ID NO: 1748082 - RNA, 19 nt, Homo sapiens
  misc_RNA (1)...(19): siRNA sense strand
gagcagcagcaaguuucua

SEQ ID NO: 1748083 - RNA, 19 nt, Homo sapiens
  misc_RNA (1)...(19): siRNA sense strand
aacaguacccuuucuggaa

SEQ ID NO: 1748084 - RNA, 19 nt, Homo sapiens
  misc_RNA (1)...(19): siRNA sense strand
gcuacgaaacaucacuauu

SEQ ID NO: 1748085 - RNA, 19 nt, Homo sapiens
  misc_RNA (1)...(19): siRNA sense strand
gcuccaaggccucuaugau

SEQ ID NO: 1748086 - RNA, 19 nt, Homo sapiens
  misc_RNA (1)...(19): siRNA sense strand
gcgcaaucgucaguaucaa

SEQ ID NO: 1748087 - RNA, 19 nt, Homo sapiens
  misc_RNA (1)...(19): siRNA sense strand
gcaccugaacccagcaaca

SEQ ID NO: 1748088 - RNA, 19 nt, Homo sapiens
  misc_RNA (1)...(19): siRNA sense strand
uacgaaacaucacuauugc

SEQ ID NO: 1748089 - RNA, 19 nt, Homo sapiens
  misc_RNA (1)...(19): siRNA sense strand
gcaaucgucaguaucaaaa

SEQ ID NO: 1748090 - RNA, 19 nt, Homo sapiens
  misc_RNA (1)...(19): siRNA sense strand
gaacccagcaacagcuuuu

SEQ ID NO: 1748091 - RNA, 19 nt, Homo sapiens
  misc_RNA (1)...(19): siRNA sense strand
cagaggaauauaaagcuau

SEQ ID NO: 1748092 - RNA, 19 nt, Homo sapiens
  misc_RNA (1)...(19): siRNA sense strand
uuagagcagcagcaaguuu

SEQ ID NO: 1748093 - RNA, 19 nt, Homo sapiens
  misc_RNA (1)...(19): siRNA sense strand
caucagaggaauauaaagc

SEQ ID NO: 1748094 - RNA, 19 nt, Homo sapiens
  misc_RNA (1)...(19): siRNA sense strand
uagagcagcagcaaguuuc

SEQ ID NO: 1748095 - RNA, 19 nt, Homo sapiens
  misc_RNA (1)...(19): siRNA sense strand
ugaauuagagcagcagcaa

SEQ ID NO: 1748096 - RNA, 19 nt, Homo sapiens
  misc_RNA (1)...(19): siRNA sense strand
gcgauggagauggagauuu

SEQ ID NO: 1748097 - RNA, 19 nt, Homo sapiens
  misc_RNA (1)...(19): siRNA sense strand
ugugaagacaugcugcuuu

SEQ ID NO: 1748098 - RNA, 19 nt, Homo sapiens
  misc_RNA (1)...(19): siRNA sense strand
cuucuggacauaucaggua

SEQ ID NO: 1748099 - RNA, 19 nt, Homo sapiens
  misc_RNA (1)...(19): siRNA sense strand
ccuugaaccauccaugauu

SEQ ID NO: 1748100 - RNA, 19 nt, Homo sapiens
  misc_RNA (1)...(19): siRNA sense strand
cucuccaagucgugaauua

SEQ ID NO: 1748101 - RNA, 19 nt, Homo sapiens
  misc_RNA (1)...(19): siRNA sense strand
ggauaauacaccuguucga

SEQ ID NO: 1748102 - RNA, 19 nt, Homo sapiens
  misc_RNA (1)...(19): siRNA sense strand
caucaggaacgucucuauc

SEQ ID NO: 1748103 - RNA, 19 nt, Homo sapiens
  misc_RNA (1)...(19): siRNA sense strand
gcacagucugguguucuug

SEQ ID NO: 1748104 - RNA, 19 nt, Homo sapiens
  misc_RNA (1)...(19): siRNA sense strand
agauggagaagauauauac

SEQ ID NO: 1748105 - RNA, 19 nt, Homo sapiens
  misc_RNA (1)...(19): siRNA sense strand
gcugagggccaucugaaac

SEQ ID NO: 1748106 - RNA, 19 nt, Homo sapiens
  misc_RNA (1)...(19): siRNA sense strand
ucagguacaucaggaacgu

SEQ ID NO: 1748107 - RNA, 19 nt, Homo sapiens
  misc_RNA (1)...(19): siRNA sense strand
agauggagauuuucaguuc

SEQ ID NO: 1748108 - RNA, 19 nt, Homo sapiens
  misc_RNA (1)...(19): siRNA sense strand
aaacuuauggagcgcaauc

SEQ ID NO: 1748109 - RNA, 19 nt, Homo sapiens
  misc_RNA (1)...(19): siRNA sense strand
aaauacaaagcaaggaugu

SEQ ID NO: 1748110 - RNA, 19 nt, Homo sapiens
  misc_RNA (1)...(19): siRNA sense strand
gaacgucucuaucaagaau

SEQ ID NO: 1748111 - RNA, 19 nt, Homo sapiens
  misc_RNA (1)...(19): siRNA sense strand
gaagauauauacucagcaa

SEQ ID NO: 1748112 - RNA, 19 nt, Homo sapiens
  misc_RNA (1)...(19): siRNA sense strand
gaauugaccucuaugaaag

SEQ ID NO: 1748113 - RNA, 19 nt, Homo sapiens
  misc_RNA (1)...(19): siRNA sense strand
gaagaaaguacuagaagaa

SEQ ID NO: 1748114 - RNA, 19 nt, Homo sapiens
  misc_RNA (1)...(19): siRNA sense strand
ggacauaucagguacauca

SEQ ID NO: 1748115 - RNA, 19 nt, Homo sapiens
  misc_RNA (1)...(19): siRNA sense strand
gaagacaugcugcuuugua

SEQ ID NO: 1748116 - RNA, 19 nt, Homo sapiens
  misc_RNA (1)...(19): siRNA sense strand
gaccagagaucguguugga

SEQ ID NO: 1748117 - RNA, 19 nt, Homo sapiens
  misc_RNA (1)...(19): siRNA sense strand
aagcaaggauguagaauug

SEQ ID NO: 1748118 - RNA, 19 nt, Homo sapiens
  misc_RNA (1)...(19): siRNA sense strand
ugaaacagauggagaagau

SEQ ID NO: 1748119 - RNA, 19 nt, Homo sapiens
  misc_RNA (1)...(19): siRNA sense strand
uagcagggccuucaaagua

SEQ ID NO: 1748120 - RNA, 19 nt, Homo sapiens
  misc_RNA (1)...(19): siRNA sense strand
gagaucguguuggacauua

SEQ ID NO: 1748121 - RNA, 19 nt, Homo sapiens
  misc_RNA (1)...(19): siRNA sense strand
gcauggcaguggugaguuu

SEQ ID NO: 1748122 - RNA, 19 nt, Homo sapiens
  misc_RNA (1)...(19): siRNA sense strand
uaauacaccuguucgaaau

SEQ ID NO: 1748123 - RNA, 19 nt, Homo sapiens
  misc_RNA (1)...(19): siRNA sense strand
gugaagacaugcugcuuug

SEQ ID NO: 1748124 - RNA, 19 nt, Homo sapiens
  misc_RNA (1)...(19): siRNA sense strand
ugaagaaaguacuagaaga

SEQ ID NO: 1748125 - RNA, 19 nt, Homo sapiens
  misc_RNA (1)...(19): siRNA sense strand
guucuuggcuucccauuag

SEQ ID NO: 1748126 - RNA, 19 nt, Homo sapiens
  misc_RNA (1)...(19): siRNA sense strand
gaaaguacuagaagaauac

SEQ ID NO: 1748127 - RNA, 19 nt, Homo sapiens
  misc_RNA (1)...(19): siRNA sense strand
cgaaacaucacuauugcua

SEQ ID NO: 1748128 - RNA, 19 nt, Homo sapiens
  misc_RNA (1)...(19): siRNA sense strand
cuacgaaacaucacuauug

SEQ ID NO: 1748129 - RNA, 19 nt, Homo sapiens
  misc_RNA (1)...(19): siRNA sense strand
gaaacaucacuauugcuaa

SEQ ID NO: 1748130 - RNA, 19 nt, Homo sapiens
  misc_RNA (1)...(19): siRNA sense strand
gcagggccuucaaaguaaa

SEQ ID NO: 1748131 - RNA, 19 nt, Homo sapiens
  misc_RNA (1)...(19): siRNA sense strand
ggagcgcaaucgucaguau

SEQ ID NO: 1748132 - RNA, 19 nt, Homo sapiens
  misc_RNA (1)...(19): siRNA sense strand
gauaauacaccuguucgaa

SEQ ID NO: 1748133 - RNA, 19 nt, Homo sapiens
  misc_RNA (1)...(19): siRNA sense strand
gaaagugucgcaucaaacu

SEQ ID NO: 1748134 - RNA, 19 nt, Homo sapiens
  misc_RNA (1)...(19): siRNA sense strand
ucagaggaauauaaagcua

SEQ ID NO: 1748135 - RNA, 19 nt, Homo sapiens
  misc_RNA (1)...(19): siRNA sense strand
ggaauauaaagcuauggua

SEQ ID NO: 1748136 - RNA, 19 nt, Homo sapiens
  misc_RNA (1)...(19): siRNA sense strand
uaucgaaagugucgcauca

SEQ ID NO: 1748137 - RNA, 19 nt, Homo sapiens
  misc_RNA (1)...(19): siRNA sense strand
agaauugaccucuaugaaa

SEQ ID NO: 1748138 - RNA, 19 nt, Homo sapiens
  misc_RNA (1)...(19): siRNA sense strand
aagacaugcugcuuuguaa

SEQ ID NO: 1748139 - RNA, 19 nt, Homo sapiens
  misc_RNA (1)...(19): siRNA sense strand
gacaugcugcuuuguaauu

SEQ ID NO: 1748140 - RNA, 19 nt, Homo sapiens
  misc_RNA (1)...(19): siRNA sense strand
caaacucucuggcuaugca

SEQ ID NO: 1748141 - RNA, 19 nt, Homo sapiens
  misc_RNA (1)...(19): siRNA sense strand
gcaaggauguagaauugac

SEQ ID NO: 1748142 - RNA, 19 nt, Homo sapiens
  misc_RNA (1)...(19): siRNA sense strand
cuggaaagcuagauauugu

SEQ ID NO: 1748143 - RNA, 19 nt, Homo sapiens
  misc_RNA (1)...(19): siRNA sense strand
ucgaaagugucgcaucaaa

SEQ ID NO: 1748144 - RNA, 19 nt, Homo sapiens
  misc_RNA (1)...(19): siRNA sense strand
uggagaagauauauacuca

SEQ ID NO: 1748145 - RNA, 19 nt, Homo sapiens
  misc_RNA (1)...(19): siRNA sense strand
acaugcugcuuuguaauua

SEQ ID NO: 1748146 - RNA, 19 nt, Homo sapiens
  misc_RNA (1)...(19): siRNA sense strand
ucaggaacgucucuaucaa

SEQ ID NO: 1748147 - RNA, 19 nt, Homo sapiens
  misc_RNA (1)...(19): siRNA sense strand
gcaaauacaaagcaaggau

SEQ ID NO: 1748148 - RNA, 19 nt, Homo sapiens
  misc_RNA (1)...(19): siRNA sense strand
aaacaucacuauugcuaac

SEQ ID NO: 1748149 - RNA, 19 nt, Homo sapiens
  misc_RNA (1)...(19): siRNA sense strand
caaguuuccuuuggauaau

SEQ ID NO: 1748150 - RNA, 19 nt, Homo sapiens
  misc_RNA (1)...(19): siRNA sense strand
uuuagucgcucaccagcua

SEQ ID NO: 1748151 - RNA, 19 nt, Homo sapiens
  misc_RNA (1)...(19): siRNA sense strand
aaacagauggagaagauau

SEQ ID NO: 1748152 - RNA, 19 nt, Homo sapiens
  misc_RNA (1)...(19): siRNA sense strand
cuccaaggccucuaugaua

SEQ ID NO: 1748153 - RNA, 19 nt, Homo sapiens
  misc_RNA (1)...(19): siRNA sense strand
gaaacagauggagaagaua

SEQ ID NO: 1748154 - RNA, 19 nt, Homo sapiens
  misc_RNA (1)...(19): siRNA sense strand
cgauggagauggagauuuu

SEQ ID NO: 1748155 - RNA, 19 nt, Homo sapiens
  misc_RNA (1)...(19): siRNA sense strand
uguccugccugcaacagua

SEQ ID NO: 1748156 - RNA, 19 nt, Homo sapiens
  misc_RNA (1)...(19): siRNA sense strand
agcagggccuucaaaguaa

SEQ ID NO: 1748157 - RNA, 19 nt, Homo sapiens
  misc_RNA (1)...(19): siRNA sense strand
aaagcaaggauguagaauu

SEQ ID NO: 1748158 - RNA, 19 nt, Homo sapiens
  misc_RNA (1)...(19): siRNA sense strand
guccaucagaggaauauaa

SEQ ID NO: 1748159 - RNA, 19 nt, Homo sapiens
  misc_RNA (1)...(19): siRNA sense strand
aggaacgucucuaucaaga

SEQ ID NO: 1748160 - RNA, 19 nt, Homo sapiens
  misc_RNA (1)...(19): siRNA sense strand
gcgcuggccuucuggacau

SEQ ID NO: 1748161 - RNA, 19 nt, Homo sapiens
  misc_RNA (1)...(19): siRNA sense strand
agaggaauauaaagcuaug

SEQ ID NO: 1748162 - RNA, 19 nt, Homo sapiens
  misc_RNA (1)...(19): siRNA sense strand
cuugaaccauccaugauug

SEQ ID NO: 1748163 - RNA, 19 nt, Homo sapiens
  misc_RNA (1)...(19): siRNA sense strand
aaaguucagugacaucucu

SEQ ID NO: 1748164 - RNA, 19 nt, Homo sapiens
  misc_RNA (1)...(19): siRNA sense strand
acaaagcaaggauguagaa

SEQ ID NO: 1748165 - RNA, 19 nt, Homo sapiens
  misc_RNA (1)...(19): siRNA sense strand
gauauuguccgcacagaac

SEQ ID NO: 1748166 - RNA, 19 nt, Homo sapiens
  misc_RNA (1)...(19): siRNA sense strand
caucaaacucucuggcuau

SEQ ID NO: 1748167 - RNA, 19 nt, Homo sapiens
  misc_RNA (1)...(19): siRNA sense strand
caugaagaaaguacuagaa

SEQ ID NO: 1748168 - RNA, 19 nt, Homo sapiens
  misc_RNA (1)...(19): siRNA sense strand
auaauacaccuguucgaaa

SEQ ID NO: 1748169 - RNA, 19 nt, Homo sapiens
  misc_RNA (1)...(19): siRNA sense strand
cagauggagaagauauaua

SEQ ID NO: 1748170 - RNA, 19 nt, Homo sapiens
  misc_RNA (1)...(19): siRNA sense strand
guacuagaagaauacaaga

SEQ ID NO: 1748171 - RNA, 19 nt, Homo sapiens
  misc_RNA (1)...(19): siRNA sense strand
caucuucugugaucagcau

SEQ ID NO: 1748172 - RNA, 19 nt, Homo sapiens
  misc_RNA (1)...(19): siRNA sense strand
ucacuauugcuaaccauga

SEQ ID NO: 1748173 - RNA, 19 nt, Homo sapiens
  misc_RNA (1)...(19): siRNA sense strand
ggaacgucucuaucaagaa

SEQ ID NO: 1748174 - RNA, 19 nt, Homo sapiens
  misc_RNA (1)...(19): siRNA sense strand
caugcugcuuuguaauuau

SEQ ID NO: 1748175 - RNA, 19 nt, Homo sapiens
  misc_RNA (1)...(19): siRNA sense strand
cacuauugcuaaccaugaa

SEQ ID NO: 1748176 - RNA, 19 nt, Homo sapiens
  misc_RNA (1)...(19): siRNA sense strand
uuaccuccaugaagaaagu

SEQ ID NO: 1748177 - RNA, 19 nt, Homo sapiens
  misc_RNA (1)...(19): siRNA sense strand
ugccugcucucacaucuuc

SEQ ID NO: 1748178 - RNA, 19 nt, Homo sapiens
  misc_RNA (1)...(19): siRNA sense strand
gagcagcagcaaguuucua

SEQ ID NO: 1748179 - RNA, 19 nt, Homo sapiens
  misc_RNA (1)...(19): siRNA sense strand
aacaguacccuuucuggaa

SEQ ID NO: 1748180 - RNA, 19 nt, Homo sapiens
  misc_RNA (1)...(19): siRNA sense strand
gcuacgaaacaucacuauu

SEQ ID NO: 1748181 - RNA, 19 nt, Homo sapiens
  misc_RNA (1)...(19): siRNA sense strand
gcuccaaggccucuaugau

SEQ ID NO: 1748182 - RNA, 19 nt, Homo sapiens
  misc_RNA (1)...(19): siRNA sense strand
gcgcaaucgucaguaucaa

SEQ ID NO: 1748183 - RNA, 19 nt, Homo sapiens
  misc_RNA (1)...(19): siRNA sense strand
gcaccugaacccagcaaca

SEQ ID NO: 1748184 - RNA, 19 nt, Homo sapiens
  misc_RNA (1)...(19): siRNA sense strand
uacgaaacaucacuauugc

SEQ ID NO: 1748185 - RNA, 19 nt, Homo sapiens
  misc_RNA (1)...(19): siRNA sense strand
gcaaucgucaguaucaaaa

SEQ ID NO: 1748186 - RNA, 19 nt, Homo sapiens
  misc_RNA (1)...(19): siRNA sense strand
gaacccagcaacagcuuuu

SEQ ID NO: 1748187 - RNA, 19 nt, Homo sapiens
  misc_RNA (1)...(19): siRNA sense strand
cagaggaauauaaagcuau

SEQ ID NO: 1748188 - RNA, 19 nt, Homo sapiens
  misc_RNA (1)...(19): siRNA sense strand
uuagagcagcagcaaguuu

SEQ ID NO: 1748189 - RNA, 19 nt, Homo sapiens
  misc_RNA (1)...(19): siRNA sense strand
caucagaggaauauaaagc

SEQ ID NO: 1748190 - RNA, 19 nt, Homo sapiens
  misc_RNA (1)...(19): siRNA sense strand
uagagcagcagcaaguuuc

SEQ ID NO: 1748191 - RNA, 19 nt, Homo sapiens
  misc_RNA (1)...(19): siRNA sense strand
ugaauuagagcagcagcaa

SEQ ID NO: 1748192 - RNA, 19 nt, Homo sapiens
  misc_RNA (1)...(19): siRNA sense strand
gcgauggagauggagauuu

SEQ ID NO: 1748193 - RNA, 19 nt, Homo sapiens
  misc_RNA (1)...(19): siRNA sense strand
ugugaagacaugcugcuuu

SEQ ID NO: 1748194 - RNA, 19 nt, Homo sapiens
  misc_RNA (1)...(19): siRNA sense strand
cuucuggacauaucaggua

SEQ ID NO: 1748195 - RNA, 19 nt, Homo sapiens
  misc_RNA (1)...(19): siRNA sense strand
ccuugaaccauccaugauu

SEQ ID NO: 1748196 - RNA, 19 nt, Homo sapiens
  misc_RNA (1)...(19): siRNA sense strand
cucuccaagucgugaauua

SEQ ID NO: 1748197 - RNA, 19 nt, Homo sapiens
  misc_RNA (1)...(19): siRNA sense strand
ggauaauacaccuguucga

SEQ ID NO: 1748198 - RNA, 19 nt, Homo sapiens
  misc_RNA (1)...(19): siRNA sense strand
caucaggaacgucucuauc

SEQ ID NO: 1748199 - RNA, 19 nt, Homo sapiens
  misc_RNA (1)...(19): siRNA sense strand
gcacagucugguguucuug

SEQ ID NO: 1748200 - RNA, 19 nt, Homo sapiens
  misc_RNA (1)...(19): siRNA sense strand
agauggagaagauauauac

SEQ ID NO: 1748201 - RNA, 19 nt, Homo sapiens
  misc_RNA (1)...(19): siRNA sense strand
gcugagggccaucugaaac

SEQ ID NO: 1748202 - RNA, 19 nt, Homo sapiens
  misc_RNA (1)...(19): siRNA sense strand
ucagguacaucaggaacgu

SEQ ID NO: 1748203 - RNA, 19 nt, Homo sapiens
  misc_RNA (1)...(19): siRNA sense strand
agauggagauuuucaguuc

SEQ ID NO: 1748204 - RNA, 19 nt, Homo sapiens
  misc_RNA (1)...(19): siRNA sense strand
aaacuuauggagcgcaauc

SEQ ID NO: 1748205 - RNA, 19 nt, Homo sapiens
  misc_RNA (1)...(19): siRNA sense strand
aaauacaaagcaaggaugu

SEQ ID NO: 1748206 - RNA, 19 nt, Homo sapiens
  misc_RNA (1)...(19): siRNA sense strand
cuacugaacuggaugauua

SEQ ID NO: 1748207 - RNA, 19 nt, Homo sapiens
  misc_RNA (1)...(19): siRNA sense strand
gaaggacuauucucauuaa

SEQ ID NO: 1748208 - RNA, 19 nt, Homo sapiens
  misc_RNA (1)...(19): siRNA sense strand
gaugauuacuccacaaaua

SEQ ID NO: 1748209 - RNA, 19 nt, Homo sapiens
  misc_RNA (1)...(19): siRNA sense strand
gagagaagauuccuuugaa

SEQ ID NO: 1748210 - RNA, 19 nt, Homo sapiens
  misc_RNA (1)...(19): siRNA sense strand
gaaagaagccgcaggauca

SEQ ID NO: 1748211 - RNA, 19 nt, Homo sapiens
  misc_RNA (1)...(19): siRNA sense strand
gaaacaaaguggauugaug

SEQ ID NO: 1748212 - RNA, 19 nt, Homo sapiens
  misc_RNA (1)...(19): siRNA sense strand
ggaaacaucagucagaaua

SEQ ID NO: 1748213 - RNA, 19 nt, Homo sapiens
  misc_RNA (1)...(19): siRNA sense strand
ggaaucaacucguguuuca

SEQ ID NO: 1748214 - RNA, 19 nt, Homo sapiens
  misc_RNA (1)...(19): siRNA sense strand
uaagagaacuccaaacaau

SEQ ID NO: 1748215 - RNA, 19 nt, Homo sapiens
  misc_RNA (1)...(19): siRNA sense strand
ucaagaaacuggacaccua

SEQ ID NO: 1748216 - RNA, 19 nt, Homo sapiens
  misc_RNA (1)...(19): siRNA sense strand
gaacaaggaagcucugauu

SEQ ID NO: 1748217 - RNA, 19 nt, Homo sapiens
  misc_RNA (1)...(19): siRNA sense strand
ggaaggacuauucucauua

SEQ ID NO: 1748218 - RNA, 19 nt, Homo sapiens
  misc_RNA (1)...(19): siRNA sense strand
ccaaagaaaucaauggaau

SEQ ID NO: 1748219 - RNA, 19 nt, Homo sapiens
  misc_RNA (1)...(19): siRNA sense strand
gaacaccccuucacaauga

SEQ ID NO: 1748220 - RNA, 19 nt, Homo sapiens
  misc_RNA (1)...(19): siRNA sense strand
agaagcagauggaacauuu

SEQ ID NO: 1748221 - RNA, 19 nt, Homo sapiens
  misc_RNA (1)...(19): siRNA sense strand
gacuuuggguuuacaauaa

SEQ ID NO: 1748222 - RNA, 19 nt, Homo sapiens
  misc_RNA (1)...(19): siRNA sense strand
caacuuauccuucagaaau

SEQ ID NO: 1748223 - RNA, 19 nt, Homo sapiens
  misc_RNA (1)...(19): siRNA sense strand
gcuuaaaccuggcgucauu

SEQ ID NO: 1748224 - RNA, 19 nt, Homo sapiens
  misc_RNA (1)...(19): siRNA sense strand
gaaagcuugugaacagauu

SEQ ID NO: 1748225 - RNA, 19 nt, Homo sapiens
  misc_RNA (1)...(19): siRNA sense strand
gaagcuaccuggagugaag

SEQ ID NO: 1748226 - RNA, 19 nt, Homo sapiens
  misc_RNA (1)...(19): siRNA sense strand
caaagcaacccguacuaua

SEQ ID NO: 1748227 - RNA, 19 nt, Homo sapiens
  misc_RNA (1)...(19): siRNA sense strand
gaugaugcuuggaaguaua

SEQ ID NO: 1748228 - RNA, 19 nt, Homo sapiens
  misc_RNA (1)...(19): siRNA sense strand
cauucaagaugcaggauua

SEQ ID NO: 1748229 - RNA, 19 nt, Homo sapiens
  misc_RNA (1)...(19): siRNA sense strand
cuucagaguucuaauauug

SEQ ID NO: 1748230 - RNA, 19 nt, Homo sapiens
  misc_RNA (1)...(19): siRNA sense strand
gaaguauaauggagauguu

SEQ ID NO: 1748231 - RNA, 19 nt, Homo sapiens
  misc_RNA (1)...(19): siRNA sense strand
gaacaaagcccagccucuu

SEQ ID NO: 1748232 - RNA, 19 nt, Homo sapiens
  misc_RNA (1)...(19): siRNA sense strand
gaggauaacagaagaaguu

SEQ ID NO: 1748233 - RNA, 19 nt, Homo sapiens
  misc_RNA (1)...(19): siRNA sense strand
gaaagaacaaguaccauca

SEQ ID NO: 1748234 - RNA, 19 nt, Homo sapiens
  misc_RNA (1)...(19): siRNA sense strand
gagaagcucuaagacguuu

SEQ ID NO: 1748235 - RNA, 19 nt, Homo sapiens
  misc_RNA (1)...(19): siRNA sense strand
gaagagagagaagaaauug

SEQ ID NO: 1748236 - RNA, 19 nt, Homo sapiens
  misc_RNA (1)...(19): siRNA sense strand
gcacacaaauggaaucaac

SEQ ID NO: 1748237 - RNA, 19 nt, Homo sapiens
  misc_RNA (1)...(19): siRNA sense strand
uaagagagaagauuccuuu

SEQ ID NO: 1748238 - RNA, 19 nt, Homo sapiens
  misc_RNA (1)...(19): siRNA sense strand
caacugauaugugcucaug

SEQ ID NO: 1748239 - RNA, 19 nt, Homo sapiens
  misc_RNA (1)...(19): siRNA sense strand
gaucuuacacgauggauga

SEQ ID NO: 1748240 - RNA, 19 nt, Homo sapiens
  misc_RNA (1)...(19): siRNA sense strand
ggaguaaguccaugaguga

SEQ ID NO: 1748241 - RNA, 19 nt, Homo sapiens
  misc_RNA (1)...(19): siRNA sense strand
caaaggagccgccaugauc

SEQ ID NO: 1748242 - RNA, 19 nt, Homo sapiens
  misc_RNA (1)...(19): siRNA sense strand
aaagcaacccguacuauaa

SEQ ID NO: 1748243 - RNA, 19 nt, Homo sapiens
  misc_RNA (1)...(19): siRNA sense strand
acaguuggauguccuauga

SEQ ID NO: 1748244 - RNA, 19 nt, Homo sapiens
  misc_RNA (1)...(19): siRNA sense strand
caucuggucuugauuuaau

SEQ ID NO: 1748245 - RNA, 19 nt, Homo sapiens
  misc_RNA (1)...(19): siRNA sense strand
ucaaacagcaugucucuga

SEQ ID NO: 1748246 - RNA, 19 nt, Homo sapiens
  misc_RNA (1)...(19): siRNA sense strand
gaaauuuggaggcaacuga

SEQ ID NO: 1748247 - RNA, 19 nt, Homo sapiens
  misc_RNA (1)...(19): siRNA sense strand
ucuaagacguuuaaggaaa

SEQ ID NO: 1748248 - RNA, 19 nt, Homo sapiens
  misc_RNA (1)...(19): siRNA sense strand
acaagcugcuccucugaua

SEQ ID NO: 1748249 - RNA, 19 nt, Homo sapiens
  misc_RNA (1)...(19): siRNA sense strand
aggaucagcuuguuauuga

SEQ ID NO: 1748250 - RNA, 19 nt, Homo sapiens
  misc_RNA (1)...(19): siRNA sense strand
aaauucagcuuccuucuca

SEQ ID NO: 1748251 - RNA, 19 nt, Homo sapiens
  misc_RNA (1)...(19): siRNA sense strand
cuucagaaauucccaaaga

SEQ ID NO: 1748252 - RNA, 19 nt, Homo sapiens
  misc_RNA (1)...(19): siRNA sense strand
ucaagaugcaggauuauaa

SEQ ID NO: 1748253 - RNA, 19 nt, Homo sapiens
  misc_RNA (1)...(19): siRNA sense strand
gaacagauuggauugaaag

SEQ ID NO: 1748254 - RNA, 19 nt, Homo sapiens
  misc_RNA (1)...(19): siRNA sense strand
aagaggaaguuguucauga

SEQ ID NO: 1748255 - RNA, 19 nt, Homo sapiens
  misc_RNA (1)...(19): siRNA sense strand
agagagagaauuccaagua

SEQ ID NO: 1748256 - RNA, 19 nt, Homo sapiens
  misc_RNA (1)...(19): siRNA sense strand
gaaacuggacaccuaguga

SEQ ID NO: 1748257 - RNA, 19 nt, Homo sapiens
  misc_RNA (1)...(19): siRNA sense strand
aagcuuaucuagccagaaa

SEQ ID NO: 1748258 - RNA, 19 nt, Homo sapiens
  misc_RNA (1)...(19): siRNA sense strand
gcucuaagacguuuaagga

SEQ ID NO: 1748259 - RNA, 19 nt, Homo sapiens
  misc_RNA (1)...(19): siRNA sense strand
ugaaagcguuugagaaucu

SEQ ID NO: 1748260 - RNA, 19 nt, Homo sapiens
  misc_RNA (1)...(19): siRNA sense strand
uagcaggauuggauaauau

SEQ ID NO: 1748261 - RNA, 19 nt, Homo sapiens
  misc_RNA (1)...(19): siRNA sense strand
gggagcaacuuauccuuca

SEQ ID NO: 1748262 - RNA, 19 nt, Homo sapiens
  misc_RNA (1)...(19): siRNA sense strand
gaugcaacuucuggaauuu

SEQ ID NO: 1748263 - RNA, 19 nt, Homo sapiens
  misc_RNA (1)...(19): siRNA sense strand
cagaggagauccaagaaag

SEQ ID NO: 1748264 - RNA, 19 nt, Homo sapiens
  misc_RNA (1)...(19): siRNA sense strand
aggaauaaauccagaucua

SEQ ID NO: 1748265 - RNA, 19 nt, Homo sapiens
  misc_RNA (1)...(19): siRNA sense strand
cuggagaucuacaggauuu

SEQ ID NO: 1748266 - RNA, 19 nt, Homo sapiens
  misc_RNA (1)...(19): siRNA sense strand
ggaggccuguugauuccua

SEQ ID NO: 1748267 - RNA, 19 nt, Homo sapiens
  misc_RNA (1)...(19): siRNA sense strand
gaaaugggagcaacagcuu

SEQ ID NO: 1748268 - RNA, 19 nt, Homo sapiens
  misc_RNA (1)...(19): siRNA sense strand
gagagagaauuccaaguac

SEQ ID NO: 1748269 - RNA, 19 nt, Homo sapiens
  misc_RNA (1)...(19): siRNA sense strand
ccgaaagccuucagaguuc

SEQ ID NO: 1748270 - RNA, 19 nt, Homo sapiens
  misc_RNA (1)...(19): siRNA sense strand
ugaugcaacuucuggaauu

SEQ ID NO: 1748271 - RNA, 19 nt, Homo sapiens
  misc_RNA (1)...(19): siRNA sense strand
guagacagccauccuaugu

SEQ ID NO: 1748272 - RNA, 19 nt, Homo sapiens
  misc_RNA (1)...(19): siRNA sense strand
gaaauucccaaagaagauu

SEQ ID NO: 1748273 - RNA, 19 nt, Homo sapiens
  misc_RNA (1)...(19): siRNA sense strand
gaucagaaaccaccaacug

SEQ ID NO: 1748274 - RNA, 19 nt, Homo sapiens
  misc_RNA (1)...(19): siRNA sense strand
acaaagagccuguuagucu

SEQ ID NO: 1748275 - RNA, 19 nt, Homo sapiens
  misc_RNA (1)...(19): siRNA sense strand
ccacaucuggucuugauuu

SEQ ID NO: 1748276 - RNA, 19 nt, Homo sapiens
  misc_RNA (1)...(19): siRNA sense strand
ggaugaugcuuggaaguau

SEQ ID NO: 1748277 - RNA, 19 nt, Homo sapiens
  misc_RNA (1)...(19): siRNA sense strand
gaagcucuaagacguuuaa

SEQ ID NO: 1748278 - RNA, 19 nt, Homo sapiens
  misc_RNA (1)...(19): siRNA sense strand
gaaaucaauggaauucaug

SEQ ID NO: 1748279 - RNA, 19 nt, Homo sapiens
  misc_RNA (1)...(19): siRNA sense strand
cacaucuggucuugauuua

SEQ ID NO: 1748280 - RNA, 19 nt, Homo sapiens
  misc_RNA (1)...(19): siRNA sense strand
ucaaaguccuguggaagaa

SEQ ID NO: 1748281 - RNA, 19 nt, Homo sapiens
  misc_RNA (1)...(19): siRNA sense strand
gugaacagauuggauugaa

SEQ ID NO: 1748282 - RNA, 19 nt, Homo sapiens
  misc_RNA (1)...(19): siRNA sense strand
gaacaaaauucaggaagga

SEQ ID NO: 1748283 - RNA, 19 nt, Homo sapiens
  misc_RNA (1)...(19): siRNA sense strand
gaugugaggcgcuauggaa

SEQ ID NO: 1748284 - RNA, 19 nt, Homo sapiens
  misc_RNA (1)...(19): siRNA sense strand
cagauuggauugaaagaag

SEQ ID NO: 1748285 - RNA, 19 nt, Homo sapiens
  misc_RNA (1)...(19): siRNA sense strand
agagaagauuccuuugaaa

SEQ ID NO: 1748286 - RNA, 19 nt, Homo sapiens
  misc_RNA (1)...(19): siRNA sense strand
caucugaauccauuucuuu

SEQ ID NO: 1748287 - RNA, 19 nt, Homo sapiens
  misc_RNA (1)...(19): siRNA sense strand
gcagguagcccagcagaau

SEQ ID NO: 1748288 - RNA, 19 nt, Homo sapiens
  misc_RNA (1)...(19): siRNA sense strand
cuaagacguuuaaggaaau

SEQ ID NO: 1748289 - RNA, 19 nt, Homo sapiens
  misc_RNA (1)...(19): siRNA sense strand
gagaagaaauugaaaagca

SEQ ID NO: 1748290 - RNA, 19 nt, Homo sapiens
  misc_RNA (1)...(19): siRNA sense strand
cagacaaacaugaggauaa

SEQ ID NO: 1748291 - RNA, 19 nt, Homo sapiens
  misc_RNA (1)...(19): siRNA sense strand
ucagaaaccaccaacugua

SEQ ID NO: 1748292 - RNA, 19 nt, Homo sapiens
  misc_RNA (1)...(19): siRNA sense strand
uuaaguguguugccuguga

SEQ ID NO: 1748293 - RNA, 19 nt, Homo sapiens
  misc_RNA (1)...(19): siRNA sense strand
gaggagauccaagaaagaa

SEQ ID NO: 1748294 - RNA, 19 nt, Homo sapiens
  misc_RNA (1)...(19): siRNA sense strand
ucacagaggagauccaaga

SEQ ID NO: 1748295 - RNA, 19 nt, Homo sapiens
  misc_RNA (1)...(19): siRNA sense strand
cagcaccucugagaaagaa

SEQ ID NO: 1748296 - RNA, 19 nt, Homo sapiens
  misc_RNA (1)...(19): siRNA sense strand
ucggagcucuggaaauuug

SEQ ID NO: 1748297 - RNA, 19 nt, Homo sapiens
  misc_RNA (1)...(19): siRNA sense strand
gcaguaacagagaagaauu

SEQ ID NO: 1748298 - RNA, 19 nt, Homo sapiens
  misc_RNA (1)...(19): siRNA sense strand
aacaugaccucuucacaga

SEQ ID NO: 1748299 - RNA, 19 nt, Homo sapiens
  misc_RNA (1)...(19): siRNA sense strand
gaaacaucagucagaauau

SEQ ID NO: 1748300 - RNA, 19 nt, Homo sapiens
  misc_RNA (1)...(19): siRNA sense strand
guacuuggaugaggaacug

SEQ ID NO: 1748301 - RNA, 19 nt, Homo sapiens
  misc_RNA (1)...(19): siRNA sense strand
gagagaauuccaaguacuu

SEQ ID NO: 1748302 - RNA, 19 nt, Homo sapiens
  misc_RNA (1)...(19): siRNA sense strand
ggaauuuacaacucagaaa

SEQ ID NO: 1748303 - RNA, 19 nt, Homo sapiens
  misc_RNA (1)...(19): siRNA sense strand
ucaguucagugauaugaga

SEQ ID NO: 1748304 - RNA, 19 nt, Homo sapiens
  misc_RNA (1)...(19): siRNA sense strand
ggaaaucuccccacaaaga

SEQ ID NO: 1748305 - RNA, 19 nt, Homo sapiens
  misc_RNA (1)...(19): siRNA sense strand
ucaagaaggagaauguauu

SEQ ID NO: 1748306 - RNA, 19 nt, Homo sapiens
  misc_RNA (1)...(19): siRNA sense strand
caacacgucccuaacuugu

SEQ ID NO: 1748307 - RNA, 19 nt, Homo sapiens
  misc_RNA (1)...(19): siRNA sense strand
gcaccagauuguccuugug

SEQ ID NO: 1748308 - RNA, 19 nt, Homo sapiens
  misc_RNA (1)...(19): siRNA sense strand
gcgucaagcucaccguugu

SEQ ID NO: 1748309 - RNA, 19 nt, Homo sapiens
  misc_RNA (1)...(19): siRNA sense strand
gugguccugugcacguuua

SEQ ID NO: 1748310 - RNA, 19 nt, Homo sapiens
  misc_RNA (1)...(19): siRNA sense strand
uggcuacccugaaccagau

SEQ ID NO: 1748311 - RNA, 19 nt, Homo sapiens
  misc_RNA (1)...(19): siRNA sense strand
ggccucaacacgucccuaa

SEQ ID NO: 1748312 - RNA, 19 nt, Homo sapiens
  misc_RNA (1)...(19): siRNA sense strand
ucaacacgucccuaacuug

SEQ ID NO: 1748313 - RNA, 19 nt, Homo sapiens
  misc_RNA (1)...(19): siRNA sense strand
guggccacgugcagaagaa

SEQ ID NO: 1748314 - RNA, 19 nt, Homo sapiens
  misc_RNA (1)...(19): siRNA sense strand
cucaacacgucccuaacuu

SEQ ID NO: 1748315 - RNA, 19 nt, Homo sapiens
  misc_RNA (1)...(19): siRNA sense strand
caacacgucccuaacuugu

SEQ ID NO: 1748316 - RNA, 19 nt, Homo sapiens
  misc_RNA (1)...(19): siRNA sense strand
gcaccagauuguccuugug

SEQ ID NO: 1748317 - RNA, 19 nt, Homo sapiens
  misc_RNA (1)...(19): siRNA sense strand
gcgucaagcucaccguugu

SEQ ID NO: 1748318 - RNA, 19 nt, Homo sapiens
  misc_RNA (1)...(19): siRNA sense strand
gugguccugugcacguuua

SEQ ID NO: 1748319 - RNA, 19 nt, Homo sapiens
  misc_RNA (1)...(19): siRNA sense strand
uggcuacccugaaccagau

SEQ ID NO: 1748320 - RNA, 19 nt, Homo sapiens
  misc_RNA (1)...(19): siRNA sense strand
ggccucaacacgucccuaa

SEQ ID NO: 1748321 - RNA, 19 nt, Homo sapiens
  misc_RNA (1)...(19): siRNA sense strand
ucaacacgucccuaacuug

SEQ ID NO: 1748322 - RNA, 19 nt, Homo sapiens
  misc_RNA (1)...(19): siRNA sense strand
guggccacgugcagaagaa

SEQ ID NO: 1748323 - RNA, 19 nt, Homo sapiens
  misc_RNA (1)...(19): siRNA sense strand
cucaacacgucccuaacuu

SEQ ID NO: 1748324 - RNA, 19 nt, Homo sapiens
  misc_RNA (1)...(19): siRNA sense strand
caacacgucccuaacuugu

SEQ ID NO: 1748325 - RNA, 19 nt, Homo sapiens
  misc_RNA (1)...(19): siRNA sense strand
gcaccagauuguccuugug

SEQ ID NO: 1748326 - RNA, 19 nt, Homo sapiens
  misc_RNA (1)...(19): siRNA sense strand
gcgucaagcucaccguugu

SEQ ID NO: 1748327 - RNA, 19 nt, Homo sapiens
  misc_RNA (1)...(19): siRNA sense strand
gugguccugugcacguuua

SEQ ID NO: 1748328 - RNA, 19 nt, Homo sapiens
  misc_RNA (1)...(19): siRNA sense strand
uggcuacccugaaccagau

SEQ ID NO: 1748329 - RNA, 19 nt, Homo sapiens
  misc_RNA (1)...(19): siRNA sense strand
ggccucaacacgucccuaa

SEQ ID NO: 1748330 - RNA, 19 nt, Homo sapiens
  misc_RNA (1)...(19): siRNA sense strand
ucaacacgucccuaacuug

SEQ ID NO: 1748331 - RNA, 19 nt, Homo sapiens
  misc_RNA (1)...(19): siRNA sense strand
guggccacgugcagaagaa

SEQ ID NO: 1748332 - RNA, 19 nt, Homo sapiens
  misc_RNA (1)...(19): siRNA sense strand
cucaacacgucccuaacuu

SEQ ID NO: 1748333 - RNA, 19 nt, Homo sapiens
  misc_RNA (1)...(19): siRNA sense strand
gaaccuugauucaguuauu

SEQ ID NO: 1748334 - RNA, 19 nt, Homo sapiens
  misc_RNA (1)...(19): siRNA sense strand
gaugggagcuuugucaaga

SEQ ID NO: 1748335 - RNA, 19 nt, Homo sapiens
  misc_RNA (1)...(19): siRNA sense strand
gcgggagccuggccauuua

SEQ ID NO: 1748336 - RNA, 19 nt, Homo sapiens
  misc_RNA (1)...(19): siRNA sense strand
ggagaaccuugauucaguu

SEQ ID NO: 1748337 - RNA, 19 nt, Homo sapiens
  misc_RNA (1)...(19): siRNA sense strand
gggagaaccuugauucagu

SEQ ID NO: 1748338 - RNA, 19 nt, Homo sapiens
  misc_RNA (1)...(19): siRNA sense strand
ucauaagucucauggauca

SEQ ID NO: 1748339 - RNA, 19 nt, Homo sapiens
  misc_RNA (1)...(19): siRNA sense strand
gaacgaacuguccuucaug

SEQ ID NO: 1748340 - RNA, 19 nt, Homo sapiens
  misc_RNA (1)...(19): siRNA sense strand
ccugggagcuggagacuag

SEQ ID NO: 1748341 - RNA, 19 nt, Homo sapiens
  misc_RNA (1)...(19): siRNA sense strand
agaaggugcuggcgauaga

SEQ ID NO: 1748342 - RNA, 19 nt, Homo sapiens
  misc_RNA (1)...(19): siRNA sense strand
ucucauaagucucauggau

SEQ ID NO: 1748343 - RNA, 19 nt, Homo sapiens
  misc_RNA (1)...(19): siRNA sense strand
gagaaccuugauucaguua

SEQ ID NO: 1748344 - RNA, 19 nt, Homo sapiens
  misc_RNA (1)...(19): siRNA sense strand
caacugcugaccucaagaa

SEQ ID NO: 1748345 - RNA, 19 nt, Homo sapiens
  misc_RNA (1)...(19): siRNA sense strand
ggagcuuugucaagaagau

SEQ ID NO: 1748346 - RNA, 19 nt, Homo sapiens
  misc_RNA (1)...(19): siRNA sense strand
agaacgaacuguccuucau

SEQ ID NO: 1748347 - RNA, 19 nt, Homo sapiens
  misc_RNA (1)...(19): siRNA sense strand
caacaagagugggaaaaga

SEQ ID NO: 1748348 - RNA, 19 nt, Homo sapiens
  misc_RNA (1)...(19): siRNA sense strand
ggaaguaagcccagaucca

SEQ ID NO: 1748349 - RNA, 19 nt, Homo sapiens
  misc_RNA (1)...(19): siRNA sense strand
gauccagccagccaaauuc

SEQ ID NO: 1748350 - RNA, 19 nt, Homo sapiens
  misc_RNA (1)...(19): siRNA sense strand
ccagaggcccuucaagcuu

SEQ ID NO: 1748351 - RNA, 19 nt, Homo sapiens
  misc_RNA (1)...(19): siRNA sense strand
ggagacgccaccagucaau

SEQ ID NO: 1748352 - RNA, 19 nt, Homo sapiens
  misc_RNA (1)...(19): siRNA sense strand
gcucagggucugcgcaaga

SEQ ID NO: 1748353 - RNA, 19 nt, Homo sapiens
  misc_RNA (1)...(19): siRNA sense strand
ggccauggcuuggacaaac

SEQ ID NO: 1748354 - RNA, 19 nt, Homo sapiens
  misc_RNA (1)...(19): siRNA sense strand
ccucucagccgcaacaaga

SEQ ID NO: 1748355 - RNA, 19 nt, Homo sapiens
  misc_RNA (1)...(19): siRNA sense strand
gccaaauucuagagcauac

SEQ ID NO: 1748356 - RNA, 19 nt, Homo sapiens
  misc_RNA (1)...(19): siRNA sense strand
aaaagaaccuucgggagaa

SEQ ID NO: 1748357 - RNA, 19 nt, Homo sapiens
  misc_RNA (1)...(19): siRNA sense strand
ggucugcgcaagauguuug

SEQ ID NO: 1748358 - RNA, 19 nt, Homo sapiens
  misc_RNA (1)...(19): siRNA sense strand
gagacgccaccagucaaua

SEQ ID NO: 1748359 - RNA, 19 nt, Homo sapiens
  misc_RNA (1)...(19): siRNA sense strand
caagaaggugcuggcgaua

SEQ ID NO: 1748360 - RNA, 19 nt, Homo sapiens
  misc_RNA (1)...(19): siRNA sense strand
gcuggagacuagcgagaag

SEQ ID NO: 1748361 - RNA, 19 nt, Homo sapiens
  misc_RNA (1)...(19): siRNA sense strand
cgaaacgcuugagcuggaa

SEQ ID NO: 1748362 - RNA, 19 nt, Homo sapiens
  misc_RNA (1)...(19): siRNA sense strand
gagccuggccauuuaaagg

SEQ ID NO: 1748363 - RNA, 19 nt, Homo sapiens
  misc_RNA (1)...(19): siRNA sense strand
ggagcugcccgaugcuaug

SEQ ID NO: 1748364 - RNA, 19 nt, Homo sapiens
  misc_RNA (1)...(19): siRNA sense strand
gggcacagaacuauuucga

SEQ ID NO: 1748365 - RNA, 19 nt, Homo sapiens
  misc_RNA (1)...(19): siRNA sense strand
acugguugcugaacuugaa

SEQ ID NO: 1748366 - RNA, 19 nt, Homo sapiens
  misc_RNA (1)...(19): siRNA sense strand
cuucugaucucugguacug

SEQ ID NO: 1748367 - RNA, 19 nt, Homo sapiens
  misc_RNA (1)...(19): siRNA sense strand
gggagcucauagagaaaug

SEQ ID NO: 1748368 - RNA, 19 nt, Homo sapiens
  misc_RNA (1)...(19): siRNA sense strand
ucuagagcauacucaagga

SEQ ID NO: 1748369 - RNA, 19 nt, Homo sapiens
  misc_RNA (1)...(19): siRNA sense strand
gccauuuaaaggccuuaua

SEQ ID NO: 1748370 - RNA, 19 nt, Homo sapiens
  misc_RNA (1)...(19): siRNA sense strand
ccagauccagccagccaaa

SEQ ID NO: 1748371 - RNA, 19 nt, Homo sapiens
  misc_RNA (1)...(19): siRNA sense strand
gcugugaccggguguugga

SEQ ID NO: 1748372 - RNA, 19 nt, Homo sapiens
  misc_RNA (1)...(19): siRNA sense strand
gcuagggcagccucaguug

SEQ ID NO: 1748373 - RNA, 19 nt, Homo sapiens
  misc_RNA (1)...(19): siRNA sense strand
ccagccagccaaauucuag

SEQ ID NO: 1748374 - RNA, 19 nt, Homo sapiens
  misc_RNA (1)...(19): siRNA sense strand
ccauuuaaaggccuuauac

SEQ ID NO: 1748375 - RNA, 19 nt, Homo sapiens
  misc_RNA (1)...(19): siRNA sense strand
gagcugugaccggguguug

SEQ ID NO: 1748376 - RNA, 19 nt, Homo sapiens
  misc_RNA (1)...(19): siRNA sense strand
cauggagggaggaaacuug

SEQ ID NO: 1748377 - RNA, 19 nt, Homo sapiens
  misc_RNA (1)...(19): siRNA sense strand
gguacuggcuuugggguuu

SEQ ID NO: 1748378 - RNA, 19 nt, Homo sapiens
  misc_RNA (1)...(19): siRNA sense strand
cagccaaauucuagagcau

SEQ ID NO: 1748379 - RNA, 19 nt, Homo sapiens
  misc_RNA (1)...(19): siRNA sense strand
cgccaccagucaauacaau

SEQ ID NO: 1748380 - RNA, 19 nt, Homo sapiens
  misc_RNA (1)...(19): siRNA sense strand
gcugccggguacuggcuuu

SEQ ID NO: 1748381 - RNA, 19 nt, Homo sapiens
  misc_RNA (1)...(19): siRNA sense strand
cgcuugagcuggaaguaag

SEQ ID NO: 1748382 - RNA, 19 nt, Homo sapiens
  misc_RNA (1)...(19): siRNA sense strand
gcuggacagagcuaacuau

SEQ ID NO: 1748383 - RNA, 19 nt, Homo sapiens
  misc_RNA (1)...(19): siRNA sense strand
ggugaaagcucgcgucauc

SEQ ID NO: 1748384 - RNA, 19 nt, Homo sapiens
  misc_RNA (1)...(19): siRNA sense strand
guuccuggaugacuccuuu

SEQ ID NO: 1748385 - RNA, 19 nt, Homo sapiens
  misc_RNA (1)...(19): siRNA sense strand
ucuaagcaguggcaucuga

SEQ ID NO: 1748386 - RNA, 19 nt, Homo sapiens
  misc_RNA (1)...(19): siRNA sense strand
ugaauuagccaccaaguac

SEQ ID NO: 1748387 - RNA, 19 nt, Homo sapiens
  misc_RNA (1)...(19): siRNA sense strand
uccugaaucuggacucuaa

SEQ ID NO: 1748388 - RNA, 19 nt, Homo sapiens
  misc_RNA (1)...(19): siRNA sense strand
gaugacuccuuucgcaagu

SEQ ID NO: 1748389 - RNA, 19 nt, Homo sapiens
  misc_RNA (1)...(19): siRNA sense strand
gggaguucgugccgccuuu

SEQ ID NO: 1748390 - RNA, 19 nt, Homo sapiens
  misc_RNA (1)...(19): siRNA sense strand
cacaauauccagcgagaga

SEQ ID NO: 1748391 - RNA, 19 nt, Homo sapiens
  misc_RNA (1)...(19): siRNA sense strand
gaucuaagcaguggcaucu

SEQ ID NO: 1748392 - RNA, 19 nt, Homo sapiens
  misc_RNA (1)...(19): siRNA sense strand
caauauccagcgagagaaa

SEQ ID NO: 1748393 - RNA, 19 nt, Homo sapiens
  misc_RNA (1)...(19): siRNA sense strand
gggcuagaauccgggaguu

SEQ ID NO: 1748394 - RNA, 19 nt, Homo sapiens
  misc_RNA (1)...(19): siRNA sense strand
ccagcgagagaaagaguuu

SEQ ID NO: 1748395 - RNA, 19 nt, Homo sapiens
  misc_RNA (1)...(19): siRNA sense strand
caagccagcacccauguuc

SEQ ID NO: 1748396 - RNA, 19 nt, Homo sapiens
  misc_RNA (1)...(19): siRNA sense strand
cguggaagcuacacuuacu

SEQ ID NO: 1748397 - RNA, 19 nt, Homo sapiens
  misc_RNA (1)...(19): siRNA sense strand
aagcucgcgucaucacuga

SEQ ID NO: 1748398 - RNA, 19 nt, Homo sapiens
  misc_RNA (1)...(19): siRNA sense strand
cugaauuagccaccaagua

SEQ ID NO: 1748399 - RNA, 19 nt, Homo sapiens
  misc_RNA (1)...(19): siRNA sense strand
gcuagcccucugccucuuu

SEQ ID NO: 1748400 - RNA, 19 nt, Homo sapiens
  misc_RNA (1)...(19): siRNA sense strand
uguauuauucugcguggaa

SEQ ID NO: 1748401 - RNA, 19 nt, Homo sapiens
  misc_RNA (1)...(19): siRNA sense strand
ugcggaagcuggugaaagc

SEQ ID NO: 1748402 - RNA, 19 nt, Homo sapiens
  misc_RNA (1)...(19): siRNA sense strand
ggugaaagcucgcgucauc

SEQ ID NO: 1748403 - RNA, 19 nt, Homo sapiens
  misc_RNA (1)...(19): siRNA sense strand
guuccuggaugacuccuuu

SEQ ID NO: 1748404 - RNA, 19 nt, Homo sapiens
  misc_RNA (1)...(19): siRNA sense strand
ucuaagcaguggcaucuga

SEQ ID NO: 1748405 - RNA, 19 nt, Homo sapiens
  misc_RNA (1)...(19): siRNA sense strand
ugaauuagccaccaaguac

SEQ ID NO: 1748406 - RNA, 19 nt, Homo sapiens
  misc_RNA (1)...(19): siRNA sense strand
uccugaaucuggacucuaa

SEQ ID NO: 1748407 - RNA, 19 nt, Homo sapiens
  misc_RNA (1)...(19): siRNA sense strand
gaugacuccuuucgcaagu

SEQ ID NO: 1748408 - RNA, 19 nt, Homo sapiens
  misc_RNA (1)...(19): siRNA sense strand
gggaguucgugccgccuuu

SEQ ID NO: 1748409 - RNA, 19 nt, Homo sapiens
  misc_RNA (1)...(19): siRNA sense strand
cacaauauccagcgagaga

SEQ ID NO: 1748410 - RNA, 19 nt, Homo sapiens
  misc_RNA (1)...(19): siRNA sense strand
gaucuaagcaguggcaucu

SEQ ID NO: 1748411 - RNA, 19 nt, Homo sapiens
  misc_RNA (1)...(19): siRNA sense strand
caauauccagcgagagaaa

SEQ ID NO: 1748412 - RNA, 19 nt, Homo sapiens
  misc_RNA (1)...(19): siRNA sense strand
gggcuagaauccgggaguu

SEQ ID NO: 1748413 - RNA, 19 nt, Homo sapiens
  misc_RNA (1)...(19): siRNA sense strand
ccagcgagagaaagaguuu

SEQ ID NO: 1748414 - RNA, 19 nt, Homo sapiens
  misc_RNA (1)...(19): siRNA sense strand
caagccagcacccauguuc

SEQ ID NO: 1748415 - RNA, 19 nt, Homo sapiens
  misc_RNA (1)...(19): siRNA sense strand
cguggaagcuacacuuacu

SEQ ID NO: 1748416 - RNA, 19 nt, Homo sapiens
  misc_RNA (1)...(19): siRNA sense strand
aagcucgcgucaucacuga

SEQ ID NO: 1748417 - RNA, 19 nt, Homo sapiens
  misc_RNA (1)...(19): siRNA sense strand
cugaauuagccaccaagua

SEQ ID NO: 1748418 - RNA, 19 nt, Homo sapiens
  misc_RNA (1)...(19): siRNA sense strand
gcuagcccucugccucuuu

SEQ ID NO: 1748419 - RNA, 19 nt, Homo sapiens
  misc_RNA (1)...(19): siRNA sense strand
uguauuauucugcguggaa

SEQ ID NO: 1748420 - RNA, 19 nt, Homo sapiens
  misc_RNA (1)...(19): siRNA sense strand
ugcggaagcuggugaaagc

SEQ ID NO: 1748421 - RNA, 19 nt, Homo sapiens
  misc_RNA (1)...(19): siRNA sense strand
ggugaaagcucgcgucauc

SEQ ID NO: 1748422 - RNA, 19 nt, Homo sapiens
  misc_RNA (1)...(19): siRNA sense strand
guuccuggaugacuccuuu

SEQ ID NO: 1748423 - RNA, 19 nt, Homo sapiens
  misc_RNA (1)...(19): siRNA sense strand
ucuaagcaguggcaucuga

SEQ ID NO: 1748424 - RNA, 19 nt, Homo sapiens
  misc_RNA (1)...(19): siRNA sense strand
ugaauuagccaccaaguac

SEQ ID NO: 1748425 - RNA, 19 nt, Homo sapiens
  misc_RNA (1)...(19): siRNA sense strand
uccugaaucuggacucuaa

SEQ ID NO: 1748426 - RNA, 19 nt, Homo sapiens
  misc_RNA (1)...(19): siRNA sense strand
gaugacuccuuucgcaagu

SEQ ID NO: 1748427 - RNA, 19 nt, Homo sapiens
  misc_RNA (1)...(19): siRNA sense strand
gggaguucgugccgccuuu

SEQ ID NO: 1748428 - RNA, 19 nt, Homo sapiens
  misc_RNA (1)...(19): siRNA sense strand
cacaauauccagcgagaga

SEQ ID NO: 1748429 - RNA, 19 nt, Homo sapiens
  misc_RNA (1)...(19): siRNA sense strand
gaucuaagcaguggcaucu

SEQ ID NO: 1748430 - RNA, 19 nt, Homo sapiens
  misc_RNA (1)...(19): siRNA sense strand
caauauccagcgagagaaa

SEQ ID NO: 1748431 - RNA, 19 nt, Homo sapiens
  misc_RNA (1)...(19): siRNA sense strand
gggcuagaauccgggaguu

SEQ ID NO: 1748432 - RNA, 19 nt, Homo sapiens
  misc_RNA (1)...(19): siRNA sense strand
ccagcgagagaaagaguuu

SEQ ID NO: 1748433 - RNA, 19 nt, Homo sapiens
  misc_RNA (1)...(19): siRNA sense strand
caagccagcacccauguuc

SEQ ID NO: 1748434 - RNA, 19 nt, Homo sapiens
  misc_RNA (1)...(19): siRNA sense strand
cguggaagcuacacuuacu

SEQ ID NO: 1748435 - RNA, 19 nt, Homo sapiens
  misc_RNA (1)...(19): siRNA sense strand
aagcucgcgucaucacuga

SEQ ID NO: 1748436 - RNA, 19 nt, Homo sapiens
  misc_RNA (1)...(19): siRNA sense strand
cugaauuagccaccaagua

SEQ ID NO: 1748437 - RNA, 19 nt, Homo sapiens
  misc_RNA (1)...(19): siRNA sense strand
gcuagcccucugccucuuu

SEQ ID NO: 1748438 - RNA, 19 nt, Homo sapiens
  misc_RNA (1)...(19): siRNA sense strand
uguauuauucugcguggaa

SEQ ID NO: 1748439 - RNA, 19 nt, Homo sapiens
  misc_RNA (1)...(19): siRNA sense strand
ugcggaagcuggugaaagc

SEQ ID NO: 1748440 - RNA, 19 nt, Homo sapiens
  misc_RNA (1)...(19): siRNA sense strand
ggugaaagcucgcgucauc

SEQ ID NO: 1748441 - RNA, 19 nt, Homo sapiens
  misc_RNA (1)...(19): siRNA sense strand
guuccuggaugacuccuuu

SEQ ID NO: 1748442 - RNA, 19 nt, Homo sapiens
  misc_RNA (1)...(19): siRNA sense strand
ugaauuagccaccaaguac

SEQ ID NO: 1748443 - RNA, 19 nt, Homo sapiens
  misc_RNA (1)...(19): siRNA sense strand
uccugaaucuggacucuaa

SEQ ID NO: 1748444 - RNA, 19 nt, Homo sapiens
  misc_RNA (1)...(19): siRNA sense strand
gaugacuccuuucgcaagu

SEQ ID NO: 1748445 - RNA, 19 nt, Homo sapiens
  misc_RNA (1)...(19): siRNA sense strand
gggaguucgugccgccuuu

SEQ ID NO: 1748446 - RNA, 19 nt, Homo sapiens
  misc_RNA (1)...(19): siRNA sense strand
cacaauauccagcgagaga

SEQ ID NO: 1748447 - RNA, 19 nt, Homo sapiens
  misc_RNA (1)...(19): siRNA sense strand
caauauccagcgagagaaa

SEQ ID NO: 1748448 - RNA, 19 nt, Homo sapiens
  misc_RNA (1)...(19): siRNA sense strand
gggcuagaauccgggaguu

SEQ ID NO: 1748449 - RNA, 19 nt, Homo sapiens
  misc_RNA (1)...(19): siRNA sense strand
ccagcgagagaaagaguuu

SEQ ID NO: 1748450 - RNA, 19 nt, Homo sapiens
  misc_RNA (1)...(19): siRNA sense strand
caagccagcacccauguuc

SEQ ID NO: 1748451 - RNA, 19 nt, Homo sapiens
  misc_RNA (1)...(19): siRNA sense strand
cguggaagcuacacuuacu

SEQ ID NO: 1748452 - RNA, 19 nt, Homo sapiens
  misc_RNA (1)...(19): siRNA sense strand
aagcucgcgucaucacuga

SEQ ID NO: 1748453 - RNA, 19 nt, Homo sapiens
  misc_RNA (1)...(19): siRNA sense strand
cugaauuagccaccaagua

SEQ ID NO: 1748454 - RNA, 19 nt, Homo sapiens
  misc_RNA (1)...(19): siRNA sense strand
gcuagcccucugccucuuu

SEQ ID NO: 1748455 - RNA, 19 nt, Homo sapiens
  misc_RNA (1)...(19): siRNA sense strand
uguauuauucugcguggaa

SEQ ID NO: 1748456 - RNA, 19 nt, Homo sapiens
  misc_RNA (1)...(19): siRNA sense strand
ugcggaagcuggugaaagc

SEQ ID NO: 1748457 - RNA, 19 nt, Homo sapiens
  misc_RNA (1)...(19): siRNA sense strand
ggugaaagcucgcgucauc

SEQ ID NO: 1748458 - RNA, 19 nt, Homo sapiens
  misc_RNA (1)...(19): siRNA sense strand
guuccuggaugacuccuuu

SEQ ID NO: 1748459 - RNA, 19 nt, Homo sapiens
  misc_RNA (1)...(19): siRNA sense strand
ucuaagcaguggcaucuga

SEQ ID NO: 1748460 - RNA, 19 nt, Homo sapiens
  misc_RNA (1)...(19): siRNA sense strand
ugaauuagccaccaaguac

SEQ ID NO: 1748461 - RNA, 19 nt, Homo sapiens
  misc_RNA (1)...(19): siRNA sense strand
uccugaaucuggacucuaa

SEQ ID NO: 1748462 - RNA, 19 nt, Homo sapiens
  misc_RNA (1)...(19): siRNA sense strand
gaugacuccuuucgcaagu

SEQ ID NO: 1748463 - RNA, 19 nt, Homo sapiens
  misc_RNA (1)...(19): siRNA sense strand
gggaguucgugccgccuuu

SEQ ID NO: 1748464 - RNA, 19 nt, Homo sapiens
  misc_RNA (1)...(19): siRNA sense strand
cacaauauccagcgagaga

SEQ ID NO: 1748465 - RNA, 19 nt, Homo sapiens
  misc_RNA (1)...(19): siRNA sense strand
gaucuaagcaguggcaucu

SEQ ID NO: 1748466 - RNA, 19 nt, Homo sapiens
  misc_RNA (1)...(19): siRNA sense strand
caauauccagcgagagaaa

SEQ ID NO: 1748467 - RNA, 19 nt, Homo sapiens
  misc_RNA (1)...(19): siRNA sense strand
gggcuagaauccgggaguu

SEQ ID NO: 1748468 - RNA, 19 nt, Homo sapiens
  misc_RNA (1)...(19): siRNA sense strand
ccagcgagagaaagaguuu

SEQ ID NO: 1748469 - RNA, 19 nt, Homo sapiens
  misc_RNA (1)...(19): siRNA sense strand
caagccagcacccauguuc

SEQ ID NO: 1748470 - RNA, 19 nt, Homo sapiens
  misc_RNA (1)...(19): siRNA sense strand
cguggaagcuacacuuacu

SEQ ID NO: 1748471 - RNA, 19 nt, Homo sapiens
  misc_RNA (1)...(19): siRNA sense strand
aagcucgcgucaucacuga

SEQ ID NO: 1748472 - RNA, 19 nt, Homo sapiens
  misc_RNA (1)...(19): siRNA sense strand
cugaauuagccaccaagua

SEQ ID NO: 1748473 - RNA, 19 nt, Homo sapiens
  misc_RNA (1)...(19): siRNA sense strand
gcuagcccucugccucuuu

SEQ ID NO: 1748474 - RNA, 19 nt, Homo sapiens
  misc_RNA (1)...(19): siRNA sense strand
uguauuauucugcguggaa

SEQ ID NO: 1748475 - RNA, 19 nt, Homo sapiens
  misc_RNA (1)...(19): siRNA sense strand
ugcggaagcuggugaaagc

SEQ ID NO: 1748476 - RNA, 19 nt, Homo sapiens
  misc_RNA (1)...(19): siRNA sense strand
ggugaaagcucgcgucauc

SEQ ID NO: 1748477 - RNA, 19 nt, Homo sapiens
  misc_RNA (1)...(19): siRNA sense strand
guuccuggaugacuccuuu

SEQ ID NO: 1748478 - RNA, 19 nt, Homo sapiens
  misc_RNA (1)...(19): siRNA sense strand
ugaauuagccaccaaguac

SEQ ID NO: 1748479 - RNA, 19 nt, Homo sapiens
  misc_RNA (1)...(19): siRNA sense strand
uccugaaucuggacucuaa

SEQ ID NO: 1748480 - RNA, 19 nt, Homo sapiens
  misc_RNA (1)...(19): siRNA sense strand
gaugacuccuuucgcaagu

SEQ ID NO: 1748481 - RNA, 19 nt, Homo sapiens
  misc_RNA (1)...(19): siRNA sense strand
gggaguucgugccgccuuu

SEQ ID NO: 1748482 - RNA, 19 nt, Homo sapiens
  misc_RNA (1)...(19): siRNA sense strand
cacaauauccagcgagaga

SEQ ID NO: 1748483 - RNA, 19 nt, Homo sapiens
  misc_RNA (1)...(19): siRNA sense strand
caauauccagcgagagaaa

SEQ ID NO: 1748484 - RNA, 19 nt, Homo sapiens
  misc_RNA (1)...(19): siRNA sense strand
gggcuagaauccgggaguu

SEQ ID NO: 1748485 - RNA, 19 nt, Homo sapiens
  misc_RNA (1)...(19): siRNA sense strand
ccagcgagagaaagaguuu

SEQ ID NO: 1748486 - RNA, 19 nt, Homo sapiens
  misc_RNA (1)...(19): siRNA sense strand
caagccagcacccauguuc

SEQ ID NO: 1748487 - RNA, 19 nt, Homo sapiens
  misc_RNA (1)...(19): siRNA sense strand
cguggaagcuacacuuacu

SEQ ID NO: 1748488 - RNA, 19 nt, Homo sapiens
  misc_RNA (1)...(19): siRNA sense strand
aagcucgcgucaucacuga

SEQ ID NO: 1748489 - RNA, 19 nt, Homo sapiens
  misc_RNA (1)...(19): siRNA sense strand
cugaauuagccaccaagua

SEQ ID NO: 1748490 - RNA, 19 nt, Homo sapiens
  misc_RNA (1)...(19): siRNA sense strand
gcuagcccucugccucuuu

SEQ ID NO: 1748491 - RNA, 19 nt, Homo sapiens
  misc_RNA (1)...(19): siRNA sense strand
uguauuauucugcguggaa

SEQ ID NO: 1748492 - RNA, 19 nt, Homo sapiens
  misc_RNA (1)...(19): siRNA sense strand
ugcggaagcuggugaaagc

SEQ ID NO: 1748493 - RNA, 19 nt, Homo sapiens
  misc_RNA (1)...(19): siRNA sense strand
ggugaaagcucgcgucauc

SEQ ID NO: 1748494 - RNA, 19 nt, Homo sapiens
  misc_RNA (1)...(19): siRNA sense strand
guuccuggaugacuccuuu

SEQ ID NO: 1748495 - RNA, 19 nt, Homo sapiens
  misc_RNA (1)...(19): siRNA sense strand
ucuaagcaguggcaucuga

SEQ ID NO: 1748496 - RNA, 19 nt, Homo sapiens
  misc_RNA (1)...(19): siRNA sense strand
ugaauuagccaccaaguac

SEQ ID NO: 1748497 - RNA, 19 nt, Homo sapiens
  misc_RNA (1)...(19): siRNA sense strand
uccugaaucuggacucuaa

SEQ ID NO: 1748498 - RNA, 19 nt, Homo sapiens
  misc_RNA (1)...(19): siRNA sense strand
gaugacuccuuucgcaagu

SEQ ID NO: 1748499 - RNA, 19 nt, Homo sapiens
  misc_RNA (1)...(19): siRNA sense strand
gggaguucgugccgccuuu

SEQ ID NO: 1748500 - RNA, 19 nt, Homo sapiens
  misc_RNA (1)...(19): siRNA sense strand
cacaauauccagcgagaga

SEQ ID NO: 1748501 - RNA, 19 nt, Homo sapiens
  misc_RNA (1)...(19): siRNA sense strand
gaucuaagcaguggcaucu

SEQ ID NO: 1748502 - RNA, 19 nt, Homo sapiens
  misc_RNA (1)...(19): siRNA sense strand
caauauccagcgagagaaa

SEQ ID NO: 1748503 - RNA, 19 nt, Homo sapiens
  misc_RNA (1)...(19): siRNA sense strand
gggcuagaauccgggaguu

SEQ ID NO: 1748504 - RNA, 19 nt, Homo sapiens
  misc_RNA (1)...(19): siRNA sense strand
ccagcgagagaaagaguuu

SEQ ID NO: 1748505 - RNA, 19 nt, Homo sapiens
  misc_RNA (1)...(19): siRNA sense strand
caagccagcacccauguuc

SEQ ID NO: 1748506 - RNA, 19 nt, Homo sapiens
  misc_RNA (1)...(19): siRNA sense strand
cguggaagcuacacuuacu

SEQ ID NO: 1748507 - RNA, 19 nt, Homo sapiens
  misc_RNA (1)...(19): siRNA sense strand
aagcucgcgucaucacuga

SEQ ID NO: 1748508 - RNA, 19 nt, Homo sapiens
  misc_RNA (1)...(19): siRNA sense strand
cugaauuagccaccaagua

SEQ ID NO: 1748509 - RNA, 19 nt, Homo sapiens
  misc_RNA (1)...(19): siRNA sense strand
gcuagcccucugccucuuu

SEQ ID NO: 1748510 - RNA, 19 nt, Homo sapiens
  misc_RNA (1)...(19): siRNA sense strand
uguauuauucugcguggaa

SEQ ID NO: 1748511 - RNA, 19 nt, Homo sapiens
  misc_RNA (1)...(19): siRNA sense strand
ugcggaagcuggugaaagc

SEQ ID NO: 1748512 - RNA, 19 nt, Homo sapiens
  misc_RNA (1)...(19): siRNA sense strand
ggugaaagcucgcgucauc

SEQ ID NO: 1748513 - RNA, 19 nt, Homo sapiens
  misc_RNA (1)...(19): siRNA sense strand
guuccuggaugacuccuuu

SEQ ID NO: 1748514 - RNA, 19 nt, Homo sapiens
  misc_RNA (1)...(19): siRNA sense strand
ucuaagcaguggcaucuga

SEQ ID NO: 1748515 - RNA, 19 nt, Homo sapiens
  misc_RNA (1)...(19): siRNA sense strand
ugaauuagccaccaaguac

SEQ ID NO: 1748516 - RNA, 19 nt, Homo sapiens
  misc_RNA (1)...(19): siRNA sense strand
uccugaaucuggacucuaa

SEQ ID NO: 1748517 - RNA, 19 nt, Homo sapiens
  misc_RNA (1)...(19): siRNA sense strand
gaugacuccuuucgcaagu

SEQ ID NO: 1748518 - RNA, 19 nt, Homo sapiens
  misc_RNA (1)...(19): siRNA sense strand
gggaguucgugccgccuuu

SEQ ID NO: 1748519 - RNA, 19 nt, Homo sapiens
  misc_RNA (1)...(19): siRNA sense strand
cacaauauccagcgagaga

SEQ ID NO: 1748520 - RNA, 19 nt, Homo sapiens
  misc_RNA (1)...(19): siRNA sense strand
gaucuaagcaguggcaucu

SEQ ID NO: 1748521 - RNA, 19 nt, Homo sapiens
  misc_RNA (1)...(19): siRNA sense strand
caauauccagcgagagaaa

SEQ ID NO: 1748522 - RNA, 19 nt, Homo sapiens
  misc_RNA (1)...(19): siRNA sense strand
gggcuagaauccgggaguu

SEQ ID NO: 1748523 - RNA, 19 nt, Homo sapiens
  misc_RNA (1)...(19): siRNA sense strand
ccagcgagagaaagaguuu

SEQ ID NO: 1748524 - RNA, 19 nt, Homo sapiens
  misc_RNA (1)...(19): siRNA sense strand
caagccagcacccauguuc

SEQ ID NO: 1748525 - RNA, 19 nt, Homo sapiens
  misc_RNA (1)...(19): siRNA sense strand
cguggaagcuacacuuacu

SEQ ID NO: 1748526 - RNA, 19 nt, Homo sapiens
  misc_RNA (1)...(19): siRNA sense strand
aagcucgcgucaucacuga

SEQ ID NO: 1748527 - RNA, 19 nt, Homo sapiens
  misc_RNA (1)...(19): siRNA sense strand
cugaauuagccaccaagua

SEQ ID NO: 1748528 - RNA, 19 nt, Homo sapiens
  misc_RNA (1)...(19): siRNA sense strand
gcuagcccucugccucuuu

SEQ ID NO: 1748529 - RNA, 19 nt, Homo sapiens
  misc_RNA (1)...(19): siRNA sense strand
uguauuauucugcguggaa

SEQ ID NO: 1748530 - RNA, 19 nt, Homo sapiens
  misc_RNA (1)...(19): siRNA sense strand
ugcggaagcuggugaaagc

SEQ ID NO: 1748531 - RNA, 19 nt, Homo sapiens
  misc_RNA (1)...(19): siRNA sense strand
ggugaaagcucgcgucauc

SEQ ID NO: 1748532 - RNA, 19 nt, Homo sapiens
  misc_RNA (1)...(19): siRNA sense strand
guuccuggaugacuccuuu

SEQ ID NO: 1748533 - RNA, 19 nt, Homo sapiens
  misc_RNA (1)...(19): siRNA sense strand
ugaauuagccaccaaguac

SEQ ID NO: 1748534 - RNA, 19 nt, Homo sapiens
  misc_RNA (1)...(19): siRNA sense strand
uccugaaucuggacucuaa

SEQ ID NO: 1748535 - RNA, 19 nt, Homo sapiens
  misc_RNA (1)...(19): siRNA sense strand
gaugacuccuuucgcaagu

SEQ ID NO: 1748536 - RNA, 19 nt, Homo sapiens
  misc_RNA (1)...(19): siRNA sense strand
gggaguucgugccgccuuu

SEQ ID NO: 1748537 - RNA, 19 nt, Homo sapiens
  misc_RNA (1)...(19): siRNA sense strand
cacaauauccagcgagaga

SEQ ID NO: 1748538 - RNA, 19 nt, Homo sapiens
  misc_RNA (1)...(19): siRNA sense strand
caauauccagcgagagaaa

SEQ ID NO: 1748539 - RNA, 19 nt, Homo sapiens
  misc_RNA (1)...(19): siRNA sense strand
gggcuagaauccgggaguu

SEQ ID NO: 1748540 - RNA, 19 nt, Homo sapiens
  misc_RNA (1)...(19): siRNA sense strand
ccagcgagagaaagaguuu

SEQ ID NO: 1748541 - RNA, 19 nt, Homo sapiens
  misc_RNA (1)...(19): siRNA sense strand
caagccagcacccauguuc

SEQ ID NO: 1748542 - RNA, 19 nt, Homo sapiens
  misc_RNA (1)...(19): siRNA sense strand
cguggaagcuacacuuacu

SEQ ID NO: 1748543 - RNA, 19 nt, Homo sapiens
  misc_RNA (1)...(19): siRNA sense strand
aagcucgcgucaucacuga

SEQ ID NO: 1748544 - RNA, 19 nt, Homo sapiens
  misc_RNA (1)...(19): siRNA sense strand
cugaauuagccaccaagua

SEQ ID NO: 1748545 - RNA, 19 nt, Homo sapiens
  misc_RNA (1)...(19): siRNA sense strand
gcuagcccucugccucuuu

SEQ ID NO: 1748546 - RNA, 19 nt, Homo sapiens
  misc_RNA (1)...(19): siRNA sense strand
uguauuauucugcguggaa

SEQ ID NO: 1748547 - RNA, 19 nt, Homo sapiens
  misc_RNA (1)...(19): siRNA sense strand
ugcggaagcuggugaaagc

SEQ ID NO: 1748548 - RNA, 19 nt, Homo sapiens
  misc_RNA (1)...(19): siRNA sense strand
ggugaaagcucgcgucauc

SEQ ID NO: 1748549 - RNA, 19 nt, Homo sapiens
  misc_RNA (1)...(19): siRNA sense strand
guuccuggaugacuccuuu

SEQ ID NO: 1748550 - RNA, 19 nt, Homo sapiens
  misc_RNA (1)...(19): siRNA sense strand
ucuaagcaguggcaucuga

SEQ ID NO: 1748551 - RNA, 19 nt, Homo sapiens
  misc_RNA (1)...(19): siRNA sense strand
ugaauuagccaccaaguac

SEQ ID NO: 1748552 - RNA, 19 nt, Homo sapiens
  misc_RNA (1)...(19): siRNA sense strand
uccugaaucuggacucuaa

SEQ ID NO: 1748553 - RNA, 19 nt, Homo sapiens
  misc_RNA (1)...(19): siRNA sense strand
gaugacuccuuucgcaagu

SEQ ID NO: 1748554 - RNA, 19 nt, Homo sapiens
  misc_RNA (1)...(19): siRNA sense strand
gggaguucgugccgccuuu

SEQ ID NO: 1748555 - RNA, 19 nt, Homo sapiens
  misc_RNA (1)...(19): siRNA sense strand
cacaauauccagcgagaga

SEQ ID NO: 1748556 - RNA, 19 nt, Homo sapiens
  misc_RNA (1)...(19): siRNA sense strand
gaucuaagcaguggcaucu

SEQ ID NO: 1748557 - RNA, 19 nt, Homo sapiens
  misc_RNA (1)...(19): siRNA sense strand
caauauccagcgagagaaa

SEQ ID NO: 1748558 - RNA, 19 nt, Homo sapiens
  misc_RNA (1)...(19): siRNA sense strand
gggcuagaauccgggaguu

SEQ ID NO: 1748559 - RNA, 19 nt, Homo sapiens
  misc_RNA (1)...(19): siRNA sense strand
ccagcgagagaaagaguuu

SEQ ID NO: 1748560 - RNA, 19 nt, Homo sapiens
  misc_RNA (1)...(19): siRNA sense strand
caagccagcacccauguuc

SEQ ID NO: 1748561 - RNA, 19 nt, Homo sapiens
  misc_RNA (1)...(19): siRNA sense strand
cguggaagcuacacuuacu

SEQ ID NO: 1748562 - RNA, 19 nt, Homo sapiens
  misc_RNA (1)...(19): siRNA sense strand
aagcucgcgucaucacuga

SEQ ID NO: 1748563 - RNA, 19 nt, Homo sapiens
  misc_RNA (1)...(19): siRNA sense strand
cugaauuagccaccaagua

SEQ ID NO: 1748564 - RNA, 19 nt, Homo sapiens
  misc_RNA (1)...(19): siRNA sense strand
gcuagcccucugccucuuu

SEQ ID NO: 1748565 - RNA, 19 nt, Homo sapiens
  misc_RNA (1)...(19): siRNA sense strand
uguauuauucugcguggaa

SEQ ID NO: 1748566 - RNA, 19 nt, Homo sapiens
  misc_RNA (1)...(19): siRNA sense strand
ugcggaagcuggugaaagc

SEQ ID NO: 1748567 - RNA, 19 nt, Homo sapiens
  misc_RNA (1)...(19): siRNA sense strand
guuccuggaugacuccuuu

SEQ ID NO: 1748568 - RNA, 19 nt, Homo sapiens
  misc_RNA (1)...(19): siRNA sense strand
ugaauuagccaccaaguac

SEQ ID NO: 1748569 - RNA, 19 nt, Homo sapiens
  misc_RNA (1)...(19): siRNA sense strand
uccugaaucuggacucuaa

SEQ ID NO: 1748570 - RNA, 19 nt, Homo sapiens
  misc_RNA (1)...(19): siRNA sense strand
gaugacuccuuucgcaagu

SEQ ID NO: 1748571 - RNA, 19 nt, Homo sapiens
  misc_RNA (1)...(19): siRNA sense strand
gggaguucgugccgccuuu

SEQ ID NO: 1748572 - RNA, 19 nt, Homo sapiens
  misc_RNA (1)...(19): siRNA sense strand
gggcuagaauccgggaguu

SEQ ID NO: 1748573 - RNA, 19 nt, Homo sapiens
  misc_RNA (1)...(19): siRNA sense strand
caagccagcacccauguuc

SEQ ID NO: 1748574 - RNA, 19 nt, Homo sapiens
  misc_RNA (1)...(19): siRNA sense strand
cguggaagcuacacuuacu

SEQ ID NO: 1748575 - RNA, 19 nt, Homo sapiens
  misc_RNA (1)...(19): siRNA sense strand
cugaauuagccaccaagua

SEQ ID NO: 1748576 - RNA, 19 nt, Homo sapiens
  misc_RNA (1)...(19): siRNA sense strand
gcuagcccucugccucuuu

SEQ ID NO: 1748577 - RNA, 19 nt, Homo sapiens
  misc_RNA (1)...(19): siRNA sense strand
uguauuauucugcguggaa

SEQ ID NO: 1748578 - RNA, 19 nt, Homo sapiens
  misc_RNA (1)...(19): siRNA sense strand
ggaaauccauguccgugua

SEQ ID NO: 1748579 - RNA, 19 nt, Homo sapiens
  misc_RNA (1)...(19): siRNA sense strand
ccaacgagcucccgaguga

SEQ ID NO: 1748580 - RNA, 19 nt, Homo sapiens
  misc_RNA (1)...(19): siRNA sense strand
gcagcaaguuugugcagua

SEQ ID NO: 1748581 - RNA, 19 nt, Homo sapiens
  misc_RNA (1)...(19): siRNA sense strand
gcagcaagauguuugugaa

SEQ ID NO: 1748582 - RNA, 19 nt, Homo sapiens
  misc_RNA (1)...(19): siRNA sense strand
gaugcgggcuccugccuuu

SEQ ID NO: 1748583 - RNA, 19 nt, Homo sapiens
  misc_RNA (1)...(19): siRNA sense strand
gagcagauccuggcaaaga

SEQ ID NO: 1748584 - RNA, 19 nt, Homo sapiens
  misc_RNA (1)...(19): siRNA sense strand
ugacuugccugguggagaa

SEQ ID NO: 1748585 - RNA, 19 nt, Homo sapiens
  misc_RNA (1)...(19): siRNA sense strand
ccaaggguguguaugagaa

SEQ ID NO: 1748586 - RNA, 19 nt, Homo sapiens
  misc_RNA (1)...(19): siRNA sense strand
gaccucacaucaacuucua

SEQ ID NO: 1748587 - RNA, 19 nt, Homo sapiens
  misc_RNA (1)...(19): siRNA sense strand
gggagcagauccuggcaaa

SEQ ID NO: 1748588 - RNA, 19 nt, Homo sapiens
  misc_RNA (1)...(19): siRNA sense strand
gcaaguuugugcaguacga

SEQ ID NO: 1748589 - RNA, 19 nt, Homo sapiens
  misc_RNA (1)...(19): siRNA sense strand
gcaagggcgugcagaggau

SEQ ID NO: 1748590 - RNA, 19 nt, Homo sapiens
  misc_RNA (1)...(19): siRNA sense strand
ggacgacugcagcaaguuu

SEQ ID NO: 1748591 - RNA, 19 nt, Homo sapiens
  misc_RNA (1)...(19): siRNA sense strand
guaacacggucaucaagca

SEQ ID NO: 1748592 - RNA, 19 nt, Homo sapiens
  misc_RNA (1)...(19): siRNA sense strand
gggugaaccuggugacaga

SEQ ID NO: 1748593 - RNA, 19 nt, Homo sapiens
  misc_RNA (1)...(19): siRNA sense strand
uuaacgagaucacugcuau

SEQ ID NO: 1748594 - RNA, 19 nt, Homo sapiens
  misc_RNA (1)...(19): siRNA sense strand
acacggagcugggcaagau

SEQ ID NO: 1748595 - RNA, 19 nt, Homo sapiens
  misc_RNA (1)...(19): siRNA sense strand
cgagaucacugcuaugacu

SEQ ID NO: 1748596 - RNA, 19 nt, Homo sapiens
  misc_RNA (1)...(19): siRNA sense strand
ucgaggcccugaaggagua

SEQ ID NO: 1748597 - RNA, 19 nt, Homo sapiens
  misc_RNA (1)...(19): siRNA sense strand
acagcaacaugaagcaauu

SEQ ID NO: 1748598 - RNA, 19 nt, Homo sapiens
  misc_RNA (1)...(19): siRNA sense strand
gagaaccugcaguccuuua

SEQ ID NO: 1748599 - RNA, 19 nt, Homo sapiens
  misc_RNA (1)...(19): siRNA sense strand
ccgcaggcuuggcaucuuu

SEQ ID NO: 1748600 - RNA, 19 nt, Homo sapiens
  misc_RNA (1)...(19): siRNA sense strand
ccuggugguuuguguauga

SEQ ID NO: 1748601 - RNA, 19 nt, Homo sapiens
  misc_RNA (1)...(19): siRNA sense strand
gaagugcuccgaagacaac

SEQ ID NO: 1748602 - RNA, 19 nt, Homo sapiens
  misc_RNA (1)...(19): siRNA sense strand
uggagaaccugcaguccuu

SEQ ID NO: 1748603 - RNA, 19 nt, Homo sapiens
  misc_RNA (1)...(19): siRNA sense strand
cagagauggugcugucaga

SEQ ID NO: 1748604 - RNA, 19 nt, Homo sapiens
  misc_RNA (1)...(19): siRNA sense strand
agauggugcugucagauga

SEQ ID NO: 1748605 - RNA, 19 nt, Homo sapiens
  misc_RNA (1)...(19): siRNA sense strand
uaccucaucuccuccaaug

SEQ ID NO: 1748606 - RNA, 19 nt, Homo sapiens
  misc_RNA (1)...(19): siRNA sense strand
gagauggugcugucagaug

SEQ ID NO: 1748607 - RNA, 19 nt, Homo sapiens
  misc_RNA (1)...(19): siRNA sense strand
caaggaaggaggacaugga

SEQ ID NO: 1748608 - RNA, 19 nt, Homo sapiens
  misc_RNA (1)...(19): siRNA sense strand
gcaccagcccugaagaaag

SEQ ID NO: 1748609 - RNA, 19 nt, Homo sapiens
  misc_RNA (1)...(19): siRNA sense strand
ccacggcucugggcuucaa

SEQ ID NO: 1748610 - RNA, 19 nt, Homo sapiens
  misc_RNA (1)...(19): siRNA sense strand
ccucaucuccuccaauguu

SEQ ID NO: 1748611 - RNA, 19 nt, Homo sapiens
  misc_RNA (1)...(19): siRNA sense strand
gcguggcgcugucuacuac

SEQ ID NO: 1748612 - RNA, 19 nt, Homo sapiens
  misc_RNA (1)...(19): siRNA sense strand
ggaguucacccuggaguuc

SEQ ID NO: 1748613 - RNA, 19 nt, Homo sapiens
  misc_RNA (1)...(19): siRNA sense strand
agacggaccugaccuucgu

SEQ ID NO: 1748614 - RNA, 19 nt, Homo sapiens
  misc_RNA (1)...(19): siRNA sense strand
ccgagaagcccucaucagu

SEQ ID NO: 1748615 - RNA, 19 nt, Homo sapiens
  misc_RNA (1)...(19): siRNA sense strand
gcgcaagcuggacgaguuu

SEQ ID NO: 1748616 - RNA, 19 nt, Homo sapiens
  misc_RNA (1)...(19): siRNA sense strand
caccagcccugaagaaagc

SEQ ID NO: 1748617 - RNA, 19 nt, Homo sapiens
  misc_RNA (1)...(19): siRNA sense strand
ggccagggcagcaagaugu

SEQ ID NO: 1748618 - RNA, 19 nt, Homo sapiens
  misc_RNA (1)...(19): siRNA sense strand
ggaguaugagccugagaug

SEQ ID NO: 1748619 - RNA, 19 nt, Homo sapiens
  misc_RNA (1)...(19): siRNA sense strand
gcucaccaccaaucagaug

SEQ ID NO: 1748620 - RNA, 19 nt, Homo sapiens
  misc_RNA (1)...(19): siRNA sense strand
ugaaccaggacaagaagaa

SEQ ID NO: 1748621 - RNA, 19 nt, Homo sapiens
  misc_RNA (1)...(19): siRNA sense strand
gggcugcaccucagucauc

SEQ ID NO: 1748622 - RNA, 19 nt, Homo sapiens
  misc_RNA (1)...(19): siRNA sense strand
ggugguggugcuccagaua

SEQ ID NO: 1748623 - RNA, 19 nt, Homo sapiens
  misc_RNA (1)...(19): siRNA sense strand
caucgacugugagguguuc

SEQ ID NO: 1748624 - RNA, 19 nt, Homo sapiens
  misc_RNA (1)...(19): siRNA sense strand
gcaucuuccucacggcaau

SEQ ID NO: 1748625 - RNA, 19 nt, Homo sapiens
  misc_RNA (1)...(19): siRNA sense strand
uggcugcccuugucuccuu

SEQ ID NO: 1748626 - RNA, 19 nt, Homo sapiens
  misc_RNA (1)...(19): siRNA sense strand
caucucggguaccacguau

SEQ ID NO: 1748627 - RNA, 19 nt, Homo sapiens
  misc_RNA (1)...(19): siRNA sense strand
gcacgcucaccaccaauca

SEQ ID NO: 1748628 - RNA, 19 nt, Homo sapiens
  misc_RNA (1)...(19): siRNA sense strand
gcugucuacuacuucaaga

SEQ ID NO: 1748629 - RNA, 19 nt, Homo sapiens
  misc_RNA (1)...(19): siRNA sense strand
caauaucacaucgggcaaa

SEQ ID NO: 1748630 - RNA, 19 nt, Homo sapiens
  misc_RNA (1)...(19): siRNA sense strand
gcaguccuuuaacgagauc

SEQ ID NO: 1748631 - RNA, 19 nt, Homo sapiens
  misc_RNA (1)...(19): siRNA sense strand
gcgcauggcacgcaagaac

SEQ ID NO: 1748632 - RNA, 19 nt, Homo sapiens
  misc_RNA (1)...(19): siRNA sense strand
ucuaccagcugaggaacuu

SEQ ID NO: 1748633 - RNA, 19 nt, Homo sapiens
  misc_RNA (1)...(19): siRNA sense strand
ggagaaccugcaguccuuu

SEQ ID NO: 1748634 - RNA, 19 nt, Homo sapiens
  misc_RNA (1)...(19): siRNA sense strand
ggaccucacaucaacuucu

SEQ ID NO: 1748635 - RNA, 19 nt, Homo sapiens
  misc_RNA (1)...(19): siRNA sense strand
gaaccugcaguccuuuaac

SEQ ID NO: 1748636 - RNA, 19 nt, Homo sapiens
  misc_RNA (1)...(19): siRNA sense strand
caucaacaucggccacuuc

SEQ ID NO: 1748637 - RNA, 19 nt, Homo sapiens
  misc_RNA (1)...(19): siRNA sense strand
agauaucucugccugucau

SEQ ID NO: 1748638 - RNA, 19 nt, Homo sapiens
  misc_RNA (1)...(19): siRNA sense strand
ccaccaccauggccuuguc

SEQ ID NO: 1748639 - RNA, 19 nt, Homo sapiens
  misc_RNA (1)...(19): siRNA sense strand
cgaggucgucugcaucuuc

SEQ ID NO: 1748640 - RNA, 19 nt, Homo sapiens
  misc_RNA (1)...(19): siRNA sense strand
ggaacgcaacgccgagagu

SEQ ID NO: 1748641 - RNA, 19 nt, Homo sapiens
  misc_RNA (1)...(19): siRNA sense strand
gggagcuggugcuggaaca

SEQ ID NO: 1748642 - RNA, 19 nt, Homo sapiens
  misc_RNA (1)...(19): siRNA sense strand
ggcagcaagauguuuguga

SEQ ID NO: 1748643 - RNA, 19 nt, Homo sapiens
  misc_RNA (1)...(19): siRNA sense strand
gaaauccauguccguguac

SEQ ID NO: 1748644 - RNA, 19 nt, Homo sapiens
  misc_RNA (1)...(19): siRNA sense strand
ggccaaggguguguaugag

SEQ ID NO: 1748645 - RNA, 19 nt, Homo sapiens
  misc_RNA (1)...(19): siRNA sense strand
cggcugucaucacuacaug

SEQ ID NO: 1748646 - RNA, 19 nt, Homo sapiens
  misc_RNA (1)...(19): siRNA sense strand
gccaaggguguguaugaga

SEQ ID NO: 1748647 - RNA, 19 nt, Homo sapiens
  misc_RNA (1)...(19): siRNA sense strand
gcuggcucuucuuccgaua

SEQ ID NO: 1748648 - RNA, 19 nt, Homo sapiens
  misc_RNA (1)...(19): siRNA sense strand
gagcugugaaccaggacaa

SEQ ID NO: 1748649 - RNA, 19 nt, Homo sapiens
  misc_RNA (1)...(19): siRNA sense strand
cagcaaguuugugcaguac

SEQ ID NO: 1748650 - RNA, 19 nt, Homo sapiens
  misc_RNA (1)...(19): siRNA sense strand
agcgcaagcuggacgaguu

SEQ ID NO: 1748651 - RNA, 19 nt, Homo sapiens
  misc_RNA (1)...(19): siRNA sense strand
caagauccggagccagaug

SEQ ID NO: 1748652 - RNA, 19 nt, Homo sapiens
  misc_RNA (1)...(19): siRNA sense strand
gcugugaaccaggacaaga

SEQ ID NO: 1748653 - RNA, 19 nt, Homo sapiens
  misc_RNA (1)...(19): siRNA sense strand
guggcgcugucuacuacuu

SEQ ID NO: 1748654 - RNA, 19 nt, Homo sapiens
  misc_RNA (1)...(19): siRNA sense strand
ccaucgaggcccugaagga

SEQ ID NO: 1748655 - RNA, 19 nt, Homo sapiens
  misc_RNA (1)...(19): siRNA sense strand
cgagcuggcgccuguaaca

SEQ ID NO: 1748656 - RNA, 19 nt, Homo sapiens
  misc_RNA (1)...(19): siRNA sense strand
cggagacagcucugacuug

SEQ ID NO: 1748657 - RNA, 19 nt, Homo sapiens
  misc_RNA (1)...(19): siRNA sense strand
ggaaauccauguccgugua

SEQ ID NO: 1748658 - RNA, 19 nt, Homo sapiens
  misc_RNA (1)...(19): siRNA sense strand
ccaacgagcucccgaguga

SEQ ID NO: 1748659 - RNA, 19 nt, Homo sapiens
  misc_RNA (1)...(19): siRNA sense strand
gcagcaaguuugugcagua

SEQ ID NO: 1748660 - RNA, 19 nt, Homo sapiens
  misc_RNA (1)...(19): siRNA sense strand
gcagcaagauguuugugaa

SEQ ID NO: 1748661 - RNA, 19 nt, Homo sapiens
  misc_RNA (1)...(19): siRNA sense strand
gaugcgggcuccugccuuu

SEQ ID NO: 1748662 - RNA, 19 nt, Homo sapiens
  misc_RNA (1)...(19): siRNA sense strand
gagcagauccuggcaaaga

SEQ ID NO: 1748663 - RNA, 19 nt, Homo sapiens
  misc_RNA (1)...(19): siRNA sense strand
ugacuugccugguggagaa

SEQ ID NO: 1748664 - RNA, 19 nt, Homo sapiens
  misc_RNA (1)...(19): siRNA sense strand
ccaaggguguguaugagaa

SEQ ID NO: 1748665 - RNA, 19 nt, Homo sapiens
  misc_RNA (1)...(19): siRNA sense strand
gaccucacaucaacuucua

SEQ ID NO: 1748666 - RNA, 19 nt, Homo sapiens
  misc_RNA (1)...(19): siRNA sense strand
gggagcagauccuggcaaa

SEQ ID NO: 1748667 - RNA, 19 nt, Homo sapiens
  misc_RNA (1)...(19): siRNA sense strand
gcaaguuugugcaguacga

SEQ ID NO: 1748668 - RNA, 19 nt, Homo sapiens
  misc_RNA (1)...(19): siRNA sense strand
gcaagggcgugcagaggau

SEQ ID NO: 1748669 - RNA, 19 nt, Homo sapiens
  misc_RNA (1)...(19): siRNA sense strand
ggacgacugcagcaaguuu

SEQ ID NO: 1748670 - RNA, 19 nt, Homo sapiens
  misc_RNA (1)...(19): siRNA sense strand
guaacacggucaucaagca

SEQ ID NO: 1748671 - RNA, 19 nt, Homo sapiens
  misc_RNA (1)...(19): siRNA sense strand
gggugaaccuggugacaga

SEQ ID NO: 1748672 - RNA, 19 nt, Homo sapiens
  misc_RNA (1)...(19): siRNA sense strand
uuaacgagaucacugcuau

SEQ ID NO: 1748673 - RNA, 19 nt, Homo sapiens
  misc_RNA (1)...(19): siRNA sense strand
acacggagcugggcaagau

SEQ ID NO: 1748674 - RNA, 19 nt, Homo sapiens
  misc_RNA (1)...(19): siRNA sense strand
cgagaucacugcuaugacu

SEQ ID NO: 1748675 - RNA, 19 nt, Homo sapiens
  misc_RNA (1)...(19): siRNA sense strand
ucgaggcccugaaggagua

SEQ ID NO: 1748676 - RNA, 19 nt, Homo sapiens
  misc_RNA (1)...(19): siRNA sense strand
acagcaacaugaagcaauu

SEQ ID NO: 1748677 - RNA, 19 nt, Homo sapiens
  misc_RNA (1)...(19): siRNA sense strand
gagaaccugcaguccuuua

SEQ ID NO: 1748678 - RNA, 19 nt, Homo sapiens
  misc_RNA (1)...(19): siRNA sense strand
ccgcaggcuuggcaucuuu

SEQ ID NO: 1748679 - RNA, 19 nt, Homo sapiens
  misc_RNA (1)...(19): siRNA sense strand
ccuggugguuuguguauga

SEQ ID NO: 1748680 - RNA, 19 nt, Homo sapiens
  misc_RNA (1)...(19): siRNA sense strand
gaagugcuccgaagacaac

SEQ ID NO: 1748681 - RNA, 19 nt, Homo sapiens
  misc_RNA (1)...(19): siRNA sense strand
uggagaaccugcaguccuu

SEQ ID NO: 1748682 - RNA, 19 nt, Homo sapiens
  misc_RNA (1)...(19): siRNA sense strand
cagagauggugcugucaga

SEQ ID NO: 1748683 - RNA, 19 nt, Homo sapiens
  misc_RNA (1)...(19): siRNA sense strand
agauggugcugucagauga

SEQ ID NO: 1748684 - RNA, 19 nt, Homo sapiens
  misc_RNA (1)...(19): siRNA sense strand
uaccucaucuccuccaaug

SEQ ID NO: 1748685 - RNA, 19 nt, Homo sapiens
  misc_RNA (1)...(19): siRNA sense strand
gagauggugcugucagaug

SEQ ID NO: 1748686 - RNA, 19 nt, Homo sapiens
  misc_RNA (1)...(19): siRNA sense strand
caaggaaggaggacaugga

SEQ ID NO: 1748687 - RNA, 19 nt, Homo sapiens
  misc_RNA (1)...(19): siRNA sense strand
gcaccagcccugaagaaag

SEQ ID NO: 1748688 - RNA, 19 nt, Homo sapiens
  misc_RNA (1)...(19): siRNA sense strand
ccacggcucugggcuucaa

SEQ ID NO: 1748689 - RNA, 19 nt, Homo sapiens
  misc_RNA (1)...(19): siRNA sense strand
ccucaucuccuccaauguu

SEQ ID NO: 1748690 - RNA, 19 nt, Homo sapiens
  misc_RNA (1)...(19): siRNA sense strand
gcguggcgcugucuacuac

SEQ ID NO: 1748691 - RNA, 19 nt, Homo sapiens
  misc_RNA (1)...(19): siRNA sense strand
ggaguucacccuggaguuc

SEQ ID NO: 1748692 - RNA, 19 nt, Homo sapiens
  misc_RNA (1)...(19): siRNA sense strand
agacggaccugaccuucgu

SEQ ID NO: 1748693 - RNA, 19 nt, Homo sapiens
  misc_RNA (1)...(19): siRNA sense strand
ccgagaagcccucaucagu

SEQ ID NO: 1748694 - RNA, 19 nt, Homo sapiens
  misc_RNA (1)...(19): siRNA sense strand
gcgcaagcuggacgaguuu

SEQ ID NO: 1748695 - RNA, 19 nt, Homo sapiens
  misc_RNA (1)...(19): siRNA sense strand
caccagcccugaagaaagc

SEQ ID NO: 1748696 - RNA, 19 nt, Homo sapiens
  misc_RNA (1)...(19): siRNA sense strand
ggccagggcagcaagaugu

SEQ ID NO: 1748697 - RNA, 19 nt, Homo sapiens
  misc_RNA (1)...(19): siRNA sense strand
ggaguaugagccugagaug

SEQ ID NO: 1748698 - RNA, 19 nt, Homo sapiens
  misc_RNA (1)...(19): siRNA sense strand
gcucaccaccaaucagaug

SEQ ID NO: 1748699 - RNA, 19 nt, Homo sapiens
  misc_RNA (1)...(19): siRNA sense strand
ugaaccaggacaagaagaa

SEQ ID NO: 1748700 - RNA, 19 nt, Homo sapiens
  misc_RNA (1)...(19): siRNA sense strand
gggcugcaccucagucauc

SEQ ID NO: 1748701 - RNA, 19 nt, Homo sapiens
  misc_RNA (1)...(19): siRNA sense strand
ggugguggugcuccagaua

SEQ ID NO: 1748702 - RNA, 19 nt, Homo sapiens
  misc_RNA (1)...(19): siRNA sense strand
caucgacugugagguguuc

SEQ ID NO: 1748703 - RNA, 19 nt, Homo sapiens
  misc_RNA (1)...(19): siRNA sense strand
gcaucuuccucacggcaau

SEQ ID NO: 1748704 - RNA, 19 nt, Homo sapiens
  misc_RNA (1)...(19): siRNA sense strand
uggcugcccuugucuccuu

SEQ ID NO: 1748705 - RNA, 19 nt, Homo sapiens
  misc_RNA (1)...(19): siRNA sense strand
caucucggguaccacguau

SEQ ID NO: 1748706 - RNA, 19 nt, Homo sapiens
  misc_RNA (1)...(19): siRNA sense strand
gcacgcucaccaccaauca

SEQ ID NO: 1748707 - RNA, 19 nt, Homo sapiens
  misc_RNA (1)...(19): siRNA sense strand
gcugucuacuacuucaaga

SEQ ID NO: 1748708 - RNA, 19 nt, Homo sapiens
  misc_RNA (1)...(19): siRNA sense strand
caauaucacaucgggcaaa

SEQ ID NO: 1748709 - RNA, 19 nt, Homo sapiens
  misc_RNA (1)...(19): siRNA sense strand
gcaguccuuuaacgagauc

SEQ ID NO: 1748710 - RNA, 19 nt, Homo sapiens
  misc_RNA (1)...(19): siRNA sense strand
gcgcauggcacgcaagaac

SEQ ID NO: 1748711 - RNA, 19 nt, Homo sapiens
  misc_RNA (1)...(19): siRNA sense strand
ucuaccagcugaggaacuu

SEQ ID NO: 1748712 - RNA, 19 nt, Homo sapiens
  misc_RNA (1)...(19): siRNA sense strand
ggagaaccugcaguccuuu

SEQ ID NO: 1748713 - RNA, 19 nt, Homo sapiens
  misc_RNA (1)...(19): siRNA sense strand
ggaccucacaucaacuucu

SEQ ID NO: 1748714 - RNA, 19 nt, Homo sapiens
  misc_RNA (1)...(19): siRNA sense strand
gaaccugcaguccuuuaac

SEQ ID NO: 1748715 - RNA, 19 nt, Homo sapiens
  misc_RNA (1)...(19): siRNA sense strand
caucaacaucggccacuuc

SEQ ID NO: 1748716 - RNA, 19 nt, Homo sapiens
  misc_RNA (1)...(19): siRNA sense strand
agauaucucugccugucau

SEQ ID NO: 1748717 - RNA, 19 nt, Homo sapiens
  misc_RNA (1)...(19): siRNA sense strand
ccaccaccauggccuuguc

SEQ ID NO: 1748718 - RNA, 19 nt, Homo sapiens
  misc_RNA (1)...(19): siRNA sense strand
cgaggucgucugcaucuuc

SEQ ID NO: 1748719 - RNA, 19 nt, Homo sapiens
  misc_RNA (1)...(19): siRNA sense strand
ggaacgcaacgccgagagu

SEQ ID NO: 1748720 - RNA, 19 nt, Homo sapiens
  misc_RNA (1)...(19): siRNA sense strand
gggagcuggugcuggaaca

SEQ ID NO: 1748721 - RNA, 19 nt, Homo sapiens
  misc_RNA (1)...(19): siRNA sense strand
ggcagcaagauguuuguga

SEQ ID NO: 1748722 - RNA, 19 nt, Homo sapiens
  misc_RNA (1)...(19): siRNA sense strand
gaaauccauguccguguac

SEQ ID NO: 1748723 - RNA, 19 nt, Homo sapiens
  misc_RNA (1)...(19): siRNA sense strand
ggccaaggguguguaugag

SEQ ID NO: 1748724 - RNA, 19 nt, Homo sapiens
  misc_RNA (1)...(19): siRNA sense strand
cggcugucaucacuacaug

SEQ ID NO: 1748725 - RNA, 19 nt, Homo sapiens
  misc_RNA (1)...(19): siRNA sense strand
gccaaggguguguaugaga

SEQ ID NO: 1748726 - RNA, 19 nt, Homo sapiens
  misc_RNA (1)...(19): siRNA sense strand
gcuggcucuucuuccgaua

SEQ ID NO: 1748727 - RNA, 19 nt, Homo sapiens
  misc_RNA (1)...(19): siRNA sense strand
gagcugugaaccaggacaa

SEQ ID NO: 1748728 - RNA, 19 nt, Homo sapiens
  misc_RNA (1)...(19): siRNA sense strand
cagcaaguuugugcaguac

SEQ ID NO: 1748729 - RNA, 19 nt, Homo sapiens
  misc_RNA (1)...(19): siRNA sense strand
agcgcaagcuggacgaguu

SEQ ID NO: 1748730 - RNA, 19 nt, Homo sapiens
  misc_RNA (1)...(19): siRNA sense strand
caagauccggagccagaug

SEQ ID NO: 1748731 - RNA, 19 nt, Homo sapiens
  misc_RNA (1)...(19): siRNA sense strand
gcugugaaccaggacaaga

SEQ ID NO: 1748732 - RNA, 19 nt, Homo sapiens
  misc_RNA (1)...(19): siRNA sense strand
guggcgcugucuacuacuu

SEQ ID NO: 1748733 - RNA, 19 nt, Homo sapiens
  misc_RNA (1)...(19): siRNA sense strand
ccaucgaggcccugaagga

SEQ ID NO: 1748734 - RNA, 19 nt, Homo sapiens
  misc_RNA (1)...(19): siRNA sense strand
cgagcuggcgccuguaaca

SEQ ID NO: 1748735 - RNA, 19 nt, Homo sapiens
  misc_RNA (1)...(19): siRNA sense strand
cggagacagcucugacuug

SEQ ID NO: 1748736 - RNA, 19 nt, Homo sapiens
  misc_RNA (1)...(19): siRNA sense strand
ggaaauccauguccgugua

SEQ ID NO: 1748737 - RNA, 19 nt, Homo sapiens
  misc_RNA (1)...(19): siRNA sense strand
ccaacgagcucccgaguga

SEQ ID NO: 1748738 - RNA, 19 nt, Homo sapiens
  misc_RNA (1)...(19): siRNA sense strand
gcagcaaguuugugcagua

SEQ ID NO: 1748739 - RNA, 19 nt, Homo sapiens
  misc_RNA (1)...(19): siRNA sense strand
gcagcaagauguuugugaa

SEQ ID NO: 1748740 - RNA, 19 nt, Homo sapiens
  misc_RNA (1)...(19): siRNA sense strand
gaugcgggcuccugccuuu

SEQ ID NO: 1748741 - RNA, 19 nt, Homo sapiens
  misc_RNA (1)...(19): siRNA sense strand
gagcagauccuggcaaaga

SEQ ID NO: 1748742 - RNA, 19 nt, Homo sapiens
  misc_RNA (1)...(19): siRNA sense strand
ugacuugccugguggagaa

SEQ ID NO: 1748743 - RNA, 19 nt, Homo sapiens
  misc_RNA (1)...(19): siRNA sense strand
ccaaggguguguaugagaa

SEQ ID NO: 1748744 - RNA, 19 nt, Homo sapiens
  misc_RNA (1)...(19): siRNA sense strand
gaccucacaucaacuucua

SEQ ID NO: 1748745 - RNA, 19 nt, Homo sapiens
  misc_RNA (1)...(19): siRNA sense strand
gggagcagauccuggcaaa

SEQ ID NO: 1748746 - RNA, 19 nt, Homo sapiens
  misc_RNA (1)...(19): siRNA sense strand
gcaaguuugugcaguacga

SEQ ID NO: 1748747 - RNA, 19 nt, Homo sapiens
  misc_RNA (1)...(19): siRNA sense strand
gcaagggcgugcagaggau

SEQ ID NO: 1748748 - RNA, 19 nt, Homo sapiens
  misc_RNA (1)...(19): siRNA sense strand
ggacgacugcagcaaguuu

SEQ ID NO: 1748749 - RNA, 19 nt, Homo sapiens
  misc_RNA (1)...(19): siRNA sense strand
guaacacggucaucaagca

SEQ ID NO: 1748750 - RNA, 19 nt, Homo sapiens
  misc_RNA (1)...(19): siRNA sense strand
gggugaaccuggugacaga

SEQ ID NO: 1748751 - RNA, 19 nt, Homo sapiens
  misc_RNA (1)...(19): siRNA sense strand
uuaacgagaucacugcuau

SEQ ID NO: 1748752 - RNA, 19 nt, Homo sapiens
  misc_RNA (1)...(19): siRNA sense strand
acacggagcugggcaagau

SEQ ID NO: 1748753 - RNA, 19 nt, Homo sapiens
  misc_RNA (1)...(19): siRNA sense strand
cgagaucacugcuaugacu

SEQ ID NO: 1748754 - RNA, 19 nt, Homo sapiens
  misc_RNA (1)...(19): siRNA sense strand
ucgaggcccugaaggagua

SEQ ID NO: 1748755 - RNA, 19 nt, Homo sapiens
  misc_RNA (1)...(19): siRNA sense strand
acagcaacaugaagcaauu

SEQ ID NO: 1748756 - RNA, 19 nt, Homo sapiens
  misc_RNA (1)...(19): siRNA sense strand
gagaaccugcaguccuuua

SEQ ID NO: 1748757 - RNA, 19 nt, Homo sapiens
  misc_RNA (1)...(19): siRNA sense strand
ccgcaggcuuggcaucuuu

SEQ ID NO: 1748758 - RNA, 19 nt, Homo sapiens
  misc_RNA (1)...(19): siRNA sense strand
ccuggugguuuguguauga

SEQ ID NO: 1748759 - RNA, 19 nt, Homo sapiens
  misc_RNA (1)...(19): siRNA sense strand
gaagugcuccgaagacaac

SEQ ID NO: 1748760 - RNA, 19 nt, Homo sapiens
  misc_RNA (1)...(19): siRNA sense strand
uggagaaccugcaguccuu

SEQ ID NO: 1748761 - RNA, 19 nt, Homo sapiens
  misc_RNA (1)...(19): siRNA sense strand
cagagauggugcugucaga

SEQ ID NO: 1748762 - RNA, 19 nt, Homo sapiens
  misc_RNA (1)...(19): siRNA sense strand
agauggugcugucagauga

SEQ ID NO: 1748763 - RNA, 19 nt, Homo sapiens
  misc_RNA (1)...(19): siRNA sense strand
uaccucaucuccuccaaug

SEQ ID NO: 1748764 - RNA, 19 nt, Homo sapiens
  misc_RNA (1)...(19): siRNA sense strand
gagauggugcugucagaug

SEQ ID NO: 1748765 - RNA, 19 nt, Homo sapiens
  misc_RNA (1)...(19): siRNA sense strand
caaggaaggaggacaugga

SEQ ID NO: 1748766 - RNA, 19 nt, Homo sapiens
  misc_RNA (1)...(19): siRNA sense strand
gcaccagcccugaagaaag

SEQ ID NO: 1748767 - RNA, 19 nt, Homo sapiens
  misc_RNA (1)...(19): siRNA sense strand
ccacggcucugggcuucaa

SEQ ID NO: 1748768 - RNA, 19 nt, Homo sapiens
  misc_RNA (1)...(19): siRNA sense strand
ccucaucuccuccaauguu

SEQ ID NO: 1748769 - RNA, 19 nt, Homo sapiens
  misc_RNA (1)...(19): siRNA sense strand
gcguggcgcugucuacuac

SEQ ID NO: 1748770 - RNA, 19 nt, Homo sapiens
  misc_RNA (1)...(19): siRNA sense strand
ggaguucacccuggaguuc

SEQ ID NO: 1748771 - RNA, 19 nt, Homo sapiens
  misc_RNA (1)...(19): siRNA sense strand
agacggaccugaccuucgu

SEQ ID NO: 1748772 - RNA, 19 nt, Homo sapiens
  misc_RNA (1)...(19): siRNA sense strand
ccgagaagcccucaucagu

SEQ ID NO: 1748773 - RNA, 19 nt, Homo sapiens
  misc_RNA (1)...(19): siRNA sense strand
gcgcaagcuggacgaguuu

SEQ ID NO: 1748774 - RNA, 19 nt, Homo sapiens
  misc_RNA (1)...(19): siRNA sense strand
caccagcccugaagaaagc

SEQ ID NO: 1748775 - RNA, 19 nt, Homo sapiens
  misc_RNA (1)...(19): siRNA sense strand
ggccagggcagcaagaugu

SEQ ID NO: 1748776 - RNA, 19 nt, Homo sapiens
  misc_RNA (1)...(19): siRNA sense strand
ggaguaugagccugagaug

SEQ ID NO: 1748777 - RNA, 19 nt, Homo sapiens
  misc_RNA (1)...(19): siRNA sense strand
gcucaccaccaaucagaug

SEQ ID NO: 1748778 - RNA, 19 nt, Homo sapiens
  misc_RNA (1)...(19): siRNA sense strand
ugaaccaggacaagaagaa

SEQ ID NO: 1748779 - RNA, 19 nt, Homo sapiens
  misc_RNA (1)...(19): siRNA sense strand
gggcugcaccucagucauc

SEQ ID NO: 1748780 - RNA, 19 nt, Homo sapiens
  misc_RNA (1)...(19): siRNA sense strand
ggugguggugcuccagaua

SEQ ID NO: 1748781 - RNA, 19 nt, Homo sapiens
  misc_RNA (1)...(19): siRNA sense strand
caucgacugugagguguuc

SEQ ID NO: 1748782 - RNA, 19 nt, Homo sapiens
  misc_RNA (1)...(19): siRNA sense strand
gcaucuuccucacggcaau

SEQ ID NO: 1748783 - RNA, 19 nt, Homo sapiens
  misc_RNA (1)...(19): siRNA sense strand
uggcugcccuugucuccuu

SEQ ID NO: 1748784 - RNA, 19 nt, Homo sapiens
  misc_RNA (1)...(19): siRNA sense strand
caucucggguaccacguau

SEQ ID NO: 1748785 - RNA, 19 nt, Homo sapiens
  misc_RNA (1)...(19): siRNA sense strand
gcacgcucaccaccaauca

SEQ ID NO: 1748786 - RNA, 19 nt, Homo sapiens
  misc_RNA (1)...(19): siRNA sense strand
gcugucuacuacuucaaga

SEQ ID NO: 1748787 - RNA, 19 nt, Homo sapiens
  misc_RNA (1)...(19): siRNA sense strand
caauaucacaucgggcaaa

SEQ ID NO: 1748788 - RNA, 19 nt, Homo sapiens
  misc_RNA (1)...(19): siRNA sense strand
gcaguccuuuaacgagauc

SEQ ID NO: 1748789 - RNA, 19 nt, Homo sapiens
  misc_RNA (1)...(19): siRNA sense strand
gcgcauggcacgcaagaac

SEQ ID NO: 1748790 - RNA, 19 nt, Homo sapiens
  misc_RNA (1)...(19): siRNA sense strand
ucuaccagcugaggaacuu

SEQ ID NO: 1748791 - RNA, 19 nt, Homo sapiens
  misc_RNA (1)...(19): siRNA sense strand
ggagaaccugcaguccuuu

SEQ ID NO: 1748792 - RNA, 19 nt, Homo sapiens
  misc_RNA (1)...(19): siRNA sense strand
ggaccucacaucaacuucu

SEQ ID NO: 1748793 - RNA, 19 nt, Homo sapiens
  misc_RNA (1)...(19): siRNA sense strand
gaaccugcaguccuuuaac

SEQ ID NO: 1748794 - RNA, 19 nt, Homo sapiens
  misc_RNA (1)...(19): siRNA sense strand
caucaacaucggccacuuc

SEQ ID NO: 1748795 - RNA, 19 nt, Homo sapiens
  misc_RNA (1)...(19): siRNA sense strand
agauaucucugccugucau

SEQ ID NO: 1748796 - RNA, 19 nt, Homo sapiens
  misc_RNA (1)...(19): siRNA sense strand
ccaccaccauggccuuguc

SEQ ID NO: 1748797 - RNA, 19 nt, Homo sapiens
  misc_RNA (1)...(19): siRNA sense strand
cgaggucgucugcaucuuc

SEQ ID NO: 1748798 - RNA, 19 nt, Homo sapiens
  misc_RNA (1)...(19): siRNA sense strand
ggaacgcaacgccgagagu

SEQ ID NO: 1748799 - RNA, 19 nt, Homo sapiens
  misc_RNA (1)...(19): siRNA sense strand
gggagcuggugcuggaaca

SEQ ID NO: 1748800 - RNA, 19 nt, Homo sapiens
  misc_RNA (1)...(19): siRNA sense strand
ggcagcaagauguuuguga

SEQ ID NO: 1748801 - RNA, 19 nt, Homo sapiens
  misc_RNA (1)...(19): siRNA sense strand
gaaauccauguccguguac

SEQ ID NO: 1748802 - RNA, 19 nt, Homo sapiens
  misc_RNA (1)...(19): siRNA sense strand
ggccaaggguguguaugag

SEQ ID NO: 1748803 - RNA, 19 nt, Homo sapiens
  misc_RNA (1)...(19): siRNA sense strand
cggcugucaucacuacaug

SEQ ID NO: 1748804 - RNA, 19 nt, Homo sapiens
  misc_RNA (1)...(19): siRNA sense strand
gccaaggguguguaugaga

SEQ ID NO: 1748805 - RNA, 19 nt, Homo sapiens
  misc_RNA (1)...(19): siRNA sense strand
gcuggcucuucuuccgaua

SEQ ID NO: 1748806 - RNA, 19 nt, Homo sapiens
  misc_RNA (1)...(19): siRNA sense strand
gagcugugaaccaggacaa

SEQ ID NO: 1748807 - RNA, 19 nt, Homo sapiens
  misc_RNA (1)...(19): siRNA sense strand
cagcaaguuugugcaguac

SEQ ID NO: 1748808 - RNA, 19 nt, Homo sapiens
  misc_RNA (1)...(19): siRNA sense strand
agcgcaagcuggacgaguu

SEQ ID NO: 1748809 - RNA, 19 nt, Homo sapiens
  misc_RNA (1)...(19): siRNA sense strand
caagauccggagccagaug

SEQ ID NO: 1748810 - RNA, 19 nt, Homo sapiens
  misc_RNA (1)...(19): siRNA sense strand
gcugugaaccaggacaaga

SEQ ID NO: 1748811 - RNA, 19 nt, Homo sapiens
  misc_RNA (1)...(19): siRNA sense strand
guggcgcugucuacuacuu

SEQ ID NO: 1748812 - RNA, 19 nt, Homo sapiens
  misc_RNA (1)...(19): siRNA sense strand
ccaucgaggcccugaagga

SEQ ID NO: 1748813 - RNA, 19 nt, Homo sapiens
  misc_RNA (1)...(19): siRNA sense strand
cgagcuggcgccuguaaca

SEQ ID NO: 1748814 - RNA, 19 nt, Homo sapiens
  misc_RNA (1)...(19): siRNA sense strand
cggagacagcucugacuug

SEQ ID NO: 1748815 - RNA, 19 nt, Homo sapiens
  misc_RNA (1)...(19): siRNA sense strand
ggaaauccauguccgugua

SEQ ID NO: 1748816 - RNA, 19 nt, Homo sapiens
  misc_RNA (1)...(19): siRNA sense strand
ccaacgagcucccgaguga

SEQ ID NO: 1748817 - RNA, 19 nt, Homo sapiens
  misc_RNA (1)...(19): siRNA sense strand
gcagcaaguuugugcagua

SEQ ID NO: 1748818 - RNA, 19 nt, Homo sapiens
  misc_RNA (1)...(19): siRNA sense strand
gcagcaagauguuugugaa

SEQ ID NO: 1748819 - RNA, 19 nt, Homo sapiens
  misc_RNA (1)...(19): siRNA sense strand
gaugcgggcuccugccuuu

SEQ ID NO: 1748820 - RNA, 19 nt, Homo sapiens
  misc_RNA (1)...(19): siRNA sense strand
gagcagauccuggcaaaga

SEQ ID NO: 1748821 - RNA, 19 nt, Homo sapiens
  misc_RNA (1)...(19): siRNA sense strand
ugacuugccugguggagaa

SEQ ID NO: 1748822 - RNA, 19 nt, Homo sapiens
  misc_RNA (1)...(19): siRNA sense strand
ccaaggguguguaugagaa

SEQ ID NO: 1748823 - RNA, 19 nt, Homo sapiens
  misc_RNA (1)...(19): siRNA sense strand
gaccucacaucaacuucua

SEQ ID NO: 1748824 - RNA, 19 nt, Homo sapiens
  misc_RNA (1)...(19): siRNA sense strand
gggagcagauccuggcaaa

SEQ ID NO: 1748825 - RNA, 19 nt, Homo sapiens
  misc_RNA (1)...(19): siRNA sense strand
gcaaguuugugcaguacga

SEQ ID NO: 1748826 - RNA, 19 nt, Homo sapiens
  misc_RNA (1)...(19): siRNA sense strand
gcaagggcgugcagaggau

SEQ ID NO: 1748827 - RNA, 19 nt, Homo sapiens
  misc_RNA (1)...(19): siRNA sense strand
ggacgacugcagcaaguuu

SEQ ID NO: 1748828 - RNA, 19 nt, Homo sapiens
  misc_RNA (1)...(19): siRNA sense strand
guaacacggucaucaagca

SEQ ID NO: 1748829 - RNA, 19 nt, Homo sapiens
  misc_RNA (1)...(19): siRNA sense strand
gggugaaccuggugacaga

SEQ ID NO: 1748830 - RNA, 19 nt, Homo sapiens
  misc_RNA (1)...(19): siRNA sense strand
uuaacgagaucacugcuau

SEQ ID NO: 1748831 - RNA, 19 nt, Homo sapiens
  misc_RNA (1)...(19): siRNA sense strand
acacggagcugggcaagau

SEQ ID NO: 1748832 - RNA, 19 nt, Homo sapiens
  misc_RNA (1)...(19): siRNA sense strand
cgagaucacugcuaugacu

SEQ ID NO: 1748833 - RNA, 19 nt, Homo sapiens
  misc_RNA (1)...(19): siRNA sense strand
ucgaggcccugaaggagua

SEQ ID NO: 1748834 - RNA, 19 nt, Homo sapiens
  misc_RNA (1)...(19): siRNA sense strand
acagcaacaugaagcaauu

SEQ ID NO: 1748835 - RNA, 19 nt, Homo sapiens
  misc_RNA (1)...(19): siRNA sense strand
gagaaccugcaguccuuua

SEQ ID NO: 1748836 - RNA, 19 nt, Homo sapiens
  misc_RNA (1)...(19): siRNA sense strand
gaagugagcgcugggaaca

SEQ ID NO: 1748837 - RNA, 19 nt, Homo sapiens
  misc_RNA (1)...(19): siRNA sense strand
ccgcaggcuuggcaucuuu

SEQ ID NO: 1748838 - RNA, 19 nt, Homo sapiens
  misc_RNA (1)...(19): siRNA sense strand
ccuggugguuuguguauga

SEQ ID NO: 1748839 - RNA, 19 nt, Homo sapiens
  misc_RNA (1)...(19): siRNA sense strand
gaagugcuccgaagacaac

SEQ ID NO: 1748840 - RNA, 19 nt, Homo sapiens
  misc_RNA (1)...(19): siRNA sense strand
uggagaaccugcaguccuu

SEQ ID NO: 1748841 - RNA, 19 nt, Homo sapiens
  misc_RNA (1)...(19): siRNA sense strand
cagagauggugcugucaga

SEQ ID NO: 1748842 - RNA, 19 nt, Homo sapiens
  misc_RNA (1)...(19): siRNA sense strand
agauggugcugucagauga

SEQ ID NO: 1748843 - RNA, 19 nt, Homo sapiens
  misc_RNA (1)...(19): siRNA sense strand
uaccucaucuccuccaaug

SEQ ID NO: 1748844 - RNA, 19 nt, Homo sapiens
  misc_RNA (1)...(19): siRNA sense strand
gagauggugcugucagaug

SEQ ID NO: 1748845 - RNA, 19 nt, Homo sapiens
  misc_RNA (1)...(19): siRNA sense strand
caaggaaggaggacaugga

SEQ ID NO: 1748846 - RNA, 19 nt, Homo sapiens
  misc_RNA (1)...(19): siRNA sense strand
gcaccagcccugaagaaag

SEQ ID NO: 1748847 - RNA, 19 nt, Homo sapiens
  misc_RNA (1)...(19): siRNA sense strand
ccacggcucugggcuucaa

SEQ ID NO: 1748848 - RNA, 19 nt, Homo sapiens
  misc_RNA (1)...(19): siRNA sense strand
ccucaucuccuccaauguu

SEQ ID NO: 1748849 - RNA, 19 nt, Homo sapiens
  misc_RNA (1)...(19): siRNA sense strand
gcguggcgcugucuacuac

SEQ ID NO: 1748850 - RNA, 19 nt, Homo sapiens
  misc_RNA (1)...(19): siRNA sense strand
ggaguucacccuggaguuc

SEQ ID NO: 1748851 - RNA, 19 nt, Homo sapiens
  misc_RNA (1)...(19): siRNA sense strand
agacggaccugaccuucgu

SEQ ID NO: 1748852 - RNA, 19 nt, Homo sapiens
  misc_RNA (1)...(19): siRNA sense strand
ccgagaagcccucaucagu

SEQ ID NO: 1748853 - RNA, 19 nt, Homo sapiens
  misc_RNA (1)...(19): siRNA sense strand
gcgcaagcuggacgaguuu

SEQ ID NO: 1748854 - RNA, 19 nt, Homo sapiens
  misc_RNA (1)...(19): siRNA sense strand
caccagcccugaagaaagc

SEQ ID NO: 1748855 - RNA, 19 nt, Homo sapiens
  misc_RNA (1)...(19): siRNA sense strand
ggccagggcagcaagaugu

SEQ ID NO: 1748856 - RNA, 19 nt, Homo sapiens
  misc_RNA (1)...(19): siRNA sense strand
ggaguaugagccugagaug

SEQ ID NO: 1748857 - RNA, 19 nt, Homo sapiens
  misc_RNA (1)...(19): siRNA sense strand
gcucaccaccaaucagaug

SEQ ID NO: 1748858 - RNA, 19 nt, Homo sapiens
  misc_RNA (1)...(19): siRNA sense strand
ugaaccaggacaagaagaa

SEQ ID NO: 1748859 - RNA, 19 nt, Homo sapiens
  misc_RNA (1)...(19): siRNA sense strand
gggcugcaccucagucauc

SEQ ID NO: 1748860 - RNA, 19 nt, Homo sapiens
  misc_RNA (1)...(19): siRNA sense strand
ggugguggugcuccagaua

SEQ ID NO: 1748861 - RNA, 19 nt, Homo sapiens
  misc_RNA (1)...(19): siRNA sense strand
caucgacugugagguguuc

SEQ ID NO: 1748862 - RNA, 19 nt, Homo sapiens
  misc_RNA (1)...(19): siRNA sense strand
gcaucuuccucacggcaau

SEQ ID NO: 1748863 - RNA, 19 nt, Homo sapiens
  misc_RNA (1)...(19): siRNA sense strand
uggcugcccuugucuccuu

SEQ ID NO: 1748864 - RNA, 19 nt, Homo sapiens
  misc_RNA (1)...(19): siRNA sense strand
caucucggguaccacguau

SEQ ID NO: 1748865 - RNA, 19 nt, Homo sapiens
  misc_RNA (1)...(19): siRNA sense strand
gcacgcucaccaccaauca

SEQ ID NO: 1748866 - RNA, 19 nt, Homo sapiens
  misc_RNA (1)...(19): siRNA sense strand
gcugucuacuacuucaaga

SEQ ID NO: 1748867 - RNA, 19 nt, Homo sapiens
  misc_RNA (1)...(19): siRNA sense strand
caauaucacaucgggcaaa

SEQ ID NO: 1748868 - RNA, 19 nt, Homo sapiens
  misc_RNA (1)...(19): siRNA sense strand
gcaguccuuuaacgagauc

SEQ ID NO: 1748869 - RNA, 19 nt, Homo sapiens
  misc_RNA (1)...(19): siRNA sense strand
gcgcauggcacgcaagaac

SEQ ID NO: 1748870 - RNA, 19 nt, Homo sapiens
  misc_RNA (1)...(19): siRNA sense strand
ucuaccagcugaggaacuu

SEQ ID NO: 1748871 - RNA, 19 nt, Homo sapiens
  misc_RNA (1)...(19): siRNA sense strand
agugagcgcugggaacaga

SEQ ID NO: 1748872 - RNA, 19 nt, Homo sapiens
  misc_RNA (1)...(19): siRNA sense strand
ggagaaccugcaguccuuu

SEQ ID NO: 1748873 - RNA, 19 nt, Homo sapiens
  misc_RNA (1)...(19): siRNA sense strand
ggaccucacaucaacuucu

SEQ ID NO: 1748874 - RNA, 19 nt, Homo sapiens
  misc_RNA (1)...(19): siRNA sense strand
gaaccugcaguccuuuaac

SEQ ID NO: 1748875 - RNA, 19 nt, Homo sapiens
  misc_RNA (1)...(19): siRNA sense strand
caucaacaucggccacuuc

SEQ ID NO: 1748876 - RNA, 19 nt, Homo sapiens
  misc_RNA (1)...(19): siRNA sense strand
agauaucucugccugucau

SEQ ID NO: 1748877 - RNA, 19 nt, Homo sapiens
  misc_RNA (1)...(19): siRNA sense strand
ccaccaccauggccuuguc

SEQ ID NO: 1748878 - RNA, 19 nt, Homo sapiens
  misc_RNA (1)...(19): siRNA sense strand
cgaggucgucugcaucuuc

SEQ ID NO: 1748879 - RNA, 19 nt, Homo sapiens
  misc_RNA (1)...(19): siRNA sense strand
ggaacgcaacgccgagagu

SEQ ID NO: 1748880 - RNA, 19 nt, Homo sapiens
  misc_RNA (1)...(19): siRNA sense strand
gggagcuggugcuggaaca

SEQ ID NO: 1748881 - RNA, 19 nt, Homo sapiens
  misc_RNA (1)...(19): siRNA sense strand
ggcagcaagauguuuguga

SEQ ID NO: 1748882 - RNA, 19 nt, Homo sapiens
  misc_RNA (1)...(19): siRNA sense strand
gaaauccauguccguguac

SEQ ID NO: 1748883 - RNA, 19 nt, Homo sapiens
  misc_RNA (1)...(19): siRNA sense strand
ggccaaggguguguaugag

SEQ ID NO: 1748884 - RNA, 19 nt, Homo sapiens
  misc_RNA (1)...(19): siRNA sense strand
cggcugucaucacuacaug

SEQ ID NO: 1748885 - RNA, 19 nt, Homo sapiens
  misc_RNA (1)...(19): siRNA sense strand
gccaaggguguguaugaga

SEQ ID NO: 1748886 - RNA, 19 nt, Homo sapiens
  misc_RNA (1)...(19): siRNA sense strand
gcuggcucuucuuccgaua

SEQ ID NO: 1748887 - RNA, 19 nt, Homo sapiens
  misc_RNA (1)...(19): siRNA sense strand
gagcugugaaccaggacaa

SEQ ID NO: 1748888 - RNA, 19 nt, Homo sapiens
  misc_RNA (1)...(19): siRNA sense strand
cagcaaguuugugcaguac

SEQ ID NO: 1748889 - RNA, 19 nt, Homo sapiens
  misc_RNA (1)...(19): siRNA sense strand
agcgcaagcuggacgaguu

SEQ ID NO: 1748890 - RNA, 19 nt, Homo sapiens
  misc_RNA (1)...(19): siRNA sense strand
caagauccggagccagaug

SEQ ID NO: 1748891 - RNA, 19 nt, Homo sapiens
  misc_RNA (1)...(19): siRNA sense strand
gcugugaaccaggacaaga

SEQ ID NO: 1748892 - RNA, 19 nt, Homo sapiens
  misc_RNA (1)...(19): siRNA sense strand
guggcgcugucuacuacuu

SEQ ID NO: 1748893 - RNA, 19 nt, Homo sapiens
  misc_RNA (1)...(19): siRNA sense strand
ccaucgaggcccugaagga

SEQ ID NO: 1748894 - RNA, 19 nt, Homo sapiens
  misc_RNA (1)...(19): siRNA sense strand
cgagcuggcgccuguaaca

SEQ ID NO: 1748895 - RNA, 19 nt, Homo sapiens
  misc_RNA (1)...(19): siRNA sense strand
cggagacagcucugacuug

SEQ ID NO: 1748896 - RNA, 19 nt, Homo sapiens
  misc_RNA (1)...(19): siRNA sense strand
ggaaauccauguccgugua

SEQ ID NO: 1748897 - RNA, 19 nt, Homo sapiens
  misc_RNA (1)...(19): siRNA sense strand
ccaacgagcucccgaguga

SEQ ID NO: 1748898 - RNA, 19 nt, Homo sapiens
  misc_RNA (1)...(19): siRNA sense strand
gcagcaaguuugugcagua

SEQ ID NO: 1748899 - RNA, 19 nt, Homo sapiens
  misc_RNA (1)...(19): siRNA sense strand
gcagcaagauguuugugaa

SEQ ID NO: 1748900 - RNA, 19 nt, Homo sapiens
  misc_RNA (1)...(19): siRNA sense strand
gaugcgggcuccugccuuu

SEQ ID NO: 1748901 - RNA, 19 nt, Homo sapiens
  misc_RNA (1)...(19): siRNA sense strand
gagcagauccuggcaaaga

SEQ ID NO: 1748902 - RNA, 19 nt, Homo sapiens
  misc_RNA (1)...(19): siRNA sense strand
ugacuugccugguggagaa

SEQ ID NO: 1748903 - RNA, 19 nt, Homo sapiens
  misc_RNA (1)...(19): siRNA sense strand
ccaaggguguguaugagaa

SEQ ID NO: 1748904 - RNA, 19 nt, Homo sapiens
  misc_RNA (1)...(19): siRNA sense strand
gaccucacaucaacuucua

SEQ ID NO: 1748905 - RNA, 19 nt, Homo sapiens
  misc_RNA (1)...(19): siRNA sense strand
gggagcagauccuggcaaa

SEQ ID NO: 1748906 - RNA, 19 nt, Homo sapiens
  misc_RNA (1)...(19): siRNA sense strand
gcaaguuugugcaguacga

SEQ ID NO: 1748907 - RNA, 19 nt, Homo sapiens
  misc_RNA (1)...(19): siRNA sense strand
gcaagggcgugcagaggau

SEQ ID NO: 1748908 - RNA, 19 nt, Homo sapiens
  misc_RNA (1)...(19): siRNA sense strand
ggacgacugcagcaaguuu

SEQ ID NO: 1748909 - RNA, 19 nt, Homo sapiens
  misc_RNA (1)...(19): siRNA sense strand
guaacacggucaucaagca

SEQ ID NO: 1748910 - RNA, 19 nt, Homo sapiens
  misc_RNA (1)...(19): siRNA sense strand
gggugaaccuggugacaga

SEQ ID NO: 1748911 - RNA, 19 nt, Homo sapiens
  misc_RNA (1)...(19): siRNA sense strand
uuaacgagaucacugcuau

SEQ ID NO: 1748912 - RNA, 19 nt, Homo sapiens
  misc_RNA (1)...(19): siRNA sense strand
acacggagcugggcaagau

SEQ ID NO: 1748913 - RNA, 19 nt, Homo sapiens
  misc_RNA (1)...(19): siRNA sense strand
cgagaucacugcuaugacu

SEQ ID NO: 1748914 - RNA, 19 nt, Homo sapiens
  misc_RNA (1)...(19): siRNA sense strand
ucgaggcccugaaggagua

SEQ ID NO: 1748915 - RNA, 19 nt, Homo sapiens
  misc_RNA (1)...(19): siRNA sense strand
acagcaacaugaagcaauu

SEQ ID NO: 1748916 - RNA, 19 nt, Homo sapiens
  misc_RNA (1)...(19): siRNA sense strand
gagaaccugcaguccuuua

SEQ ID NO: 1748917 - RNA, 19 nt, Homo sapiens
  misc_RNA (1)...(19): siRNA sense strand
ccgcaggcuuggcaucuuu

SEQ ID NO: 1748918 - RNA, 19 nt, Homo sapiens
  misc_RNA (1)...(19): siRNA sense strand
ccuggugguuuguguauga

SEQ ID NO: 1748919 - RNA, 19 nt, Homo sapiens
  misc_RNA (1)...(19): siRNA sense strand
gaagugcuccgaagacaac

SEQ ID NO: 1748920 - RNA, 19 nt, Homo sapiens
  misc_RNA (1)...(19): siRNA sense strand
uggagaaccugcaguccuu

SEQ ID NO: 1748921 - RNA, 19 nt, Homo sapiens
  misc_RNA (1)...(19): siRNA sense strand
cagagauggugcugucaga

SEQ ID NO: 1748922 - RNA, 19 nt, Homo sapiens
  misc_RNA (1)...(19): siRNA sense strand
agauggugcugucagauga

SEQ ID NO: 1748923 - RNA, 19 nt, Homo sapiens
  misc_RNA (1)...(19): siRNA sense strand
uaccucaucuccuccaaug

SEQ ID NO: 1748924 - RNA, 19 nt, Homo sapiens
  misc_RNA (1)...(19): siRNA sense strand
gagauggugcugucagaug

SEQ ID NO: 1748925 - RNA, 19 nt, Homo sapiens
  misc_RNA (1)...(19): siRNA sense strand
caaggaaggaggacaugga

SEQ ID NO: 1748926 - RNA, 19 nt, Homo sapiens
  misc_RNA (1)...(19): siRNA sense strand
gcaccagcccugaagaaag

SEQ ID NO: 1748927 - RNA, 19 nt, Homo sapiens
  misc_RNA (1)...(19): siRNA sense strand
ccacggcucugggcuucaa

SEQ ID NO: 1748928 - RNA, 19 nt, Homo sapiens
  misc_RNA (1)...(19): siRNA sense strand
ccucaucuccuccaauguu

SEQ ID NO: 1748929 - RNA, 19 nt, Homo sapiens
  misc_RNA (1)...(19): siRNA sense strand
gcguggcgcugucuacuac

SEQ ID NO: 1748930 - RNA, 19 nt, Homo sapiens
  misc_RNA (1)...(19): siRNA sense strand
ggaguucacccuggaguuc

SEQ ID NO: 1748931 - RNA, 19 nt, Homo sapiens
  misc_RNA (1)...(19): siRNA sense strand
agacggaccugaccuucgu

SEQ ID NO: 1748932 - RNA, 19 nt, Homo sapiens
  misc_RNA (1)...(19): siRNA sense strand
ccgagaagcccucaucagu

SEQ ID NO: 1748933 - RNA, 19 nt, Homo sapiens
  misc_RNA (1)...(19): siRNA sense strand
gcgcaagcuggacgaguuu

SEQ ID NO: 1748934 - RNA, 19 nt, Homo sapiens
  misc_RNA (1)...(19): siRNA sense strand
caccagcccugaagaaagc

SEQ ID NO: 1748935 - RNA, 19 nt, Homo sapiens
  misc_RNA (1)...(19): siRNA sense strand
ggccagggcagcaagaugu

SEQ ID NO: 1748936 - RNA, 19 nt, Homo sapiens
  misc_RNA (1)...(19): siRNA sense strand
ggaguaugagccugagaug

SEQ ID NO: 1748937 - RNA, 19 nt, Homo sapiens
  misc_RNA (1)...(19): siRNA sense strand
gcucaccaccaaucagaug

SEQ ID NO: 1748938 - RNA, 19 nt, Homo sapiens
  misc_RNA (1)...(19): siRNA sense strand
ugaaccaggacaagaagaa

SEQ ID NO: 1748939 - RNA, 19 nt, Homo sapiens
  misc_RNA (1)...(19): siRNA sense strand
gggcugcaccucagucauc

SEQ ID NO: 1748940 - RNA, 19 nt, Homo sapiens
  misc_RNA (1)...(19): siRNA sense strand
ggugguggugcuccagaua

SEQ ID NO: 1748941 - RNA, 19 nt, Homo sapiens
  misc_RNA (1)...(19): siRNA sense strand
caucgacugugagguguuc

SEQ ID NO: 1748942 - RNA, 19 nt, Homo sapiens
  misc_RNA (1)...(19): siRNA sense strand
gcaucuuccucacggcaau

SEQ ID NO: 1748943 - RNA, 19 nt, Homo sapiens
  misc_RNA (1)...(19): siRNA sense strand
uggcugcccuugucuccuu

SEQ ID NO: 1748944 - RNA, 19 nt, Homo sapiens
  misc_RNA (1)...(19): siRNA sense strand
caucucggguaccacguau

SEQ ID NO: 1748945 - RNA, 19 nt, Homo sapiens
  misc_RNA (1)...(19): siRNA sense strand
gcacgcucaccaccaauca

SEQ ID NO: 1748946 - RNA, 19 nt, Homo sapiens
  misc_RNA (1)...(19): siRNA sense strand
gcugucuacuacuucaaga

SEQ ID NO: 1748947 - RNA, 19 nt, Homo sapiens
  misc_RNA (1)...(19): siRNA sense strand
caauaucacaucgggcaaa

SEQ ID NO: 1748948 - RNA, 19 nt, Homo sapiens
  misc_RNA (1)...(19): siRNA sense strand
gcaguccuuuaacgagauc

SEQ ID NO: 1748949 - RNA, 19 nt, Homo sapiens
  misc_RNA (1)...(19): siRNA sense strand
gcgcauggcacgcaagaac

SEQ ID NO: 1748950 - RNA, 19 nt, Homo sapiens
  misc_RNA (1)...(19): siRNA sense strand
ucuaccagcugaggaacuu

SEQ ID NO: 1748951 - RNA, 19 nt, Homo sapiens
  misc_RNA (1)...(19): siRNA sense strand
ggagaaccugcaguccuuu

SEQ ID NO: 1748952 - RNA, 19 nt, Homo sapiens
  misc_RNA (1)...(19): siRNA sense strand
ggaccucacaucaacuucu

SEQ ID NO: 1748953 - RNA, 19 nt, Homo sapiens
  misc_RNA (1)...(19): siRNA sense strand
gaaccugcaguccuuuaac

SEQ ID NO: 1748954 - RNA, 19 nt, Homo sapiens
  misc_RNA (1)...(19): siRNA sense strand
caucaacaucggccacuuc

SEQ ID NO: 1748955 - RNA, 19 nt, Homo sapiens
  misc_RNA (1)...(19): siRNA sense strand
agauaucucugccugucau

SEQ ID NO: 1748956 - RNA, 19 nt, Homo sapiens
  misc_RNA (1)...(19): siRNA sense strand
ccaccaccauggccuuguc

SEQ ID NO: 1748957 - RNA, 19 nt, Homo sapiens
  misc_RNA (1)...(19): siRNA sense strand
cgaggucgucugcaucuuc

SEQ ID NO: 1748958 - RNA, 19 nt, Homo sapiens
  misc_RNA (1)...(19): siRNA sense strand
ggaacgcaacgccgagagu

SEQ ID NO: 1748959 - RNA, 19 nt, Homo sapiens
  misc_RNA (1)...(19): siRNA sense strand
gggagcuggugcuggaaca

SEQ ID NO: 1748960 - RNA, 19 nt, Homo sapiens
  misc_RNA (1)...(19): siRNA sense strand
ggcagcaagauguuuguga

SEQ ID NO: 1748961 - RNA, 19 nt, Homo sapiens
  misc_RNA (1)...(19): siRNA sense strand
gaaauccauguccguguac

SEQ ID NO: 1748962 - RNA, 19 nt, Homo sapiens
  misc_RNA (1)...(19): siRNA sense strand
ggccaaggguguguaugag

SEQ ID NO: 1748963 - RNA, 19 nt, Homo sapiens
  misc_RNA (1)...(19): siRNA sense strand
cggcugucaucacuacaug

SEQ ID NO: 1748964 - RNA, 19 nt, Homo sapiens
  misc_RNA (1)...(19): siRNA sense strand
gccaaggguguguaugaga

SEQ ID NO: 1748965 - RNA, 19 nt, Homo sapiens
  misc_RNA (1)...(19): siRNA sense strand
gcuggcucuucuuccgaua

SEQ ID NO: 1748966 - RNA, 19 nt, Homo sapiens
  misc_RNA (1)...(19): siRNA sense strand
gagcugugaaccaggacaa

SEQ ID NO: 1748967 - RNA, 19 nt, Homo sapiens
  misc_RNA (1)...(19): siRNA sense strand
cagcaaguuugugcaguac

SEQ ID NO: 1748968 - RNA, 19 nt, Homo sapiens
  misc_RNA (1)...(19): siRNA sense strand
agcgcaagcuggacgaguu

SEQ ID NO: 1748969 - RNA, 19 nt, Homo sapiens
  misc_RNA (1)...(19): siRNA sense strand
caagauccggagccagaug

SEQ ID NO: 1748970 - RNA, 19 nt, Homo sapiens
  misc_RNA (1)...(19): siRNA sense strand
gcugugaaccaggacaaga

SEQ ID NO: 1748971 - RNA, 19 nt, Homo sapiens
  misc_RNA (1)...(19): siRNA sense strand
guggcgcugucuacuacuu

SEQ ID NO: 1748972 - RNA, 19 nt, Homo sapiens
  misc_RNA (1)...(19): siRNA sense strand
ccaucgaggcccugaagga

SEQ ID NO: 1748973 - RNA, 19 nt, Homo sapiens
  misc_RNA (1)...(19): siRNA sense strand
cgagcuggcgccuguaaca

SEQ ID NO: 1748974 - RNA, 19 nt, Homo sapiens
  misc_RNA (1)...(19): siRNA sense strand
cggagacagcucugacuug

SEQ ID NO: 1748975 - RNA, 19 nt, Homo sapiens
  misc_RNA (1)...(19): siRNA sense strand
ggaaauccauguccgugua

SEQ ID NO: 1748976 - RNA, 19 nt, Homo sapiens
  misc_RNA (1)...(19): siRNA sense strand
ccaacgagcucccgaguga

SEQ ID NO: 1748977 - RNA, 19 nt, Homo sapiens
  misc_RNA (1)...(19): siRNA sense strand
gcagcaaguuugugcagua

SEQ ID NO: 1748978 - RNA, 19 nt, Homo sapiens
  misc_RNA (1)...(19): siRNA sense strand
gcagcaagauguuugugaa

SEQ ID NO: 1748979 - RNA, 19 nt, Homo sapiens
  misc_RNA (1)...(19): siRNA sense strand
gaugcgggcuccugccuuu

SEQ ID NO: 1748980 - RNA, 19 nt, Homo sapiens
  misc_RNA (1)...(19): siRNA sense strand
gagcagauccuggcaaaga

SEQ ID NO: 1748981 - RNA, 19 nt, Homo sapiens
  misc_RNA (1)...(19): siRNA sense strand
ugacuugccugguggagaa

SEQ ID NO: 1748982 - RNA, 19 nt, Homo sapiens
  misc_RNA (1)...(19): siRNA sense strand
ccaaggguguguaugagaa

SEQ ID NO: 1748983 - RNA, 19 nt, Homo sapiens
  misc_RNA (1)...(19): siRNA sense strand
gaccucacaucaacuucua

SEQ ID NO: 1748984 - RNA, 19 nt, Homo sapiens
  misc_RNA (1)...(19): siRNA sense strand
gggagcagauccuggcaaa

SEQ ID NO: 1748985 - RNA, 19 nt, Homo sapiens
  misc_RNA (1)...(19): siRNA sense strand
gcaaguuugugcaguacga

SEQ ID NO: 1748986 - RNA, 19 nt, Homo sapiens
  misc_RNA (1)...(19): siRNA sense strand
gcaagggcgugcagaggau

SEQ ID NO: 1748987 - RNA, 19 nt, Homo sapiens
  misc_RNA (1)...(19): siRNA sense strand
ggacgacugcagcaaguuu

SEQ ID NO: 1748988 - RNA, 19 nt, Homo sapiens
  misc_RNA (1)...(19): siRNA sense strand
guaacacggucaucaagca

SEQ ID NO: 1748989 - RNA, 19 nt, Homo sapiens
  misc_RNA (1)...(19): siRNA sense strand
gggugaaccuggugacaga

SEQ ID NO: 1748990 - RNA, 19 nt, Homo sapiens
  misc_RNA (1)...(19): siRNA sense strand
uuaacgagaucacugcuau

SEQ ID NO: 1748991 - RNA, 19 nt, Homo sapiens
  misc_RNA (1)...(19): siRNA sense strand
acacggagcugggcaagau

SEQ ID NO: 1748992 - RNA, 19 nt, Homo sapiens
  misc_RNA (1)...(19): siRNA sense strand
cgagaucacugcuaugacu

SEQ ID NO: 1748993 - RNA, 19 nt, Homo sapiens
  misc_RNA (1)...(19): siRNA sense strand
ucgaggcccugaaggagua

SEQ ID NO: 1748994 - RNA, 19 nt, Homo sapiens
  misc_RNA (1)...(19): siRNA sense strand
acagcaacaugaagcaauu

SEQ ID NO: 1748995 - RNA, 19 nt, Homo sapiens
  misc_RNA (1)...(19): siRNA sense strand
gagaaccugcaguccuuua

SEQ ID NO: 1748996 - RNA, 19 nt, Homo sapiens
  misc_RNA (1)...(19): siRNA sense strand
ccgcaggcuuggcaucuuu

SEQ ID NO: 1748997 - RNA, 19 nt, Homo sapiens
  misc_RNA (1)...(19): siRNA sense strand
ccuggugguuuguguauga

SEQ ID NO: 1748998 - RNA, 19 nt, Homo sapiens
  misc_RNA (1)...(19): siRNA sense strand
gaagugcuccgaagacaac

SEQ ID NO: 1748999 - RNA, 19 nt, Homo sapiens
  misc_RNA (1)...(19): siRNA sense strand
uggagaaccugcaguccuu

SEQ ID NO: 1749000 - RNA, 19 nt, Homo sapiens
  misc_RNA (1)...(19): siRNA sense strand
cagagauggugcugucaga

SEQ ID NO: 1749001 - RNA, 19 nt, Homo sapiens
  misc_RNA (1)...(19): siRNA sense strand
agauggugcugucagauga

SEQ ID NO: 1749002 - RNA, 19 nt, Homo sapiens
  misc_RNA (1)...(19): siRNA sense strand
uaccucaucuccuccaaug

SEQ ID NO: 1749003 - RNA, 19 nt, Homo sapiens
  misc_RNA (1)...(19): siRNA sense strand
gagauggugcugucagaug

SEQ ID NO: 1749004 - RNA, 19 nt, Homo sapiens
  misc_RNA (1)...(19): siRNA sense strand
caaggaaggaggacaugga

SEQ ID NO: 1749005 - RNA, 19 nt, Homo sapiens
  misc_RNA (1)...(19): siRNA sense strand
gcaccagcccugaagaaag

SEQ ID NO: 1749006 - RNA, 19 nt, Homo sapiens
  misc_RNA (1)...(19): siRNA sense strand
ccacggcucugggcuucaa

SEQ ID NO: 1749007 - RNA, 19 nt, Homo sapiens
  misc_RNA (1)...(19): siRNA sense strand
ccucaucuccuccaauguu

SEQ ID NO: 1749008 - RNA, 19 nt, Homo sapiens
  misc_RNA (1)...(19): siRNA sense strand
gcguggcgcugucuacuac

SEQ ID NO: 1749009 - RNA, 19 nt, Homo sapiens
  misc_RNA (1)...(19): siRNA sense strand
ggaguucacccuggaguuc

SEQ ID NO: 1749010 - RNA, 19 nt, Homo sapiens
  misc_RNA (1)...(19): siRNA sense strand
agacggaccugaccuucgu

SEQ ID NO: 1749011 - RNA, 19 nt, Homo sapiens
  misc_RNA (1)...(19): siRNA sense strand
ccgagaagcccucaucagu

SEQ ID NO: 1749012 - RNA, 19 nt, Homo sapiens
  misc_RNA (1)...(19): siRNA sense strand
gcgcaagcuggacgaguuu

SEQ ID NO: 1749013 - RNA, 19 nt, Homo sapiens
  misc_RNA (1)...(19): siRNA sense strand
caccagcccugaagaaagc

SEQ ID NO: 1749014 - RNA, 19 nt, Homo sapiens
  misc_RNA (1)...(19): siRNA sense strand
ggccagggcagcaagaugu

SEQ ID NO: 1749015 - RNA, 19 nt, Homo sapiens
  misc_RNA (1)...(19): siRNA sense strand
ggaguaugagccugagaug

SEQ ID NO: 1749016 - RNA, 19 nt, Homo sapiens
  misc_RNA (1)...(19): siRNA sense strand
gcucaccaccaaucagaug

SEQ ID NO: 1749017 - RNA, 19 nt, Homo sapiens
  misc_RNA (1)...(19): siRNA sense strand
ugaaccaggacaagaagaa

SEQ ID NO: 1749018 - RNA, 19 nt, Homo sapiens
  misc_RNA (1)...(19): siRNA sense strand
gggcugcaccucagucauc

SEQ ID NO: 1749019 - RNA, 19 nt, Homo sapiens
  misc_RNA (1)...(19): siRNA sense strand
ggugguggugcuccagaua

SEQ ID NO: 1749020 - RNA, 19 nt, Homo sapiens
  misc_RNA (1)...(19): siRNA sense strand
caucgacugugagguguuc

SEQ ID NO: 1749021 - RNA, 19 nt, Homo sapiens
  misc_RNA (1)...(19): siRNA sense strand
gcaucuuccucacggcaau

SEQ ID NO: 1749022 - RNA, 19 nt, Homo sapiens
  misc_RNA (1)...(19): siRNA sense strand
uggcugcccuugucuccuu

SEQ ID NO: 1749023 - RNA, 19 nt, Homo sapiens
  misc_RNA (1)...(19): siRNA sense strand
caucucggguaccacguau

SEQ ID NO: 1749024 - RNA, 19 nt, Homo sapiens
  misc_RNA (1)...(19): siRNA sense strand
gcacgcucaccaccaauca

SEQ ID NO: 1749025 - RNA, 19 nt, Homo sapiens
  misc_RNA (1)...(19): siRNA sense strand
gcugucuacuacuucaaga

SEQ ID NO: 1749026 - RNA, 19 nt, Homo sapiens
  misc_RNA (1)...(19): siRNA sense strand
caauaucacaucgggcaaa

SEQ ID NO: 1749027 - RNA, 19 nt, Homo sapiens
  misc_RNA (1)...(19): siRNA sense strand
gcaguccuuuaacgagauc

SEQ ID NO: 1749028 - RNA, 19 nt, Homo sapiens
  misc_RNA (1)...(19): siRNA sense strand
gcgcauggcacgcaagaac

SEQ ID NO: 1749029 - RNA, 19 nt, Homo sapiens
  misc_RNA (1)...(19): siRNA sense strand
ucuaccagcugaggaacuu

SEQ ID NO: 1749030 - RNA, 19 nt, Homo sapiens
  misc_RNA (1)...(19): siRNA sense strand
ggagaaccugcaguccuuu

SEQ ID NO: 1749031 - RNA, 19 nt, Homo sapiens
  misc_RNA (1)...(19): siRNA sense strand
ggaccucacaucaacuucu

SEQ ID NO: 1749032 - RNA, 19 nt, Homo sapiens
  misc_RNA (1)...(19): siRNA sense strand
gaaccugcaguccuuuaac

SEQ ID NO: 1749033 - RNA, 19 nt, Homo sapiens
  misc_RNA (1)...(19): siRNA sense strand
caucaacaucggccacuuc

SEQ ID NO: 1749034 - RNA, 19 nt, Homo sapiens
  misc_RNA (1)...(19): siRNA sense strand
agauaucucugccugucau

SEQ ID NO: 1749035 - RNA, 19 nt, Homo sapiens
  misc_RNA (1)...(19): siRNA sense strand
ccaccaccauggccuuguc

SEQ ID NO: 1749036 - RNA, 19 nt, Homo sapiens
  misc_RNA (1)...(19): siRNA sense strand
cgaggucgucugcaucuuc

SEQ ID NO: 1749037 - RNA, 19 nt, Homo sapiens
  misc_RNA (1)...(19): siRNA sense strand
ggaacgcaacgccgagagu

SEQ ID NO: 1749038 - RNA, 19 nt, Homo sapiens
  misc_RNA (1)...(19): siRNA sense strand
gggagcuggugcuggaaca

SEQ ID NO: 1749039 - RNA, 19 nt, Homo sapiens
  misc_RNA (1)...(19): siRNA sense strand
ggcagcaagauguuuguga

SEQ ID NO: 1749040 - RNA, 19 nt, Homo sapiens
  misc_RNA (1)...(19): siRNA sense strand
gaaauccauguccguguac

SEQ ID NO: 1749041 - RNA, 19 nt, Homo sapiens
  misc_RNA (1)...(19): siRNA sense strand
ggccaaggguguguaugag

SEQ ID NO: 1749042 - RNA, 19 nt, Homo sapiens
  misc_RNA (1)...(19): siRNA sense strand
cggcugucaucacuacaug

SEQ ID NO: 1749043 - RNA, 19 nt, Homo sapiens
  misc_RNA (1)...(19): siRNA sense strand
gccaaggguguguaugaga

SEQ ID NO: 1749044 - RNA, 19 nt, Homo sapiens
  misc_RNA (1)...(19): siRNA sense strand
gcuggcucuucuuccgaua

SEQ ID NO: 1749045 - RNA, 19 nt, Homo sapiens
  misc_RNA (1)...(19): siRNA sense strand
gagcugugaaccaggacaa

SEQ ID NO: 1749046 - RNA, 19 nt, Homo sapiens
  misc_RNA (1)...(19): siRNA sense strand
cagcaaguuugugcaguac

SEQ ID NO: 1749047 - RNA, 19 nt, Homo sapiens
  misc_RNA (1)...(19): siRNA sense strand
agcgcaagcuggacgaguu

SEQ ID NO: 1749048 - RNA, 19 nt, Homo sapiens
  misc_RNA (1)...(19): siRNA sense strand
caagauccggagccagaug

SEQ ID NO: 1749049 - RNA, 19 nt, Homo sapiens
  misc_RNA (1)...(19): siRNA sense strand
gcugugaaccaggacaaga

SEQ ID NO: 1749050 - RNA, 19 nt, Homo sapiens
  misc_RNA (1)...(19): siRNA sense strand
guggcgcugucuacuacuu

SEQ ID NO: 1749051 - RNA, 19 nt, Homo sapiens
  misc_RNA (1)...(19): siRNA sense strand
ccaucgaggcccugaagga

SEQ ID NO: 1749052 - RNA, 19 nt, Homo sapiens
  misc_RNA (1)...(19): siRNA sense strand
cgagcuggcgccuguaaca

SEQ ID NO: 1749053 - RNA, 19 nt, Homo sapiens
  misc_RNA (1)...(19): siRNA sense strand
cggagacagcucugacuug

SEQ ID NO: 1749054 - RNA, 19 nt, Homo sapiens
  misc_RNA (1)...(19): siRNA sense strand
ggaaauccauguccgugua

SEQ ID NO: 1749055 - RNA, 19 nt, Homo sapiens
  misc_RNA (1)...(19): siRNA sense strand
ccaacgagcucccgaguga

SEQ ID NO: 1749056 - RNA, 19 nt, Homo sapiens
  misc_RNA (1)...(19): siRNA sense strand
gcagcaaguuugugcagua

SEQ ID NO: 1749057 - RNA, 19 nt, Homo sapiens
  misc_RNA (1)...(19): siRNA sense strand
gcagcaagauguuugugaa

SEQ ID NO: 1749058 - RNA, 19 nt, Homo sapiens
  misc_RNA (1)...(19): siRNA sense strand
gaugcgggcuccugccuuu

SEQ ID NO: 1749059 - RNA, 19 nt, Homo sapiens
  misc_RNA (1)...(19): siRNA sense strand
gagcagauccuggcaaaga

SEQ ID NO: 1749060 - RNA, 19 nt, Homo sapiens
  misc_RNA (1)...(19): siRNA sense strand
ugacuugccugguggagaa

SEQ ID NO: 1749061 - RNA, 19 nt, Homo sapiens
  misc_RNA (1)...(19): siRNA sense strand
ccaaggguguguaugagaa

SEQ ID NO: 1749062 - RNA, 19 nt, Homo sapiens
  misc_RNA (1)...(19): siRNA sense strand
gaccucacaucaacuucua

SEQ ID NO: 1749063 - RNA, 19 nt, Homo sapiens
  misc_RNA (1)...(19): siRNA sense strand
gggagcagauccuggcaaa

SEQ ID NO: 1749064 - RNA, 19 nt, Homo sapiens
  misc_RNA (1)...(19): siRNA sense strand
gcaaguuugugcaguacga

SEQ ID NO: 1749065 - RNA, 19 nt, Homo sapiens
  misc_RNA (1)...(19): siRNA sense strand
gcaagggcgugcagaggau

SEQ ID NO: 1749066 - RNA, 19 nt, Homo sapiens
  misc_RNA (1)...(19): siRNA sense strand
ggacgacugcagcaaguuu

SEQ ID NO: 1749067 - RNA, 19 nt, Homo sapiens
  misc_RNA (1)...(19): siRNA sense strand
guaacacggucaucaagca

SEQ ID NO: 1749068 - RNA, 19 nt, Homo sapiens
  misc_RNA (1)...(19): siRNA sense strand
gggugaaccuggugacaga

SEQ ID NO: 1749069 - RNA, 19 nt, Homo sapiens
  misc_RNA (1)...(19): siRNA sense strand
uuaacgagaucacugcuau

SEQ ID NO: 1749070 - RNA, 19 nt, Homo sapiens
  misc_RNA (1)...(19): siRNA sense strand
acacggagcugggcaagau

SEQ ID NO: 1749071 - RNA, 19 nt, Homo sapiens
  misc_RNA (1)...(19): siRNA sense strand
cgagaucacugcuaugacu

SEQ ID NO: 1749072 - RNA, 19 nt, Homo sapiens
  misc_RNA (1)...(19): siRNA sense strand
ucgaggcccugaaggagua

SEQ ID NO: 1749073 - RNA, 19 nt, Homo sapiens
  misc_RNA (1)...(19): siRNA sense strand
acagcaacaugaagcaauu

SEQ ID NO: 1749074 - RNA, 19 nt, Homo sapiens
  misc_RNA (1)...(19): siRNA sense strand
gagaaccugcaguccuuua

SEQ ID NO: 1749075 - RNA, 19 nt, Homo sapiens
  misc_RNA (1)...(19): siRNA sense strand
ccgcaggcuuggcaucuuu

SEQ ID NO: 1749076 - RNA, 19 nt, Homo sapiens
  misc_RNA (1)...(19): siRNA sense strand
ccuggugguuuguguauga

SEQ ID NO: 1749077 - RNA, 19 nt, Homo sapiens
  misc_RNA (1)...(19): siRNA sense strand
gaagugcuccgaagacaac

SEQ ID NO: 1749078 - RNA, 19 nt, Homo sapiens
  misc_RNA (1)...(19): siRNA sense strand
uggagaaccugcaguccuu

SEQ ID NO: 1749079 - RNA, 19 nt, Homo sapiens
  misc_RNA (1)...(19): siRNA sense strand
cagagauggugcugucaga

SEQ ID NO: 1749080 - RNA, 19 nt, Homo sapiens
  misc_RNA (1)...(19): siRNA sense strand
agauggugcugucagauga

SEQ ID NO: 1749081 - RNA, 19 nt, Homo sapiens
  misc_RNA (1)...(19): siRNA sense strand
uaccucaucuccuccaaug

SEQ ID NO: 1749082 - RNA, 19 nt, Homo sapiens
  misc_RNA (1)...(19): siRNA sense strand
gagauggugcugucagaug

SEQ ID NO: 1749083 - RNA, 19 nt, Homo sapiens
  misc_RNA (1)...(19): siRNA sense strand
caaggaaggaggacaugga

SEQ ID NO: 1749084 - RNA, 19 nt, Homo sapiens
  misc_RNA (1)...(19): siRNA sense strand
gcaccagcccugaagaaag

SEQ ID NO: 1749085 - RNA, 19 nt, Homo sapiens
  misc_RNA (1)...(19): siRNA sense strand
ccacggcucugggcuucaa

SEQ ID NO: 1749086 - RNA, 19 nt, Homo sapiens
  misc_RNA (1)...(19): siRNA sense strand
ccucaucuccuccaauguu

SEQ ID NO: 1749087 - RNA, 19 nt, Homo sapiens
  misc_RNA (1)...(19): siRNA sense strand
gcguggcgcugucuacuac

SEQ ID NO: 1749088 - RNA, 19 nt, Homo sapiens
  misc_RNA (1)...(19): siRNA sense strand
ggaguucacccuggaguuc

SEQ ID NO: 1749089 - RNA, 19 nt, Homo sapiens
  misc_RNA (1)...(19): siRNA sense strand
agacggaccugaccuucgu

SEQ ID NO: 1749090 - RNA, 19 nt, Homo sapiens
  misc_RNA (1)...(19): siRNA sense strand
ccgagaagcccucaucagu

SEQ ID NO: 1749091 - RNA, 19 nt, Homo sapiens
  misc_RNA (1)...(19): siRNA sense strand
gcgcaagcuggacgaguuu

SEQ ID NO: 1749092 - RNA, 19 nt, Homo sapiens
  misc_RNA (1)...(19): siRNA sense strand
caccagcccugaagaaagc

SEQ ID NO: 1749093 - RNA, 19 nt, Homo sapiens
  misc_RNA (1)...(19): siRNA sense strand
ggccagggcagcaagaugu

SEQ ID NO: 1749094 - RNA, 19 nt, Homo sapiens
  misc_RNA (1)...(19): siRNA sense strand
ggaguaugagccugagaug

SEQ ID NO: 1749095 - RNA, 19 nt, Homo sapiens
  misc_RNA (1)...(19): siRNA sense strand
gcucaccaccaaucagaug

SEQ ID NO: 1749096 - RNA, 19 nt, Homo sapiens
  misc_RNA (1)...(19): siRNA sense strand
ugaaccaggacaagaagaa

SEQ ID NO: 1749097 - RNA, 19 nt, Homo sapiens
  misc_RNA (1)...(19): siRNA sense strand
gggcugcaccucagucauc

SEQ ID NO: 1749098 - RNA, 19 nt, Homo sapiens
  misc_RNA (1)...(19): siRNA sense strand
ggugguggugcuccagaua

SEQ ID NO: 1749099 - RNA, 19 nt, Homo sapiens
  misc_RNA (1)...(19): siRNA sense strand
caucgacugugagguguuc

SEQ ID NO: 1749100 - RNA, 19 nt, Homo sapiens
  misc_RNA (1)...(19): siRNA sense strand
gcaucuuccucacggcaau

SEQ ID NO: 1749101 - RNA, 19 nt, Homo sapiens
  misc_RNA (1)...(19): siRNA sense strand
uggcugcccuugucuccuu

SEQ ID NO: 1749102 - RNA, 19 nt, Homo sapiens
  misc_RNA (1)...(19): siRNA sense strand
caucucggguaccacguau

SEQ ID NO: 1749103 - RNA, 19 nt, Homo sapiens
  misc_RNA (1)...(19): siRNA sense strand
gcacgcucaccaccaauca

SEQ ID NO: 1749104 - RNA, 19 nt, Homo sapiens
  misc_RNA (1)...(19): siRNA sense strand
gcugucuacuacuucaaga

SEQ ID NO: 1749105 - RNA, 19 nt, Homo sapiens
  misc_RNA (1)...(19): siRNA sense strand
caauaucacaucgggcaaa

SEQ ID NO: 1749106 - RNA, 19 nt, Homo sapiens
  misc_RNA (1)...(19): siRNA sense strand
gcaguccuuuaacgagauc

SEQ ID NO: 1749107 - RNA, 19 nt, Homo sapiens
  misc_RNA (1)...(19): siRNA sense strand
gcgcauggcacgcaagaac

SEQ ID NO: 1749108 - RNA, 19 nt, Homo sapiens
  misc_RNA (1)...(19): siRNA sense strand
ucuaccagcugaggaacuu

SEQ ID NO: 1749109 - RNA, 19 nt, Homo sapiens
  misc_RNA (1)...(19): siRNA sense strand
ggagaaccugcaguccuuu

SEQ ID NO: 1749110 - RNA, 19 nt, Homo sapiens
  misc_RNA (1)...(19): siRNA sense strand
ggaccucacaucaacuucu

SEQ ID NO: 1749111 - RNA, 19 nt, Homo sapiens
  misc_RNA (1)...(19): siRNA sense strand
gaaccugcaguccuuuaac

SEQ ID NO: 1749112 - RNA, 19 nt, Homo sapiens
  misc_RNA (1)...(19): siRNA sense strand
caucaacaucggccacuuc

SEQ ID NO: 1749113 - RNA, 19 nt, Homo sapiens
  misc_RNA (1)...(19): siRNA sense strand
agauaucucugccugucau

SEQ ID NO: 1749114 - RNA, 19 nt, Homo sapiens
  misc_RNA (1)...(19): siRNA sense strand
ccaccaccauggccuuguc

SEQ ID NO: 1749115 - RNA, 19 nt, Homo sapiens
  misc_RNA (1)...(19): siRNA sense strand
cgaggucgucugcaucuuc

SEQ ID NO: 1749116 - RNA, 19 nt, Homo sapiens
  misc_RNA (1)...(19): siRNA sense strand
ggaacgcaacgccgagagu

SEQ ID NO: 1749117 - RNA, 19 nt, Homo sapiens
  misc_RNA (1)...(19): siRNA sense strand
gggagcuggugcuggaaca

SEQ ID NO: 1749118 - RNA, 19 nt, Homo sapiens
  misc_RNA (1)...(19): siRNA sense strand
ggcagcaagauguuuguga

SEQ ID NO: 1749119 - RNA, 19 nt, Homo sapiens
  misc_RNA (1)...(19): siRNA sense strand
gaaauccauguccguguac

SEQ ID NO: 1749120 - RNA, 19 nt, Homo sapiens
  misc_RNA (1)...(19): siRNA sense strand
ggccaaggguguguaugag

SEQ ID NO: 1749121 - RNA, 19 nt, Homo sapiens
  misc_RNA (1)...(19): siRNA sense strand
cggcugucaucacuacaug

SEQ ID NO: 1749122 - RNA, 19 nt, Homo sapiens
  misc_RNA (1)...(19): siRNA sense strand
gccaaggguguguaugaga

SEQ ID NO: 1749123 - RNA, 19 nt, Homo sapiens
  misc_RNA (1)...(19): siRNA sense strand
gcuggcucuucuuccgaua

SEQ ID NO: 1749124 - RNA, 19 nt, Homo sapiens
  misc_RNA (1)...(19): siRNA sense strand
gagcugugaaccaggacaa

SEQ ID NO: 1749125 - RNA, 19 nt, Homo sapiens
  misc_RNA (1)...(19): siRNA sense strand
cagcaaguuugugcaguac

SEQ ID NO: 1749126 - RNA, 19 nt, Homo sapiens
  misc_RNA (1)...(19): siRNA sense strand
agcgcaagcuggacgaguu

SEQ ID NO: 1749127 - RNA, 19 nt, Homo sapiens
  misc_RNA (1)...(19): siRNA sense strand
caagauccggagccagaug

SEQ ID NO: 1749128 - RNA, 19 nt, Homo sapiens
  misc_RNA (1)...(19): siRNA sense strand
gcugugaaccaggacaaga

SEQ ID NO: 1749129 - RNA, 19 nt, Homo sapiens
  misc_RNA (1)...(19): siRNA sense strand
guggcgcugucuacuacuu

SEQ ID NO: 1749130 - RNA, 19 nt, Homo sapiens
  misc_RNA (1)...(19): siRNA sense strand
ccaucgaggcccugaagga

SEQ ID NO: 1749131 - RNA, 19 nt, Homo sapiens
  misc_RNA (1)...(19): siRNA sense strand
cgagcuggcgccuguaaca

SEQ ID NO: 1749132 - RNA, 19 nt, Homo sapiens
  misc_RNA (1)...(19): siRNA sense strand
cggagacagcucugacuug

SEQ ID NO: 1749133 - RNA, 19 nt, Homo sapiens
  misc_RNA (1)...(19): siRNA sense strand
ggaaauccauguccgugua

SEQ ID NO: 1749134 - RNA, 19 nt, Homo sapiens
  misc_RNA (1)...(19): siRNA sense strand
ccaacgagcucccgaguga

SEQ ID NO: 1749135 - RNA, 19 nt, Homo sapiens
  misc_RNA (1)...(19): siRNA sense strand
gcagcaaguuugugcagua

SEQ ID NO: 1749136 - RNA, 19 nt, Homo sapiens
  misc_RNA (1)...(19): siRNA sense strand
gcagcaagauguuugugaa

SEQ ID NO: 1749137 - RNA, 19 nt, Homo sapiens
  misc_RNA (1)...(19): siRNA sense strand
gaugcgggcuccugccuuu

SEQ ID NO: 1749138 - RNA, 19 nt, Homo sapiens
  misc_RNA (1)...(19): siRNA sense strand
gagcagauccuggcaaaga

SEQ ID NO: 1749139 - RNA, 19 nt, Homo sapiens
  misc_RNA (1)...(19): siRNA sense strand
ugacuugccugguggagaa

SEQ ID NO: 1749140 - RNA, 19 nt, Homo sapiens
  misc_RNA (1)...(19): siRNA sense strand
ccaaggguguguaugagaa

SEQ ID NO: 1749141 - RNA, 19 nt, Homo sapiens
  misc_RNA (1)...(19): siRNA sense strand
gaccucacaucaacuucua

SEQ ID NO: 1749142 - RNA, 19 nt, Homo sapiens
  misc_RNA (1)...(19): siRNA sense strand
gggagcagauccuggcaaa

SEQ ID NO: 1749143 - RNA, 19 nt, Homo sapiens
  misc_RNA (1)...(19): siRNA sense strand
gcaaguuugugcaguacga

SEQ ID NO: 1749144 - RNA, 19 nt, Homo sapiens
  misc_RNA (1)...(19): siRNA sense strand
gcaagggcgugcagaggau

SEQ ID NO: 1749145 - RNA, 19 nt, Homo sapiens
  misc_RNA (1)...(19): siRNA sense strand
ggacgacugcagcaaguuu

SEQ ID NO: 1749146 - RNA, 19 nt, Homo sapiens
  misc_RNA (1)...(19): siRNA sense strand
guaacacggucaucaagca

SEQ ID NO: 1749147 - RNA, 19 nt, Homo sapiens
  misc_RNA (1)...(19): siRNA sense strand
gggugaaccuggugacaga

SEQ ID NO: 1749148 - RNA, 19 nt, Homo sapiens
  misc_RNA (1)...(19): siRNA sense strand
uuaacgagaucacugcuau

SEQ ID NO: 1749149 - RNA, 19 nt, Homo sapiens
  misc_RNA (1)...(19): siRNA sense strand
acacggagcugggcaagau

SEQ ID NO: 1749150 - RNA, 19 nt, Homo sapiens
  misc_RNA (1)...(19): siRNA sense strand
cgagaucacugcuaugacu

SEQ ID NO: 1749151 - RNA, 19 nt, Homo sapiens
  misc_RNA (1)...(19): siRNA sense strand
ucgaggcccugaaggagua

SEQ ID NO: 1749152 - RNA, 19 nt, Homo sapiens
  misc_RNA (1)...(19): siRNA sense strand
acagcaacaugaagcaauu

SEQ ID NO: 1749153 - RNA, 19 nt, Homo sapiens
  misc_RNA (1)...(19): siRNA sense strand
gagaaccugcaguccuuua

SEQ ID NO: 1749154 - RNA, 19 nt, Homo sapiens
  misc_RNA (1)...(19): siRNA sense strand
ccgcaggcuuggcaucuuu

SEQ ID NO: 1749155 - RNA, 19 nt, Homo sapiens
  misc_RNA (1)...(19): siRNA sense strand
ccuggugguuuguguauga

SEQ ID NO: 1749156 - RNA, 19 nt, Homo sapiens
  misc_RNA (1)...(19): siRNA sense strand
gaagugcuccgaagacaac

SEQ ID NO: 1749157 - RNA, 19 nt, Homo sapiens
  misc_RNA (1)...(19): siRNA sense strand
uggagaaccugcaguccuu

SEQ ID NO: 1749158 - RNA, 19 nt, Homo sapiens
  misc_RNA (1)...(19): siRNA sense strand
cagagauggugcugucaga

SEQ ID NO: 1749159 - RNA, 19 nt, Homo sapiens
  misc_RNA (1)...(19): siRNA sense strand
agauggugcugucagauga

SEQ ID NO: 1749160 - RNA, 19 nt, Homo sapiens
  misc_RNA (1)...(19): siRNA sense strand
uaccucaucuccuccaaug

SEQ ID NO: 1749161 - RNA, 19 nt, Homo sapiens
  misc_RNA (1)...(19): siRNA sense strand
gagauggugcugucagaug

SEQ ID NO: 1749162 - RNA, 19 nt, Homo sapiens
  misc_RNA (1)...(19): siRNA sense strand
caaggaaggaggacaugga

SEQ ID NO: 1749163 - RNA, 19 nt, Homo sapiens
  misc_RNA (1)...(19): siRNA sense strand
gcaccagcccugaagaaag

SEQ ID NO: 1749164 - RNA, 19 nt, Homo sapiens
  misc_RNA (1)...(19): siRNA sense strand
ccacggcucugggcuucaa

SEQ ID NO: 1749165 - RNA, 19 nt, Homo sapiens
  misc_RNA (1)...(19): siRNA sense strand
ccucaucuccuccaauguu

SEQ ID NO: 1749166 - RNA, 19 nt, Homo sapiens
  misc_RNA (1)...(19): siRNA sense strand
gcguggcgcugucuacuac

SEQ ID NO: 1749167 - RNA, 19 nt, Homo sapiens
  misc_RNA (1)...(19): siRNA sense strand
ggaguucacccuggaguuc

SEQ ID NO: 1749168 - RNA, 19 nt, Homo sapiens
  misc_RNA (1)...(19): siRNA sense strand
agacggaccugaccuucgu

SEQ ID NO: 1749169 - RNA, 19 nt, Homo sapiens
  misc_RNA (1)...(19): siRNA sense strand
ccgagaagcccucaucagu

SEQ ID NO: 1749170 - RNA, 19 nt, Homo sapiens
  misc_RNA (1)...(19): siRNA sense strand
gcgcaagcuggacgaguuu

SEQ ID NO: 1749171 - RNA, 19 nt, Homo sapiens
  misc_RNA (1)...(19): siRNA sense strand
caccagcccugaagaaagc

SEQ ID NO: 1749172 - RNA, 19 nt, Homo sapiens
  misc_RNA (1)...(19): siRNA sense strand
ggccagggcagcaagaugu

SEQ ID NO: 1749173 - RNA, 19 nt, Homo sapiens
  misc_RNA (1)...(19): siRNA sense strand
ggaguaugagccugagaug

SEQ ID NO: 1749174 - RNA, 19 nt, Homo sapiens
  misc_RNA (1)...(19): siRNA sense strand
gcucaccaccaaucagaug

SEQ ID NO: 1749175 - RNA, 19 nt, Homo sapiens
  misc_RNA (1)...(19): siRNA sense strand
ugaaccaggacaagaagaa

SEQ ID NO: 1749176 - RNA, 19 nt, Homo sapiens
  misc_RNA (1)...(19): siRNA sense strand
gggcugcaccucagucauc

SEQ ID NO: 1749177 - RNA, 19 nt, Homo sapiens
  misc_RNA (1)...(19): siRNA sense strand
ggugguggugcuccagaua

SEQ ID NO: 1749178 - RNA, 19 nt, Homo sapiens
  misc_RNA (1)...(19): siRNA sense strand
caucgacugugagguguuc

SEQ ID NO: 1749179 - RNA, 19 nt, Homo sapiens
  misc_RNA (1)...(19): siRNA sense strand
gcaucuuccucacggcaau

SEQ ID NO: 1749180 - RNA, 19 nt, Homo sapiens
  misc_RNA (1)...(19): siRNA sense strand
uggcugcccuugucuccuu

SEQ ID NO: 1749181 - RNA, 19 nt, Homo sapiens
  misc_RNA (1)...(19): siRNA sense strand
caucucggguaccacguau

SEQ ID NO: 1749182 - RNA, 19 nt, Homo sapiens
  misc_RNA (1)...(19): siRNA sense strand
gcacgcucaccaccaauca

SEQ ID NO: 1749183 - RNA, 19 nt, Homo sapiens
  misc_RNA (1)...(19): siRNA sense strand
gcugucuacuacuucaaga

SEQ ID NO: 1749184 - RNA, 19 nt, Homo sapiens
  misc_RNA (1)...(19): siRNA sense strand
caauaucacaucgggcaaa

SEQ ID NO: 1749185 - RNA, 19 nt, Homo sapiens
  misc_RNA (1)...(19): siRNA sense strand
gcaguccuuuaacgagauc

SEQ ID NO: 1749186 - RNA, 19 nt, Homo sapiens
  misc_RNA (1)...(19): siRNA sense strand
gcgcauggcacgcaagaac

SEQ ID NO: 1749187 - RNA, 19 nt, Homo sapiens
  misc_RNA (1)...(19): siRNA sense strand
ucuaccagcugaggaacuu

SEQ ID NO: 1749188 - RNA, 19 nt, Homo sapiens
  misc_RNA (1)...(19): siRNA sense strand
ggagaaccugcaguccuuu

SEQ ID NO: 1749189 - RNA, 19 nt, Homo sapiens
  misc_RNA (1)...(19): siRNA sense strand
ggaccucacaucaacuucu

SEQ ID NO: 1749190 - RNA, 19 nt, Homo sapiens
  misc_RNA (1)...(19): siRNA sense strand
gaaccugcaguccuuuaac

SEQ ID NO: 1749191 - RNA, 19 nt, Homo sapiens
  misc_RNA (1)...(19): siRNA sense strand
caucaacaucggccacuuc

SEQ ID NO: 1749192 - RNA, 19 nt, Homo sapiens
  misc_RNA (1)...(19): siRNA sense strand
agauaucucugccugucau

SEQ ID NO: 1749193 - RNA, 19 nt, Homo sapiens
  misc_RNA (1)...(19): siRNA sense strand
ccaccaccauggccuuguc

SEQ ID NO: 1749194 - RNA, 19 nt, Homo sapiens
  misc_RNA (1)...(19): siRNA sense strand
cgaggucgucugcaucuuc

SEQ ID NO: 1749195 - RNA, 19 nt, Homo sapiens
  misc_RNA (1)...(19): siRNA sense strand
ggaacgcaacgccgagagu

SEQ ID NO: 1749196 - RNA, 19 nt, Homo sapiens
  misc_RNA (1)...(19): siRNA sense strand
gggagcuggugcuggaaca

SEQ ID NO: 1749197 - RNA, 19 nt, Homo sapiens
  misc_RNA (1)...(19): siRNA sense strand
ggcagcaagauguuuguga

SEQ ID NO: 1749198 - RNA, 19 nt, Homo sapiens
  misc_RNA (1)...(19): siRNA sense strand
gaaauccauguccguguac

SEQ ID NO: 1749199 - RNA, 19 nt, Homo sapiens
  misc_RNA (1)...(19): siRNA sense strand
ggccaaggguguguaugag

SEQ ID NO: 1749200 - RNA, 19 nt, Homo sapiens
  misc_RNA (1)...(19): siRNA sense strand
cggcugucaucacuacaug

SEQ ID NO: 1749201 - RNA, 19 nt, Homo sapiens
  misc_RNA (1)...(19): siRNA sense strand
gccaaggguguguaugaga

SEQ ID NO: 1749202 - RNA, 19 nt, Homo sapiens
  misc_RNA (1)...(19): siRNA sense strand
gcuggcucuucuuccgaua

SEQ ID NO: 1749203 - RNA, 19 nt, Homo sapiens
  misc_RNA (1)...(19): siRNA sense strand
gagcugugaaccaggacaa

SEQ ID NO: 1749204 - RNA, 19 nt, Homo sapiens
  misc_RNA (1)...(19): siRNA sense strand
cagcaaguuugugcaguac

SEQ ID NO: 1749205 - RNA, 19 nt, Homo sapiens
  misc_RNA (1)...(19): siRNA sense strand
agcgcaagcuggacgaguu

SEQ ID NO: 1749206 - RNA, 19 nt, Homo sapiens
  misc_RNA (1)...(19): siRNA sense strand
caagauccggagccagaug

SEQ ID NO: 1749207 - RNA, 19 nt, Homo sapiens
  misc_RNA (1)...(19): siRNA sense strand
gcugugaaccaggacaaga

SEQ ID NO: 1749208 - RNA, 19 nt, Homo sapiens
  misc_RNA (1)...(19): siRNA sense strand
guggcgcugucuacuacuu

SEQ ID NO: 1749209 - RNA, 19 nt, Homo sapiens
  misc_RNA (1)...(19): siRNA sense strand
ccaucgaggcccugaagga

SEQ ID NO: 1749210 - RNA, 19 nt, Homo sapiens
  misc_RNA (1)...(19): siRNA sense strand
cgagcuggcgccuguaaca

SEQ ID NO: 1749211 - RNA, 19 nt, Homo sapiens
  misc_RNA (1)...(19): siRNA sense strand
cggagacagcucugacuug

SEQ ID NO: 1749212 - RNA, 19 nt, Homo sapiens
  misc_RNA (1)...(19): siRNA sense strand
ggaaauccauguccgugua

SEQ ID NO: 1749213 - RNA, 19 nt, Homo sapiens
  misc_RNA (1)...(19): siRNA sense strand
ccaacgagcucccgaguga

SEQ ID NO: 1749214 - RNA, 19 nt, Homo sapiens
  misc_RNA (1)...(19): siRNA sense strand
gcagcaaguuugugcagua

SEQ ID NO: 1749215 - RNA, 19 nt, Homo sapiens
  misc_RNA (1)...(19): siRNA sense strand
gcagcaagauguuugugaa

SEQ ID NO: 1749216 - RNA, 19 nt, Homo sapiens
  misc_RNA (1)...(19): siRNA sense strand
gaugcgggcuccugccuuu

SEQ ID NO: 1749217 - RNA, 19 nt, Homo sapiens
  misc_RNA (1)...(19): siRNA sense strand
gagcagauccuggcaaaga

SEQ ID NO: 1749218 - RNA, 19 nt, Homo sapiens
  misc_RNA (1)...(19): siRNA sense strand
ugacuugccugguggagaa

SEQ ID NO: 1749219 - RNA, 19 nt, Homo sapiens
  misc_RNA (1)...(19): siRNA sense strand
ccaaggguguguaugagaa

SEQ ID NO: 1749220 - RNA, 19 nt, Homo sapiens
  misc_RNA (1)...(19): siRNA sense strand
gaccucacaucaacuucua

SEQ ID NO: 1749221 - RNA, 19 nt, Homo sapiens
  misc_RNA (1)...(19): siRNA sense strand
gggagcagauccuggcaaa

SEQ ID NO: 1749222 - RNA, 19 nt, Homo sapiens
  misc_RNA (1)...(19): siRNA sense strand
gcaaguuugugcaguacga

SEQ ID NO: 1749223 - RNA, 19 nt, Homo sapiens
  misc_RNA (1)...(19): siRNA sense strand
gcaagggcgugcagaggau

SEQ ID NO: 1749224 - RNA, 19 nt, Homo sapiens
  misc_RNA (1)...(19): siRNA sense strand
ggacgacugcagcaaguuu

SEQ ID NO: 1749225 - RNA, 19 nt, Homo sapiens
  misc_RNA (1)...(19): siRNA sense strand
guaacacggucaucaagca

SEQ ID NO: 1749226 - RNA, 19 nt, Homo sapiens
  misc_RNA (1)...(19): siRNA sense strand
gggugaaccuggugacaga

SEQ ID NO: 1749227 - RNA, 19 nt, Homo sapiens
  misc_RNA (1)...(19): siRNA sense strand
uuaacgagaucacugcuau

SEQ ID NO: 1749228 - RNA, 19 nt, Homo sapiens
  misc_RNA (1)...(19): siRNA sense strand
acacggagcugggcaagau

SEQ ID NO: 1749229 - RNA, 19 nt, Homo sapiens
  misc_RNA (1)...(19): siRNA sense strand
cgagaucacugcuaugacu

SEQ ID NO: 1749230 - RNA, 19 nt, Homo sapiens
  misc_RNA (1)...(19): siRNA sense strand
ucgaggcccugaaggagua

SEQ ID NO: 1749231 - RNA, 19 nt, Homo sapiens
  misc_RNA (1)...(19): siRNA sense strand
acagcaacaugaagcaauu

SEQ ID NO: 1749232 - RNA, 19 nt, Homo sapiens
  misc_RNA (1)...(19): siRNA sense strand
gagaaccugcaguccuuua

SEQ ID NO: 1749233 - RNA, 19 nt, Homo sapiens
  misc_RNA (1)...(19): siRNA sense strand
ccgcaggcuuggcaucuuu

SEQ ID NO: 1749234 - RNA, 19 nt, Homo sapiens
  misc_RNA (1)...(19): siRNA sense strand
ccuggugguuuguguauga

SEQ ID NO: 1749235 - RNA, 19 nt, Homo sapiens
  misc_RNA (1)...(19): siRNA sense strand
gaagugcuccgaagacaac

SEQ ID NO: 1749236 - RNA, 19 nt, Homo sapiens
  misc_RNA (1)...(19): siRNA sense strand
uggagaaccugcaguccuu

SEQ ID NO: 1749237 - RNA, 19 nt, Homo sapiens
  misc_RNA (1)...(19): siRNA sense strand
cagagauggugcugucaga

SEQ ID NO: 1749238 - RNA, 19 nt, Homo sapiens
  misc_RNA (1)...(19): siRNA sense strand
agauggugcugucagauga

SEQ ID NO: 1749239 - RNA, 19 nt, Homo sapiens
  misc_RNA (1)...(19): siRNA sense strand
uaccucaucuccuccaaug

SEQ ID NO: 1749240 - RNA, 19 nt, Homo sapiens
  misc_RNA (1)...(19): siRNA sense strand
gagauggugcugucagaug

SEQ ID NO: 1749241 - RNA, 19 nt, Homo sapiens
  misc_RNA (1)...(19): siRNA sense strand
caaggaaggaggacaugga

SEQ ID NO: 1749242 - RNA, 19 nt, Homo sapiens
  misc_RNA (1)...(19): siRNA sense strand
gcaccagcccugaagaaag

SEQ ID NO: 1749243 - RNA, 19 nt, Homo sapiens
  misc_RNA (1)...(19): siRNA sense strand
ccacggcucugggcuucaa

SEQ ID NO: 1749244 - RNA, 19 nt, Homo sapiens
  misc_RNA (1)...(19): siRNA sense strand
ccucaucuccuccaauguu

SEQ ID NO: 1749245 - RNA, 19 nt, Homo sapiens
  misc_RNA (1)...(19): siRNA sense strand
gcguggcgcugucuacuac

SEQ ID NO: 1749246 - RNA, 19 nt, Homo sapiens
  misc_RNA (1)...(19): siRNA sense strand
ggaguucacccuggaguuc

SEQ ID NO: 1749247 - RNA, 19 nt, Homo sapiens
  misc_RNA (1)...(19): siRNA sense strand
agacggaccugaccuucgu

SEQ ID NO: 1749248 - RNA, 19 nt, Homo sapiens
  misc_RNA (1)...(19): siRNA sense strand
ccgagaagcccucaucagu

SEQ ID NO: 1749249 - RNA, 19 nt, Homo sapiens
  misc_RNA (1)...(19): siRNA sense strand
gcgcaagcuggacgaguuu

SEQ ID NO: 1749250 - RNA, 19 nt, Homo sapiens
  misc_RNA (1)...(19): siRNA sense strand
caccagcccugaagaaagc

SEQ ID NO: 1749251 - RNA, 19 nt, Homo sapiens
  misc_RNA (1)...(19): siRNA sense strand
ggccagggcagcaagaugu

SEQ ID NO: 1749252 - RNA, 19 nt, Homo sapiens
  misc_RNA (1)...(19): siRNA sense strand
ggaguaugagccugagaug

SEQ ID NO: 1749253 - RNA, 19 nt, Homo sapiens
  misc_RNA (1)...(19): siRNA sense strand
gcucaccaccaaucagaug

SEQ ID NO: 1749254 - RNA, 19 nt, Homo sapiens
  misc_RNA (1)...(19): siRNA sense strand
ugaaccaggacaagaagaa

SEQ ID NO: 1749255 - RNA, 19 nt, Homo sapiens
  misc_RNA (1)...(19): siRNA sense strand
gggcugcaccucagucauc

SEQ ID NO: 1749256 - RNA, 19 nt, Homo sapiens
  misc_RNA (1)...(19): siRNA sense strand
ggugguggugcuccagaua

SEQ ID NO: 1749257 - RNA, 19 nt, Homo sapiens
  misc_RNA (1)...(19): siRNA sense strand
caucgacugugagguguuc

SEQ ID NO: 1749258 - RNA, 19 nt, Homo sapiens
  misc_RNA (1)...(19): siRNA sense strand
gcaucuuccucacggcaau

SEQ ID NO: 1749259 - RNA, 19 nt, Homo sapiens
  misc_RNA (1)...(19): siRNA sense strand
uggcugcccuugucuccuu

SEQ ID NO: 1749260 - RNA, 19 nt, Homo sapiens
  misc_RNA (1)...(19): siRNA sense strand
caucucggguaccacguau

SEQ ID NO: 1749261 - RNA, 19 nt, Homo sapiens
  misc_RNA (1)...(19): siRNA sense strand
gcacgcucaccaccaauca

SEQ ID NO: 1749262 - RNA, 19 nt, Homo sapiens
  misc_RNA (1)...(19): siRNA sense strand
gcugucuacuacuucaaga

SEQ ID NO: 1749263 - RNA, 19 nt, Homo sapiens
  misc_RNA (1)...(19): siRNA sense strand
caauaucacaucgggcaaa

SEQ ID NO: 1749264 - RNA, 19 nt, Homo sapiens
  misc_RNA (1)...(19): siRNA sense strand
gcaguccuuuaacgagauc

SEQ ID NO: 1749265 - RNA, 19 nt, Homo sapiens
  misc_RNA (1)...(19): siRNA sense strand
gcgcauggcacgcaagaac

SEQ ID NO: 1749266 - RNA, 19 nt, Homo sapiens
  misc_RNA (1)...(19): siRNA sense strand
ucuaccagcugaggaacuu

SEQ ID NO: 1749267 - RNA, 19 nt, Homo sapiens
  misc_RNA (1)...(19): siRNA sense strand
ggagaaccugcaguccuuu

SEQ ID NO: 1749268 - RNA, 19 nt, Homo sapiens
  misc_RNA (1)...(19): siRNA sense strand
ggaccucacaucaacuucu

SEQ ID NO: 1749269 - RNA, 19 nt, Homo sapiens
  misc_RNA (1)...(19): siRNA sense strand
gaaccugcaguccuuuaac

SEQ ID NO: 1749270 - RNA, 19 nt, Homo sapiens
  misc_RNA (1)...(19): siRNA sense strand
caucaacaucggccacuuc

SEQ ID NO: 1749271 - RNA, 19 nt, Homo sapiens
  misc_RNA (1)...(19): siRNA sense strand
agauaucucugccugucau

SEQ ID NO: 1749272 - RNA, 19 nt, Homo sapiens
  misc_RNA (1)...(19): siRNA sense strand
ccaccaccauggccuuguc

SEQ ID NO: 1749273 - RNA, 19 nt, Homo sapiens
  misc_RNA (1)...(19): siRNA sense strand
cgaggucgucugcaucuuc

SEQ ID NO: 1749274 - RNA, 19 nt, Homo sapiens
  misc_RNA (1)...(19): siRNA sense strand
ggaacgcaacgccgagagu

SEQ ID NO: 1749275 - RNA, 19 nt, Homo sapiens
  misc_RNA (1)...(19): siRNA sense strand
gggagcuggugcuggaaca

SEQ ID NO: 1749276 - RNA, 19 nt, Homo sapiens
  misc_RNA (1)...(19): siRNA sense strand
ggcagcaagauguuuguga

SEQ ID NO: 1749277 - RNA, 19 nt, Homo sapiens
  misc_RNA (1)...(19): siRNA sense strand
gaaauccauguccguguac

SEQ ID NO: 1749278 - RNA, 19 nt, Homo sapiens
  misc_RNA (1)...(19): siRNA sense strand
ggccaaggguguguaugag

SEQ ID NO: 1749279 - RNA, 19 nt, Homo sapiens
  misc_RNA (1)...(19): siRNA sense strand
cggcugucaucacuacaug

SEQ ID NO: 1749280 - RNA, 19 nt, Homo sapiens
  misc_RNA (1)...(19): siRNA sense strand
gccaaggguguguaugaga

SEQ ID NO: 1749281 - RNA, 19 nt, Homo sapiens
  misc_RNA (1)...(19): siRNA sense strand
gcuggcucuucuuccgaua

SEQ ID NO: 1749282 - RNA, 19 nt, Homo sapiens
  misc_RNA (1)...(19): siRNA sense strand
gagcugugaaccaggacaa

SEQ ID NO: 1749283 - RNA, 19 nt, Homo sapiens
  misc_RNA (1)...(19): siRNA sense strand
cagcaaguuugugcaguac

SEQ ID NO: 1749284 - RNA, 19 nt, Homo sapiens
  misc_RNA (1)...(19): siRNA sense strand
agcgcaagcuggacgaguu

SEQ ID NO: 1749285 - RNA, 19 nt, Homo sapiens
  misc_RNA (1)...(19): siRNA sense strand
caagauccggagccagaug

SEQ ID NO: 1749286 - RNA, 19 nt, Homo sapiens
  misc_RNA (1)...(19): siRNA sense strand
gcugugaaccaggacaaga

SEQ ID NO: 1749287 - RNA, 19 nt, Homo sapiens
  misc_RNA (1)...(19): siRNA sense strand
guggcgcugucuacuacuu

SEQ ID NO: 1749288 - RNA, 19 nt, Homo sapiens
  misc_RNA (1)...(19): siRNA sense strand
ccaucgaggcccugaagga

SEQ ID NO: 1749289 - RNA, 19 nt, Homo sapiens
  misc_RNA (1)...(19): siRNA sense strand
cgagcuggcgccuguaaca

SEQ ID NO: 1749290 - RNA, 19 nt, Homo sapiens
  misc_RNA (1)...(19): siRNA sense strand
cggagacagcucugacuug

SEQ ID NO: 1749291 - RNA, 19 nt, Homo sapiens
  misc_RNA (1)...(19): siRNA sense strand
ggaaauccauguccgugua

SEQ ID NO: 1749292 - RNA, 19 nt, Homo sapiens
  misc_RNA (1)...(19): siRNA sense strand
ccaacgagcucccgaguga

SEQ ID NO: 1749293 - RNA, 19 nt, Homo sapiens
  misc_RNA (1)...(19): siRNA sense strand
gcagcaaguuugugcagua

SEQ ID NO: 1749294 - RNA, 19 nt, Homo sapiens
  misc_RNA (1)...(19): siRNA sense strand
gcagcaagauguuugugaa

SEQ ID NO: 1749295 - RNA, 19 nt, Homo sapiens
  misc_RNA (1)...(19): siRNA sense strand
gaugcgggcuccugccuuu

SEQ ID NO: 1749296 - RNA, 19 nt, Homo sapiens
  misc_RNA (1)...(19): siRNA sense strand
gagcagauccuggcaaaga

SEQ ID NO: 1749297 - RNA, 19 nt, Homo sapiens
  misc_RNA (1)...(19): siRNA sense strand
ugacuugccugguggagaa

SEQ ID NO: 1749298 - RNA, 19 nt, Homo sapiens
  misc_RNA (1)...(19): siRNA sense strand
ccaaggguguguaugagaa

SEQ ID NO: 1749299 - RNA, 19 nt, Homo sapiens
  misc_RNA (1)...(19): siRNA sense strand
gaccucacaucaacuucua

SEQ ID NO: 1749300 - RNA, 19 nt, Homo sapiens
  misc_RNA (1)...(19): siRNA sense strand
gggagcagauccuggcaaa

SEQ ID NO: 1749301 - RNA, 19 nt, Homo sapiens
  misc_RNA (1)...(19): siRNA sense strand
gcaaguuugugcaguacga

SEQ ID NO: 1749302 - RNA, 19 nt, Homo sapiens
  misc_RNA (1)...(19): siRNA sense strand
gcaagggcgugcagaggau

SEQ ID NO: 1749303 - RNA, 19 nt, Homo sapiens
  misc_RNA (1)...(19): siRNA sense strand
ggacgacugcagcaaguuu

SEQ ID NO: 1749304 - RNA, 19 nt, Homo sapiens
  misc_RNA (1)...(19): siRNA sense strand
guaacacggucaucaagca

SEQ ID NO: 1749305 - RNA, 19 nt, Homo sapiens
  misc_RNA (1)...(19): siRNA sense strand
gggugaaccuggugacaga

SEQ ID NO: 1749306 - RNA, 19 nt, Homo sapiens
  misc_RNA (1)...(19): siRNA sense strand
uuaacgagaucacugcuau

SEQ ID NO: 1749307 - RNA, 19 nt, Homo sapiens
  misc_RNA (1)...(19): siRNA sense strand
acacggagcugggcaagau

SEQ ID NO: 1749308 - RNA, 19 nt, Homo sapiens
  misc_RNA (1)...(19): siRNA sense strand
cgagaucacugcuaugacu

SEQ ID NO: 1749309 - RNA, 19 nt, Homo sapiens
  misc_RNA (1)...(19): siRNA sense strand
ucgaggcccugaaggagua

SEQ ID NO: 1749310 - RNA, 19 nt, Homo sapiens
  misc_RNA (1)...(19): siRNA sense strand
acagcaacaugaagcaauu

SEQ ID NO: 1749311 - RNA, 19 nt, Homo sapiens
  misc_RNA (1)...(19): siRNA sense strand
gagaaccugcaguccuuua

SEQ ID NO: 1749312 - RNA, 19 nt, Homo sapiens
  misc_RNA (1)...(19): siRNA sense strand
ccgcaggcuuggcaucuuu

SEQ ID NO: 1749313 - RNA, 19 nt, Homo sapiens
  misc_RNA (1)...(19): siRNA sense strand
ccuggugguuuguguauga

SEQ ID NO: 1749314 - RNA, 19 nt, Homo sapiens
  misc_RNA (1)...(19): siRNA sense strand
gaagugcuccgaagacaac

SEQ ID NO: 1749315 - RNA, 19 nt, Homo sapiens
  misc_RNA (1)...(19): siRNA sense strand
uggagaaccugcaguccuu

SEQ ID NO: 1749316 - RNA, 19 nt, Homo sapiens
  misc_RNA (1)...(19): siRNA sense strand
cagagauggugcugucaga

SEQ ID NO: 1749317 - RNA, 19 nt, Homo sapiens
  misc_RNA (1)...(19): siRNA sense strand
agauggugcugucagauga

SEQ ID NO: 1749318 - RNA, 19 nt, Homo sapiens
  misc_RNA (1)...(19): siRNA sense strand
uaccucaucuccuccaaug

SEQ ID NO: 1749319 - RNA, 19 nt, Homo sapiens
  misc_RNA (1)...(19): siRNA sense strand
gagauggugcugucagaug

SEQ ID NO: 1749320 - RNA, 19 nt, Homo sapiens
  misc_RNA (1)...(19): siRNA sense strand
caaggaaggaggacaugga

SEQ ID NO: 1749321 - RNA, 19 nt, Homo sapiens
  misc_RNA (1)...(19): siRNA sense strand
gcaccagcccugaagaaag

SEQ ID NO: 1749322 - RNA, 19 nt, Homo sapiens
  misc_RNA (1)...(19): siRNA sense strand
ccacggcucugggcuucaa

SEQ ID NO: 1749323 - RNA, 19 nt, Homo sapiens
  misc_RNA (1)...(19): siRNA sense strand
ccucaucuccuccaauguu

SEQ ID NO: 1749324 - RNA, 19 nt, Homo sapiens
  misc_RNA (1)...(19): siRNA sense strand
gcguggcgcugucuacuac

SEQ ID NO: 1749325 - RNA, 19 nt, Homo sapiens
  misc_RNA (1)...(19): siRNA sense strand
ggaguucacccuggaguuc

SEQ ID NO: 1749326 - RNA, 19 nt, Homo sapiens
  misc_RNA (1)...(19): siRNA sense strand
agacggaccugaccuucgu

SEQ ID NO: 1749327 - RNA, 19 nt, Homo sapiens
  misc_RNA (1)...(19): siRNA sense strand
ccgagaagcccucaucagu

SEQ ID NO: 1749328 - RNA, 19 nt, Homo sapiens
  misc_RNA (1)...(19): siRNA sense strand
gcgcaagcuggacgaguuu

SEQ ID NO: 1749329 - RNA, 19 nt, Homo sapiens
  misc_RNA (1)...(19): siRNA sense strand
caccagcccugaagaaagc

SEQ ID NO: 1749330 - RNA, 19 nt, Homo sapiens
  misc_RNA (1)...(19): siRNA sense strand
ggccagggcagcaagaugu

SEQ ID NO: 1749331 - RNA, 19 nt, Homo sapiens
  misc_RNA (1)...(19): siRNA sense strand
ggaguaugagccugagaug

SEQ ID NO: 1749332 - RNA, 19 nt, Homo sapiens
  misc_RNA (1)...(19): siRNA sense strand
gcucaccaccaaucagaug

SEQ ID NO: 1749333 - RNA, 19 nt, Homo sapiens
  misc_RNA (1)...(19): siRNA sense strand
ugaaccaggacaagaagaa

SEQ ID NO: 1749334 - RNA, 19 nt, Homo sapiens
  misc_RNA (1)...(19): siRNA sense strand
gggcugcaccucagucauc

SEQ ID NO: 1749335 - RNA, 19 nt, Homo sapiens
  misc_RNA (1)...(19): siRNA sense strand
ggugguggugcuccagaua

SEQ ID NO: 1749336 - RNA, 19 nt, Homo sapiens
  misc_RNA (1)...(19): siRNA sense strand
caucgacugugagguguuc

SEQ ID NO: 1749337 - RNA, 19 nt, Homo sapiens
  misc_RNA (1)...(19): siRNA sense strand
gcaucuuccucacggcaau

SEQ ID NO: 1749338 - RNA, 19 nt, Homo sapiens
  misc_RNA (1)...(19): siRNA sense strand
uggcugcccuugucuccuu

SEQ ID NO: 1749339 - RNA, 19 nt, Homo sapiens
  misc_RNA (1)...(19): siRNA sense strand
caucucggguaccacguau

SEQ ID NO: 1749340 - RNA, 19 nt, Homo sapiens
  misc_RNA (1)...(19): siRNA sense strand
gcacgcucaccaccaauca

SEQ ID NO: 1749341 - RNA, 19 nt, Homo sapiens
  misc_RNA (1)...(19): siRNA sense strand
gcugucuacuacuucaaga

SEQ ID NO: 1749342 - RNA, 19 nt, Homo sapiens
  misc_RNA (1)...(19): siRNA sense strand
caauaucacaucgggcaaa

SEQ ID NO: 1749343 - RNA, 19 nt, Homo sapiens
  misc_RNA (1)...(19): siRNA sense strand
gcaguccuuuaacgagauc

SEQ ID NO: 1749344 - RNA, 19 nt, Homo sapiens
  misc_RNA (1)...(19): siRNA sense strand
gcgcauggcacgcaagaac

SEQ ID NO: 1749345 - RNA, 19 nt, Homo sapiens
  misc_RNA (1)...(19): siRNA sense strand
ucuaccagcugaggaacuu

SEQ ID NO: 1749346 - RNA, 19 nt, Homo sapiens
  misc_RNA (1)...(19): siRNA sense strand
ggagaaccugcaguccuuu

SEQ ID NO: 1749347 - RNA, 19 nt, Homo sapiens
  misc_RNA (1)...(19): siRNA sense strand
ggaccucacaucaacuucu

SEQ ID NO: 1749348 - RNA, 19 nt, Homo sapiens
  misc_RNA (1)...(19): siRNA sense strand
gaaccugcaguccuuuaac

SEQ ID NO: 1749349 - RNA, 19 nt, Homo sapiens
  misc_RNA (1)...(19): siRNA sense strand
caucaacaucggccacuuc

SEQ ID NO: 1749350 - RNA, 19 nt, Homo sapiens
  misc_RNA (1)...(19): siRNA sense strand
agauaucucugccugucau

SEQ ID NO: 1749351 - RNA, 19 nt, Homo sapiens
  misc_RNA (1)...(19): siRNA sense strand
ccaccaccauggccuuguc

SEQ ID NO: 1749352 - RNA, 19 nt, Homo sapiens
  misc_RNA (1)...(19): siRNA sense strand
cgaggucgucugcaucuuc

SEQ ID NO: 1749353 - RNA, 19 nt, Homo sapiens
  misc_RNA (1)...(19): siRNA sense strand
ggaacgcaacgccgagagu

SEQ ID NO: 1749354 - RNA, 19 nt, Homo sapiens
  misc_RNA (1)...(19): siRNA sense strand
gggagcuggugcuggaaca

SEQ ID NO: 1749355 - RNA, 19 nt, Homo sapiens
  misc_RNA (1)...(19): siRNA sense strand
ggcagcaagauguuuguga

SEQ ID NO: 1749356 - RNA, 19 nt, Homo sapiens
  misc_RNA (1)...(19): siRNA sense strand
gaaauccauguccguguac

SEQ ID NO: 1749357 - RNA, 19 nt, Homo sapiens
  misc_RNA (1)...(19): siRNA sense strand
ggccaaggguguguaugag

SEQ ID NO: 1749358 - RNA, 19 nt, Homo sapiens
  misc_RNA (1)...(19): siRNA sense strand
cggcugucaucacuacaug

SEQ ID NO: 1749359 - RNA, 19 nt, Homo sapiens
  misc_RNA (1)...(19): siRNA sense strand
gccaaggguguguaugaga

SEQ ID NO: 1749360 - RNA, 19 nt, Homo sapiens
  misc_RNA (1)...(19): siRNA sense strand
gcuggcucuucuuccgaua

SEQ ID NO: 1749361 - RNA, 19 nt, Homo sapiens
  misc_RNA (1)...(19): siRNA sense strand
gagcugugaaccaggacaa

SEQ ID NO: 1749362 - RNA, 19 nt, Homo sapiens
  misc_RNA (1)...(19): siRNA sense strand
cagcaaguuugugcaguac

SEQ ID NO: 1749363 - RNA, 19 nt, Homo sapiens
  misc_RNA (1)...(19): siRNA sense strand
agcgcaagcuggacgaguu

SEQ ID NO: 1749364 - RNA, 19 nt, Homo sapiens
  misc_RNA (1)...(19): siRNA sense strand
caagauccggagccagaug

SEQ ID NO: 1749365 - RNA, 19 nt, Homo sapiens
  misc_RNA (1)...(19): siRNA sense strand
gcugugaaccaggacaaga

SEQ ID NO: 1749366 - RNA, 19 nt, Homo sapiens
  misc_RNA (1)...(19): siRNA sense strand
guggcgcugucuacuacuu

SEQ ID NO: 1749367 - RNA, 19 nt, Homo sapiens
  misc_RNA (1)...(19): siRNA sense strand
ccaucgaggcccugaagga

SEQ ID NO: 1749368 - RNA, 19 nt, Homo sapiens
  misc_RNA (1)...(19): siRNA sense strand
cgagcuggcgccuguaaca

SEQ ID NO: 1749369 - RNA, 19 nt, Homo sapiens
  misc_RNA (1)...(19): siRNA sense strand
cggagacagcucugacuug

SEQ ID NO: 1749370 - RNA, 19 nt, Homo sapiens
  misc_RNA (1)...(19): siRNA sense strand
ggaaauccauguccgugua

SEQ ID NO: 1749371 - RNA, 19 nt, Homo sapiens
  misc_RNA (1)...(19): siRNA sense strand
ccaacgagcucccgaguga

SEQ ID NO: 1749372 - RNA, 19 nt, Homo sapiens
  misc_RNA (1)...(19): siRNA sense strand
gcagcaaguuugugcagua

SEQ ID NO: 1749373 - RNA, 19 nt, Homo sapiens
  misc_RNA (1)...(19): siRNA sense strand
gcagcaagauguuugugaa

SEQ ID NO: 1749374 - RNA, 19 nt, Homo sapiens
  misc_RNA (1)...(19): siRNA sense strand
gaugcgggcuccugccuuu

SEQ ID NO: 1749375 - RNA, 19 nt, Homo sapiens
  misc_RNA (1)...(19): siRNA sense strand
gagcagauccuggcaaaga

SEQ ID NO: 1749376 - RNA, 19 nt, Homo sapiens
  misc_RNA (1)...(19): siRNA sense strand
ugacuugccugguggagaa

SEQ ID NO: 1749377 - RNA, 19 nt, Homo sapiens
  misc_RNA (1)...(19): siRNA sense strand
ccaaggguguguaugagaa

SEQ ID NO: 1749378 - RNA, 19 nt, Homo sapiens
  misc_RNA (1)...(19): siRNA sense strand
gaccucacaucaacuucua

SEQ ID NO: 1749379 - RNA, 19 nt, Homo sapiens
  misc_RNA (1)...(19): siRNA sense strand
gggagcagauccuggcaaa

SEQ ID NO: 1749380 - RNA, 19 nt, Homo sapiens
  misc_RNA (1)...(19): siRNA sense strand
gcaaguuugugcaguacga

SEQ ID NO: 1749381 - RNA, 19 nt, Homo sapiens
  misc_RNA (1)...(19): siRNA sense strand
gcaagggcgugcagaggau

SEQ ID NO: 1749382 - RNA, 19 nt, Homo sapiens
  misc_RNA (1)...(19): siRNA sense strand
ggacgacugcagcaaguuu

SEQ ID NO: 1749383 - RNA, 19 nt, Homo sapiens
  misc_RNA (1)...(19): siRNA sense strand
guaacacggucaucaagca

SEQ ID NO: 1749384 - RNA, 19 nt, Homo sapiens
  misc_RNA (1)...(19): siRNA sense strand
gggugaaccuggugacaga

SEQ ID NO: 1749385 - RNA, 19 nt, Homo sapiens
  misc_RNA (1)...(19): siRNA sense strand
uuaacgagaucacugcuau

SEQ ID NO: 1749386 - RNA, 19 nt, Homo sapiens
  misc_RNA (1)...(19): siRNA sense strand
acacggagcugggcaagau

SEQ ID NO: 1749387 - RNA, 19 nt, Homo sapiens
  misc_RNA (1)...(19): siRNA sense strand
cgagaucacugcuaugacu

SEQ ID NO: 1749388 - RNA, 19 nt, Homo sapiens
  misc_RNA (1)...(19): siRNA sense strand
ucgaggcccugaaggagua

SEQ ID NO: 1749389 - RNA, 19 nt, Homo sapiens
  misc_RNA (1)...(19): siRNA sense strand
acagcaacaugaagcaauu

SEQ ID NO: 1749390 - RNA, 19 nt, Homo sapiens
  misc_RNA (1)...(19): siRNA sense strand
gagaaccugcaguccuuua

SEQ ID NO: 1749391 - RNA, 19 nt, Homo sapiens
  misc_RNA (1)...(19): siRNA sense strand
gaagugagcgcugggaaca

SEQ ID NO: 1749392 - RNA, 19 nt, Homo sapiens
  misc_RNA (1)...(19): siRNA sense strand
ccgcaggcuuggcaucuuu

SEQ ID NO: 1749393 - RNA, 19 nt, Homo sapiens
  misc_RNA (1)...(19): siRNA sense strand
ccuggugguuuguguauga

SEQ ID NO: 1749394 - RNA, 19 nt, Homo sapiens
  misc_RNA (1)...(19): siRNA sense strand
gaagugcuccgaagacaac

SEQ ID NO: 1749395 - RNA, 19 nt, Homo sapiens
  misc_RNA (1)...(19): siRNA sense strand
uggagaaccugcaguccuu

SEQ ID NO: 1749396 - RNA, 19 nt, Homo sapiens
  misc_RNA (1)...(19): siRNA sense strand
cagagauggugcugucaga

SEQ ID NO: 1749397 - RNA, 19 nt, Homo sapiens
  misc_RNA (1)...(19): siRNA sense strand
agauggugcugucagauga

SEQ ID NO: 1749398 - RNA, 19 nt, Homo sapiens
  misc_RNA (1)...(19): siRNA sense strand
uaccucaucuccuccaaug

SEQ ID NO: 1749399 - RNA, 19 nt, Homo sapiens
  misc_RNA (1)...(19): siRNA sense strand
gagauggugcugucagaug

SEQ ID NO: 1749400 - RNA, 19 nt, Homo sapiens
  misc_RNA (1)...(19): siRNA sense strand
caaggaaggaggacaugga

SEQ ID NO: 1749401 - RNA, 19 nt, Homo sapiens
  misc_RNA (1)...(19): siRNA sense strand
gcaccagcccugaagaaag

SEQ ID NO: 1749402 - RNA, 19 nt, Homo sapiens
  misc_RNA (1)...(19): siRNA sense strand
ccacggcucugggcuucaa

SEQ ID NO: 1749403 - RNA, 19 nt, Homo sapiens
  misc_RNA (1)...(19): siRNA sense strand
ccucaucuccuccaauguu

SEQ ID NO: 1749404 - RNA, 19 nt, Homo sapiens
  misc_RNA (1)...(19): siRNA sense strand
gcguggcgcugucuacuac

SEQ ID NO: 1749405 - RNA, 19 nt, Homo sapiens
  misc_RNA (1)...(19): siRNA sense strand
ggaguucacccuggaguuc

SEQ ID NO: 1749406 - RNA, 19 nt, Homo sapiens
  misc_RNA (1)...(19): siRNA sense strand
agacggaccugaccuucgu

SEQ ID NO: 1749407 - RNA, 19 nt, Homo sapiens
  misc_RNA (1)...(19): siRNA sense strand
ccgagaagcccucaucagu

SEQ ID NO: 1749408 - RNA, 19 nt, Homo sapiens
  misc_RNA (1)...(19): siRNA sense strand
gcgcaagcuggacgaguuu

SEQ ID NO: 1749409 - RNA, 19 nt, Homo sapiens
  misc_RNA (1)...(19): siRNA sense strand
caccagcccugaagaaagc

SEQ ID NO: 1749410 - RNA, 19 nt, Homo sapiens
  misc_RNA (1)...(19): siRNA sense strand
ggccagggcagcaagaugu

SEQ ID NO: 1749411 - RNA, 19 nt, Homo sapiens
  misc_RNA (1)...(19): siRNA sense strand
ggaguaugagccugagaug

SEQ ID NO: 1749412 - RNA, 19 nt, Homo sapiens
  misc_RNA (1)...(19): siRNA sense strand
gcucaccaccaaucagaug

SEQ ID NO: 1749413 - RNA, 19 nt, Homo sapiens
  misc_RNA (1)...(19): siRNA sense strand
ugaaccaggacaagaagaa

SEQ ID NO: 1749414 - RNA, 19 nt, Homo sapiens
  misc_RNA (1)...(19): siRNA sense strand
gggcugcaccucagucauc

SEQ ID NO: 1749415 - RNA, 19 nt, Homo sapiens
  misc_RNA (1)...(19): siRNA sense strand
ggugguggugcuccagaua

SEQ ID NO: 1749416 - RNA, 19 nt, Homo sapiens
  misc_RNA (1)...(19): siRNA sense strand
caucgacugugagguguuc

SEQ ID NO: 1749417 - RNA, 19 nt, Homo sapiens
  misc_RNA (1)...(19): siRNA sense strand
gcaucuuccucacggcaau

SEQ ID NO: 1749418 - RNA, 19 nt, Homo sapiens
  misc_RNA (1)...(19): siRNA sense strand
uggcugcccuugucuccuu

SEQ ID NO: 1749419 - RNA, 19 nt, Homo sapiens
  misc_RNA (1)...(19): siRNA sense strand
caucucggguaccacguau

SEQ ID NO: 1749420 - RNA, 19 nt, Homo sapiens
  misc_RNA (1)...(19): siRNA sense strand
gcacgcucaccaccaauca

SEQ ID NO: 1749421 - RNA, 19 nt, Homo sapiens
  misc_RNA (1)...(19): siRNA sense strand
gcugucuacuacuucaaga

SEQ ID NO: 1749422 - RNA, 19 nt, Homo sapiens
  misc_RNA (1)...(19): siRNA sense strand
caauaucacaucgggcaaa

SEQ ID NO: 1749423 - RNA, 19 nt, Homo sapiens
  misc_RNA (1)...(19): siRNA sense strand
gcaguccuuuaacgagauc

SEQ ID NO: 1749424 - RNA, 19 nt, Homo sapiens
  misc_RNA (1)...(19): siRNA sense strand
gcgcauggcacgcaagaac

SEQ ID NO: 1749425 - RNA, 19 nt, Homo sapiens
  misc_RNA (1)...(19): siRNA sense strand
ucuaccagcugaggaacuu

SEQ ID NO: 1749426 - RNA, 19 nt, Homo sapiens
  misc_RNA (1)...(19): siRNA sense strand
agugagcgcugggaacaga

SEQ ID NO: 1749427 - RNA, 19 nt, Homo sapiens
  misc_RNA (1)...(19): siRNA sense strand
ggagaaccugcaguccuuu

SEQ ID NO: 1749428 - RNA, 19 nt, Homo sapiens
  misc_RNA (1)...(19): siRNA sense strand
ggaccucacaucaacuucu

SEQ ID NO: 1749429 - RNA, 19 nt, Homo sapiens
  misc_RNA (1)...(19): siRNA sense strand
gaaccugcaguccuuuaac

SEQ ID NO: 1749430 - RNA, 19 nt, Homo sapiens
  misc_RNA (1)...(19): siRNA sense strand
caucaacaucggccacuuc

SEQ ID NO: 1749431 - RNA, 19 nt, Homo sapiens
  misc_RNA (1)...(19): siRNA sense strand
agauaucucugccugucau

SEQ ID NO: 1749432 - RNA, 19 nt, Homo sapiens
  misc_RNA (1)...(19): siRNA sense strand
ccaccaccauggccuuguc

SEQ ID NO: 1749433 - RNA, 19 nt, Homo sapiens
  misc_RNA (1)...(19): siRNA sense strand
cgaggucgucugcaucuuc

SEQ ID NO: 1749434 - RNA, 19 nt, Homo sapiens
  misc_RNA (1)...(19): siRNA sense strand
ggaacgcaacgccgagagu

SEQ ID NO: 1749435 - RNA, 19 nt, Homo sapiens
  misc_RNA (1)...(19): siRNA sense strand
gggagcuggugcuggaaca

SEQ ID NO: 1749436 - RNA, 19 nt, Homo sapiens
  misc_RNA (1)...(19): siRNA sense strand
ggcagcaagauguuuguga

SEQ ID NO: 1749437 - RNA, 19 nt, Homo sapiens
  misc_RNA (1)...(19): siRNA sense strand
gaaauccauguccguguac

SEQ ID NO: 1749438 - RNA, 19 nt, Homo sapiens
  misc_RNA (1)...(19): siRNA sense strand
ggccaaggguguguaugag

SEQ ID NO: 1749439 - RNA, 19 nt, Homo sapiens
  misc_RNA (1)...(19): siRNA sense strand
cggcugucaucacuacaug

SEQ ID NO: 1749440 - RNA, 19 nt, Homo sapiens
  misc_RNA (1)...(19): siRNA sense strand
gccaaggguguguaugaga

SEQ ID NO: 1749441 - RNA, 19 nt, Homo sapiens
  misc_RNA (1)...(19): siRNA sense strand
gcuggcucuucuuccgaua

SEQ ID NO: 1749442 - RNA, 19 nt, Homo sapiens
  misc_RNA (1)...(19): siRNA sense strand
gagcugugaaccaggacaa

SEQ ID NO: 1749443 - RNA, 19 nt, Homo sapiens
  misc_RNA (1)...(19): siRNA sense strand
cagcaaguuugugcaguac

SEQ ID NO: 1749444 - RNA, 19 nt, Homo sapiens
  misc_RNA (1)...(19): siRNA sense strand
agcgcaagcuggacgaguu

SEQ ID NO: 1749445 - RNA, 19 nt, Homo sapiens
  misc_RNA (1)...(19): siRNA sense strand
caagauccggagccagaug

SEQ ID NO: 1749446 - RNA, 19 nt, Homo sapiens
  misc_RNA (1)...(19): siRNA sense strand
gcugugaaccaggacaaga

SEQ ID NO: 1749447 - RNA, 19 nt, Homo sapiens
  misc_RNA (1)...(19): siRNA sense strand
guggcgcugucuacuacuu

SEQ ID NO: 1749448 - RNA, 19 nt, Homo sapiens
  misc_RNA (1)...(19): siRNA sense strand
ccaucgaggcccugaagga

SEQ ID NO: 1749449 - RNA, 19 nt, Homo sapiens
  misc_RNA (1)...(19): siRNA sense strand
cgagcuggcgccuguaaca

SEQ ID NO: 1749450 - RNA, 19 nt, Homo sapiens
  misc_RNA (1)...(19): siRNA sense strand
cggagacagcucugacuug

SEQ ID NO: 1749451 - RNA, 19 nt, Homo sapiens
  misc_RNA (1)...(19): siRNA sense strand
ggaaauccauguccgugua

SEQ ID NO: 1749452 - RNA, 19 nt, Homo sapiens
  misc_RNA (1)...(19): siRNA sense strand
ccaacgagcucccgaguga

SEQ ID NO: 1749453 - RNA, 19 nt, Homo sapiens
  misc_RNA (1)...(19): siRNA sense strand
gcagcaaguuugugcagua

SEQ ID NO: 1749454 - RNA, 19 nt, Homo sapiens
  misc_RNA (1)...(19): siRNA sense strand
gcagcaagauguuugugaa

SEQ ID NO: 1749455 - RNA, 19 nt, Homo sapiens
  misc_RNA (1)...(19): siRNA sense strand
gaugcgggcuccugccuuu

SEQ ID NO: 1749456 - RNA, 19 nt, Homo sapiens
  misc_RNA (1)...(19): siRNA sense strand
gagcagauccuggcaaaga

SEQ ID NO: 1749457 - RNA, 19 nt, Homo sapiens
  misc_RNA (1)...(19): siRNA sense strand
ugacuugccugguggagaa

SEQ ID NO: 1749458 - RNA, 19 nt, Homo sapiens
  misc_RNA (1)...(19): siRNA sense strand
ccaaggguguguaugagaa

SEQ ID NO: 1749459 - RNA, 19 nt, Homo sapiens
  misc_RNA (1)...(19): siRNA sense strand
gaccucacaucaacuucua

SEQ ID NO: 1749460 - RNA, 19 nt, Homo sapiens
  misc_RNA (1)...(19): siRNA sense strand
gggagcagauccuggcaaa

SEQ ID NO: 1749461 - RNA, 19 nt, Homo sapiens
  misc_RNA (1)...(19): siRNA sense strand
gcaaguuugugcaguacga

SEQ ID NO: 1749462 - RNA, 19 nt, Homo sapiens
  misc_RNA (1)...(19): siRNA sense strand
gcaagggcgugcagaggau

SEQ ID NO: 1749463 - RNA, 19 nt, Homo sapiens
  misc_RNA (1)...(19): siRNA sense strand
ggacgacugcagcaaguuu

SEQ ID NO: 1749464 - RNA, 19 nt, Homo sapiens
  misc_RNA (1)...(19): siRNA sense strand
guaacacggucaucaagca

SEQ ID NO: 1749465 - RNA, 19 nt, Homo sapiens
  misc_RNA (1)...(19): siRNA sense strand
gggugaaccuggugacaga

SEQ ID NO: 1749466 - RNA, 19 nt, Homo sapiens
  misc_RNA (1)...(19): siRNA sense strand
uuaacgagaucacugcuau

SEQ ID NO: 1749467 - RNA, 19 nt, Homo sapiens
  misc_RNA (1)...(19): siRNA sense strand
acacggagcugggcaagau

SEQ ID NO: 1749468 - RNA, 19 nt, Homo sapiens
  misc_RNA (1)...(19): siRNA sense strand
cgagaucacugcuaugacu

SEQ ID NO: 1749469 - RNA, 19 nt, Homo sapiens
  misc_RNA (1)...(19): siRNA sense strand
ucgaggcccugaaggagua

SEQ ID NO: 1749470 - RNA, 19 nt, Homo sapiens
  misc_RNA (1)...(19): siRNA sense strand
acagcaacaugaagcaauu

SEQ ID NO: 1749471 - RNA, 19 nt, Homo sapiens
  misc_RNA (1)...(19): siRNA sense strand
gagaaccugcaguccuuua

SEQ ID NO: 1749472 - RNA, 19 nt, Homo sapiens
  misc_RNA (1)...(19): siRNA sense strand
ccgcaggcuuggcaucuuu

SEQ ID NO: 1749473 - RNA, 19 nt, Homo sapiens
  misc_RNA (1)...(19): siRNA sense strand
ccuggugguuuguguauga

SEQ ID NO: 1749474 - RNA, 19 nt, Homo sapiens
  misc_RNA (1)...(19): siRNA sense strand
gaagugcuccgaagacaac

SEQ ID NO: 1749475 - RNA, 19 nt, Homo sapiens
  misc_RNA (1)...(19): siRNA sense strand
uggagaaccugcaguccuu

SEQ ID NO: 1749476 - RNA, 19 nt, Homo sapiens
  misc_RNA (1)...(19): siRNA sense strand
cagagauggugcugucaga

SEQ ID NO: 1749477 - RNA, 19 nt, Homo sapiens
  misc_RNA (1)...(19): siRNA sense strand
agauggugcugucagauga

SEQ ID NO: 1749478 - RNA, 19 nt, Homo sapiens
  misc_RNA (1)...(19): siRNA sense strand
uaccucaucuccuccaaug

SEQ ID NO: 1749479 - RNA, 19 nt, Homo sapiens
  misc_RNA (1)...(19): siRNA sense strand
gagauggugcugucagaug

SEQ ID NO: 1749480 - RNA, 19 nt, Homo sapiens
  misc_RNA (1)...(19): siRNA sense strand
caaggaaggaggacaugga

SEQ ID NO: 1749481 - RNA, 19 nt, Homo sapiens
  misc_RNA (1)...(19): siRNA sense strand
gcaccagcccugaagaaag

SEQ ID NO: 1749482 - RNA, 19 nt, Homo sapiens
  misc_RNA (1)...(19): siRNA sense strand
ccacggcucugggcuucaa

SEQ ID NO: 1749483 - RNA, 19 nt, Homo sapiens
  misc_RNA (1)...(19): siRNA sense strand
ccucaucuccuccaauguu

SEQ ID NO: 1749484 - RNA, 19 nt, Homo sapiens
  misc_RNA (1)...(19): siRNA sense strand
gcguggcgcugucuacuac

SEQ ID NO: 1749485 - RNA, 19 nt, Homo sapiens
  misc_RNA (1)...(19): siRNA sense strand
ggaguucacccuggaguuc

SEQ ID NO: 1749486 - RNA, 19 nt, Homo sapiens
  misc_RNA (1)...(19): siRNA sense strand
agacggaccugaccuucgu

SEQ ID NO: 1749487 - RNA, 19 nt, Homo sapiens
  misc_RNA (1)...(19): siRNA sense strand
ccgagaagcccucaucagu

SEQ ID NO: 1749488 - RNA, 19 nt, Homo sapiens
  misc_RNA (1)...(19): siRNA sense strand
gcgcaagcuggacgaguuu

SEQ ID NO: 1749489 - RNA, 19 nt, Homo sapiens
  misc_RNA (1)...(19): siRNA sense strand
caccagcccugaagaaagc

SEQ ID NO: 1749490 - RNA, 19 nt, Homo sapiens
  misc_RNA (1)...(19): siRNA sense strand
ggccagggcagcaagaugu

SEQ ID NO: 1749491 - RNA, 19 nt, Homo sapiens
  misc_RNA (1)...(19): siRNA sense strand
ggaguaugagccugagaug

SEQ ID NO: 1749492 - RNA, 19 nt, Homo sapiens
  misc_RNA (1)...(19): siRNA sense strand
gcucaccaccaaucagaug

SEQ ID NO: 1749493 - RNA, 19 nt, Homo sapiens
  misc_RNA (1)...(19): siRNA sense strand
ugaaccaggacaagaagaa

SEQ ID NO: 1749494 - RNA, 19 nt, Homo sapiens
  misc_RNA (1)...(19): siRNA sense strand
gggcugcaccucagucauc

SEQ ID NO: 1749495 - RNA, 19 nt, Homo sapiens
  misc_RNA (1)...(19): siRNA sense strand
ggugguggugcuccagaua

SEQ ID NO: 1749496 - RNA, 19 nt, Homo sapiens
  misc_RNA (1)...(19): siRNA sense strand
caucgacugugagguguuc

SEQ ID NO: 1749497 - RNA, 19 nt, Homo sapiens
  misc_RNA (1)...(19): siRNA sense strand
gcaucuuccucacggcaau

SEQ ID NO: 1749498 - RNA, 19 nt, Homo sapiens
  misc_RNA (1)...(19): siRNA sense strand
uggcugcccuugucuccuu

SEQ ID NO: 1749499 - RNA, 19 nt, Homo sapiens
  misc_RNA (1)...(19): siRNA sense strand
caucucggguaccacguau

SEQ ID NO: 1749500 - RNA, 19 nt, Homo sapiens
  misc_RNA (1)...(19): siRNA sense strand
gcacgcucaccaccaauca

SEQ ID NO: 1749501 - RNA, 19 nt, Homo sapiens
  misc_RNA (1)...(19): siRNA sense strand
gcugucuacuacuucaaga

SEQ ID NO: 1749502 - RNA, 19 nt, Homo sapiens
  misc_RNA (1)...(19): siRNA sense strand
caauaucacaucgggcaaa

SEQ ID NO: 1749503 - RNA, 19 nt, Homo sapiens
  misc_RNA (1)...(19): siRNA sense strand
gcaguccuuuaacgagauc

SEQ ID NO: 1749504 - RNA, 19 nt, Homo sapiens
  misc_RNA (1)...(19): siRNA sense strand
gcgcauggcacgcaagaac

SEQ ID NO: 1749505 - RNA, 19 nt, Homo sapiens
  misc_RNA (1)...(19): siRNA sense strand
ucuaccagcugaggaacuu

SEQ ID NO: 1749506 - RNA, 19 nt, Homo sapiens
  misc_RNA (1)...(19): siRNA sense strand
ggagaaccugcaguccuuu

SEQ ID NO: 1749507 - RNA, 19 nt, Homo sapiens
  misc_RNA (1)...(19): siRNA sense strand
ggaccucacaucaacuucu

SEQ ID NO: 1749508 - RNA, 19 nt, Homo sapiens
  misc_RNA (1)...(19): siRNA sense strand
gaaccugcaguccuuuaac

SEQ ID NO: 1749509 - RNA, 19 nt, Homo sapiens
  misc_RNA (1)...(19): siRNA sense strand
caucaacaucggccacuuc

SEQ ID NO: 1749510 - RNA, 19 nt, Homo sapiens
  misc_RNA (1)...(19): siRNA sense strand
agauaucucugccugucau

SEQ ID NO: 1749511 - RNA, 19 nt, Homo sapiens
  misc_RNA (1)...(19): siRNA sense strand
ccaccaccauggccuuguc

SEQ ID NO: 1749512 - RNA, 19 nt, Homo sapiens
  misc_RNA (1)...(19): siRNA sense strand
cgaggucgucugcaucuuc

SEQ ID NO: 1749513 - RNA, 19 nt, Homo sapiens
  misc_RNA (1)...(19): siRNA sense strand
ggaacgcaacgccgagagu

SEQ ID NO: 1749514 - RNA, 19 nt, Homo sapiens
  misc_RNA (1)...(19): siRNA sense strand
gggagcuggugcuggaaca

SEQ ID NO: 1749515 - RNA, 19 nt, Homo sapiens
  misc_RNA (1)...(19): siRNA sense strand
ggcagcaagauguuuguga

SEQ ID NO: 1749516 - RNA, 19 nt, Homo sapiens
  misc_RNA (1)...(19): siRNA sense strand
gaaauccauguccguguac

SEQ ID NO: 1749517 - RNA, 19 nt, Homo sapiens
  misc_RNA (1)...(19): siRNA sense strand
ggccaaggguguguaugag

SEQ ID NO: 1749518 - RNA, 19 nt, Homo sapiens
  misc_RNA (1)...(19): siRNA sense strand
cggcugucaucacuacaug

SEQ ID NO: 1749519 - RNA, 19 nt, Homo sapiens
  misc_RNA (1)...(19): siRNA sense strand
gccaaggguguguaugaga

SEQ ID NO: 1749520 - RNA, 19 nt, Homo sapiens
  misc_RNA (1)...(19): siRNA sense strand
gcuggcucuucuuccgaua

SEQ ID NO: 1749521 - RNA, 19 nt, Homo sapiens
  misc_RNA (1)...(19): siRNA sense strand
gagcugugaaccaggacaa

SEQ ID NO: 1749522 - RNA, 19 nt, Homo sapiens
  misc_RNA (1)...(19): siRNA sense strand
cagcaaguuugugcaguac

SEQ ID NO: 1749523 - RNA, 19 nt, Homo sapiens
  misc_RNA (1)...(19): siRNA sense strand
agcgcaagcuggacgaguu

SEQ ID NO: 1749524 - RNA, 19 nt, Homo sapiens
  misc_RNA (1)...(19): siRNA sense strand
caagauccggagccagaug

SEQ ID NO: 1749525 - RNA, 19 nt, Homo sapiens
  misc_RNA (1)...(19): siRNA sense strand
gcugugaaccaggacaaga

SEQ ID NO: 1749526 - RNA, 19 nt, Homo sapiens
  misc_RNA (1)...(19): siRNA sense strand
guggcgcugucuacuacuu

SEQ ID NO: 1749527 - RNA, 19 nt, Homo sapiens
  misc_RNA (1)...(19): siRNA sense strand
ccaucgaggcccugaagga

SEQ ID NO: 1749528 - RNA, 19 nt, Homo sapiens
  misc_RNA (1)...(19): siRNA sense strand
cgagcuggcgccuguaaca

SEQ ID NO: 1749529 - RNA, 19 nt, Homo sapiens
  misc_RNA (1)...(19): siRNA sense strand
cggagacagcucugacuug

SEQ ID NO: 1749530 - RNA, 19 nt, Homo sapiens
  misc_RNA (1)...(19): siRNA sense strand
ggaaauccauguccgugua

SEQ ID NO: 1749531 - RNA, 19 nt, Homo sapiens
  misc_RNA (1)...(19): siRNA sense strand
ccaacgagcucccgaguga

SEQ ID NO: 1749532 - RNA, 19 nt, Homo sapiens
  misc_RNA (1)...(19): siRNA sense strand
gcagcaaguuugugcagua

SEQ ID NO: 1749533 - RNA, 19 nt, Homo sapiens
  misc_RNA (1)...(19): siRNA sense strand
gcagcaagauguuugugaa

SEQ ID NO: 1749534 - RNA, 19 nt, Homo sapiens
  misc_RNA (1)...(19): siRNA sense strand
gaugcgggcuccugccuuu

SEQ ID NO: 1749535 - RNA, 19 nt, Homo sapiens
  misc_RNA (1)...(19): siRNA sense strand
gagcagauccuggcaaaga

SEQ ID NO: 1749536 - RNA, 19 nt, Homo sapiens
  misc_RNA (1)...(19): siRNA sense strand
ugacuugccugguggagaa

SEQ ID NO: 1749537 - RNA, 19 nt, Homo sapiens
  misc_RNA (1)...(19): siRNA sense strand
ccaaggguguguaugagaa

SEQ ID NO: 1749538 - RNA, 19 nt, Homo sapiens
  misc_RNA (1)...(19): siRNA sense strand
gaccucacaucaacuucua

SEQ ID NO: 1749539 - RNA, 19 nt, Homo sapiens
  misc_RNA (1)...(19): siRNA sense strand
gggagcagauccuggcaaa

SEQ ID NO: 1749540 - RNA, 19 nt, Homo sapiens
  misc_RNA (1)...(19): siRNA sense strand
gcaaguuugugcaguacga

SEQ ID NO: 1749541 - RNA, 19 nt, Homo sapiens
  misc_RNA (1)...(19): siRNA sense strand
gcaagggcgugcagaggau

SEQ ID NO: 1749542 - RNA, 19 nt, Homo sapiens
  misc_RNA (1)...(19): siRNA sense strand
ggacgacugcagcaaguuu

SEQ ID NO: 1749543 - RNA, 19 nt, Homo sapiens
  misc_RNA (1)...(19): siRNA sense strand
guaacacggucaucaagca

SEQ ID NO: 1749544 - RNA, 19 nt, Homo sapiens
  misc_RNA (1)...(19): siRNA sense strand
gggugaaccuggugacaga

SEQ ID NO: 1749545 - RNA, 19 nt, Homo sapiens
  misc_RNA (1)...(19): siRNA sense strand
uuaacgagaucacugcuau

SEQ ID NO: 1749546 - RNA, 19 nt, Homo sapiens
  misc_RNA (1)...(19): siRNA sense strand
acacggagcugggcaagau

SEQ ID NO: 1749547 - RNA, 19 nt, Homo sapiens
  misc_RNA (1)...(19): siRNA sense strand
cgagaucacugcuaugacu

SEQ ID NO: 1749548 - RNA, 19 nt, Homo sapiens
  misc_RNA (1)...(19): siRNA sense strand
ucgaggcccugaaggagua

SEQ ID NO: 1749549 - RNA, 19 nt, Homo sapiens
  misc_RNA (1)...(19): siRNA sense strand
acagcaacaugaagcaauu

SEQ ID NO: 1749550 - RNA, 19 nt, Homo sapiens
  misc_RNA (1)...(19): siRNA sense strand
gagaaccugcaguccuuua

SEQ ID NO: 1749551 - RNA, 19 nt, Homo sapiens
  misc_RNA (1)...(19): siRNA sense strand
ccgcaggcuuggcaucuuu

SEQ ID NO: 1749552 - RNA, 19 nt, Homo sapiens
  misc_RNA (1)...(19): siRNA sense strand
ccuggugguuuguguauga

SEQ ID NO: 1749553 - RNA, 19 nt, Homo sapiens
  misc_RNA (1)...(19): siRNA sense strand
gaagugcuccgaagacaac

SEQ ID NO: 1749554 - RNA, 19 nt, Homo sapiens
  misc_RNA (1)...(19): siRNA sense strand
uggagaaccugcaguccuu

SEQ ID NO: 1749555 - RNA, 19 nt, Homo sapiens
  misc_RNA (1)...(19): siRNA sense strand
cagagauggugcugucaga

SEQ ID NO: 1749556 - RNA, 19 nt, Homo sapiens
  misc_RNA (1)...(19): siRNA sense strand
agauggugcugucagauga

SEQ ID NO: 1749557 - RNA, 19 nt, Homo sapiens
  misc_RNA (1)...(19): siRNA sense strand
uaccucaucuccuccaaug

SEQ ID NO: 1749558 - RNA, 19 nt, Homo sapiens
  misc_RNA (1)...(19): siRNA sense strand
gagauggugcugucagaug

SEQ ID NO: 1749559 - RNA, 19 nt, Homo sapiens
  misc_RNA (1)...(19): siRNA sense strand
caaggaaggaggacaugga

SEQ ID NO: 1749560 - RNA, 19 nt, Homo sapiens
  misc_RNA (1)...(19): siRNA sense strand
gcaccagcccugaagaaag

SEQ ID NO: 1749561 - RNA, 19 nt, Homo sapiens
  misc_RNA (1)...(19): siRNA sense strand
ccacggcucugggcuucaa

SEQ ID NO: 1749562 - RNA, 19 nt, Homo sapiens
  misc_RNA (1)...(19): siRNA sense strand
ccucaucuccuccaauguu

SEQ ID NO: 1749563 - RNA, 19 nt, Homo sapiens
  misc_RNA (1)...(19): siRNA sense strand
gcguggcgcugucuacuac

SEQ ID NO: 1749564 - RNA, 19 nt, Homo sapiens
  misc_RNA (1)...(19): siRNA sense strand
ggaguucacccuggaguuc

SEQ ID NO: 1749565 - RNA, 19 nt, Homo sapiens
  misc_RNA (1)...(19): siRNA sense strand
agacggaccugaccuucgu

SEQ ID NO: 1749566 - RNA, 19 nt, Homo sapiens
  misc_RNA (1)...(19): siRNA sense strand
ccgagaagcccucaucagu

SEQ ID NO: 1749567 - RNA, 19 nt, Homo sapiens
  misc_RNA (1)...(19): siRNA sense strand
gcgcaagcuggacgaguuu

SEQ ID NO: 1749568 - RNA, 19 nt, Homo sapiens
  misc_RNA (1)...(19): siRNA sense strand
caccagcccugaagaaagc

SEQ ID NO: 1749569 - RNA, 19 nt, Homo sapiens
  misc_RNA (1)...(19): siRNA sense strand
ggccagggcagcaagaugu

SEQ ID NO: 1749570 - RNA, 19 nt, Homo sapiens
  misc_RNA (1)...(19): siRNA sense strand
ggaguaugagccugagaug

SEQ ID NO: 1749571 - RNA, 19 nt, Homo sapiens
  misc_RNA (1)...(19): siRNA sense strand
gcucaccaccaaucagaug

SEQ ID NO: 1749572 - RNA, 19 nt, Homo sapiens
  misc_RNA (1)...(19): siRNA sense strand
ugaaccaggacaagaagaa

SEQ ID NO: 1749573 - RNA, 19 nt, Homo sapiens
  misc_RNA (1)...(19): siRNA sense strand
gggcugcaccucagucauc

SEQ ID NO: 1749574 - RNA, 19 nt, Homo sapiens
  misc_RNA (1)...(19): siRNA sense strand
ggugguggugcuccagaua

SEQ ID NO: 1749575 - RNA, 19 nt, Homo sapiens
  misc_RNA (1)...(19): siRNA sense strand
caucgacugugagguguuc

SEQ ID NO: 1749576 - RNA, 19 nt, Homo sapiens
  misc_RNA (1)...(19): siRNA sense strand
gcaucuuccucacggcaau

SEQ ID NO: 1749577 - RNA, 19 nt, Homo sapiens
  misc_RNA (1)...(19): siRNA sense strand
uggcugcccuugucuccuu

SEQ ID NO: 1749578 - RNA, 19 nt, Homo sapiens
  misc_RNA (1)...(19): siRNA sense strand
caucucggguaccacguau

SEQ ID NO: 1749579 - RNA, 19 nt, Homo sapiens
  misc_RNA (1)...(19): siRNA sense strand
gcacgcucaccaccaauca

SEQ ID NO: 1749580 - RNA, 19 nt, Homo sapiens
  misc_RNA (1)...(19): siRNA sense strand
gcugucuacuacuucaaga

SEQ ID NO: 1749581 - RNA, 19 nt, Homo sapiens
  misc_RNA (1)...(19): siRNA sense strand
caauaucacaucgggcaaa

SEQ ID NO: 1749582 - RNA, 19 nt, Homo sapiens
  misc_RNA (1)...(19): siRNA sense strand
gcaguccuuuaacgagauc

SEQ ID NO: 1749583 - RNA, 19 nt, Homo sapiens
  misc_RNA (1)...(19): siRNA sense strand
gcgcauggcacgcaagaac

SEQ ID NO: 1749584 - RNA, 19 nt, Homo sapiens
  misc_RNA (1)...(19): siRNA sense strand
ucuaccagcugaggaacuu

SEQ ID NO: 1749585 - RNA, 19 nt, Homo sapiens
  misc_RNA (1)...(19): siRNA sense strand
ggagaaccugcaguccuuu

SEQ ID NO: 1749586 - RNA, 19 nt, Homo sapiens
  misc_RNA (1)...(19): siRNA sense strand
ggaccucacaucaacuucu

SEQ ID NO: 1749587 - RNA, 19 nt, Homo sapiens
  misc_RNA (1)...(19): siRNA sense strand
gaaccugcaguccuuuaac

SEQ ID NO: 1749588 - RNA, 19 nt, Homo sapiens
  misc_RNA (1)...(19): siRNA sense strand
caucaacaucggccacuuc

SEQ ID NO: 1749589 - RNA, 19 nt, Homo sapiens
  misc_RNA (1)...(19): siRNA sense strand
agauaucucugccugucau

SEQ ID NO: 1749590 - RNA, 19 nt, Homo sapiens
  misc_RNA (1)...(19): siRNA sense strand
ccaccaccauggccuuguc

SEQ ID NO: 1749591 - RNA, 19 nt, Homo sapiens
  misc_RNA (1)...(19): siRNA sense strand
cgaggucgucugcaucuuc

SEQ ID NO: 1749592 - RNA, 19 nt, Homo sapiens
  misc_RNA (1)...(19): siRNA sense strand
ggaacgcaacgccgagagu

SEQ ID NO: 1749593 - RNA, 19 nt, Homo sapiens
  misc_RNA (1)...(19): siRNA sense strand
gggagcuggugcuggaaca

SEQ ID NO: 1749594 - RNA, 19 nt, Homo sapiens
  misc_RNA (1)...(19): siRNA sense strand
ggcagcaagauguuuguga

SEQ ID NO: 1749595 - RNA, 19 nt, Homo sapiens
  misc_RNA (1)...(19): siRNA sense strand
gaaauccauguccguguac

SEQ ID NO: 1749596 - RNA, 19 nt, Homo sapiens
  misc_RNA (1)...(19): siRNA sense strand
ggccaaggguguguaugag

SEQ ID NO: 1749597 - RNA, 19 nt, Homo sapiens
  misc_RNA (1)...(19): siRNA sense strand
cggcugucaucacuacaug

SEQ ID NO: 1749598 - RNA, 19 nt, Homo sapiens
  misc_RNA (1)...(19): siRNA sense strand
gccaaggguguguaugaga

SEQ ID NO: 1749599 - RNA, 19 nt, Homo sapiens
  misc_RNA (1)...(19): siRNA sense strand
gcuggcucuucuuccgaua

SEQ ID NO: 1749600 - RNA, 19 nt, Homo sapiens
  misc_RNA (1)...(19): siRNA sense strand
gagcugugaaccaggacaa

SEQ ID NO: 1749601 - RNA, 19 nt, Homo sapiens
  misc_RNA (1)...(19): siRNA sense strand
cagcaaguuugugcaguac

SEQ ID NO: 1749602 - RNA, 19 nt, Homo sapiens
  misc_RNA (1)...(19): siRNA sense strand
agcgcaagcuggacgaguu

SEQ ID NO: 1749603 - RNA, 19 nt, Homo sapiens
  misc_RNA (1)...(19): siRNA sense strand
caagauccggagccagaug

SEQ ID NO: 1749604 - RNA, 19 nt, Homo sapiens
  misc_RNA (1)...(19): siRNA sense strand
gcugugaaccaggacaaga

SEQ ID NO: 1749605 - RNA, 19 nt, Homo sapiens
  misc_RNA (1)...(19): siRNA sense strand
guggcgcugucuacuacuu

SEQ ID NO: 1749606 - RNA, 19 nt, Homo sapiens
  misc_RNA (1)...(19): siRNA sense strand
ccaucgaggcccugaagga

SEQ ID NO: 1749607 - RNA, 19 nt, Homo sapiens
  misc_RNA (1)...(19): siRNA sense strand
cgagcuggcgccuguaaca

SEQ ID NO: 1749608 - RNA, 19 nt, Homo sapiens
  misc_RNA (1)...(19): siRNA sense strand
cggagacagcucugacuug

SEQ ID NO: 1749609 - RNA, 19 nt, Homo sapiens
  misc_RNA (1)...(19): siRNA sense strand
ggaaauccauguccgugua

SEQ ID NO: 1749610 - RNA, 19 nt, Homo sapiens
  misc_RNA (1)...(19): siRNA sense strand
ccaacgagcucccgaguga

SEQ ID NO: 1749611 - RNA, 19 nt, Homo sapiens
  misc_RNA (1)...(19): siRNA sense strand
gcagcaaguuugugcagua

SEQ ID NO: 1749612 - RNA, 19 nt, Homo sapiens
  misc_RNA (1)...(19): siRNA sense strand
gcagcaagauguuugugaa

SEQ ID NO: 1749613 - RNA, 19 nt, Homo sapiens
  misc_RNA (1)...(19): siRNA sense strand
gaugcgggcuccugccuuu

SEQ ID NO: 1749614 - RNA, 19 nt, Homo sapiens
  misc_RNA (1)...(19): siRNA sense strand
gagcagauccuggcaaaga

SEQ ID NO: 1749615 - RNA, 19 nt, Homo sapiens
  misc_RNA (1)...(19): siRNA sense strand
ugacuugccugguggagaa

SEQ ID NO: 1749616 - RNA, 19 nt, Homo sapiens
  misc_RNA (1)...(19): siRNA sense strand
ccaaggguguguaugagaa

SEQ ID NO: 1749617 - RNA, 19 nt, Homo sapiens
  misc_RNA (1)...(19): siRNA sense strand
gaccucacaucaacuucua

SEQ ID NO: 1749618 - RNA, 19 nt, Homo sapiens
  misc_RNA (1)...(19): siRNA sense strand
gggagcagauccuggcaaa

SEQ ID NO: 1749619 - RNA, 19 nt, Homo sapiens
  misc_RNA (1)...(19): siRNA sense strand
gcaaguuugugcaguacga

SEQ ID NO: 1749620 - RNA, 19 nt, Homo sapiens
  misc_RNA (1)...(19): siRNA sense strand
gcaagggcgugcagaggau

SEQ ID NO: 1749621 - RNA, 19 nt, Homo sapiens
  misc_RNA (1)...(19): siRNA sense strand
ggacgacugcagcaaguuu

SEQ ID NO: 1749622 - RNA, 19 nt, Homo sapiens
  misc_RNA (1)...(19): siRNA sense strand
guaacacggucaucaagca

SEQ ID NO: 1749623 - RNA, 19 nt, Homo sapiens
  misc_RNA (1)...(19): siRNA sense strand
gggugaaccuggugacaga

SEQ ID NO: 1749624 - RNA, 19 nt, Homo sapiens
  misc_RNA (1)...(19): siRNA sense strand
uuaacgagaucacugcuau

SEQ ID NO: 1749625 - RNA, 19 nt, Homo sapiens
  misc_RNA (1)...(19): siRNA sense strand
acacggagcugggcaagau

SEQ ID NO: 1749626 - RNA, 19 nt, Homo sapiens
  misc_RNA (1)...(19): siRNA sense strand
cgagaucacugcuaugacu

SEQ ID NO: 1749627 - RNA, 19 nt, Homo sapiens
  misc_RNA (1)...(19): siRNA sense strand
ucgaggcccugaaggagua

SEQ ID NO: 1749628 - RNA, 19 nt, Homo sapiens
  misc_RNA (1)...(19): siRNA sense strand
acagcaacaugaagcaauu

SEQ ID NO: 1749629 - RNA, 19 nt, Homo sapiens
  misc_RNA (1)...(19): siRNA sense strand
gagaaccugcaguccuuua

SEQ ID NO: 1749630 - RNA, 19 nt, Homo sapiens
  misc_RNA (1)...(19): siRNA sense strand
ccgcaggcuuggcaucuuu

SEQ ID NO: 1749631 - RNA, 19 nt, Homo sapiens
  misc_RNA (1)...(19): siRNA sense strand
ccuggugguuuguguauga

SEQ ID NO: 1749632 - RNA, 19 nt, Homo sapiens
  misc_RNA (1)...(19): siRNA sense strand
gaagugcuccgaagacaac

SEQ ID NO: 1749633 - RNA, 19 nt, Homo sapiens
  misc_RNA (1)...(19): siRNA sense strand
uggagaaccugcaguccuu

SEQ ID NO: 1749634 - RNA, 19 nt, Homo sapiens
  misc_RNA (1)...(19): siRNA sense strand
cagagauggugcugucaga

SEQ ID NO: 1749635 - RNA, 19 nt, Homo sapiens
  misc_RNA (1)...(19): siRNA sense strand
agauggugcugucagauga

SEQ ID NO: 1749636 - RNA, 19 nt, Homo sapiens
  misc_RNA (1)...(19): siRNA sense strand
uaccucaucuccuccaaug

SEQ ID NO: 1749637 - RNA, 19 nt, Homo sapiens
  misc_RNA (1)...(19): siRNA sense strand
gagauggugcugucagaug

SEQ ID NO: 1749638 - RNA, 19 nt, Homo sapiens
  misc_RNA (1)...(19): siRNA sense strand
caaggaaggaggacaugga

SEQ ID NO: 1749639 - RNA, 19 nt, Homo sapiens
  misc_RNA (1)...(19): siRNA sense strand
gcaccagcccugaagaaag

SEQ ID NO: 1749640 - RNA, 19 nt, Homo sapiens
  misc_RNA (1)...(19): siRNA sense strand
ccacggcucugggcuucaa

SEQ ID NO: 1749641 - RNA, 19 nt, Homo sapiens
  misc_RNA (1)...(19): siRNA sense strand
ccucaucuccuccaauguu

SEQ ID NO: 1749642 - RNA, 19 nt, Homo sapiens
  misc_RNA (1)...(19): siRNA sense strand
gcguggcgcugucuacuac

SEQ ID NO: 1749643 - RNA, 19 nt, Homo sapiens
  misc_RNA (1)...(19): siRNA sense strand
ggaguucacccuggaguuc

SEQ ID NO: 1749644 - RNA, 19 nt, Homo sapiens
  misc_RNA (1)...(19): siRNA sense strand
agacggaccugaccuucgu

SEQ ID NO: 1749645 - RNA, 19 nt, Homo sapiens
  misc_RNA (1)...(19): siRNA sense strand
ccgagaagcccucaucagu

SEQ ID NO: 1749646 - RNA, 19 nt, Homo sapiens
  misc_RNA (1)...(19): siRNA sense strand
gcgcaagcuggacgaguuu

SEQ ID NO: 1749647 - RNA, 19 nt, Homo sapiens
  misc_RNA (1)...(19): siRNA sense strand
caccagcccugaagaaagc

SEQ ID NO: 1749648 - RNA, 19 nt, Homo sapiens
  misc_RNA (1)...(19): siRNA sense strand
ggccagggcagcaagaugu

SEQ ID NO: 1749649 - RNA, 19 nt, Homo sapiens
  misc_RNA (1)...(19): siRNA sense strand
ggaguaugagccugagaug

SEQ ID NO: 1749650 - RNA, 19 nt, Homo sapiens
  misc_RNA (1)...(19): siRNA sense strand
gcucaccaccaaucagaug

SEQ ID NO: 1749651 - RNA, 19 nt, Homo sapiens
  misc_RNA (1)...(19): siRNA sense strand
ugaaccaggacaagaagaa

SEQ ID NO: 1749652 - RNA, 19 nt, Homo sapiens
  misc_RNA (1)...(19): siRNA sense strand
gggcugcaccucagucauc

SEQ ID NO: 1749653 - RNA, 19 nt, Homo sapiens
  misc_RNA (1)...(19): siRNA sense strand
ggugguggugcuccagaua

SEQ ID NO: 1749654 - RNA, 19 nt, Homo sapiens
  misc_RNA (1)...(19): siRNA sense strand
caucgacugugagguguuc

SEQ ID NO: 1749655 - RNA, 19 nt, Homo sapiens
  misc_RNA (1)...(19): siRNA sense strand
gcaucuuccucacggcaau

SEQ ID NO: 1749656 - RNA, 19 nt, Homo sapiens
  misc_RNA (1)...(19): siRNA sense strand
uggcugcccuugucuccuu

SEQ ID NO: 1749657 - RNA, 19 nt, Homo sapiens
  misc_RNA (1)...(19): siRNA sense strand
caucucggguaccacguau

SEQ ID NO: 1749658 - RNA, 19 nt, Homo sapiens
  misc_RNA (1)...(19): siRNA sense strand
gcacgcucaccaccaauca

SEQ ID NO: 1749659 - RNA, 19 nt, Homo sapiens
  misc_RNA (1)...(19): siRNA sense strand
gcugucuacuacuucaaga

SEQ ID NO: 1749660 - RNA, 19 nt, Homo sapiens
  misc_RNA (1)...(19): siRNA sense strand
caauaucacaucgggcaaa

SEQ ID NO: 1749661 - RNA, 19 nt, Homo sapiens
  misc_RNA (1)...(19): siRNA sense strand
gcaguccuuuaacgagauc

SEQ ID NO: 1749662 - RNA, 19 nt, Homo sapiens
  misc_RNA (1)...(19): siRNA sense strand
gcgcauggcacgcaagaac

SEQ ID NO: 1749663 - RNA, 19 nt, Homo sapiens
  misc_RNA (1)...(19): siRNA sense strand
ucuaccagcugaggaacuu

SEQ ID NO: 1749664 - RNA, 19 nt, Homo sapiens
  misc_RNA (1)...(19): siRNA sense strand
ggagaaccugcaguccuuu

SEQ ID NO: 1749665 - RNA, 19 nt, Homo sapiens
  misc_RNA (1)...(19): siRNA sense strand
ggaccucacaucaacuucu

SEQ ID NO: 1749666 - RNA, 19 nt, Homo sapiens
  misc_RNA (1)...(19): siRNA sense strand
gaaccugcaguccuuuaac

SEQ ID NO: 1749667 - RNA, 19 nt, Homo sapiens
  misc_RNA (1)...(19): siRNA sense strand
caucaacaucggccacuuc

SEQ ID NO: 1749668 - RNA, 19 nt, Homo sapiens
  misc_RNA (1)...(19): siRNA sense strand
agauaucucugccugucau

SEQ ID NO: 1749669 - RNA, 19 nt, Homo sapiens
  misc_RNA (1)...(19): siRNA sense strand
ccaccaccauggccuuguc

SEQ ID NO: 1749670 - RNA, 19 nt, Homo sapiens
  misc_RNA (1)...(19): siRNA sense strand
cgaggucgucugcaucuuc

SEQ ID NO: 1749671 - RNA, 19 nt, Homo sapiens
  misc_RNA (1)...(19): siRNA sense strand
ggaacgcaacgccgagagu

SEQ ID NO: 1749672 - RNA, 19 nt, Homo sapiens
  misc_RNA (1)...(19): siRNA sense strand
gggagcuggugcuggaaca

SEQ ID NO: 1749673 - RNA, 19 nt, Homo sapiens
  misc_RNA (1)...(19): siRNA sense strand
ggcagcaagauguuuguga

SEQ ID NO: 1749674 - RNA, 19 nt, Homo sapiens
  misc_RNA (1)...(19): siRNA sense strand
gaaauccauguccguguac

SEQ ID NO: 1749675 - RNA, 19 nt, Homo sapiens
  misc_RNA (1)...(19): siRNA sense strand
ggccaaggguguguaugag

SEQ ID NO: 1749676 - RNA, 19 nt, Homo sapiens
  misc_RNA (1)...(19): siRNA sense strand
cggcugucaucacuacaug

SEQ ID NO: 1749677 - RNA, 19 nt, Homo sapiens
  misc_RNA (1)...(19): siRNA sense strand
gccaaggguguguaugaga

SEQ ID NO: 1749678 - RNA, 19 nt, Homo sapiens
  misc_RNA (1)...(19): siRNA sense strand
gcuggcucuucuuccgaua

SEQ ID NO: 1749679 - RNA, 19 nt, Homo sapiens
  misc_RNA (1)...(19): siRNA sense strand
gagcugugaaccaggacaa

SEQ ID NO: 1749680 - RNA, 19 nt, Homo sapiens
  misc_RNA (1)...(19): siRNA sense strand
cagcaaguuugugcaguac

SEQ ID NO: 1749681 - RNA, 19 nt, Homo sapiens
  misc_RNA (1)...(19): siRNA sense strand
agcgcaagcuggacgaguu

SEQ ID NO: 1749682 - RNA, 19 nt, Homo sapiens
  misc_RNA (1)...(19): siRNA sense strand
caagauccggagccagaug

SEQ ID NO: 1749683 - RNA, 19 nt, Homo sapiens
  misc_RNA (1)...(19): siRNA sense strand
gcugugaaccaggacaaga

SEQ ID NO: 1749684 - RNA, 19 nt, Homo sapiens
  misc_RNA (1)...(19): siRNA sense strand
guggcgcugucuacuacuu

SEQ ID NO: 1749685 - RNA, 19 nt, Homo sapiens
  misc_RNA (1)...(19): siRNA sense strand
ccaucgaggcccugaagga

SEQ ID NO: 1749686 - RNA, 19 nt, Homo sapiens
  misc_RNA (1)...(19): siRNA sense strand
cgagcuggcgccuguaaca

SEQ ID NO: 1749687 - RNA, 19 nt, Homo sapiens
  misc_RNA (1)...(19): siRNA sense strand
cggagacagcucugacuug

SEQ ID NO: 1749688 - RNA, 19 nt, Homo sapiens
  misc_RNA (1)...(19): siRNA sense strand
gaaauaagcuaaacccaua

SEQ ID NO: 1749689 - RNA, 19 nt, Homo sapiens
  misc_RNA (1)...(19): siRNA sense strand
gagaagaccuugaaauaaa

SEQ ID NO: 1749690 - RNA, 19 nt, Homo sapiens
  misc_RNA (1)...(19): siRNA sense strand
ggaaagaucucuggacaaa

SEQ ID NO: 1749691 - RNA, 19 nt, Homo sapiens
  misc_RNA (1)...(19): siRNA sense strand
caaaugcccuggaagauaa

SEQ ID NO: 1749692 - RNA, 19 nt, Homo sapiens
  misc_RNA (1)...(19): siRNA sense strand
gaagaaggccuccaaagaa

SEQ ID NO: 1749693 - RNA, 19 nt, Homo sapiens
  misc_RNA (1)...(19): siRNA sense strand
gaaguccucuugugcagua

SEQ ID NO: 1749694 - RNA, 19 nt, Homo sapiens
  misc_RNA (1)...(19): siRNA sense strand
gaacagagcccgacuaaaa

SEQ ID NO: 1749695 - RNA, 19 nt, Homo sapiens
  misc_RNA (1)...(19): siRNA sense strand
gaagcauugucaacauuua

SEQ ID NO: 1749696 - RNA, 19 nt, Homo sapiens
  misc_RNA (1)...(19): siRNA sense strand
caaagaagauguagcaaag

SEQ ID NO: 1749697 - RNA, 19 nt, Homo sapiens
  misc_RNA (1)...(19): siRNA sense strand
ggacauugcugcuguucuu

SEQ ID NO: 1749698 - RNA, 19 nt, Homo sapiens
  misc_RNA (1)...(19): siRNA sense strand
gggagaagaccuugaaaua

SEQ ID NO: 1749699 - RNA, 19 nt, Homo sapiens
  misc_RNA (1)...(19): siRNA sense strand
ucauaaagcucuuaggauu

SEQ ID NO: 1749700 - RNA, 19 nt, Homo sapiens
  misc_RNA (1)...(19): siRNA sense strand
ucacaacccucaucugaaa

SEQ ID NO: 1749701 - RNA, 19 nt, Homo sapiens
  misc_RNA (1)...(19): siRNA sense strand
ggacaaaggcucaggaaga

SEQ ID NO: 1749702 - RNA, 19 nt, Homo sapiens
  misc_RNA (1)...(19): siRNA sense strand
gaaauaaacucccaaaaca

SEQ ID NO: 1749703 - RNA, 19 nt, Homo sapiens
  misc_RNA (1)...(19): siRNA sense strand
ggaagguccugauggaauu

SEQ ID NO: 1749704 - RNA, 19 nt, Homo sapiens
  misc_RNA (1)...(19): siRNA sense strand
gagggaauuuggacauaua

SEQ ID NO: 1749705 - RNA, 19 nt, Homo sapiens
  misc_RNA (1)...(19): siRNA sense strand
gcaaagcccugaaagucuu

SEQ ID NO: 1749706 - RNA, 19 nt, Homo sapiens
  misc_RNA (1)...(19): siRNA sense strand
ggagaagaccuugaaauaa

SEQ ID NO: 1749707 - RNA, 19 nt, Homo sapiens
  misc_RNA (1)...(19): siRNA sense strand
aacaagaacuuccagauuu

SEQ ID NO: 1749708 - RNA, 19 nt, Homo sapiens
  misc_RNA (1)...(19): siRNA sense strand
ccagaauccucucuccuua

SEQ ID NO: 1749709 - RNA, 19 nt, Homo sapiens
  misc_RNA (1)...(19): siRNA sense strand
ccaaugccuugaaaguuua

SEQ ID NO: 1749710 - RNA, 19 nt, Homo sapiens
  misc_RNA (1)...(19): siRNA sense strand
gaaugacguugcuguguga

SEQ ID NO: 1749711 - RNA, 19 nt, Homo sapiens
  misc_RNA (1)...(19): siRNA sense strand
gaaagcauaugaaggaaac

SEQ ID NO: 1749712 - RNA, 19 nt, Homo sapiens
  misc_RNA (1)...(19): siRNA sense strand
aggaagagaugagaaauaa

SEQ ID NO: 1749713 - RNA, 19 nt, Homo sapiens
  misc_RNA (1)...(19): siRNA sense strand
ugaaggagcucagaaagga

SEQ ID NO: 1749714 - RNA, 19 nt, Homo sapiens
  misc_RNA (1)...(19): siRNA sense strand
gcauguguguggagaauau

SEQ ID NO: 1749715 - RNA, 19 nt, Homo sapiens
  misc_RNA (1)...(19): siRNA sense strand
caacaagaacuuccagauu

SEQ ID NO: 1749716 - RNA, 19 nt, Homo sapiens
  misc_RNA (1)...(19): siRNA sense strand
caagauagaagagcugaua

SEQ ID NO: 1749717 - RNA, 19 nt, Homo sapiens
  misc_RNA (1)...(19): siRNA sense strand
cccaaugccuugaaaguuu

SEQ ID NO: 1749718 - RNA, 19 nt, Homo sapiens
  misc_RNA (1)...(19): siRNA sense strand
ggucuguacuugugugaaa

SEQ ID NO: 1749719 - RNA, 19 nt, Homo sapiens
  misc_RNA (1)...(19): siRNA sense strand
ccaaagugaugaauuucuu

SEQ ID NO: 1749720 - RNA, 19 nt, Homo sapiens
  misc_RNA (1)...(19): siRNA sense strand
ccaauuauccugagcaguu

SEQ ID NO: 1749721 - RNA, 19 nt, Homo sapiens
  misc_RNA (1)...(19): siRNA sense strand
uugaugggcuguuuccuua

SEQ ID NO: 1749722 - RNA, 19 nt, Homo sapiens
  misc_RNA (1)...(19): siRNA sense strand
caaagcugcuggacaaaca

SEQ ID NO: 1749723 - RNA, 19 nt, Homo sapiens
  misc_RNA (1)...(19): siRNA sense strand
gcucagaaaggaagaguuu

SEQ ID NO: 1749724 - RNA, 19 nt, Homo sapiens
  misc_RNA (1)...(19): siRNA sense strand
gaaggacagguucacauuu

SEQ ID NO: 1749725 - RNA, 19 nt, Homo sapiens
  misc_RNA (1)...(19): siRNA sense strand
ggaaggacagguucacauu

SEQ ID NO: 1749726 - RNA, 19 nt, Homo sapiens
  misc_RNA (1)...(19): siRNA sense strand
gagaugagaaauaagcuaa

SEQ ID NO: 1749727 - RNA, 19 nt, Homo sapiens
  misc_RNA (1)...(19): siRNA sense strand
gagaagaucgaagacauuu

SEQ ID NO: 1749728 - RNA, 19 nt, Homo sapiens
  misc_RNA (1)...(19): siRNA sense strand
gaagagcaaagcccugaaa

SEQ ID NO: 1749729 - RNA, 19 nt, Homo sapiens
  misc_RNA (1)...(19): siRNA sense strand
ugaagaaggccuccaaaga

SEQ ID NO: 1749730 - RNA, 19 nt, Homo sapiens
  misc_RNA (1)...(19): siRNA sense strand
gagcaaagcccugaaaguc

SEQ ID NO: 1749731 - RNA, 19 nt, Homo sapiens
  misc_RNA (1)...(19): siRNA sense strand
guauuucuccuacuucuuu

SEQ ID NO: 1749732 - RNA, 19 nt, Homo sapiens
  misc_RNA (1)...(19): siRNA sense strand
gcauaugaaggaaacauuu

SEQ ID NO: 1749733 - RNA, 19 nt, Homo sapiens
  misc_RNA (1)...(19): siRNA sense strand
aaagaucucuggacaaagg

SEQ ID NO: 1749734 - RNA, 19 nt, Homo sapiens
  misc_RNA (1)...(19): siRNA sense strand
ugaagaaacucagaagauc

SEQ ID NO: 1749735 - RNA, 19 nt, Homo sapiens
  misc_RNA (1)...(19): siRNA sense strand
ucaaaugcccuggaagaua

SEQ ID NO: 1749736 - RNA, 19 nt, Homo sapiens
  misc_RNA (1)...(19): siRNA sense strand
agaauccucucuccuuauu

SEQ ID NO: 1749737 - RNA, 19 nt, Homo sapiens
  misc_RNA (1)...(19): siRNA sense strand
agaauugaaugacgcauau

SEQ ID NO: 1749738 - RNA, 19 nt, Homo sapiens
  misc_RNA (1)...(19): siRNA sense strand
ggaggaauggguuaucuga

SEQ ID NO: 1749739 - RNA, 19 nt, Homo sapiens
  misc_RNA (1)...(19): siRNA sense strand
ucacauggaccuuggauug

SEQ ID NO: 1749740 - RNA, 19 nt, Homo sapiens
  misc_RNA (1)...(19): siRNA sense strand
gguaugagacuccuccaaa

SEQ ID NO: 1749741 - RNA, 19 nt, Homo sapiens
  misc_RNA (1)...(19): siRNA sense strand
ccaaagaagauguagcaaa

SEQ ID NO: 1749742 - RNA, 19 nt, Homo sapiens
  misc_RNA (1)...(19): siRNA sense strand
gcacccaggcugcagcaua

SEQ ID NO: 1749743 - RNA, 19 nt, Homo sapiens
  misc_RNA (1)...(19): siRNA sense strand
gaaaauaccagccuugaug

SEQ ID NO: 1749744 - RNA, 19 nt, Homo sapiens
  misc_RNA (1)...(19): siRNA sense strand
gacaaaggcucaggaagag

SEQ ID NO: 1749745 - RNA, 19 nt, Homo sapiens
  misc_RNA (1)...(19): siRNA sense strand
gcagcauccucacuguaaa

SEQ ID NO: 1749746 - RNA, 19 nt, Homo sapiens
  misc_RNA (1)...(19): siRNA sense strand
gaaacaccucuccuuggua

SEQ ID NO: 1749747 - RNA, 19 nt, Homo sapiens
  misc_RNA (1)...(19): siRNA sense strand
caggaacuauucauugguu

SEQ ID NO: 1749748 - RNA, 19 nt, Homo sapiens
  misc_RNA (1)...(19): siRNA sense strand
cagagggaauuuggacaua

SEQ ID NO: 1749749 - RNA, 19 nt, Homo sapiens
  misc_RNA (1)...(19): siRNA sense strand
acagaaagcauaugaagga

SEQ ID NO: 1749750 - RNA, 19 nt, Homo sapiens
  misc_RNA (1)...(19): siRNA sense strand
aaggacagguucacauuug

SEQ ID NO: 1749751 - RNA, 19 nt, Homo sapiens
  misc_RNA (1)...(19): siRNA sense strand
ugaaacaccucuccuuggu

SEQ ID NO: 1749752 - RNA, 19 nt, Homo sapiens
  misc_RNA (1)...(19): siRNA sense strand
cagagaagaucgaagacau

SEQ ID NO: 1749753 - RNA, 19 nt, Homo sapiens
  misc_RNA (1)...(19): siRNA sense strand
gaagagaugagaaauaagc

SEQ ID NO: 1749754 - RNA, 19 nt, Homo sapiens
  misc_RNA (1)...(19): siRNA sense strand
gcucaaaugcccuggaaga

SEQ ID NO: 1749755 - RNA, 19 nt, Homo sapiens
  misc_RNA (1)...(19): siRNA sense strand
gaacauuugguaauagcuu

SEQ ID NO: 1749756 - RNA, 19 nt, Homo sapiens
  misc_RNA (1)...(19): siRNA sense strand
cagaagaaaucgucagcau

SEQ ID NO: 1749757 - RNA, 19 nt, Homo sapiens
  misc_RNA (1)...(19): siRNA sense strand
caauuauccugagcaguuu

SEQ ID NO: 1749758 - RNA, 19 nt, Homo sapiens
  misc_RNA (1)...(19): siRNA sense strand
cuacaaagaaaccaugaaa

SEQ ID NO: 1749759 - RNA, 19 nt, Homo sapiens
  misc_RNA (1)...(19): siRNA sense strand
cauccucacuguaaauuag

SEQ ID NO: 1749760 - RNA, 19 nt, Homo sapiens
  misc_RNA (1)...(19): siRNA sense strand
gagagaauucuguucauca

SEQ ID NO: 1749761 - RNA, 19 nt, Homo sapiens
  misc_RNA (1)...(19): siRNA sense strand
acaguuaugugcagcuuug

SEQ ID NO: 1749762 - RNA, 19 nt, Homo sapiens
  misc_RNA (1)...(19): siRNA sense strand
ccagugaaguuugugaaga

SEQ ID NO: 1749763 - RNA, 19 nt, Homo sapiens
  misc_RNA (1)...(19): siRNA sense strand
ugacaucuccagugaaguu

SEQ ID NO: 1749764 - RNA, 19 nt, Homo sapiens
  misc_RNA (1)...(19): siRNA sense strand
caggaagagaugagaaaua

SEQ ID NO: 1749765 - RNA, 19 nt, Homo sapiens
  misc_RNA (1)...(19): siRNA sense strand
aaacuugggcauaaugaaa

SEQ ID NO: 1749766 - RNA, 19 nt, Homo sapiens
  misc_RNA (1)...(19): siRNA sense strand
uaacgacacuucgcaugug

SEQ ID NO: 1749767 - RNA, 19 nt, Homo sapiens
  misc_RNA (1)...(19): siRNA sense strand
uaacaacuguauucaaagc

SEQ ID NO: 1749768 - RNA, 19 nt, Homo sapiens
  misc_RNA (1)...(19): siRNA sense strand
cuguuuaucuugugccaua

SEQ ID NO: 1749769 - RNA, 19 nt, Homo sapiens
  misc_RNA (1)...(19): siRNA sense strand
ggaagaguuuuggaaauuu

SEQ ID NO: 1749770 - RNA, 19 nt, Homo sapiens
  misc_RNA (1)...(19): siRNA sense strand
cauccaaugugcaagauag

SEQ ID NO: 1749771 - RNA, 19 nt, Homo sapiens
  misc_RNA (1)...(19): siRNA sense strand
gaugagaaauaagcuaaac

SEQ ID NO: 1749772 - RNA, 19 nt, Homo sapiens
  misc_RNA (1)...(19): siRNA sense strand
gaaacuugggcauaaugaa

SEQ ID NO: 1749773 - RNA, 19 nt, Homo sapiens
  misc_RNA (1)...(19): siRNA sense strand
ccaaaacaccaccuauuua

SEQ ID NO: 1749774 - RNA, 19 nt, Homo sapiens
  misc_RNA (1)...(19): siRNA sense strand
auaaagcucuuaggauuca

SEQ ID NO: 1749775 - RNA, 19 nt, Homo sapiens
  misc_RNA (1)...(19): siRNA sense strand
cugaagacccugaaacuug

SEQ ID NO: 1749776 - RNA, 19 nt, Homo sapiens
  misc_RNA (1)...(19): siRNA sense strand
gacaaacauuacccaggaa

SEQ ID NO: 1749777 - RNA, 19 nt, Homo sapiens
  misc_RNA (1)...(19): siRNA sense strand
cauauuuacuucuguguac

SEQ ID NO: 1749778 - RNA, 19 nt, Homo sapiens
  misc_RNA (1)...(19): siRNA sense strand
gaccuaaagcaggaaauaa

SEQ ID NO: 1749779 - RNA, 19 nt, Homo sapiens
  misc_RNA (1)...(19): siRNA sense strand
gugaacagagcccgacuaa

SEQ ID NO: 1749780 - RNA, 19 nt, Homo sapiens
  misc_RNA (1)...(19): siRNA sense strand
gacgaggaauacaagauca

SEQ ID NO: 1749781 - RNA, 19 nt, Homo sapiens
  misc_RNA (1)...(19): siRNA sense strand
guaugagacuccuccaaag

SEQ ID NO: 1749782 - RNA, 19 nt, Homo sapiens
  misc_RNA (1)...(19): siRNA sense strand
gugaugaauuucuuugaag

SEQ ID NO: 1749783 - RNA, 19 nt, Homo sapiens
  misc_RNA (1)...(19): siRNA sense strand
caucugaccauuucacaug

SEQ ID NO: 1749784 - RNA, 19 nt, Homo sapiens
  misc_RNA (1)...(19): siRNA sense strand
ccugaugucuguggaagaa

SEQ ID NO: 1749785 - RNA, 19 nt, Homo sapiens
  misc_RNA (1)...(19): siRNA sense strand
agaagauccugaugucugu

SEQ ID NO: 1749786 - RNA, 19 nt, Homo sapiens
  misc_RNA (1)...(19): siRNA sense strand
gaaacugaagacccugaaa

SEQ ID NO: 1749787 - RNA, 19 nt, Homo sapiens
  misc_RNA (1)...(19): siRNA sense strand
aagaaggccuccaaagaag

SEQ ID NO: 1749788 - RNA, 19 nt, Homo sapiens
  misc_RNA (1)...(19): siRNA sense strand
ggaaauccauguccgugua

SEQ ID NO: 1749789 - RNA, 19 nt, Homo sapiens
  misc_RNA (1)...(19): siRNA sense strand
ccaacgagcucccgaguga

SEQ ID NO: 1749790 - RNA, 19 nt, Homo sapiens
  misc_RNA (1)...(19): siRNA sense strand
gcagcaaguuugugcagua

SEQ ID NO: 1749791 - RNA, 19 nt, Homo sapiens
  misc_RNA (1)...(19): siRNA sense strand
gcagcaagauguuugugaa

SEQ ID NO: 1749792 - RNA, 19 nt, Homo sapiens
  misc_RNA (1)...(19): siRNA sense strand
gaugcgggcuccugccuuu

SEQ ID NO: 1749793 - RNA, 19 nt, Homo sapiens
  misc_RNA (1)...(19): siRNA sense strand
gagcagauccuggcaaaga

SEQ ID NO: 1749794 - RNA, 19 nt, Homo sapiens
  misc_RNA (1)...(19): siRNA sense strand
ugacuugccugguggagaa

SEQ ID NO: 1749795 - RNA, 19 nt, Homo sapiens
  misc_RNA (1)...(19): siRNA sense strand
ccaaggguguguaugagaa

SEQ ID NO: 1749796 - RNA, 19 nt, Homo sapiens
  misc_RNA (1)...(19): siRNA sense strand
gaccucacaucaacuucua

SEQ ID NO: 1749797 - RNA, 19 nt, Homo sapiens
  misc_RNA (1)...(19): siRNA sense strand
gggagcagauccuggcaaa

SEQ ID NO: 1749798 - RNA, 19 nt, Homo sapiens
  misc_RNA (1)...(19): siRNA sense strand
gcaaguuugugcaguacga

SEQ ID NO: 1749799 - RNA, 19 nt, Homo sapiens
  misc_RNA (1)...(19): siRNA sense strand
gcaagggcgugcagaggau

SEQ ID NO: 1749800 - RNA, 19 nt, Homo sapiens
  misc_RNA (1)...(19): siRNA sense strand
ggacgacugcagcaaguuu

SEQ ID NO: 1749801 - RNA, 19 nt, Homo sapiens
  misc_RNA (1)...(19): siRNA sense strand
guaacacggucaucaagca

SEQ ID NO: 1749802 - RNA, 19 nt, Homo sapiens
  misc_RNA (1)...(19): siRNA sense strand
gggugaaccuggugacaga

SEQ ID NO: 1749803 - RNA, 19 nt, Homo sapiens
  misc_RNA (1)...(19): siRNA sense strand
uuaacgagaucacugcuau

SEQ ID NO: 1749804 - RNA, 19 nt, Homo sapiens
  misc_RNA (1)...(19): siRNA sense strand
acacggagcugggcaagau

SEQ ID NO: 1749805 - RNA, 19 nt, Homo sapiens
  misc_RNA (1)...(19): siRNA sense strand
cgagaucacugcuaugacu

SEQ ID NO: 1749806 - RNA, 19 nt, Homo sapiens
  misc_RNA (1)...(19): siRNA sense strand
ucgaggcccugaaggagua

SEQ ID NO: 1749807 - RNA, 19 nt, Homo sapiens
  misc_RNA (1)...(19): siRNA sense strand
acagcaacaugaagcaauu

SEQ ID NO: 1749808 - RNA, 19 nt, Homo sapiens
  misc_RNA (1)...(19): siRNA sense strand
gagaaccugcaguccuuua

SEQ ID NO: 1749809 - RNA, 19 nt, Homo sapiens
  misc_RNA (1)...(19): siRNA sense strand
ccgcaggcuuggcaucuuu

SEQ ID NO: 1749810 - RNA, 19 nt, Homo sapiens
  misc_RNA (1)...(19): siRNA sense strand
ccuggugguuuguguauga

SEQ ID NO: 1749811 - RNA, 19 nt, Homo sapiens
  misc_RNA (1)...(19): siRNA sense strand
gaagugcuccgaagacaac

SEQ ID NO: 1749812 - RNA, 19 nt, Homo sapiens
  misc_RNA (1)...(19): siRNA sense strand
uggagaaccugcaguccuu

SEQ ID NO: 1749813 - RNA, 19 nt, Homo sapiens
  misc_RNA (1)...(19): siRNA sense strand
cagagauggugcugucaga

SEQ ID NO: 1749814 - RNA, 19 nt, Homo sapiens
  misc_RNA (1)...(19): siRNA sense strand
agauggugcugucagauga

SEQ ID NO: 1749815 - RNA, 19 nt, Homo sapiens
  misc_RNA (1)...(19): siRNA sense strand
uaccucaucuccuccaaug

SEQ ID NO: 1749816 - RNA, 19 nt, Homo sapiens
  misc_RNA (1)...(19): siRNA sense strand
gagauggugcugucagaug

SEQ ID NO: 1749817 - RNA, 19 nt, Homo sapiens
  misc_RNA (1)...(19): siRNA sense strand
caaggaaggaggacaugga

SEQ ID NO: 1749818 - RNA, 19 nt, Homo sapiens
  misc_RNA (1)...(19): siRNA sense strand
gcaccagcccugaagaaag

SEQ ID NO: 1749819 - RNA, 19 nt, Homo sapiens
  misc_RNA (1)...(19): siRNA sense strand
ccacggcucugggcuucaa

SEQ ID NO: 1749820 - RNA, 19 nt, Homo sapiens
  misc_RNA (1)...(19): siRNA sense strand
ccucaucuccuccaauguu

SEQ ID NO: 1749821 - RNA, 19 nt, Homo sapiens
  misc_RNA (1)...(19): siRNA sense strand
gcguggcgcugucuacuac

SEQ ID NO: 1749822 - RNA, 19 nt, Homo sapiens
  misc_RNA (1)...(19): siRNA sense strand
ggaguucacccuggaguuc

SEQ ID NO: 1749823 - RNA, 19 nt, Homo sapiens
  misc_RNA (1)...(19): siRNA sense strand
agacggaccugaccuucgu

SEQ ID NO: 1749824 - RNA, 19 nt, Homo sapiens
  misc_RNA (1)...(19): siRNA sense strand
ccgagaagcccucaucagu

SEQ ID NO: 1749825 - RNA, 19 nt, Homo sapiens
  misc_RNA (1)...(19): siRNA sense strand
gcgcaagcuggacgaguuu

SEQ ID NO: 1749826 - RNA, 19 nt, Homo sapiens
  misc_RNA (1)...(19): siRNA sense strand
caccagcccugaagaaagc

SEQ ID NO: 1749827 - RNA, 19 nt, Homo sapiens
  misc_RNA (1)...(19): siRNA sense strand
ggccagggcagcaagaugu

SEQ ID NO: 1749828 - RNA, 19 nt, Homo sapiens
  misc_RNA (1)...(19): siRNA sense strand
ggaguaugagccugagaug

SEQ ID NO: 1749829 - RNA, 19 nt, Homo sapiens
  misc_RNA (1)...(19): siRNA sense strand
gcucaccaccaaucagaug

SEQ ID NO: 1749830 - RNA, 19 nt, Homo sapiens
  misc_RNA (1)...(19): siRNA sense strand
ugaaccaggacaagaagaa

SEQ ID NO: 1749831 - RNA, 19 nt, Homo sapiens
  misc_RNA (1)...(19): siRNA sense strand
gggcugcaccucagucauc

SEQ ID NO: 1749832 - RNA, 19 nt, Homo sapiens
  misc_RNA (1)...(19): siRNA sense strand
ggugguggugcuccagaua

SEQ ID NO: 1749833 - RNA, 19 nt, Homo sapiens
  misc_RNA (1)...(19): siRNA sense strand
caucgacugugagguguuc

SEQ ID NO: 1749834 - RNA, 19 nt, Homo sapiens
  misc_RNA (1)...(19): siRNA sense strand
gcaucuuccucacggcaau

SEQ ID NO: 1749835 - RNA, 19 nt, Homo sapiens
  misc_RNA (1)...(19): siRNA sense strand
uggcugcccuugucuccuu

SEQ ID NO: 1749836 - RNA, 19 nt, Homo sapiens
  misc_RNA (1)...(19): siRNA sense strand
caucucggguaccacguau

SEQ ID NO: 1749837 - RNA, 19 nt, Homo sapiens
  misc_RNA (1)...(19): siRNA sense strand
gcacgcucaccaccaauca

SEQ ID NO: 1749838 - RNA, 19 nt, Homo sapiens
  misc_RNA (1)...(19): siRNA sense strand
gcugucuacuacuucaaga

SEQ ID NO: 1749839 - RNA, 19 nt, Homo sapiens
  misc_RNA (1)...(19): siRNA sense strand
caauaucacaucgggcaaa

SEQ ID NO: 1749840 - RNA, 19 nt, Homo sapiens
  misc_RNA (1)...(19): siRNA sense strand
gcaguccuuuaacgagauc

SEQ ID NO: 1749841 - RNA, 19 nt, Homo sapiens
  misc_RNA (1)...(19): siRNA sense strand
gcgcauggcacgcaagaac

SEQ ID NO: 1749842 - RNA, 19 nt, Homo sapiens
  misc_RNA (1)...(19): siRNA sense strand
ucuaccagcugaggaacuu

SEQ ID NO: 1749843 - RNA, 19 nt, Homo sapiens
  misc_RNA (1)...(19): siRNA sense strand
ggagaaccugcaguccuuu

SEQ ID NO: 1749844 - RNA, 19 nt, Homo sapiens
  misc_RNA (1)...(19): siRNA sense strand
ggaccucacaucaacuucu

SEQ ID NO: 1749845 - RNA, 19 nt, Homo sapiens
  misc_RNA (1)...(19): siRNA sense strand
gaaccugcaguccuuuaac

SEQ ID NO: 1749846 - RNA, 19 nt, Homo sapiens
  misc_RNA (1)...(19): siRNA sense strand
caucaacaucggccacuuc

SEQ ID NO: 1749847 - RNA, 19 nt, Homo sapiens
  misc_RNA (1)...(19): siRNA sense strand
agauaucucugccugucau

SEQ ID NO: 1749848 - RNA, 19 nt, Homo sapiens
  misc_RNA (1)...(19): siRNA sense strand
ccaccaccauggccuuguc

SEQ ID NO: 1749849 - RNA, 19 nt, Homo sapiens
  misc_RNA (1)...(19): siRNA sense strand
cgaggucgucugcaucuuc

SEQ ID NO: 1749850 - RNA, 19 nt, Homo sapiens
  misc_RNA (1)...(19): siRNA sense strand
ggaacgcaacgccgagagu

SEQ ID NO: 1749851 - RNA, 19 nt, Homo sapiens
  misc_RNA (1)...(19): siRNA sense strand
gggagcuggugcuggaaca

SEQ ID NO: 1749852 - RNA, 19 nt, Homo sapiens
  misc_RNA (1)...(19): siRNA sense strand
ggcagcaagauguuuguga

SEQ ID NO: 1749853 - RNA, 19 nt, Homo sapiens
  misc_RNA (1)...(19): siRNA sense strand
gaaauccauguccguguac

SEQ ID NO: 1749854 - RNA, 19 nt, Homo sapiens
  misc_RNA (1)...(19): siRNA sense strand
ggccaaggguguguaugag

SEQ ID NO: 1749855 - RNA, 19 nt, Homo sapiens
  misc_RNA (1)...(19): siRNA sense strand
cggcugucaucacuacaug

SEQ ID NO: 1749856 - RNA, 19 nt, Homo sapiens
  misc_RNA (1)...(19): siRNA sense strand
gccaaggguguguaugaga

SEQ ID NO: 1749857 - RNA, 19 nt, Homo sapiens
  misc_RNA (1)...(19): siRNA sense strand
gcuggcucuucuuccgaua

SEQ ID NO: 1749858 - RNA, 19 nt, Homo sapiens
  misc_RNA (1)...(19): siRNA sense strand
gagcugugaaccaggacaa

SEQ ID NO: 1749859 - RNA, 19 nt, Homo sapiens
  misc_RNA (1)...(19): siRNA sense strand
cagcaaguuugugcaguac

SEQ ID NO: 1749860 - RNA, 19 nt, Homo sapiens
  misc_RNA (1)...(19): siRNA sense strand
agcgcaagcuggacgaguu

SEQ ID NO: 1749861 - RNA, 19 nt, Homo sapiens
  misc_RNA (1)...(19): siRNA sense strand
caagauccggagccagaug

SEQ ID NO: 1749862 - RNA, 19 nt, Homo sapiens
  misc_RNA (1)...(19): siRNA sense strand
gcugugaaccaggacaaga

SEQ ID NO: 1749863 - RNA, 19 nt, Homo sapiens
  misc_RNA (1)...(19): siRNA sense strand
guggcgcugucuacuacuu

SEQ ID NO: 1749864 - RNA, 19 nt, Homo sapiens
  misc_RNA (1)...(19): siRNA sense strand
ccaucgaggcccugaagga

SEQ ID NO: 1749865 - RNA, 19 nt, Homo sapiens
  misc_RNA (1)...(19): siRNA sense strand
cgagcuggcgccuguaaca

SEQ ID NO: 1749866 - RNA, 19 nt, Homo sapiens
  misc_RNA (1)...(19): siRNA sense strand
cggagacagcucugacuug

SEQ ID NO: 1749867 - RNA, 19 nt, Homo sapiens
  misc_RNA (1)...(19): siRNA sense strand
ggaaauccauguccgugua

SEQ ID NO: 1749868 - RNA, 19 nt, Homo sapiens
  misc_RNA (1)...(19): siRNA sense strand
ccaacgagcucccgaguga

SEQ ID NO: 1749869 - RNA, 19 nt, Homo sapiens
  misc_RNA (1)...(19): siRNA sense strand
gcagcaaguuugugcagua

SEQ ID NO: 1749870 - RNA, 19 nt, Homo sapiens
  misc_RNA (1)...(19): siRNA sense strand
gcagcaagauguuugugaa

SEQ ID NO: 1749871 - RNA, 19 nt, Homo sapiens
  misc_RNA (1)...(19): siRNA sense strand
gaugcgggcuccugccuuu

SEQ ID NO: 1749872 - RNA, 19 nt, Homo sapiens
  misc_RNA (1)...(19): siRNA sense strand
gagcagauccuggcaaaga

SEQ ID NO: 1749873 - RNA, 19 nt, Homo sapiens
  misc_RNA (1)...(19): siRNA sense strand
ugacuugccugguggagaa

SEQ ID NO: 1749874 - RNA, 19 nt, Homo sapiens
  misc_RNA (1)...(19): siRNA sense strand
ccaaggguguguaugagaa

SEQ ID NO: 1749875 - RNA, 19 nt, Homo sapiens
  misc_RNA (1)...(19): siRNA sense strand
gaccucacaucaacuucua

SEQ ID NO: 1749876 - RNA, 19 nt, Homo sapiens
  misc_RNA (1)...(19): siRNA sense strand
gggagcagauccuggcaaa

SEQ ID NO: 1749877 - RNA, 19 nt, Homo sapiens
  misc_RNA (1)...(19): siRNA sense strand
gcaaguuugugcaguacga

SEQ ID NO: 1749878 - RNA, 19 nt, Homo sapiens
  misc_RNA (1)...(19): siRNA sense strand
gcaagggcgugcagaggau

SEQ ID NO: 1749879 - RNA, 19 nt, Homo sapiens
  misc_RNA (1)...(19): siRNA sense strand
ggacgacugcagcaaguuu

SEQ ID NO: 1749880 - RNA, 19 nt, Homo sapiens
  misc_RNA (1)...(19): siRNA sense strand
guaacacggucaucaagca

SEQ ID NO: 1749881 - RNA, 19 nt, Homo sapiens
  misc_RNA (1)...(19): siRNA sense strand
gggugaaccuggugacaga

SEQ ID NO: 1749882 - RNA, 19 nt, Homo sapiens
  misc_RNA (1)...(19): siRNA sense strand
uuaacgagaucacugcuau

SEQ ID NO: 1749883 - RNA, 19 nt, Homo sapiens
  misc_RNA (1)...(19): siRNA sense strand
acacggagcugggcaagau

SEQ ID NO: 1749884 - RNA, 19 nt, Homo sapiens
  misc_RNA (1)...(19): siRNA sense strand
cgagaucacugcuaugacu

SEQ ID NO: 1749885 - RNA, 19 nt, Homo sapiens
  misc_RNA (1)...(19): siRNA sense strand
ucgaggcccugaaggagua

SEQ ID NO: 1749886 - RNA, 19 nt, Homo sapiens
  misc_RNA (1)...(19): siRNA sense strand
acagcaacaugaagcaauu

SEQ ID NO: 1749887 - RNA, 19 nt, Homo sapiens
  misc_RNA (1)...(19): siRNA sense strand
gagaaccugcaguccuuua

SEQ ID NO: 1749888 - RNA, 19 nt, Homo sapiens
  misc_RNA (1)...(19): siRNA sense strand
ccgcaggcuuggcaucuuu

SEQ ID NO: 1749889 - RNA, 19 nt, Homo sapiens
  misc_RNA (1)...(19): siRNA sense strand
ccuggugguuuguguauga

SEQ ID NO: 1749890 - RNA, 19 nt, Homo sapiens
  misc_RNA (1)...(19): siRNA sense strand
gaagugcuccgaagacaac

SEQ ID NO: 1749891 - RNA, 19 nt, Homo sapiens
  misc_RNA (1)...(19): siRNA sense strand
uggagaaccugcaguccuu

SEQ ID NO: 1749892 - RNA, 19 nt, Homo sapiens
  misc_RNA (1)...(19): siRNA sense strand
cagagauggugcugucaga

SEQ ID NO: 1749893 - RNA, 19 nt, Homo sapiens
  misc_RNA (1)...(19): siRNA sense strand
agauggugcugucagauga

SEQ ID NO: 1749894 - RNA, 19 nt, Homo sapiens
  misc_RNA (1)...(19): siRNA sense strand
uaccucaucuccuccaaug

SEQ ID NO: 1749895 - RNA, 19 nt, Homo sapiens
  misc_RNA (1)...(19): siRNA sense strand
gagauggugcugucagaug

SEQ ID NO: 1749896 - RNA, 19 nt, Homo sapiens
  misc_RNA (1)...(19): siRNA sense strand
caaggaaggaggacaugga

SEQ ID NO: 1749897 - RNA, 19 nt, Homo sapiens
  misc_RNA (1)...(19): siRNA sense strand
gcaccagcccugaagaaag

SEQ ID NO: 1749898 - RNA, 19 nt, Homo sapiens
  misc_RNA (1)...(19): siRNA sense strand
ccacggcucugggcuucaa

SEQ ID NO: 1749899 - RNA, 19 nt, Homo sapiens
  misc_RNA (1)...(19): siRNA sense strand
ccucaucuccuccaauguu

SEQ ID NO: 1749900 - RNA, 19 nt, Homo sapiens
  misc_RNA (1)...(19): siRNA sense strand
gcguggcgcugucuacuac

SEQ ID NO: 1749901 - RNA, 19 nt, Homo sapiens
  misc_RNA (1)...(19): siRNA sense strand
ggaguucacccuggaguuc

SEQ ID NO: 1749902 - RNA, 19 nt, Homo sapiens
  misc_RNA (1)...(19): siRNA sense strand
agacggaccugaccuucgu

SEQ ID NO: 1749903 - RNA, 19 nt, Homo sapiens
  misc_RNA (1)...(19): siRNA sense strand
ccgagaagcccucaucagu

SEQ ID NO: 1749904 - RNA, 19 nt, Homo sapiens
  misc_RNA (1)...(19): siRNA sense strand
gcgcaagcuggacgaguuu

SEQ ID NO: 1749905 - RNA, 19 nt, Homo sapiens
  misc_RNA (1)...(19): siRNA sense strand
caccagcccugaagaaagc

SEQ ID NO: 1749906 - RNA, 19 nt, Homo sapiens
  misc_RNA (1)...(19): siRNA sense strand
ggccagggcagcaagaugu

SEQ ID NO: 1749907 - RNA, 19 nt, Homo sapiens
  misc_RNA (1)...(19): siRNA sense strand
ggaguaugagccugagaug

SEQ ID NO: 1749908 - RNA, 19 nt, Homo sapiens
  misc_RNA (1)...(19): siRNA sense strand
gcucaccaccaaucagaug

SEQ ID NO: 1749909 - RNA, 19 nt, Homo sapiens
  misc_RNA (1)...(19): siRNA sense strand
ugaaccaggacaagaagaa

SEQ ID NO: 1749910 - RNA, 19 nt, Homo sapiens
  misc_RNA (1)...(19): siRNA sense strand
gggcugcaccucagucauc

SEQ ID NO: 1749911 - RNA, 19 nt, Homo sapiens
  misc_RNA (1)...(19): siRNA sense strand
ggugguggugcuccagaua

SEQ ID NO: 1749912 - RNA, 19 nt, Homo sapiens
  misc_RNA (1)...(19): siRNA sense strand
caucgacugugagguguuc

SEQ ID NO: 1749913 - RNA, 19 nt, Homo sapiens
  misc_RNA (1)...(19): siRNA sense strand
gcaucuuccucacggcaau

SEQ ID NO: 1749914 - RNA, 19 nt, Homo sapiens
  misc_RNA (1)...(19): siRNA sense strand
uggcugcccuugucuccuu

SEQ ID NO: 1749915 - RNA, 19 nt, Homo sapiens
  misc_RNA (1)...(19): siRNA sense strand
caucucggguaccacguau

SEQ ID NO: 1749916 - RNA, 19 nt, Homo sapiens
  misc_RNA (1)...(19): siRNA sense strand
gcacgcucaccaccaauca

SEQ ID NO: 1749917 - RNA, 19 nt, Homo sapiens
  misc_RNA (1)...(19): siRNA sense strand
gcugucuacuacuucaaga

SEQ ID NO: 1749918 - RNA, 19 nt, Homo sapiens
  misc_RNA (1)...(19): siRNA sense strand
caauaucacaucgggcaaa

SEQ ID NO: 1749919 - RNA, 19 nt, Homo sapiens
  misc_RNA (1)...(19): siRNA sense strand
gcaguccuuuaacgagauc

SEQ ID NO: 1749920 - RNA, 19 nt, Homo sapiens
  misc_RNA (1)...(19): siRNA sense strand
gcgcauggcacgcaagaac

SEQ ID NO: 1749921 - RNA, 19 nt, Homo sapiens
  misc_RNA (1)...(19): siRNA sense strand
ucuaccagcugaggaacuu

SEQ ID NO: 1749922 - RNA, 19 nt, Homo sapiens
  misc_RNA (1)...(19): siRNA sense strand
ggagaaccugcaguccuuu

SEQ ID NO: 1749923 - RNA, 19 nt, Homo sapiens
  misc_RNA (1)...(19): siRNA sense strand
ggaccucacaucaacuucu

SEQ ID NO: 1749924 - RNA, 19 nt, Homo sapiens
  misc_RNA (1)...(19): siRNA sense strand
gaaccugcaguccuuuaac

SEQ ID NO: 1749925 - RNA, 19 nt, Homo sapiens
  misc_RNA (1)...(19): siRNA sense strand
caucaacaucggccacuuc

SEQ ID NO: 1749926 - RNA, 19 nt, Homo sapiens
  misc_RNA (1)...(19): siRNA sense strand
agauaucucugccugucau

SEQ ID NO: 1749927 - RNA, 19 nt, Homo sapiens
  misc_RNA (1)...(19): siRNA sense strand
ccaccaccauggccuuguc

SEQ ID NO: 1749928 - RNA, 19 nt, Homo sapiens
  misc_RNA (1)...(19): siRNA sense strand
cgaggucgucugcaucuuc

SEQ ID NO: 1749929 - RNA, 19 nt, Homo sapiens
  misc_RNA (1)...(19): siRNA sense strand
ggaacgcaacgccgagagu

SEQ ID NO: 1749930 - RNA, 19 nt, Homo sapiens
  misc_RNA (1)...(19): siRNA sense strand
gggagcuggugcuggaaca

SEQ ID NO: 1749931 - RNA, 19 nt, Homo sapiens
  misc_RNA (1)...(19): siRNA sense strand
ggcagcaagauguuuguga

SEQ ID NO: 1749932 - RNA, 19 nt, Homo sapiens
  misc_RNA (1)...(19): siRNA sense strand
gaaauccauguccguguac

SEQ ID NO: 1749933 - RNA, 19 nt, Homo sapiens
  misc_RNA (1)...(19): siRNA sense strand
ggccaaggguguguaugag

SEQ ID NO: 1749934 - RNA, 19 nt, Homo sapiens
  misc_RNA (1)...(19): siRNA sense strand
cggcugucaucacuacaug

SEQ ID NO: 1749935 - RNA, 19 nt, Homo sapiens
  misc_RNA (1)...(19): siRNA sense strand
gccaaggguguguaugaga

SEQ ID NO: 1749936 - RNA, 19 nt, Homo sapiens
  misc_RNA (1)...(19): siRNA sense strand
gcuggcucuucuuccgaua

SEQ ID NO: 1749937 - RNA, 19 nt, Homo sapiens
  misc_RNA (1)...(19): siRNA sense strand
gagcugugaaccaggacaa

SEQ ID NO: 1749938 - RNA, 19 nt, Homo sapiens
  misc_RNA (1)...(19): siRNA sense strand
cagcaaguuugugcaguac

SEQ ID NO: 1749939 - RNA, 19 nt, Homo sapiens
  misc_RNA (1)...(19): siRNA sense strand
agcgcaagcuggacgaguu

SEQ ID NO: 1749940 - RNA, 19 nt, Homo sapiens
  misc_RNA (1)...(19): siRNA sense strand
caagauccggagccagaug

SEQ ID NO: 1749941 - RNA, 19 nt, Homo sapiens
  misc_RNA (1)...(19): siRNA sense strand
gcugugaaccaggacaaga

SEQ ID NO: 1749942 - RNA, 19 nt, Homo sapiens
  misc_RNA (1)...(19): siRNA sense strand
guggcgcugucuacuacuu

SEQ ID NO: 1749943 - RNA, 19 nt, Homo sapiens
  misc_RNA (1)...(19): siRNA sense strand
ccaucgaggcccugaagga

SEQ ID NO: 1749944 - RNA, 19 nt, Homo sapiens
  misc_RNA (1)...(19): siRNA sense strand
cgagcuggcgccuguaaca

SEQ ID NO: 1749945 - RNA, 19 nt, Homo sapiens
  misc_RNA (1)...(19): siRNA sense strand
cggagacagcucugacuug

SEQ ID NO: 1749946 - RNA, 19 nt, Homo sapiens
  misc_RNA (1)...(19): siRNA sense strand
ggaaauccauguccgugua

SEQ ID NO: 1749947 - RNA, 19 nt, Homo sapiens
  misc_RNA (1)...(19): siRNA sense strand
ccaacgagcucccgaguga

SEQ ID NO: 1749948 - RNA, 19 nt, Homo sapiens
  misc_RNA (1)...(19): siRNA sense strand
gcagcaaguuugugcagua

SEQ ID NO: 1749949 - RNA, 19 nt, Homo sapiens
  misc_RNA (1)...(19): siRNA sense strand
gcagcaagauguuugugaa

SEQ ID NO: 1749950 - RNA, 19 nt, Homo sapiens
  misc_RNA (1)...(19): siRNA sense strand
gaugcgggcuccugccuuu

SEQ ID NO: 1749951 - RNA, 19 nt, Homo sapiens
  misc_RNA (1)...(19): siRNA sense strand
gagcagauccuggcaaaga

SEQ ID NO: 1749952 - RNA, 19 nt, Homo sapiens
  misc_RNA (1)...(19): siRNA sense strand
ugacuugccugguggagaa

SEQ ID NO: 1749953 - RNA, 19 nt, Homo sapiens
  misc_RNA (1)...(19): siRNA sense strand
ccaaggguguguaugagaa

SEQ ID NO: 1749954 - RNA, 19 nt, Homo sapiens
  misc_RNA (1)...(19): siRNA sense strand
gaccucacaucaacuucua

SEQ ID NO: 1749955 - RNA, 19 nt, Homo sapiens
  misc_RNA (1)...(19): siRNA sense strand
gggagcagauccuggcaaa

SEQ ID NO: 1749956 - RNA, 19 nt, Homo sapiens
  misc_RNA (1)...(19): siRNA sense strand
gcaaguuugugcaguacga

SEQ ID NO: 1749957 - RNA, 19 nt, Homo sapiens
  misc_RNA (1)...(19): siRNA sense strand
gcaagggcgugcagaggau

SEQ ID NO: 1749958 - RNA, 19 nt, Homo sapiens
  misc_RNA (1)...(19): siRNA sense strand
ggacgacugcagcaaguuu

SEQ ID NO: 1749959 - RNA, 19 nt, Homo sapiens
  misc_RNA (1)...(19): siRNA sense strand
guaacacggucaucaagca

SEQ ID NO: 1749960 - RNA, 19 nt, Homo sapiens
  misc_RNA (1)...(19): siRNA sense strand
gggugaaccuggugacaga

SEQ ID NO: 1749961 - RNA, 19 nt, Homo sapiens
  misc_RNA (1)...(19): siRNA sense strand
uuaacgagaucacugcuau

SEQ ID NO: 1749962 - RNA, 19 nt, Homo sapiens
  misc_RNA (1)...(19): siRNA sense strand
acacggagcugggcaagau

SEQ ID NO: 1749963 - RNA, 19 nt, Homo sapiens
  misc_RNA (1)...(19): siRNA sense strand
cgagaucacugcuaugacu

SEQ ID NO: 1749964 - RNA, 19 nt, Homo sapiens
  misc_RNA (1)...(19): siRNA sense strand
ucgaggcccugaaggagua

SEQ ID NO: 1749965 - RNA, 19 nt, Homo sapiens
  misc_RNA (1)...(19): siRNA sense strand
acagcaacaugaagcaauu

SEQ ID NO: 1749966 - RNA, 19 nt, Homo sapiens
  misc_RNA (1)...(19): siRNA sense strand
gagaaccugcaguccuuua

SEQ ID NO: 1749967 - RNA, 19 nt, Homo sapiens
  misc_RNA (1)...(19): siRNA sense strand
ccgcaggcuuggcaucuuu

SEQ ID NO: 1749968 - RNA, 19 nt, Homo sapiens
  misc_RNA (1)...(19): siRNA sense strand
ccuggugguuuguguauga

SEQ ID NO: 1749969 - RNA, 19 nt, Homo sapiens
  misc_RNA (1)...(19): siRNA sense strand
gaagugcuccgaagacaac

SEQ ID NO: 1749970 - RNA, 19 nt, Homo sapiens
  misc_RNA (1)...(19): siRNA sense strand
uggagaaccugcaguccuu

SEQ ID NO: 1749971 - RNA, 19 nt, Homo sapiens
  misc_RNA (1)...(19): siRNA sense strand
cagagauggugcugucaga

SEQ ID NO: 1749972 - RNA, 19 nt, Homo sapiens
  misc_RNA (1)...(19): siRNA sense strand
agauggugcugucagauga

SEQ ID NO: 1749973 - RNA, 19 nt, Homo sapiens
  misc_RNA (1)...(19): siRNA sense strand
uaccucaucuccuccaaug

SEQ ID NO: 1749974 - RNA, 19 nt, Homo sapiens
  misc_RNA (1)...(19): siRNA sense strand
gagauggugcugucagaug

SEQ ID NO: 1749975 - RNA, 19 nt, Homo sapiens
  misc_RNA (1)...(19): siRNA sense strand
caaggaaggaggacaugga

SEQ ID NO: 1749976 - RNA, 19 nt, Homo sapiens
  misc_RNA (1)...(19): siRNA sense strand
gcaccagcccugaagaaag

SEQ ID NO: 1749977 - RNA, 19 nt, Homo sapiens
  misc_RNA (1)...(19): siRNA sense strand
ccacggcucugggcuucaa

SEQ ID NO: 1749978 - RNA, 19 nt, Homo sapiens
  misc_RNA (1)...(19): siRNA sense strand
ccucaucuccuccaauguu

SEQ ID NO: 1749979 - RNA, 19 nt, Homo sapiens
  misc_RNA (1)...(19): siRNA sense strand
gcguggcgcugucuacuac

SEQ ID NO: 1749980 - RNA, 19 nt, Homo sapiens
  misc_RNA (1)...(19): siRNA sense strand
ggaguucacccuggaguuc

SEQ ID NO: 1749981 - RNA, 19 nt, Homo sapiens
  misc_RNA (1)...(19): siRNA sense strand
agacggaccugaccuucgu

SEQ ID NO: 1749982 - RNA, 19 nt, Homo sapiens
  misc_RNA (1)...(19): siRNA sense strand
ccgagaagcccucaucagu

SEQ ID NO: 1749983 - RNA, 19 nt, Homo sapiens
  misc_RNA (1)...(19): siRNA sense strand
gcgcaagcuggacgaguuu

SEQ ID NO: 1749984 - RNA, 19 nt, Homo sapiens
  misc_RNA (1)...(19): siRNA sense strand
caccagcccugaagaaagc

SEQ ID NO: 1749985 - RNA, 19 nt, Homo sapiens
  misc_RNA (1)...(19): siRNA sense strand
ggccagggcagcaagaugu

SEQ ID NO: 1749986 - RNA, 19 nt, Homo sapiens
  misc_RNA (1)...(19): siRNA sense strand
ggaguaugagccugagaug

SEQ ID NO: 1749987 - RNA, 19 nt, Homo sapiens
  misc_RNA (1)...(19): siRNA sense strand
gcucaccaccaaucagaug

SEQ ID NO: 1749988 - RNA, 19 nt, Homo sapiens
  misc_RNA (1)...(19): siRNA sense strand
ugaaccaggacaagaagaa

SEQ ID NO: 1749989 - RNA, 19 nt, Homo sapiens
  misc_RNA (1)...(19): siRNA sense strand
gggcugcaccucagucauc

SEQ ID NO: 1749990 - RNA, 19 nt, Homo sapiens
  misc_RNA (1)...(19): siRNA sense strand
ggugguggugcuccagaua

SEQ ID NO: 1749991 - RNA, 19 nt, Homo sapiens
  misc_RNA (1)...(19): siRNA sense strand
caucgacugugagguguuc

SEQ ID NO: 1749992 - RNA, 19 nt, Homo sapiens
  misc_RNA (1)...(19): siRNA sense strand
gcaucuuccucacggcaau

SEQ ID NO: 1749993 - RNA, 19 nt, Homo sapiens
  misc_RNA (1)...(19): siRNA sense strand
uggcugcccuugucuccuu

SEQ ID NO: 1749994 - RNA, 19 nt, Homo sapiens
  misc_RNA (1)...(19): siRNA sense strand
caucucggguaccacguau

SEQ ID NO: 1749995 - RNA, 19 nt, Homo sapiens
  misc_RNA (1)...(19): siRNA sense strand
gcacgcucaccaccaauca

SEQ ID NO: 1749996 - RNA, 19 nt, Homo sapiens
  misc_RNA (1)...(19): siRNA sense strand
gcugucuacuacuucaaga

SEQ ID NO: 1749997 - RNA, 19 nt, Homo sapiens
  misc_RNA (1)...(19): siRNA sense strand
caauaucacaucgggcaaa

SEQ ID NO: 1749998 - RNA, 19 nt, Homo sapiens
  misc_RNA (1)...(19): siRNA sense strand
gcaguccuuuaacgagauc

SEQ ID NO: 1749999 - RNA, 19 nt, Homo sapiens
  misc_RNA (1)...(19): siRNA sense strand
gcgcauggcacgcaagaac

SEQ ID NO: 1750000 - RNA, 19 nt, Homo sapiens
  misc_RNA (1)...(19): siRNA sense strand
ucuaccagcugaggaacuu

SEQ ID NO: 1750001 - RNA, 19 nt, Homo sapiens
  misc_RNA (1)...(19): siRNA sense strand
ggagaaccugcaguccuuu

SEQ ID NO: 1750002 - RNA, 19 nt, Homo sapiens
  misc_RNA (1)...(19): siRNA sense strand
ggaccucacaucaacuucu

SEQ ID NO: 1750003 - RNA, 19 nt, Homo sapiens
  misc_RNA (1)...(19): siRNA sense strand
gaaccugcaguccuuuaac

SEQ ID NO: 1750004 - RNA, 19 nt, Homo sapiens
  misc_RNA (1)...(19): siRNA sense strand
caucaacaucggccacuuc

SEQ ID NO: 1750005 - RNA, 19 nt, Homo sapiens
  misc_RNA (1)...(19): siRNA sense strand
agauaucucugccugucau

SEQ ID NO: 1750006 - RNA, 19 nt, Homo sapiens
  misc_RNA (1)...(19): siRNA sense strand
ccaccaccauggccuuguc

SEQ ID NO: 1750007 - RNA, 19 nt, Homo sapiens
  misc_RNA (1)...(19): siRNA sense strand
cgaggucgucugcaucuuc

SEQ ID NO: 1750008 - RNA, 19 nt, Homo sapiens
  misc_RNA (1)...(19): siRNA sense strand
ggaacgcaacgccgagagu

SEQ ID NO: 1750009 - RNA, 19 nt, Homo sapiens
  misc_RNA (1)...(19): siRNA sense strand
gggagcuggugcuggaaca

SEQ ID NO: 1750010 - RNA, 19 nt, Homo sapiens
  misc_RNA (1)...(19): siRNA sense strand
ggcagcaagauguuuguga

SEQ ID NO: 1750011 - RNA, 19 nt, Homo sapiens
  misc_RNA (1)...(19): siRNA sense strand
gaaauccauguccguguac

SEQ ID NO: 1750012 - RNA, 19 nt, Homo sapiens
  misc_RNA (1)...(19): siRNA sense strand
ggccaaggguguguaugag

SEQ ID NO: 1750013 - RNA, 19 nt, Homo sapiens
  misc_RNA (1)...(19): siRNA sense strand
cggcugucaucacuacaug

SEQ ID NO: 1750014 - RNA, 19 nt, Homo sapiens
  misc_RNA (1)...(19): siRNA sense strand
gccaaggguguguaugaga

SEQ ID NO: 1750015 - RNA, 19 nt, Homo sapiens
  misc_RNA (1)...(19): siRNA sense strand
gcuggcucuucuuccgaua

SEQ ID NO: 1750016 - RNA, 19 nt, Homo sapiens
  misc_RNA (1)...(19): siRNA sense strand
gagcugugaaccaggacaa

SEQ ID NO: 1750017 - RNA, 19 nt, Homo sapiens
  misc_RNA (1)...(19): siRNA sense strand
cagcaaguuugugcaguac

SEQ ID NO: 1750018 - RNA, 19 nt, Homo sapiens
  misc_RNA (1)...(19): siRNA sense strand
agcgcaagcuggacgaguu

SEQ ID NO: 1750019 - RNA, 19 nt, Homo sapiens
  misc_RNA (1)...(19): siRNA sense strand
caagauccggagccagaug

SEQ ID NO: 1750020 - RNA, 19 nt, Homo sapiens
  misc_RNA (1)...(19): siRNA sense strand
gcugugaaccaggacaaga

SEQ ID NO: 1750021 - RNA, 19 nt, Homo sapiens
  misc_RNA (1)...(19): siRNA sense strand
guggcgcugucuacuacuu

SEQ ID NO: 1750022 - RNA, 19 nt, Homo sapiens
  misc_RNA (1)...(19): siRNA sense strand
ccaucgaggcccugaagga

SEQ ID NO: 1750023 - RNA, 19 nt, Homo sapiens
  misc_RNA (1)...(19): siRNA sense strand
cgagcuggcgccuguaaca

SEQ ID NO: 1750024 - RNA, 19 nt, Homo sapiens
  misc_RNA (1)...(19): siRNA sense strand
cggagacagcucugacuug

SEQ ID NO: 1750025 - RNA, 19 nt, Homo sapiens
  misc_RNA (1)...(19): siRNA sense strand
ggaaauccauguccgugua

SEQ ID NO: 1750026 - RNA, 19 nt, Homo sapiens
  misc_RNA (1)...(19): siRNA sense strand
ccaacgagcucccgaguga

SEQ ID NO: 1750027 - RNA, 19 nt, Homo sapiens
  misc_RNA (1)...(19): siRNA sense strand
gcagcaaguuugugcagua

SEQ ID NO: 1750028 - RNA, 19 nt, Homo sapiens
  misc_RNA (1)...(19): siRNA sense strand
gcagcaagauguuugugaa

SEQ ID NO: 1750029 - RNA, 19 nt, Homo sapiens
  misc_RNA (1)...(19): siRNA sense strand
gaugcgggcuccugccuuu

SEQ ID NO: 1750030 - RNA, 19 nt, Homo sapiens
  misc_RNA (1)...(19): siRNA sense strand
gagcagauccuggcaaaga

SEQ ID NO: 1750031 - RNA, 19 nt, Homo sapiens
  misc_RNA (1)...(19): siRNA sense strand
ugacuugccugguggagaa

SEQ ID NO: 1750032 - RNA, 19 nt, Homo sapiens
  misc_RNA (1)...(19): siRNA sense strand
ccaaggguguguaugagaa

SEQ ID NO: 1750033 - RNA, 19 nt, Homo sapiens
  misc_RNA (1)...(19): siRNA sense strand
gaccucacaucaacuucua

SEQ ID NO: 1750034 - RNA, 19 nt, Homo sapiens
  misc_RNA (1)...(19): siRNA sense strand
gggagcagauccuggcaaa

SEQ ID NO: 1750035 - RNA, 19 nt, Homo sapiens
  misc_RNA (1)...(19): siRNA sense strand
gcaaguuugugcaguacga

SEQ ID NO: 1750036 - RNA, 19 nt, Homo sapiens
  misc_RNA (1)...(19): siRNA sense strand
gcaagggcgugcagaggau

SEQ ID NO: 1750037 - RNA, 19 nt, Homo sapiens
  misc_RNA (1)...(19): siRNA sense strand
ggacgacugcagcaaguuu

SEQ ID NO: 1750038 - RNA, 19 nt, Homo sapiens
  misc_RNA (1)...(19): siRNA sense strand
guaacacggucaucaagca

SEQ ID NO: 1750039 - RNA, 19 nt, Homo sapiens
  misc_RNA (1)...(19): siRNA sense strand
gggugaaccuggugacaga

SEQ ID NO: 1750040 - RNA, 19 nt, Homo sapiens
  misc_RNA (1)...(19): siRNA sense strand
uuaacgagaucacugcuau

SEQ ID NO: 1750041 - RNA, 19 nt, Homo sapiens
  misc_RNA (1)...(19): siRNA sense strand
acacggagcugggcaagau

SEQ ID NO: 1750042 - RNA, 19 nt, Homo sapiens
  misc_RNA (1)...(19): siRNA sense strand
cgagaucacugcuaugacu

SEQ ID NO: 1750043 - RNA, 19 nt, Homo sapiens
  misc_RNA (1)...(19): siRNA sense strand
ucgaggcccugaaggagua

SEQ ID NO: 1750044 - RNA, 19 nt, Homo sapiens
  misc_RNA (1)...(19): siRNA sense strand
acagcaacaugaagcaauu

SEQ ID NO: 1750045 - RNA, 19 nt, Homo sapiens
  misc_RNA (1)...(19): siRNA sense strand
gagaaccugcaguccuuua

SEQ ID NO: 1750046 - RNA, 19 nt, Homo sapiens
  misc_RNA (1)...(19): siRNA sense strand
gaagugagcgcugggaaca

SEQ ID NO: 1750047 - RNA, 19 nt, Homo sapiens
  misc_RNA (1)...(19): siRNA sense strand
ccgcaggcuuggcaucuuu

SEQ ID NO: 1750048 - RNA, 19 nt, Homo sapiens
  misc_RNA (1)...(19): siRNA sense strand
ccuggugguuuguguauga

SEQ ID NO: 1750049 - RNA, 19 nt, Homo sapiens
  misc_RNA (1)...(19): siRNA sense strand
gaagugcuccgaagacaac

SEQ ID NO: 1750050 - RNA, 19 nt, Homo sapiens
  misc_RNA (1)...(19): siRNA sense strand
uggagaaccugcaguccuu

SEQ ID NO: 1750051 - RNA, 19 nt, Homo sapiens
  misc_RNA (1)...(19): siRNA sense strand
cagagauggugcugucaga

SEQ ID NO: 1750052 - RNA, 19 nt, Homo sapiens
  misc_RNA (1)...(19): siRNA sense strand
agauggugcugucagauga

SEQ ID NO: 1750053 - RNA, 19 nt, Homo sapiens
  misc_RNA (1)...(19): siRNA sense strand
uaccucaucuccuccaaug

SEQ ID NO: 1750054 - RNA, 19 nt, Homo sapiens
  misc_RNA (1)...(19): siRNA sense strand
gagauggugcugucagaug

SEQ ID NO: 1750055 - RNA, 19 nt, Homo sapiens
  misc_RNA (1)...(19): siRNA sense strand
caaggaaggaggacaugga

SEQ ID NO: 1750056 - RNA, 19 nt, Homo sapiens
  misc_RNA (1)...(19): siRNA sense strand
gcaccagcccugaagaaag

SEQ ID NO: 1750057 - RNA, 19 nt, Homo sapiens
  misc_RNA (1)...(19): siRNA sense strand
ccacggcucugggcuucaa

SEQ ID NO: 1750058 - RNA, 19 nt, Homo sapiens
  misc_RNA (1)...(19): siRNA sense strand
ccucaucuccuccaauguu

SEQ ID NO: 1750059 - RNA, 19 nt, Homo sapiens
  misc_RNA (1)...(19): siRNA sense strand
gcguggcgcugucuacuac

SEQ ID NO: 1750060 - RNA, 19 nt, Homo sapiens
  misc_RNA (1)...(19): siRNA sense strand
ggaguucacccuggaguuc

SEQ ID NO: 1750061 - RNA, 19 nt, Homo sapiens
  misc_RNA (1)...(19): siRNA sense strand
agacggaccugaccuucgu

SEQ ID NO: 1750062 - RNA, 19 nt, Homo sapiens
  misc_RNA (1)...(19): siRNA sense strand
ccgagaagcccucaucagu

SEQ ID NO: 1750063 - RNA, 19 nt, Homo sapiens
  misc_RNA (1)...(19): siRNA sense strand
gcgcaagcuggacgaguuu

SEQ ID NO: 1750064 - RNA, 19 nt, Homo sapiens
  misc_RNA (1)...(19): siRNA sense strand
caccagcccugaagaaagc

SEQ ID NO: 1750065 - RNA, 19 nt, Homo sapiens
  misc_RNA (1)...(19): siRNA sense strand
ggccagggcagcaagaugu

SEQ ID NO: 1750066 - RNA, 19 nt, Homo sapiens
  misc_RNA (1)...(19): siRNA sense strand
ggaguaugagccugagaug

SEQ ID NO: 1750067 - RNA, 19 nt, Homo sapiens
  misc_RNA (1)...(19): siRNA sense strand
gcucaccaccaaucagaug

SEQ ID NO: 1750068 - RNA, 19 nt, Homo sapiens
  misc_RNA (1)...(19): siRNA sense strand
ugaaccaggacaagaagaa

SEQ ID NO: 1750069 - RNA, 19 nt, Homo sapiens
  misc_RNA (1)...(19): siRNA sense strand
gggcugcaccucagucauc

SEQ ID NO: 1750070 - RNA, 19 nt, Homo sapiens
  misc_RNA (1)...(19): siRNA sense strand
ggugguggugcuccagaua

SEQ ID NO: 1750071 - RNA, 19 nt, Homo sapiens
  misc_RNA (1)...(19): siRNA sense strand
caucgacugugagguguuc

SEQ ID NO: 1750072 - RNA, 19 nt, Homo sapiens
  misc_RNA (1)...(19): siRNA sense strand
gcaucuuccucacggcaau

SEQ ID NO: 1750073 - RNA, 19 nt, Homo sapiens
  misc_RNA (1)...(19): siRNA sense strand
uggcugcccuugucuccuu

SEQ ID NO: 1750074 - RNA, 19 nt, Homo sapiens
  misc_RNA (1)...(19): siRNA sense strand
caucucggguaccacguau

SEQ ID NO: 1750075 - RNA, 19 nt, Homo sapiens
  misc_RNA (1)...(19): siRNA sense strand
gcacgcucaccaccaauca

SEQ ID NO: 1750076 - RNA, 19 nt, Homo sapiens
  misc_RNA (1)...(19): siRNA sense strand
gcugucuacuacuucaaga

SEQ ID NO: 1750077 - RNA, 19 nt, Homo sapiens
  misc_RNA (1)...(19): siRNA sense strand
caauaucacaucgggcaaa

SEQ ID NO: 1750078 - RNA, 19 nt, Homo sapiens
  misc_RNA (1)...(19): siRNA sense strand
gcaguccuuuaacgagauc

SEQ ID NO: 1750079 - RNA, 19 nt, Homo sapiens
  misc_RNA (1)...(19): siRNA sense strand
gcgcauggcacgcaagaac

SEQ ID NO: 1750080 - RNA, 19 nt, Homo sapiens
  misc_RNA (1)...(19): siRNA sense strand
ucuaccagcugaggaacuu

SEQ ID NO: 1750081 - RNA, 19 nt, Homo sapiens
  misc_RNA (1)...(19): siRNA sense strand
agugagcgcugggaacaga

SEQ ID NO: 1750082 - RNA, 19 nt, Homo sapiens
  misc_RNA (1)...(19): siRNA sense strand
ggagaaccugcaguccuuu

SEQ ID NO: 1750083 - RNA, 19 nt, Homo sapiens
  misc_RNA (1)...(19): siRNA sense strand
ggaccucacaucaacuucu

SEQ ID NO: 1750084 - RNA, 19 nt, Homo sapiens
  misc_RNA (1)...(19): siRNA sense strand
gaaccugcaguccuuuaac

SEQ ID NO: 1750085 - RNA, 19 nt, Homo sapiens
  misc_RNA (1)...(19): siRNA sense strand
caucaacaucggccacuuc

SEQ ID NO: 1750086 - RNA, 19 nt, Homo sapiens
  misc_RNA (1)...(19): siRNA sense strand
agauaucucugccugucau

SEQ ID NO: 1750087 - RNA, 19 nt, Homo sapiens
  misc_RNA (1)...(19): siRNA sense strand
ccaccaccauggccuuguc

SEQ ID NO: 1750088 - RNA, 19 nt, Homo sapiens
  misc_RNA (1)...(19): siRNA sense strand
cgaggucgucugcaucuuc

SEQ ID NO: 1750089 - RNA, 19 nt, Homo sapiens
  misc_RNA (1)...(19): siRNA sense strand
ggaacgcaacgccgagagu

SEQ ID NO: 1750090 - RNA, 19 nt, Homo sapiens
  misc_RNA (1)...(19): siRNA sense strand
gggagcuggugcuggaaca

SEQ ID NO: 1750091 - RNA, 19 nt, Homo sapiens
  misc_RNA (1)...(19): siRNA sense strand
ggcagcaagauguuuguga

SEQ ID NO: 1750092 - RNA, 19 nt, Homo sapiens
  misc_RNA (1)...(19): siRNA sense strand
gaaauccauguccguguac

SEQ ID NO: 1750093 - RNA, 19 nt, Homo sapiens
  misc_RNA (1)...(19): siRNA sense strand
ggccaaggguguguaugag

SEQ ID NO: 1750094 - RNA, 19 nt, Homo sapiens
  misc_RNA (1)...(19): siRNA sense strand
cggcugucaucacuacaug

SEQ ID NO: 1750095 - RNA, 19 nt, Homo sapiens
  misc_RNA (1)...(19): siRNA sense strand
gccaaggguguguaugaga

SEQ ID NO: 1750096 - RNA, 19 nt, Homo sapiens
  misc_RNA (1)...(19): siRNA sense strand
gcuggcucuucuuccgaua

SEQ ID NO: 1750097 - RNA, 19 nt, Homo sapiens
  misc_RNA (1)...(19): siRNA sense strand
gagcugugaaccaggacaa

SEQ ID NO: 1750098 - RNA, 19 nt, Homo sapiens
  misc_RNA (1)...(19): siRNA sense strand
cagcaaguuugugcaguac

SEQ ID NO: 1750099 - RNA, 19 nt, Homo sapiens
  misc_RNA (1)...(19): siRNA sense strand
agcgcaagcuggacgaguu

SEQ ID NO: 1750100 - RNA, 19 nt, Homo sapiens
  misc_RNA (1)...(19): siRNA sense strand
caagauccggagccagaug

SEQ ID NO: 1750101 - RNA, 19 nt, Homo sapiens
  misc_RNA (1)...(19): siRNA sense strand
gcugugaaccaggacaaga

SEQ ID NO: 1750102 - RNA, 19 nt, Homo sapiens
  misc_RNA (1)...(19): siRNA sense strand
guggcgcugucuacuacuu

SEQ ID NO: 1750103 - RNA, 19 nt, Homo sapiens
  misc_RNA (1)...(19): siRNA sense strand
ccaucgaggcccugaagga

SEQ ID NO: 1750104 - RNA, 19 nt, Homo sapiens
  misc_RNA (1)...(19): siRNA sense strand
cgagcuggcgccuguaaca

SEQ ID NO: 1750105 - RNA, 19 nt, Homo sapiens
  misc_RNA (1)...(19): siRNA sense strand
cggagacagcucugacuug

SEQ ID NO: 1750106 - RNA, 19 nt, Homo sapiens
  misc_RNA (1)...(19): siRNA sense strand
ggaaauccauguccgugua

SEQ ID NO: 1750107 - RNA, 19 nt, Homo sapiens
  misc_RNA (1)...(19): siRNA sense strand
ccaacgagcucccgaguga

SEQ ID NO: 1750108 - RNA, 19 nt, Homo sapiens
  misc_RNA (1)...(19): siRNA sense strand
gcagcaaguuugugcagua

SEQ ID NO: 1750109 - RNA, 19 nt, Homo sapiens
  misc_RNA (1)...(19): siRNA sense strand
gcagcaagauguuugugaa

SEQ ID NO: 1750110 - RNA, 19 nt, Homo sapiens
  misc_RNA (1)...(19): siRNA sense strand
gaugcgggcuccugccuuu

SEQ ID NO: 1750111 - RNA, 19 nt, Homo sapiens
  misc_RNA (1)...(19): siRNA sense strand
gagcagauccuggcaaaga

SEQ ID NO: 1750112 - RNA, 19 nt, Homo sapiens
  misc_RNA (1)...(19): siRNA sense strand
ugacuugccugguggagaa

SEQ ID NO: 1750113 - RNA, 19 nt, Homo sapiens
  misc_RNA (1)...(19): siRNA sense strand
ccaaggguguguaugagaa

SEQ ID NO: 1750114 - RNA, 19 nt, Homo sapiens
  misc_RNA (1)...(19): siRNA sense strand
gaccucacaucaacuucua

SEQ ID NO: 1750115 - RNA, 19 nt, Homo sapiens
  misc_RNA (1)...(19): siRNA sense strand
gggagcagauccuggcaaa

SEQ ID NO: 1750116 - RNA, 19 nt, Homo sapiens
  misc_RNA (1)...(19): siRNA sense strand
gcaaguuugugcaguacga

SEQ ID NO: 1750117 - RNA, 19 nt, Homo sapiens
  misc_RNA (1)...(19): siRNA sense strand
gcaagggcgugcagaggau

SEQ ID NO: 1750118 - RNA, 19 nt, Homo sapiens
  misc_RNA (1)...(19): siRNA sense strand
ggacgacugcagcaaguuu

SEQ ID NO: 1750119 - RNA, 19 nt, Homo sapiens
  misc_RNA (1)...(19): siRNA sense strand
guaacacggucaucaagca

SEQ ID NO: 1750120 - RNA, 19 nt, Homo sapiens
  misc_RNA (1)...(19): siRNA sense strand
gggugaaccuggugacaga

SEQ ID NO: 1750121 - RNA, 19 nt, Homo sapiens
  misc_RNA (1)...(19): siRNA sense strand
uuaacgagaucacugcuau

SEQ ID NO: 1750122 - RNA, 19 nt, Homo sapiens
  misc_RNA (1)...(19): siRNA sense strand
acacggagcugggcaagau

SEQ ID NO: 1750123 - RNA, 19 nt, Homo sapiens
  misc_RNA (1)...(19): siRNA sense strand
cgagaucacugcuaugacu

SEQ ID NO: 1750124 - RNA, 19 nt, Homo sapiens
  misc_RNA (1)...(19): siRNA sense strand
ucgaggcccugaaggagua

SEQ ID NO: 1750125 - RNA, 19 nt, Homo sapiens
  misc_RNA (1)...(19): siRNA sense strand
acagcaacaugaagcaauu

SEQ ID NO: 1750126 - RNA, 19 nt, Homo sapiens
  misc_RNA (1)...(19): siRNA sense strand
gagaaccugcaguccuuua

SEQ ID NO: 1750127 - RNA, 19 nt, Homo sapiens
  misc_RNA (1)...(19): siRNA sense strand
ccgcaggcuuggcaucuuu

SEQ ID NO: 1750128 - RNA, 19 nt, Homo sapiens
  misc_RNA (1)...(19): siRNA sense strand
ccuggugguuuguguauga

SEQ ID NO: 1750129 - RNA, 19 nt, Homo sapiens
  misc_RNA (1)...(19): siRNA sense strand
gaagugcuccgaagacaac

SEQ ID NO: 1750130 - RNA, 19 nt, Homo sapiens
  misc_RNA (1)...(19): siRNA sense strand
uggagaaccugcaguccuu

SEQ ID NO: 1750131 - RNA, 19 nt, Homo sapiens
  misc_RNA (1)...(19): siRNA sense strand
cagagauggugcugucaga

SEQ ID NO: 1750132 - RNA, 19 nt, Homo sapiens
  misc_RNA (1)...(19): siRNA sense strand
agauggugcugucagauga

SEQ ID NO: 1750133 - RNA, 19 nt, Homo sapiens
  misc_RNA (1)...(19): siRNA sense strand
uaccucaucuccuccaaug

SEQ ID NO: 1750134 - RNA, 19 nt, Homo sapiens
  misc_RNA (1)...(19): siRNA sense strand
gagauggugcugucagaug

SEQ ID NO: 1750135 - RNA, 19 nt, Homo sapiens
  misc_RNA (1)...(19): siRNA sense strand
caaggaaggaggacaugga

SEQ ID NO: 1750136 - RNA, 19 nt, Homo sapiens
  misc_RNA (1)...(19): siRNA sense strand
gcaccagcccugaagaaag

SEQ ID NO: 1750137 - RNA, 19 nt, Homo sapiens
  misc_RNA (1)...(19): siRNA sense strand
ccacggcucugggcuucaa

SEQ ID NO: 1750138 - RNA, 19 nt, Homo sapiens
  misc_RNA (1)...(19): siRNA sense strand
ccucaucuccuccaauguu

SEQ ID NO: 1750139 - RNA, 19 nt, Homo sapiens
  misc_RNA (1)...(19): siRNA sense strand
gcguggcgcugucuacuac

SEQ ID NO: 1750140 - RNA, 19 nt, Homo sapiens
  misc_RNA (1)...(19): siRNA sense strand
ggaguucacccuggaguuc

SEQ ID NO: 1750141 - RNA, 19 nt, Homo sapiens
  misc_RNA (1)...(19): siRNA sense strand
agacggaccugaccuucgu

SEQ ID NO: 1750142 - RNA, 19 nt, Homo sapiens
  misc_RNA (1)...(19): siRNA sense strand
ccgagaagcccucaucagu

SEQ ID NO: 1750143 - RNA, 19 nt, Homo sapiens
  misc_RNA (1)...(19): siRNA sense strand
gcgcaagcuggacgaguuu

SEQ ID NO: 1750144 - RNA, 19 nt, Homo sapiens
  misc_RNA (1)...(19): siRNA sense strand
caccagcccugaagaaagc

SEQ ID NO: 1750145 - RNA, 19 nt, Homo sapiens
  misc_RNA (1)...(19): siRNA sense strand
ggccagggcagcaagaugu

SEQ ID NO: 1750146 - RNA, 19 nt, Homo sapiens
  misc_RNA (1)...(19): siRNA sense strand
ggaguaugagccugagaug

SEQ ID NO: 1750147 - RNA, 19 nt, Homo sapiens
  misc_RNA (1)...(19): siRNA sense strand
gcucaccaccaaucagaug

SEQ ID NO: 1750148 - RNA, 19 nt, Homo sapiens
  misc_RNA (1)...(19): siRNA sense strand
ugaaccaggacaagaagaa

SEQ ID NO: 1750149 - RNA, 19 nt, Homo sapiens
  misc_RNA (1)...(19): siRNA sense strand
gggcugcaccucagucauc

SEQ ID NO: 1750150 - RNA, 19 nt, Homo sapiens
  misc_RNA (1)...(19): siRNA sense strand
ggugguggugcuccagaua

SEQ ID NO: 1750151 - RNA, 19 nt, Homo sapiens
  misc_RNA (1)...(19): siRNA sense strand
caucgacugugagguguuc

SEQ ID NO: 1750152 - RNA, 19 nt, Homo sapiens
  misc_RNA (1)...(19): siRNA sense strand
gcaucuuccucacggcaau

SEQ ID NO: 1750153 - RNA, 19 nt, Homo sapiens
  misc_RNA (1)...(19): siRNA sense strand
uggcugcccuugucuccuu

SEQ ID NO: 1750154 - RNA, 19 nt, Homo sapiens
  misc_RNA (1)...(19): siRNA sense strand
caucucggguaccacguau

SEQ ID NO: 1750155 - RNA, 19 nt, Homo sapiens
  misc_RNA (1)...(19): siRNA sense strand
gcacgcucaccaccaauca

SEQ ID NO: 1750156 - RNA, 19 nt, Homo sapiens
  misc_RNA (1)...(19): siRNA sense strand
gcugucuacuacuucaaga

SEQ ID NO: 1750157 - RNA, 19 nt, Homo sapiens
  misc_RNA (1)...(19): siRNA sense strand
caauaucacaucgggcaaa

SEQ ID NO: 1750158 - RNA, 19 nt, Homo sapiens
  misc_RNA (1)...(19): siRNA sense strand
gcaguccuuuaacgagauc

SEQ ID NO: 1750159 - RNA, 19 nt, Homo sapiens
  misc_RNA (1)...(19): siRNA sense strand
gcgcauggcacgcaagaac

SEQ ID NO: 1750160 - RNA, 19 nt, Homo sapiens
  misc_RNA (1)...(19): siRNA sense strand
ucuaccagcugaggaacuu

SEQ ID NO: 1750161 - RNA, 19 nt, Homo sapiens
  misc_RNA (1)...(19): siRNA sense strand
ggagaaccugcaguccuuu

SEQ ID NO: 1750162 - RNA, 19 nt, Homo sapiens
  misc_RNA (1)...(19): siRNA sense strand
ggaccucacaucaacuucu

SEQ ID NO: 1750163 - RNA, 19 nt, Homo sapiens
  misc_RNA (1)...(19): siRNA sense strand
gaaccugcaguccuuuaac

SEQ ID NO: 1750164 - RNA, 19 nt, Homo sapiens
  misc_RNA (1)...(19): siRNA sense strand
caucaacaucggccacuuc

SEQ ID NO: 1750165 - RNA, 19 nt, Homo sapiens
  misc_RNA (1)...(19): siRNA sense strand
agauaucucugccugucau

SEQ ID NO: 1750166 - RNA, 19 nt, Homo sapiens
  misc_RNA (1)...(19): siRNA sense strand
ccaccaccauggccuuguc

SEQ ID NO: 1750167 - RNA, 19 nt, Homo sapiens
  misc_RNA (1)...(19): siRNA sense strand
cgaggucgucugcaucuuc

SEQ ID NO: 1750168 - RNA, 19 nt, Homo sapiens
  misc_RNA (1)...(19): siRNA sense strand
ggaacgcaacgccgagagu

SEQ ID NO: 1750169 - RNA, 19 nt, Homo sapiens
  misc_RNA (1)...(19): siRNA sense strand
gggagcuggugcuggaaca

SEQ ID NO: 1750170 - RNA, 19 nt, Homo sapiens
  misc_RNA (1)...(19): siRNA sense strand
ggcagcaagauguuuguga

SEQ ID NO: 1750171 - RNA, 19 nt, Homo sapiens
  misc_RNA (1)...(19): siRNA sense strand
gaaauccauguccguguac

SEQ ID NO: 1750172 - RNA, 19 nt, Homo sapiens
  misc_RNA (1)...(19): siRNA sense strand
ggccaaggguguguaugag

SEQ ID NO: 1750173 - RNA, 19 nt, Homo sapiens
  misc_RNA (1)...(19): siRNA sense strand
cggcugucaucacuacaug

SEQ ID NO: 1750174 - RNA, 19 nt, Homo sapiens
  misc_RNA (1)...(19): siRNA sense strand
gccaaggguguguaugaga

SEQ ID NO: 1750175 - RNA, 19 nt, Homo sapiens
  misc_RNA (1)...(19): siRNA sense strand
gcuggcucuucuuccgaua

SEQ ID NO: 1750176 - RNA, 19 nt, Homo sapiens
  misc_RNA (1)...(19): siRNA sense strand
gagcugugaaccaggacaa

SEQ ID NO: 1750177 - RNA, 19 nt, Homo sapiens
  misc_RNA (1)...(19): siRNA sense strand
cagcaaguuugugcaguac

SEQ ID NO: 1750178 - RNA, 19 nt, Homo sapiens
  misc_RNA (1)...(19): siRNA sense strand
agcgcaagcuggacgaguu

SEQ ID NO: 1750179 - RNA, 19 nt, Homo sapiens
  misc_RNA (1)...(19): siRNA sense strand
caagauccggagccagaug

SEQ ID NO: 1750180 - RNA, 19 nt, Homo sapiens
  misc_RNA (1)...(19): siRNA sense strand
gcugugaaccaggacaaga

SEQ ID NO: 1750181 - RNA, 19 nt, Homo sapiens
  misc_RNA (1)...(19): siRNA sense strand
guggcgcugucuacuacuu

SEQ ID NO: 1750182 - RNA, 19 nt, Homo sapiens
  misc_RNA (1)...(19): siRNA sense strand
ccaucgaggcccugaagga

SEQ ID NO: 1750183 - RNA, 19 nt, Homo sapiens
  misc_RNA (1)...(19): siRNA sense strand
cgagcuggcgccuguaaca

SEQ ID NO: 1750184 - RNA, 19 nt, Homo sapiens
  misc_RNA (1)...(19): siRNA sense strand
cggagacagcucugacuug

SEQ ID NO: 1750185 - RNA, 19 nt, Homo sapiens
  misc_RNA (1)...(19): siRNA sense strand
ggaaauccauguccgugua

SEQ ID NO: 1750186 - RNA, 19 nt, Homo sapiens
  misc_RNA (1)...(19): siRNA sense strand
ccaacgagcucccgaguga

SEQ ID NO: 1750187 - RNA, 19 nt, Homo sapiens
  misc_RNA (1)...(19): siRNA sense strand
gcagcaaguuugugcagua

SEQ ID NO: 1750188 - RNA, 19 nt, Homo sapiens
  misc_RNA (1)...(19): siRNA sense strand
gcagcaagauguuugugaa

SEQ ID NO: 1750189 - RNA, 19 nt, Homo sapiens
  misc_RNA (1)...(19): siRNA sense strand
gaugcgggcuccugccuuu

SEQ ID NO: 1750190 - RNA, 19 nt, Homo sapiens
  misc_RNA (1)...(19): siRNA sense strand
gagcagauccuggcaaaga

SEQ ID NO: 1750191 - RNA, 19 nt, Homo sapiens
  misc_RNA (1)...(19): siRNA sense strand
ugacuugccugguggagaa

SEQ ID NO: 1750192 - RNA, 19 nt, Homo sapiens
  misc_RNA (1)...(19): siRNA sense strand
ccaaggguguguaugagaa

SEQ ID NO: 1750193 - RNA, 19 nt, Homo sapiens
  misc_RNA (1)...(19): siRNA sense strand
gaccucacaucaacuucua

SEQ ID NO: 1750194 - RNA, 19 nt, Homo sapiens
  misc_RNA (1)...(19): siRNA sense strand
gggagcagauccuggcaaa

SEQ ID NO: 1750195 - RNA, 19 nt, Homo sapiens
  misc_RNA (1)...(19): siRNA sense strand
gcaaguuugugcaguacga

SEQ ID NO: 1750196 - RNA, 19 nt, Homo sapiens
  misc_RNA (1)...(19): siRNA sense strand
gcaagggcgugcagaggau

SEQ ID NO: 1750197 - RNA, 19 nt, Homo sapiens
  misc_RNA (1)...(19): siRNA sense strand
ggacgacugcagcaaguuu

SEQ ID NO: 1750198 - RNA, 19 nt, Homo sapiens
  misc_RNA (1)...(19): siRNA sense strand
guaacacggucaucaagca

SEQ ID NO: 1750199 - RNA, 19 nt, Homo sapiens
  misc_RNA (1)...(19): siRNA sense strand
gggugaaccuggugacaga

SEQ ID NO: 1750200 - RNA, 19 nt, Homo sapiens
  misc_RNA (1)...(19): siRNA sense strand
uuaacgagaucacugcuau

SEQ ID NO: 1750201 - RNA, 19 nt, Homo sapiens
  misc_RNA (1)...(19): siRNA sense strand
acacggagcugggcaagau

SEQ ID NO: 1750202 - RNA, 19 nt, Homo sapiens
  misc_RNA (1)...(19): siRNA sense strand
cgagaucacugcuaugacu

SEQ ID NO: 1750203 - RNA, 19 nt, Homo sapiens
  misc_RNA (1)...(19): siRNA sense strand
ucgaggcccugaaggagua

SEQ ID NO: 1750204 - RNA, 19 nt, Homo sapiens
  misc_RNA (1)...(19): siRNA sense strand
acagcaacaugaagcaauu

SEQ ID NO: 1750205 - RNA, 19 nt, Homo sapiens
  misc_RNA (1)...(19): siRNA sense strand
gagaaccugcaguccuuua

SEQ ID NO: 1750206 - RNA, 19 nt, Homo sapiens
  misc_RNA (1)...(19): siRNA sense strand
ccgcaggcuuggcaucuuu

SEQ ID NO: 1750207 - RNA, 19 nt, Homo sapiens
  misc_RNA (1)...(19): siRNA sense strand
ccuggugguuuguguauga

SEQ ID NO: 1750208 - RNA, 19 nt, Homo sapiens
  misc_RNA (1)...(19): siRNA sense strand
gaagugcuccgaagacaac

SEQ ID NO: 1750209 - RNA, 19 nt, Homo sapiens
  misc_RNA (1)...(19): siRNA sense strand
uggagaaccugcaguccuu

SEQ ID NO: 1750210 - RNA, 19 nt, Homo sapiens
  misc_RNA (1)...(19): siRNA sense strand
cagagauggugcugucaga

SEQ ID NO: 1750211 - RNA, 19 nt, Homo sapiens
  misc_RNA (1)...(19): siRNA sense strand
agauggugcugucagauga

SEQ ID NO: 1750212 - RNA, 19 nt, Homo sapiens
  misc_RNA (1)...(19): siRNA sense strand
uaccucaucuccuccaaug

SEQ ID NO: 1750213 - RNA, 19 nt, Homo sapiens
  misc_RNA (1)...(19): siRNA sense strand
gagauggugcugucagaug

SEQ ID NO: 1750214 - RNA, 19 nt, Homo sapiens
  misc_RNA (1)...(19): siRNA sense strand
caaggaaggaggacaugga

SEQ ID NO: 1750215 - RNA, 19 nt, Homo sapiens
  misc_RNA (1)...(19): siRNA sense strand
gcaccagcccugaagaaag

SEQ ID NO: 1750216 - RNA, 19 nt, Homo sapiens
  misc_RNA (1)...(19): siRNA sense strand
ccacggcucugggcuucaa

SEQ ID NO: 1750217 - RNA, 19 nt, Homo sapiens
  misc_RNA (1)...(19): siRNA sense strand
ccucaucuccuccaauguu

SEQ ID NO: 1750218 - RNA, 19 nt, Homo sapiens
  misc_RNA (1)...(19): siRNA sense strand
gcguggcgcugucuacuac

SEQ ID NO: 1750219 - RNA, 19 nt, Homo sapiens
  misc_RNA (1)...(19): siRNA sense strand
ggaguucacccuggaguuc

SEQ ID NO: 1750220 - RNA, 19 nt, Homo sapiens
  misc_RNA (1)...(19): siRNA sense strand
agacggaccugaccuucgu

SEQ ID NO: 1750221 - RNA, 19 nt, Homo sapiens
  misc_RNA (1)...(19): siRNA sense strand
ccgagaagcccucaucagu

SEQ ID NO: 1750222 - RNA, 19 nt, Homo sapiens
  misc_RNA (1)...(19): siRNA sense strand
gcgcaagcuggacgaguuu

SEQ ID NO: 1750223 - RNA, 19 nt, Homo sapiens
  misc_RNA (1)...(19): siRNA sense strand
caccagcccugaagaaagc

SEQ ID NO: 1750224 - RNA, 19 nt, Homo sapiens
  misc_RNA (1)...(19): siRNA sense strand
ggccagggcagcaagaugu

SEQ ID NO: 1750225 - RNA, 19 nt, Homo sapiens
  misc_RNA (1)...(19): siRNA sense strand
ggaguaugagccugagaug

SEQ ID NO: 1750226 - RNA, 19 nt, Homo sapiens
  misc_RNA (1)...(19): siRNA sense strand
gcucaccaccaaucagaug

SEQ ID NO: 1750227 - RNA, 19 nt, Homo sapiens
  misc_RNA (1)...(19): siRNA sense strand
ugaaccaggacaagaagaa

SEQ ID NO: 1750228 - RNA, 19 nt, Homo sapiens
  misc_RNA (1)...(19): siRNA sense strand
gggcugcaccucagucauc

SEQ ID NO: 1750229 - RNA, 19 nt, Homo sapiens
  misc_RNA (1)...(19): siRNA sense strand
ggugguggugcuccagaua

SEQ ID NO: 1750230 - RNA, 19 nt, Homo sapiens
  misc_RNA (1)...(19): siRNA sense strand
caucgacugugagguguuc

SEQ ID NO: 1750231 - RNA, 19 nt, Homo sapiens
  misc_RNA (1)...(19): siRNA sense strand
gcaucuuccucacggcaau

SEQ ID NO: 1750232 - RNA, 19 nt, Homo sapiens
  misc_RNA (1)...(19): siRNA sense strand
uggcugcccuugucuccuu

SEQ ID NO: 1750233 - RNA, 19 nt, Homo sapiens
  misc_RNA (1)...(19): siRNA sense strand
caucucggguaccacguau

SEQ ID NO: 1750234 - RNA, 19 nt, Homo sapiens
  misc_RNA (1)...(19): siRNA sense strand
gcacgcucaccaccaauca

SEQ ID NO: 1750235 - RNA, 19 nt, Homo sapiens
  misc_RNA (1)...(19): siRNA sense strand
gcugucuacuacuucaaga

SEQ ID NO: 1750236 - RNA, 19 nt, Homo sapiens
  misc_RNA (1)...(19): siRNA sense strand
caauaucacaucgggcaaa

SEQ ID NO: 1750237 - RNA, 19 nt, Homo sapiens
  misc_RNA (1)...(19): siRNA sense strand
gcaguccuuuaacgagauc

SEQ ID NO: 1750238 - RNA, 19 nt, Homo sapiens
  misc_RNA (1)...(19): siRNA sense strand
gcgcauggcacgcaagaac

SEQ ID NO: 1750239 - RNA, 19 nt, Homo sapiens
  misc_RNA (1)...(19): siRNA sense strand
ucuaccagcugaggaacuu

SEQ ID NO: 1750240 - RNA, 19 nt, Homo sapiens
  misc_RNA (1)...(19): siRNA sense strand
ggagaaccugcaguccuuu

SEQ ID NO: 1750241 - RNA, 19 nt, Homo sapiens
  misc_RNA (1)...(19): siRNA sense strand
ggaccucacaucaacuucu

SEQ ID NO: 1750242 - RNA, 19 nt, Homo sapiens
  misc_RNA (1)...(19): siRNA sense strand
gaaccugcaguccuuuaac

SEQ ID NO: 1750243 - RNA, 19 nt, Homo sapiens
  misc_RNA (1)...(19): siRNA sense strand
caucaacaucggccacuuc

SEQ ID NO: 1750244 - RNA, 19 nt, Homo sapiens
  misc_RNA (1)...(19): siRNA sense strand
agauaucucugccugucau

SEQ ID NO: 1750245 - RNA, 19 nt, Homo sapiens
  misc_RNA (1)...(19): siRNA sense strand
ccaccaccauggccuuguc

SEQ ID NO: 1750246 - RNA, 19 nt, Homo sapiens
  misc_RNA (1)...(19): siRNA sense strand
cgaggucgucugcaucuuc

SEQ ID NO: 1750247 - RNA, 19 nt, Homo sapiens
  misc_RNA (1)...(19): siRNA sense strand
ggaacgcaacgccgagagu

SEQ ID NO: 1750248 - RNA, 19 nt, Homo sapiens
  misc_RNA (1)...(19): siRNA sense strand
gggagcuggugcuggaaca

SEQ ID NO: 1750249 - RNA, 19 nt, Homo sapiens
  misc_RNA (1)...(19): siRNA sense strand
ggcagcaagauguuuguga

SEQ ID NO: 1750250 - RNA, 19 nt, Homo sapiens
  misc_RNA (1)...(19): siRNA sense strand
gaaauccauguccguguac

SEQ ID NO: 1750251 - RNA, 19 nt, Homo sapiens
  misc_RNA (1)...(19): siRNA sense strand
ggccaaggguguguaugag

SEQ ID NO: 1750252 - RNA, 19 nt, Homo sapiens
  misc_RNA (1)...(19): siRNA sense strand
cggcugucaucacuacaug

SEQ ID NO: 1750253 - RNA, 19 nt, Homo sapiens
  misc_RNA (1)...(19): siRNA sense strand
gccaaggguguguaugaga

SEQ ID NO: 1750254 - RNA, 19 nt, Homo sapiens
  misc_RNA (1)...(19): siRNA sense strand
gcuggcucuucuuccgaua

SEQ ID NO: 1750255 - RNA, 19 nt, Homo sapiens
  misc_RNA (1)...(19): siRNA sense strand
gagcugugaaccaggacaa

SEQ ID NO: 1750256 - RNA, 19 nt, Homo sapiens
  misc_RNA (1)...(19): siRNA sense strand
cagcaaguuugugcaguac

SEQ ID NO: 1750257 - RNA, 19 nt, Homo sapiens
  misc_RNA (1)...(19): siRNA sense strand
agcgcaagcuggacgaguu

SEQ ID NO: 1750258 - RNA, 19 nt, Homo sapiens
  misc_RNA (1)...(19): siRNA sense strand
caagauccggagccagaug

SEQ ID NO: 1750259 - RNA, 19 nt, Homo sapiens
  misc_RNA (1)...(19): siRNA sense strand
gcugugaaccaggacaaga

SEQ ID NO: 1750260 - RNA, 19 nt, Homo sapiens
  misc_RNA (1)...(19): siRNA sense strand
guggcgcugucuacuacuu

SEQ ID NO: 1750261 - RNA, 19 nt, Homo sapiens
  misc_RNA (1)...(19): siRNA sense strand
ccaucgaggcccugaagga

SEQ ID NO: 1750262 - RNA, 19 nt, Homo sapiens
  misc_RNA (1)...(19): siRNA sense strand
cgagcuggcgccuguaaca

SEQ ID NO: 1750263 - RNA, 19 nt, Homo sapiens
  misc_RNA (1)...(19): siRNA sense strand
cggagacagcucugacuug

SEQ ID NO: 1750264 - RNA, 19 nt, Homo sapiens
  misc_RNA (1)...(19): siRNA sense strand
ggaaauccauguccgugua

SEQ ID NO: 1750265 - RNA, 19 nt, Homo sapiens
  misc_RNA (1)...(19): siRNA sense strand
ccaacgagcucccgaguga

SEQ ID NO: 1750266 - RNA, 19 nt, Homo sapiens
  misc_RNA (1)...(19): siRNA sense strand
gcagcaaguuugugcagua

SEQ ID NO: 1750267 - RNA, 19 nt, Homo sapiens
  misc_RNA (1)...(19): siRNA sense strand
gcagcaagauguuugugaa

SEQ ID NO: 1750268 - RNA, 19 nt, Homo sapiens
  misc_RNA (1)...(19): siRNA sense strand
gaugcgggcuccugccuuu

SEQ ID NO: 1750269 - RNA, 19 nt, Homo sapiens
  misc_RNA (1)...(19): siRNA sense strand
gagcagauccuggcaaaga

SEQ ID NO: 1750270 - RNA, 19 nt, Homo sapiens
  misc_RNA (1)...(19): siRNA sense strand
ugacuugccugguggagaa

SEQ ID NO: 1750271 - RNA, 19 nt, Homo sapiens
  misc_RNA (1)...(19): siRNA sense strand
ccaaggguguguaugagaa

SEQ ID NO: 1750272 - RNA, 19 nt, Homo sapiens
  misc_RNA (1)...(19): siRNA sense strand
gaccucacaucaacuucua

SEQ ID NO: 1750273 - RNA, 19 nt, Homo sapiens
  misc_RNA (1)...(19): siRNA sense strand
gggagcagauccuggcaaa

SEQ ID NO: 1750274 - RNA, 19 nt, Homo sapiens
  misc_RNA (1)...(19): siRNA sense strand
gcaaguuugugcaguacga

SEQ ID NO: 1750275 - RNA, 19 nt, Homo sapiens
  misc_RNA (1)...(19): siRNA sense strand
gcaagggcgugcagaggau

SEQ ID NO: 1750276 - RNA, 19 nt, Homo sapiens
  misc_RNA (1)...(19): siRNA sense strand
ggacgacugcagcaaguuu

SEQ ID NO: 1750277 - RNA, 19 nt, Homo sapiens
  misc_RNA (1)...(19): siRNA sense strand
guaacacggucaucaagca

SEQ ID NO: 1750278 - RNA, 19 nt, Homo sapiens
  misc_RNA (1)...(19): siRNA sense strand
gggugaaccuggugacaga

SEQ ID NO: 1750279 - RNA, 19 nt, Homo sapiens
  misc_RNA (1)...(19): siRNA sense strand
uuaacgagaucacugcuau

SEQ ID NO: 1750280 - RNA, 19 nt, Homo sapiens
  misc_RNA (1)...(19): siRNA sense strand
acacggagcugggcaagau

SEQ ID NO: 1750281 - RNA, 19 nt, Homo sapiens
  misc_RNA (1)...(19): siRNA sense strand
cgagaucacugcuaugacu

SEQ ID NO: 1750282 - RNA, 19 nt, Homo sapiens
  misc_RNA (1)...(19): siRNA sense strand
ucgaggcccugaaggagua

SEQ ID NO: 1750283 - RNA, 19 nt, Homo sapiens
  misc_RNA (1)...(19): siRNA sense strand
acagcaacaugaagcaauu

SEQ ID NO: 1750284 - RNA, 19 nt, Homo sapiens
  misc_RNA (1)...(19): siRNA sense strand
gagaaccugcaguccuuua

SEQ ID NO: 1750285 - RNA, 19 nt, Homo sapiens
  misc_RNA (1)...(19): siRNA sense strand
ccgcaggcuuggcaucuuu

SEQ ID NO: 1750286 - RNA, 19 nt, Homo sapiens
  misc_RNA (1)...(19): siRNA sense strand
ccuggugguuuguguauga

SEQ ID NO: 1750287 - RNA, 19 nt, Homo sapiens
  misc_RNA (1)...(19): siRNA sense strand
gaagugcuccgaagacaac

SEQ ID NO: 1750288 - RNA, 19 nt, Homo sapiens
  misc_RNA (1)...(19): siRNA sense strand
uggagaaccugcaguccuu

SEQ ID NO: 1750289 - RNA, 19 nt, Homo sapiens
  misc_RNA (1)...(19): siRNA sense strand
cagagauggugcugucaga

SEQ ID NO: 1750290 - RNA, 19 nt, Homo sapiens
  misc_RNA (1)...(19): siRNA sense strand
agauggugcugucagauga

SEQ ID NO: 1750291 - RNA, 19 nt, Homo sapiens
  misc_RNA (1)...(19): siRNA sense strand
uaccucaucuccuccaaug

SEQ ID NO: 1750292 - RNA, 19 nt, Homo sapiens
  misc_RNA (1)...(19): siRNA sense strand
gagauggugcugucagaug

SEQ ID NO: 1750293 - RNA, 19 nt, Homo sapiens
  misc_RNA (1)...(19): siRNA sense strand
caaggaaggaggacaugga

SEQ ID NO: 1750294 - RNA, 19 nt, Homo sapiens
  misc_RNA (1)...(19): siRNA sense strand
gcaccagcccugaagaaag

SEQ ID NO: 1750295 - RNA, 19 nt, Homo sapiens
  misc_RNA (1)...(19): siRNA sense strand
ccacggcucugggcuucaa

SEQ ID NO: 1750296 - RNA, 19 nt, Homo sapiens
  misc_RNA (1)...(19): siRNA sense strand
ccucaucuccuccaauguu

SEQ ID NO: 1750297 - RNA, 19 nt, Homo sapiens
  misc_RNA (1)...(19): siRNA sense strand
gcguggcgcugucuacuac

SEQ ID NO: 1750298 - RNA, 19 nt, Homo sapiens
  misc_RNA (1)...(19): siRNA sense strand
ggaguucacccuggaguuc

SEQ ID NO: 1750299 - RNA, 19 nt, Homo sapiens
  misc_RNA (1)...(19): siRNA sense strand
agacggaccugaccuucgu

SEQ ID NO: 1750300 - RNA, 19 nt, Homo sapiens
  misc_RNA (1)...(19): siRNA sense strand
ccgagaagcccucaucagu

SEQ ID NO: 1750301 - RNA, 19 nt, Homo sapiens
  misc_RNA (1)...(19): siRNA sense strand
gcgcaagcuggacgaguuu

SEQ ID NO: 1750302 - RNA, 19 nt, Homo sapiens
  misc_RNA (1)...(19): siRNA sense strand
caccagcccugaagaaagc

SEQ ID NO: 1750303 - RNA, 19 nt, Homo sapiens
  misc_RNA (1)...(19): siRNA sense strand
ggccagggcagcaagaugu

SEQ ID NO: 1750304 - RNA, 19 nt, Homo sapiens
  misc_RNA (1)...(19): siRNA sense strand
ggaguaugagccugagaug

SEQ ID NO: 1750305 - RNA, 19 nt, Homo sapiens
  misc_RNA (1)...(19): siRNA sense strand
gcucaccaccaaucagaug

SEQ ID NO: 1750306 - RNA, 19 nt, Homo sapiens
  misc_RNA (1)...(19): siRNA sense strand
ugaaccaggacaagaagaa

SEQ ID NO: 1750307 - RNA, 19 nt, Homo sapiens
  misc_RNA (1)...(19): siRNA sense strand
gggcugcaccucagucauc

SEQ ID NO: 1750308 - RNA, 19 nt, Homo sapiens
  misc_RNA (1)...(19): siRNA sense strand
ggugguggugcuccagaua

SEQ ID NO: 1750309 - RNA, 19 nt, Homo sapiens
  misc_RNA (1)...(19): siRNA sense strand
caucgacugugagguguuc

SEQ ID NO: 1750310 - RNA, 19 nt, Homo sapiens
  misc_RNA (1)...(19): siRNA sense strand
gcaucuuccucacggcaau

SEQ ID NO: 1750311 - RNA, 19 nt, Homo sapiens
  misc_RNA (1)...(19): siRNA sense strand
uggcugcccuugucuccuu

SEQ ID NO: 1750312 - RNA, 19 nt, Homo sapiens
  misc_RNA (1)...(19): siRNA sense strand
caucucggguaccacguau

SEQ ID NO: 1750313 - RNA, 19 nt, Homo sapiens
  misc_RNA (1)...(19): siRNA sense strand
gcacgcucaccaccaauca

SEQ ID NO: 1750314 - RNA, 19 nt, Homo sapiens
  misc_RNA (1)...(19): siRNA sense strand
gcugucuacuacuucaaga

SEQ ID NO: 1750315 - RNA, 19 nt, Homo sapiens
  misc_RNA (1)...(19): siRNA sense strand
caauaucacaucgggcaaa

SEQ ID NO: 1750316 - RNA, 19 nt, Homo sapiens
  misc_RNA (1)...(19): siRNA sense strand
gcaguccuuuaacgagauc

SEQ ID NO: 1750317 - RNA, 19 nt, Homo sapiens
  misc_RNA (1)...(19): siRNA sense strand
gcgcauggcacgcaagaac

SEQ ID NO: 1750318 - RNA, 19 nt, Homo sapiens
  misc_RNA (1)...(19): siRNA sense strand
ucuaccagcugaggaacuu

SEQ ID NO: 1750319 - RNA, 19 nt, Homo sapiens
  misc_RNA (1)...(19): siRNA sense strand
ggagaaccugcaguccuuu

SEQ ID NO: 1750320 - RNA, 19 nt, Homo sapiens
  misc_RNA (1)...(19): siRNA sense strand
ggaccucacaucaacuucu

SEQ ID NO: 1750321 - RNA, 19 nt, Homo sapiens
  misc_RNA (1)...(19): siRNA sense strand
gaaccugcaguccuuuaac

SEQ ID NO: 1750322 - RNA, 19 nt, Homo sapiens
  misc_RNA (1)...(19): siRNA sense strand
caucaacaucggccacuuc

SEQ ID NO: 1750323 - RNA, 19 nt, Homo sapiens
  misc_RNA (1)...(19): siRNA sense strand
agauaucucugccugucau

SEQ ID NO: 1750324 - RNA, 19 nt, Homo sapiens
  misc_RNA (1)...(19): siRNA sense strand
ccaccaccauggccuuguc

SEQ ID NO: 1750325 - RNA, 19 nt, Homo sapiens
  misc_RNA (1)...(19): siRNA sense strand
cgaggucgucugcaucuuc

SEQ ID NO: 1750326 - RNA, 19 nt, Homo sapiens
  misc_RNA (1)...(19): siRNA sense strand
ggaacgcaacgccgagagu

SEQ ID NO: 1750327 - RNA, 19 nt, Homo sapiens
  misc_RNA (1)...(19): siRNA sense strand
gggagcuggugcuggaaca

SEQ ID NO: 1750328 - RNA, 19 nt, Homo sapiens
  misc_RNA (1)...(19): siRNA sense strand
ggcagcaagauguuuguga

SEQ ID NO: 1750329 - RNA, 19 nt, Homo sapiens
  misc_RNA (1)...(19): siRNA sense strand
gaaauccauguccguguac

SEQ ID NO: 1750330 - RNA, 19 nt, Homo sapiens
  misc_RNA (1)...(19): siRNA sense strand
ggccaaggguguguaugag

SEQ ID NO: 1750331 - RNA, 19 nt, Homo sapiens
  misc_RNA (1)...(19): siRNA sense strand
cggcugucaucacuacaug

SEQ ID NO: 1750332 - RNA, 19 nt, Homo sapiens
  misc_RNA (1)...(19): siRNA sense strand
gccaaggguguguaugaga

SEQ ID NO: 1750333 - RNA, 19 nt, Homo sapiens
  misc_RNA (1)...(19): siRNA sense strand
gcuggcucuucuuccgaua

SEQ ID NO: 1750334 - RNA, 19 nt, Homo sapiens
  misc_RNA (1)...(19): siRNA sense strand
gagcugugaaccaggacaa

SEQ ID NO: 1750335 - RNA, 19 nt, Homo sapiens
  misc_RNA (1)...(19): siRNA sense strand
cagcaaguuugugcaguac

SEQ ID NO: 1750336 - RNA, 19 nt, Homo sapiens
  misc_RNA (1)...(19): siRNA sense strand
agcgcaagcuggacgaguu

SEQ ID NO: 1750337 - RNA, 19 nt, Homo sapiens
  misc_RNA (1)...(19): siRNA sense strand
caagauccggagccagaug

SEQ ID NO: 1750338 - RNA, 19 nt, Homo sapiens
  misc_RNA (1)...(19): siRNA sense strand
gcugugaaccaggacaaga

SEQ ID NO: 1750339 - RNA, 19 nt, Homo sapiens
  misc_RNA (1)...(19): siRNA sense strand
guggcgcugucuacuacuu

SEQ ID NO: 1750340 - RNA, 19 nt, Homo sapiens
  misc_RNA (1)...(19): siRNA sense strand
ccaucgaggcccugaagga

SEQ ID NO: 1750341 - RNA, 19 nt, Homo sapiens
  misc_RNA (1)...(19): siRNA sense strand
cgagcuggcgccuguaaca

SEQ ID NO: 1750342 - RNA, 19 nt, Homo sapiens
  misc_RNA (1)...(19): siRNA sense strand
cggagacagcucugacuug

SEQ ID NO: 1750343 - RNA, 19 nt, Homo sapiens
  misc_RNA (1)...(19): siRNA sense strand
ggaaauccauguccgugua

SEQ ID NO: 1750344 - RNA, 19 nt, Homo sapiens
  misc_RNA (1)...(19): siRNA sense strand
ccaacgagcucccgaguga

SEQ ID NO: 1750345 - RNA, 19 nt, Homo sapiens
  misc_RNA (1)...(19): siRNA sense strand
gcagcaaguuugugcagua

SEQ ID NO: 1750346 - RNA, 19 nt, Homo sapiens
  misc_RNA (1)...(19): siRNA sense strand
gcagcaagauguuugugaa

SEQ ID NO: 1750347 - RNA, 19 nt, Homo sapiens
  misc_RNA (1)...(19): siRNA sense strand
gaugcgggcuccugccuuu

SEQ ID NO: 1750348 - RNA, 19 nt, Homo sapiens
  misc_RNA (1)...(19): siRNA sense strand
gagcagauccuggcaaaga

SEQ ID NO: 1750349 - RNA, 19 nt, Homo sapiens
  misc_RNA (1)...(19): siRNA sense strand
ugacuugccugguggagaa

SEQ ID NO: 1750350 - RNA, 19 nt, Homo sapiens
  misc_RNA (1)...(19): siRNA sense strand
ccaaggguguguaugagaa

SEQ ID NO: 1750351 - RNA, 19 nt, Homo sapiens
  misc_RNA (1)...(19): siRNA sense strand
gaccucacaucaacuucua

SEQ ID NO: 1750352 - RNA, 19 nt, Homo sapiens
  misc_RNA (1)...(19): siRNA sense strand
gggagcagauccuggcaaa

SEQ ID NO: 1750353 - RNA, 19 nt, Homo sapiens
  misc_RNA (1)...(19): siRNA sense strand
gcaaguuugugcaguacga

SEQ ID NO: 1750354 - RNA, 19 nt, Homo sapiens
  misc_RNA (1)...(19): siRNA sense strand
gcaagggcgugcagaggau

SEQ ID NO: 1750355 - RNA, 19 nt, Homo sapiens
  misc_RNA (1)...(19): siRNA sense strand
ggacgacugcagcaaguuu

SEQ ID NO: 1750356 - RNA, 19 nt, Homo sapiens
  misc_RNA (1)...(19): siRNA sense strand
guaacacggucaucaagca

SEQ ID NO: 1750357 - RNA, 19 nt, Homo sapiens
  misc_RNA (1)...(19): siRNA sense strand
gggugaaccuggugacaga

SEQ ID NO: 1750358 - RNA, 19 nt, Homo sapiens
  misc_RNA (1)...(19): siRNA sense strand
uuaacgagaucacugcuau

SEQ ID NO: 1750359 - RNA, 19 nt, Homo sapiens
  misc_RNA (1)...(19): siRNA sense strand
acacggagcugggcaagau

SEQ ID NO: 1750360 - RNA, 19 nt, Homo sapiens
  misc_RNA (1)...(19): siRNA sense strand
cgagaucacugcuaugacu

SEQ ID NO: 1750361 - RNA, 19 nt, Homo sapiens
  misc_RNA (1)...(19): siRNA sense strand
ucgaggcccugaaggagua

SEQ ID NO: 1750362 - RNA, 19 nt, Homo sapiens
  misc_RNA (1)...(19): siRNA sense strand
acagcaacaugaagcaauu

SEQ ID NO: 1750363 - RNA, 19 nt, Homo sapiens
  misc_RNA (1)...(19): siRNA sense strand
gagaaccugcaguccuuua

SEQ ID NO: 1750364 - RNA, 19 nt, Homo sapiens
  misc_RNA (1)...(19): siRNA sense strand
ccgcaggcuuggcaucuuu

SEQ ID NO: 1750365 - RNA, 19 nt, Homo sapiens
  misc_RNA (1)...(19): siRNA sense strand
ccuggugguuuguguauga

SEQ ID NO: 1750366 - RNA, 19 nt, Homo sapiens
  misc_RNA (1)...(19): siRNA sense strand
gaagugcuccgaagacaac

SEQ ID NO: 1750367 - RNA, 19 nt, Homo sapiens
  misc_RNA (1)...(19): siRNA sense strand
uggagaaccugcaguccuu

SEQ ID NO: 1750368 - RNA, 19 nt, Homo sapiens
  misc_RNA (1)...(19): siRNA sense strand
cagagauggugcugucaga

SEQ ID NO: 1750369 - RNA, 19 nt, Homo sapiens
  misc_RNA (1)...(19): siRNA sense strand
agauggugcugucagauga

SEQ ID NO: 1750370 - RNA, 19 nt, Homo sapiens
  misc_RNA (1)...(19): siRNA sense strand
uaccucaucuccuccaaug

SEQ ID NO: 1750371 - RNA, 19 nt, Homo sapiens
  misc_RNA (1)...(19): siRNA sense strand
gagauggugcugucagaug

SEQ ID NO: 1750372 - RNA, 19 nt, Homo sapiens
  misc_RNA (1)...(19): siRNA sense strand
caaggaaggaggacaugga

SEQ ID NO: 1750373 - RNA, 19 nt, Homo sapiens
  misc_RNA (1)...(19): siRNA sense strand
gcaccagcccugaagaaag

SEQ ID NO: 1750374 - RNA, 19 nt, Homo sapiens
  misc_RNA (1)...(19): siRNA sense strand
ccacggcucugggcuucaa

SEQ ID NO: 1750375 - RNA, 19 nt, Homo sapiens
  misc_RNA (1)...(19): siRNA sense strand
ccucaucuccuccaauguu

SEQ ID NO: 1750376 - RNA, 19 nt, Homo sapiens
  misc_RNA (1)...(19): siRNA sense strand
gcguggcgcugucuacuac

SEQ ID NO: 1750377 - RNA, 19 nt, Homo sapiens
  misc_RNA (1)...(19): siRNA sense strand
ggaguucacccuggaguuc

SEQ ID NO: 1750378 - RNA, 19 nt, Homo sapiens
  misc_RNA (1)...(19): siRNA sense strand
agacggaccugaccuucgu

SEQ ID NO: 1750379 - RNA, 19 nt, Homo sapiens
  misc_RNA (1)...(19): siRNA sense strand
ccgagaagcccucaucagu

SEQ ID NO: 1750380 - RNA, 19 nt, Homo sapiens
  misc_RNA (1)...(19): siRNA sense strand
gcgcaagcuggacgaguuu

SEQ ID NO: 1750381 - RNA, 19 nt, Homo sapiens
  misc_RNA (1)...(19): siRNA sense strand
caccagcccugaagaaagc

SEQ ID NO: 1750382 - RNA, 19 nt, Homo sapiens
  misc_RNA (1)...(19): siRNA sense strand
ggccagggcagcaagaugu

SEQ ID NO: 1750383 - RNA, 19 nt, Homo sapiens
  misc_RNA (1)...(19): siRNA sense strand
ggaguaugagccugagaug

SEQ ID NO: 1750384 - RNA, 19 nt, Homo sapiens
  misc_RNA (1)...(19): siRNA sense strand
gcucaccaccaaucagaug

SEQ ID NO: 1750385 - RNA, 19 nt, Homo sapiens
  misc_RNA (1)...(19): siRNA sense strand
ugaaccaggacaagaagaa

SEQ ID NO: 1750386 - RNA, 19 nt, Homo sapiens
  misc_RNA (1)...(19): siRNA sense strand
gggcugcaccucagucauc

SEQ ID NO: 1750387 - RNA, 19 nt, Homo sapiens
  misc_RNA (1)...(19): siRNA sense strand
ggugguggugcuccagaua

SEQ ID NO: 1750388 - RNA, 19 nt, Homo sapiens
  misc_RNA (1)...(19): siRNA sense strand
caucgacugugagguguuc

SEQ ID NO: 1750389 - RNA, 19 nt, Homo sapiens
  misc_RNA (1)...(19): siRNA sense strand
gcaucuuccucacggcaau

SEQ ID NO: 1750390 - RNA, 19 nt, Homo sapiens
  misc_RNA (1)...(19): siRNA sense strand
uggcugcccuugucuccuu

SEQ ID NO: 1750391 - RNA, 19 nt, Homo sapiens
  misc_RNA (1)...(19): siRNA sense strand
caucucggguaccacguau

SEQ ID NO: 1750392 - RNA, 19 nt, Homo sapiens
  misc_RNA (1)...(19): siRNA sense strand
gcacgcucaccaccaauca

SEQ ID NO: 1750393 - RNA, 19 nt, Homo sapiens
  misc_RNA (1)...(19): siRNA sense strand
gcugucuacuacuucaaga

SEQ ID NO: 1750394 - RNA, 19 nt, Homo sapiens
  misc_RNA (1)...(19): siRNA sense strand
caauaucacaucgggcaaa

SEQ ID NO: 1750395 - RNA, 19 nt, Homo sapiens
  misc_RNA (1)...(19): siRNA sense strand
gcaguccuuuaacgagauc

SEQ ID NO: 1750396 - RNA, 19 nt, Homo sapiens
  misc_RNA (1)...(19): siRNA sense strand
gcgcauggcacgcaagaac

SEQ ID NO: 1750397 - RNA, 19 nt, Homo sapiens
  misc_RNA (1)...(19): siRNA sense strand
ucuaccagcugaggaacuu

SEQ ID NO: 1750398 - RNA, 19 nt, Homo sapiens
  misc_RNA (1)...(19): siRNA sense strand
ggagaaccugcaguccuuu

SEQ ID NO: 1750399 - RNA, 19 nt, Homo sapiens
  misc_RNA (1)...(19): siRNA sense strand
ggaccucacaucaacuucu

SEQ ID NO: 1750400 - RNA, 19 nt, Homo sapiens
  misc_RNA (1)...(19): siRNA sense strand
gaaccugcaguccuuuaac

SEQ ID NO: 1750401 - RNA, 19 nt, Homo sapiens
  misc_RNA (1)...(19): siRNA sense strand
caucaacaucggccacuuc

SEQ ID NO: 1750402 - RNA, 19 nt, Homo sapiens
  misc_RNA (1)...(19): siRNA sense strand
agauaucucugccugucau

SEQ ID NO: 1750403 - RNA, 19 nt, Homo sapiens
  misc_RNA (1)...(19): siRNA sense strand
ccaccaccauggccuuguc

SEQ ID NO: 1750404 - RNA, 19 nt, Homo sapiens
  misc_RNA (1)...(19): siRNA sense strand
cgaggucgucugcaucuuc

SEQ ID NO: 1750405 - RNA, 19 nt, Homo sapiens
  misc_RNA (1)...(19): siRNA sense strand
ggaacgcaacgccgagagu

SEQ ID NO: 1750406 - RNA, 19 nt, Homo sapiens
  misc_RNA (1)...(19): siRNA sense strand
gggagcuggugcuggaaca

SEQ ID NO: 1750407 - RNA, 19 nt, Homo sapiens
  misc_RNA (1)...(19): siRNA sense strand
ggcagcaagauguuuguga

SEQ ID NO: 1750408 - RNA, 19 nt, Homo sapiens
  misc_RNA (1)...(19): siRNA sense strand
gaaauccauguccguguac

SEQ ID NO: 1750409 - RNA, 19 nt, Homo sapiens
  misc_RNA (1)...(19): siRNA sense strand
ggccaaggguguguaugag

SEQ ID NO: 1750410 - RNA, 19 nt, Homo sapiens
  misc_RNA (1)...(19): siRNA sense strand
cggcugucaucacuacaug

SEQ ID NO: 1750411 - RNA, 19 nt, Homo sapiens
  misc_RNA (1)...(19): siRNA sense strand
gccaaggguguguaugaga

SEQ ID NO: 1750412 - RNA, 19 nt, Homo sapiens
  misc_RNA (1)...(19): siRNA sense strand
gcuggcucuucuuccgaua

SEQ ID NO: 1750413 - RNA, 19 nt, Homo sapiens
  misc_RNA (1)...(19): siRNA sense strand
gagcugugaaccaggacaa

SEQ ID NO: 1750414 - RNA, 19 nt, Homo sapiens
  misc_RNA (1)...(19): siRNA sense strand
cagcaaguuugugcaguac

SEQ ID NO: 1750415 - RNA, 19 nt, Homo sapiens
  misc_RNA (1)...(19): siRNA sense strand
agcgcaagcuggacgaguu

SEQ ID NO: 1750416 - RNA, 19 nt, Homo sapiens
  misc_RNA (1)...(19): siRNA sense strand
caagauccggagccagaug

SEQ ID NO: 1750417 - RNA, 19 nt, Homo sapiens
  misc_RNA (1)...(19): siRNA sense strand
gcugugaaccaggacaaga

SEQ ID NO: 1750418 - RNA, 19 nt, Homo sapiens
  misc_RNA (1)...(19): siRNA sense strand
guggcgcugucuacuacuu

SEQ ID NO: 1750419 - RNA, 19 nt, Homo sapiens
  misc_RNA (1)...(19): siRNA sense strand
ccaucgaggcccugaagga

SEQ ID NO: 1750420 - RNA, 19 nt, Homo sapiens
  misc_RNA (1)...(19): siRNA sense strand
cgagcuggcgccuguaaca

SEQ ID NO: 1750421 - RNA, 19 nt, Homo sapiens
  misc_RNA (1)...(19): siRNA sense strand
cggagacagcucugacuug

SEQ ID NO: 1750422 - RNA, 19 nt, Homo sapiens
  misc_RNA (1)...(19): siRNA sense strand
ggaaauccauguccgugua

SEQ ID NO: 1750423 - RNA, 19 nt, Homo sapiens
  misc_RNA (1)...(19): siRNA sense strand
ccaacgagcucccgaguga

SEQ ID NO: 1750424 - RNA, 19 nt, Homo sapiens
  misc_RNA (1)...(19): siRNA sense strand
gcagcaaguuugugcagua

SEQ ID NO: 1750425 - RNA, 19 nt, Homo sapiens
  misc_RNA (1)...(19): siRNA sense strand
gcagcaagauguuugugaa

SEQ ID NO: 1750426 - RNA, 19 nt, Homo sapiens
  misc_RNA (1)...(19): siRNA sense strand
gaugcgggcuccugccuuu

SEQ ID NO: 1750427 - RNA, 19 nt, Homo sapiens
  misc_RNA (1)...(19): siRNA sense strand
gagcagauccuggcaaaga

SEQ ID NO: 1750428 - RNA, 19 nt, Homo sapiens
  misc_RNA (1)...(19): siRNA sense strand
ugacuugccugguggagaa

SEQ ID NO: 1750429 - RNA, 19 nt, Homo sapiens
  misc_RNA (1)...(19): siRNA sense strand
ccaaggguguguaugagaa

SEQ ID NO: 1750430 - RNA, 19 nt, Homo sapiens
  misc_RNA (1)...(19): siRNA sense strand
gaccucacaucaacuucua

SEQ ID NO: 1750431 - RNA, 19 nt, Homo sapiens
  misc_RNA (1)...(19): siRNA sense strand
gggagcagauccuggcaaa

SEQ ID NO: 1750432 - RNA, 19 nt, Homo sapiens
  misc_RNA (1)...(19): siRNA sense strand
gcaaguuugugcaguacga

SEQ ID NO: 1750433 - RNA, 19 nt, Homo sapiens
  misc_RNA (1)...(19): siRNA sense strand
gcaagggcgugcagaggau

SEQ ID NO: 1750434 - RNA, 19 nt, Homo sapiens
  misc_RNA (1)...(19): siRNA sense strand
ggacgacugcagcaaguuu

SEQ ID NO: 1750435 - RNA, 19 nt, Homo sapiens
  misc_RNA (1)...(19): siRNA sense strand
guaacacggucaucaagca

SEQ ID NO: 1750436 - RNA, 19 nt, Homo sapiens
  misc_RNA (1)...(19): siRNA sense strand
gggugaaccuggugacaga

SEQ ID NO: 1750437 - RNA, 19 nt, Homo sapiens
  misc_RNA (1)...(19): siRNA sense strand
uuaacgagaucacugcuau

SEQ ID NO: 1750438 - RNA, 19 nt, Homo sapiens
  misc_RNA (1)...(19): siRNA sense strand
acacggagcugggcaagau

SEQ ID NO: 1750439 - RNA, 19 nt, Homo sapiens
  misc_RNA (1)...(19): siRNA sense strand
cgagaucacugcuaugacu

SEQ ID NO: 1750440 - RNA, 19 nt, Homo sapiens
  misc_RNA (1)...(19): siRNA sense strand
ucgaggcccugaaggagua

SEQ ID NO: 1750441 - RNA, 19 nt, Homo sapiens
  misc_RNA (1)...(19): siRNA sense strand
acagcaacaugaagcaauu

SEQ ID NO: 1750442 - RNA, 19 nt, Homo sapiens
  misc_RNA (1)...(19): siRNA sense strand
gagaaccugcaguccuuua

SEQ ID NO: 1750443 - RNA, 19 nt, Homo sapiens
  misc_RNA (1)...(19): siRNA sense strand
ccgcaggcuuggcaucuuu

SEQ ID NO: 1750444 - RNA, 19 nt, Homo sapiens
  misc_RNA (1)...(19): siRNA sense strand
ccuggugguuuguguauga

SEQ ID NO: 1750445 - RNA, 19 nt, Homo sapiens
  misc_RNA (1)...(19): siRNA sense strand
gaagugcuccgaagacaac

SEQ ID NO: 1750446 - RNA, 19 nt, Homo sapiens
  misc_RNA (1)...(19): siRNA sense strand
uggagaaccugcaguccuu

SEQ ID NO: 1750447 - RNA, 19 nt, Homo sapiens
  misc_RNA (1)...(19): siRNA sense strand
cagagauggugcugucaga

SEQ ID NO: 1750448 - RNA, 19 nt, Homo sapiens
  misc_RNA (1)...(19): siRNA sense strand
agauggugcugucagauga

SEQ ID NO: 1750449 - RNA, 19 nt, Homo sapiens
  misc_RNA (1)...(19): siRNA sense strand
uaccucaucuccuccaaug

SEQ ID NO: 1750450 - RNA, 19 nt, Homo sapiens
  misc_RNA (1)...(19): siRNA sense strand
gagauggugcugucagaug

SEQ ID NO: 1750451 - RNA, 19 nt, Homo sapiens
  misc_RNA (1)...(19): siRNA sense strand
caaggaaggaggacaugga

SEQ ID NO: 1750452 - RNA, 19 nt, Homo sapiens
  misc_RNA (1)...(19): siRNA sense strand
gcaccagcccugaagaaag

SEQ ID NO: 1750453 - RNA, 19 nt, Homo sapiens
  misc_RNA (1)...(19): siRNA sense strand
ccacggcucugggcuucaa

SEQ ID NO: 1750454 - RNA, 19 nt, Homo sapiens
  misc_RNA (1)...(19): siRNA sense strand
ccucaucuccuccaauguu

SEQ ID NO: 1750455 - RNA, 19 nt, Homo sapiens
  misc_RNA (1)...(19): siRNA sense strand
gcguggcgcugucuacuac

SEQ ID NO: 1750456 - RNA, 19 nt, Homo sapiens
  misc_RNA (1)...(19): siRNA sense strand
ggaguucacccuggaguuc

SEQ ID NO: 1750457 - RNA, 19 nt, Homo sapiens
  misc_RNA (1)...(19): siRNA sense strand
agacggaccugaccuucgu

SEQ ID NO: 1750458 - RNA, 19 nt, Homo sapiens
  misc_RNA (1)...(19): siRNA sense strand
ccgagaagcccucaucagu

SEQ ID NO: 1750459 - RNA, 19 nt, Homo sapiens
  misc_RNA (1)...(19): siRNA sense strand
gcgcaagcuggacgaguuu

SEQ ID NO: 1750460 - RNA, 19 nt, Homo sapiens
  misc_RNA (1)...(19): siRNA sense strand
caccagcccugaagaaagc

SEQ ID NO: 1750461 - RNA, 19 nt, Homo sapiens
  misc_RNA (1)...(19): siRNA sense strand
ggccagggcagcaagaugu

SEQ ID NO: 1750462 - RNA, 19 nt, Homo sapiens
  misc_RNA (1)...(19): siRNA sense strand
ggaguaugagccugagaug

SEQ ID NO: 1750463 - RNA, 19 nt, Homo sapiens
  misc_RNA (1)...(19): siRNA sense strand
gcucaccaccaaucagaug

SEQ ID NO: 1750464 - RNA, 19 nt, Homo sapiens
  misc_RNA (1)...(19): siRNA sense strand
ugaaccaggacaagaagaa

SEQ ID NO: 1750465 - RNA, 19 nt, Homo sapiens
  misc_RNA (1)...(19): siRNA sense strand
gggcugcaccucagucauc

SEQ ID NO: 1750466 - RNA, 19 nt, Homo sapiens
  misc_RNA (1)...(19): siRNA sense strand
ggugguggugcuccagaua

SEQ ID NO: 1750467 - RNA, 19 nt, Homo sapiens
  misc_RNA (1)...(19): siRNA sense strand
caucgacugugagguguuc

SEQ ID NO: 1750468 - RNA, 19 nt, Homo sapiens
  misc_RNA (1)...(19): siRNA sense strand
gcaucuuccucacggcaau

SEQ ID NO: 1750469 - RNA, 19 nt, Homo sapiens
  misc_RNA (1)...(19): siRNA sense strand
uggcugcccuugucuccuu

SEQ ID NO: 1750470 - RNA, 19 nt, Homo sapiens
  misc_RNA (1)...(19): siRNA sense strand
caucucggguaccacguau

SEQ ID NO: 1750471 - RNA, 19 nt, Homo sapiens
  misc_RNA (1)...(19): siRNA sense strand
gcacgcucaccaccaauca

SEQ ID NO: 1750472 - RNA, 19 nt, Homo sapiens
  misc_RNA (1)...(19): siRNA sense strand
gcugucuacuacuucaaga

SEQ ID NO: 1750473 - RNA, 19 nt, Homo sapiens
  misc_RNA (1)...(19): siRNA sense strand
caauaucacaucgggcaaa

SEQ ID NO: 1750474 - RNA, 19 nt, Homo sapiens
  misc_RNA (1)...(19): siRNA sense strand
gcaguccuuuaacgagauc

SEQ ID NO: 1750475 - RNA, 19 nt, Homo sapiens
  misc_RNA (1)...(19): siRNA sense strand
gcgcauggcacgcaagaac

SEQ ID NO: 1750476 - RNA, 19 nt, Homo sapiens
  misc_RNA (1)...(19): siRNA sense strand
ucuaccagcugaggaacuu

SEQ ID NO: 1750477 - RNA, 19 nt, Homo sapiens
  misc_RNA (1)...(19): siRNA sense strand
ggagaaccugcaguccuuu

SEQ ID NO: 1750478 - RNA, 19 nt, Homo sapiens
  misc_RNA (1)...(19): siRNA sense strand
ggaccucacaucaacuucu

SEQ ID NO: 1750479 - RNA, 19 nt, Homo sapiens
  misc_RNA (1)...(19): siRNA sense strand
gaaccugcaguccuuuaac

SEQ ID NO: 1750480 - RNA, 19 nt, Homo sapiens
  misc_RNA (1)...(19): siRNA sense strand
caucaacaucggccacuuc

SEQ ID NO: 1750481 - RNA, 19 nt, Homo sapiens
  misc_RNA (1)...(19): siRNA sense strand
agauaucucugccugucau

SEQ ID NO: 1750482 - RNA, 19 nt, Homo sapiens
  misc_RNA (1)...(19): siRNA sense strand
ccaccaccauggccuuguc

SEQ ID NO: 1750483 - RNA, 19 nt, Homo sapiens
  misc_RNA (1)...(19): siRNA sense strand
cgaggucgucugcaucuuc

SEQ ID NO: 1750484 - RNA, 19 nt, Homo sapiens
  misc_RNA (1)...(19): siRNA sense strand
ggaacgcaacgccgagagu

SEQ ID NO: 1750485 - RNA, 19 nt, Homo sapiens
  misc_RNA (1)...(19): siRNA sense strand
gggagcuggugcuggaaca

SEQ ID NO: 1750486 - RNA, 19 nt, Homo sapiens
  misc_RNA (1)...(19): siRNA sense strand
ggcagcaagauguuuguga

SEQ ID NO: 1750487 - RNA, 19 nt, Homo sapiens
  misc_RNA (1)...(19): siRNA sense strand
gaaauccauguccguguac

SEQ ID NO: 1750488 - RNA, 19 nt, Homo sapiens
  misc_RNA (1)...(19): siRNA sense strand
ggccaaggguguguaugag

SEQ ID NO: 1750489 - RNA, 19 nt, Homo sapiens
  misc_RNA (1)...(19): siRNA sense strand
cggcugucaucacuacaug

SEQ ID NO: 1750490 - RNA, 19 nt, Homo sapiens
  misc_RNA (1)...(19): siRNA sense strand
gccaaggguguguaugaga

SEQ ID NO: 1750491 - RNA, 19 nt, Homo sapiens
  misc_RNA (1)...(19): siRNA sense strand
gcuggcucuucuuccgaua

SEQ ID NO: 1750492 - RNA, 19 nt, Homo sapiens
  misc_RNA (1)...(19): siRNA sense strand
gagcugugaaccaggacaa

SEQ ID NO: 1750493 - RNA, 19 nt, Homo sapiens
  misc_RNA (1)...(19): siRNA sense strand
cagcaaguuugugcaguac

SEQ ID NO: 1750494 - RNA, 19 nt, Homo sapiens
  misc_RNA (1)...(19): siRNA sense strand
agcgcaagcuggacgaguu

SEQ ID NO: 1750495 - RNA, 19 nt, Homo sapiens
  misc_RNA (1)...(19): siRNA sense strand
caagauccggagccagaug

SEQ ID NO: 1750496 - RNA, 19 nt, Homo sapiens
  misc_RNA (1)...(19): siRNA sense strand
gcugugaaccaggacaaga

SEQ ID NO: 1750497 - RNA, 19 nt, Homo sapiens
  misc_RNA (1)...(19): siRNA sense strand
guggcgcugucuacuacuu

SEQ ID NO: 1750498 - RNA, 19 nt, Homo sapiens
  misc_RNA (1)...(19): siRNA sense strand
ccaucgaggcccugaagga

SEQ ID NO: 1750499 - RNA, 19 nt, Homo sapiens
  misc_RNA (1)...(19): siRNA sense strand
cgagcuggcgccuguaaca

SEQ ID NO: 1750500 - RNA, 19 nt, Homo sapiens
  misc_RNA (1)...(19): siRNA sense strand
cggagacagcucugacuug

SEQ ID NO: 1750501 - RNA, 19 nt, Homo sapiens
  misc_RNA (1)...(19): siRNA sense strand
ggaaauccauguccgugua

SEQ ID NO: 1750502 - RNA, 19 nt, Homo sapiens
  misc_RNA (1)...(19): siRNA sense strand
ccaacgagcucccgaguga

SEQ ID NO: 1750503 - RNA, 19 nt, Homo sapiens
  misc_RNA (1)...(19): siRNA sense strand
gcagcaaguuugugcagua

SEQ ID NO: 1750504 - RNA, 19 nt, Homo sapiens
  misc_RNA (1)...(19): siRNA sense strand
gcagcaagauguuugugaa

SEQ ID NO: 1750505 - RNA, 19 nt, Homo sapiens
  misc_RNA (1)...(19): siRNA sense strand
gaugcgggcuccugccuuu

SEQ ID NO: 1750506 - RNA, 19 nt, Homo sapiens
  misc_RNA (1)...(19): siRNA sense strand
gagcagauccuggcaaaga

SEQ ID NO: 1750507 - RNA, 19 nt, Homo sapiens
  misc_RNA (1)...(19): siRNA sense strand
ugacuugccugguggagaa

SEQ ID NO: 1750508 - RNA, 19 nt, Homo sapiens
  misc_RNA (1)...(19): siRNA sense strand
ccaaggguguguaugagaa

SEQ ID NO: 1750509 - RNA, 19 nt, Homo sapiens
  misc_RNA (1)...(19): siRNA sense strand
gaccucacaucaacuucua

SEQ ID NO: 1750510 - RNA, 19 nt, Homo sapiens
  misc_RNA (1)...(19): siRNA sense strand
gggagcagauccuggcaaa

SEQ ID NO: 1750511 - RNA, 19 nt, Homo sapiens
  misc_RNA (1)...(19): siRNA sense strand
gcaaguuugugcaguacga

SEQ ID NO: 1750512 - RNA, 19 nt, Homo sapiens
  misc_RNA (1)...(19): siRNA sense strand
gcaagggcgugcagaggau

SEQ ID NO: 1750513 - RNA, 19 nt, Homo sapiens
  misc_RNA (1)...(19): siRNA sense strand
ggacgacugcagcaaguuu

SEQ ID NO: 1750514 - RNA, 19 nt, Homo sapiens
  misc_RNA (1)...(19): siRNA sense strand
guaacacggucaucaagca

SEQ ID NO: 1750515 - RNA, 19 nt, Homo sapiens
  misc_RNA (1)...(19): siRNA sense strand
gggugaaccuggugacaga

SEQ ID NO: 1750516 - RNA, 19 nt, Homo sapiens
  misc_RNA (1)...(19): siRNA sense strand
uuaacgagaucacugcuau

SEQ ID NO: 1750517 - RNA, 19 nt, Homo sapiens
  misc_RNA (1)...(19): siRNA sense strand
acacggagcugggcaagau

SEQ ID NO: 1750518 - RNA, 19 nt, Homo sapiens
  misc_RNA (1)...(19): siRNA sense strand
cgagaucacugcuaugacu

SEQ ID NO: 1750519 - RNA, 19 nt, Homo sapiens
  misc_RNA (1)...(19): siRNA sense strand
ucgaggcccugaaggagua

SEQ ID NO: 1750520 - RNA, 19 nt, Homo sapiens
  misc_RNA (1)...(19): siRNA sense strand
acagcaacaugaagcaauu

SEQ ID NO: 1750521 - RNA, 19 nt, Homo sapiens
  misc_RNA (1)...(19): siRNA sense strand
gagaaccugcaguccuuua

SEQ ID NO: 1750522 - RNA, 19 nt, Homo sapiens
  misc_RNA (1)...(19): siRNA sense strand
ccgcaggcuuggcaucuuu

SEQ ID NO: 1750523 - RNA, 19 nt, Homo sapiens
  misc_RNA (1)...(19): siRNA sense strand
ccuggugguuuguguauga

SEQ ID NO: 1750524 - RNA, 19 nt, Homo sapiens
  misc_RNA (1)...(19): siRNA sense strand
gaagugcuccgaagacaac

SEQ ID NO: 1750525 - RNA, 19 nt, Homo sapiens
  misc_RNA (1)...(19): siRNA sense strand
uggagaaccugcaguccuu

SEQ ID NO: 1750526 - RNA, 19 nt, Homo sapiens
  misc_RNA (1)...(19): siRNA sense strand
cagagauggugcugucaga

SEQ ID NO: 1750527 - RNA, 19 nt, Homo sapiens
  misc_RNA (1)...(19): siRNA sense strand
agauggugcugucagauga

SEQ ID NO: 1750528 - RNA, 19 nt, Homo sapiens
  misc_RNA (1)...(19): siRNA sense strand
uaccucaucuccuccaaug

SEQ ID NO: 1750529 - RNA, 19 nt, Homo sapiens
  misc_RNA (1)...(19): siRNA sense strand
gagauggugcugucagaug

SEQ ID NO: 1750530 - RNA, 19 nt, Homo sapiens
  misc_RNA (1)...(19): siRNA sense strand
caaggaaggaggacaugga

SEQ ID NO: 1750531 - RNA, 19 nt, Homo sapiens
  misc_RNA (1)...(19): siRNA sense strand
gcaccagcccugaagaaag

SEQ ID NO: 1750532 - RNA, 19 nt, Homo sapiens
  misc_RNA (1)...(19): siRNA sense strand
ccacggcucugggcuucaa

SEQ ID NO: 1750533 - RNA, 19 nt, Homo sapiens
  misc_RNA (1)...(19): siRNA sense strand
ccucaucuccuccaauguu

SEQ ID NO: 1750534 - RNA, 19 nt, Homo sapiens
  misc_RNA (1)...(19): siRNA sense strand
gcguggcgcugucuacuac

SEQ ID NO: 1750535 - RNA, 19 nt, Homo sapiens
  misc_RNA (1)...(19): siRNA sense strand
ggaguucacccuggaguuc

SEQ ID NO: 1750536 - RNA, 19 nt, Homo sapiens
  misc_RNA (1)...(19): siRNA sense strand
agacggaccugaccuucgu

SEQ ID NO: 1750537 - RNA, 19 nt, Homo sapiens
  misc_RNA (1)...(19): siRNA sense strand
ccgagaagcccucaucagu

SEQ ID NO: 1750538 - RNA, 19 nt, Homo sapiens
  misc_RNA (1)...(19): siRNA sense strand
gcgcaagcuggacgaguuu

SEQ ID NO: 1750539 - RNA, 19 nt, Homo sapiens
  misc_RNA (1)...(19): siRNA sense strand
caccagcccugaagaaagc

SEQ ID NO: 1750540 - RNA, 19 nt, Homo sapiens
  misc_RNA (1)...(19): siRNA sense strand
ggccagggcagcaagaugu

SEQ ID NO: 1750541 - RNA, 19 nt, Homo sapiens
  misc_RNA (1)...(19): siRNA sense strand
ggaguaugagccugagaug

SEQ ID NO: 1750542 - RNA, 19 nt, Homo sapiens
  misc_RNA (1)...(19): siRNA sense strand
gcucaccaccaaucagaug

SEQ ID NO: 1750543 - RNA, 19 nt, Homo sapiens
  misc_RNA (1)...(19): siRNA sense strand
ugaaccaggacaagaagaa

SEQ ID NO: 1750544 - RNA, 19 nt, Homo sapiens
  misc_RNA (1)...(19): siRNA sense strand
gggcugcaccucagucauc

SEQ ID NO: 1750545 - RNA, 19 nt, Homo sapiens
  misc_RNA (1)...(19): siRNA sense strand
ggugguggugcuccagaua

SEQ ID NO: 1750546 - RNA, 19 nt, Homo sapiens
  misc_RNA (1)...(19): siRNA sense strand
caucgacugugagguguuc

SEQ ID NO: 1750547 - RNA, 19 nt, Homo sapiens
  misc_RNA (1)...(19): siRNA sense strand
gcaucuuccucacggcaau

SEQ ID NO: 1750548 - RNA, 19 nt, Homo sapiens
  misc_RNA (1)...(19): siRNA sense strand
uggcugcccuugucuccuu

SEQ ID NO: 1750549 - RNA, 19 nt, Homo sapiens
  misc_RNA (1)...(19): siRNA sense strand
caucucggguaccacguau

SEQ ID NO: 1750550 - RNA, 19 nt, Homo sapiens
  misc_RNA (1)...(19): siRNA sense strand
gcacgcucaccaccaauca

SEQ ID NO: 1750551 - RNA, 19 nt, Homo sapiens
  misc_RNA (1)...(19): siRNA sense strand
gcugucuacuacuucaaga

SEQ ID NO: 1750552 - RNA, 19 nt, Homo sapiens
  misc_RNA (1)...(19): siRNA sense strand
caauaucacaucgggcaaa

SEQ ID NO: 1750553 - RNA, 19 nt, Homo sapiens
  misc_RNA (1)...(19): siRNA sense strand
gcaguccuuuaacgagauc

SEQ ID NO: 1750554 - RNA, 19 nt, Homo sapiens
  misc_RNA (1)...(19): siRNA sense strand
gcgcauggcacgcaagaac

SEQ ID NO: 1750555 - RNA, 19 nt, Homo sapiens
  misc_RNA (1)...(19): siRNA sense strand
ucuaccagcugaggaacuu

SEQ ID NO: 1750556 - RNA, 19 nt, Homo sapiens
  misc_RNA (1)...(19): siRNA sense strand
ggagaaccugcaguccuuu

SEQ ID NO: 1750557 - RNA, 19 nt, Homo sapiens
  misc_RNA (1)...(19): siRNA sense strand
ggaccucacaucaacuucu

SEQ ID NO: 1750558 - RNA, 19 nt, Homo sapiens
  misc_RNA (1)...(19): siRNA sense strand
gaaccugcaguccuuuaac

SEQ ID NO: 1750559 - RNA, 19 nt, Homo sapiens
  misc_RNA (1)...(19): siRNA sense strand
caucaacaucggccacuuc

SEQ ID NO: 1750560 - RNA, 19 nt, Homo sapiens
  misc_RNA (1)...(19): siRNA sense strand
agauaucucugccugucau

SEQ ID NO: 1750561 - RNA, 19 nt, Homo sapiens
  misc_RNA (1)...(19): siRNA sense strand
ccaccaccauggccuuguc

SEQ ID NO: 1750562 - RNA, 19 nt, Homo sapiens
  misc_RNA (1)...(19): siRNA sense strand
cgaggucgucugcaucuuc

SEQ ID NO: 1750563 - RNA, 19 nt, Homo sapiens
  misc_RNA (1)...(19): siRNA sense strand
ggaacgcaacgccgagagu

SEQ ID NO: 1750564 - RNA, 19 nt, Homo sapiens
  misc_RNA (1)...(19): siRNA sense strand
gggagcuggugcuggaaca

SEQ ID NO: 1750565 - RNA, 19 nt, Homo sapiens
  misc_RNA (1)...(19): siRNA sense strand
ggcagcaagauguuuguga

SEQ ID NO: 1750566 - RNA, 19 nt, Homo sapiens
  misc_RNA (1)...(19): siRNA sense strand
gaaauccauguccguguac

SEQ ID NO: 1750567 - RNA, 19 nt, Homo sapiens
  misc_RNA (1)...(19): siRNA sense strand
ggccaaggguguguaugag

SEQ ID NO: 1750568 - RNA, 19 nt, Homo sapiens
  misc_RNA (1)...(19): siRNA sense strand
cggcugucaucacuacaug

SEQ ID NO: 1750569 - RNA, 19 nt, Homo sapiens
  misc_RNA (1)...(19): siRNA sense strand
gccaaggguguguaugaga

SEQ ID NO: 1750570 - RNA, 19 nt, Homo sapiens
  misc_RNA (1)...(19): siRNA sense strand
gcuggcucuucuuccgaua

SEQ ID NO: 1750571 - RNA, 19 nt, Homo sapiens
  misc_RNA (1)...(19): siRNA sense strand
gagcugugaaccaggacaa

SEQ ID NO: 1750572 - RNA, 19 nt, Homo sapiens
  misc_RNA (1)...(19): siRNA sense strand
cagcaaguuugugcaguac

SEQ ID NO: 1750573 - RNA, 19 nt, Homo sapiens
  misc_RNA (1)...(19): siRNA sense strand
agcgcaagcuggacgaguu

SEQ ID NO: 1750574 - RNA, 19 nt, Homo sapiens
  misc_RNA (1)...(19): siRNA sense strand
caagauccggagccagaug

SEQ ID NO: 1750575 - RNA, 19 nt, Homo sapiens
  misc_RNA (1)...(19): siRNA sense strand
gcugugaaccaggacaaga

SEQ ID NO: 1750576 - RNA, 19 nt, Homo sapiens
  misc_RNA (1)...(19): siRNA sense strand
guggcgcugucuacuacuu

SEQ ID NO: 1750577 - RNA, 19 nt, Homo sapiens
  misc_RNA (1)...(19): siRNA sense strand
ccaucgaggcccugaagga

SEQ ID NO: 1750578 - RNA, 19 nt, Homo sapiens
  misc_RNA (1)...(19): siRNA sense strand
cgagcuggcgccuguaaca

SEQ ID NO: 1750579 - RNA, 19 nt, Homo sapiens
  misc_RNA (1)...(19): siRNA sense strand
cggagacagcucugacuug

SEQ ID NO: 1750580 - RNA, 19 nt, Homo sapiens
  misc_RNA (1)...(19): siRNA sense strand
ggaaauccauguccgugua

SEQ ID NO: 1750581 - RNA, 19 nt, Homo sapiens
  misc_RNA (1)...(19): siRNA sense strand
ccaacgagcucccgaguga

SEQ ID NO: 1750582 - RNA, 19 nt, Homo sapiens
  misc_RNA (1)...(19): siRNA sense strand
gcagcaaguuugugcagua

SEQ ID NO: 1750583 - RNA, 19 nt, Homo sapiens
  misc_RNA (1)...(19): siRNA sense strand
gcagcaagauguuugugaa

SEQ ID NO: 1750584 - RNA, 19 nt, Homo sapiens
  misc_RNA (1)...(19): siRNA sense strand
gaugcgggcuccugccuuu

SEQ ID NO: 1750585 - RNA, 19 nt, Homo sapiens
  misc_RNA (1)...(19): siRNA sense strand
gagcagauccuggcaaaga

SEQ ID NO: 1750586 - RNA, 19 nt, Homo sapiens
  misc_RNA (1)...(19): siRNA sense strand
ugacuugccugguggagaa

SEQ ID NO: 1750587 - RNA, 19 nt, Homo sapiens
  misc_RNA (1)...(19): siRNA sense strand
ccaaggguguguaugagaa

SEQ ID NO: 1750588 - RNA, 19 nt, Homo sapiens
  misc_RNA (1)...(19): siRNA sense strand
gaccucacaucaacuucua

SEQ ID NO: 1750589 - RNA, 19 nt, Homo sapiens
  misc_RNA (1)...(19): siRNA sense strand
gggagcagauccuggcaaa

SEQ ID NO: 1750590 - RNA, 19 nt, Homo sapiens
  misc_RNA (1)...(19): siRNA sense strand
gcaaguuugugcaguacga

SEQ ID NO: 1750591 - RNA, 19 nt, Homo sapiens
  misc_RNA (1)...(19): siRNA sense strand
gcaagggcgugcagaggau

SEQ ID NO: 1750592 - RNA, 19 nt, Homo sapiens
  misc_RNA (1)...(19): siRNA sense strand
ggacgacugcagcaaguuu

SEQ ID NO: 1750593 - RNA, 19 nt, Homo sapiens
  misc_RNA (1)...(19): siRNA sense strand
guaacacggucaucaagca

SEQ ID NO: 1750594 - RNA, 19 nt, Homo sapiens
  misc_RNA (1)...(19): siRNA sense strand
gggugaaccuggugacaga

SEQ ID NO: 1750595 - RNA, 19 nt, Homo sapiens
  misc_RNA (1)...(19): siRNA sense strand
uuaacgagaucacugcuau

SEQ ID NO: 1750596 - RNA, 19 nt, Homo sapiens
  misc_RNA (1)...(19): siRNA sense strand
acacggagcugggcaagau

SEQ ID NO: 1750597 - RNA, 19 nt, Homo sapiens
  misc_RNA (1)...(19): siRNA sense strand
cgagaucacugcuaugacu

SEQ ID NO: 1750598 - RNA, 19 nt, Homo sapiens
  misc_RNA (1)...(19): siRNA sense strand
ucgaggcccugaaggagua

SEQ ID NO: 1750599 - RNA, 19 nt, Homo sapiens
  misc_RNA (1)...(19): siRNA sense strand
acagcaacaugaagcaauu

SEQ ID NO: 1750600 - RNA, 19 nt, Homo sapiens
  misc_RNA (1)...(19): siRNA sense strand
gagaaccugcaguccuuua

SEQ ID NO: 1750601 - RNA, 19 nt, Homo sapiens
  misc_RNA (1)...(19): siRNA sense strand
gaagugagcgcugggaaca

SEQ ID NO: 1750602 - RNA, 19 nt, Homo sapiens
  misc_RNA (1)...(19): siRNA sense strand
ccgcaggcuuggcaucuuu

SEQ ID NO: 1750603 - RNA, 19 nt, Homo sapiens
  misc_RNA (1)...(19): siRNA sense strand
ccuggugguuuguguauga

SEQ ID NO: 1750604 - RNA, 19 nt, Homo sapiens
  misc_RNA (1)...(19): siRNA sense strand
gaagugcuccgaagacaac

SEQ ID NO: 1750605 - RNA, 19 nt, Homo sapiens
  misc_RNA (1)...(19): siRNA sense strand
uggagaaccugcaguccuu

SEQ ID NO: 1750606 - RNA, 19 nt, Homo sapiens
  misc_RNA (1)...(19): siRNA sense strand
cagagauggugcugucaga

SEQ ID NO: 1750607 - RNA, 19 nt, Homo sapiens
  misc_RNA (1)...(19): siRNA sense strand
agauggugcugucagauga

SEQ ID NO: 1750608 - RNA, 19 nt, Homo sapiens
  misc_RNA (1)...(19): siRNA sense strand
uaccucaucuccuccaaug

SEQ ID NO: 1750609 - RNA, 19 nt, Homo sapiens
  misc_RNA (1)...(19): siRNA sense strand
gagauggugcugucagaug

SEQ ID NO: 1750610 - RNA, 19 nt, Homo sapiens
  misc_RNA (1)...(19): siRNA sense strand
caaggaaggaggacaugga

SEQ ID NO: 1750611 - RNA, 19 nt, Homo sapiens
  misc_RNA (1)...(19): siRNA sense strand
gcaccagcccugaagaaag

SEQ ID NO: 1750612 - RNA, 19 nt, Homo sapiens
  misc_RNA (1)...(19): siRNA sense strand
ccacggcucugggcuucaa

SEQ ID NO: 1750613 - RNA, 19 nt, Homo sapiens
  misc_RNA (1)...(19): siRNA sense strand
ccucaucuccuccaauguu

SEQ ID NO: 1750614 - RNA, 19 nt, Homo sapiens
  misc_RNA (1)...(19): siRNA sense strand
gcguggcgcugucuacuac

SEQ ID NO: 1750615 - RNA, 19 nt, Homo sapiens
  misc_RNA (1)...(19): siRNA sense strand
ggaguucacccuggaguuc

SEQ ID NO: 1750616 - RNA, 19 nt, Homo sapiens
  misc_RNA (1)...(19): siRNA sense strand
agacggaccugaccuucgu

SEQ ID NO: 1750617 - RNA, 19 nt, Homo sapiens
  misc_RNA (1)...(19): siRNA sense strand
ccgagaagcccucaucagu

SEQ ID NO: 1750618 - RNA, 19 nt, Homo sapiens
  misc_RNA (1)...(19): siRNA sense strand
gcgcaagcuggacgaguuu

SEQ ID NO: 1750619 - RNA, 19 nt, Homo sapiens
  misc_RNA (1)...(19): siRNA sense strand
caccagcccugaagaaagc

SEQ ID NO: 1750620 - RNA, 19 nt, Homo sapiens
  misc_RNA (1)...(19): siRNA sense strand
ggccagggcagcaagaugu

SEQ ID NO: 1750621 - RNA, 19 nt, Homo sapiens
  misc_RNA (1)...(19): siRNA sense strand
ggaguaugagccugagaug

SEQ ID NO: 1750622 - RNA, 19 nt, Homo sapiens
  misc_RNA (1)...(19): siRNA sense strand
gcucaccaccaaucagaug

SEQ ID NO: 1750623 - RNA, 19 nt, Homo sapiens
  misc_RNA (1)...(19): siRNA sense strand
ugaaccaggacaagaagaa

SEQ ID NO: 1750624 - RNA, 19 nt, Homo sapiens
  misc_RNA (1)...(19): siRNA sense strand
gggcugcaccucagucauc

SEQ ID NO: 1750625 - RNA, 19 nt, Homo sapiens
  misc_RNA (1)...(19): siRNA sense strand
ggugguggugcuccagaua

SEQ ID NO: 1750626 - RNA, 19 nt, Homo sapiens
  misc_RNA (1)...(19): siRNA sense strand
caucgacugugagguguuc

SEQ ID NO: 1750627 - RNA, 19 nt, Homo sapiens
  misc_RNA (1)...(19): siRNA sense strand
gcaucuuccucacggcaau

SEQ ID NO: 1750628 - RNA, 19 nt, Homo sapiens
  misc_RNA (1)...(19): siRNA sense strand
uggcugcccuugucuccuu

SEQ ID NO: 1750629 - RNA, 19 nt, Homo sapiens
  misc_RNA (1)...(19): siRNA sense strand
caucucggguaccacguau

SEQ ID NO: 1750630 - RNA, 19 nt, Homo sapiens
  misc_RNA (1)...(19): siRNA sense strand
gcacgcucaccaccaauca

SEQ ID NO: 1750631 - RNA, 19 nt, Homo sapiens
  misc_RNA (1)...(19): siRNA sense strand
gcugucuacuacuucaaga

SEQ ID NO: 1750632 - RNA, 19 nt, Homo sapiens
  misc_RNA (1)...(19): siRNA sense strand
caauaucacaucgggcaaa

SEQ ID NO: 1750633 - RNA, 19 nt, Homo sapiens
  misc_RNA (1)...(19): siRNA sense strand
gcaguccuuuaacgagauc

SEQ ID NO: 1750634 - RNA, 19 nt, Homo sapiens
  misc_RNA (1)...(19): siRNA sense strand
gcgcauggcacgcaagaac

SEQ ID NO: 1750635 - RNA, 19 nt, Homo sapiens
  misc_RNA (1)...(19): siRNA sense strand
ucuaccagcugaggaacuu

SEQ ID NO: 1750636 - RNA, 19 nt, Homo sapiens
  misc_RNA (1)...(19): siRNA sense strand
agugagcgcugggaacaga

SEQ ID NO: 1750637 - RNA, 19 nt, Homo sapiens
  misc_RNA (1)...(19): siRNA sense strand
ggagaaccugcaguccuuu

SEQ ID NO: 1750638 - RNA, 19 nt, Homo sapiens
  misc_RNA (1)...(19): siRNA sense strand
ggaccucacaucaacuucu

SEQ ID NO: 1750639 - RNA, 19 nt, Homo sapiens
  misc_RNA (1)...(19): siRNA sense strand
gaaccugcaguccuuuaac

SEQ ID NO: 1750640 - RNA, 19 nt, Homo sapiens
  misc_RNA (1)...(19): siRNA sense strand
caucaacaucggccacuuc

SEQ ID NO: 1750641 - RNA, 19 nt, Homo sapiens
  misc_RNA (1)...(19): siRNA sense strand
agauaucucugccugucau

SEQ ID NO: 1750642 - RNA, 19 nt, Homo sapiens
  misc_RNA (1)...(19): siRNA sense strand
ccaccaccauggccuuguc

SEQ ID NO: 1750643 - RNA, 19 nt, Homo sapiens
  misc_RNA (1)...(19): siRNA sense strand
cgaggucgucugcaucuuc

SEQ ID NO: 1750644 - RNA, 19 nt, Homo sapiens
  misc_RNA (1)...(19): siRNA sense strand
ggaacgcaacgccgagagu

SEQ ID NO: 1750645 - RNA, 19 nt, Homo sapiens
  misc_RNA (1)...(19): siRNA sense strand
gggagcuggugcuggaaca

SEQ ID NO: 1750646 - RNA, 19 nt, Homo sapiens
  misc_RNA (1)...(19): siRNA sense strand
ggcagcaagauguuuguga

SEQ ID NO: 1750647 - RNA, 19 nt, Homo sapiens
  misc_RNA (1)...(19): siRNA sense strand
gaaauccauguccguguac

SEQ ID NO: 1750648 - RNA, 19 nt, Homo sapiens
  misc_RNA (1)...(19): siRNA sense strand
ggccaaggguguguaugag

SEQ ID NO: 1750649 - RNA, 19 nt, Homo sapiens
  misc_RNA (1)...(19): siRNA sense strand
cggcugucaucacuacaug

SEQ ID NO: 1750650 - RNA, 19 nt, Homo sapiens
  misc_RNA (1)...(19): siRNA sense strand
gccaaggguguguaugaga

SEQ ID NO: 1750651 - RNA, 19 nt, Homo sapiens
  misc_RNA (1)...(19): siRNA sense strand
gcuggcucuucuuccgaua

SEQ ID NO: 1750652 - RNA, 19 nt, Homo sapiens
  misc_RNA (1)...(19): siRNA sense strand
gagcugugaaccaggacaa

SEQ ID NO: 1750653 - RNA, 19 nt, Homo sapiens
  misc_RNA (1)...(19): siRNA sense strand
cagcaaguuugugcaguac

SEQ ID NO: 1750654 - RNA, 19 nt, Homo sapiens
  misc_RNA (1)...(19): siRNA sense strand
agcgcaagcuggacgaguu

SEQ ID NO: 1750655 - RNA, 19 nt, Homo sapiens
  misc_RNA (1)...(19): siRNA sense strand
caagauccggagccagaug

SEQ ID NO: 1750656 - RNA, 19 nt, Homo sapiens
  misc_RNA (1)...(19): siRNA sense strand
gcugugaaccaggacaaga

SEQ ID NO: 1750657 - RNA, 19 nt, Homo sapiens
  misc_RNA (1)...(19): siRNA sense strand
guggcgcugucuacuacuu

SEQ ID NO: 1750658 - RNA, 19 nt, Homo sapiens
  misc_RNA (1)...(19): siRNA sense strand
ccaucgaggcccugaagga

SEQ ID NO: 1750659 - RNA, 19 nt, Homo sapiens
  misc_RNA (1)...(19): siRNA sense strand
cgagcuggcgccuguaaca

SEQ ID NO: 1750660 - RNA, 19 nt, Homo sapiens
  misc_RNA (1)...(19): siRNA sense strand
cggagacagcucugacuug

SEQ ID NO: 1750661 - RNA, 19 nt, Homo sapiens
  misc_RNA (1)...(19): siRNA sense strand
ggaaauccauguccgugua

SEQ ID NO: 1750662 - RNA, 19 nt, Homo sapiens
  misc_RNA (1)...(19): siRNA sense strand
ccaacgagcucccgaguga

SEQ ID NO: 1750663 - RNA, 19 nt, Homo sapiens
  misc_RNA (1)...(19): siRNA sense strand
gcagcaaguuugugcagua

SEQ ID NO: 1750664 - RNA, 19 nt, Homo sapiens
  misc_RNA (1)...(19): siRNA sense strand
gcagcaagauguuugugaa

SEQ ID NO: 1750665 - RNA, 19 nt, Homo sapiens
  misc_RNA (1)...(19): siRNA sense strand
gaugcgggcuccugccuuu

SEQ ID NO: 1750666 - RNA, 19 nt, Homo sapiens
  misc_RNA (1)...(19): siRNA sense strand
gagcagauccuggcaaaga

SEQ ID NO: 1750667 - RNA, 19 nt, Homo sapiens
  misc_RNA (1)...(19): siRNA sense strand
ugacuugccugguggagaa

SEQ ID NO: 1750668 - RNA, 19 nt, Homo sapiens
  misc_RNA (1)...(19): siRNA sense strand
ccaaggguguguaugagaa

SEQ ID NO: 1750669 - RNA, 19 nt, Homo sapiens
  misc_RNA (1)...(19): siRNA sense strand
gaccucacaucaacuucua

SEQ ID NO: 1750670 - RNA, 19 nt, Homo sapiens
  misc_RNA (1)...(19): siRNA sense strand
gggagcagauccuggcaaa

SEQ ID NO: 1750671 - RNA, 19 nt, Homo sapiens
  misc_RNA (1)...(19): siRNA sense strand
gcaaguuugugcaguacga

SEQ ID NO: 1750672 - RNA, 19 nt, Homo sapiens
  misc_RNA (1)...(19): siRNA sense strand
gcaagggcgugcagaggau

SEQ ID NO: 1750673 - RNA, 19 nt, Homo sapiens
  misc_RNA (1)...(19): siRNA sense strand
ggacgacugcagcaaguuu

SEQ ID NO: 1750674 - RNA, 19 nt, Homo sapiens
  misc_RNA (1)...(19): siRNA sense strand
guaacacggucaucaagca

SEQ ID NO: 1750675 - RNA, 19 nt, Homo sapiens
  misc_RNA (1)...(19): siRNA sense strand
gggugaaccuggugacaga

SEQ ID NO: 1750676 - RNA, 19 nt, Homo sapiens
  misc_RNA (1)...(19): siRNA sense strand
uuaacgagaucacugcuau

SEQ ID NO: 1750677 - RNA, 19 nt, Homo sapiens
  misc_RNA (1)...(19): siRNA sense strand
acacggagcugggcaagau

SEQ ID NO: 1750678 - RNA, 19 nt, Homo sapiens
  misc_RNA (1)...(19): siRNA sense strand
cgagaucacugcuaugacu

SEQ ID NO: 1750679 - RNA, 19 nt, Homo sapiens
  misc_RNA (1)...(19): siRNA sense strand
ucgaggcccugaaggagua

SEQ ID NO: 1750680 - RNA, 19 nt, Homo sapiens
  misc_RNA (1)...(19): siRNA sense strand
acagcaacaugaagcaauu

SEQ ID NO: 1750681 - RNA, 19 nt, Homo sapiens
  misc_RNA (1)...(19): siRNA sense strand
gagaaccugcaguccuuua

SEQ ID NO: 1750682 - RNA, 19 nt, Homo sapiens
  misc_RNA (1)...(19): siRNA sense strand
ccgcaggcuuggcaucuuu

SEQ ID NO: 1750683 - RNA, 19 nt, Homo sapiens
  misc_RNA (1)...(19): siRNA sense strand
ccuggugguuuguguauga

SEQ ID NO: 1750684 - RNA, 19 nt, Homo sapiens
  misc_RNA (1)...(19): siRNA sense strand
gaagugcuccgaagacaac

SEQ ID NO: 1750685 - RNA, 19 nt, Homo sapiens
  misc_RNA (1)...(19): siRNA sense strand
uggagaaccugcaguccuu

SEQ ID NO: 1750686 - RNA, 19 nt, Homo sapiens
  misc_RNA (1)...(19): siRNA sense strand
cagagauggugcugucaga

SEQ ID NO: 1750687 - RNA, 19 nt, Homo sapiens
  misc_RNA (1)...(19): siRNA sense strand
agauggugcugucagauga

SEQ ID NO: 1750688 - RNA, 19 nt, Homo sapiens
  misc_RNA (1)...(19): siRNA sense strand
uaccucaucuccuccaaug

SEQ ID NO: 1750689 - RNA, 19 nt, Homo sapiens
  misc_RNA (1)...(19): siRNA sense strand
gagauggugcugucagaug

SEQ ID NO: 1750690 - RNA, 19 nt, Homo sapiens
  misc_RNA (1)...(19): siRNA sense strand
caaggaaggaggacaugga

SEQ ID NO: 1750691 - RNA, 19 nt, Homo sapiens
  misc_RNA (1)...(19): siRNA sense strand
gcaccagcccugaagaaag

SEQ ID NO: 1750692 - RNA, 19 nt, Homo sapiens
  misc_RNA (1)...(19): siRNA sense strand
ccacggcucugggcuucaa

SEQ ID NO: 1750693 - RNA, 19 nt, Homo sapiens
  misc_RNA (1)...(19): siRNA sense strand
ccucaucuccuccaauguu

SEQ ID NO: 1750694 - RNA, 19 nt, Homo sapiens
  misc_RNA (1)...(19): siRNA sense strand
gcguggcgcugucuacuac

SEQ ID NO: 1750695 - RNA, 19 nt, Homo sapiens
  misc_RNA (1)...(19): siRNA sense strand
ggaguucacccuggaguuc

SEQ ID NO: 1750696 - RNA, 19 nt, Homo sapiens
  misc_RNA (1)...(19): siRNA sense strand
agacggaccugaccuucgu

SEQ ID NO: 1750697 - RNA, 19 nt, Homo sapiens
  misc_RNA (1)...(19): siRNA sense strand
ccgagaagcccucaucagu

SEQ ID NO: 1750698 - RNA, 19 nt, Homo sapiens
  misc_RNA (1)...(19): siRNA sense strand
gcgcaagcuggacgaguuu

SEQ ID NO: 1750699 - RNA, 19 nt, Homo sapiens
  misc_RNA (1)...(19): siRNA sense strand
caccagcccugaagaaagc

SEQ ID NO: 1750700 - RNA, 19 nt, Homo sapiens
  misc_RNA (1)...(19): siRNA sense strand
ggccagggcagcaagaugu

SEQ ID NO: 1750701 - RNA, 19 nt, Homo sapiens
  misc_RNA (1)...(19): siRNA sense strand
ggaguaugagccugagaug

SEQ ID NO: 1750702 - RNA, 19 nt, Homo sapiens
  misc_RNA (1)...(19): siRNA sense strand
gcucaccaccaaucagaug

SEQ ID NO: 1750703 - RNA, 19 nt, Homo sapiens
  misc_RNA (1)...(19): siRNA sense strand
ugaaccaggacaagaagaa

SEQ ID NO: 1750704 - RNA, 19 nt, Homo sapiens
  misc_RNA (1)...(19): siRNA sense strand
gggcugcaccucagucauc

SEQ ID NO: 1750705 - RNA, 19 nt, Homo sapiens
  misc_RNA (1)...(19): siRNA sense strand
ggugguggugcuccagaua

SEQ ID NO: 1750706 - RNA, 19 nt, Homo sapiens
  misc_RNA (1)...(19): siRNA sense strand
caucgacugugagguguuc

SEQ ID NO: 1750707 - RNA, 19 nt, Homo sapiens
  misc_RNA (1)...(19): siRNA sense strand
gcaucuuccucacggcaau

SEQ ID NO: 1750708 - RNA, 19 nt, Homo sapiens
  misc_RNA (1)...(19): siRNA sense strand
uggcugcccuugucuccuu

SEQ ID NO: 1750709 - RNA, 19 nt, Homo sapiens
  misc_RNA (1)...(19): siRNA sense strand
caucucggguaccacguau

SEQ ID NO: 1750710 - RNA, 19 nt, Homo sapiens
  misc_RNA (1)...(19): siRNA sense strand
gcacgcucaccaccaauca

SEQ ID NO: 1750711 - RNA, 19 nt, Homo sapiens
  misc_RNA (1)...(19): siRNA sense strand
gcugucuacuacuucaaga

SEQ ID NO: 1750712 - RNA, 19 nt, Homo sapiens
  misc_RNA (1)...(19): siRNA sense strand
caauaucacaucgggcaaa

SEQ ID NO: 1750713 - RNA, 19 nt, Homo sapiens
  misc_RNA (1)...(19): siRNA sense strand
gcaguccuuuaacgagauc

SEQ ID NO: 1750714 - RNA, 19 nt, Homo sapiens
  misc_RNA (1)...(19): siRNA sense strand
gcgcauggcacgcaagaac

SEQ ID NO: 1750715 - RNA, 19 nt, Homo sapiens
  misc_RNA (1)...(19): siRNA sense strand
ucuaccagcugaggaacuu

SEQ ID NO: 1750716 - RNA, 19 nt, Homo sapiens
  misc_RNA (1)...(19): siRNA sense strand
ggagaaccugcaguccuuu

SEQ ID NO: 1750717 - RNA, 19 nt, Homo sapiens
  misc_RNA (1)...(19): siRNA sense strand
ggaccucacaucaacuucu

SEQ ID NO: 1750718 - RNA, 19 nt, Homo sapiens
  misc_RNA (1)...(19): siRNA sense strand
gaaccugcaguccuuuaac

SEQ ID NO: 1750719 - RNA, 19 nt, Homo sapiens
  misc_RNA (1)...(19): siRNA sense strand
caucaacaucggccacuuc

SEQ ID NO: 1750720 - RNA, 19 nt, Homo sapiens
  misc_RNA (1)...(19): siRNA sense strand
agauaucucugccugucau

SEQ ID NO: 1750721 - RNA, 19 nt, Homo sapiens
  misc_RNA (1)...(19): siRNA sense strand
ccaccaccauggccuuguc

SEQ ID NO: 1750722 - RNA, 19 nt, Homo sapiens
  misc_RNA (1)...(19): siRNA sense strand
cgaggucgucugcaucuuc

SEQ ID NO: 1750723 - RNA, 19 nt, Homo sapiens
  misc_RNA (1)...(19): siRNA sense strand
ggaacgcaacgccgagagu

SEQ ID NO: 1750724 - RNA, 19 nt, Homo sapiens
  misc_RNA (1)...(19): siRNA sense strand
gggagcuggugcuggaaca

SEQ ID NO: 1750725 - RNA, 19 nt, Homo sapiens
  misc_RNA (1)...(19): siRNA sense strand
ggcagcaagauguuuguga

SEQ ID NO: 1750726 - RNA, 19 nt, Homo sapiens
  misc_RNA (1)...(19): siRNA sense strand
gaaauccauguccguguac

SEQ ID NO: 1750727 - RNA, 19 nt, Homo sapiens
  misc_RNA (1)...(19): siRNA sense strand
ggccaaggguguguaugag

SEQ ID NO: 1750728 - RNA, 19 nt, Homo sapiens
  misc_RNA (1)...(19): siRNA sense strand
cggcugucaucacuacaug

SEQ ID NO: 1750729 - RNA, 19 nt, Homo sapiens
  misc_RNA (1)...(19): siRNA sense strand
gccaaggguguguaugaga

SEQ ID NO: 1750730 - RNA, 19 nt, Homo sapiens
  misc_RNA (1)...(19): siRNA sense strand
gcuggcucuucuuccgaua

SEQ ID NO: 1750731 - RNA, 19 nt, Homo sapiens
  misc_RNA (1)...(19): siRNA sense strand
gagcugugaaccaggacaa

SEQ ID NO: 1750732 - RNA, 19 nt, Homo sapiens
  misc_RNA (1)...(19): siRNA sense strand
cagcaaguuugugcaguac

SEQ ID NO: 1750733 - RNA, 19 nt, Homo sapiens
  misc_RNA (1)...(19): siRNA sense strand
agcgcaagcuggacgaguu

SEQ ID NO: 1750734 - RNA, 19 nt, Homo sapiens
  misc_RNA (1)...(19): siRNA sense strand
caagauccggagccagaug

SEQ ID NO: 1750735 - RNA, 19 nt, Homo sapiens
  misc_RNA (1)...(19): siRNA sense strand
gcugugaaccaggacaaga

SEQ ID NO: 1750736 - RNA, 19 nt, Homo sapiens
  misc_RNA (1)...(19): siRNA sense strand
guggcgcugucuacuacuu

SEQ ID NO: 1750737 - RNA, 19 nt, Homo sapiens
  misc_RNA (1)...(19): siRNA sense strand
ccaucgaggcccugaagga

SEQ ID NO: 1750738 - RNA, 19 nt, Homo sapiens
  misc_RNA (1)...(19): siRNA sense strand
cgagcuggcgccuguaaca

SEQ ID NO: 1750739 - RNA, 19 nt, Homo sapiens
  misc_RNA (1)...(19): siRNA sense strand
cggagacagcucugacuug

SEQ ID NO: 1750740 - RNA, 19 nt, Homo sapiens
  misc_RNA (1)...(19): siRNA sense strand
ggaaauccauguccgugua

SEQ ID NO: 1750741 - RNA, 19 nt, Homo sapiens
  misc_RNA (1)...(19): siRNA sense strand
ccaacgagcucccgaguga

SEQ ID NO: 1750742 - RNA, 19 nt, Homo sapiens
  misc_RNA (1)...(19): siRNA sense strand
gcagcaaguuugugcagua

SEQ ID NO: 1750743 - RNA, 19 nt, Homo sapiens
  misc_RNA (1)...(19): siRNA sense strand
gcagcaagauguuugugaa

SEQ ID NO: 1750744 - RNA, 19 nt, Homo sapiens
  misc_RNA (1)...(19): siRNA sense strand
gaugcgggcuccugccuuu

SEQ ID NO: 1750745 - RNA, 19 nt, Homo sapiens
  misc_RNA (1)...(19): siRNA sense strand
gagcagauccuggcaaaga

SEQ ID NO: 1750746 - RNA, 19 nt, Homo sapiens
  misc_RNA (1)...(19): siRNA sense strand
ugacuugccugguggagaa

SEQ ID NO: 1750747 - RNA, 19 nt, Homo sapiens
  misc_RNA (1)...(19): siRNA sense strand
ccaaggguguguaugagaa

SEQ ID NO: 1750748 - RNA, 19 nt, Homo sapiens
  misc_RNA (1)...(19): siRNA sense strand
gaccucacaucaacuucua

SEQ ID NO: 1750749 - RNA, 19 nt, Homo sapiens
  misc_RNA (1)...(19): siRNA sense strand
gggagcagauccuggcaaa

SEQ ID NO: 1750750 - RNA, 19 nt, Homo sapiens
  misc_RNA (1)...(19): siRNA sense strand
gcaaguuugugcaguacga

SEQ ID NO: 1750751 - RNA, 19 nt, Homo sapiens
  misc_RNA (1)...(19): siRNA sense strand
gcaagggcgugcagaggau

SEQ ID NO: 1750752 - RNA, 19 nt, Homo sapiens
  misc_RNA (1)...(19): siRNA sense strand
ggacgacugcagcaaguuu

SEQ ID NO: 1750753 - RNA, 19 nt, Homo sapiens
  misc_RNA (1)...(19): siRNA sense strand
guaacacggucaucaagca

SEQ ID NO: 1750754 - RNA, 19 nt, Homo sapiens
  misc_RNA (1)...(19): siRNA sense strand
gggugaaccuggugacaga

SEQ ID NO: 1750755 - RNA, 19 nt, Homo sapiens
  misc_RNA (1)...(19): siRNA sense strand
uuaacgagaucacugcuau

SEQ ID NO: 1750756 - RNA, 19 nt, Homo sapiens
  misc_RNA (1)...(19): siRNA sense strand
acacggagcugggcaagau

SEQ ID NO: 1750757 - RNA, 19 nt, Homo sapiens
  misc_RNA (1)...(19): siRNA sense strand
cgagaucacugcuaugacu

SEQ ID NO: 1750758 - RNA, 19 nt, Homo sapiens
  misc_RNA (1)...(19): siRNA sense strand
ucgaggcccugaaggagua

SEQ ID NO: 1750759 - RNA, 19 nt, Homo sapiens
  misc_RNA (1)...(19): siRNA sense strand
acagcaacaugaagcaauu

SEQ ID NO: 1750760 - RNA, 19 nt, Homo sapiens
  misc_RNA (1)...(19): siRNA sense strand
gagaaccugcaguccuuua

SEQ ID NO: 1750761 - RNA, 19 nt, Homo sapiens
  misc_RNA (1)...(19): siRNA sense strand
ccgcaggcuuggcaucuuu

SEQ ID NO: 1750762 - RNA, 19 nt, Homo sapiens
  misc_RNA (1)...(19): siRNA sense strand
ccuggugguuuguguauga

SEQ ID NO: 1750763 - RNA, 19 nt, Homo sapiens
  misc_RNA (1)...(19): siRNA sense strand
gaagugcuccgaagacaac

SEQ ID NO: 1750764 - RNA, 19 nt, Homo sapiens
  misc_RNA (1)...(19): siRNA sense strand
uggagaaccugcaguccuu

SEQ ID NO: 1750765 - RNA, 19 nt, Homo sapiens
  misc_RNA (1)...(19): siRNA sense strand
cagagauggugcugucaga

SEQ ID NO: 1750766 - RNA, 19 nt, Homo sapiens
  misc_RNA (1)...(19): siRNA sense strand
agauggugcugucagauga

SEQ ID NO: 1750767 - RNA, 19 nt, Homo sapiens
  misc_RNA (1)...(19): siRNA sense strand
uaccucaucuccuccaaug

SEQ ID NO: 1750768 - RNA, 19 nt, Homo sapiens
  misc_RNA (1)...(19): siRNA sense strand
gagauggugcugucagaug

SEQ ID NO: 1750769 - RNA, 19 nt, Homo sapiens
  misc_RNA (1)...(19): siRNA sense strand
caaggaaggaggacaugga

SEQ ID NO: 1750770 - RNA, 19 nt, Homo sapiens
  misc_RNA (1)...(19): siRNA sense strand
gcaccagcccugaagaaag

SEQ ID NO: 1750771 - RNA, 19 nt, Homo sapiens
  misc_RNA (1)...(19): siRNA sense strand
ccacggcucugggcuucaa

SEQ ID NO: 1750772 - RNA, 19 nt, Homo sapiens
  misc_RNA (1)...(19): siRNA sense strand
ccucaucuccuccaauguu

SEQ ID NO: 1750773 - RNA, 19 nt, Homo sapiens
  misc_RNA (1)...(19): siRNA sense strand
gcguggcgcugucuacuac

SEQ ID NO: 1750774 - RNA, 19 nt, Homo sapiens
  misc_RNA (1)...(19): siRNA sense strand
ggaguucacccuggaguuc

SEQ ID NO: 1750775 - RNA, 19 nt, Homo sapiens
  misc_RNA (1)...(19): siRNA sense strand
agacggaccugaccuucgu

SEQ ID NO: 1750776 - RNA, 19 nt, Homo sapiens
  misc_RNA (1)...(19): siRNA sense strand
ccgagaagcccucaucagu

SEQ ID NO: 1750777 - RNA, 19 nt, Homo sapiens
  misc_RNA (1)...(19): siRNA sense strand
gcgcaagcuggacgaguuu

SEQ ID NO: 1750778 - RNA, 19 nt, Homo sapiens
  misc_RNA (1)...(19): siRNA sense strand
caccagcccugaagaaagc

SEQ ID NO: 1750779 - RNA, 19 nt, Homo sapiens
  misc_RNA (1)...(19): siRNA sense strand
ggccagggcagcaagaugu

SEQ ID NO: 1750780 - RNA, 19 nt, Homo sapiens
  misc_RNA (1)...(19): siRNA sense strand
ggaguaugagccugagaug

SEQ ID NO: 1750781 - RNA, 19 nt, Homo sapiens
  misc_RNA (1)...(19): siRNA sense strand
gcucaccaccaaucagaug

SEQ ID NO: 1750782 - RNA, 19 nt, Homo sapiens
  misc_RNA (1)...(19): siRNA sense strand
ugaaccaggacaagaagaa

SEQ ID NO: 1750783 - RNA, 19 nt, Homo sapiens
  misc_RNA (1)...(19): siRNA sense strand
gggcugcaccucagucauc

SEQ ID NO: 1750784 - RNA, 19 nt, Homo sapiens
  misc_RNA (1)...(19): siRNA sense strand
ggugguggugcuccagaua

SEQ ID NO: 1750785 - RNA, 19 nt, Homo sapiens
  misc_RNA (1)...(19): siRNA sense strand
caucgacugugagguguuc

SEQ ID NO: 1750786 - RNA, 19 nt, Homo sapiens
  misc_RNA (1)...(19): siRNA sense strand
gcaucuuccucacggcaau

SEQ ID NO: 1750787 - RNA, 19 nt, Homo sapiens
  misc_RNA (1)...(19): siRNA sense strand
uggcugcccuugucuccuu

SEQ ID NO: 1750788 - RNA, 19 nt, Homo sapiens
  misc_RNA (1)...(19): siRNA sense strand
caucucggguaccacguau

SEQ ID NO: 1750789 - RNA, 19 nt, Homo sapiens
  misc_RNA (1)...(19): siRNA sense strand
gcacgcucaccaccaauca

SEQ ID NO: 1750790 - RNA, 19 nt, Homo sapiens
  misc_RNA (1)...(19): siRNA sense strand
gcugucuacuacuucaaga

SEQ ID NO: 1750791 - RNA, 19 nt, Homo sapiens
  misc_RNA (1)...(19): siRNA sense strand
caauaucacaucgggcaaa

SEQ ID NO: 1750792 - RNA, 19 nt, Homo sapiens
  misc_RNA (1)...(19): siRNA sense strand
gcaguccuuuaacgagauc

SEQ ID NO: 1750793 - RNA, 19 nt, Homo sapiens
  misc_RNA (1)...(19): siRNA sense strand
gcgcauggcacgcaagaac

SEQ ID NO: 1750794 - RNA, 19 nt, Homo sapiens
  misc_RNA (1)...(19): siRNA sense strand
ucuaccagcugaggaacuu

SEQ ID NO: 1750795 - RNA, 19 nt, Homo sapiens
  misc_RNA (1)...(19): siRNA sense strand
ggagaaccugcaguccuuu

SEQ ID NO: 1750796 - RNA, 19 nt, Homo sapiens
  misc_RNA (1)...(19): siRNA sense strand
ggaccucacaucaacuucu

SEQ ID NO: 1750797 - RNA, 19 nt, Homo sapiens
  misc_RNA (1)...(19): siRNA sense strand
gaaccugcaguccuuuaac

SEQ ID NO: 1750798 - RNA, 19 nt, Homo sapiens
  misc_RNA (1)...(19): siRNA sense strand
caucaacaucggccacuuc

SEQ ID NO: 1750799 - RNA, 19 nt, Homo sapiens
  misc_RNA (1)...(19): siRNA sense strand
agauaucucugccugucau

SEQ ID NO: 1750800 - RNA, 19 nt, Homo sapiens
  misc_RNA (1)...(19): siRNA sense strand
ccaccaccauggccuuguc

SEQ ID NO: 1750801 - RNA, 19 nt, Homo sapiens
  misc_RNA (1)...(19): siRNA sense strand
cgaggucgucugcaucuuc

SEQ ID NO: 1750802 - RNA, 19 nt, Homo sapiens
  misc_RNA (1)...(19): siRNA sense strand
ggaacgcaacgccgagagu

SEQ ID NO: 1750803 - RNA, 19 nt, Homo sapiens
  misc_RNA (1)...(19): siRNA sense strand
gggagcuggugcuggaaca

SEQ ID NO: 1750804 - RNA, 19 nt, Homo sapiens
  misc_RNA (1)...(19): siRNA sense strand
ggcagcaagauguuuguga

SEQ ID NO: 1750805 - RNA, 19 nt, Homo sapiens
  misc_RNA (1)...(19): siRNA sense strand
gaaauccauguccguguac

SEQ ID NO: 1750806 - RNA, 19 nt, Homo sapiens
  misc_RNA (1)...(19): siRNA sense strand
ggccaaggguguguaugag

SEQ ID NO: 1750807 - RNA, 19 nt, Homo sapiens
  misc_RNA (1)...(19): siRNA sense strand
cggcugucaucacuacaug

SEQ ID NO: 1750808 - RNA, 19 nt, Homo sapiens
  misc_RNA (1)...(19): siRNA sense strand
gccaaggguguguaugaga

SEQ ID NO: 1750809 - RNA, 19 nt, Homo sapiens
  misc_RNA (1)...(19): siRNA sense strand
gcuggcucuucuuccgaua

SEQ ID NO: 1750810 - RNA, 19 nt, Homo sapiens
  misc_RNA (1)...(19): siRNA sense strand
gagcugugaaccaggacaa

SEQ ID NO: 1750811 - RNA, 19 nt, Homo sapiens
  misc_RNA (1)...(19): siRNA sense strand
cagcaaguuugugcaguac

SEQ ID NO: 1750812 - RNA, 19 nt, Homo sapiens
  misc_RNA (1)...(19): siRNA sense strand
agcgcaagcuggacgaguu

SEQ ID NO: 1750813 - RNA, 19 nt, Homo sapiens
  misc_RNA (1)...(19): siRNA sense strand
caagauccggagccagaug

SEQ ID NO: 1750814 - RNA, 19 nt, Homo sapiens
  misc_RNA (1)...(19): siRNA sense strand
gcugugaaccaggacaaga

SEQ ID NO: 1750815 - RNA, 19 nt, Homo sapiens
  misc_RNA (1)...(19): siRNA sense strand
guggcgcugucuacuacuu

SEQ ID NO: 1750816 - RNA, 19 nt, Homo sapiens
  misc_RNA (1)...(19): siRNA sense strand
ccaucgaggcccugaagga

SEQ ID NO: 1750817 - RNA, 19 nt, Homo sapiens
  misc_RNA (1)...(19): siRNA sense strand
cgagcuggcgccuguaaca

SEQ ID NO: 1750818 - RNA, 19 nt, Homo sapiens
  misc_RNA (1)...(19): siRNA sense strand
cggagacagcucugacuug

SEQ ID NO: 1750819 - RNA, 19 nt, Homo sapiens
  misc_RNA (1)...(19): siRNA sense strand
ggaaauccauguccgugua

SEQ ID NO: 1750820 - RNA, 19 nt, Homo sapiens
  misc_RNA (1)...(19): siRNA sense strand
ccaacgagcucccgaguga

SEQ ID NO: 1750821 - RNA, 19 nt, Homo sapiens
  misc_RNA (1)...(19): siRNA sense strand
gcagcaaguuugugcagua

SEQ ID NO: 1750822 - RNA, 19 nt, Homo sapiens
  misc_RNA (1)...(19): siRNA sense strand
gcagcaagauguuugugaa

SEQ ID NO: 1750823 - RNA, 19 nt, Homo sapiens
  misc_RNA (1)...(19): siRNA sense strand
gaugcgggcuccugccuuu

SEQ ID NO: 1750824 - RNA, 19 nt, Homo sapiens
  misc_RNA (1)...(19): siRNA sense strand
gagcagauccuggcaaaga

SEQ ID NO: 1750825 - RNA, 19 nt, Homo sapiens
  misc_RNA (1)...(19): siRNA sense strand
ugacuugccugguggagaa

SEQ ID NO: 1750826 - RNA, 19 nt, Homo sapiens
  misc_RNA (1)...(19): siRNA sense strand
ccaaggguguguaugagaa

SEQ ID NO: 1750827 - RNA, 19 nt, Homo sapiens
  misc_RNA (1)...(19): siRNA sense strand
gaccucacaucaacuucua

SEQ ID NO: 1750828 - RNA, 19 nt, Homo sapiens
  misc_RNA (1)...(19): siRNA sense strand
gggagcagauccuggcaaa

SEQ ID NO: 1750829 - RNA, 19 nt, Homo sapiens
  misc_RNA (1)...(19): siRNA sense strand
gcaaguuugugcaguacga

SEQ ID NO: 1750830 - RNA, 19 nt, Homo sapiens
  misc_RNA (1)...(19): siRNA sense strand
gcaagggcgugcagaggau

SEQ ID NO: 1750831 - RNA, 19 nt, Homo sapiens
  misc_RNA (1)...(19): siRNA sense strand
ggacgacugcagcaaguuu

SEQ ID NO: 1750832 - RNA, 19 nt, Homo sapiens
  misc_RNA (1)...(19): siRNA sense strand
guaacacggucaucaagca

SEQ ID NO: 1750833 - RNA, 19 nt, Homo sapiens
  misc_RNA (1)...(19): siRNA sense strand
gggugaaccuggugacaga

SEQ ID NO: 1750834 - RNA, 19 nt, Homo sapiens
  misc_RNA (1)...(19): siRNA sense strand
uuaacgagaucacugcuau

SEQ ID NO: 1750835 - RNA, 19 nt, Homo sapiens
  misc_RNA (1)...(19): siRNA sense strand
acacggagcugggcaagau

SEQ ID NO: 1750836 - RNA, 19 nt, Homo sapiens
  misc_RNA (1)...(19): siRNA sense strand
cgagaucacugcuaugacu

SEQ ID NO: 1750837 - RNA, 19 nt, Homo sapiens
  misc_RNA (1)...(19): siRNA sense strand
ucgaggcccugaaggagua

SEQ ID NO: 1750838 - RNA, 19 nt, Homo sapiens
  misc_RNA (1)...(19): siRNA sense strand
acagcaacaugaagcaauu

SEQ ID NO: 1750839 - RNA, 19 nt, Homo sapiens
  misc_RNA (1)...(19): siRNA sense strand
gagaaccugcaguccuuua

SEQ ID NO: 1750840 - RNA, 19 nt, Homo sapiens
  misc_RNA (1)...(19): siRNA sense strand
ccgcaggcuuggcaucuuu

SEQ ID NO: 1750841 - RNA, 19 nt, Homo sapiens
  misc_RNA (1)...(19): siRNA sense strand
ccuggugguuuguguauga

SEQ ID NO: 1750842 - RNA, 19 nt, Homo sapiens
  misc_RNA (1)...(19): siRNA sense strand
gaagugcuccgaagacaac

SEQ ID NO: 1750843 - RNA, 19 nt, Homo sapiens
  misc_RNA (1)...(19): siRNA sense strand
uggagaaccugcaguccuu

SEQ ID NO: 1750844 - RNA, 19 nt, Homo sapiens
  misc_RNA (1)...(19): siRNA sense strand
cagagauggugcugucaga

SEQ ID NO: 1750845 - RNA, 19 nt, Homo sapiens
  misc_RNA (1)...(19): siRNA sense strand
agauggugcugucagauga

SEQ ID NO: 1750846 - RNA, 19 nt, Homo sapiens
  misc_RNA (1)...(19): siRNA sense strand
uaccucaucuccuccaaug

SEQ ID NO: 1750847 - RNA, 19 nt, Homo sapiens
  misc_RNA (1)...(19): siRNA sense strand
gagauggugcugucagaug

SEQ ID NO: 1750848 - RNA, 19 nt, Homo sapiens
  misc_RNA (1)...(19): siRNA sense strand
caaggaaggaggacaugga

SEQ ID NO: 1750849 - RNA, 19 nt, Homo sapiens
  misc_RNA (1)...(19): siRNA sense strand
gcaccagcccugaagaaag

SEQ ID NO: 1750850 - RNA, 19 nt, Homo sapiens
  misc_RNA (1)...(19): siRNA sense strand
ccacggcucugggcuucaa

SEQ ID NO: 1750851 - RNA, 19 nt, Homo sapiens
  misc_RNA (1)...(19): siRNA sense strand
ccucaucuccuccaauguu

SEQ ID NO: 1750852 - RNA, 19 nt, Homo sapiens
  misc_RNA (1)...(19): siRNA sense strand
gcguggcgcugucuacuac

SEQ ID NO: 1750853 - RNA, 19 nt, Homo sapiens
  misc_RNA (1)...(19): siRNA sense strand
ggaguucacccuggaguuc

SEQ ID NO: 1750854 - RNA, 19 nt, Homo sapiens
  misc_RNA (1)...(19): siRNA sense strand
agacggaccugaccuucgu

SEQ ID NO: 1750855 - RNA, 19 nt, Homo sapiens
  misc_RNA (1)...(19): siRNA sense strand
ccgagaagcccucaucagu

SEQ ID NO: 1750856 - RNA, 19 nt, Homo sapiens
  misc_RNA (1)...(19): siRNA sense strand
gcgcaagcuggacgaguuu

SEQ ID NO: 1750857 - RNA, 19 nt, Homo sapiens
  misc_RNA (1)...(19): siRNA sense strand
caccagcccugaagaaagc

SEQ ID NO: 1750858 - RNA, 19 nt, Homo sapiens
  misc_RNA (1)...(19): siRNA sense strand
ggccagggcagcaagaugu

SEQ ID NO: 1750859 - RNA, 19 nt, Homo sapiens
  misc_RNA (1)...(19): siRNA sense strand
ggaguaugagccugagaug

SEQ ID NO: 1750860 - RNA, 19 nt, Homo sapiens
  misc_RNA (1)...(19): siRNA sense strand
gcucaccaccaaucagaug

SEQ ID NO: 1750861 - RNA, 19 nt, Homo sapiens
  misc_RNA (1)...(19): siRNA sense strand
ugaaccaggacaagaagaa

SEQ ID NO: 1750862 - RNA, 19 nt, Homo sapiens
  misc_RNA (1)...(19): siRNA sense strand
gggcugcaccucagucauc

SEQ ID NO: 1750863 - RNA, 19 nt, Homo sapiens
  misc_RNA (1)...(19): siRNA sense strand
ggugguggugcuccagaua

SEQ ID NO: 1750864 - RNA, 19 nt, Homo sapiens
  misc_RNA (1)...(19): siRNA sense strand
caucgacugugagguguuc

SEQ ID NO: 1750865 - RNA, 19 nt, Homo sapiens
  misc_RNA (1)...(19): siRNA sense strand
gcaucuuccucacggcaau

SEQ ID NO: 1750866 - RNA, 19 nt, Homo sapiens
  misc_RNA (1)...(19): siRNA sense strand
uggcugcccuugucuccuu

SEQ ID NO: 1750867 - RNA, 19 nt, Homo sapiens
  misc_RNA (1)...(19): siRNA sense strand
caucucggguaccacguau

SEQ ID NO: 1750868 - RNA, 19 nt, Homo sapiens
  misc_RNA (1)...(19): siRNA sense strand
gcacgcucaccaccaauca

SEQ ID NO: 1750869 - RNA, 19 nt, Homo sapiens
  misc_RNA (1)...(19): siRNA sense strand
gcugucuacuacuucaaga

SEQ ID NO: 1750870 - RNA, 19 nt, Homo sapiens
  misc_RNA (1)...(19): siRNA sense strand
caauaucacaucgggcaaa

SEQ ID NO: 1750871 - RNA, 19 nt, Homo sapiens
  misc_RNA (1)...(19): siRNA sense strand
gcaguccuuuaacgagauc

SEQ ID NO: 1750872 - RNA, 19 nt, Homo sapiens
  misc_RNA (1)...(19): siRNA sense strand
gcgcauggcacgcaagaac

SEQ ID NO: 1750873 - RNA, 19 nt, Homo sapiens
  misc_RNA (1)...(19): siRNA sense strand
ucuaccagcugaggaacuu

SEQ ID NO: 1750874 - RNA, 19 nt, Homo sapiens
  misc_RNA (1)...(19): siRNA sense strand
ggagaaccugcaguccuuu

SEQ ID NO: 1750875 - RNA, 19 nt, Homo sapiens
  misc_RNA (1)...(19): siRNA sense strand
ggaccucacaucaacuucu

SEQ ID NO: 1750876 - RNA, 19 nt, Homo sapiens
  misc_RNA (1)...(19): siRNA sense strand
gaaccugcaguccuuuaac

SEQ ID NO: 1750877 - RNA, 19 nt, Homo sapiens
  misc_RNA (1)...(19): siRNA sense strand
caucaacaucggccacuuc

SEQ ID NO: 1750878 - RNA, 19 nt, Homo sapiens
  misc_RNA (1)...(19): siRNA sense strand
agauaucucugccugucau

SEQ ID NO: 1750879 - RNA, 19 nt, Homo sapiens
  misc_RNA (1)...(19): siRNA sense strand
ccaccaccauggccuuguc

SEQ ID NO: 1750880 - RNA, 19 nt, Homo sapiens
  misc_RNA (1)...(19): siRNA sense strand
cgaggucgucugcaucuuc

SEQ ID NO: 1750881 - RNA, 19 nt, Homo sapiens
  misc_RNA (1)...(19): siRNA sense strand
ggaacgcaacgccgagagu

SEQ ID NO: 1750882 - RNA, 19 nt, Homo sapiens
  misc_RNA (1)...(19): siRNA sense strand
gggagcuggugcuggaaca

SEQ ID NO: 1750883 - RNA, 19 nt, Homo sapiens
  misc_RNA (1)...(19): siRNA sense strand
ggcagcaagauguuuguga

SEQ ID NO: 1750884 - RNA, 19 nt, Homo sapiens
  misc_RNA (1)...(19): siRNA sense strand
gaaauccauguccguguac

SEQ ID NO: 1750885 - RNA, 19 nt, Homo sapiens
  misc_RNA (1)...(19): siRNA sense strand
ggccaaggguguguaugag

SEQ ID NO: 1750886 - RNA, 19 nt, Homo sapiens
  misc_RNA (1)...(19): siRNA sense strand
cggcugucaucacuacaug

SEQ ID NO: 1750887 - RNA, 19 nt, Homo sapiens
  misc_RNA (1)...(19): siRNA sense strand
gccaaggguguguaugaga

SEQ ID NO: 1750888 - RNA, 19 nt, Homo sapiens
  misc_RNA (1)...(19): siRNA sense strand
gcuggcucuucuuccgaua

SEQ ID NO: 1750889 - RNA, 19 nt, Homo sapiens
  misc_RNA (1)...(19): siRNA sense strand
gagcugugaaccaggacaa

SEQ ID NO: 1750890 - RNA, 19 nt, Homo sapiens
  misc_RNA (1)...(19): siRNA sense strand
cagcaaguuugugcaguac

SEQ ID NO: 1750891 - RNA, 19 nt, Homo sapiens
  misc_RNA (1)...(19): siRNA sense strand
agcgcaagcuggacgaguu

SEQ ID NO: 1750892 - RNA, 19 nt, Homo sapiens
  misc_RNA (1)...(19): siRNA sense strand
caagauccggagccagaug

SEQ ID NO: 1750893 - RNA, 19 nt, Homo sapiens
  misc_RNA (1)...(19): siRNA sense strand
gcugugaaccaggacaaga

SEQ ID NO: 1750894 - RNA, 19 nt, Homo sapiens
  misc_RNA (1)...(19): siRNA sense strand
guggcgcugucuacuacuu

SEQ ID NO: 1750895 - RNA, 19 nt, Homo sapiens
  misc_RNA (1)...(19): siRNA sense strand
ccaucgaggcccugaagga

SEQ ID NO: 1750896 - RNA, 19 nt, Homo sapiens
  misc_RNA (1)...(19): siRNA sense strand
cgagcuggcgccuguaaca

SEQ ID NO: 1750897 - RNA, 19 nt, Homo sapiens
  misc_RNA (1)...(19): siRNA sense strand
cggagacagcucugacuug

SEQ ID NO: 1750898 - RNA, 19 nt, Homo sapiens
  misc_RNA (1)...(19): siRNA sense strand
ggaaugaaguguaccaaag

SEQ ID NO: 1750899 - RNA, 19 nt, Homo sapiens
  misc_RNA (1)...(19): siRNA sense strand
cauaauugguggugucaua

SEQ ID NO: 1750900 - RNA, 19 nt, Homo sapiens
  misc_RNA (1)...(19): siRNA sense strand
gcauguagaggacuuauga

SEQ ID NO: 1750901 - RNA, 19 nt, Homo sapiens
  misc_RNA (1)...(19): siRNA sense strand
gauguucccuauaugcaaa

SEQ ID NO: 1750902 - RNA, 19 nt, Homo sapiens
  misc_RNA (1)...(19): siRNA sense strand
gcaaaaguaugaauuagga

SEQ ID NO: 1750903 - RNA, 19 nt, Homo sapiens
  misc_RNA (1)...(19): siRNA sense strand
gggcuucuuugguuccaua

SEQ ID NO: 1750904 - RNA, 19 nt, Homo sapiens
  misc_RNA (1)...(19): siRNA sense strand
gacuggauguucccuauau

SEQ ID NO: 1750905 - RNA, 19 nt, Homo sapiens
  misc_RNA (1)...(19): siRNA sense strand
cgauaaagccaaagcuaaa

SEQ ID NO: 1750906 - RNA, 19 nt, Homo sapiens
  misc_RNA (1)...(19): siRNA sense strand
cuucuuugguuccauauuu

SEQ ID NO: 1750907 - RNA, 19 nt, Homo sapiens
  misc_RNA (1)...(19): siRNA sense strand
ucagggcugugcucaauga

SEQ ID NO: 1750908 - RNA, 19 nt, Homo sapiens
  misc_RNA (1)...(19): siRNA sense strand
caacaaacccuucaaaaca

SEQ ID NO: 1750909 - RNA, 19 nt, Homo sapiens
  misc_RNA (1)...(19): siRNA sense strand
aaucacaacggaauucuuu

SEQ ID NO: 1750910 - RNA, 19 nt, Homo sapiens
  misc_RNA (1)...(19): siRNA sense strand
aaacaacaaacccuucaaa

SEQ ID NO: 1750911 - RNA, 19 nt, Homo sapiens
  misc_RNA (1)...(19): siRNA sense strand
gaaugaaguguaccaaagu

SEQ ID NO: 1750912 - RNA, 19 nt, Homo sapiens
  misc_RNA (1)...(19): siRNA sense strand
gagccucacugugcauaau

SEQ ID NO: 1750913 - RNA, 19 nt, Homo sapiens
  misc_RNA (1)...(19): siRNA sense strand
ucacaacggaauucuuuga

SEQ ID NO: 1750914 - RNA, 19 nt, Homo sapiens
  misc_RNA (1)...(19): siRNA sense strand
ccgauaaagccaaagcuaa

SEQ ID NO: 1750915 - RNA, 19 nt, Homo sapiens
  misc_RNA (1)...(19): siRNA sense strand
aauugguggugucauauuu

SEQ ID NO: 1750916 - RNA, 19 nt, Homo sapiens
  misc_RNA (1)...(19): siRNA sense strand
ugucagggcugugcucaau

SEQ ID NO: 1750917 - RNA, 19 nt, Homo sapiens
  misc_RNA (1)...(19): siRNA sense strand
aaaguaucaugguggagaa

SEQ ID NO: 1750918 - RNA, 19 nt, Homo sapiens
  misc_RNA (1)...(19): siRNA sense strand
uauuugcgcucuuuggaau

SEQ ID NO: 1750919 - RNA, 19 nt, Homo sapiens
  misc_RNA (1)...(19): siRNA sense strand
ggcugggauuguauucaua

SEQ ID NO: 1750920 - RNA, 19 nt, Homo sapiens
  misc_RNA (1)...(19): siRNA sense strand
caauaucugacaacaacaa

SEQ ID NO: 1750921 - RNA, 19 nt, Homo sapiens
  misc_RNA (1)...(19): siRNA sense strand
aaacacccagauacacaua

SEQ ID NO: 1750922 - RNA, 19 nt, Homo sapiens
  misc_RNA (1)...(19): siRNA sense strand
auucuuugauccucucuuu

SEQ ID NO: 1750923 - RNA, 19 nt, Homo sapiens
  misc_RNA (1)...(19): siRNA sense strand
acaacggaauucuuugauc

SEQ ID NO: 1750924 - RNA, 19 nt, Homo sapiens
  misc_RNA (1)...(19): siRNA sense strand
uucaauaucugacaacaac

SEQ ID NO: 1750925 - RNA, 19 nt, Homo sapiens
  misc_RNA (1)...(19): siRNA sense strand
ggauguucccuauaugcaa

SEQ ID NO: 1750926 - RNA, 19 nt, Homo sapiens
  misc_RNA (1)...(19): siRNA sense strand
ggugucauauuuugcuuuu

SEQ ID NO: 1750927 - RNA, 19 nt, Homo sapiens
  misc_RNA (1)...(19): siRNA sense strand
gagcaaaaguaugaauuag

SEQ ID NO: 1750928 - RNA, 19 nt, Homo sapiens
  misc_RNA (1)...(19): siRNA sense strand
uugauccucucuuuguuga

SEQ ID NO: 1750929 - RNA, 19 nt, Homo sapiens
  misc_RNA (1)...(19): siRNA sense strand
guaucaugguggagaagau

SEQ ID NO: 1750930 - RNA, 19 nt, Homo sapiens
  misc_RNA (1)...(19): siRNA sense strand
caacaaaacacccagauac

SEQ ID NO: 1750931 - RNA, 19 nt, Homo sapiens
  misc_RNA (1)...(19): siRNA sense strand
gccucacugugcauaauug

SEQ ID NO: 1750932 - RNA, 19 nt, Homo sapiens
  misc_RNA (1)...(19): siRNA sense strand
ugacuggauguucccuaua

SEQ ID NO: 1750933 - RNA, 19 nt, Homo sapiens
  misc_RNA (1)...(19): siRNA sense strand
acacccagauacacauaca

SEQ ID NO: 1750934 - RNA, 19 nt, Homo sapiens
  misc_RNA (1)...(19): siRNA sense strand
uaauugguggugucauauu

SEQ ID NO: 1750935 - RNA, 19 nt, Homo sapiens
  misc_RNA (1)...(19): siRNA sense strand
uucccuauaugcaaacaaa

SEQ ID NO: 1750936 - RNA, 19 nt, Homo sapiens
  misc_RNA (1)...(19): siRNA sense strand
uggcugggauuguauucau

SEQ ID NO: 1750937 - RNA, 19 nt, Homo sapiens
  misc_RNA (1)...(19): siRNA sense strand
gcucaaugacuggauguuc

SEQ ID NO: 1750938 - RNA, 19 nt, Homo sapiens
  misc_RNA (1)...(19): siRNA sense strand
uuccauauuugcgcucuuu

SEQ ID NO: 1750939 - RNA, 19 nt, Homo sapiens
  misc_RNA (1)...(19): siRNA sense strand
cauauuugcgcucuuugga

SEQ ID NO: 1750940 - RNA, 19 nt, Homo sapiens
  misc_RNA (1)...(19): siRNA sense strand
ggagccucacugugcauaa

SEQ ID NO: 1750941 - RNA, 19 nt, Homo sapiens
  misc_RNA (1)...(19): siRNA sense strand
aaugaaguguaccaaaguc

SEQ ID NO: 1750942 - RNA, 19 nt, Homo sapiens
  misc_RNA (1)...(19): siRNA sense strand
uuguuuggcugggauugua

SEQ ID NO: 1750943 - RNA, 19 nt, Homo sapiens
  misc_RNA (1)...(19): siRNA sense strand
gauaaagccaaagcuaaaa

SEQ ID NO: 1750944 - RNA, 19 nt, Homo sapiens
  misc_RNA (1)...(19): siRNA sense strand
ggaaugaaguguaccaaag

SEQ ID NO: 1750945 - RNA, 19 nt, Homo sapiens
  misc_RNA (1)...(19): siRNA sense strand
cauaauugguggugucaua

SEQ ID NO: 1750946 - RNA, 19 nt, Homo sapiens
  misc_RNA (1)...(19): siRNA sense strand
gcauguagaggacuuauga

SEQ ID NO: 1750947 - RNA, 19 nt, Homo sapiens
  misc_RNA (1)...(19): siRNA sense strand
gauguucccuauaugcaaa

SEQ ID NO: 1750948 - RNA, 19 nt, Homo sapiens
  misc_RNA (1)...(19): siRNA sense strand
gcaaaaguaugaauuagga

SEQ ID NO: 1750949 - RNA, 19 nt, Homo sapiens
  misc_RNA (1)...(19): siRNA sense strand
gggcuucuuugguuccaua

SEQ ID NO: 1750950 - RNA, 19 nt, Homo sapiens
  misc_RNA (1)...(19): siRNA sense strand
gacuggauguucccuauau

SEQ ID NO: 1750951 - RNA, 19 nt, Homo sapiens
  misc_RNA (1)...(19): siRNA sense strand
cgauaaagccaaagcuaaa

SEQ ID NO: 1750952 - RNA, 19 nt, Homo sapiens
  misc_RNA (1)...(19): siRNA sense strand
cuucuuugguuccauauuu

SEQ ID NO: 1750953 - RNA, 19 nt, Homo sapiens
  misc_RNA (1)...(19): siRNA sense strand
ucagggcugugcucaauga

SEQ ID NO: 1750954 - RNA, 19 nt, Homo sapiens
  misc_RNA (1)...(19): siRNA sense strand
caacaaacccuucaaaaca

SEQ ID NO: 1750955 - RNA, 19 nt, Homo sapiens
  misc_RNA (1)...(19): siRNA sense strand
aaucacaacggaauucuuu

SEQ ID NO: 1750956 - RNA, 19 nt, Homo sapiens
  misc_RNA (1)...(19): siRNA sense strand
aaacaacaaacccuucaaa

SEQ ID NO: 1750957 - RNA, 19 nt, Homo sapiens
  misc_RNA (1)...(19): siRNA sense strand
gaaugaaguguaccaaagu

SEQ ID NO: 1750958 - RNA, 19 nt, Homo sapiens
  misc_RNA (1)...(19): siRNA sense strand
gagccucacugugcauaau

SEQ ID NO: 1750959 - RNA, 19 nt, Homo sapiens
  misc_RNA (1)...(19): siRNA sense strand
ucacaacggaauucuuuga

SEQ ID NO: 1750960 - RNA, 19 nt, Homo sapiens
  misc_RNA (1)...(19): siRNA sense strand
ccgauaaagccaaagcuaa

SEQ ID NO: 1750961 - RNA, 19 nt, Homo sapiens
  misc_RNA (1)...(19): siRNA sense strand
aauugguggugucauauuu

SEQ ID NO: 1750962 - RNA, 19 nt, Homo sapiens
  misc_RNA (1)...(19): siRNA sense strand
ugucagggcugugcucaau

SEQ ID NO: 1750963 - RNA, 19 nt, Homo sapiens
  misc_RNA (1)...(19): siRNA sense strand
aaaguaucaugguggagaa

SEQ ID NO: 1750964 - RNA, 19 nt, Homo sapiens
  misc_RNA (1)...(19): siRNA sense strand
uauuugcgcucuuuggaau

SEQ ID NO: 1750965 - RNA, 19 nt, Homo sapiens
  misc_RNA (1)...(19): siRNA sense strand
ggcugggauuguauucaua

SEQ ID NO: 1750966 - RNA, 19 nt, Homo sapiens
  misc_RNA (1)...(19): siRNA sense strand
caauaucugacaacaacaa

SEQ ID NO: 1750967 - RNA, 19 nt, Homo sapiens
  misc_RNA (1)...(19): siRNA sense strand
aaacacccagauacacaua

SEQ ID NO: 1750968 - RNA, 19 nt, Homo sapiens
  misc_RNA (1)...(19): siRNA sense strand
auucuuugauccucucuuu

SEQ ID NO: 1750969 - RNA, 19 nt, Homo sapiens
  misc_RNA (1)...(19): siRNA sense strand
acaacggaauucuuugauc

SEQ ID NO: 1750970 - RNA, 19 nt, Homo sapiens
  misc_RNA (1)...(19): siRNA sense strand
uucaauaucugacaacaac

SEQ ID NO: 1750971 - RNA, 19 nt, Homo sapiens
  misc_RNA (1)...(19): siRNA sense strand
ggauguucccuauaugcaa

SEQ ID NO: 1750972 - RNA, 19 nt, Homo sapiens
  misc_RNA (1)...(19): siRNA sense strand
ggugucauauuuugcuuuu

SEQ ID NO: 1750973 - RNA, 19 nt, Homo sapiens
  misc_RNA (1)...(19): siRNA sense strand
gagcaaaaguaugaauuag

SEQ ID NO: 1750974 - RNA, 19 nt, Homo sapiens
  misc_RNA (1)...(19): siRNA sense strand
uugauccucucuuuguuga

SEQ ID NO: 1750975 - RNA, 19 nt, Homo sapiens
  misc_RNA (1)...(19): siRNA sense strand
guaucaugguggagaagau

SEQ ID NO: 1750976 - RNA, 19 nt, Homo sapiens
  misc_RNA (1)...(19): siRNA sense strand
caacaaaacacccagauac

SEQ ID NO: 1750977 - RNA, 19 nt, Homo sapiens
  misc_RNA (1)...(19): siRNA sense strand
gccucacugugcauaauug

SEQ ID NO: 1750978 - RNA, 19 nt, Homo sapiens
  misc_RNA (1)...(19): siRNA sense strand
ugacuggauguucccuaua

SEQ ID NO: 1750979 - RNA, 19 nt, Homo sapiens
  misc_RNA (1)...(19): siRNA sense strand
acacccagauacacauaca

SEQ ID NO: 1750980 - RNA, 19 nt, Homo sapiens
  misc_RNA (1)...(19): siRNA sense strand
uaauugguggugucauauu

SEQ ID NO: 1750981 - RNA, 19 nt, Homo sapiens
  misc_RNA (1)...(19): siRNA sense strand
uucccuauaugcaaacaaa

SEQ ID NO: 1750982 - RNA, 19 nt, Homo sapiens
  misc_RNA (1)...(19): siRNA sense strand
uggcugggauuguauucau

SEQ ID NO: 1750983 - RNA, 19 nt, Homo sapiens
  misc_RNA (1)...(19): siRNA sense strand
gcucaaugacuggauguuc

SEQ ID NO: 1750984 - RNA, 19 nt, Homo sapiens
  misc_RNA (1)...(19): siRNA sense strand
uuccauauuugcgcucuuu

SEQ ID NO: 1750985 - RNA, 19 nt, Homo sapiens
  misc_RNA (1)...(19): siRNA sense strand
cauauuugcgcucuuugga

SEQ ID NO: 1750986 - RNA, 19 nt, Homo sapiens
  misc_RNA (1)...(19): siRNA sense strand
ggagccucacugugcauaa

SEQ ID NO: 1750987 - RNA, 19 nt, Homo sapiens
  misc_RNA (1)...(19): siRNA sense strand
aaugaaguguaccaaaguc

SEQ ID NO: 1750988 - RNA, 19 nt, Homo sapiens
  misc_RNA (1)...(19): siRNA sense strand
uuguuuggcugggauugua

SEQ ID NO: 1750989 - RNA, 19 nt, Homo sapiens
  misc_RNA (1)...(19): siRNA sense strand
gauaaagccaaagcuaaaa

SEQ ID NO: 1750990 - RNA, 19 nt, Homo sapiens
  misc_RNA (1)...(19): siRNA sense strand
ggaaugaaguguaccaaag

SEQ ID NO: 1750991 - RNA, 19 nt, Homo sapiens
  misc_RNA (1)...(19): siRNA sense strand
cauaauugguggugucaua

SEQ ID NO: 1750992 - RNA, 19 nt, Homo sapiens
  misc_RNA (1)...(19): siRNA sense strand
gcauguagaggacuuauga

SEQ ID NO: 1750993 - RNA, 19 nt, Homo sapiens
  misc_RNA (1)...(19): siRNA sense strand
gauguucccuauaugcaaa

SEQ ID NO: 1750994 - RNA, 19 nt, Homo sapiens
  misc_RNA (1)...(19): siRNA sense strand
gcaaaaguaugaauuagga

SEQ ID NO: 1750995 - RNA, 19 nt, Homo sapiens
  misc_RNA (1)...(19): siRNA sense strand
gggcuucuuugguuccaua

SEQ ID NO: 1750996 - RNA, 19 nt, Homo sapiens
  misc_RNA (1)...(19): siRNA sense strand
gacuggauguucccuauau

SEQ ID NO: 1750997 - RNA, 19 nt, Homo sapiens
  misc_RNA (1)...(19): siRNA sense strand
cgauaaagccaaagcuaaa

SEQ ID NO: 1750998 - RNA, 19 nt, Homo sapiens
  misc_RNA (1)...(19): siRNA sense strand
cuucuuugguuccauauuu

SEQ ID NO: 1750999 - RNA, 19 nt, Homo sapiens
  misc_RNA (1)...(19): siRNA sense strand
ucagggcugugcucaauga

SEQ ID NO: 1751000 - RNA, 19 nt, Homo sapiens
  misc_RNA (1)...(19): siRNA sense strand
caacaaacccuucaaaaca

SEQ ID NO: 1751001 - RNA, 19 nt, Homo sapiens
  misc_RNA (1)...(19): siRNA sense strand
aaucacaacggaauucuuu

SEQ ID NO: 1751002 - RNA, 19 nt, Homo sapiens
  misc_RNA (1)...(19): siRNA sense strand
aaacaacaaacccuucaaa

SEQ ID NO: 1751003 - RNA, 19 nt, Homo sapiens
  misc_RNA (1)...(19): siRNA sense strand
gaaugaaguguaccaaagu

SEQ ID NO: 1751004 - RNA, 19 nt, Homo sapiens
  misc_RNA (1)...(19): siRNA sense strand
gagccucacugugcauaau

SEQ ID NO: 1751005 - RNA, 19 nt, Homo sapiens
  misc_RNA (1)...(19): siRNA sense strand
ucacaacggaauucuuuga

SEQ ID NO: 1751006 - RNA, 19 nt, Homo sapiens
  misc_RNA (1)...(19): siRNA sense strand
ccgauaaagccaaagcuaa

SEQ ID NO: 1751007 - RNA, 19 nt, Homo sapiens
  misc_RNA (1)...(19): siRNA sense strand
aauugguggugucauauuu

SEQ ID NO: 1751008 - RNA, 19 nt, Homo sapiens
  misc_RNA (1)...(19): siRNA sense strand
ugucagggcugugcucaau

SEQ ID NO: 1751009 - RNA, 19 nt, Homo sapiens
  misc_RNA (1)...(19): siRNA sense strand
aaaguaucaugguggagaa

SEQ ID NO: 1751010 - RNA, 19 nt, Homo sapiens
  misc_RNA (1)...(19): siRNA sense strand
uauuugcgcucuuuggaau

SEQ ID NO: 1751011 - RNA, 19 nt, Homo sapiens
  misc_RNA (1)...(19): siRNA sense strand
ggcugggauuguauucaua

SEQ ID NO: 1751012 - RNA, 19 nt, Homo sapiens
  misc_RNA (1)...(19): siRNA sense strand
caauaucugacaacaacaa

SEQ ID NO: 1751013 - RNA, 19 nt, Homo sapiens
  misc_RNA (1)...(19): siRNA sense strand
aaacacccagauacacaua

SEQ ID NO: 1751014 - RNA, 19 nt, Homo sapiens
  misc_RNA (1)...(19): siRNA sense strand
auucuuugauccucucuuu

SEQ ID NO: 1751015 - RNA, 19 nt, Homo sapiens
  misc_RNA (1)...(19): siRNA sense strand
acaacggaauucuuugauc

SEQ ID NO: 1751016 - RNA, 19 nt, Homo sapiens
  misc_RNA (1)...(19): siRNA sense strand
uucaauaucugacaacaac

SEQ ID NO: 1751017 - RNA, 19 nt, Homo sapiens
  misc_RNA (1)...(19): siRNA sense strand
ggauguucccuauaugcaa

SEQ ID NO: 1751018 - RNA, 19 nt, Homo sapiens
  misc_RNA (1)...(19): siRNA sense strand
ggugucauauuuugcuuuu

SEQ ID NO: 1751019 - RNA, 19 nt, Homo sapiens
  misc_RNA (1)...(19): siRNA sense strand
gagcaaaaguaugaauuag

SEQ ID NO: 1751020 - RNA, 19 nt, Homo sapiens
  misc_RNA (1)...(19): siRNA sense strand
uugauccucucuuuguuga

SEQ ID NO: 1751021 - RNA, 19 nt, Homo sapiens
  misc_RNA (1)...(19): siRNA sense strand
guaucaugguggagaagau

SEQ ID NO: 1751022 - RNA, 19 nt, Homo sapiens
  misc_RNA (1)...(19): siRNA sense strand
caacaaaacacccagauac

SEQ ID NO: 1751023 - RNA, 19 nt, Homo sapiens
  misc_RNA (1)...(19): siRNA sense strand
gccucacugugcauaauug

SEQ ID NO: 1751024 - RNA, 19 nt, Homo sapiens
  misc_RNA (1)...(19): siRNA sense strand
ugacuggauguucccuaua

SEQ ID NO: 1751025 - RNA, 19 nt, Homo sapiens
  misc_RNA (1)...(19): siRNA sense strand
acacccagauacacauaca

SEQ ID NO: 1751026 - RNA, 19 nt, Homo sapiens
  misc_RNA (1)...(19): siRNA sense strand
uaauugguggugucauauu

SEQ ID NO: 1751027 - RNA, 19 nt, Homo sapiens
  misc_RNA (1)...(19): siRNA sense strand
uucccuauaugcaaacaaa

SEQ ID NO: 1751028 - RNA, 19 nt, Homo sapiens
  misc_RNA (1)...(19): siRNA sense strand
uggcugggauuguauucau

SEQ ID NO: 1751029 - RNA, 19 nt, Homo sapiens
  misc_RNA (1)...(19): siRNA sense strand
gcucaaugacuggauguuc

SEQ ID NO: 1751030 - RNA, 19 nt, Homo sapiens
  misc_RNA (1)...(19): siRNA sense strand
uuccauauuugcgcucuuu

SEQ ID NO: 1751031 - RNA, 19 nt, Homo sapiens
  misc_RNA (1)...(19): siRNA sense strand
cauauuugcgcucuuugga

SEQ ID NO: 1751032 - RNA, 19 nt, Homo sapiens
  misc_RNA (1)...(19): siRNA sense strand
ggagccucacugugcauaa

SEQ ID NO: 1751033 - RNA, 19 nt, Homo sapiens
  misc_RNA (1)...(19): siRNA sense strand
aaugaaguguaccaaaguc

SEQ ID NO: 1751034 - RNA, 19 nt, Homo sapiens
  misc_RNA (1)...(19): siRNA sense strand
uuguuuggcugggauugua

SEQ ID NO: 1751035 - RNA, 19 nt, Homo sapiens
  misc_RNA (1)...(19): siRNA sense strand
gauaaagccaaagcuaaaa

SEQ ID NO: 1751036 - RNA, 19 nt, Homo sapiens
  misc_RNA (1)...(19): siRNA sense strand
ggaaugaaguguaccaaag

SEQ ID NO: 1751037 - RNA, 19 nt, Homo sapiens
  misc_RNA (1)...(19): siRNA sense strand
cauaauugguggugucaua

SEQ ID NO: 1751038 - RNA, 19 nt, Homo sapiens
  misc_RNA (1)...(19): siRNA sense strand
gcauguagaggacuuauga

SEQ ID NO: 1751039 - RNA, 19 nt, Homo sapiens
  misc_RNA (1)...(19): siRNA sense strand
gauguucccuauaugcaaa

SEQ ID NO: 1751040 - RNA, 19 nt, Homo sapiens
  misc_RNA (1)...(19): siRNA sense strand
gcaaaaguaugaauuagga

SEQ ID NO: 1751041 - RNA, 19 nt, Homo sapiens
  misc_RNA (1)...(19): siRNA sense strand
gggcuucuuugguuccaua

SEQ ID NO: 1751042 - RNA, 19 nt, Homo sapiens
  misc_RNA (1)...(19): siRNA sense strand
gacuggauguucccuauau

SEQ ID NO: 1751043 - RNA, 19 nt, Homo sapiens
  misc_RNA (1)...(19): siRNA sense strand
cgauaaagccaaagcuaaa

SEQ ID NO: 1751044 - RNA, 19 nt, Homo sapiens
  misc_RNA (1)...(19): siRNA sense strand
cuucuuugguuccauauuu

SEQ ID NO: 1751045 - RNA, 19 nt, Homo sapiens
  misc_RNA (1)...(19): siRNA sense strand
ucagggcugugcucaauga

SEQ ID NO: 1751046 - RNA, 19 nt, Homo sapiens
  misc_RNA (1)...(19): siRNA sense strand
caacaaacccuucaaaaca

SEQ ID NO: 1751047 - RNA, 19 nt, Homo sapiens
  misc_RNA (1)...(19): siRNA sense strand
aaucacaacggaauucuuu

SEQ ID NO: 1751048 - RNA, 19 nt, Homo sapiens
  misc_RNA (1)...(19): siRNA sense strand
aaacaacaaacccuucaaa

SEQ ID NO: 1751049 - RNA, 19 nt, Homo sapiens
  misc_RNA (1)...(19): siRNA sense strand
gaaugaaguguaccaaagu

SEQ ID NO: 1751050 - RNA, 19 nt, Homo sapiens
  misc_RNA (1)...(19): siRNA sense strand
gagccucacugugcauaau

SEQ ID NO: 1751051 - RNA, 19 nt, Homo sapiens
  misc_RNA (1)...(19): siRNA sense strand
ucacaacggaauucuuuga

SEQ ID NO: 1751052 - RNA, 19 nt, Homo sapiens
  misc_RNA (1)...(19): siRNA sense strand
ccgauaaagccaaagcuaa

SEQ ID NO: 1751053 - RNA, 19 nt, Homo sapiens
  misc_RNA (1)...(19): siRNA sense strand
aauugguggugucauauuu

SEQ ID NO: 1751054 - RNA, 19 nt, Homo sapiens
  misc_RNA (1)...(19): siRNA sense strand
ugucagggcugugcucaau

SEQ ID NO: 1751055 - RNA, 19 nt, Homo sapiens
  misc_RNA (1)...(19): siRNA sense strand
aaaguaucaugguggagaa

SEQ ID NO: 1751056 - RNA, 19 nt, Homo sapiens
  misc_RNA (1)...(19): siRNA sense strand
uauuugcgcucuuuggaau

SEQ ID NO: 1751057 - RNA, 19 nt, Homo sapiens
  misc_RNA (1)...(19): siRNA sense strand
ggcugggauuguauucaua

SEQ ID NO: 1751058 - RNA, 19 nt, Homo sapiens
  misc_RNA (1)...(19): siRNA sense strand
caauaucugacaacaacaa

SEQ ID NO: 1751059 - RNA, 19 nt, Homo sapiens
  misc_RNA (1)...(19): siRNA sense strand
aaacacccagauacacaua

SEQ ID NO: 1751060 - RNA, 19 nt, Homo sapiens
  misc_RNA (1)...(19): siRNA sense strand
auucuuugauccucucuuu

SEQ ID NO: 1751061 - RNA, 19 nt, Homo sapiens
  misc_RNA (1)...(19): siRNA sense strand
acaacggaauucuuugauc

SEQ ID NO: 1751062 - RNA, 19 nt, Homo sapiens
  misc_RNA (1)...(19): siRNA sense strand
uucaauaucugacaacaac

SEQ ID NO: 1751063 - RNA, 19 nt, Homo sapiens
  misc_RNA (1)...(19): siRNA sense strand
ggauguucccuauaugcaa

SEQ ID NO: 1751064 - RNA, 19 nt, Homo sapiens
  misc_RNA (1)...(19): siRNA sense strand
ggugucauauuuugcuuuu

SEQ ID NO: 1751065 - RNA, 19 nt, Homo sapiens
  misc_RNA (1)...(19): siRNA sense strand
gagcaaaaguaugaauuag

SEQ ID NO: 1751066 - RNA, 19 nt, Homo sapiens
  misc_RNA (1)...(19): siRNA sense strand
uugauccucucuuuguuga

SEQ ID NO: 1751067 - RNA, 19 nt, Homo sapiens
  misc_RNA (1)...(19): siRNA sense strand
guaucaugguggagaagau

SEQ ID NO: 1751068 - RNA, 19 nt, Homo sapiens
  misc_RNA (1)...(19): siRNA sense strand
caacaaaacacccagauac

SEQ ID NO: 1751069 - RNA, 19 nt, Homo sapiens
  misc_RNA (1)...(19): siRNA sense strand
gccucacugugcauaauug

SEQ ID NO: 1751070 - RNA, 19 nt, Homo sapiens
  misc_RNA (1)...(19): siRNA sense strand
ugacuggauguucccuaua

SEQ ID NO: 1751071 - RNA, 19 nt, Homo sapiens
  misc_RNA (1)...(19): siRNA sense strand
acacccagauacacauaca

SEQ ID NO: 1751072 - RNA, 19 nt, Homo sapiens
  misc_RNA (1)...(19): siRNA sense strand
uaauugguggugucauauu

SEQ ID NO: 1751073 - RNA, 19 nt, Homo sapiens
  misc_RNA (1)...(19): siRNA sense strand
uucccuauaugcaaacaaa

SEQ ID NO: 1751074 - RNA, 19 nt, Homo sapiens
  misc_RNA (1)...(19): siRNA sense strand
uggcugggauuguauucau

SEQ ID NO: 1751075 - RNA, 19 nt, Homo sapiens
  misc_RNA (1)...(19): siRNA sense strand
gcucaaugacuggauguuc

SEQ ID NO: 1751076 - RNA, 19 nt, Homo sapiens
  misc_RNA (1)...(19): siRNA sense strand
uuccauauuugcgcucuuu

SEQ ID NO: 1751077 - RNA, 19 nt, Homo sapiens
  misc_RNA (1)...(19): siRNA sense strand
cauauuugcgcucuuugga

SEQ ID NO: 1751078 - RNA, 19 nt, Homo sapiens
  misc_RNA (1)...(19): siRNA sense strand
ggagccucacugugcauaa

SEQ ID NO: 1751079 - RNA, 19 nt, Homo sapiens
  misc_RNA (1)...(19): siRNA sense strand
aaugaaguguaccaaaguc

SEQ ID NO: 1751080 - RNA, 19 nt, Homo sapiens
  misc_RNA (1)...(19): siRNA sense strand
uuguuuggcugggauugua

SEQ ID NO: 1751081 - RNA, 19 nt, Homo sapiens
  misc_RNA (1)...(19): siRNA sense strand
gauaaagccaaagcuaaaa

SEQ ID NO: 1751082 - RNA, 19 nt, Homo sapiens
  misc_RNA (1)...(19): siRNA sense strand
ccaaagaaucggcaaauga

SEQ ID NO: 1751083 - RNA, 19 nt, Homo sapiens
  misc_RNA (1)...(19): siRNA sense strand
gcaugucccugugggugaa

SEQ ID NO: 1751084 - RNA, 19 nt, Homo sapiens
  misc_RNA (1)...(19): siRNA sense strand
aagauguucucccucaaga

SEQ ID NO: 1751085 - RNA, 19 nt, Homo sapiens
  misc_RNA (1)...(19): siRNA sense strand
aacaaucgcugcccucucu

SEQ ID NO: 1751086 - RNA, 19 nt, Homo sapiens
  misc_RNA (1)...(19): siRNA sense strand
guaaucauuccuuccacaa

SEQ ID NO: 1751087 - RNA, 19 nt, Homo sapiens
  misc_RNA (1)...(19): siRNA sense strand
ucuuagaugucaagcugaa

SEQ ID NO: 1751088 - RNA, 19 nt, Homo sapiens
  misc_RNA (1)...(19): siRNA sense strand
aaacaaacaagaggacugu

SEQ ID NO: 1751089 - RNA, 19 nt, Homo sapiens
  misc_RNA (1)...(19): siRNA sense strand
aaucauuccuuccacaacu

SEQ ID NO: 1751090 - RNA, 19 nt, Homo sapiens
  misc_RNA (1)...(19): siRNA sense strand
caagauguucucccucaag

SEQ ID NO: 1751091 - RNA, 19 nt, Homo sapiens
  misc_RNA (1)...(19): siRNA sense strand
uuccacaacugcugcaugu

SEQ ID NO: 1751092 - RNA, 19 nt, Homo sapiens
  misc_RNA (1)...(19): siRNA sense strand
cguggaagacggagaggaa

SEQ ID NO: 1751093 - RNA, 19 nt, Homo sapiens
  misc_RNA (1)...(19): siRNA sense strand
uccaaagaaucggcaaaug

SEQ ID NO: 1751094 - RNA, 19 nt, Homo sapiens
  misc_RNA (1)...(19): siRNA sense strand
acaaacaagaggacugugu

SEQ ID NO: 1751095 - RNA, 19 nt, Homo sapiens
  misc_RNA (1)...(19): siRNA sense strand
acaagauguucucccucaa

SEQ ID NO: 1751096 - RNA, 19 nt, Homo sapiens
  misc_RNA (1)...(19): siRNA sense strand
aagauguucucccucaaga

SEQ ID NO: 1751097 - RNA, 19 nt, Homo sapiens
  misc_RNA (1)...(19): siRNA sense strand
caagauguucucccucaag

SEQ ID NO: 1751098 - RNA, 19 nt, Homo sapiens
  misc_RNA (1)...(19): siRNA sense strand
cguggaagacggagaggaa

SEQ ID NO: 1751099 - RNA, 19 nt, Homo sapiens
  misc_RNA (1)...(19): siRNA sense strand
acaagauguucucccucaa

SEQ ID NO: 1751100 - RNA, 19 nt, Homo sapiens
  misc_RNA (1)...(19): siRNA sense strand
aagauguucucccucaaga

SEQ ID NO: 1751101 - RNA, 19 nt, Homo sapiens
  misc_RNA (1)...(19): siRNA sense strand
guaaucauuccuuccacaa

SEQ ID NO: 1751102 - RNA, 19 nt, Homo sapiens
  misc_RNA (1)...(19): siRNA sense strand
ucuuagaugucaagcugaa

SEQ ID NO: 1751103 - RNA, 19 nt, Homo sapiens
  misc_RNA (1)...(19): siRNA sense strand
aaacaaacaagaggacugu

SEQ ID NO: 1751104 - RNA, 19 nt, Homo sapiens
  misc_RNA (1)...(19): siRNA sense strand
aaucauuccuuccacaacu

SEQ ID NO: 1751105 - RNA, 19 nt, Homo sapiens
  misc_RNA (1)...(19): siRNA sense strand
caagauguucucccucaag

SEQ ID NO: 1751106 - RNA, 19 nt, Homo sapiens
  misc_RNA (1)...(19): siRNA sense strand
uuccacaacugcugcaugu

SEQ ID NO: 1751107 - RNA, 19 nt, Homo sapiens
  misc_RNA (1)...(19): siRNA sense strand
cguggaagacggagaggaa

SEQ ID NO: 1751108 - RNA, 19 nt, Homo sapiens
  misc_RNA (1)...(19): siRNA sense strand
acaaacaagaggacugugu

SEQ ID NO: 1751109 - RNA, 19 nt, Homo sapiens
  misc_RNA (1)...(19): siRNA sense strand
acaagauguucucccucaa

SEQ ID NO: 1751110 - RNA, 19 nt, Homo sapiens
  misc_RNA (1)...(19): siRNA sense strand
caaguucgcuguucaagua

SEQ ID NO: 1751111 - RNA, 19 nt, Homo sapiens
  misc_RNA (1)...(19): siRNA sense strand
gcacgcauaucaucucuuu

SEQ ID NO: 1751112 - RNA, 19 nt, Homo sapiens
  misc_RNA (1)...(19): siRNA sense strand
gaacugaacgaaugaagaa

SEQ ID NO: 1751113 - RNA, 19 nt, Homo sapiens
  misc_RNA (1)...(19): siRNA sense strand
gcucaccuuugucuaaaua

SEQ ID NO: 1751114 - RNA, 19 nt, Homo sapiens
  misc_RNA (1)...(19): siRNA sense strand
gaagcucaccuuugucuaa

SEQ ID NO: 1751115 - RNA, 19 nt, Homo sapiens
  misc_RNA (1)...(19): siRNA sense strand
gaagaagacuauggcauca

SEQ ID NO: 1751116 - RNA, 19 nt, Homo sapiens
  misc_RNA (1)...(19): siRNA sense strand
gaaaccagaagaagaauau

SEQ ID NO: 1751117 - RNA, 19 nt, Homo sapiens
  misc_RNA (1)...(19): siRNA sense strand
agagagaacugaacgaaug

SEQ ID NO: 1751118 - RNA, 19 nt, Homo sapiens
  misc_RNA (1)...(19): siRNA sense strand
auaaaggacuucccugaaa

SEQ ID NO: 1751119 - RNA, 19 nt, Homo sapiens
  misc_RNA (1)...(19): siRNA sense strand
cuguacagcugguauauuu

SEQ ID NO: 1751120 - RNA, 19 nt, Homo sapiens
  misc_RNA (1)...(19): siRNA sense strand
gaacgaaugaagaagacua

SEQ ID NO: 1751121 - RNA, 19 nt, Homo sapiens
  misc_RNA (1)...(19): siRNA sense strand
agacuaugaugccaacuuu

SEQ ID NO: 1751122 - RNA, 19 nt, Homo sapiens
  misc_RNA (1)...(19): siRNA sense strand
ugacuugggacaucaaaua

SEQ ID NO: 1751123 - RNA, 19 nt, Homo sapiens
  misc_RNA (1)...(19): siRNA sense strand
cuugggacaucaaauauaa

SEQ ID NO: 1751124 - RNA, 19 nt, Homo sapiens
  misc_RNA (1)...(19): siRNA sense strand
ggaguauguuguauucgaa

SEQ ID NO: 1751125 - RNA, 19 nt, Homo sapiens
  misc_RNA (1)...(19): siRNA sense strand
gaaagcaggauugguuauu

SEQ ID NO: 1751126 - RNA, 19 nt, Homo sapiens
  misc_RNA (1)...(19): siRNA sense strand
ggagcuuuguggaaucuuu

SEQ ID NO: 1751127 - RNA, 19 nt, Homo sapiens
  misc_RNA (1)...(19): siRNA sense strand
gcugaaaccagaagaagaa

SEQ ID NO: 1751128 - RNA, 19 nt, Homo sapiens
  misc_RNA (1)...(19): siRNA sense strand
ggccaucuaugaccgguuu

SEQ ID NO: 1751129 - RNA, 19 nt, Homo sapiens
  misc_RNA (1)...(19): siRNA sense strand
gagaaugcauaccaagauc

SEQ ID NO: 1751130 - RNA, 19 nt, Homo sapiens
  misc_RNA (1)...(19): siRNA sense strand
guacagcugguauauuuga

SEQ ID NO: 1751131 - RNA, 19 nt, Homo sapiens
  misc_RNA (1)...(19): siRNA sense strand
uauugaagcucaccuuugu

SEQ ID NO: 1751132 - RNA, 19 nt, Homo sapiens
  misc_RNA (1)...(19): siRNA sense strand
gcagcuauaguuccaguaa

SEQ ID NO: 1751133 - RNA, 19 nt, Homo sapiens
  misc_RNA (1)...(19): siRNA sense strand
uauggaagcuggagaaugc

SEQ ID NO: 1751134 - RNA, 19 nt, Homo sapiens
  misc_RNA (1)...(19): siRNA sense strand
uuucacaccuccuauuuau

SEQ ID NO: 1751135 - RNA, 19 nt, Homo sapiens
  misc_RNA (1)...(19): siRNA sense strand
ggagaaugcauaccaagau

SEQ ID NO: 1751136 - RNA, 19 nt, Homo sapiens
  misc_RNA (1)...(19): siRNA sense strand
ucacaccuccuauuuauca

SEQ ID NO: 1751137 - RNA, 19 nt, Homo sapiens
  misc_RNA (1)...(19): siRNA sense strand
gcauaucaucucuuucaaa

SEQ ID NO: 1751138 - RNA, 19 nt, Homo sapiens
  misc_RNA (1)...(19): siRNA sense strand
caaaggagggacugauaga

SEQ ID NO: 1751139 - RNA, 19 nt, Homo sapiens
  misc_RNA (1)...(19): siRNA sense strand
guugauguauggacaggaa

SEQ ID NO: 1751140 - RNA, 19 nt, Homo sapiens
  misc_RNA (1)...(19): siRNA sense strand
uaaauaacucagaccauga

SEQ ID NO: 1751141 - RNA, 19 nt, Homo sapiens
  misc_RNA (1)...(19): siRNA sense strand
gcuaaggauaucuuuauug

SEQ ID NO: 1751142 - RNA, 19 nt, Homo sapiens
  misc_RNA (1)...(19): siRNA sense strand
gagcuuuguggaaucuuua

SEQ ID NO: 1751143 - RNA, 19 nt, Homo sapiens
  misc_RNA (1)...(19): siRNA sense strand
gagagaacugaacgaauga

SEQ ID NO: 1751144 - RNA, 19 nt, Homo sapiens
  misc_RNA (1)...(19): siRNA sense strand
ggaaagcaggauugguuau

SEQ ID NO: 1751145 - RNA, 19 nt, Homo sapiens
  misc_RNA (1)...(19): siRNA sense strand
ggaagcuggagaaugcaua

SEQ ID NO: 1751146 - RNA, 19 nt, Homo sapiens
  misc_RNA (1)...(19): siRNA sense strand
agacaugacuugggacauc

SEQ ID NO: 1751147 - RNA, 19 nt, Homo sapiens
  misc_RNA (1)...(19): siRNA sense strand
uaaaggacuucccugaaaa

SEQ ID NO: 1751148 - RNA, 19 nt, Homo sapiens
  misc_RNA (1)...(19): siRNA sense strand
aaagcaggauugguuauuc

SEQ ID NO: 1751149 - RNA, 19 nt, Homo sapiens
  misc_RNA (1)...(19): siRNA sense strand
cuugguaacugaacacugu

SEQ ID NO: 1751150 - RNA, 19 nt, Homo sapiens
  misc_RNA (1)...(19): siRNA sense strand
ccuggaguauguuguauuc

SEQ ID NO: 1751151 - RNA, 19 nt, Homo sapiens
  misc_RNA (1)...(19): siRNA sense strand
gcuggagaaugcauaccaa

SEQ ID NO: 1751152 - RNA, 19 nt, Homo sapiens
  misc_RNA (1)...(19): siRNA sense strand
agaagacuauggcaucaca

SEQ ID NO: 1751153 - RNA, 19 nt, Homo sapiens
  misc_RNA (1)...(19): siRNA sense strand
guauggacaggaagaugua

SEQ ID NO: 1751154 - RNA, 19 nt, Homo sapiens
  misc_RNA (1)...(19): siRNA sense strand
acuaugaugccaacuuuaa

SEQ ID NO: 1751155 - RNA, 19 nt, Homo sapiens
  misc_RNA (1)...(19): siRNA sense strand
ccggaaagcaggauugguu

SEQ ID NO: 1751156 - RNA, 19 nt, Homo sapiens
  misc_RNA (1)...(19): siRNA sense strand
guucgcuguucaaguauga

SEQ ID NO: 1751157 - RNA, 19 nt, Homo sapiens
  misc_RNA (1)...(19): siRNA sense strand
gacaugacuugggacauca

SEQ ID NO: 1751158 - RNA, 19 nt, Homo sapiens
  misc_RNA (1)...(19): siRNA sense strand
ggacugauagagagaacug

SEQ ID NO: 1751159 - RNA, 19 nt, Homo sapiens
  misc_RNA (1)...(19): siRNA sense strand
cggaaagcaggauugguua

SEQ ID NO: 1751160 - RNA, 19 nt, Homo sapiens
  misc_RNA (1)...(19): siRNA sense strand
aagcucaccuuugucuaaa

SEQ ID NO: 1751161 - RNA, 19 nt, Homo sapiens
  misc_RNA (1)...(19): siRNA sense strand
cagaagaagaauaugaaga

SEQ ID NO: 1751162 - RNA, 19 nt, Homo sapiens
  misc_RNA (1)...(19): siRNA sense strand
guuucacaccuccuauuua

SEQ ID NO: 1751163 - RNA, 19 nt, Homo sapiens
  misc_RNA (1)...(19): siRNA sense strand
ugaaaccagaagaagaaua

SEQ ID NO: 1751164 - RNA, 19 nt, Homo sapiens
  misc_RNA (1)...(19): siRNA sense strand
aggaagauguacccaagga

SEQ ID NO: 1751165 - RNA, 19 nt, Homo sapiens
  misc_RNA (1)...(19): siRNA sense strand
gaaaagcaguugacaaacc

SEQ ID NO: 1751166 - RNA, 19 nt, Homo sapiens
  misc_RNA (1)...(19): siRNA sense strand
uggaguauguuguauucga

SEQ ID NO: 1751167 - RNA, 19 nt, Homo sapiens
  misc_RNA (1)...(19): siRNA sense strand
gacuauggcaucacaagug

SEQ ID NO: 1751168 - RNA, 19 nt, Homo sapiens
  misc_RNA (1)...(19): siRNA sense strand
agaagaagaauaugaagag

SEQ ID NO: 1751169 - RNA, 19 nt, Homo sapiens
  misc_RNA (1)...(19): siRNA sense strand
gaaccagggcaacguguac

SEQ ID NO: 1751170 - RNA, 19 nt, Homo sapiens
  misc_RNA (1)...(19): siRNA sense strand
ggauaucuuuauugaagcu

SEQ ID NO: 1751171 - RNA, 19 nt, Homo sapiens
  misc_RNA (1)...(19): siRNA sense strand
uaugcaacaugcccggaaa

SEQ ID NO: 1751172 - RNA, 19 nt, Homo sapiens
  misc_RNA (1)...(19): siRNA sense strand
caacguguacggccagauc

SEQ ID NO: 1751173 - RNA, 19 nt, Homo sapiens
  misc_RNA (1)...(19): siRNA sense strand
aaaaggaguuuaugcaaca

SEQ ID NO: 1751174 - RNA, 19 nt, Homo sapiens
  misc_RNA (1)...(19): siRNA sense strand
aauaaaggacuucccugaa

SEQ ID NO: 1751175 - RNA, 19 nt, Homo sapiens
  misc_RNA (1)...(19): siRNA sense strand
aagcagcccauccuuaaga

SEQ ID NO: 1751176 - RNA, 19 nt, Homo sapiens
  misc_RNA (1)...(19): siRNA sense strand
ccucucauguuguucaagu

SEQ ID NO: 1751177 - RNA, 19 nt, Homo sapiens
  misc_RNA (1)...(19): siRNA sense strand
acgcauaucaucucuuuca

SEQ ID NO: 1751178 - RNA, 19 nt, Homo sapiens
  misc_RNA (1)...(19): siRNA sense strand
ccuccuauuuaucaaccua

SEQ ID NO: 1751179 - RNA, 19 nt, Homo sapiens
  misc_RNA (1)...(19): siRNA sense strand
aaacguuucacaccuccua

SEQ ID NO: 1751180 - RNA, 19 nt, Homo sapiens
  misc_RNA (1)...(19): siRNA sense strand
ucaguccgcagcuauaguu

SEQ ID NO: 1751181 - RNA, 19 nt, Homo sapiens
  misc_RNA (1)...(19): siRNA sense strand
ugguauauuugaugccuau

SEQ ID NO: 1751182 - RNA, 19 nt, Homo sapiens
  misc_RNA (1)...(19): siRNA sense strand
agcuauaguuccaguaaga

SEQ ID NO: 1751183 - RNA, 19 nt, Homo sapiens
  misc_RNA (1)...(19): siRNA sense strand
gacuugggacaucaaauau

SEQ ID NO: 1751184 - RNA, 19 nt, Homo sapiens
  misc_RNA (1)...(19): siRNA sense strand
gacuaugaugccaacuuua

SEQ ID NO: 1751185 - RNA, 19 nt, Homo sapiens
  misc_RNA (1)...(19): siRNA sense strand
cgaaugaagaagacuaugg

SEQ ID NO: 1751186 - RNA, 19 nt, Homo sapiens
  misc_RNA (1)...(19): siRNA sense strand
ucaaaggagggacugauag

SEQ ID NO: 1751187 - RNA, 19 nt, Homo sapiens
  misc_RNA (1)...(19): siRNA sense strand
gcuggagcuuuguggaauc

SEQ ID NO: 1751188 - RNA, 19 nt, Homo sapiens
  misc_RNA (1)...(19): siRNA sense strand
aaccagaagaagaauauga

SEQ ID NO: 1751189 - RNA, 19 nt, Homo sapiens
  misc_RNA (1)...(19): siRNA sense strand
gguuuggccgguugaugua

SEQ ID NO: 1751190 - RNA, 19 nt, Homo sapiens
  misc_RNA (1)...(19): siRNA sense strand
ggagggacugauagagaga

SEQ ID NO: 1751191 - RNA, 19 nt, Homo sapiens
  misc_RNA (1)...(19): siRNA sense strand
gaguauguuguauucgaaa

SEQ ID NO: 1751192 - RNA, 19 nt, Homo sapiens
  misc_RNA (1)...(19): siRNA sense strand
agacucuggccaucuauga

SEQ ID NO: 1751193 - RNA, 19 nt, Homo sapiens
  misc_RNA (1)...(19): siRNA sense strand
acuauggcaucacaagugu

SEQ ID NO: 1751194 - RNA, 19 nt, Homo sapiens
  misc_RNA (1)...(19): siRNA sense strand
aaggagggacugauagaga

SEQ ID NO: 1751195 - RNA, 19 nt, Homo sapiens
  misc_RNA (1)...(19): siRNA sense strand
ucgaaaagcaguugacaaa

SEQ ID NO: 1751196 - RNA, 19 nt, Homo sapiens
  misc_RNA (1)...(19): siRNA sense strand
gcuauaguuccaguaagaa

SEQ ID NO: 1751197 - RNA, 19 nt, Homo sapiens
  misc_RNA (1)...(19): siRNA sense strand
gaagcuggagaaugcauac

SEQ ID NO: 1751198 - RNA, 19 nt, Homo sapiens
  misc_RNA (1)...(19): siRNA sense strand
cguuucacaccuccuauuu

SEQ ID NO: 1751199 - RNA, 19 nt, Homo sapiens
  misc_RNA (1)...(19): siRNA sense strand
gcaacaugcccggaaagca

SEQ ID NO: 1751200 - RNA, 19 nt, Homo sapiens
  misc_RNA (1)...(19): siRNA sense strand
guauauuugaugccuaugu

SEQ ID NO: 1751201 - RNA, 19 nt, Homo sapiens
  misc_RNA (1)...(19): siRNA sense strand
ugaaccagggcaacgugua

SEQ ID NO: 1751202 - RNA, 19 nt, Homo sapiens
  misc_RNA (1)...(19): siRNA sense strand
gagaacugaacgaaugaag

SEQ ID NO: 1751203 - RNA, 19 nt, Homo sapiens
  misc_RNA (1)...(19): siRNA sense strand
ggccuguacagcugguaua

SEQ ID NO: 1751204 - RNA, 19 nt, Homo sapiens
  misc_RNA (1)...(19): siRNA sense strand
gaaugcauaccaagaucgu

SEQ ID NO: 1751205 - RNA, 19 nt, Homo sapiens
  misc_RNA (1)...(19): siRNA sense strand
ggaagauguacccaaggau

SEQ ID NO: 1751206 - RNA, 19 nt, Homo sapiens
  misc_RNA (1)...(19): siRNA sense strand
cuaugaugccaacuuuaaa

SEQ ID NO: 1751207 - RNA, 19 nt, Homo sapiens
  misc_RNA (1)...(19): siRNA sense strand
agaacugaacgaaugaaga

SEQ ID NO: 1751208 - RNA, 19 nt, Homo sapiens
  misc_RNA (1)...(19): siRNA sense strand
uucaaaggagggacugaua

SEQ ID NO: 1751209 - RNA, 19 nt, Homo sapiens
  misc_RNA (1)...(19): siRNA sense strand
cagcuauaguuccaguaag

SEQ ID NO: 1751210 - RNA, 19 nt, Homo sapiens
  misc_RNA (1)...(19): siRNA sense strand
ggaaauccauguccgugua

SEQ ID NO: 1751211 - RNA, 19 nt, Homo sapiens
  misc_RNA (1)...(19): siRNA sense strand
ccaacgagcucccgaguga

SEQ ID NO: 1751212 - RNA, 19 nt, Homo sapiens
  misc_RNA (1)...(19): siRNA sense strand
gcagcaaguuugugcagua

SEQ ID NO: 1751213 - RNA, 19 nt, Homo sapiens
  misc_RNA (1)...(19): siRNA sense strand
gcagcaagauguuugugaa

SEQ ID NO: 1751214 - RNA, 19 nt, Homo sapiens
  misc_RNA (1)...(19): siRNA sense strand
gaugcgggcuccugccuuu

SEQ ID NO: 1751215 - RNA, 19 nt, Homo sapiens
  misc_RNA (1)...(19): siRNA sense strand
gagcagauccuggcaaaga

SEQ ID NO: 1751216 - RNA, 19 nt, Homo sapiens
  misc_RNA (1)...(19): siRNA sense strand
ugacuugccugguggagaa

SEQ ID NO: 1751217 - RNA, 19 nt, Homo sapiens
  misc_RNA (1)...(19): siRNA sense strand
ccaaggguguguaugagaa

SEQ ID NO: 1751218 - RNA, 19 nt, Homo sapiens
  misc_RNA (1)...(19): siRNA sense strand
gaccucacaucaacuucua

SEQ ID NO: 1751219 - RNA, 19 nt, Homo sapiens
  misc_RNA (1)...(19): siRNA sense strand
gggagcagauccuggcaaa

SEQ ID NO: 1751220 - RNA, 19 nt, Homo sapiens
  misc_RNA (1)...(19): siRNA sense strand
gcaaguuugugcaguacga

SEQ ID NO: 1751221 - RNA, 19 nt, Homo sapiens
  misc_RNA (1)...(19): siRNA sense strand
gcaagggcgugcagaggau

SEQ ID NO: 1751222 - RNA, 19 nt, Homo sapiens
  misc_RNA (1)...(19): siRNA sense strand
ggacgacugcagcaaguuu

SEQ ID NO: 1751223 - RNA, 19 nt, Homo sapiens
  misc_RNA (1)...(19): siRNA sense strand
guaacacggucaucaagca

SEQ ID NO: 1751224 - RNA, 19 nt, Homo sapiens
  misc_RNA (1)...(19): siRNA sense strand
gggugaaccuggugacaga

SEQ ID NO: 1751225 - RNA, 19 nt, Homo sapiens
  misc_RNA (1)...(19): siRNA sense strand
uuaacgagaucacugcuau

SEQ ID NO: 1751226 - RNA, 19 nt, Homo sapiens
  misc_RNA (1)...(19): siRNA sense strand
acacggagcugggcaagau

SEQ ID NO: 1751227 - RNA, 19 nt, Homo sapiens
  misc_RNA (1)...(19): siRNA sense strand
cgagaucacugcuaugacu

SEQ ID NO: 1751228 - RNA, 19 nt, Homo sapiens
  misc_RNA (1)...(19): siRNA sense strand
ucgaggcccugaaggagua

SEQ ID NO: 1751229 - RNA, 19 nt, Homo sapiens
  misc_RNA (1)...(19): siRNA sense strand
acagcaacaugaagcaauu

SEQ ID NO: 1751230 - RNA, 19 nt, Homo sapiens
  misc_RNA (1)...(19): siRNA sense strand
gagaaccugcaguccuuua

SEQ ID NO: 1751231 - RNA, 19 nt, Homo sapiens
  misc_RNA (1)...(19): siRNA sense strand
ccgcaggcuuggcaucuuu

SEQ ID NO: 1751232 - RNA, 19 nt, Homo sapiens
  misc_RNA (1)...(19): siRNA sense strand
ccuggugguuuguguauga

SEQ ID NO: 1751233 - RNA, 19 nt, Homo sapiens
  misc_RNA (1)...(19): siRNA sense strand
gaagugcuccgaagacaac

SEQ ID NO: 1751234 - RNA, 19 nt, Homo sapiens
  misc_RNA (1)...(19): siRNA sense strand
uggagaaccugcaguccuu

SEQ ID NO: 1751235 - RNA, 19 nt, Homo sapiens
  misc_RNA (1)...(19): siRNA sense strand
cagagauggugcugucaga

SEQ ID NO: 1751236 - RNA, 19 nt, Homo sapiens
  misc_RNA (1)...(19): siRNA sense strand
agauggugcugucagauga

SEQ ID NO: 1751237 - RNA, 19 nt, Homo sapiens
  misc_RNA (1)...(19): siRNA sense strand
uaccucaucuccuccaaug

SEQ ID NO: 1751238 - RNA, 19 nt, Homo sapiens
  misc_RNA (1)...(19): siRNA sense strand
gagauggugcugucagaug

SEQ ID NO: 1751239 - RNA, 19 nt, Homo sapiens
  misc_RNA (1)...(19): siRNA sense strand
caaggaaggaggacaugga

SEQ ID NO: 1751240 - RNA, 19 nt, Homo sapiens
  misc_RNA (1)...(19): siRNA sense strand
gcaccagcccugaagaaag

SEQ ID NO: 1751241 - RNA, 19 nt, Homo sapiens
  misc_RNA (1)...(19): siRNA sense strand
ccacggcucugggcuucaa

SEQ ID NO: 1751242 - RNA, 19 nt, Homo sapiens
  misc_RNA (1)...(19): siRNA sense strand
ccucaucuccuccaauguu

SEQ ID NO: 1751243 - RNA, 19 nt, Homo sapiens
  misc_RNA (1)...(19): siRNA sense strand
gcguggcgcugucuacuac

SEQ ID NO: 1751244 - RNA, 19 nt, Homo sapiens
  misc_RNA (1)...(19): siRNA sense strand
ggaguucacccuggaguuc

SEQ ID NO: 1751245 - RNA, 19 nt, Homo sapiens
  misc_RNA (1)...(19): siRNA sense strand
agacggaccugaccuucgu

SEQ ID NO: 1751246 - RNA, 19 nt, Homo sapiens
  misc_RNA (1)...(19): siRNA sense strand
ccgagaagcccucaucagu

SEQ ID NO: 1751247 - RNA, 19 nt, Homo sapiens
  misc_RNA (1)...(19): siRNA sense strand
gcgcaagcuggacgaguuu

SEQ ID NO: 1751248 - RNA, 19 nt, Homo sapiens
  misc_RNA (1)...(19): siRNA sense strand
caccagcccugaagaaagc

SEQ ID NO: 1751249 - RNA, 19 nt, Homo sapiens
  misc_RNA (1)...(19): siRNA sense strand
ggccagggcagcaagaugu

SEQ ID NO: 1751250 - RNA, 19 nt, Homo sapiens
  misc_RNA (1)...(19): siRNA sense strand
ggaguaugagccugagaug

SEQ ID NO: 1751251 - RNA, 19 nt, Homo sapiens
  misc_RNA (1)...(19): siRNA sense strand
gcucaccaccaaucagaug

SEQ ID NO: 1751252 - RNA, 19 nt, Homo sapiens
  misc_RNA (1)...(19): siRNA sense strand
ugaaccaggacaagaagaa

SEQ ID NO: 1751253 - RNA, 19 nt, Homo sapiens
  misc_RNA (1)...(19): siRNA sense strand
gggcugcaccucagucauc

SEQ ID NO: 1751254 - RNA, 19 nt, Homo sapiens
  misc_RNA (1)...(19): siRNA sense strand
ggugguggugcuccagaua

SEQ ID NO: 1751255 - RNA, 19 nt, Homo sapiens
  misc_RNA (1)...(19): siRNA sense strand
caucgacugugagguguuc

SEQ ID NO: 1751256 - RNA, 19 nt, Homo sapiens
  misc_RNA (1)...(19): siRNA sense strand
gcaucuuccucacggcaau

SEQ ID NO: 1751257 - RNA, 19 nt, Homo sapiens
  misc_RNA (1)...(19): siRNA sense strand
uggcugcccuugucuccuu

SEQ ID NO: 1751258 - RNA, 19 nt, Homo sapiens
  misc_RNA (1)...(19): siRNA sense strand
caucucggguaccacguau

SEQ ID NO: 1751259 - RNA, 19 nt, Homo sapiens
  misc_RNA (1)...(19): siRNA sense strand
gcacgcucaccaccaauca

SEQ ID NO: 1751260 - RNA, 19 nt, Homo sapiens
  misc_RNA (1)...(19): siRNA sense strand
gcugucuacuacuucaaga

SEQ ID NO: 1751261 - RNA, 19 nt, Homo sapiens
  misc_RNA (1)...(19): siRNA sense strand
caauaucacaucgggcaaa

SEQ ID NO: 1751262 - RNA, 19 nt, Homo sapiens
  misc_RNA (1)...(19): siRNA sense strand
gcaguccuuuaacgagauc

SEQ ID NO: 1751263 - RNA, 19 nt, Homo sapiens
  misc_RNA (1)...(19): siRNA sense strand
gcgcauggcacgcaagaac

SEQ ID NO: 1751264 - RNA, 19 nt, Homo sapiens
  misc_RNA (1)...(19): siRNA sense strand
ucuaccagcugaggaacuu

SEQ ID NO: 1751265 - RNA, 19 nt, Homo sapiens
  misc_RNA (1)...(19): siRNA sense strand
ggagaaccugcaguccuuu

SEQ ID NO: 1751266 - RNA, 19 nt, Homo sapiens
  misc_RNA (1)...(19): siRNA sense strand
ggaccucacaucaacuucu

SEQ ID NO: 1751267 - RNA, 19 nt, Homo sapiens
  misc_RNA (1)...(19): siRNA sense strand
gaaccugcaguccuuuaac

SEQ ID NO: 1751268 - RNA, 19 nt, Homo sapiens
  misc_RNA (1)...(19): siRNA sense strand
caucaacaucggccacuuc

SEQ ID NO: 1751269 - RNA, 19 nt, Homo sapiens
  misc_RNA (1)...(19): siRNA sense strand
agauaucucugccugucau

SEQ ID NO: 1751270 - RNA, 19 nt, Homo sapiens
  misc_RNA (1)...(19): siRNA sense strand
ccaccaccauggccuuguc

SEQ ID NO: 1751271 - RNA, 19 nt, Homo sapiens
  misc_RNA (1)...(19): siRNA sense strand
cgaggucgucugcaucuuc

SEQ ID NO: 1751272 - RNA, 19 nt, Homo sapiens
  misc_RNA (1)...(19): siRNA sense strand
ggaacgcaacgccgagagu

SEQ ID NO: 1751273 - RNA, 19 nt, Homo sapiens
  misc_RNA (1)...(19): siRNA sense strand
gggagcuggugcuggaaca

SEQ ID NO: 1751274 - RNA, 19 nt, Homo sapiens
  misc_RNA (1)...(19): siRNA sense strand
ggcagcaagauguuuguga

SEQ ID NO: 1751275 - RNA, 19 nt, Homo sapiens
  misc_RNA (1)...(19): siRNA sense strand
gaaauccauguccguguac

SEQ ID NO: 1751276 - RNA, 19 nt, Homo sapiens
  misc_RNA (1)...(19): siRNA sense strand
ggccaaggguguguaugag

SEQ ID NO: 1751277 - RNA, 19 nt, Homo sapiens
  misc_RNA (1)...(19): siRNA sense strand
cggcugucaucacuacaug

SEQ ID NO: 1751278 - RNA, 19 nt, Homo sapiens
  misc_RNA (1)...(19): siRNA sense strand
gccaaggguguguaugaga

SEQ ID NO: 1751279 - RNA, 19 nt, Homo sapiens
  misc_RNA (1)...(19): siRNA sense strand
gcuggcucuucuuccgaua

SEQ ID NO: 1751280 - RNA, 19 nt, Homo sapiens
  misc_RNA (1)...(19): siRNA sense strand
gagcugugaaccaggacaa

SEQ ID NO: 1751281 - RNA, 19 nt, Homo sapiens
  misc_RNA (1)...(19): siRNA sense strand
cagcaaguuugugcaguac

SEQ ID NO: 1751282 - RNA, 19 nt, Homo sapiens
  misc_RNA (1)...(19): siRNA sense strand
agcgcaagcuggacgaguu

SEQ ID NO: 1751283 - RNA, 19 nt, Homo sapiens
  misc_RNA (1)...(19): siRNA sense strand
caagauccggagccagaug

SEQ ID NO: 1751284 - RNA, 19 nt, Homo sapiens
  misc_RNA (1)...(19): siRNA sense strand
gcugugaaccaggacaaga

SEQ ID NO: 1751285 - RNA, 19 nt, Homo sapiens
  misc_RNA (1)...(19): siRNA sense strand
guggcgcugucuacuacuu

SEQ ID NO: 1751286 - RNA, 19 nt, Homo sapiens
  misc_RNA (1)...(19): siRNA sense strand
ccaucgaggcccugaagga

SEQ ID NO: 1751287 - RNA, 19 nt, Homo sapiens
  misc_RNA (1)...(19): siRNA sense strand
cgagcuggcgccuguaaca

SEQ ID NO: 1751288 - RNA, 19 nt, Homo sapiens
  misc_RNA (1)...(19): siRNA sense strand
cggagacagcucugacuug

SEQ ID NO: 1751289 - RNA, 19 nt, Homo sapiens
  misc_RNA (1)...(19): siRNA sense strand
ggaaauccauguccgugua

SEQ ID NO: 1751290 - RNA, 19 nt, Homo sapiens
  misc_RNA (1)...(19): siRNA sense strand
ccaacgagcucccgaguga

SEQ ID NO: 1751291 - RNA, 19 nt, Homo sapiens
  misc_RNA (1)...(19): siRNA sense strand
gcagcaaguuugugcagua

SEQ ID NO: 1751292 - RNA, 19 nt, Homo sapiens
  misc_RNA (1)...(19): siRNA sense strand
gcagcaagauguuugugaa

SEQ ID NO: 1751293 - RNA, 19 nt, Homo sapiens
  misc_RNA (1)...(19): siRNA sense strand
gaugcgggcuccugccuuu

SEQ ID NO: 1751294 - RNA, 19 nt, Homo sapiens
  misc_RNA (1)...(19): siRNA sense strand
gagcagauccuggcaaaga

SEQ ID NO: 1751295 - RNA, 19 nt, Homo sapiens
  misc_RNA (1)...(19): siRNA sense strand
ugacuugccugguggagaa

SEQ ID NO: 1751296 - RNA, 19 nt, Homo sapiens
  misc_RNA (1)...(19): siRNA sense strand
ccaaggguguguaugagaa

SEQ ID NO: 1751297 - RNA, 19 nt, Homo sapiens
  misc_RNA (1)...(19): siRNA sense strand
gaccucacaucaacuucua

SEQ ID NO: 1751298 - RNA, 19 nt, Homo sapiens
  misc_RNA (1)...(19): siRNA sense strand
gggagcagauccuggcaaa

SEQ ID NO: 1751299 - RNA, 19 nt, Homo sapiens
  misc_RNA (1)...(19): siRNA sense strand
gcaaguuugugcaguacga

SEQ ID NO: 1751300 - RNA, 19 nt, Homo sapiens
  misc_RNA (1)...(19): siRNA sense strand
gcaagggcgugcagaggau

SEQ ID NO: 1751301 - RNA, 19 nt, Homo sapiens
  misc_RNA (1)...(19): siRNA sense strand
ggacgacugcagcaaguuu

SEQ ID NO: 1751302 - RNA, 19 nt, Homo sapiens
  misc_RNA (1)...(19): siRNA sense strand
guaacacggucaucaagca

SEQ ID NO: 1751303 - RNA, 19 nt, Homo sapiens
  misc_RNA (1)...(19): siRNA sense strand
gggugaaccuggugacaga

SEQ ID NO: 1751304 - RNA, 19 nt, Homo sapiens
  misc_RNA (1)...(19): siRNA sense strand
uuaacgagaucacugcuau

SEQ ID NO: 1751305 - RNA, 19 nt, Homo sapiens
  misc_RNA (1)...(19): siRNA sense strand
acacggagcugggcaagau

SEQ ID NO: 1751306 - RNA, 19 nt, Homo sapiens
  misc_RNA (1)...(19): siRNA sense strand
cgagaucacugcuaugacu

SEQ ID NO: 1751307 - RNA, 19 nt, Homo sapiens
  misc_RNA (1)...(19): siRNA sense strand
ucgaggcccugaaggagua

SEQ ID NO: 1751308 - RNA, 19 nt, Homo sapiens
  misc_RNA (1)...(19): siRNA sense strand
acagcaacaugaagcaauu

SEQ ID NO: 1751309 - RNA, 19 nt, Homo sapiens
  misc_RNA (1)...(19): siRNA sense strand
gagaaccugcaguccuuua

SEQ ID NO: 1751310 - RNA, 19 nt, Homo sapiens
  misc_RNA (1)...(19): siRNA sense strand
ccgcaggcuuggcaucuuu

SEQ ID NO: 1751311 - RNA, 19 nt, Homo sapiens
  misc_RNA (1)...(19): siRNA sense strand
ccuggugguuuguguauga

SEQ ID NO: 1751312 - RNA, 19 nt, Homo sapiens
  misc_RNA (1)...(19): siRNA sense strand
gaagugcuccgaagacaac

SEQ ID NO: 1751313 - RNA, 19 nt, Homo sapiens
  misc_RNA (1)...(19): siRNA sense strand
uggagaaccugcaguccuu

SEQ ID NO: 1751314 - RNA, 19 nt, Homo sapiens
  misc_RNA (1)...(19): siRNA sense strand
cagagauggugcugucaga

SEQ ID NO: 1751315 - RNA, 19 nt, Homo sapiens
  misc_RNA (1)...(19): siRNA sense strand
agauggugcugucagauga

SEQ ID NO: 1751316 - RNA, 19 nt, Homo sapiens
  misc_RNA (1)...(19): siRNA sense strand
uaccucaucuccuccaaug

SEQ ID NO: 1751317 - RNA, 19 nt, Homo sapiens
  misc_RNA (1)...(19): siRNA sense strand
gagauggugcugucagaug

SEQ ID NO: 1751318 - RNA, 19 nt, Homo sapiens
  misc_RNA (1)...(19): siRNA sense strand
caaggaaggaggacaugga

SEQ ID NO: 1751319 - RNA, 19 nt, Homo sapiens
  misc_RNA (1)...(19): siRNA sense strand
gcaccagcccugaagaaag

SEQ ID NO: 1751320 - RNA, 19 nt, Homo sapiens
  misc_RNA (1)...(19): siRNA sense strand
ccacggcucugggcuucaa

SEQ ID NO: 1751321 - RNA, 19 nt, Homo sapiens
  misc_RNA (1)...(19): siRNA sense strand
ccucaucuccuccaauguu

SEQ ID NO: 1751322 - RNA, 19 nt, Homo sapiens
  misc_RNA (1)...(19): siRNA sense strand
gcguggcgcugucuacuac

SEQ ID NO: 1751323 - RNA, 19 nt, Homo sapiens
  misc_RNA (1)...(19): siRNA sense strand
ggaguucacccuggaguuc

SEQ ID NO: 1751324 - RNA, 19 nt, Homo sapiens
  misc_RNA (1)...(19): siRNA sense strand
agacggaccugaccuucgu

SEQ ID NO: 1751325 - RNA, 19 nt, Homo sapiens
  misc_RNA (1)...(19): siRNA sense strand
ccgagaagcccucaucagu

SEQ ID NO: 1751326 - RNA, 19 nt, Homo sapiens
  misc_RNA (1)...(19): siRNA sense strand
gcgcaagcuggacgaguuu

SEQ ID NO: 1751327 - RNA, 19 nt, Homo sapiens
  misc_RNA (1)...(19): siRNA sense strand
caccagcccugaagaaagc

SEQ ID NO: 1751328 - RNA, 19 nt, Homo sapiens
  misc_RNA (1)...(19): siRNA sense strand
ggccagggcagcaagaugu

SEQ ID NO: 1751329 - RNA, 19 nt, Homo sapiens
  misc_RNA (1)...(19): siRNA sense strand
ggaguaugagccugagaug

SEQ ID NO: 1751330 - RNA, 19 nt, Homo sapiens
  misc_RNA (1)...(19): siRNA sense strand
gcucaccaccaaucagaug

SEQ ID NO: 1751331 - RNA, 19 nt, Homo sapiens
  misc_RNA (1)...(19): siRNA sense strand
ugaaccaggacaagaagaa

SEQ ID NO: 1751332 - RNA, 19 nt, Homo sapiens
  misc_RNA (1)...(19): siRNA sense strand
gggcugcaccucagucauc

SEQ ID NO: 1751333 - RNA, 19 nt, Homo sapiens
  misc_RNA (1)...(19): siRNA sense strand
ggugguggugcuccagaua

SEQ ID NO: 1751334 - RNA, 19 nt, Homo sapiens
  misc_RNA (1)...(19): siRNA sense strand
caucgacugugagguguuc

SEQ ID NO: 1751335 - RNA, 19 nt, Homo sapiens
  misc_RNA (1)...(19): siRNA sense strand
gcaucuuccucacggcaau

SEQ ID NO: 1751336 - RNA, 19 nt, Homo sapiens
  misc_RNA (1)...(19): siRNA sense strand
uggcugcccuugucuccuu

SEQ ID NO: 1751337 - RNA, 19 nt, Homo sapiens
  misc_RNA (1)...(19): siRNA sense strand
caucucggguaccacguau

SEQ ID NO: 1751338 - RNA, 19 nt, Homo sapiens
  misc_RNA (1)...(19): siRNA sense strand
gcacgcucaccaccaauca

SEQ ID NO: 1751339 - RNA, 19 nt, Homo sapiens
  misc_RNA (1)...(19): siRNA sense strand
gcugucuacuacuucaaga

SEQ ID NO: 1751340 - RNA, 19 nt, Homo sapiens
  misc_RNA (1)...(19): siRNA sense strand
caauaucacaucgggcaaa

SEQ ID NO: 1751341 - RNA, 19 nt, Homo sapiens
  misc_RNA (1)...(19): siRNA sense strand
gcaguccuuuaacgagauc

SEQ ID NO: 1751342 - RNA, 19 nt, Homo sapiens
  misc_RNA (1)...(19): siRNA sense strand
gcgcauggcacgcaagaac

SEQ ID NO: 1751343 - RNA, 19 nt, Homo sapiens
  misc_RNA (1)...(19): siRNA sense strand
ucuaccagcugaggaacuu

SEQ ID NO: 1751344 - RNA, 19 nt, Homo sapiens
  misc_RNA (1)...(19): siRNA sense strand
ggagaaccugcaguccuuu

SEQ ID NO: 1751345 - RNA, 19 nt, Homo sapiens
  misc_RNA (1)...(19): siRNA sense strand
ggaccucacaucaacuucu

SEQ ID NO: 1751346 - RNA, 19 nt, Homo sapiens
  misc_RNA (1)...(19): siRNA sense strand
gaaccugcaguccuuuaac

SEQ ID NO: 1751347 - RNA, 19 nt, Homo sapiens
  misc_RNA (1)...(19): siRNA sense strand
caucaacaucggccacuuc

SEQ ID NO: 1751348 - RNA, 19 nt, Homo sapiens
  misc_RNA (1)...(19): siRNA sense strand
agauaucucugccugucau

SEQ ID NO: 1751349 - RNA, 19 nt, Homo sapiens
  misc_RNA (1)...(19): siRNA sense strand
ccaccaccauggccuuguc

SEQ ID NO: 1751350 - RNA, 19 nt, Homo sapiens
  misc_RNA (1)...(19): siRNA sense strand
cgaggucgucugcaucuuc

SEQ ID NO: 1751351 - RNA, 19 nt, Homo sapiens
  misc_RNA (1)...(19): siRNA sense strand
ggaacgcaacgccgagagu

SEQ ID NO: 1751352 - RNA, 19 nt, Homo sapiens
  misc_RNA (1)...(19): siRNA sense strand
gggagcuggugcuggaaca

SEQ ID NO: 1751353 - RNA, 19 nt, Homo sapiens
  misc_RNA (1)...(19): siRNA sense strand
ggcagcaagauguuuguga

SEQ ID NO: 1751354 - RNA, 19 nt, Homo sapiens
  misc_RNA (1)...(19): siRNA sense strand
gaaauccauguccguguac

SEQ ID NO: 1751355 - RNA, 19 nt, Homo sapiens
  misc_RNA (1)...(19): siRNA sense strand
ggccaaggguguguaugag

SEQ ID NO: 1751356 - RNA, 19 nt, Homo sapiens
  misc_RNA (1)...(19): siRNA sense strand
cggcugucaucacuacaug

SEQ ID NO: 1751357 - RNA, 19 nt, Homo sapiens
  misc_RNA (1)...(19): siRNA sense strand
gccaaggguguguaugaga

SEQ ID NO: 1751358 - RNA, 19 nt, Homo sapiens
  misc_RNA (1)...(19): siRNA sense strand
gcuggcucuucuuccgaua

SEQ ID NO: 1751359 - RNA, 19 nt, Homo sapiens
  misc_RNA (1)...(19): siRNA sense strand
gagcugugaaccaggacaa

SEQ ID NO: 1751360 - RNA, 19 nt, Homo sapiens
  misc_RNA (1)...(19): siRNA sense strand
cagcaaguuugugcaguac

SEQ ID NO: 1751361 - RNA, 19 nt, Homo sapiens
  misc_RNA (1)...(19): siRNA sense strand
agcgcaagcuggacgaguu

SEQ ID NO: 1751362 - RNA, 19 nt, Homo sapiens
  misc_RNA (1)...(19): siRNA sense strand
caagauccggagccagaug

SEQ ID NO: 1751363 - RNA, 19 nt, Homo sapiens
  misc_RNA (1)...(19): siRNA sense strand
gcugugaaccaggacaaga

SEQ ID NO: 1751364 - RNA, 19 nt, Homo sapiens
  misc_RNA (1)...(19): siRNA sense strand
guggcgcugucuacuacuu

SEQ ID NO: 1751365 - RNA, 19 nt, Homo sapiens
  misc_RNA (1)...(19): siRNA sense strand
ccaucgaggcccugaagga

SEQ ID NO: 1751366 - RNA, 19 nt, Homo sapiens
  misc_RNA (1)...(19): siRNA sense strand
cgagcuggcgccuguaaca

SEQ ID NO: 1751367 - RNA, 19 nt, Homo sapiens
  misc_RNA (1)...(19): siRNA sense strand
cggagacagcucugacuug

SEQ ID NO: 1751368 - RNA, 19 nt, Homo sapiens
  misc_RNA (1)...(19): siRNA sense strand
ggaaauccauguccgugua

SEQ ID NO: 1751369 - RNA, 19 nt, Homo sapiens
  misc_RNA (1)...(19): siRNA sense strand
ccaacgagcucccgaguga

SEQ ID NO: 1751370 - RNA, 19 nt, Homo sapiens
  misc_RNA (1)...(19): siRNA sense strand
gcagcaaguuugugcagua

SEQ ID NO: 1751371 - RNA, 19 nt, Homo sapiens
  misc_RNA (1)...(19): siRNA sense strand
gcagcaagauguuugugaa

SEQ ID NO: 1751372 - RNA, 19 nt, Homo sapiens
  misc_RNA (1)...(19): siRNA sense strand
gaugcgggcuccugccuuu

SEQ ID NO: 1751373 - RNA, 19 nt, Homo sapiens
  misc_RNA (1)...(19): siRNA sense strand
gagcagauccuggcaaaga

SEQ ID NO: 1751374 - RNA, 19 nt, Homo sapiens
  misc_RNA (1)...(19): siRNA sense strand
ugacuugccugguggagaa

SEQ ID NO: 1751375 - RNA, 19 nt, Homo sapiens
  misc_RNA (1)...(19): siRNA sense strand
ccaaggguguguaugagaa

SEQ ID NO: 1751376 - RNA, 19 nt, Homo sapiens
  misc_RNA (1)...(19): siRNA sense strand
gaccucacaucaacuucua

SEQ ID NO: 1751377 - RNA, 19 nt, Homo sapiens
  misc_RNA (1)...(19): siRNA sense strand
gggagcagauccuggcaaa

SEQ ID NO: 1751378 - RNA, 19 nt, Homo sapiens
  misc_RNA (1)...(19): siRNA sense strand
gcaaguuugugcaguacga

SEQ ID NO: 1751379 - RNA, 19 nt, Homo sapiens
  misc_RNA (1)...(19): siRNA sense strand
gcaagggcgugcagaggau

SEQ ID NO: 1751380 - RNA, 19 nt, Homo sapiens
  misc_RNA (1)...(19): siRNA sense strand
ggacgacugcagcaaguuu

SEQ ID NO: 1751381 - RNA, 19 nt, Homo sapiens
  misc_RNA (1)...(19): siRNA sense strand
guaacacggucaucaagca

SEQ ID NO: 1751382 - RNA, 19 nt, Homo sapiens
  misc_RNA (1)...(19): siRNA sense strand
gggugaaccuggugacaga

SEQ ID NO: 1751383 - RNA, 19 nt, Homo sapiens
  misc_RNA (1)...(19): siRNA sense strand
uuaacgagaucacugcuau

SEQ ID NO: 1751384 - RNA, 19 nt, Homo sapiens
  misc_RNA (1)...(19): siRNA sense strand
acacggagcugggcaagau

SEQ ID NO: 1751385 - RNA, 19 nt, Homo sapiens
  misc_RNA (1)...(19): siRNA sense strand
cgagaucacugcuaugacu

SEQ ID NO: 1751386 - RNA, 19 nt, Homo sapiens
  misc_RNA (1)...(19): siRNA sense strand
ucgaggcccugaaggagua

SEQ ID NO: 1751387 - RNA, 19 nt, Homo sapiens
  misc_RNA (1)...(19): siRNA sense strand
acagcaacaugaagcaauu

SEQ ID NO: 1751388 - RNA, 19 nt, Homo sapiens
  misc_RNA (1)...(19): siRNA sense strand
gagaaccugcaguccuuua

SEQ ID NO: 1751389 - RNA, 19 nt, Homo sapiens
  misc_RNA (1)...(19): siRNA sense strand
ccgcaggcuuggcaucuuu

SEQ ID NO: 1751390 - RNA, 19 nt, Homo sapiens
  misc_RNA (1)...(19): siRNA sense strand
ccuggugguuuguguauga

SEQ ID NO: 1751391 - RNA, 19 nt, Homo sapiens
  misc_RNA (1)...(19): siRNA sense strand
gaagugcuccgaagacaac

SEQ ID NO: 1751392 - RNA, 19 nt, Homo sapiens
  misc_RNA (1)...(19): siRNA sense strand
uggagaaccugcaguccuu

SEQ ID NO: 1751393 - RNA, 19 nt, Homo sapiens
  misc_RNA (1)...(19): siRNA sense strand
cagagauggugcugucaga

SEQ ID NO: 1751394 - RNA, 19 nt, Homo sapiens
  misc_RNA (1)...(19): siRNA sense strand
agauggugcugucagauga

SEQ ID NO: 1751395 - RNA, 19 nt, Homo sapiens
  misc_RNA (1)...(19): siRNA sense strand
uaccucaucuccuccaaug

SEQ ID NO: 1751396 - RNA, 19 nt, Homo sapiens
  misc_RNA (1)...(19): siRNA sense strand
gagauggugcugucagaug

SEQ ID NO: 1751397 - RNA, 19 nt, Homo sapiens
  misc_RNA (1)...(19): siRNA sense strand
caaggaaggaggacaugga

SEQ ID NO: 1751398 - RNA, 19 nt, Homo sapiens
  misc_RNA (1)...(19): siRNA sense strand
gcaccagcccugaagaaag

SEQ ID NO: 1751399 - RNA, 19 nt, Homo sapiens
  misc_RNA (1)...(19): siRNA sense strand
ccacggcucugggcuucaa

SEQ ID NO: 1751400 - RNA, 19 nt, Homo sapiens
  misc_RNA (1)...(19): siRNA sense strand
ccucaucuccuccaauguu

SEQ ID NO: 1751401 - RNA, 19 nt, Homo sapiens
  misc_RNA (1)...(19): siRNA sense strand
gcguggcgcugucuacuac

SEQ ID NO: 1751402 - RNA, 19 nt, Homo sapiens
  misc_RNA (1)...(19): siRNA sense strand
ggaguucacccuggaguuc

SEQ ID NO: 1751403 - RNA, 19 nt, Homo sapiens
  misc_RNA (1)...(19): siRNA sense strand
agacggaccugaccuucgu

SEQ ID NO: 1751404 - RNA, 19 nt, Homo sapiens
  misc_RNA (1)...(19): siRNA sense strand
ccgagaagcccucaucagu

SEQ ID NO: 1751405 - RNA, 19 nt, Homo sapiens
  misc_RNA (1)...(19): siRNA sense strand
gcgcaagcuggacgaguuu

SEQ ID NO: 1751406 - RNA, 19 nt, Homo sapiens
  misc_RNA (1)...(19): siRNA sense strand
caccagcccugaagaaagc

SEQ ID NO: 1751407 - RNA, 19 nt, Homo sapiens
  misc_RNA (1)...(19): siRNA sense strand
ggccagggcagcaagaugu

SEQ ID NO: 1751408 - RNA, 19 nt, Homo sapiens
  misc_RNA (1)...(19): siRNA sense strand
ggaguaugagccugagaug

SEQ ID NO: 1751409 - RNA, 19 nt, Homo sapiens
  misc_RNA (1)...(19): siRNA sense strand
gcucaccaccaaucagaug

SEQ ID NO: 1751410 - RNA, 19 nt, Homo sapiens
  misc_RNA (1)...(19): siRNA sense strand
ugaaccaggacaagaagaa

SEQ ID NO: 1751411 - RNA, 19 nt, Homo sapiens
  misc_RNA (1)...(19): siRNA sense strand
gggcugcaccucagucauc

SEQ ID NO: 1751412 - RNA, 19 nt, Homo sapiens
  misc_RNA (1)...(19): siRNA sense strand
ggugguggugcuccagaua

SEQ ID NO: 1751413 - RNA, 19 nt, Homo sapiens
  misc_RNA (1)...(19): siRNA sense strand
caucgacugugagguguuc

SEQ ID NO: 1751414 - RNA, 19 nt, Homo sapiens
  misc_RNA (1)...(19): siRNA sense strand
gcaucuuccucacggcaau

SEQ ID NO: 1751415 - RNA, 19 nt, Homo sapiens
  misc_RNA (1)...(19): siRNA sense strand
uggcugcccuugucuccuu

SEQ ID NO: 1751416 - RNA, 19 nt, Homo sapiens
  misc_RNA (1)...(19): siRNA sense strand
caucucggguaccacguau

SEQ ID NO: 1751417 - RNA, 19 nt, Homo sapiens
  misc_RNA (1)...(19): siRNA sense strand
gcacgcucaccaccaauca

SEQ ID NO: 1751418 - RNA, 19 nt, Homo sapiens
  misc_RNA (1)...(19): siRNA sense strand
gcugucuacuacuucaaga

SEQ ID NO: 1751419 - RNA, 19 nt, Homo sapiens
  misc_RNA (1)...(19): siRNA sense strand
caauaucacaucgggcaaa

SEQ ID NO: 1751420 - RNA, 19 nt, Homo sapiens
  misc_RNA (1)...(19): siRNA sense strand
gcaguccuuuaacgagauc

SEQ ID NO: 1751421 - RNA, 19 nt, Homo sapiens
  misc_RNA (1)...(19): siRNA sense strand
gcgcauggcacgcaagaac

SEQ ID NO: 1751422 - RNA, 19 nt, Homo sapiens
  misc_RNA (1)...(19): siRNA sense strand
ucuaccagcugaggaacuu

SEQ ID NO: 1751423 - RNA, 19 nt, Homo sapiens
  misc_RNA (1)...(19): siRNA sense strand
ggagaaccugcaguccuuu

SEQ ID NO: 1751424 - RNA, 19 nt, Homo sapiens
  misc_RNA (1)...(19): siRNA sense strand
ggaccucacaucaacuucu

SEQ ID NO: 1751425 - RNA, 19 nt, Homo sapiens
  misc_RNA (1)...(19): siRNA sense strand
gaaccugcaguccuuuaac

SEQ ID NO: 1751426 - RNA, 19 nt, Homo sapiens
  misc_RNA (1)...(19): siRNA sense strand
caucaacaucggccacuuc

SEQ ID NO: 1751427 - RNA, 19 nt, Homo sapiens
  misc_RNA (1)...(19): siRNA sense strand
agauaucucugccugucau

SEQ ID NO: 1751428 - RNA, 19 nt, Homo sapiens
  misc_RNA (1)...(19): siRNA sense strand
ccaccaccauggccuuguc

SEQ ID NO: 1751429 - RNA, 19 nt, Homo sapiens
  misc_RNA (1)...(19): siRNA sense strand
cgaggucgucugcaucuuc

SEQ ID NO: 1751430 - RNA, 19 nt, Homo sapiens
  misc_RNA (1)...(19): siRNA sense strand
ggaacgcaacgccgagagu

SEQ ID NO: 1751431 - RNA, 19 nt, Homo sapiens
  misc_RNA (1)...(19): siRNA sense strand
gggagcuggugcuggaaca

SEQ ID NO: 1751432 - RNA, 19 nt, Homo sapiens
  misc_RNA (1)...(19): siRNA sense strand
ggcagcaagauguuuguga

SEQ ID NO: 1751433 - RNA, 19 nt, Homo sapiens
  misc_RNA (1)...(19): siRNA sense strand
gaaauccauguccguguac

SEQ ID NO: 1751434 - RNA, 19 nt, Homo sapiens
  misc_RNA (1)...(19): siRNA sense strand
ggccaaggguguguaugag

SEQ ID NO: 1751435 - RNA, 19 nt, Homo sapiens
  misc_RNA (1)...(19): siRNA sense strand
cggcugucaucacuacaug

SEQ ID NO: 1751436 - RNA, 19 nt, Homo sapiens
  misc_RNA (1)...(19): siRNA sense strand
gccaaggguguguaugaga

SEQ ID NO: 1751437 - RNA, 19 nt, Homo sapiens
  misc_RNA (1)...(19): siRNA sense strand
gcuggcucuucuuccgaua

SEQ ID NO: 1751438 - RNA, 19 nt, Homo sapiens
  misc_RNA (1)...(19): siRNA sense strand
gagcugugaaccaggacaa

SEQ ID NO: 1751439 - RNA, 19 nt, Homo sapiens
  misc_RNA (1)...(19): siRNA sense strand
cagcaaguuugugcaguac

SEQ ID NO: 1751440 - RNA, 19 nt, Homo sapiens
  misc_RNA (1)...(19): siRNA sense strand
agcgcaagcuggacgaguu

SEQ ID NO: 1751441 - RNA, 19 nt, Homo sapiens
  misc_RNA (1)...(19): siRNA sense strand
caagauccggagccagaug

SEQ ID NO: 1751442 - RNA, 19 nt, Homo sapiens
  misc_RNA (1)...(19): siRNA sense strand
gcugugaaccaggacaaga

SEQ ID NO: 1751443 - RNA, 19 nt, Homo sapiens
  misc_RNA (1)...(19): siRNA sense strand
guggcgcugucuacuacuu

SEQ ID NO: 1751444 - RNA, 19 nt, Homo sapiens
  misc_RNA (1)...(19): siRNA sense strand
ccaucgaggcccugaagga

SEQ ID NO: 1751445 - RNA, 19 nt, Homo sapiens
  misc_RNA (1)...(19): siRNA sense strand
cgagcuggcgccuguaaca

SEQ ID NO: 1751446 - RNA, 19 nt, Homo sapiens
  misc_RNA (1)...(19): siRNA sense strand
cggagacagcucugacuug

SEQ ID NO: 1751447 - RNA, 19 nt, Homo sapiens
  misc_RNA (1)...(19): siRNA sense strand
ggaaauccauguccgugua

SEQ ID NO: 1751448 - RNA, 19 nt, Homo sapiens
  misc_RNA (1)...(19): siRNA sense strand
ccaacgagcucccgaguga

SEQ ID NO: 1751449 - RNA, 19 nt, Homo sapiens
  misc_RNA (1)...(19): siRNA sense strand
gcagcaaguuugugcagua

SEQ ID NO: 1751450 - RNA, 19 nt, Homo sapiens
  misc_RNA (1)...(19): siRNA sense strand
gcagcaagauguuugugaa

SEQ ID NO: 1751451 - RNA, 19 nt, Homo sapiens
  misc_RNA (1)...(19): siRNA sense strand
gaugcgggcuccugccuuu

SEQ ID NO: 1751452 - RNA, 19 nt, Homo sapiens
  misc_RNA (1)...(19): siRNA sense strand
gagcagauccuggcaaaga

SEQ ID NO: 1751453 - RNA, 19 nt, Homo sapiens
  misc_RNA (1)...(19): siRNA sense strand
ugacuugccugguggagaa

SEQ ID NO: 1751454 - RNA, 19 nt, Homo sapiens
  misc_RNA (1)...(19): siRNA sense strand
ccaaggguguguaugagaa

SEQ ID NO: 1751455 - RNA, 19 nt, Homo sapiens
  misc_RNA (1)...(19): siRNA sense strand
gaccucacaucaacuucua

SEQ ID NO: 1751456 - RNA, 19 nt, Homo sapiens
  misc_RNA (1)...(19): siRNA sense strand
gggagcagauccuggcaaa

SEQ ID NO: 1751457 - RNA, 19 nt, Homo sapiens
  misc_RNA (1)...(19): siRNA sense strand
gcaaguuugugcaguacga

SEQ ID NO: 1751458 - RNA, 19 nt, Homo sapiens
  misc_RNA (1)...(19): siRNA sense strand
gcaagggcgugcagaggau

SEQ ID NO: 1751459 - RNA, 19 nt, Homo sapiens
  misc_RNA (1)...(19): siRNA sense strand
ggacgacugcagcaaguuu

SEQ ID NO: 1751460 - RNA, 19 nt, Homo sapiens
  misc_RNA (1)...(19): siRNA sense strand
guaacacggucaucaagca

SEQ ID NO: 1751461 - RNA, 19 nt, Homo sapiens
  misc_RNA (1)...(19): siRNA sense strand
gggugaaccuggugacaga

SEQ ID NO: 1751462 - RNA, 19 nt, Homo sapiens
  misc_RNA (1)...(19): siRNA sense strand
uuaacgagaucacugcuau

SEQ ID NO: 1751463 - RNA, 19 nt, Homo sapiens
  misc_RNA (1)...(19): siRNA sense strand
acacggagcugggcaagau

SEQ ID NO: 1751464 - RNA, 19 nt, Homo sapiens
  misc_RNA (1)...(19): siRNA sense strand
cgagaucacugcuaugacu

SEQ ID NO: 1751465 - RNA, 19 nt, Homo sapiens
  misc_RNA (1)...(19): siRNA sense strand
ucgaggcccugaaggagua

SEQ ID NO: 1751466 - RNA, 19 nt, Homo sapiens
  misc_RNA (1)...(19): siRNA sense strand
acagcaacaugaagcaauu

SEQ ID NO: 1751467 - RNA, 19 nt, Homo sapiens
  misc_RNA (1)...(19): siRNA sense strand
gagaaccugcaguccuuua

SEQ ID NO: 1751468 - RNA, 19 nt, Homo sapiens
  misc_RNA (1)...(19): siRNA sense strand
gaagugagcgcugggaaca

SEQ ID NO: 1751469 - RNA, 19 nt, Homo sapiens
  misc_RNA (1)...(19): siRNA sense strand
ccgcaggcuuggcaucuuu

SEQ ID NO: 1751470 - RNA, 19 nt, Homo sapiens
  misc_RNA (1)...(19): siRNA sense strand
ccuggugguuuguguauga

SEQ ID NO: 1751471 - RNA, 19 nt, Homo sapiens
  misc_RNA (1)...(19): siRNA sense strand
gaagugcuccgaagacaac

SEQ ID NO: 1751472 - RNA, 19 nt, Homo sapiens
  misc_RNA (1)...(19): siRNA sense strand
uggagaaccugcaguccuu

SEQ ID NO: 1751473 - RNA, 19 nt, Homo sapiens
  misc_RNA (1)...(19): siRNA sense strand
cagagauggugcugucaga

SEQ ID NO: 1751474 - RNA, 19 nt, Homo sapiens
  misc_RNA (1)...(19): siRNA sense strand
agauggugcugucagauga

SEQ ID NO: 1751475 - RNA, 19 nt, Homo sapiens
  misc_RNA (1)...(19): siRNA sense strand
uaccucaucuccuccaaug

SEQ ID NO: 1751476 - RNA, 19 nt, Homo sapiens
  misc_RNA (1)...(19): siRNA sense strand
gagauggugcugucagaug

SEQ ID NO: 1751477 - RNA, 19 nt, Homo sapiens
  misc_RNA (1)...(19): siRNA sense strand
caaggaaggaggacaugga

SEQ ID NO: 1751478 - RNA, 19 nt, Homo sapiens
  misc_RNA (1)...(19): siRNA sense strand
gcaccagcccugaagaaag

SEQ ID NO: 1751479 - RNA, 19 nt, Homo sapiens
  misc_RNA (1)...(19): siRNA sense strand
ccacggcucugggcuucaa

SEQ ID NO: 1751480 - RNA, 19 nt, Homo sapiens
  misc_RNA (1)...(19): siRNA sense strand
ccucaucuccuccaauguu

SEQ ID NO: 1751481 - RNA, 19 nt, Homo sapiens
  misc_RNA (1)...(19): siRNA sense strand
gcguggcgcugucuacuac

SEQ ID NO: 1751482 - RNA, 19 nt, Homo sapiens
  misc_RNA (1)...(19): siRNA sense strand
ggaguucacccuggaguuc

SEQ ID NO: 1751483 - RNA, 19 nt, Homo sapiens
  misc_RNA (1)...(19): siRNA sense strand
agacggaccugaccuucgu

SEQ ID NO: 1751484 - RNA, 19 nt, Homo sapiens
  misc_RNA (1)...(19): siRNA sense strand
ccgagaagcccucaucagu

SEQ ID NO: 1751485 - RNA, 19 nt, Homo sapiens
  misc_RNA (1)...(19): siRNA sense strand
gcgcaagcuggacgaguuu

SEQ ID NO: 1751486 - RNA, 19 nt, Homo sapiens
  misc_RNA (1)...(19): siRNA sense strand
caccagcccugaagaaagc

SEQ ID NO: 1751487 - RNA, 19 nt, Homo sapiens
  misc_RNA (1)...(19): siRNA sense strand
ggccagggcagcaagaugu

SEQ ID NO: 1751488 - RNA, 19 nt, Homo sapiens
  misc_RNA (1)...(19): siRNA sense strand
ggaguaugagccugagaug

SEQ ID NO: 1751489 - RNA, 19 nt, Homo sapiens
  misc_RNA (1)...(19): siRNA sense strand
gcucaccaccaaucagaug

SEQ ID NO: 1751490 - RNA, 19 nt, Homo sapiens
  misc_RNA (1)...(19): siRNA sense strand
ugaaccaggacaagaagaa

SEQ ID NO: 1751491 - RNA, 19 nt, Homo sapiens
  misc_RNA (1)...(19): siRNA sense strand
gggcugcaccucagucauc

SEQ ID NO: 1751492 - RNA, 19 nt, Homo sapiens
  misc_RNA (1)...(19): siRNA sense strand
ggugguggugcuccagaua

SEQ ID NO: 1751493 - RNA, 19 nt, Homo sapiens
  misc_RNA (1)...(19): siRNA sense strand
caucgacugugagguguuc

SEQ ID NO: 1751494 - RNA, 19 nt, Homo sapiens
  misc_RNA (1)...(19): siRNA sense strand
gcaucuuccucacggcaau

SEQ ID NO: 1751495 - RNA, 19 nt, Homo sapiens
  misc_RNA (1)...(19): siRNA sense strand
uggcugcccuugucuccuu

SEQ ID NO: 1751496 - RNA, 19 nt, Homo sapiens
  misc_RNA (1)...(19): siRNA sense strand
caucucggguaccacguau

SEQ ID NO: 1751497 - RNA, 19 nt, Homo sapiens
  misc_RNA (1)...(19): siRNA sense strand
gcacgcucaccaccaauca

SEQ ID NO: 1751498 - RNA, 19 nt, Homo sapiens
  misc_RNA (1)...(19): siRNA sense strand
gcugucuacuacuucaaga

SEQ ID NO: 1751499 - RNA, 19 nt, Homo sapiens
  misc_RNA (1)...(19): siRNA sense strand
caauaucacaucgggcaaa

SEQ ID NO: 1751500 - RNA, 19 nt, Homo sapiens
  misc_RNA (1)...(19): siRNA sense strand
gcaguccuuuaacgagauc

SEQ ID NO: 1751501 - RNA, 19 nt, Homo sapiens
  misc_RNA (1)...(19): siRNA sense strand
gcgcauggcacgcaagaac

SEQ ID NO: 1751502 - RNA, 19 nt, Homo sapiens
  misc_RNA (1)...(19): siRNA sense strand
ucuaccagcugaggaacuu

SEQ ID NO: 1751503 - RNA, 19 nt, Homo sapiens
  misc_RNA (1)...(19): siRNA sense strand
agugagcgcugggaacaga

SEQ ID NO: 1751504 - RNA, 19 nt, Homo sapiens
  misc_RNA (1)...(19): siRNA sense strand
ggagaaccugcaguccuuu

SEQ ID NO: 1751505 - RNA, 19 nt, Homo sapiens
  misc_RNA (1)...(19): siRNA sense strand
ggaccucacaucaacuucu

SEQ ID NO: 1751506 - RNA, 19 nt, Homo sapiens
  misc_RNA (1)...(19): siRNA sense strand
gaaccugcaguccuuuaac

SEQ ID NO: 1751507 - RNA, 19 nt, Homo sapiens
  misc_RNA (1)...(19): siRNA sense strand
caucaacaucggccacuuc

SEQ ID NO: 1751508 - RNA, 19 nt, Homo sapiens
  misc_RNA (1)...(19): siRNA sense strand
agauaucucugccugucau

SEQ ID NO: 1751509 - RNA, 19 nt, Homo sapiens
  misc_RNA (1)...(19): siRNA sense strand
ccaccaccauggccuuguc

SEQ ID NO: 1751510 - RNA, 19 nt, Homo sapiens
  misc_RNA (1)...(19): siRNA sense strand
cgaggucgucugcaucuuc

SEQ ID NO: 1751511 - RNA, 19 nt, Homo sapiens
  misc_RNA (1)...(19): siRNA sense strand
ggaacgcaacgccgagagu

SEQ ID NO: 1751512 - RNA, 19 nt, Homo sapiens
  misc_RNA (1)...(19): siRNA sense strand
gggagcuggugcuggaaca

SEQ ID NO: 1751513 - RNA, 19 nt, Homo sapiens
  misc_RNA (1)...(19): siRNA sense strand
ggcagcaagauguuuguga

SEQ ID NO: 1751514 - RNA, 19 nt, Homo sapiens
  misc_RNA (1)...(19): siRNA sense strand
gaaauccauguccguguac

SEQ ID NO: 1751515 - RNA, 19 nt, Homo sapiens
  misc_RNA (1)...(19): siRNA sense strand
ggccaaggguguguaugag

SEQ ID NO: 1751516 - RNA, 19 nt, Homo sapiens
  misc_RNA (1)...(19): siRNA sense strand
cggcugucaucacuacaug

SEQ ID NO: 1751517 - RNA, 19 nt, Homo sapiens
  misc_RNA (1)...(19): siRNA sense strand
gccaaggguguguaugaga

SEQ ID NO: 1751518 - RNA, 19 nt, Homo sapiens
  misc_RNA (1)...(19): siRNA sense strand
gcuggcucuucuuccgaua

SEQ ID NO: 1751519 - RNA, 19 nt, Homo sapiens
  misc_RNA (1)...(19): siRNA sense strand
gagcugugaaccaggacaa

SEQ ID NO: 1751520 - RNA, 19 nt, Homo sapiens
  misc_RNA (1)...(19): siRNA sense strand
cagcaaguuugugcaguac

SEQ ID NO: 1751521 - RNA, 19 nt, Homo sapiens
  misc_RNA (1)...(19): siRNA sense strand
agcgcaagcuggacgaguu

SEQ ID NO: 1751522 - RNA, 19 nt, Homo sapiens
  misc_RNA (1)...(19): siRNA sense strand
caagauccggagccagaug

SEQ ID NO: 1751523 - RNA, 19 nt, Homo sapiens
  misc_RNA (1)...(19): siRNA sense strand
gcugugaaccaggacaaga

SEQ ID NO: 1751524 - RNA, 19 nt, Homo sapiens
  misc_RNA (1)...(19): siRNA sense strand
guggcgcugucuacuacuu

SEQ ID NO: 1751525 - RNA, 19 nt, Homo sapiens
  misc_RNA (1)...(19): siRNA sense strand
ccaucgaggcccugaagga

SEQ ID NO: 1751526 - RNA, 19 nt, Homo sapiens
  misc_RNA (1)...(19): siRNA sense strand
cgagcuggcgccuguaaca

SEQ ID NO: 1751527 - RNA, 19 nt, Homo sapiens
  misc_RNA (1)...(19): siRNA sense strand
cggagacagcucugacuug

SEQ ID NO: 1751528 - RNA, 19 nt, Homo sapiens
  misc_RNA (1)...(19): siRNA sense strand
ggaaauccauguccgugua

SEQ ID NO: 1751529 - RNA, 19 nt, Homo sapiens
  misc_RNA (1)...(19): siRNA sense strand
ccaacgagcucccgaguga

SEQ ID NO: 1751530 - RNA, 19 nt, Homo sapiens
  misc_RNA (1)...(19): siRNA sense strand
gcagcaaguuugugcagua

SEQ ID NO: 1751531 - RNA, 19 nt, Homo sapiens
  misc_RNA (1)...(19): siRNA sense strand
gcagcaagauguuugugaa

SEQ ID NO: 1751532 - RNA, 19 nt, Homo sapiens
  misc_RNA (1)...(19): siRNA sense strand
gaugcgggcuccugccuuu

SEQ ID NO: 1751533 - RNA, 19 nt, Homo sapiens
  misc_RNA (1)...(19): siRNA sense strand
gagcagauccuggcaaaga

SEQ ID NO: 1751534 - RNA, 19 nt, Homo sapiens
  misc_RNA (1)...(19): siRNA sense strand
ugacuugccugguggagaa

SEQ ID NO: 1751535 - RNA, 19 nt, Homo sapiens
  misc_RNA (1)...(19): siRNA sense strand
ccaaggguguguaugagaa

SEQ ID NO: 1751536 - RNA, 19 nt, Homo sapiens
  misc_RNA (1)...(19): siRNA sense strand
gaccucacaucaacuucua

SEQ ID NO: 1751537 - RNA, 19 nt, Homo sapiens
  misc_RNA (1)...(19): siRNA sense strand
gggagcagauccuggcaaa

SEQ ID NO: 1751538 - RNA, 19 nt, Homo sapiens
  misc_RNA (1)...(19): siRNA sense strand
gcaaguuugugcaguacga

SEQ ID NO: 1751539 - RNA, 19 nt, Homo sapiens
  misc_RNA (1)...(19): siRNA sense strand
gcaagggcgugcagaggau

SEQ ID NO: 1751540 - RNA, 19 nt, Homo sapiens
  misc_RNA (1)...(19): siRNA sense strand
ggacgacugcagcaaguuu

SEQ ID NO: 1751541 - RNA, 19 nt, Homo sapiens
  misc_RNA (1)...(19): siRNA sense strand
guaacacggucaucaagca

SEQ ID NO: 1751542 - RNA, 19 nt, Homo sapiens
  misc_RNA (1)...(19): siRNA sense strand
gggugaaccuggugacaga

SEQ ID NO: 1751543 - RNA, 19 nt, Homo sapiens
  misc_RNA (1)...(19): siRNA sense strand
uuaacgagaucacugcuau

SEQ ID NO: 1751544 - RNA, 19 nt, Homo sapiens
  misc_RNA (1)...(19): siRNA sense strand
acacggagcugggcaagau

SEQ ID NO: 1751545 - RNA, 19 nt, Homo sapiens
  misc_RNA (1)...(19): siRNA sense strand
cgagaucacugcuaugacu

SEQ ID NO: 1751546 - RNA, 19 nt, Homo sapiens
  misc_RNA (1)...(19): siRNA sense strand
ucgaggcccugaaggagua

SEQ ID NO: 1751547 - RNA, 19 nt, Homo sapiens
  misc_RNA (1)...(19): siRNA sense strand
acagcaacaugaagcaauu

SEQ ID NO: 1751548 - RNA, 19 nt, Homo sapiens
  misc_RNA (1)...(19): siRNA sense strand
gagaaccugcaguccuuua

SEQ ID NO: 1751549 - RNA, 19 nt, Homo sapiens
  misc_RNA (1)...(19): siRNA sense strand
ccgcaggcuuggcaucuuu

SEQ ID NO: 1751550 - RNA, 19 nt, Homo sapiens
  misc_RNA (1)...(19): siRNA sense strand
ccuggugguuuguguauga

SEQ ID NO: 1751551 - RNA, 19 nt, Homo sapiens
  misc_RNA (1)...(19): siRNA sense strand
gaagugcuccgaagacaac

SEQ ID NO: 1751552 - RNA, 19 nt, Homo sapiens
  misc_RNA (1)...(19): siRNA sense strand
uggagaaccugcaguccuu

SEQ ID NO: 1751553 - RNA, 19 nt, Homo sapiens
  misc_RNA (1)...(19): siRNA sense strand
cagagauggugcugucaga

SEQ ID NO: 1751554 - RNA, 19 nt, Homo sapiens
  misc_RNA (1)...(19): siRNA sense strand
agauggugcugucagauga

SEQ ID NO: 1751555 - RNA, 19 nt, Homo sapiens
  misc_RNA (1)...(19): siRNA sense strand
uaccucaucuccuccaaug

SEQ ID NO: 1751556 - RNA, 19 nt, Homo sapiens
  misc_RNA (1)...(19): siRNA sense strand
gagauggugcugucagaug

SEQ ID NO: 1751557 - RNA, 19 nt, Homo sapiens
  misc_RNA (1)...(19): siRNA sense strand
caaggaaggaggacaugga

SEQ ID NO: 1751558 - RNA, 19 nt, Homo sapiens
  misc_RNA (1)...(19): siRNA sense strand
gcaccagcccugaagaaag

SEQ ID NO: 1751559 - RNA, 19 nt, Homo sapiens
  misc_RNA (1)...(19): siRNA sense strand
ccacggcucugggcuucaa

SEQ ID NO: 1751560 - RNA, 19 nt, Homo sapiens
  misc_RNA (1)...(19): siRNA sense strand
ccucaucuccuccaauguu

SEQ ID NO: 1751561 - RNA, 19 nt, Homo sapiens
  misc_RNA (1)...(19): siRNA sense strand
gcguggcgcugucuacuac

SEQ ID NO: 1751562 - RNA, 19 nt, Homo sapiens
  misc_RNA (1)...(19): siRNA sense strand
ggaguucacccuggaguuc

SEQ ID NO: 1751563 - RNA, 19 nt, Homo sapiens
  misc_RNA (1)...(19): siRNA sense strand
agacggaccugaccuucgu

SEQ ID NO: 1751564 - RNA, 19 nt, Homo sapiens
  misc_RNA (1)...(19): siRNA sense strand
ccgagaagcccucaucagu

SEQ ID NO: 1751565 - RNA, 19 nt, Homo sapiens
  misc_RNA (1)...(19): siRNA sense strand
gcgcaagcuggacgaguuu

SEQ ID NO: 1751566 - RNA, 19 nt, Homo sapiens
  misc_RNA (1)...(19): siRNA sense strand
caccagcccugaagaaagc

SEQ ID NO: 1751567 - RNA, 19 nt, Homo sapiens
  misc_RNA (1)...(19): siRNA sense strand
ggccagggcagcaagaugu

SEQ ID NO: 1751568 - RNA, 19 nt, Homo sapiens
  misc_RNA (1)...(19): siRNA sense strand
ggaguaugagccugagaug

SEQ ID NO: 1751569 - RNA, 19 nt, Homo sapiens
  misc_RNA (1)...(19): siRNA sense strand
gcucaccaccaaucagaug

SEQ ID NO: 1751570 - RNA, 19 nt, Homo sapiens
  misc_RNA (1)...(19): siRNA sense strand
ugaaccaggacaagaagaa

SEQ ID NO: 1751571 - RNA, 19 nt, Homo sapiens
  misc_RNA (1)...(19): siRNA sense strand
gggcugcaccucagucauc

SEQ ID NO: 1751572 - RNA, 19 nt, Homo sapiens
  misc_RNA (1)...(19): siRNA sense strand
ggugguggugcuccagaua

SEQ ID NO: 1751573 - RNA, 19 nt, Homo sapiens
  misc_RNA (1)...(19): siRNA sense strand
caucgacugugagguguuc

SEQ ID NO: 1751574 - RNA, 19 nt, Homo sapiens
  misc_RNA (1)...(19): siRNA sense strand
gcaucuuccucacggcaau

SEQ ID NO: 1751575 - RNA, 19 nt, Homo sapiens
  misc_RNA (1)...(19): siRNA sense strand
uggcugcccuugucuccuu

SEQ ID NO: 1751576 - RNA, 19 nt, Homo sapiens
  misc_RNA (1)...(19): siRNA sense strand
caucucggguaccacguau

SEQ ID NO: 1751577 - RNA, 19 nt, Homo sapiens
  misc_RNA (1)...(19): siRNA sense strand
gcacgcucaccaccaauca

SEQ ID NO: 1751578 - RNA, 19 nt, Homo sapiens
  misc_RNA (1)...(19): siRNA sense strand
gcugucuacuacuucaaga

SEQ ID NO: 1751579 - RNA, 19 nt, Homo sapiens
  misc_RNA (1)...(19): siRNA sense strand
caauaucacaucgggcaaa

SEQ ID NO: 1751580 - RNA, 19 nt, Homo sapiens
  misc_RNA (1)...(19): siRNA sense strand
gcaguccuuuaacgagauc

SEQ ID NO: 1751581 - RNA, 19 nt, Homo sapiens
  misc_RNA (1)...(19): siRNA sense strand
gcgcauggcacgcaagaac

SEQ ID NO: 1751582 - RNA, 19 nt, Homo sapiens
  misc_RNA (1)...(19): siRNA sense strand
ucuaccagcugaggaacuu

SEQ ID NO: 1751583 - RNA, 19 nt, Homo sapiens
  misc_RNA (1)...(19): siRNA sense strand
ggagaaccugcaguccuuu

SEQ ID NO: 1751584 - RNA, 19 nt, Homo sapiens
  misc_RNA (1)...(19): siRNA sense strand
ggaccucacaucaacuucu

SEQ ID NO: 1751585 - RNA, 19 nt, Homo sapiens
  misc_RNA (1)...(19): siRNA sense strand
gaaccugcaguccuuuaac

SEQ ID NO: 1751586 - RNA, 19 nt, Homo sapiens
  misc_RNA (1)...(19): siRNA sense strand
caucaacaucggccacuuc

SEQ ID NO: 1751587 - RNA, 19 nt, Homo sapiens
  misc_RNA (1)...(19): siRNA sense strand
agauaucucugccugucau

SEQ ID NO: 1751588 - RNA, 19 nt, Homo sapiens
  misc_RNA (1)...(19): siRNA sense strand
ccaccaccauggccuuguc

SEQ ID NO: 1751589 - RNA, 19 nt, Homo sapiens
  misc_RNA (1)...(19): siRNA sense strand
cgaggucgucugcaucuuc

SEQ ID NO: 1751590 - RNA, 19 nt, Homo sapiens
  misc_RNA (1)...(19): siRNA sense strand
ggaacgcaacgccgagagu

SEQ ID NO: 1751591 - RNA, 19 nt, Homo sapiens
  misc_RNA (1)...(19): siRNA sense strand
gggagcuggugcuggaaca

SEQ ID NO: 1751592 - RNA, 19 nt, Homo sapiens
  misc_RNA (1)...(19): siRNA sense strand
ggcagcaagauguuuguga

SEQ ID NO: 1751593 - RNA, 19 nt, Homo sapiens
  misc_RNA (1)...(19): siRNA sense strand
gaaauccauguccguguac

SEQ ID NO: 1751594 - RNA, 19 nt, Homo sapiens
  misc_RNA (1)...(19): siRNA sense strand
ggccaaggguguguaugag

SEQ ID NO: 1751595 - RNA, 19 nt, Homo sapiens
  misc_RNA (1)...(19): siRNA sense strand
cggcugucaucacuacaug

SEQ ID NO: 1751596 - RNA, 19 nt, Homo sapiens
  misc_RNA (1)...(19): siRNA sense strand
gccaaggguguguaugaga

SEQ ID NO: 1751597 - RNA, 19 nt, Homo sapiens
  misc_RNA (1)...(19): siRNA sense strand
gcuggcucuucuuccgaua

SEQ ID NO: 1751598 - RNA, 19 nt, Homo sapiens
  misc_RNA (1)...(19): siRNA sense strand
gagcugugaaccaggacaa

SEQ ID NO: 1751599 - RNA, 19 nt, Homo sapiens
  misc_RNA (1)...(19): siRNA sense strand
cagcaaguuugugcaguac

SEQ ID NO: 1751600 - RNA, 19 nt, Homo sapiens
  misc_RNA (1)...(19): siRNA sense strand
agcgcaagcuggacgaguu

SEQ ID NO: 1751601 - RNA, 19 nt, Homo sapiens
  misc_RNA (1)...(19): siRNA sense strand
caagauccggagccagaug

SEQ ID NO: 1751602 - RNA, 19 nt, Homo sapiens
  misc_RNA (1)...(19): siRNA sense strand
gcugugaaccaggacaaga

SEQ ID NO: 1751603 - RNA, 19 nt, Homo sapiens
  misc_RNA (1)...(19): siRNA sense strand
guggcgcugucuacuacuu

SEQ ID NO: 1751604 - RNA, 19 nt, Homo sapiens
  misc_RNA (1)...(19): siRNA sense strand
ccaucgaggcccugaagga

SEQ ID NO: 1751605 - RNA, 19 nt, Homo sapiens
  misc_RNA (1)...(19): siRNA sense strand
cgagcuggcgccuguaaca

SEQ ID NO: 1751606 - RNA, 19 nt, Homo sapiens
  misc_RNA (1)...(19): siRNA sense strand
cggagacagcucugacuug

SEQ ID NO: 1751607 - RNA, 19 nt, Homo sapiens
  misc_RNA (1)...(19): siRNA sense strand
ggaaauccauguccgugua

SEQ ID NO: 1751608 - RNA, 19 nt, Homo sapiens
  misc_RNA (1)...(19): siRNA sense strand
ccaacgagcucccgaguga

SEQ ID NO: 1751609 - RNA, 19 nt, Homo sapiens
  misc_RNA (1)...(19): siRNA sense strand
gcagcaaguuugugcagua

SEQ ID NO: 1751610 - RNA, 19 nt, Homo sapiens
  misc_RNA (1)...(19): siRNA sense strand
gcagcaagauguuugugaa

SEQ ID NO: 1751611 - RNA, 19 nt, Homo sapiens
  misc_RNA (1)...(19): siRNA sense strand
gaugcgggcuccugccuuu

SEQ ID NO: 1751612 - RNA, 19 nt, Homo sapiens
  misc_RNA (1)...(19): siRNA sense strand
gagcagauccuggcaaaga

SEQ ID NO: 1751613 - RNA, 19 nt, Homo sapiens
  misc_RNA (1)...(19): siRNA sense strand
ugacuugccugguggagaa

SEQ ID NO: 1751614 - RNA, 19 nt, Homo sapiens
  misc_RNA (1)...(19): siRNA sense strand
ccaaggguguguaugagaa

SEQ ID NO: 1751615 - RNA, 19 nt, Homo sapiens
  misc_RNA (1)...(19): siRNA sense strand
gaccucacaucaacuucua

SEQ ID NO: 1751616 - RNA, 19 nt, Homo sapiens
  misc_RNA (1)...(19): siRNA sense strand
gggagcagauccuggcaaa

SEQ ID NO: 1751617 - RNA, 19 nt, Homo sapiens
  misc_RNA (1)...(19): siRNA sense strand
gcaaguuugugcaguacga

SEQ ID NO: 1751618 - RNA, 19 nt, Homo sapiens
  misc_RNA (1)...(19): siRNA sense strand
gcaagggcgugcagaggau

SEQ ID NO: 1751619 - RNA, 19 nt, Homo sapiens
  misc_RNA (1)...(19): siRNA sense strand
ggacgacugcagcaaguuu

SEQ ID NO: 1751620 - RNA, 19 nt, Homo sapiens
  misc_RNA (1)...(19): siRNA sense strand
guaacacggucaucaagca

SEQ ID NO: 1751621 - RNA, 19 nt, Homo sapiens
  misc_RNA (1)...(19): siRNA sense strand
gggugaaccuggugacaga

SEQ ID NO: 1751622 - RNA, 19 nt, Homo sapiens
  misc_RNA (1)...(19): siRNA sense strand
uuaacgagaucacugcuau

SEQ ID NO: 1751623 - RNA, 19 nt, Homo sapiens
  misc_RNA (1)...(19): siRNA sense strand
acacggagcugggcaagau

SEQ ID NO: 1751624 - RNA, 19 nt, Homo sapiens
  misc_RNA (1)...(19): siRNA sense strand
cgagaucacugcuaugacu

SEQ ID NO: 1751625 - RNA, 19 nt, Homo sapiens
  misc_RNA (1)...(19): siRNA sense strand
ucgaggcccugaaggagua

SEQ ID NO: 1751626 - RNA, 19 nt, Homo sapiens
  misc_RNA (1)...(19): siRNA sense strand
acagcaacaugaagcaauu

SEQ ID NO: 1751627 - RNA, 19 nt, Homo sapiens
  misc_RNA (1)...(19): siRNA sense strand
gagaaccugcaguccuuua

SEQ ID NO: 1751628 - RNA, 19 nt, Homo sapiens
  misc_RNA (1)...(19): siRNA sense strand
ccgcaggcuuggcaucuuu

SEQ ID NO: 1751629 - RNA, 19 nt, Homo sapiens
  misc_RNA (1)...(19): siRNA sense strand
ccuggugguuuguguauga

SEQ ID NO: 1751630 - RNA, 19 nt, Homo sapiens
  misc_RNA (1)...(19): siRNA sense strand
gaagugcuccgaagacaac

SEQ ID NO: 1751631 - RNA, 19 nt, Homo sapiens
  misc_RNA (1)...(19): siRNA sense strand
uggagaaccugcaguccuu

SEQ ID NO: 1751632 - RNA, 19 nt, Homo sapiens
  misc_RNA (1)...(19): siRNA sense strand
cagagauggugcugucaga

SEQ ID NO: 1751633 - RNA, 19 nt, Homo sapiens
  misc_RNA (1)...(19): siRNA sense strand
agauggugcugucagauga

SEQ ID NO: 1751634 - RNA, 19 nt, Homo sapiens
  misc_RNA (1)...(19): siRNA sense strand
uaccucaucuccuccaaug

SEQ ID NO: 1751635 - RNA, 19 nt, Homo sapiens
  misc_RNA (1)...(19): siRNA sense strand
gagauggugcugucagaug

SEQ ID NO: 1751636 - RNA, 19 nt, Homo sapiens
  misc_RNA (1)...(19): siRNA sense strand
caaggaaggaggacaugga

SEQ ID NO: 1751637 - RNA, 19 nt, Homo sapiens
  misc_RNA (1)...(19): siRNA sense strand
gcaccagcccugaagaaag

SEQ ID NO: 1751638 - RNA, 19 nt, Homo sapiens
  misc_RNA (1)...(19): siRNA sense strand
ccacggcucugggcuucaa

SEQ ID NO: 1751639 - RNA, 19 nt, Homo sapiens
  misc_RNA (1)...(19): siRNA sense strand
ccucaucuccuccaauguu

SEQ ID NO: 1751640 - RNA, 19 nt, Homo sapiens
  misc_RNA (1)...(19): siRNA sense strand
gcguggcgcugucuacuac

SEQ ID NO: 1751641 - RNA, 19 nt, Homo sapiens
  misc_RNA (1)...(19): siRNA sense strand
ggaguucacccuggaguuc

SEQ ID NO: 1751642 - RNA, 19 nt, Homo sapiens
  misc_RNA (1)...(19): siRNA sense strand
agacggaccugaccuucgu

SEQ ID NO: 1751643 - RNA, 19 nt, Homo sapiens
  misc_RNA (1)...(19): siRNA sense strand
ccgagaagcccucaucagu

SEQ ID NO: 1751644 - RNA, 19 nt, Homo sapiens
  misc_RNA (1)...(19): siRNA sense strand
gcgcaagcuggacgaguuu

SEQ ID NO: 1751645 - RNA, 19 nt, Homo sapiens
  misc_RNA (1)...(19): siRNA sense strand
caccagcccugaagaaagc

SEQ ID NO: 1751646 - RNA, 19 nt, Homo sapiens
  misc_RNA (1)...(19): siRNA sense strand
ggccagggcagcaagaugu

SEQ ID NO: 1751647 - RNA, 19 nt, Homo sapiens
  misc_RNA (1)...(19): siRNA sense strand
ggaguaugagccugagaug

SEQ ID NO: 1751648 - RNA, 19 nt, Homo sapiens
  misc_RNA (1)...(19): siRNA sense strand
gcucaccaccaaucagaug

SEQ ID NO: 1751649 - RNA, 19 nt, Homo sapiens
  misc_RNA (1)...(19): siRNA sense strand
ugaaccaggacaagaagaa

SEQ ID NO: 1751650 - RNA, 19 nt, Homo sapiens
  misc_RNA (1)...(19): siRNA sense strand
gggcugcaccucagucauc

SEQ ID NO: 1751651 - RNA, 19 nt, Homo sapiens
  misc_RNA (1)...(19): siRNA sense strand
ggugguggugcuccagaua

SEQ ID NO: 1751652 - RNA, 19 nt, Homo sapiens
  misc_RNA (1)...(19): siRNA sense strand
caucgacugugagguguuc

SEQ ID NO: 1751653 - RNA, 19 nt, Homo sapiens
  misc_RNA (1)...(19): siRNA sense strand
gcaucuuccucacggcaau

SEQ ID NO: 1751654 - RNA, 19 nt, Homo sapiens
  misc_RNA (1)...(19): siRNA sense strand
uggcugcccuugucuccuu

SEQ ID NO: 1751655 - RNA, 19 nt, Homo sapiens
  misc_RNA (1)...(19): siRNA sense strand
caucucggguaccacguau

SEQ ID NO: 1751656 - RNA, 19 nt, Homo sapiens
  misc_RNA (1)...(19): siRNA sense strand
gcacgcucaccaccaauca

SEQ ID NO: 1751657 - RNA, 19 nt, Homo sapiens
  misc_RNA (1)...(19): siRNA sense strand
gcugucuacuacuucaaga

SEQ ID NO: 1751658 - RNA, 19 nt, Homo sapiens
  misc_RNA (1)...(19): siRNA sense strand
caauaucacaucgggcaaa

SEQ ID NO: 1751659 - RNA, 19 nt, Homo sapiens
  misc_RNA (1)...(19): siRNA sense strand
gcaguccuuuaacgagauc

SEQ ID NO: 1751660 - RNA, 19 nt, Homo sapiens
  misc_RNA (1)...(19): siRNA sense strand
gcgcauggcacgcaagaac

SEQ ID NO: 1751661 - RNA, 19 nt, Homo sapiens
  misc_RNA (1)...(19): siRNA sense strand
ucuaccagcugaggaacuu

SEQ ID NO: 1751662 - RNA, 19 nt, Homo sapiens
  misc_RNA (1)...(19): siRNA sense strand
ggagaaccugcaguccuuu

SEQ ID NO: 1751663 - RNA, 19 nt, Homo sapiens
  misc_RNA (1)...(19): siRNA sense strand
ggaccucacaucaacuucu

SEQ ID NO: 1751664 - RNA, 19 nt, Homo sapiens
  misc_RNA (1)...(19): siRNA sense strand
gaaccugcaguccuuuaac

SEQ ID NO: 1751665 - RNA, 19 nt, Homo sapiens
  misc_RNA (1)...(19): siRNA sense strand
caucaacaucggccacuuc

SEQ ID NO: 1751666 - RNA, 19 nt, Homo sapiens
  misc_RNA (1)...(19): siRNA sense strand
agauaucucugccugucau

SEQ ID NO: 1751667 - RNA, 19 nt, Homo sapiens
  misc_RNA (1)...(19): siRNA sense strand
ccaccaccauggccuuguc

SEQ ID NO: 1751668 - RNA, 19 nt, Homo sapiens
  misc_RNA (1)...(19): siRNA sense strand
cgaggucgucugcaucuuc

SEQ ID NO: 1751669 - RNA, 19 nt, Homo sapiens
  misc_RNA (1)...(19): siRNA sense strand
ggaacgcaacgccgagagu

SEQ ID NO: 1751670 - RNA, 19 nt, Homo sapiens
  misc_RNA (1)...(19): siRNA sense strand
gggagcuggugcuggaaca

SEQ ID NO: 1751671 - RNA, 19 nt, Homo sapiens
  misc_RNA (1)...(19): siRNA sense strand
ggcagcaagauguuuguga

SEQ ID NO: 1751672 - RNA, 19 nt, Homo sapiens
  misc_RNA (1)...(19): siRNA sense strand
gaaauccauguccguguac

SEQ ID NO: 1751673 - RNA, 19 nt, Homo sapiens
  misc_RNA (1)...(19): siRNA sense strand
ggccaaggguguguaugag

SEQ ID NO: 1751674 - RNA, 19 nt, Homo sapiens
  misc_RNA (1)...(19): siRNA sense strand
cggcugucaucacuacaug

SEQ ID NO: 1751675 - RNA, 19 nt, Homo sapiens
  misc_RNA (1)...(19): siRNA sense strand
gccaaggguguguaugaga

SEQ ID NO: 1751676 - RNA, 19 nt, Homo sapiens
  misc_RNA (1)...(19): siRNA sense strand
gcuggcucuucuuccgaua

SEQ ID NO: 1751677 - RNA, 19 nt, Homo sapiens
  misc_RNA (1)...(19): siRNA sense strand
gagcugugaaccaggacaa

SEQ ID NO: 1751678 - RNA, 19 nt, Homo sapiens
  misc_RNA (1)...(19): siRNA sense strand
cagcaaguuugugcaguac

SEQ ID NO: 1751679 - RNA, 19 nt, Homo sapiens
  misc_RNA (1)...(19): siRNA sense strand
agcgcaagcuggacgaguu

SEQ ID NO: 1751680 - RNA, 19 nt, Homo sapiens
  misc_RNA (1)...(19): siRNA sense strand
caagauccggagccagaug

SEQ ID NO: 1751681 - RNA, 19 nt, Homo sapiens
  misc_RNA (1)...(19): siRNA sense strand
gcugugaaccaggacaaga

SEQ ID NO: 1751682 - RNA, 19 nt, Homo sapiens
  misc_RNA (1)...(19): siRNA sense strand
guggcgcugucuacuacuu

SEQ ID NO: 1751683 - RNA, 19 nt, Homo sapiens
  misc_RNA (1)...(19): siRNA sense strand
ccaucgaggcccugaagga

SEQ ID NO: 1751684 - RNA, 19 nt, Homo sapiens
  misc_RNA (1)...(19): siRNA sense strand
cgagcuggcgccuguaaca

SEQ ID NO: 1751685 - RNA, 19 nt, Homo sapiens
  misc_RNA (1)...(19): siRNA sense strand
cggagacagcucugacuug

SEQ ID NO: 1751686 - RNA, 19 nt, Homo sapiens
  misc_RNA (1)...(19): siRNA sense strand
ggaaauccauguccgugua

SEQ ID NO: 1751687 - RNA, 19 nt, Homo sapiens
  misc_RNA (1)...(19): siRNA sense strand
ccaacgagcucccgaguga

SEQ ID NO: 1751688 - RNA, 19 nt, Homo sapiens
  misc_RNA (1)...(19): siRNA sense strand
gcagcaaguuugugcagua

SEQ ID NO: 1751689 - RNA, 19 nt, Homo sapiens
  misc_RNA (1)...(19): siRNA sense strand
gcagcaagauguuugugaa

SEQ ID NO: 1751690 - RNA, 19 nt, Homo sapiens
  misc_RNA (1)...(19): siRNA sense strand
gaugcgggcuccugccuuu

SEQ ID NO: 1751691 - RNA, 19 nt, Homo sapiens
  misc_RNA (1)...(19): siRNA sense strand
gagcagauccuggcaaaga

SEQ ID NO: 1751692 - RNA, 19 nt, Homo sapiens
  misc_RNA (1)...(19): siRNA sense strand
ugacuugccugguggagaa

SEQ ID NO: 1751693 - RNA, 19 nt, Homo sapiens
  misc_RNA (1)...(19): siRNA sense strand
ccaaggguguguaugagaa

SEQ ID NO: 1751694 - RNA, 19 nt, Homo sapiens
  misc_RNA (1)...(19): siRNA sense strand
gaccucacaucaacuucua

SEQ ID NO: 1751695 - RNA, 19 nt, Homo sapiens
  misc_RNA (1)...(19): siRNA sense strand
gggagcagauccuggcaaa

SEQ ID NO: 1751696 - RNA, 19 nt, Homo sapiens
  misc_RNA (1)...(19): siRNA sense strand
gcaaguuugugcaguacga

SEQ ID NO: 1751697 - RNA, 19 nt, Homo sapiens
  misc_RNA (1)...(19): siRNA sense strand
gcaagggcgugcagaggau

SEQ ID NO: 1751698 - RNA, 19 nt, Homo sapiens
  misc_RNA (1)...(19): siRNA sense strand
ggacgacugcagcaaguuu

SEQ ID NO: 1751699 - RNA, 19 nt, Homo sapiens
  misc_RNA (1)...(19): siRNA sense strand
guaacacggucaucaagca

SEQ ID NO: 1751700 - RNA, 19 nt, Homo sapiens
  misc_RNA (1)...(19): siRNA sense strand
gggugaaccuggugacaga

SEQ ID NO: 1751701 - RNA, 19 nt, Homo sapiens
  misc_RNA (1)...(19): siRNA sense strand
uuaacgagaucacugcuau

SEQ ID NO: 1751702 - RNA, 19 nt, Homo sapiens
  misc_RNA (1)...(19): siRNA sense strand
acacggagcugggcaagau

SEQ ID NO: 1751703 - RNA, 19 nt, Homo sapiens
  misc_RNA (1)...(19): siRNA sense strand
cgagaucacugcuaugacu

SEQ ID NO: 1751704 - RNA, 19 nt, Homo sapiens
  misc_RNA (1)...(19): siRNA sense strand
ucgaggcccugaaggagua

SEQ ID NO: 1751705 - RNA, 19 nt, Homo sapiens
  misc_RNA (1)...(19): siRNA sense strand
acagcaacaugaagcaauu

SEQ ID NO: 1751706 - RNA, 19 nt, Homo sapiens
  misc_RNA (1)...(19): siRNA sense strand
gagaaccugcaguccuuua

SEQ ID NO: 1751707 - RNA, 19 nt, Homo sapiens
  misc_RNA (1)...(19): siRNA sense strand
ccgcaggcuuggcaucuuu

SEQ ID NO: 1751708 - RNA, 19 nt, Homo sapiens
  misc_RNA (1)...(19): siRNA sense strand
ccuggugguuuguguauga

SEQ ID NO: 1751709 - RNA, 19 nt, Homo sapiens
  misc_RNA (1)...(19): siRNA sense strand
gaagugcuccgaagacaac

SEQ ID NO: 1751710 - RNA, 19 nt, Homo sapiens
  misc_RNA (1)...(19): siRNA sense strand
uggagaaccugcaguccuu

SEQ ID NO: 1751711 - RNA, 19 nt, Homo sapiens
  misc_RNA (1)...(19): siRNA sense strand
cagagauggugcugucaga

SEQ ID NO: 1751712 - RNA, 19 nt, Homo sapiens
  misc_RNA (1)...(19): siRNA sense strand
agauggugcugucagauga

SEQ ID NO: 1751713 - RNA, 19 nt, Homo sapiens
  misc_RNA (1)...(19): siRNA sense strand
uaccucaucuccuccaaug

SEQ ID NO: 1751714 - RNA, 19 nt, Homo sapiens
  misc_RNA (1)...(19): siRNA sense strand
gagauggugcugucagaug

SEQ ID NO: 1751715 - RNA, 19 nt, Homo sapiens
  misc_RNA (1)...(19): siRNA sense strand
caaggaaggaggacaugga

SEQ ID NO: 1751716 - RNA, 19 nt, Homo sapiens
  misc_RNA (1)...(19): siRNA sense strand
gcaccagcccugaagaaag

SEQ ID NO: 1751717 - RNA, 19 nt, Homo sapiens
  misc_RNA (1)...(19): siRNA sense strand
ccacggcucugggcuucaa

SEQ ID NO: 1751718 - RNA, 19 nt, Homo sapiens
  misc_RNA (1)...(19): siRNA sense strand
ccucaucuccuccaauguu

SEQ ID NO: 1751719 - RNA, 19 nt, Homo sapiens
  misc_RNA (1)...(19): siRNA sense strand
gcguggcgcugucuacuac

SEQ ID NO: 1751720 - RNA, 19 nt, Homo sapiens
  misc_RNA (1)...(19): siRNA sense strand
ggaguucacccuggaguuc

SEQ ID NO: 1751721 - RNA, 19 nt, Homo sapiens
  misc_RNA (1)...(19): siRNA sense strand
agacggaccugaccuucgu

SEQ ID NO: 1751722 - RNA, 19 nt, Homo sapiens
  misc_RNA (1)...(19): siRNA sense strand
ccgagaagcccucaucagu

SEQ ID NO: 1751723 - RNA, 19 nt, Homo sapiens
  misc_RNA (1)...(19): siRNA sense strand
gcgcaagcuggacgaguuu

SEQ ID NO: 1751724 - RNA, 19 nt, Homo sapiens
  misc_RNA (1)...(19): siRNA sense strand
caccagcccugaagaaagc

SEQ ID NO: 1751725 - RNA, 19 nt, Homo sapiens
  misc_RNA (1)...(19): siRNA sense strand
ggccagggcagcaagaugu

SEQ ID NO: 1751726 - RNA, 19 nt, Homo sapiens
  misc_RNA (1)...(19): siRNA sense strand
ggaguaugagccugagaug

SEQ ID NO: 1751727 - RNA, 19 nt, Homo sapiens
  misc_RNA (1)...(19): siRNA sense strand
gcucaccaccaaucagaug

SEQ ID NO: 1751728 - RNA, 19 nt, Homo sapiens
  misc_RNA (1)...(19): siRNA sense strand
ugaaccaggacaagaagaa

SEQ ID NO: 1751729 - RNA, 19 nt, Homo sapiens
  misc_RNA (1)...(19): siRNA sense strand
gggcugcaccucagucauc

SEQ ID NO: 1751730 - RNA, 19 nt, Homo sapiens
  misc_RNA (1)...(19): siRNA sense strand
ggugguggugcuccagaua

SEQ ID NO: 1751731 - RNA, 19 nt, Homo sapiens
  misc_RNA (1)...(19): siRNA sense strand
caucgacugugagguguuc

SEQ ID NO: 1751732 - RNA, 19 nt, Homo sapiens
  misc_RNA (1)...(19): siRNA sense strand
gcaucuuccucacggcaau

SEQ ID NO: 1751733 - RNA, 19 nt, Homo sapiens
  misc_RNA (1)...(19): siRNA sense strand
uggcugcccuugucuccuu

SEQ ID NO: 1751734 - RNA, 19 nt, Homo sapiens
  misc_RNA (1)...(19): siRNA sense strand
caucucggguaccacguau

SEQ ID NO: 1751735 - RNA, 19 nt, Homo sapiens
  misc_RNA (1)...(19): siRNA sense strand
gcacgcucaccaccaauca

SEQ ID NO: 1751736 - RNA, 19 nt, Homo sapiens
  misc_RNA (1)...(19): siRNA sense strand
gcugucuacuacuucaaga

SEQ ID NO: 1751737 - RNA, 19 nt, Homo sapiens
  misc_RNA (1)...(19): siRNA sense strand
caauaucacaucgggcaaa

SEQ ID NO: 1751738 - RNA, 19 nt, Homo sapiens
  misc_RNA (1)...(19): siRNA sense strand
gcaguccuuuaacgagauc

SEQ ID NO: 1751739 - RNA, 19 nt, Homo sapiens
  misc_RNA (1)...(19): siRNA sense strand
gcgcauggcacgcaagaac

SEQ ID NO: 1751740 - RNA, 19 nt, Homo sapiens
  misc_RNA (1)...(19): siRNA sense strand
ucuaccagcugaggaacuu

SEQ ID NO: 1751741 - RNA, 19 nt, Homo sapiens
  misc_RNA (1)...(19): siRNA sense strand
ggagaaccugcaguccuuu

SEQ ID NO: 1751742 - RNA, 19 nt, Homo sapiens
  misc_RNA (1)...(19): siRNA sense strand
ggaccucacaucaacuucu

SEQ ID NO: 1751743 - RNA, 19 nt, Homo sapiens
  misc_RNA (1)...(19): siRNA sense strand
gaaccugcaguccuuuaac

SEQ ID NO: 1751744 - RNA, 19 nt, Homo sapiens
  misc_RNA (1)...(19): siRNA sense strand
caucaacaucggccacuuc

SEQ ID NO: 1751745 - RNA, 19 nt, Homo sapiens
  misc_RNA (1)...(19): siRNA sense strand
agauaucucugccugucau

SEQ ID NO: 1751746 - RNA, 19 nt, Homo sapiens
  misc_RNA (1)...(19): siRNA sense strand
ccaccaccauggccuuguc

SEQ ID NO: 1751747 - RNA, 19 nt, Homo sapiens
  misc_RNA (1)...(19): siRNA sense strand
cgaggucgucugcaucuuc

SEQ ID NO: 1751748 - RNA, 19 nt, Homo sapiens
  misc_RNA (1)...(19): siRNA sense strand
ggaacgcaacgccgagagu

SEQ ID NO: 1751749 - RNA, 19 nt, Homo sapiens
  misc_RNA (1)...(19): siRNA sense strand
gggagcuggugcuggaaca

SEQ ID NO: 1751750 - RNA, 19 nt, Homo sapiens
  misc_RNA (1)...(19): siRNA sense strand
ggcagcaagauguuuguga

SEQ ID NO: 1751751 - RNA, 19 nt, Homo sapiens
  misc_RNA (1)...(19): siRNA sense strand
gaaauccauguccguguac

SEQ ID NO: 1751752 - RNA, 19 nt, Homo sapiens
  misc_RNA (1)...(19): siRNA sense strand
ggccaaggguguguaugag

SEQ ID NO: 1751753 - RNA, 19 nt, Homo sapiens
  misc_RNA (1)...(19): siRNA sense strand
cggcugucaucacuacaug

SEQ ID NO: 1751754 - RNA, 19 nt, Homo sapiens
  misc_RNA (1)...(19): siRNA sense strand
gccaaggguguguaugaga

SEQ ID NO: 1751755 - RNA, 19 nt, Homo sapiens
  misc_RNA (1)...(19): siRNA sense strand
gcuggcucuucuuccgaua

SEQ ID NO: 1751756 - RNA, 19 nt, Homo sapiens
  misc_RNA (1)...(19): siRNA sense strand
gagcugugaaccaggacaa

SEQ ID NO: 1751757 - RNA, 19 nt, Homo sapiens
  misc_RNA (1)...(19): siRNA sense strand
cagcaaguuugugcaguac

SEQ ID NO: 1751758 - RNA, 19 nt, Homo sapiens
  misc_RNA (1)...(19): siRNA sense strand
agcgcaagcuggacgaguu

SEQ ID NO: 1751759 - RNA, 19 nt, Homo sapiens
  misc_RNA (1)...(19): siRNA sense strand
caagauccggagccagaug

SEQ ID NO: 1751760 - RNA, 19 nt, Homo sapiens
  misc_RNA (1)...(19): siRNA sense strand
gcugugaaccaggacaaga

SEQ ID NO: 1751761 - RNA, 19 nt, Homo sapiens
  misc_RNA (1)...(19): siRNA sense strand
guggcgcugucuacuacuu

SEQ ID NO: 1751762 - RNA, 19 nt, Homo sapiens
  misc_RNA (1)...(19): siRNA sense strand
ccaucgaggcccugaagga

SEQ ID NO: 1751763 - RNA, 19 nt, Homo sapiens
  misc_RNA (1)...(19): siRNA sense strand
cgagcuggcgccuguaaca

SEQ ID NO: 1751764 - RNA, 19 nt, Homo sapiens
  misc_RNA (1)...(19): siRNA sense strand
cggagacagcucugacuug

SEQ ID NO: 1751765 - RNA, 19 nt, Homo sapiens
  misc_RNA (1)...(19): siRNA sense strand
ggaaauccauguccgugua

SEQ ID NO: 1751766 - RNA, 19 nt, Homo sapiens
  misc_RNA (1)...(19): siRNA sense strand
ccaacgagcucccgaguga

SEQ ID NO: 1751767 - RNA, 19 nt, Homo sapiens
  misc_RNA (1)...(19): siRNA sense strand
gcagcaaguuugugcagua

SEQ ID NO: 1751768 - RNA, 19 nt, Homo sapiens
  misc_RNA (1)...(19): siRNA sense strand
gcagcaagauguuugugaa

SEQ ID NO: 1751769 - RNA, 19 nt, Homo sapiens
  misc_RNA (1)...(19): siRNA sense strand
gaugcgggcuccugccuuu

SEQ ID NO: 1751770 - RNA, 19 nt, Homo sapiens
  misc_RNA (1)...(19): siRNA sense strand
gagcagauccuggcaaaga

SEQ ID NO: 1751771 - RNA, 19 nt, Homo sapiens
  misc_RNA (1)...(19): siRNA sense strand
ugacuugccugguggagaa

SEQ ID NO: 1751772 - RNA, 19 nt, Homo sapiens
  misc_RNA (1)...(19): siRNA sense strand
ccaaggguguguaugagaa

SEQ ID NO: 1751773 - RNA, 19 nt, Homo sapiens
  misc_RNA (1)...(19): siRNA sense strand
gaccucacaucaacuucua

SEQ ID NO: 1751774 - RNA, 19 nt, Homo sapiens
  misc_RNA (1)...(19): siRNA sense strand
gggagcagauccuggcaaa

SEQ ID NO: 1751775 - RNA, 19 nt, Homo sapiens
  misc_RNA (1)...(19): siRNA sense strand
gcaaguuugugcaguacga

SEQ ID NO: 1751776 - RNA, 19 nt, Homo sapiens
  misc_RNA (1)...(19): siRNA sense strand
gcaagggcgugcagaggau

SEQ ID NO: 1751777 - RNA, 19 nt, Homo sapiens
  misc_RNA (1)...(19): siRNA sense strand
ggacgacugcagcaaguuu

SEQ ID NO: 1751778 - RNA, 19 nt, Homo sapiens
  misc_RNA (1)...(19): siRNA sense strand
guaacacggucaucaagca

SEQ ID NO: 1751779 - RNA, 19 nt, Homo sapiens
  misc_RNA (1)...(19): siRNA sense strand
gggugaaccuggugacaga

SEQ ID NO: 1751780 - RNA, 19 nt, Homo sapiens
  misc_RNA (1)...(19): siRNA sense strand
uuaacgagaucacugcuau

SEQ ID NO: 1751781 - RNA, 19 nt, Homo sapiens
  misc_RNA (1)...(19): siRNA sense strand
acacggagcugggcaagau

SEQ ID NO: 1751782 - RNA, 19 nt, Homo sapiens
  misc_RNA (1)...(19): siRNA sense strand
cgagaucacugcuaugacu

SEQ ID NO: 1751783 - RNA, 19 nt, Homo sapiens
  misc_RNA (1)...(19): siRNA sense strand
ucgaggcccugaaggagua

SEQ ID NO: 1751784 - RNA, 19 nt, Homo sapiens
  misc_RNA (1)...(19): siRNA sense strand
acagcaacaugaagcaauu

SEQ ID NO: 1751785 - RNA, 19 nt, Homo sapiens
  misc_RNA (1)...(19): siRNA sense strand
gagaaccugcaguccuuua

SEQ ID NO: 1751786 - RNA, 19 nt, Homo sapiens
  misc_RNA (1)...(19): siRNA sense strand
ccgcaggcuuggcaucuuu

SEQ ID NO: 1751787 - RNA, 19 nt, Homo sapiens
  misc_RNA (1)...(19): siRNA sense strand
ccuggugguuuguguauga

SEQ ID NO: 1751788 - RNA, 19 nt, Homo sapiens
  misc_RNA (1)...(19): siRNA sense strand
gaagugcuccgaagacaac

SEQ ID NO: 1751789 - RNA, 19 nt, Homo sapiens
  misc_RNA (1)...(19): siRNA sense strand
uggagaaccugcaguccuu

SEQ ID NO: 1751790 - RNA, 19 nt, Homo sapiens
  misc_RNA (1)...(19): siRNA sense strand
cagagauggugcugucaga

SEQ ID NO: 1751791 - RNA, 19 nt, Homo sapiens
  misc_RNA (1)...(19): siRNA sense strand
agauggugcugucagauga

SEQ ID NO: 1751792 - RNA, 19 nt, Homo sapiens
  misc_RNA (1)...(19): siRNA sense strand
uaccucaucuccuccaaug

SEQ ID NO: 1751793 - RNA, 19 nt, Homo sapiens
  misc_RNA (1)...(19): siRNA sense strand
gagauggugcugucagaug

SEQ ID NO: 1751794 - RNA, 19 nt, Homo sapiens
  misc_RNA (1)...(19): siRNA sense strand
caaggaaggaggacaugga

SEQ ID NO: 1751795 - RNA, 19 nt, Homo sapiens
  misc_RNA (1)...(19): siRNA sense strand
gcaccagcccugaagaaag

SEQ ID NO: 1751796 - RNA, 19 nt, Homo sapiens
  misc_RNA (1)...(19): siRNA sense strand
ccacggcucugggcuucaa

SEQ ID NO: 1751797 - RNA, 19 nt, Homo sapiens
  misc_RNA (1)...(19): siRNA sense strand
ccucaucuccuccaauguu

SEQ ID NO: 1751798 - RNA, 19 nt, Homo sapiens
  misc_RNA (1)...(19): siRNA sense strand
gcguggcgcugucuacuac

SEQ ID NO: 1751799 - RNA, 19 nt, Homo sapiens
  misc_RNA (1)...(19): siRNA sense strand
ggaguucacccuggaguuc

SEQ ID NO: 1751800 - RNA, 19 nt, Homo sapiens
  misc_RNA (1)...(19): siRNA sense strand
agacggaccugaccuucgu

SEQ ID NO: 1751801 - RNA, 19 nt, Homo sapiens
  misc_RNA (1)...(19): siRNA sense strand
ccgagaagcccucaucagu

SEQ ID NO: 1751802 - RNA, 19 nt, Homo sapiens
  misc_RNA (1)...(19): siRNA sense strand
gcgcaagcuggacgaguuu

SEQ ID NO: 1751803 - RNA, 19 nt, Homo sapiens
  misc_RNA (1)...(19): siRNA sense strand
caccagcccugaagaaagc

SEQ ID NO: 1751804 - RNA, 19 nt, Homo sapiens
  misc_RNA (1)...(19): siRNA sense strand
ggccagggcagcaagaugu

SEQ ID NO: 1751805 - RNA, 19 nt, Homo sapiens
  misc_RNA (1)...(19): siRNA sense strand
ggaguaugagccugagaug

SEQ ID NO: 1751806 - RNA, 19 nt, Homo sapiens
  misc_RNA (1)...(19): siRNA sense strand
gcucaccaccaaucagaug

SEQ ID NO: 1751807 - RNA, 19 nt, Homo sapiens
  misc_RNA (1)...(19): siRNA sense strand
ugaaccaggacaagaagaa

SEQ ID NO: 1751808 - RNA, 19 nt, Homo sapiens
  misc_RNA (1)...(19): siRNA sense strand
gggcugcaccucagucauc

SEQ ID NO: 1751809 - RNA, 19 nt, Homo sapiens
  misc_RNA (1)...(19): siRNA sense strand
ggugguggugcuccagaua

SEQ ID NO: 1751810 - RNA, 19 nt, Homo sapiens
  misc_RNA (1)...(19): siRNA sense strand
caucgacugugagguguuc

SEQ ID NO: 1751811 - RNA, 19 nt, Homo sapiens
  misc_RNA (1)...(19): siRNA sense strand
gcaucuuccucacggcaau

SEQ ID NO: 1751812 - RNA, 19 nt, Homo sapiens
  misc_RNA (1)...(19): siRNA sense strand
uggcugcccuugucuccuu

SEQ ID NO: 1751813 - RNA, 19 nt, Homo sapiens
  misc_RNA (1)...(19): siRNA sense strand
caucucggguaccacguau

SEQ ID NO: 1751814 - RNA, 19 nt, Homo sapiens
  misc_RNA (1)...(19): siRNA sense strand
gcacgcucaccaccaauca

SEQ ID NO: 1751815 - RNA, 19 nt, Homo sapiens
  misc_RNA (1)...(19): siRNA sense strand
gcugucuacuacuucaaga

SEQ ID NO: 1751816 - RNA, 19 nt, Homo sapiens
  misc_RNA (1)...(19): siRNA sense strand
caauaucacaucgggcaaa

SEQ ID NO: 1751817 - RNA, 19 nt, Homo sapiens
  misc_RNA (1)...(19): siRNA sense strand
gcaguccuuuaacgagauc

SEQ ID NO: 1751818 - RNA, 19 nt, Homo sapiens
  misc_RNA (1)...(19): siRNA sense strand
gcgcauggcacgcaagaac

SEQ ID NO: 1751819 - RNA, 19 nt, Homo sapiens
  misc_RNA (1)...(19): siRNA sense strand
ucuaccagcugaggaacuu

SEQ ID NO: 1751820 - RNA, 19 nt, Homo sapiens
  misc_RNA (1)...(19): siRNA sense strand
ggagaaccugcaguccuuu

SEQ ID NO: 1751821 - RNA, 19 nt, Homo sapiens
  misc_RNA (1)...(19): siRNA sense strand
ggaccucacaucaacuucu

SEQ ID NO: 1751822 - RNA, 19 nt, Homo sapiens
  misc_RNA (1)...(19): siRNA sense strand
gaaccugcaguccuuuaac

SEQ ID NO: 1751823 - RNA, 19 nt, Homo sapiens
  misc_RNA (1)...(19): siRNA sense strand
caucaacaucggccacuuc

SEQ ID NO: 1751824 - RNA, 19 nt, Homo sapiens
  misc_RNA (1)...(19): siRNA sense strand
agauaucucugccugucau

SEQ ID NO: 1751825 - RNA, 19 nt, Homo sapiens
  misc_RNA (1)...(19): siRNA sense strand
ccaccaccauggccuuguc

SEQ ID NO: 1751826 - RNA, 19 nt, Homo sapiens
  misc_RNA (1)...(19): siRNA sense strand
cgaggucgucugcaucuuc

SEQ ID NO: 1751827 - RNA, 19 nt, Homo sapiens
  misc_RNA (1)...(19): siRNA sense strand
ggaacgcaacgccgagagu

SEQ ID NO: 1751828 - RNA, 19 nt, Homo sapiens
  misc_RNA (1)...(19): siRNA sense strand
gggagcuggugcuggaaca

SEQ ID NO: 1751829 - RNA, 19 nt, Homo sapiens
  misc_RNA (1)...(19): siRNA sense strand
ggcagcaagauguuuguga

SEQ ID NO: 1751830 - RNA, 19 nt, Homo sapiens
  misc_RNA (1)...(19): siRNA sense strand
gaaauccauguccguguac

SEQ ID NO: 1751831 - RNA, 19 nt, Homo sapiens
  misc_RNA (1)...(19): siRNA sense strand
ggccaaggguguguaugag

SEQ ID NO: 1751832 - RNA, 19 nt, Homo sapiens
  misc_RNA (1)...(19): siRNA sense strand
cggcugucaucacuacaug

SEQ ID NO: 1751833 - RNA, 19 nt, Homo sapiens
  misc_RNA (1)...(19): siRNA sense strand
gccaaggguguguaugaga

SEQ ID NO: 1751834 - RNA, 19 nt, Homo sapiens
  misc_RNA (1)...(19): siRNA sense strand
gcuggcucuucuuccgaua

SEQ ID NO: 1751835 - RNA, 19 nt, Homo sapiens
  misc_RNA (1)...(19): siRNA sense strand
gagcugugaaccaggacaa

SEQ ID NO: 1751836 - RNA, 19 nt, Homo sapiens
  misc_RNA (1)...(19): siRNA sense strand
cagcaaguuugugcaguac

SEQ ID NO: 1751837 - RNA, 19 nt, Homo sapiens
  misc_RNA (1)...(19): siRNA sense strand
agcgcaagcuggacgaguu

SEQ ID NO: 1751838 - RNA, 19 nt, Homo sapiens
  misc_RNA (1)...(19): siRNA sense strand
caagauccggagccagaug

SEQ ID NO: 1751839 - RNA, 19 nt, Homo sapiens
  misc_RNA (1)...(19): siRNA sense strand
gcugugaaccaggacaaga

SEQ ID NO: 1751840 - RNA, 19 nt, Homo sapiens
  misc_RNA (1)...(19): siRNA sense strand
guggcgcugucuacuacuu

SEQ ID NO: 1751841 - RNA, 19 nt, Homo sapiens
  misc_RNA (1)...(19): siRNA sense strand
ccaucgaggcccugaagga

SEQ ID NO: 1751842 - RNA, 19 nt, Homo sapiens
  misc_RNA (1)...(19): siRNA sense strand
cgagcuggcgccuguaaca

SEQ ID NO: 1751843 - RNA, 19 nt, Homo sapiens
  misc_RNA (1)...(19): siRNA sense strand
cggagacagcucugacuug

SEQ ID NO: 1751844 - RNA, 19 nt, Homo sapiens
  misc_RNA (1)...(19): siRNA sense strand
ggaaauccauguccgugua

SEQ ID NO: 1751845 - RNA, 19 nt, Homo sapiens
  misc_RNA (1)...(19): siRNA sense strand
ccaacgagcucccgaguga

SEQ ID NO: 1751846 - RNA, 19 nt, Homo sapiens
  misc_RNA (1)...(19): siRNA sense strand
gcagcaaguuugugcagua

SEQ ID NO: 1751847 - RNA, 19 nt, Homo sapiens
  misc_RNA (1)...(19): siRNA sense strand
gcagcaagauguuugugaa

SEQ ID NO: 1751848 - RNA, 19 nt, Homo sapiens
  misc_RNA (1)...(19): siRNA sense strand
gaugcgggcuccugccuuu

SEQ ID NO: 1751849 - RNA, 19 nt, Homo sapiens
  misc_RNA (1)...(19): siRNA sense strand
gagcagauccuggcaaaga

SEQ ID NO: 1751850 - RNA, 19 nt, Homo sapiens
  misc_RNA (1)...(19): siRNA sense strand
ugacuugccugguggagaa

SEQ ID NO: 1751851 - RNA, 19 nt, Homo sapiens
  misc_RNA (1)...(19): siRNA sense strand
ccaaggguguguaugagaa

SEQ ID NO: 1751852 - RNA, 19 nt, Homo sapiens
  misc_RNA (1)...(19): siRNA sense strand
gaccucacaucaacuucua

SEQ ID NO: 1751853 - RNA, 19 nt, Homo sapiens
  misc_RNA (1)...(19): siRNA sense strand
gggagcagauccuggcaaa

SEQ ID NO: 1751854 - RNA, 19 nt, Homo sapiens
  misc_RNA (1)...(19): siRNA sense strand
gcaaguuugugcaguacga

SEQ ID NO: 1751855 - RNA, 19 nt, Homo sapiens
  misc_RNA (1)...(19): siRNA sense strand
gcaagggcgugcagaggau

SEQ ID NO: 1751856 - RNA, 19 nt, Homo sapiens
  misc_RNA (1)...(19): siRNA sense strand
ggacgacugcagcaaguuu

SEQ ID NO: 1751857 - RNA, 19 nt, Homo sapiens
  misc_RNA (1)...(19): siRNA sense strand
guaacacggucaucaagca

SEQ ID NO: 1751858 - RNA, 19 nt, Homo sapiens
  misc_RNA (1)...(19): siRNA sense strand
gggugaaccuggugacaga

SEQ ID NO: 1751859 - RNA, 19 nt, Homo sapiens
  misc_RNA (1)...(19): siRNA sense strand
uuaacgagaucacugcuau

SEQ ID NO: 1751860 - RNA, 19 nt, Homo sapiens
  misc_RNA (1)...(19): siRNA sense strand
acacggagcugggcaagau

SEQ ID NO: 1751861 - RNA, 19 nt, Homo sapiens
  misc_RNA (1)...(19): siRNA sense strand
cgagaucacugcuaugacu

SEQ ID NO: 1751862 - RNA, 19 nt, Homo sapiens
  misc_RNA (1)...(19): siRNA sense strand
ucgaggcccugaaggagua

SEQ ID NO: 1751863 - RNA, 19 nt, Homo sapiens
  misc_RNA (1)...(19): siRNA sense strand
acagcaacaugaagcaauu

SEQ ID NO: 1751864 - RNA, 19 nt, Homo sapiens
  misc_RNA (1)...(19): siRNA sense strand
gagaaccugcaguccuuua

SEQ ID NO: 1751865 - RNA, 19 nt, Homo sapiens
  misc_RNA (1)...(19): siRNA sense strand
ccgcaggcuuggcaucuuu

SEQ ID NO: 1751866 - RNA, 19 nt, Homo sapiens
  misc_RNA (1)...(19): siRNA sense strand
ccuggugguuuguguauga

SEQ ID NO: 1751867 - RNA, 19 nt, Homo sapiens
  misc_RNA (1)...(19): siRNA sense strand
gaagugcuccgaagacaac

SEQ ID NO: 1751868 - RNA, 19 nt, Homo sapiens
  misc_RNA (1)...(19): siRNA sense strand
uggagaaccugcaguccuu

SEQ ID NO: 1751869 - RNA, 19 nt, Homo sapiens
  misc_RNA (1)...(19): siRNA sense strand
cagagauggugcugucaga

SEQ ID NO: 1751870 - RNA, 19 nt, Homo sapiens
  misc_RNA (1)...(19): siRNA sense strand
agauggugcugucagauga

SEQ ID NO: 1751871 - RNA, 19 nt, Homo sapiens
  misc_RNA (1)...(19): siRNA sense strand
uaccucaucuccuccaaug

SEQ ID NO: 1751872 - RNA, 19 nt, Homo sapiens
  misc_RNA (1)...(19): siRNA sense strand
gagauggugcugucagaug

SEQ ID NO: 1751873 - RNA, 19 nt, Homo sapiens
  misc_RNA (1)...(19): siRNA sense strand
caaggaaggaggacaugga

SEQ ID NO: 1751874 - RNA, 19 nt, Homo sapiens
  misc_RNA (1)...(19): siRNA sense strand
gcaccagcccugaagaaag

SEQ ID NO: 1751875 - RNA, 19 nt, Homo sapiens
  misc_RNA (1)...(19): siRNA sense strand
ccacggcucugggcuucaa

SEQ ID NO: 1751876 - RNA, 19 nt, Homo sapiens
  misc_RNA (1)...(19): siRNA sense strand
ccucaucuccuccaauguu

SEQ ID NO: 1751877 - RNA, 19 nt, Homo sapiens
  misc_RNA (1)...(19): siRNA sense strand
gcguggcgcugucuacuac

SEQ ID NO: 1751878 - RNA, 19 nt, Homo sapiens
  misc_RNA (1)...(19): siRNA sense strand
ggaguucacccuggaguuc

SEQ ID NO: 1751879 - RNA, 19 nt, Homo sapiens
  misc_RNA (1)...(19): siRNA sense strand
agacggaccugaccuucgu

SEQ ID NO: 1751880 - RNA, 19 nt, Homo sapiens
  misc_RNA (1)...(19): siRNA sense strand
ccgagaagcccucaucagu

SEQ ID NO: 1751881 - RNA, 19 nt, Homo sapiens
  misc_RNA (1)...(19): siRNA sense strand
gcgcaagcuggacgaguuu

SEQ ID NO: 1751882 - RNA, 19 nt, Homo sapiens
  misc_RNA (1)...(19): siRNA sense strand
caccagcccugaagaaagc

SEQ ID NO: 1751883 - RNA, 19 nt, Homo sapiens
  misc_RNA (1)...(19): siRNA sense strand
ggccagggcagcaagaugu

SEQ ID NO: 1751884 - RNA, 19 nt, Homo sapiens
  misc_RNA (1)...(19): siRNA sense strand
ggaguaugagccugagaug

SEQ ID NO: 1751885 - RNA, 19 nt, Homo sapiens
  misc_RNA (1)...(19): siRNA sense strand
gcucaccaccaaucagaug

SEQ ID NO: 1751886 - RNA, 19 nt, Homo sapiens
  misc_RNA (1)...(19): siRNA sense strand
ugaaccaggacaagaagaa

SEQ ID NO: 1751887 - RNA, 19 nt, Homo sapiens
  misc_RNA (1)...(19): siRNA sense strand
gggcugcaccucagucauc

SEQ ID NO: 1751888 - RNA, 19 nt, Homo sapiens
  misc_RNA (1)...(19): siRNA sense strand
ggugguggugcuccagaua

SEQ ID NO: 1751889 - RNA, 19 nt, Homo sapiens
  misc_RNA (1)...(19): siRNA sense strand
caucgacugugagguguuc

SEQ ID NO: 1751890 - RNA, 19 nt, Homo sapiens
  misc_RNA (1)...(19): siRNA sense strand
gcaucuuccucacggcaau

SEQ ID NO: 1751891 - RNA, 19 nt, Homo sapiens
  misc_RNA (1)...(19): siRNA sense strand
uggcugcccuugucuccuu

SEQ ID NO: 1751892 - RNA, 19 nt, Homo sapiens
  misc_RNA (1)...(19): siRNA sense strand
caucucggguaccacguau

SEQ ID NO: 1751893 - RNA, 19 nt, Homo sapiens
  misc_RNA (1)...(19): siRNA sense strand
gcacgcucaccaccaauca

SEQ ID NO: 1751894 - RNA, 19 nt, Homo sapiens
  misc_RNA (1)...(19): siRNA sense strand
gcugucuacuacuucaaga

SEQ ID NO: 1751895 - RNA, 19 nt, Homo sapiens
  misc_RNA (1)...(19): siRNA sense strand
caauaucacaucgggcaaa

SEQ ID NO: 1751896 - RNA, 19 nt, Homo sapiens
  misc_RNA (1)...(19): siRNA sense strand
gcaguccuuuaacgagauc

SEQ ID NO: 1751897 - RNA, 19 nt, Homo sapiens
  misc_RNA (1)...(19): siRNA sense strand
gcgcauggcacgcaagaac

SEQ ID NO: 1751898 - RNA, 19 nt, Homo sapiens
  misc_RNA (1)...(19): siRNA sense strand
ucuaccagcugaggaacuu

SEQ ID NO: 1751899 - RNA, 19 nt, Homo sapiens
  misc_RNA (1)...(19): siRNA sense strand
ggagaaccugcaguccuuu

SEQ ID NO: 1751900 - RNA, 19 nt, Homo sapiens
  misc_RNA (1)...(19): siRNA sense strand
ggaccucacaucaacuucu

SEQ ID NO: 1751901 - RNA, 19 nt, Homo sapiens
  misc_RNA (1)...(19): siRNA sense strand
gaaccugcaguccuuuaac

SEQ ID NO: 1751902 - RNA, 19 nt, Homo sapiens
  misc_RNA (1)...(19): siRNA sense strand
caucaacaucggccacuuc

SEQ ID NO: 1751903 - RNA, 19 nt, Homo sapiens
  misc_RNA (1)...(19): siRNA sense strand
agauaucucugccugucau

SEQ ID NO: 1751904 - RNA, 19 nt, Homo sapiens
  misc_RNA (1)...(19): siRNA sense strand
ccaccaccauggccuuguc

SEQ ID NO: 1751905 - RNA, 19 nt, Homo sapiens
  misc_RNA (1)...(19): siRNA sense strand
cgaggucgucugcaucuuc

SEQ ID NO: 1751906 - RNA, 19 nt, Homo sapiens
  misc_RNA (1)...(19): siRNA sense strand
ggaacgcaacgccgagagu

SEQ ID NO: 1751907 - RNA, 19 nt, Homo sapiens
  misc_RNA (1)...(19): siRNA sense strand
gggagcuggugcuggaaca

SEQ ID NO: 1751908 - RNA, 19 nt, Homo sapiens
  misc_RNA (1)...(19): siRNA sense strand
ggcagcaagauguuuguga

SEQ ID NO: 1751909 - RNA, 19 nt, Homo sapiens
  misc_RNA (1)...(19): siRNA sense strand
gaaauccauguccguguac

SEQ ID NO: 1751910 - RNA, 19 nt, Homo sapiens
  misc_RNA (1)...(19): siRNA sense strand
ggccaaggguguguaugag

SEQ ID NO: 1751911 - RNA, 19 nt, Homo sapiens
  misc_RNA (1)...(19): siRNA sense strand
cggcugucaucacuacaug

SEQ ID NO: 1751912 - RNA, 19 nt, Homo sapiens
  misc_RNA (1)...(19): siRNA sense strand
gccaaggguguguaugaga

SEQ ID NO: 1751913 - RNA, 19 nt, Homo sapiens
  misc_RNA (1)...(19): siRNA sense strand
gcuggcucuucuuccgaua

SEQ ID NO: 1751914 - RNA, 19 nt, Homo sapiens
  misc_RNA (1)...(19): siRNA sense strand
gagcugugaaccaggacaa

SEQ ID NO: 1751915 - RNA, 19 nt, Homo sapiens
  misc_RNA (1)...(19): siRNA sense strand
cagcaaguuugugcaguac

SEQ ID NO: 1751916 - RNA, 19 nt, Homo sapiens
  misc_RNA (1)...(19): siRNA sense strand
agcgcaagcuggacgaguu

SEQ ID NO: 1751917 - RNA, 19 nt, Homo sapiens
  misc_RNA (1)...(19): siRNA sense strand
caagauccggagccagaug

SEQ ID NO: 1751918 - RNA, 19 nt, Homo sapiens
  misc_RNA (1)...(19): siRNA sense strand
gcugugaaccaggacaaga

SEQ ID NO: 1751919 - RNA, 19 nt, Homo sapiens
  misc_RNA (1)...(19): siRNA sense strand
guggcgcugucuacuacuu

SEQ ID NO: 1751920 - RNA, 19 nt, Homo sapiens
  misc_RNA (1)...(19): siRNA sense strand
ccaucgaggcccugaagga

SEQ ID NO: 1751921 - RNA, 19 nt, Homo sapiens
  misc_RNA (1)...(19): siRNA sense strand
cgagcuggcgccuguaaca

SEQ ID NO: 1751922 - RNA, 19 nt, Homo sapiens
  misc_RNA (1)...(19): siRNA sense strand
cggagacagcucugacuug

SEQ ID NO: 1751923 - RNA, 19 nt, Homo sapiens
  misc_RNA (1)...(19): siRNA sense strand
ggaaauccauguccgugua

SEQ ID NO: 1751924 - RNA, 19 nt, Homo sapiens
  misc_RNA (1)...(19): siRNA sense strand
ccaacgagcucccgaguga

SEQ ID NO: 1751925 - RNA, 19 nt, Homo sapiens
  misc_RNA (1)...(19): siRNA sense strand
gcagcaaguuugugcagua

SEQ ID NO: 1751926 - RNA, 19 nt, Homo sapiens
  misc_RNA (1)...(19): siRNA sense strand
gcagcaagauguuugugaa

SEQ ID NO: 1751927 - RNA, 19 nt, Homo sapiens
  misc_RNA (1)...(19): siRNA sense strand
gaugcgggcuccugccuuu

SEQ ID NO: 1751928 - RNA, 19 nt, Homo sapiens
  misc_RNA (1)...(19): siRNA sense strand
gagcagauccuggcaaaga

SEQ ID NO: 1751929 - RNA, 19 nt, Homo sapiens
  misc_RNA (1)...(19): siRNA sense strand
ugacuugccugguggagaa

SEQ ID NO: 1751930 - RNA, 19 nt, Homo sapiens
  misc_RNA (1)...(19): siRNA sense strand
ccaaggguguguaugagaa

SEQ ID NO: 1751931 - RNA, 19 nt, Homo sapiens
  misc_RNA (1)...(19): siRNA sense strand
gaccucacaucaacuucua

SEQ ID NO: 1751932 - RNA, 19 nt, Homo sapiens
  misc_RNA (1)...(19): siRNA sense strand
gggagcagauccuggcaaa

SEQ ID NO: 1751933 - RNA, 19 nt, Homo sapiens
  misc_RNA (1)...(19): siRNA sense strand
gcaaguuugugcaguacga

SEQ ID NO: 1751934 - RNA, 19 nt, Homo sapiens
  misc_RNA (1)...(19): siRNA sense strand
gcaagggcgugcagaggau

SEQ ID NO: 1751935 - RNA, 19 nt, Homo sapiens
  misc_RNA (1)...(19): siRNA sense strand
ggacgacugcagcaaguuu

SEQ ID NO: 1751936 - RNA, 19 nt, Homo sapiens
  misc_RNA (1)...(19): siRNA sense strand
guaacacggucaucaagca

SEQ ID NO: 1751937 - RNA, 19 nt, Homo sapiens
  misc_RNA (1)...(19): siRNA sense strand
gggugaaccuggugacaga

SEQ ID NO: 1751938 - RNA, 19 nt, Homo sapiens
  misc_RNA (1)...(19): siRNA sense strand
uuaacgagaucacugcuau

SEQ ID NO: 1751939 - RNA, 19 nt, Homo sapiens
  misc_RNA (1)...(19): siRNA sense strand
acacggagcugggcaagau

SEQ ID NO: 1751940 - RNA, 19 nt, Homo sapiens
  misc_RNA (1)...(19): siRNA sense strand
cgagaucacugcuaugacu

SEQ ID NO: 1751941 - RNA, 19 nt, Homo sapiens
  misc_RNA (1)...(19): siRNA sense strand
ucgaggcccugaaggagua

SEQ ID NO: 1751942 - RNA, 19 nt, Homo sapiens
  misc_RNA (1)...(19): siRNA sense strand
acagcaacaugaagcaauu

SEQ ID NO: 1751943 - RNA, 19 nt, Homo sapiens
  misc_RNA (1)...(19): siRNA sense strand
gagaaccugcaguccuuua

SEQ ID NO: 1751944 - RNA, 19 nt, Homo sapiens
  misc_RNA (1)...(19): siRNA sense strand
ccgcaggcuuggcaucuuu

SEQ ID NO: 1751945 - RNA, 19 nt, Homo sapiens
  misc_RNA (1)...(19): siRNA sense strand
ccuggugguuuguguauga

SEQ ID NO: 1751946 - RNA, 19 nt, Homo sapiens
  misc_RNA (1)...(19): siRNA sense strand
gaagugcuccgaagacaac

SEQ ID NO: 1751947 - RNA, 19 nt, Homo sapiens
  misc_RNA (1)...(19): siRNA sense strand
uggagaaccugcaguccuu

SEQ ID NO: 1751948 - RNA, 19 nt, Homo sapiens
  misc_RNA (1)...(19): siRNA sense strand
cagagauggugcugucaga

SEQ ID NO: 1751949 - RNA, 19 nt, Homo sapiens
  misc_RNA (1)...(19): siRNA sense strand
agauggugcugucagauga

SEQ ID NO: 1751950 - RNA, 19 nt, Homo sapiens
  misc_RNA (1)...(19): siRNA sense strand
uaccucaucuccuccaaug

SEQ ID NO: 1751951 - RNA, 19 nt, Homo sapiens
  misc_RNA (1)...(19): siRNA sense strand
gagauggugcugucagaug

SEQ ID NO: 1751952 - RNA, 19 nt, Homo sapiens
  misc_RNA (1)...(19): siRNA sense strand
caaggaaggaggacaugga

SEQ ID NO: 1751953 - RNA, 19 nt, Homo sapiens
  misc_RNA (1)...(19): siRNA sense strand
gcaccagcccugaagaaag

SEQ ID NO: 1751954 - RNA, 19 nt, Homo sapiens
  misc_RNA (1)...(19): siRNA sense strand
ccacggcucugggcuucaa

SEQ ID NO: 1751955 - RNA, 19 nt, Homo sapiens
  misc_RNA (1)...(19): siRNA sense strand
ccucaucuccuccaauguu

SEQ ID NO: 1751956 - RNA, 19 nt, Homo sapiens
  misc_RNA (1)...(19): siRNA sense strand
gcguggcgcugucuacuac

SEQ ID NO: 1751957 - RNA, 19 nt, Homo sapiens
  misc_RNA (1)...(19): siRNA sense strand
ggaguucacccuggaguuc

SEQ ID NO: 1751958 - RNA, 19 nt, Homo sapiens
  misc_RNA (1)...(19): siRNA sense strand
agacggaccugaccuucgu

SEQ ID NO: 1751959 - RNA, 19 nt, Homo sapiens
  misc_RNA (1)...(19): siRNA sense strand
ccgagaagcccucaucagu

SEQ ID NO: 1751960 - RNA, 19 nt, Homo sapiens
  misc_RNA (1)...(19): siRNA sense strand
gcgcaagcuggacgaguuu

SEQ ID NO: 1751961 - RNA, 19 nt, Homo sapiens
  misc_RNA (1)...(19): siRNA sense strand
caccagcccugaagaaagc

SEQ ID NO: 1751962 - RNA, 19 nt, Homo sapiens
  misc_RNA (1)...(19): siRNA sense strand
ggccagggcagcaagaugu

SEQ ID NO: 1751963 - RNA, 19 nt, Homo sapiens
  misc_RNA (1)...(19): siRNA sense strand
ggaguaugagccugagaug

SEQ ID NO: 1751964 - RNA, 19 nt, Homo sapiens
  misc_RNA (1)...(19): siRNA sense strand
gcucaccaccaaucagaug

SEQ ID NO: 1751965 - RNA, 19 nt, Homo sapiens
  misc_RNA (1)...(19): siRNA sense strand
ugaaccaggacaagaagaa

SEQ ID NO: 1751966 - RNA, 19 nt, Homo sapiens
  misc_RNA (1)...(19): siRNA sense strand
gggcugcaccucagucauc

SEQ ID NO: 1751967 - RNA, 19 nt, Homo sapiens
  misc_RNA (1)...(19): siRNA sense strand
ggugguggugcuccagaua

SEQ ID NO: 1751968 - RNA, 19 nt, Homo sapiens
  misc_RNA (1)...(19): siRNA sense strand
caucgacugugagguguuc

SEQ ID NO: 1751969 - RNA, 19 nt, Homo sapiens
  misc_RNA (1)...(19): siRNA sense strand
gcaucuuccucacggcaau

SEQ ID NO: 1751970 - RNA, 19 nt, Homo sapiens
  misc_RNA (1)...(19): siRNA sense strand
uggcugcccuugucuccuu

SEQ ID NO: 1751971 - RNA, 19 nt, Homo sapiens
  misc_RNA (1)...(19): siRNA sense strand
caucucggguaccacguau

SEQ ID NO: 1751972 - RNA, 19 nt, Homo sapiens
  misc_RNA (1)...(19): siRNA sense strand
gcacgcucaccaccaauca

SEQ ID NO: 1751973 - RNA, 19 nt, Homo sapiens
  misc_RNA (1)...(19): siRNA sense strand
gcugucuacuacuucaaga

SEQ ID NO: 1751974 - RNA, 19 nt, Homo sapiens
  misc_RNA (1)...(19): siRNA sense strand
caauaucacaucgggcaaa

SEQ ID NO: 1751975 - RNA, 19 nt, Homo sapiens
  misc_RNA (1)...(19): siRNA sense strand
gcaguccuuuaacgagauc

SEQ ID NO: 1751976 - RNA, 19 nt, Homo sapiens
  misc_RNA (1)...(19): siRNA sense strand
gcgcauggcacgcaagaac

SEQ ID NO: 1751977 - RNA, 19 nt, Homo sapiens
  misc_RNA (1)...(19): siRNA sense strand
ucuaccagcugaggaacuu

SEQ ID NO: 1751978 - RNA, 19 nt, Homo sapiens
  misc_RNA (1)...(19): siRNA sense strand
ggagaaccugcaguccuuu

SEQ ID NO: 1751979 - RNA, 19 nt, Homo sapiens
  misc_RNA (1)...(19): siRNA sense strand
ggaccucacaucaacuucu

SEQ ID NO: 1751980 - RNA, 19 nt, Homo sapiens
  misc_RNA (1)...(19): siRNA sense strand
gaaccugcaguccuuuaac

SEQ ID NO: 1751981 - RNA, 19 nt, Homo sapiens
  misc_RNA (1)...(19): siRNA sense strand
caucaacaucggccacuuc

SEQ ID NO: 1751982 - RNA, 19 nt, Homo sapiens
  misc_RNA (1)...(19): siRNA sense strand
agauaucucugccugucau

SEQ ID NO: 1751983 - RNA, 19 nt, Homo sapiens
  misc_RNA (1)...(19): siRNA sense strand
ccaccaccauggccuuguc

SEQ ID NO: 1751984 - RNA, 19 nt, Homo sapiens
  misc_RNA (1)...(19): siRNA sense strand
cgaggucgucugcaucuuc

SEQ ID NO: 1751985 - RNA, 19 nt, Homo sapiens
  misc_RNA (1)...(19): siRNA sense strand
ggaacgcaacgccgagagu

SEQ ID NO: 1751986 - RNA, 19 nt, Homo sapiens
  misc_RNA (1)...(19): siRNA sense strand
gggagcuggugcuggaaca

SEQ ID NO: 1751987 - RNA, 19 nt, Homo sapiens
  misc_RNA (1)...(19): siRNA sense strand
ggcagcaagauguuuguga

SEQ ID NO: 1751988 - RNA, 19 nt, Homo sapiens
  misc_RNA (1)...(19): siRNA sense strand
gaaauccauguccguguac

SEQ ID NO: 1751989 - RNA, 19 nt, Homo sapiens
  misc_RNA (1)...(19): siRNA sense strand
ggccaaggguguguaugag

SEQ ID NO: 1751990 - RNA, 19 nt, Homo sapiens
  misc_RNA (1)...(19): siRNA sense strand
cggcugucaucacuacaug

SEQ ID NO: 1751991 - RNA, 19 nt, Homo sapiens
  misc_RNA (1)...(19): siRNA sense strand
gccaaggguguguaugaga

SEQ ID NO: 1751992 - RNA, 19 nt, Homo sapiens
  misc_RNA (1)...(19): siRNA sense strand
gcuggcucuucuuccgaua

SEQ ID NO: 1751993 - RNA, 19 nt, Homo sapiens
  misc_RNA (1)...(19): siRNA sense strand
gagcugugaaccaggacaa

SEQ ID NO: 1751994 - RNA, 19 nt, Homo sapiens
  misc_RNA (1)...(19): siRNA sense strand
cagcaaguuugugcaguac

SEQ ID NO: 1751995 - RNA, 19 nt, Homo sapiens
  misc_RNA (1)...(19): siRNA sense strand
agcgcaagcuggacgaguu

SEQ ID NO: 1751996 - RNA, 19 nt, Homo sapiens
  misc_RNA (1)...(19): siRNA sense strand
caagauccggagccagaug

SEQ ID NO: 1751997 - RNA, 19 nt, Homo sapiens
  misc_RNA (1)...(19): siRNA sense strand
gcugugaaccaggacaaga

SEQ ID NO: 1751998 - RNA, 19 nt, Homo sapiens
  misc_RNA (1)...(19): siRNA sense strand
guggcgcugucuacuacuu

SEQ ID NO: 1751999 - RNA, 19 nt, Homo sapiens
  misc_RNA (1)...(19): siRNA sense strand
ccaucgaggcccugaagga

SEQ ID NO: 1752000 - RNA, 19 nt, Homo sapiens
  misc_RNA (1)...(19): siRNA sense strand
cgagcuggcgccuguaaca

SEQ ID NO: 1752001 - RNA, 19 nt, Homo sapiens
  misc_RNA (1)...(19): siRNA sense strand
cggagacagcucugacuug

SEQ ID NO: 1752002 - RNA, 19 nt, Homo sapiens
  misc_RNA (1)...(19): siRNA sense strand
ggaaauccauguccgugua

SEQ ID NO: 1752003 - RNA, 19 nt, Homo sapiens
  misc_RNA (1)...(19): siRNA sense strand
ccaacgagcucccgaguga

SEQ ID NO: 1752004 - RNA, 19 nt, Homo sapiens
  misc_RNA (1)...(19): siRNA sense strand
gcagcaaguuugugcagua

SEQ ID NO: 1752005 - RNA, 19 nt, Homo sapiens
  misc_RNA (1)...(19): siRNA sense strand
gcagcaagauguuugugaa

SEQ ID NO: 1752006 - RNA, 19 nt, Homo sapiens
  misc_RNA (1)...(19): siRNA sense strand
gaugcgggcuccugccuuu

SEQ ID NO: 1752007 - RNA, 19 nt, Homo sapiens
  misc_RNA (1)...(19): siRNA sense strand
gagcagauccuggcaaaga

SEQ ID NO: 1752008 - RNA, 19 nt, Homo sapiens
  misc_RNA (1)...(19): siRNA sense strand
ugacuugccugguggagaa

SEQ ID NO: 1752009 - RNA, 19 nt, Homo sapiens
  misc_RNA (1)...(19): siRNA sense strand
ccaaggguguguaugagaa

SEQ ID NO: 1752010 - RNA, 19 nt, Homo sapiens
  misc_RNA (1)...(19): siRNA sense strand
gaccucacaucaacuucua

SEQ ID NO: 1752011 - RNA, 19 nt, Homo sapiens
  misc_RNA (1)...(19): siRNA sense strand
gggagcagauccuggcaaa

SEQ ID NO: 1752012 - RNA, 19 nt, Homo sapiens
  misc_RNA (1)...(19): siRNA sense strand
gcaaguuugugcaguacga

SEQ ID NO: 1752013 - RNA, 19 nt, Homo sapiens
  misc_RNA (1)...(19): siRNA sense strand
gcaagggcgugcagaggau

SEQ ID NO: 1752014 - RNA, 19 nt, Homo sapiens
  misc_RNA (1)...(19): siRNA sense strand
ggacgacugcagcaaguuu

SEQ ID NO: 1752015 - RNA, 19 nt, Homo sapiens
  misc_RNA (1)...(19): siRNA sense strand
guaacacggucaucaagca

SEQ ID NO: 1752016 - RNA, 19 nt, Homo sapiens
  misc_RNA (1)...(19): siRNA sense strand
gggugaaccuggugacaga

SEQ ID NO: 1752017 - RNA, 19 nt, Homo sapiens
  misc_RNA (1)...(19): siRNA sense strand
uuaacgagaucacugcuau

SEQ ID NO: 1752018 - RNA, 19 nt, Homo sapiens
  misc_RNA (1)...(19): siRNA sense strand
acacggagcugggcaagau

SEQ ID NO: 1752019 - RNA, 19 nt, Homo sapiens
  misc_RNA (1)...(19): siRNA sense strand
cgagaucacugcuaugacu

SEQ ID NO: 1752020 - RNA, 19 nt, Homo sapiens
  misc_RNA (1)...(19): siRNA sense strand
ucgaggcccugaaggagua

SEQ ID NO: 1752021 - RNA, 19 nt, Homo sapiens
  misc_RNA (1)...(19): siRNA sense strand
acagcaacaugaagcaauu

SEQ ID NO: 1752022 - RNA, 19 nt, Homo sapiens
  misc_RNA (1)...(19): siRNA sense strand
gagaaccugcaguccuuua

SEQ ID NO: 1752023 - RNA, 19 nt, Homo sapiens
  misc_RNA (1)...(19): siRNA sense strand
gaagugagcgcugggaaca

SEQ ID NO: 1752024 - RNA, 19 nt, Homo sapiens
  misc_RNA (1)...(19): siRNA sense strand
ccgcaggcuuggcaucuuu

SEQ ID NO: 1752025 - RNA, 19 nt, Homo sapiens
  misc_RNA (1)...(19): siRNA sense strand
ccuggugguuuguguauga

SEQ ID NO: 1752026 - RNA, 19 nt, Homo sapiens
  misc_RNA (1)...(19): siRNA sense strand
gaagugcuccgaagacaac

SEQ ID NO: 1752027 - RNA, 19 nt, Homo sapiens
  misc_RNA (1)...(19): siRNA sense strand
uggagaaccugcaguccuu

SEQ ID NO: 1752028 - RNA, 19 nt, Homo sapiens
  misc_RNA (1)...(19): siRNA sense strand
cagagauggugcugucaga

SEQ ID NO: 1752029 - RNA, 19 nt, Homo sapiens
  misc_RNA (1)...(19): siRNA sense strand
agauggugcugucagauga

SEQ ID NO: 1752030 - RNA, 19 nt, Homo sapiens
  misc_RNA (1)...(19): siRNA sense strand
uaccucaucuccuccaaug

SEQ ID NO: 1752031 - RNA, 19 nt, Homo sapiens
  misc_RNA (1)...(19): siRNA sense strand
gagauggugcugucagaug

SEQ ID NO: 1752032 - RNA, 19 nt, Homo sapiens
  misc_RNA (1)...(19): siRNA sense strand
caaggaaggaggacaugga

SEQ ID NO: 1752033 - RNA, 19 nt, Homo sapiens
  misc_RNA (1)...(19): siRNA sense strand
gcaccagcccugaagaaag

SEQ ID NO: 1752034 - RNA, 19 nt, Homo sapiens
  misc_RNA (1)...(19): siRNA sense strand
ccacggcucugggcuucaa

SEQ ID NO: 1752035 - RNA, 19 nt, Homo sapiens
  misc_RNA (1)...(19): siRNA sense strand
ccucaucuccuccaauguu

SEQ ID NO: 1752036 - RNA, 19 nt, Homo sapiens
  misc_RNA (1)...(19): siRNA sense strand
gcguggcgcugucuacuac

SEQ ID NO: 1752037 - RNA, 19 nt, Homo sapiens
  misc_RNA (1)...(19): siRNA sense strand
ggaguucacccuggaguuc

SEQ ID NO: 1752038 - RNA, 19 nt, Homo sapiens
  misc_RNA (1)...(19): siRNA sense strand
agacggaccugaccuucgu

SEQ ID NO: 1752039 - RNA, 19 nt, Homo sapiens
  misc_RNA (1)...(19): siRNA sense strand
ccgagaagcccucaucagu

SEQ ID NO: 1752040 - RNA, 19 nt, Homo sapiens
  misc_RNA (1)...(19): siRNA sense strand
gcgcaagcuggacgaguuu

SEQ ID NO: 1752041 - RNA, 19 nt, Homo sapiens
  misc_RNA (1)...(19): siRNA sense strand
caccagcccugaagaaagc

SEQ ID NO: 1752042 - RNA, 19 nt, Homo sapiens
  misc_RNA (1)...(19): siRNA sense strand
ggccagggcagcaagaugu

SEQ ID NO: 1752043 - RNA, 19 nt, Homo sapiens
  misc_RNA (1)...(19): siRNA sense strand
ggaguaugagccugagaug

SEQ ID NO: 1752044 - RNA, 19 nt, Homo sapiens
  misc_RNA (1)...(19): siRNA sense strand
gcucaccaccaaucagaug

SEQ ID NO: 1752045 - RNA, 19 nt, Homo sapiens
  misc_RNA (1)...(19): siRNA sense strand
ugaaccaggacaagaagaa

SEQ ID NO: 1752046 - RNA, 19 nt, Homo sapiens
  misc_RNA (1)...(19): siRNA sense strand
gggcugcaccucagucauc

SEQ ID NO: 1752047 - RNA, 19 nt, Homo sapiens
  misc_RNA (1)...(19): siRNA sense strand
ggugguggugcuccagaua

SEQ ID NO: 1752048 - RNA, 19 nt, Homo sapiens
  misc_RNA (1)...(19): siRNA sense strand
caucgacugugagguguuc

SEQ ID NO: 1752049 - RNA, 19 nt, Homo sapiens
  misc_RNA (1)...(19): siRNA sense strand
gcaucuuccucacggcaau

SEQ ID NO: 1752050 - RNA, 19 nt, Homo sapiens
  misc_RNA (1)...(19): siRNA sense strand
uggcugcccuugucuccuu

SEQ ID NO: 1752051 - RNA, 19 nt, Homo sapiens
  misc_RNA (1)...(19): siRNA sense strand
caucucggguaccacguau

SEQ ID NO: 1752052 - RNA, 19 nt, Homo sapiens
  misc_RNA (1)...(19): siRNA sense strand
gcacgcucaccaccaauca

SEQ ID NO: 1752053 - RNA, 19 nt, Homo sapiens
  misc_RNA (1)...(19): siRNA sense strand
gcugucuacuacuucaaga

SEQ ID NO: 1752054 - RNA, 19 nt, Homo sapiens
  misc_RNA (1)...(19): siRNA sense strand
caauaucacaucgggcaaa

SEQ ID NO: 1752055 - RNA, 19 nt, Homo sapiens
  misc_RNA (1)...(19): siRNA sense strand
gcaguccuuuaacgagauc

SEQ ID NO: 1752056 - RNA, 19 nt, Homo sapiens
  misc_RNA (1)...(19): siRNA sense strand
gcgcauggcacgcaagaac

SEQ ID NO: 1752057 - RNA, 19 nt, Homo sapiens
  misc_RNA (1)...(19): siRNA sense strand
ucuaccagcugaggaacuu

SEQ ID NO: 1752058 - RNA, 19 nt, Homo sapiens
  misc_RNA (1)...(19): siRNA sense strand
agugagcgcugggaacaga

SEQ ID NO: 1752059 - RNA, 19 nt, Homo sapiens
  misc_RNA (1)...(19): siRNA sense strand
ggagaaccugcaguccuuu

SEQ ID NO: 1752060 - RNA, 19 nt, Homo sapiens
  misc_RNA (1)...(19): siRNA sense strand
ggaccucacaucaacuucu

SEQ ID NO: 1752061 - RNA, 19 nt, Homo sapiens
  misc_RNA (1)...(19): siRNA sense strand
gaaccugcaguccuuuaac

SEQ ID NO: 1752062 - RNA, 19 nt, Homo sapiens
  misc_RNA (1)...(19): siRNA sense strand
caucaacaucggccacuuc

SEQ ID NO: 1752063 - RNA, 19 nt, Homo sapiens
  misc_RNA (1)...(19): siRNA sense strand
agauaucucugccugucau

SEQ ID NO: 1752064 - RNA, 19 nt, Homo sapiens
  misc_RNA (1)...(19): siRNA sense strand
ccaccaccauggccuuguc

SEQ ID NO: 1752065 - RNA, 19 nt, Homo sapiens
  misc_RNA (1)...(19): siRNA sense strand
cgaggucgucugcaucuuc

SEQ ID NO: 1752066 - RNA, 19 nt, Homo sapiens
  misc_RNA (1)...(19): siRNA sense strand
ggaacgcaacgccgagagu

SEQ ID NO: 1752067 - RNA, 19 nt, Homo sapiens
  misc_RNA (1)...(19): siRNA sense strand
gggagcuggugcuggaaca

SEQ ID NO: 1752068 - RNA, 19 nt, Homo sapiens
  misc_RNA (1)...(19): siRNA sense strand
ggcagcaagauguuuguga

SEQ ID NO: 1752069 - RNA, 19 nt, Homo sapiens
  misc_RNA (1)...(19): siRNA sense strand
gaaauccauguccguguac

SEQ ID NO: 1752070 - RNA, 19 nt, Homo sapiens
  misc_RNA (1)...(19): siRNA sense strand
ggccaaggguguguaugag

SEQ ID NO: 1752071 - RNA, 19 nt, Homo sapiens
  misc_RNA (1)...(19): siRNA sense strand
cggcugucaucacuacaug

SEQ ID NO: 1752072 - RNA, 19 nt, Homo sapiens
  misc_RNA (1)...(19): siRNA sense strand
gccaaggguguguaugaga

SEQ ID NO: 1752073 - RNA, 19 nt, Homo sapiens
  misc_RNA (1)...(19): siRNA sense strand
gcuggcucuucuuccgaua

SEQ ID NO: 1752074 - RNA, 19 nt, Homo sapiens
  misc_RNA (1)...(19): siRNA sense strand
gagcugugaaccaggacaa

SEQ ID NO: 1752075 - RNA, 19 nt, Homo sapiens
  misc_RNA (1)...(19): siRNA sense strand
cagcaaguuugugcaguac

SEQ ID NO: 1752076 - RNA, 19 nt, Homo sapiens
  misc_RNA (1)...(19): siRNA sense strand
agcgcaagcuggacgaguu

SEQ ID NO: 1752077 - RNA, 19 nt, Homo sapiens
  misc_RNA (1)...(19): siRNA sense strand
caagauccggagccagaug

SEQ ID NO: 1752078 - RNA, 19 nt, Homo sapiens
  misc_RNA (1)...(19): siRNA sense strand
gcugugaaccaggacaaga

SEQ ID NO: 1752079 - RNA, 19 nt, Homo sapiens
  misc_RNA (1)...(19): siRNA sense strand
guggcgcugucuacuacuu

SEQ ID NO: 1752080 - RNA, 19 nt, Homo sapiens
  misc_RNA (1)...(19): siRNA sense strand
ccaucgaggcccugaagga

SEQ ID NO: 1752081 - RNA, 19 nt, Homo sapiens
  misc_RNA (1)...(19): siRNA sense strand
cgagcuggcgccuguaaca

SEQ ID NO: 1752082 - RNA, 19 nt, Homo sapiens
  misc_RNA (1)...(19): siRNA sense strand
cggagacagcucugacuug

SEQ ID NO: 1752083 - RNA, 19 nt, Homo sapiens
  misc_RNA (1)...(19): siRNA sense strand
ggaaauccauguccgugua

SEQ ID NO: 1752084 - RNA, 19 nt, Homo sapiens
  misc_RNA (1)...(19): siRNA sense strand
ccaacgagcucccgaguga

SEQ ID NO: 1752085 - RNA, 19 nt, Homo sapiens
  misc_RNA (1)...(19): siRNA sense strand
gcagcaaguuugugcagua

SEQ ID NO: 1752086 - RNA, 19 nt, Homo sapiens
  misc_RNA (1)...(19): siRNA sense strand
gcagcaagauguuugugaa

SEQ ID NO: 1752087 - RNA, 19 nt, Homo sapiens
  misc_RNA (1)...(19): siRNA sense strand
gaugcgggcuccugccuuu

SEQ ID NO: 1752088 - RNA, 19 nt, Homo sapiens
  misc_RNA (1)...(19): siRNA sense strand
gagcagauccuggcaaaga

SEQ ID NO: 1752089 - RNA, 19 nt, Homo sapiens
  misc_RNA (1)...(19): siRNA sense strand
ugacuugccugguggagaa

SEQ ID NO: 1752090 - RNA, 19 nt, Homo sapiens
  misc_RNA (1)...(19): siRNA sense strand
ccaaggguguguaugagaa

SEQ ID NO: 1752091 - RNA, 19 nt, Homo sapiens
  misc_RNA (1)...(19): siRNA sense strand
gaccucacaucaacuucua

SEQ ID NO: 1752092 - RNA, 19 nt, Homo sapiens
  misc_RNA (1)...(19): siRNA sense strand
gggagcagauccuggcaaa

SEQ ID NO: 1752093 - RNA, 19 nt, Homo sapiens
  misc_RNA (1)...(19): siRNA sense strand
gcaaguuugugcaguacga

SEQ ID NO: 1752094 - RNA, 19 nt, Homo sapiens
  misc_RNA (1)...(19): siRNA sense strand
gcaagggcgugcagaggau

SEQ ID NO: 1752095 - RNA, 19 nt, Homo sapiens
  misc_RNA (1)...(19): siRNA sense strand
ggacgacugcagcaaguuu

SEQ ID NO: 1752096 - RNA, 19 nt, Homo sapiens
  misc_RNA (1)...(19): siRNA sense strand
guaacacggucaucaagca

SEQ ID NO: 1752097 - RNA, 19 nt, Homo sapiens
  misc_RNA (1)...(19): siRNA sense strand
gggugaaccuggugacaga

SEQ ID NO: 1752098 - RNA, 19 nt, Homo sapiens
  misc_RNA (1)...(19): siRNA sense strand
uuaacgagaucacugcuau

SEQ ID NO: 1752099 - RNA, 19 nt, Homo sapiens
  misc_RNA (1)...(19): siRNA sense strand
acacggagcugggcaagau

SEQ ID NO: 1752100 - RNA, 19 nt, Homo sapiens
  misc_RNA (1)...(19): siRNA sense strand
cgagaucacugcuaugacu

SEQ ID NO: 1752101 - RNA, 19 nt, Homo sapiens
  misc_RNA (1)...(19): siRNA sense strand
ucgaggcccugaaggagua

SEQ ID NO: 1752102 - RNA, 19 nt, Homo sapiens
  misc_RNA (1)...(19): siRNA sense strand
acagcaacaugaagcaauu

SEQ ID NO: 1752103 - RNA, 19 nt, Homo sapiens
  misc_RNA (1)...(19): siRNA sense strand
gagaaccugcaguccuuua

SEQ ID NO: 1752104 - RNA, 19 nt, Homo sapiens
  misc_RNA (1)...(19): siRNA sense strand
ccgcaggcuuggcaucuuu

SEQ ID NO: 1752105 - RNA, 19 nt, Homo sapiens
  misc_RNA (1)...(19): siRNA sense strand
ccuggugguuuguguauga

SEQ ID NO: 1752106 - RNA, 19 nt, Homo sapiens
  misc_RNA (1)...(19): siRNA sense strand
gaagugcuccgaagacaac

SEQ ID NO: 1752107 - RNA, 19 nt, Homo sapiens
  misc_RNA (1)...(19): siRNA sense strand
uggagaaccugcaguccuu

SEQ ID NO: 1752108 - RNA, 19 nt, Homo sapiens
  misc_RNA (1)...(19): siRNA sense strand
cagagauggugcugucaga

SEQ ID NO: 1752109 - RNA, 19 nt, Homo sapiens
  misc_RNA (1)...(19): siRNA sense strand
agauggugcugucagauga

SEQ ID NO: 1752110 - RNA, 19 nt, Homo sapiens
  misc_RNA (1)...(19): siRNA sense strand
uaccucaucuccuccaaug

SEQ ID NO: 1752111 - RNA, 19 nt, Homo sapiens
  misc_RNA (1)...(19): siRNA sense strand
gagauggugcugucagaug

SEQ ID NO: 1752112 - RNA, 19 nt, Homo sapiens
  misc_RNA (1)...(19): siRNA sense strand
caaggaaggaggacaugga

SEQ ID NO: 1752113 - RNA, 19 nt, Homo sapiens
  misc_RNA (1)...(19): siRNA sense strand
gcaccagcccugaagaaag

SEQ ID NO: 1752114 - RNA, 19 nt, Homo sapiens
  misc_RNA (1)...(19): siRNA sense strand
ccacggcucugggcuucaa

SEQ ID NO: 1752115 - RNA, 19 nt, Homo sapiens
  misc_RNA (1)...(19): siRNA sense strand
ccucaucuccuccaauguu

SEQ ID NO: 1752116 - RNA, 19 nt, Homo sapiens
  misc_RNA (1)...(19): siRNA sense strand
gcguggcgcugucuacuac

SEQ ID NO: 1752117 - RNA, 19 nt, Homo sapiens
  misc_RNA (1)...(19): siRNA sense strand
ggaguucacccuggaguuc

SEQ ID NO: 1752118 - RNA, 19 nt, Homo sapiens
  misc_RNA (1)...(19): siRNA sense strand
agacggaccugaccuucgu

SEQ ID NO: 1752119 - RNA, 19 nt, Homo sapiens
  misc_RNA (1)...(19): siRNA sense strand
ccgagaagcccucaucagu

SEQ ID NO: 1752120 - RNA, 19 nt, Homo sapiens
  misc_RNA (1)...(19): siRNA sense strand
gcgcaagcuggacgaguuu

SEQ ID NO: 1752121 - RNA, 19 nt, Homo sapiens
  misc_RNA (1)...(19): siRNA sense strand
caccagcccugaagaaagc

SEQ ID NO: 1752122 - RNA, 19 nt, Homo sapiens
  misc_RNA (1)...(19): siRNA sense strand
ggccagggcagcaagaugu

SEQ ID NO: 1752123 - RNA, 19 nt, Homo sapiens
  misc_RNA (1)...(19): siRNA sense strand
ggaguaugagccugagaug

SEQ ID NO: 1752124 - RNA, 19 nt, Homo sapiens
  misc_RNA (1)...(19): siRNA sense strand
gcucaccaccaaucagaug

SEQ ID NO: 1752125 - RNA, 19 nt, Homo sapiens
  misc_RNA (1)...(19): siRNA sense strand
ugaaccaggacaagaagaa

SEQ ID NO: 1752126 - RNA, 19 nt, Homo sapiens
  misc_RNA (1)...(19): siRNA sense strand
gggcugcaccucagucauc

SEQ ID NO: 1752127 - RNA, 19 nt, Homo sapiens
  misc_RNA (1)...(19): siRNA sense strand
ggugguggugcuccagaua

SEQ ID NO: 1752128 - RNA, 19 nt, Homo sapiens
  misc_RNA (1)...(19): siRNA sense strand
caucgacugugagguguuc

SEQ ID NO: 1752129 - RNA, 19 nt, Homo sapiens
  misc_RNA (1)...(19): siRNA sense strand
gcaucuuccucacggcaau

SEQ ID NO: 1752130 - RNA, 19 nt, Homo sapiens
  misc_RNA (1)...(19): siRNA sense strand
uggcugcccuugucuccuu

SEQ ID NO: 1752131 - RNA, 19 nt, Homo sapiens
  misc_RNA (1)...(19): siRNA sense strand
caucucggguaccacguau

SEQ ID NO: 1752132 - RNA, 19 nt, Homo sapiens
  misc_RNA (1)...(19): siRNA sense strand
gcacgcucaccaccaauca

SEQ ID NO: 1752133 - RNA, 19 nt, Homo sapiens
  misc_RNA (1)...(19): siRNA sense strand
gcugucuacuacuucaaga

SEQ ID NO: 1752134 - RNA, 19 nt, Homo sapiens
  misc_RNA (1)...(19): siRNA sense strand
caauaucacaucgggcaaa

SEQ ID NO: 1752135 - RNA, 19 nt, Homo sapiens
  misc_RNA (1)...(19): siRNA sense strand
gcaguccuuuaacgagauc

SEQ ID NO: 1752136 - RNA, 19 nt, Homo sapiens
  misc_RNA (1)...(19): siRNA sense strand
gcgcauggcacgcaagaac

SEQ ID NO: 1752137 - RNA, 19 nt, Homo sapiens
  misc_RNA (1)...(19): siRNA sense strand
ucuaccagcugaggaacuu

SEQ ID NO: 1752138 - RNA, 19 nt, Homo sapiens
  misc_RNA (1)...(19): siRNA sense strand
ggagaaccugcaguccuuu

SEQ ID NO: 1752139 - RNA, 19 nt, Homo sapiens
  misc_RNA (1)...(19): siRNA sense strand
ggaccucacaucaacuucu

SEQ ID NO: 1752140 - RNA, 19 nt, Homo sapiens
  misc_RNA (1)...(19): siRNA sense strand
gaaccugcaguccuuuaac

SEQ ID NO: 1752141 - RNA, 19 nt, Homo sapiens
  misc_RNA (1)...(19): siRNA sense strand
caucaacaucggccacuuc

SEQ ID NO: 1752142 - RNA, 19 nt, Homo sapiens
  misc_RNA (1)...(19): siRNA sense strand
agauaucucugccugucau

SEQ ID NO: 1752143 - RNA, 19 nt, Homo sapiens
  misc_RNA (1)...(19): siRNA sense strand
ccaccaccauggccuuguc

SEQ ID NO: 1752144 - RNA, 19 nt, Homo sapiens
  misc_RNA (1)...(19): siRNA sense strand
cgaggucgucugcaucuuc

SEQ ID NO: 1752145 - RNA, 19 nt, Homo sapiens
  misc_RNA (1)...(19): siRNA sense strand
ggaacgcaacgccgagagu

SEQ ID NO: 1752146 - RNA, 19 nt, Homo sapiens
  misc_RNA (1)...(19): siRNA sense strand
gggagcuggugcuggaaca

SEQ ID NO: 1752147 - RNA, 19 nt, Homo sapiens
  misc_RNA (1)...(19): siRNA sense strand
ggcagcaagauguuuguga

SEQ ID NO: 1752148 - RNA, 19 nt, Homo sapiens
  misc_RNA (1)...(19): siRNA sense strand
gaaauccauguccguguac

SEQ ID NO: 1752149 - RNA, 19 nt, Homo sapiens
  misc_RNA (1)...(19): siRNA sense strand
ggccaaggguguguaugag

SEQ ID NO: 1752150 - RNA, 19 nt, Homo sapiens
  misc_RNA (1)...(19): siRNA sense strand
cggcugucaucacuacaug

SEQ ID NO: 1752151 - RNA, 19 nt, Homo sapiens
  misc_RNA (1)...(19): siRNA sense strand
gccaaggguguguaugaga

SEQ ID NO: 1752152 - RNA, 19 nt, Homo sapiens
  misc_RNA (1)...(19): siRNA sense strand
gcuggcucuucuuccgaua

SEQ ID NO: 1752153 - RNA, 19 nt, Homo sapiens
  misc_RNA (1)...(19): siRNA sense strand
gagcugugaaccaggacaa

SEQ ID NO: 1752154 - RNA, 19 nt, Homo sapiens
  misc_RNA (1)...(19): siRNA sense strand
cagcaaguuugugcaguac

SEQ ID NO: 1752155 - RNA, 19 nt, Homo sapiens
  misc_RNA (1)...(19): siRNA sense strand
agcgcaagcuggacgaguu

SEQ ID NO: 1752156 - RNA, 19 nt, Homo sapiens
  misc_RNA (1)...(19): siRNA sense strand
caagauccggagccagaug

SEQ ID NO: 1752157 - RNA, 19 nt, Homo sapiens
  misc_RNA (1)...(19): siRNA sense strand
gcugugaaccaggacaaga

SEQ ID NO: 1752158 - RNA, 19 nt, Homo sapiens
  misc_RNA (1)...(19): siRNA sense strand
guggcgcugucuacuacuu

SEQ ID NO: 1752159 - RNA, 19 nt, Homo sapiens
  misc_RNA (1)...(19): siRNA sense strand
ccaucgaggcccugaagga

SEQ ID NO: 1752160 - RNA, 19 nt, Homo sapiens
  misc_RNA (1)...(19): siRNA sense strand
cgagcuggcgccuguaaca

SEQ ID NO: 1752161 - RNA, 19 nt, Homo sapiens
  misc_RNA (1)...(19): siRNA sense strand
cggagacagcucugacuug

SEQ ID NO: 1752162 - RNA, 19 nt, Homo sapiens
  misc_RNA (1)...(19): siRNA sense strand
ggaaauccauguccgugua

SEQ ID NO: 1752163 - RNA, 19 nt, Homo sapiens
  misc_RNA (1)...(19): siRNA sense strand
ccaacgagcucccgaguga

SEQ ID NO: 1752164 - RNA, 19 nt, Homo sapiens
  misc_RNA (1)...(19): siRNA sense strand
gcagcaaguuugugcagua

SEQ ID NO: 1752165 - RNA, 19 nt, Homo sapiens
  misc_RNA (1)...(19): siRNA sense strand
gcagcaagauguuugugaa

SEQ ID NO: 1752166 - RNA, 19 nt, Homo sapiens
  misc_RNA (1)...(19): siRNA sense strand
gaugcgggcuccugccuuu

SEQ ID NO: 1752167 - RNA, 19 nt, Homo sapiens
  misc_RNA (1)...(19): siRNA sense strand
gagcagauccuggcaaaga

SEQ ID NO: 1752168 - RNA, 19 nt, Homo sapiens
  misc_RNA (1)...(19): siRNA sense strand
ugacuugccugguggagaa

SEQ ID NO: 1752169 - RNA, 19 nt, Homo sapiens
  misc_RNA (1)...(19): siRNA sense strand
ccaaggguguguaugagaa

SEQ ID NO: 1752170 - RNA, 19 nt, Homo sapiens
  misc_RNA (1)...(19): siRNA sense strand
gaccucacaucaacuucua

SEQ ID NO: 1752171 - RNA, 19 nt, Homo sapiens
  misc_RNA (1)...(19): siRNA sense strand
gggagcagauccuggcaaa

SEQ ID NO: 1752172 - RNA, 19 nt, Homo sapiens
  misc_RNA (1)...(19): siRNA sense strand
gcaaguuugugcaguacga

SEQ ID NO: 1752173 - RNA, 19 nt, Homo sapiens
  misc_RNA (1)...(19): siRNA sense strand
gcaagggcgugcagaggau

SEQ ID NO: 1752174 - RNA, 19 nt, Homo sapiens
  misc_RNA (1)...(19): siRNA sense strand
ggacgacugcagcaaguuu

SEQ ID NO: 1752175 - RNA, 19 nt, Homo sapiens
  misc_RNA (1)...(19): siRNA sense strand
guaacacggucaucaagca

SEQ ID NO: 1752176 - RNA, 19 nt, Homo sapiens
  misc_RNA (1)...(19): siRNA sense strand
gggugaaccuggugacaga

SEQ ID NO: 1752177 - RNA, 19 nt, Homo sapiens
  misc_RNA (1)...(19): siRNA sense strand
uuaacgagaucacugcuau

SEQ ID NO: 1752178 - RNA, 19 nt, Homo sapiens
  misc_RNA (1)...(19): siRNA sense strand
acacggagcugggcaagau

SEQ ID NO: 1752179 - RNA, 19 nt, Homo sapiens
  misc_RNA (1)...(19): siRNA sense strand
cgagaucacugcuaugacu

SEQ ID NO: 1752180 - RNA, 19 nt, Homo sapiens
  misc_RNA (1)...(19): siRNA sense strand
ucgaggcccugaaggagua

SEQ ID NO: 1752181 - RNA, 19 nt, Homo sapiens
  misc_RNA (1)...(19): siRNA sense strand
acagcaacaugaagcaauu

SEQ ID NO: 1752182 - RNA, 19 nt, Homo sapiens
  misc_RNA (1)...(19): siRNA sense strand
gagaaccugcaguccuuua

SEQ ID NO: 1752183 - RNA, 19 nt, Homo sapiens
  misc_RNA (1)...(19): siRNA sense strand
ccgcaggcuuggcaucuuu

SEQ ID NO: 1752184 - RNA, 19 nt, Homo sapiens
  misc_RNA (1)...(19): siRNA sense strand
ccuggugguuuguguauga

SEQ ID NO: 1752185 - RNA, 19 nt, Homo sapiens
  misc_RNA (1)...(19): siRNA sense strand
gaagugcuccgaagacaac

SEQ ID NO: 1752186 - RNA, 19 nt, Homo sapiens
  misc_RNA (1)...(19): siRNA sense strand
uggagaaccugcaguccuu

SEQ ID NO: 1752187 - RNA, 19 nt, Homo sapiens
  misc_RNA (1)...(19): siRNA sense strand
cagagauggugcugucaga

SEQ ID NO: 1752188 - RNA, 19 nt, Homo sapiens
  misc_RNA (1)...(19): siRNA sense strand
agauggugcugucagauga

SEQ ID NO: 1752189 - RNA, 19 nt, Homo sapiens
  misc_RNA (1)...(19): siRNA sense strand
uaccucaucuccuccaaug

SEQ ID NO: 1752190 - RNA, 19 nt, Homo sapiens
  misc_RNA (1)...(19): siRNA sense strand
gagauggugcugucagaug

SEQ ID NO: 1752191 - RNA, 19 nt, Homo sapiens
  misc_RNA (1)...(19): siRNA sense strand
caaggaaggaggacaugga

SEQ ID NO: 1752192 - RNA, 19 nt, Homo sapiens
  misc_RNA (1)...(19): siRNA sense strand
gcaccagcccugaagaaag

SEQ ID NO: 1752193 - RNA, 19 nt, Homo sapiens
  misc_RNA (1)...(19): siRNA sense strand
ccacggcucugggcuucaa

SEQ ID NO: 1752194 - RNA, 19 nt, Homo sapiens
  misc_RNA (1)...(19): siRNA sense strand
ccucaucuccuccaauguu

SEQ ID NO: 1752195 - RNA, 19 nt, Homo sapiens
  misc_RNA (1)...(19): siRNA sense strand
gcguggcgcugucuacuac

SEQ ID NO: 1752196 - RNA, 19 nt, Homo sapiens
  misc_RNA (1)...(19): siRNA sense strand
ggaguucacccuggaguuc

SEQ ID NO: 1752197 - RNA, 19 nt, Homo sapiens
  misc_RNA (1)...(19): siRNA sense strand
agacggaccugaccuucgu

SEQ ID NO: 1752198 - RNA, 19 nt, Homo sapiens
  misc_RNA (1)...(19): siRNA sense strand
ccgagaagcccucaucagu

SEQ ID NO: 1752199 - RNA, 19 nt, Homo sapiens
  misc_RNA (1)...(19): siRNA sense strand
gcgcaagcuggacgaguuu

SEQ ID NO: 1752200 - RNA, 19 nt, Homo sapiens
  misc_RNA (1)...(19): siRNA sense strand
caccagcccugaagaaagc

SEQ ID NO: 1752201 - RNA, 19 nt, Homo sapiens
  misc_RNA (1)...(19): siRNA sense strand
ggccagggcagcaagaugu

SEQ ID NO: 1752202 - RNA, 19 nt, Homo sapiens
  misc_RNA (1)...(19): siRNA sense strand
ggaguaugagccugagaug

SEQ ID NO: 1752203 - RNA, 19 nt, Homo sapiens
  misc_RNA (1)...(19): siRNA sense strand
gcucaccaccaaucagaug

SEQ ID NO: 1752204 - RNA, 19 nt, Homo sapiens
  misc_RNA (1)...(19): siRNA sense strand
ugaaccaggacaagaagaa

SEQ ID NO: 1752205 - RNA, 19 nt, Homo sapiens
  misc_RNA (1)...(19): siRNA sense strand
gggcugcaccucagucauc

SEQ ID NO: 1752206 - RNA, 19 nt, Homo sapiens
  misc_RNA (1)...(19): siRNA sense strand
ggugguggugcuccagaua

SEQ ID NO: 1752207 - RNA, 19 nt, Homo sapiens
  misc_RNA (1)...(19): siRNA sense strand
caucgacugugagguguuc

SEQ ID NO: 1752208 - RNA, 19 nt, Homo sapiens
  misc_RNA (1)...(19): siRNA sense strand
gcaucuuccucacggcaau

SEQ ID NO: 1752209 - RNA, 19 nt, Homo sapiens
  misc_RNA (1)...(19): siRNA sense strand
uggcugcccuugucuccuu

SEQ ID NO: 1752210 - RNA, 19 nt, Homo sapiens
  misc_RNA (1)...(19): siRNA sense strand
caucucggguaccacguau

SEQ ID NO: 1752211 - RNA, 19 nt, Homo sapiens
  misc_RNA (1)...(19): siRNA sense strand
gcacgcucaccaccaauca

SEQ ID NO: 1752212 - RNA, 19 nt, Homo sapiens
  misc_RNA (1)...(19): siRNA sense strand
gcugucuacuacuucaaga

SEQ ID NO: 1752213 - RNA, 19 nt, Homo sapiens
  misc_RNA (1)...(19): siRNA sense strand
caauaucacaucgggcaaa

SEQ ID NO: 1752214 - RNA, 19 nt, Homo sapiens
  misc_RNA (1)...(19): siRNA sense strand
gcaguccuuuaacgagauc

SEQ ID NO: 1752215 - RNA, 19 nt, Homo sapiens
  misc_RNA (1)...(19): siRNA sense strand
gcgcauggcacgcaagaac

SEQ ID NO: 1752216 - RNA, 19 nt, Homo sapiens
  misc_RNA (1)...(19): siRNA sense strand
ucuaccagcugaggaacuu

SEQ ID NO: 1752217 - RNA, 19 nt, Homo sapiens
  misc_RNA (1)...(19): siRNA sense strand
ggagaaccugcaguccuuu

SEQ ID NO: 1752218 - RNA, 19 nt, Homo sapiens
  misc_RNA (1)...(19): siRNA sense strand
ggaccucacaucaacuucu

SEQ ID NO: 1752219 - RNA, 19 nt, Homo sapiens
  misc_RNA (1)...(19): siRNA sense strand
gaaccugcaguccuuuaac

SEQ ID NO: 1752220 - RNA, 19 nt, Homo sapiens
  misc_RNA (1)...(19): siRNA sense strand
caucaacaucggccacuuc

SEQ ID NO: 1752221 - RNA, 19 nt, Homo sapiens
  misc_RNA (1)...(19): siRNA sense strand
agauaucucugccugucau

SEQ ID NO: 1752222 - RNA, 19 nt, Homo sapiens
  misc_RNA (1)...(19): siRNA sense strand
ccaccaccauggccuuguc

SEQ ID NO: 1752223 - RNA, 19 nt, Homo sapiens
  misc_RNA (1)...(19): siRNA sense strand
cgaggucgucugcaucuuc

SEQ ID NO: 1752224 - RNA, 19 nt, Homo sapiens
  misc_RNA (1)...(19): siRNA sense strand
ggaacgcaacgccgagagu

SEQ ID NO: 1752225 - RNA, 19 nt, Homo sapiens
  misc_RNA (1)...(19): siRNA sense strand
gggagcuggugcuggaaca

SEQ ID NO: 1752226 - RNA, 19 nt, Homo sapiens
  misc_RNA (1)...(19): siRNA sense strand
ggcagcaagauguuuguga

SEQ ID NO: 1752227 - RNA, 19 nt, Homo sapiens
  misc_RNA (1)...(19): siRNA sense strand
gaaauccauguccguguac

SEQ ID NO: 1752228 - RNA, 19 nt, Homo sapiens
  misc_RNA (1)...(19): siRNA sense strand
ggccaaggguguguaugag

SEQ ID NO: 1752229 - RNA, 19 nt, Homo sapiens
  misc_RNA (1)...(19): siRNA sense strand
cggcugucaucacuacaug

SEQ ID NO: 1752230 - RNA, 19 nt, Homo sapiens
  misc_RNA (1)...(19): siRNA sense strand
gccaaggguguguaugaga

SEQ ID NO: 1752231 - RNA, 19 nt, Homo sapiens
  misc_RNA (1)...(19): siRNA sense strand
gcuggcucuucuuccgaua

SEQ ID NO: 1752232 - RNA, 19 nt, Homo sapiens
  misc_RNA (1)...(19): siRNA sense strand
gagcugugaaccaggacaa

SEQ ID NO: 1752233 - RNA, 19 nt, Homo sapiens
  misc_RNA (1)...(19): siRNA sense strand
cagcaaguuugugcaguac

SEQ ID NO: 1752234 - RNA, 19 nt, Homo sapiens
  misc_RNA (1)...(19): siRNA sense strand
agcgcaagcuggacgaguu

SEQ ID NO: 1752235 - RNA, 19 nt, Homo sapiens
  misc_RNA (1)...(19): siRNA sense strand
caagauccggagccagaug

SEQ ID NO: 1752236 - RNA, 19 nt, Homo sapiens
  misc_RNA (1)...(19): siRNA sense strand
gcugugaaccaggacaaga

SEQ ID NO: 1752237 - RNA, 19 nt, Homo sapiens
  misc_RNA (1)...(19): siRNA sense strand
guggcgcugucuacuacuu

SEQ ID NO: 1752238 - RNA, 19 nt, Homo sapiens
  misc_RNA (1)...(19): siRNA sense strand
ccaucgaggcccugaagga

SEQ ID NO: 1752239 - RNA, 19 nt, Homo sapiens
  misc_RNA (1)...(19): siRNA sense strand
cgagcuggcgccuguaaca

SEQ ID NO: 1752240 - RNA, 19 nt, Homo sapiens
  misc_RNA (1)...(19): siRNA sense strand
cggagacagcucugacuug

SEQ ID NO: 1752241 - RNA, 19 nt, Homo sapiens
  misc_RNA (1)...(19): siRNA sense strand
ggaaauccauguccgugua

SEQ ID NO: 1752242 - RNA, 19 nt, Homo sapiens
  misc_RNA (1)...(19): siRNA sense strand
ccaacgagcucccgaguga

SEQ ID NO: 1752243 - RNA, 19 nt, Homo sapiens
  misc_RNA (1)...(19): siRNA sense strand
gcagcaaguuugugcagua

SEQ ID NO: 1752244 - RNA, 19 nt, Homo sapiens
  misc_RNA (1)...(19): siRNA sense strand
gcagcaagauguuugugaa

SEQ ID NO: 1752245 - RNA, 19 nt, Homo sapiens
  misc_RNA (1)...(19): siRNA sense strand
gaugcgggcuccugccuuu

SEQ ID NO: 1752246 - RNA, 19 nt, Homo sapiens
  misc_RNA (1)...(19): siRNA sense strand
gagcagauccuggcaaaga

SEQ ID NO: 1752247 - RNA, 19 nt, Homo sapiens
  misc_RNA (1)...(19): siRNA sense strand
ugacuugccugguggagaa

SEQ ID NO: 1752248 - RNA, 19 nt, Homo sapiens
  misc_RNA (1)...(19): siRNA sense strand
ccaaggguguguaugagaa

SEQ ID NO: 1752249 - RNA, 19 nt, Homo sapiens
  misc_RNA (1)...(19): siRNA sense strand
gaccucacaucaacuucua

SEQ ID NO: 1752250 - RNA, 19 nt, Homo sapiens
  misc_RNA (1)...(19): siRNA sense strand
gggagcagauccuggcaaa

SEQ ID NO: 1752251 - RNA, 19 nt, Homo sapiens
  misc_RNA (1)...(19): siRNA sense strand
gcaaguuugugcaguacga

SEQ ID NO: 1752252 - RNA, 19 nt, Homo sapiens
  misc_RNA (1)...(19): siRNA sense strand
gcaagggcgugcagaggau

SEQ ID NO: 1752253 - RNA, 19 nt, Homo sapiens
  misc_RNA (1)...(19): siRNA sense strand
ggacgacugcagcaaguuu

SEQ ID NO: 1752254 - RNA, 19 nt, Homo sapiens
  misc_RNA (1)...(19): siRNA sense strand
guaacacggucaucaagca

SEQ ID NO: 1752255 - RNA, 19 nt, Homo sapiens
  misc_RNA (1)...(19): siRNA sense strand
gggugaaccuggugacaga

SEQ ID NO: 1752256 - RNA, 19 nt, Homo sapiens
  misc_RNA (1)...(19): siRNA sense strand
uuaacgagaucacugcuau

SEQ ID NO: 1752257 - RNA, 19 nt, Homo sapiens
  misc_RNA (1)...(19): siRNA sense strand
acacggagcugggcaagau

SEQ ID NO: 1752258 - RNA, 19 nt, Homo sapiens
  misc_RNA (1)...(19): siRNA sense strand
cgagaucacugcuaugacu

SEQ ID NO: 1752259 - RNA, 19 nt, Homo sapiens
  misc_RNA (1)...(19): siRNA sense strand
ucgaggcccugaaggagua

SEQ ID NO: 1752260 - RNA, 19 nt, Homo sapiens
  misc_RNA (1)...(19): siRNA sense strand
acagcaacaugaagcaauu

SEQ ID NO: 1752261 - RNA, 19 nt, Homo sapiens
  misc_RNA (1)...(19): siRNA sense strand
gagaaccugcaguccuuua

SEQ ID NO: 1752262 - RNA, 19 nt, Homo sapiens
  misc_RNA (1)...(19): siRNA sense strand
ccgcaggcuuggcaucuuu

SEQ ID NO: 1752263 - RNA, 19 nt, Homo sapiens
  misc_RNA (1)...(19): siRNA sense strand
ccuggugguuuguguauga

SEQ ID NO: 1752264 - RNA, 19 nt, Homo sapiens
  misc_RNA (1)...(19): siRNA sense strand
gaagugcuccgaagacaac

SEQ ID NO: 1752265 - RNA, 19 nt, Homo sapiens
  misc_RNA (1)...(19): siRNA sense strand
uggagaaccugcaguccuu

SEQ ID NO: 1752266 - RNA, 19 nt, Homo sapiens
  misc_RNA (1)...(19): siRNA sense strand
cagagauggugcugucaga

SEQ ID NO: 1752267 - RNA, 19 nt, Homo sapiens
  misc_RNA (1)...(19): siRNA sense strand
agauggugcugucagauga

SEQ ID NO: 1752268 - RNA, 19 nt, Homo sapiens
  misc_RNA (1)...(19): siRNA sense strand
uaccucaucuccuccaaug

SEQ ID NO: 1752269 - RNA, 19 nt, Homo sapiens
  misc_RNA (1)...(19): siRNA sense strand
gagauggugcugucagaug

SEQ ID NO: 1752270 - RNA, 19 nt, Homo sapiens
  misc_RNA (1)...(19): siRNA sense strand
caaggaaggaggacaugga

SEQ ID NO: 1752271 - RNA, 19 nt, Homo sapiens
  misc_RNA (1)...(19): siRNA sense strand
gcaccagcccugaagaaag

SEQ ID NO: 1752272 - RNA, 19 nt, Homo sapiens
  misc_RNA (1)...(19): siRNA sense strand
ccacggcucugggcuucaa

SEQ ID NO: 1752273 - RNA, 19 nt, Homo sapiens
  misc_RNA (1)...(19): siRNA sense strand
ccucaucuccuccaauguu

SEQ ID NO: 1752274 - RNA, 19 nt, Homo sapiens
  misc_RNA (1)...(19): siRNA sense strand
gcguggcgcugucuacuac

SEQ ID NO: 1752275 - RNA, 19 nt, Homo sapiens
  misc_RNA (1)...(19): siRNA sense strand
ggaguucacccuggaguuc

SEQ ID NO: 1752276 - RNA, 19 nt, Homo sapiens
  misc_RNA (1)...(19): siRNA sense strand
agacggaccugaccuucgu

SEQ ID NO: 1752277 - RNA, 19 nt, Homo sapiens
  misc_RNA (1)...(19): siRNA sense strand
ccgagaagcccucaucagu

SEQ ID NO: 1752278 - RNA, 19 nt, Homo sapiens
  misc_RNA (1)...(19): siRNA sense strand
gcgcaagcuggacgaguuu

SEQ ID NO: 1752279 - RNA, 19 nt, Homo sapiens
  misc_RNA (1)...(19): siRNA sense strand
caccagcccugaagaaagc

SEQ ID NO: 1752280 - RNA, 19 nt, Homo sapiens
  misc_RNA (1)...(19): siRNA sense strand
ggccagggcagcaagaugu

SEQ ID NO: 1752281 - RNA, 19 nt, Homo sapiens
  misc_RNA (1)...(19): siRNA sense strand
ggaguaugagccugagaug

SEQ ID NO: 1752282 - RNA, 19 nt, Homo sapiens
  misc_RNA (1)...(19): siRNA sense strand
gcucaccaccaaucagaug

SEQ ID NO: 1752283 - RNA, 19 nt, Homo sapiens
  misc_RNA (1)...(19): siRNA sense strand
ugaaccaggacaagaagaa

SEQ ID NO: 1752284 - RNA, 19 nt, Homo sapiens
  misc_RNA (1)...(19): siRNA sense strand
gggcugcaccucagucauc

SEQ ID NO: 1752285 - RNA, 19 nt, Homo sapiens
  misc_RNA (1)...(19): siRNA sense strand
ggugguggugcuccagaua

SEQ ID NO: 1752286 - RNA, 19 nt, Homo sapiens
  misc_RNA (1)...(19): siRNA sense strand
caucgacugugagguguuc

SEQ ID NO: 1752287 - RNA, 19 nt, Homo sapiens
  misc_RNA (1)...(19): siRNA sense strand
gcaucuuccucacggcaau

SEQ ID NO: 1752288 - RNA, 19 nt, Homo sapiens
  misc_RNA (1)...(19): siRNA sense strand
uggcugcccuugucuccuu

SEQ ID NO: 1752289 - RNA, 19 nt, Homo sapiens
  misc_RNA (1)...(19): siRNA sense strand
caucucggguaccacguau

SEQ ID NO: 1752290 - RNA, 19 nt, Homo sapiens
  misc_RNA (1)...(19): siRNA sense strand
gcacgcucaccaccaauca

SEQ ID NO: 1752291 - RNA, 19 nt, Homo sapiens
  misc_RNA (1)...(19): siRNA sense strand
gcugucuacuacuucaaga

SEQ ID NO: 1752292 - RNA, 19 nt, Homo sapiens
  misc_RNA (1)...(19): siRNA sense strand
caauaucacaucgggcaaa

SEQ ID NO: 1752293 - RNA, 19 nt, Homo sapiens
  misc_RNA (1)...(19): siRNA sense strand
gcaguccuuuaacgagauc

SEQ ID NO: 1752294 - RNA, 19 nt, Homo sapiens
  misc_RNA (1)...(19): siRNA sense strand
gcgcauggcacgcaagaac

SEQ ID NO: 1752295 - RNA, 19 nt, Homo sapiens
  misc_RNA (1)...(19): siRNA sense strand
ucuaccagcugaggaacuu

SEQ ID NO: 1752296 - RNA, 19 nt, Homo sapiens
  misc_RNA (1)...(19): siRNA sense strand
ggagaaccugcaguccuuu

SEQ ID NO: 1752297 - RNA, 19 nt, Homo sapiens
  misc_RNA (1)...(19): siRNA sense strand
ggaccucacaucaacuucu

SEQ ID NO: 1752298 - RNA, 19 nt, Homo sapiens
  misc_RNA (1)...(19): siRNA sense strand
gaaccugcaguccuuuaac

SEQ ID NO: 1752299 - RNA, 19 nt, Homo sapiens
  misc_RNA (1)...(19): siRNA sense strand
caucaacaucggccacuuc

SEQ ID NO: 1752300 - RNA, 19 nt, Homo sapiens
  misc_RNA (1)...(19): siRNA sense strand
agauaucucugccugucau

SEQ ID NO: 1752301 - RNA, 19 nt, Homo sapiens
  misc_RNA (1)...(19): siRNA sense strand
ccaccaccauggccuuguc

SEQ ID NO: 1752302 - RNA, 19 nt, Homo sapiens
  misc_RNA (1)...(19): siRNA sense strand
cgaggucgucugcaucuuc

SEQ ID NO: 1752303 - RNA, 19 nt, Homo sapiens
  misc_RNA (1)...(19): siRNA sense strand
ggaacgcaacgccgagagu

SEQ ID NO: 1752304 - RNA, 19 nt, Homo sapiens
  misc_RNA (1)...(19): siRNA sense strand
gggagcuggugcuggaaca

SEQ ID NO: 1752305 - RNA, 19 nt, Homo sapiens
  misc_RNA (1)...(19): siRNA sense strand
ggcagcaagauguuuguga

SEQ ID NO: 1752306 - RNA, 19 nt, Homo sapiens
  misc_RNA (1)...(19): siRNA sense strand
gaaauccauguccguguac

SEQ ID NO: 1752307 - RNA, 19 nt, Homo sapiens
  misc_RNA (1)...(19): siRNA sense strand
ggccaaggguguguaugag

SEQ ID NO: 1752308 - RNA, 19 nt, Homo sapiens
  misc_RNA (1)...(19): siRNA sense strand
cggcugucaucacuacaug

SEQ ID NO: 1752309 - RNA, 19 nt, Homo sapiens
  misc_RNA (1)...(19): siRNA sense strand
gccaaggguguguaugaga

SEQ ID NO: 1752310 - RNA, 19 nt, Homo sapiens
  misc_RNA (1)...(19): siRNA sense strand
gcuggcucuucuuccgaua

SEQ ID NO: 1752311 - RNA, 19 nt, Homo sapiens
  misc_RNA (1)...(19): siRNA sense strand
gagcugugaaccaggacaa

SEQ ID NO: 1752312 - RNA, 19 nt, Homo sapiens
  misc_RNA (1)...(19): siRNA sense strand
cagcaaguuugugcaguac

SEQ ID NO: 1752313 - RNA, 19 nt, Homo sapiens
  misc_RNA (1)...(19): siRNA sense strand
agcgcaagcuggacgaguu

SEQ ID NO: 1752314 - RNA, 19 nt, Homo sapiens
  misc_RNA (1)...(19): siRNA sense strand
caagauccggagccagaug

SEQ ID NO: 1752315 - RNA, 19 nt, Homo sapiens
  misc_RNA (1)...(19): siRNA sense strand
gcugugaaccaggacaaga

SEQ ID NO: 1752316 - RNA, 19 nt, Homo sapiens
  misc_RNA (1)...(19): siRNA sense strand
guggcgcugucuacuacuu

SEQ ID NO: 1752317 - RNA, 19 nt, Homo sapiens
  misc_RNA (1)...(19): siRNA sense strand
ccaucgaggcccugaagga

SEQ ID NO: 1752318 - RNA, 19 nt, Homo sapiens
  misc_RNA (1)...(19): siRNA sense strand
cgagcuggcgccuguaaca

SEQ ID NO: 1752319 - RNA, 19 nt, Homo sapiens
  misc_RNA (1)...(19): siRNA sense strand
cggagacagcucugacuug

SEQ ID NO: 1752320 - RNA, 19 nt, Homo sapiens
  misc_RNA (1)...(19): siRNA sense strand
gaacgucucuaucaagaau

SEQ ID NO: 1752321 - RNA, 19 nt, Homo sapiens
  misc_RNA (1)...(19): siRNA sense strand
gaagauauauacucagcaa

SEQ ID NO: 1752322 - RNA, 19 nt, Homo sapiens
  misc_RNA (1)...(19): siRNA sense strand
gaauugaccucuaugaaag

SEQ ID NO: 1752323 - RNA, 19 nt, Homo sapiens
  misc_RNA (1)...(19): siRNA sense strand
gaagaaaguacuagaagaa

SEQ ID NO: 1752324 - RNA, 19 nt, Homo sapiens
  misc_RNA (1)...(19): siRNA sense strand
ggacauaucagguacauca

SEQ ID NO: 1752325 - RNA, 19 nt, Homo sapiens
  misc_RNA (1)...(19): siRNA sense strand
gaagacaugcugcuuugua

SEQ ID NO: 1752326 - RNA, 19 nt, Homo sapiens
  misc_RNA (1)...(19): siRNA sense strand
agaccucacuauccuauua

SEQ ID NO: 1752327 - RNA, 19 nt, Homo sapiens
  misc_RNA (1)...(19): siRNA sense strand
gaccagagaucguguugga

SEQ ID NO: 1752328 - RNA, 19 nt, Homo sapiens
  misc_RNA (1)...(19): siRNA sense strand
aagcaaggauguagaauug

SEQ ID NO: 1752329 - RNA, 19 nt, Homo sapiens
  misc_RNA (1)...(19): siRNA sense strand
ugaaacagauggagaagau

SEQ ID NO: 1752330 - RNA, 19 nt, Homo sapiens
  misc_RNA (1)...(19): siRNA sense strand
uagcagggccuucaaagua

SEQ ID NO: 1752331 - RNA, 19 nt, Homo sapiens
  misc_RNA (1)...(19): siRNA sense strand
gagaucguguuggacauua

SEQ ID NO: 1752332 - RNA, 19 nt, Homo sapiens
  misc_RNA (1)...(19): siRNA sense strand
gcauggcaguggugaguuu

SEQ ID NO: 1752333 - RNA, 19 nt, Homo sapiens
  misc_RNA (1)...(19): siRNA sense strand
uaauacaccuguucgaaau

SEQ ID NO: 1752334 - RNA, 19 nt, Homo sapiens
  misc_RNA (1)...(19): siRNA sense strand
gugaagacaugcugcuuug

SEQ ID NO: 1752335 - RNA, 19 nt, Homo sapiens
  misc_RNA (1)...(19): siRNA sense strand
ugaagaaaguacuagaaga

SEQ ID NO: 1752336 - RNA, 19 nt, Homo sapiens
  misc_RNA (1)...(19): siRNA sense strand
guucuuggcuucccauuag

SEQ ID NO: 1752337 - RNA, 19 nt, Homo sapiens
  misc_RNA (1)...(19): siRNA sense strand
gaaaguacuagaagaauac

SEQ ID NO: 1752338 - RNA, 19 nt, Homo sapiens
  misc_RNA (1)...(19): siRNA sense strand
cgaaacaucacuauugcua

SEQ ID NO: 1752339 - RNA, 19 nt, Homo sapiens
  misc_RNA (1)...(19): siRNA sense strand
cuacgaaacaucacuauug

SEQ ID NO: 1752340 - RNA, 19 nt, Homo sapiens
  misc_RNA (1)...(19): siRNA sense strand
gaaacaucacuauugcuaa

SEQ ID NO: 1752341 - RNA, 19 nt, Homo sapiens
  misc_RNA (1)...(19): siRNA sense strand
gcagggccuucaaaguaaa

SEQ ID NO: 1752342 - RNA, 19 nt, Homo sapiens
  misc_RNA (1)...(19): siRNA sense strand
gaaagugucgcaucaaacu

SEQ ID NO: 1752343 - RNA, 19 nt, Homo sapiens
  misc_RNA (1)...(19): siRNA sense strand
gauaauacaccuguucgaa

SEQ ID NO: 1752344 - RNA, 19 nt, Homo sapiens
  misc_RNA (1)...(19): siRNA sense strand
ggagcgcaaucgucaguau

SEQ ID NO: 1752345 - RNA, 19 nt, Homo sapiens
  misc_RNA (1)...(19): siRNA sense strand
ucagaggaauauaaagcua

SEQ ID NO: 1752346 - RNA, 19 nt, Homo sapiens
  misc_RNA (1)...(19): siRNA sense strand
uaucgaaagugucgcauca

SEQ ID NO: 1752347 - RNA, 19 nt, Homo sapiens
  misc_RNA (1)...(19): siRNA sense strand
agaauugaccucuaugaaa

SEQ ID NO: 1752348 - RNA, 19 nt, Homo sapiens
  misc_RNA (1)...(19): siRNA sense strand
ggaauauaaagcuauggua

SEQ ID NO: 1752349 - RNA, 19 nt, Homo sapiens
  misc_RNA (1)...(19): siRNA sense strand
aagacaugcugcuuuguaa

SEQ ID NO: 1752350 - RNA, 19 nt, Homo sapiens
  misc_RNA (1)...(19): siRNA sense strand
gacaugcugcuuuguaauu

SEQ ID NO: 1752351 - RNA, 19 nt, Homo sapiens
  misc_RNA (1)...(19): siRNA sense strand
gcaaggauguagaauugac

SEQ ID NO: 1752352 - RNA, 19 nt, Homo sapiens
  misc_RNA (1)...(19): siRNA sense strand
caaacucucuggcuaugca

SEQ ID NO: 1752353 - RNA, 19 nt, Homo sapiens
  misc_RNA (1)...(19): siRNA sense strand
ucgaaagugucgcaucaaa

SEQ ID NO: 1752354 - RNA, 19 nt, Homo sapiens
  misc_RNA (1)...(19): siRNA sense strand
cuggaaagcuagauauugu

SEQ ID NO: 1752355 - RNA, 19 nt, Homo sapiens
  misc_RNA (1)...(19): siRNA sense strand
uggagaagauauauacuca

SEQ ID NO: 1752356 - RNA, 19 nt, Homo sapiens
  misc_RNA (1)...(19): siRNA sense strand
acaugcugcuuuguaauua

SEQ ID NO: 1752357 - RNA, 19 nt, Homo sapiens
  misc_RNA (1)...(19): siRNA sense strand
ucaggaacgucucuaucaa

SEQ ID NO: 1752358 - RNA, 19 nt, Homo sapiens
  misc_RNA (1)...(19): siRNA sense strand
gcaaauacaaagcaaggau

SEQ ID NO: 1752359 - RNA, 19 nt, Homo sapiens
  misc_RNA (1)...(19): siRNA sense strand
aaacaucacuauugcuaac

SEQ ID NO: 1752360 - RNA, 19 nt, Homo sapiens
  misc_RNA (1)...(19): siRNA sense strand
caaguuuccuuuggauaau

SEQ ID NO: 1752361 - RNA, 19 nt, Homo sapiens
  misc_RNA (1)...(19): siRNA sense strand
uuuagucgcucaccagcua

SEQ ID NO: 1752362 - RNA, 19 nt, Homo sapiens
  misc_RNA (1)...(19): siRNA sense strand
aaacagauggagaagauau

SEQ ID NO: 1752363 - RNA, 19 nt, Homo sapiens
  misc_RNA (1)...(19): siRNA sense strand
cuccaaggccucuaugaua

SEQ ID NO: 1752364 - RNA, 19 nt, Homo sapiens
  misc_RNA (1)...(19): siRNA sense strand
gaaacagauggagaagaua

SEQ ID NO: 1752365 - RNA, 19 nt, Homo sapiens
  misc_RNA (1)...(19): siRNA sense strand
cgauggagauggagauuuu

SEQ ID NO: 1752366 - RNA, 19 nt, Homo sapiens
  misc_RNA (1)...(19): siRNA sense strand
ggagaccucacuauccuau

SEQ ID NO: 1752367 - RNA, 19 nt, Homo sapiens
  misc_RNA (1)...(19): siRNA sense strand
uguccugccugcaacagua

SEQ ID NO: 1752368 - RNA, 19 nt, Homo sapiens
  misc_RNA (1)...(19): siRNA sense strand
agcagggccuucaaaguaa

SEQ ID NO: 1752369 - RNA, 19 nt, Homo sapiens
  misc_RNA (1)...(19): siRNA sense strand
aaagcaaggauguagaauu

SEQ ID NO: 1752370 - RNA, 19 nt, Homo sapiens
  misc_RNA (1)...(19): siRNA sense strand
guccaucagaggaauauaa

SEQ ID NO: 1752371 - RNA, 19 nt, Homo sapiens
  misc_RNA (1)...(19): siRNA sense strand
aggaacgucucuaucaaga

SEQ ID NO: 1752372 - RNA, 19 nt, Homo sapiens
  misc_RNA (1)...(19): siRNA sense strand
gcgcuggccuucuggacau

SEQ ID NO: 1752373 - RNA, 19 nt, Homo sapiens
  misc_RNA (1)...(19): siRNA sense strand
agaggaauauaaagcuaug

SEQ ID NO: 1752374 - RNA, 19 nt, Homo sapiens
  misc_RNA (1)...(19): siRNA sense strand
cuugaaccauccaugauug

SEQ ID NO: 1752375 - RNA, 19 nt, Homo sapiens
  misc_RNA (1)...(19): siRNA sense strand
aaaguucagugacaucucu

SEQ ID NO: 1752376 - RNA, 19 nt, Homo sapiens
  misc_RNA (1)...(19): siRNA sense strand
acaaagcaaggauguagaa

SEQ ID NO: 1752377 - RNA, 19 nt, Homo sapiens
  misc_RNA (1)...(19): siRNA sense strand
gauauuguccgcacagaac

SEQ ID NO: 1752378 - RNA, 19 nt, Homo sapiens
  misc_RNA (1)...(19): siRNA sense strand
caucaaacucucuggcuau

SEQ ID NO: 1752379 - RNA, 19 nt, Homo sapiens
  misc_RNA (1)...(19): siRNA sense strand
ucacuauccuauuaugucu

SEQ ID NO: 1752380 - RNA, 19 nt, Homo sapiens
  misc_RNA (1)...(19): siRNA sense strand
caugaagaaaguacuagaa

SEQ ID NO: 1752381 - RNA, 19 nt, Homo sapiens
  misc_RNA (1)...(19): siRNA sense strand
auaauacaccuguucgaaa

SEQ ID NO: 1752382 - RNA, 19 nt, Homo sapiens
  misc_RNA (1)...(19): siRNA sense strand
cagauggagaagauauaua

SEQ ID NO: 1752383 - RNA, 19 nt, Homo sapiens
  misc_RNA (1)...(19): siRNA sense strand
guacuagaagaauacaaga

SEQ ID NO: 1752384 - RNA, 19 nt, Homo sapiens
  misc_RNA (1)...(19): siRNA sense strand
ucacuauugcuaaccauga

SEQ ID NO: 1752385 - RNA, 19 nt, Homo sapiens
  misc_RNA (1)...(19): siRNA sense strand
caucuucugugaucagcau

SEQ ID NO: 1752386 - RNA, 19 nt, Homo sapiens
  misc_RNA (1)...(19): siRNA sense strand
ggaacgucucuaucaagaa

SEQ ID NO: 1752387 - RNA, 19 nt, Homo sapiens
  misc_RNA (1)...(19): siRNA sense strand
uuaccuccaugaagaaagu

SEQ ID NO: 1752388 - RNA, 19 nt, Homo sapiens
  misc_RNA (1)...(19): siRNA sense strand
caugcugcuuuguaauuau

SEQ ID NO: 1752389 - RNA, 19 nt, Homo sapiens
  misc_RNA (1)...(19): siRNA sense strand
cacuauugcuaaccaugaa

SEQ ID NO: 1752390 - RNA, 19 nt, Homo sapiens
  misc_RNA (1)...(19): siRNA sense strand
aacaguacccuuucuggaa

SEQ ID NO: 1752391 - RNA, 19 nt, Homo sapiens
  misc_RNA (1)...(19): siRNA sense strand
gagcagcagcaaguuucua

SEQ ID NO: 1752392 - RNA, 19 nt, Homo sapiens
  misc_RNA (1)...(19): siRNA sense strand
gcuacgaaacaucacuauu

SEQ ID NO: 1752393 - RNA, 19 nt, Homo sapiens
  misc_RNA (1)...(19): siRNA sense strand
gcuccaaggccucuaugau

SEQ ID NO: 1752394 - RNA, 19 nt, Homo sapiens
  misc_RNA (1)...(19): siRNA sense strand
ugccugcucucacaucuuc

SEQ ID NO: 1752395 - RNA, 19 nt, Homo sapiens
  misc_RNA (1)...(19): siRNA sense strand
gcgcaaucgucaguaucaa

SEQ ID NO: 1752396 - RNA, 19 nt, Homo sapiens
  misc_RNA (1)...(19): siRNA sense strand
gcaccugaacccagcaaca

SEQ ID NO: 1752397 - RNA, 19 nt, Homo sapiens
  misc_RNA (1)...(19): siRNA sense strand
uacgaaacaucacuauugc

SEQ ID NO: 1752398 - RNA, 19 nt, Homo sapiens
  misc_RNA (1)...(19): siRNA sense strand
gcaaucgucaguaucaaaa

SEQ ID NO: 1752399 - RNA, 19 nt, Homo sapiens
  misc_RNA (1)...(19): siRNA sense strand
gaacccagcaacagcuuuu

SEQ ID NO: 1752400 - RNA, 19 nt, Homo sapiens
  misc_RNA (1)...(19): siRNA sense strand
cagaggaauauaaagcuau

SEQ ID NO: 1752401 - RNA, 19 nt, Homo sapiens
  misc_RNA (1)...(19): siRNA sense strand
uuagagcagcagcaaguuu

SEQ ID NO: 1752402 - RNA, 19 nt, Homo sapiens
  misc_RNA (1)...(19): siRNA sense strand
caucagaggaauauaaagc

SEQ ID NO: 1752403 - RNA, 19 nt, Homo sapiens
  misc_RNA (1)...(19): siRNA sense strand
uagagcagcagcaaguuuc

SEQ ID NO: 1752404 - RNA, 19 nt, Homo sapiens
  misc_RNA (1)...(19): siRNA sense strand
ugaauuagagcagcagcaa

SEQ ID NO: 1752405 - RNA, 19 nt, Homo sapiens
  misc_RNA (1)...(19): siRNA sense strand
gcgauggagauggagauuu

SEQ ID NO: 1752406 - RNA, 19 nt, Homo sapiens
  misc_RNA (1)...(19): siRNA sense strand
ugugaagacaugcugcuuu

SEQ ID NO: 1752407 - RNA, 19 nt, Homo sapiens
  misc_RNA (1)...(19): siRNA sense strand
cuucuggacauaucaggua

SEQ ID NO: 1752408 - RNA, 19 nt, Homo sapiens
  misc_RNA (1)...(19): siRNA sense strand
ccuugaaccauccaugauu

SEQ ID NO: 1752409 - RNA, 19 nt, Homo sapiens
  misc_RNA (1)...(19): siRNA sense strand
gaccucacuauccuauuau

SEQ ID NO: 1752410 - RNA, 19 nt, Homo sapiens
  misc_RNA (1)...(19): siRNA sense strand
cucuccaagucgugaauua

SEQ ID NO: 1752411 - RNA, 19 nt, Homo sapiens
  misc_RNA (1)...(19): siRNA sense strand
ggauaauacaccuguucga

SEQ ID NO: 1752412 - RNA, 19 nt, Homo sapiens
  misc_RNA (1)...(19): siRNA sense strand
caucaggaacgucucuauc

SEQ ID NO: 1752413 - RNA, 19 nt, Homo sapiens
  misc_RNA (1)...(19): siRNA sense strand
gcacagucugguguucuug

SEQ ID NO: 1752414 - RNA, 19 nt, Homo sapiens
  misc_RNA (1)...(19): siRNA sense strand
agauggagaagauauauac

SEQ ID NO: 1752415 - RNA, 19 nt, Homo sapiens
  misc_RNA (1)...(19): siRNA sense strand
gcugagggccaucugaaac

SEQ ID NO: 1752416 - RNA, 19 nt, Homo sapiens
  misc_RNA (1)...(19): siRNA sense strand
ucagguacaucaggaacgu

SEQ ID NO: 1752417 - RNA, 19 nt, Homo sapiens
  misc_RNA (1)...(19): siRNA sense strand
agauggagauuuucaguuc

SEQ ID NO: 1752418 - RNA, 19 nt, Homo sapiens
  misc_RNA (1)...(19): siRNA sense strand
aaacuuauggagcgcaauc

SEQ ID NO: 1752419 - RNA, 19 nt, Homo sapiens
  misc_RNA (1)...(19): siRNA sense strand
aaauacaaagcaaggaugu

SEQ ID NO: 1752420 - RNA, 19 nt, Homo sapiens
  misc_RNA (1)...(19): siRNA sense strand
gaacgucucuaucaagaau

SEQ ID NO: 1752421 - RNA, 19 nt, Homo sapiens
  misc_RNA (1)...(19): siRNA sense strand
gaagauauauacucagcaa

SEQ ID NO: 1752422 - RNA, 19 nt, Homo sapiens
  misc_RNA (1)...(19): siRNA sense strand
gaauugaccucuaugaaag

SEQ ID NO: 1752423 - RNA, 19 nt, Homo sapiens
  misc_RNA (1)...(19): siRNA sense strand
gaagaaaguacuagaagaa

SEQ ID NO: 1752424 - RNA, 19 nt, Homo sapiens
  misc_RNA (1)...(19): siRNA sense strand
ggacauaucagguacauca

SEQ ID NO: 1752425 - RNA, 19 nt, Homo sapiens
  misc_RNA (1)...(19): siRNA sense strand
gaagacaugcugcuuugua

SEQ ID NO: 1752426 - RNA, 19 nt, Homo sapiens
  misc_RNA (1)...(19): siRNA sense strand
gaccagagaucguguugga

SEQ ID NO: 1752427 - RNA, 19 nt, Homo sapiens
  misc_RNA (1)...(19): siRNA sense strand
aagcaaggauguagaauug

SEQ ID NO: 1752428 - RNA, 19 nt, Homo sapiens
  misc_RNA (1)...(19): siRNA sense strand
ugaaacagauggagaagau

SEQ ID NO: 1752429 - RNA, 19 nt, Homo sapiens
  misc_RNA (1)...(19): siRNA sense strand
uagcagggccuucaaagua

SEQ ID NO: 1752430 - RNA, 19 nt, Homo sapiens
  misc_RNA (1)...(19): siRNA sense strand
gagaucguguuggacauua

SEQ ID NO: 1752431 - RNA, 19 nt, Homo sapiens
  misc_RNA (1)...(19): siRNA sense strand
gcauggcaguggugaguuu

SEQ ID NO: 1752432 - RNA, 19 nt, Homo sapiens
  misc_RNA (1)...(19): siRNA sense strand
uaauacaccuguucgaaau

SEQ ID NO: 1752433 - RNA, 19 nt, Homo sapiens
  misc_RNA (1)...(19): siRNA sense strand
gugaagacaugcugcuuug

SEQ ID NO: 1752434 - RNA, 19 nt, Homo sapiens
  misc_RNA (1)...(19): siRNA sense strand
ugaagaaaguacuagaaga

SEQ ID NO: 1752435 - RNA, 19 nt, Homo sapiens
  misc_RNA (1)...(19): siRNA sense strand
guucuuggcuucccauuag

SEQ ID NO: 1752436 - RNA, 19 nt, Homo sapiens
  misc_RNA (1)...(19): siRNA sense strand
gaaaguacuagaagaauac

SEQ ID NO: 1752437 - RNA, 19 nt, Homo sapiens
  misc_RNA (1)...(19): siRNA sense strand
cgaaacaucacuauugcua

SEQ ID NO: 1752438 - RNA, 19 nt, Homo sapiens
  misc_RNA (1)...(19): siRNA sense strand
cuacgaaacaucacuauug

SEQ ID NO: 1752439 - RNA, 19 nt, Homo sapiens
  misc_RNA (1)...(19): siRNA sense strand
gaaacaucacuauugcuaa

SEQ ID NO: 1752440 - RNA, 19 nt, Homo sapiens
  misc_RNA (1)...(19): siRNA sense strand
gcagggccuucaaaguaaa

SEQ ID NO: 1752441 - RNA, 19 nt, Homo sapiens
  misc_RNA (1)...(19): siRNA sense strand
ggagcgcaaucgucaguau

SEQ ID NO: 1752442 - RNA, 19 nt, Homo sapiens
  misc_RNA (1)...(19): siRNA sense strand
gauaauacaccuguucgaa

SEQ ID NO: 1752443 - RNA, 19 nt, Homo sapiens
  misc_RNA (1)...(19): siRNA sense strand
gaaagugucgcaucaaacu

SEQ ID NO: 1752444 - RNA, 19 nt, Homo sapiens
  misc_RNA (1)...(19): siRNA sense strand
ucagaggaauauaaagcua

SEQ ID NO: 1752445 - RNA, 19 nt, Homo sapiens
  misc_RNA (1)...(19): siRNA sense strand
ggaauauaaagcuauggua

SEQ ID NO: 1752446 - RNA, 19 nt, Homo sapiens
  misc_RNA (1)...(19): siRNA sense strand
uaucgaaagugucgcauca

SEQ ID NO: 1752447 - RNA, 19 nt, Homo sapiens
  misc_RNA (1)...(19): siRNA sense strand
agaauugaccucuaugaaa

SEQ ID NO: 1752448 - RNA, 19 nt, Homo sapiens
  misc_RNA (1)...(19): siRNA sense strand
aagacaugcugcuuuguaa

SEQ ID NO: 1752449 - RNA, 19 nt, Homo sapiens
  misc_RNA (1)...(19): siRNA sense strand
gacaugcugcuuuguaauu

SEQ ID NO: 1752450 - RNA, 19 nt, Homo sapiens
  misc_RNA (1)...(19): siRNA sense strand
caaacucucuggcuaugca

SEQ ID NO: 1752451 - RNA, 19 nt, Homo sapiens
  misc_RNA (1)...(19): siRNA sense strand
gcaaggauguagaauugac

SEQ ID NO: 1752452 - RNA, 19 nt, Homo sapiens
  misc_RNA (1)...(19): siRNA sense strand
cuggaaagcuagauauugu

SEQ ID NO: 1752453 - RNA, 19 nt, Homo sapiens
  misc_RNA (1)...(19): siRNA sense strand
ucgaaagugucgcaucaaa

SEQ ID NO: 1752454 - RNA, 19 nt, Homo sapiens
  misc_RNA (1)...(19): siRNA sense strand
uggagaagauauauacuca

SEQ ID NO: 1752455 - RNA, 19 nt, Homo sapiens
  misc_RNA (1)...(19): siRNA sense strand
acaugcugcuuuguaauua

SEQ ID NO: 1752456 - RNA, 19 nt, Homo sapiens
  misc_RNA (1)...(19): siRNA sense strand
ucaggaacgucucuaucaa

SEQ ID NO: 1752457 - RNA, 19 nt, Homo sapiens
  misc_RNA (1)...(19): siRNA sense strand
gcaaauacaaagcaaggau

SEQ ID NO: 1752458 - RNA, 19 nt, Homo sapiens
  misc_RNA (1)...(19): siRNA sense strand
aaacaucacuauugcuaac

SEQ ID NO: 1752459 - RNA, 19 nt, Homo sapiens
  misc_RNA (1)...(19): siRNA sense strand
caaguuuccuuuggauaau

SEQ ID NO: 1752460 - RNA, 19 nt, Homo sapiens
  misc_RNA (1)...(19): siRNA sense strand
uuuagucgcucaccagcua

SEQ ID NO: 1752461 - RNA, 19 nt, Homo sapiens
  misc_RNA (1)...(19): siRNA sense strand
aaacagauggagaagauau

SEQ ID NO: 1752462 - RNA, 19 nt, Homo sapiens
  misc_RNA (1)...(19): siRNA sense strand
cuccaaggccucuaugaua

SEQ ID NO: 1752463 - RNA, 19 nt, Homo sapiens
  misc_RNA (1)...(19): siRNA sense strand
gaaacagauggagaagaua

SEQ ID NO: 1752464 - RNA, 19 nt, Homo sapiens
  misc_RNA (1)...(19): siRNA sense strand
cgauggagauggagauuuu

SEQ ID NO: 1752465 - RNA, 19 nt, Homo sapiens
  misc_RNA (1)...(19): siRNA sense strand
uguccugccugcaacagua

SEQ ID NO: 1752466 - RNA, 19 nt, Homo sapiens
  misc_RNA (1)...(19): siRNA sense strand
agcagggccuucaaaguaa

SEQ ID NO: 1752467 - RNA, 19 nt, Homo sapiens
  misc_RNA (1)...(19): siRNA sense strand
aaagcaaggauguagaauu

SEQ ID NO: 1752468 - RNA, 19 nt, Homo sapiens
  misc_RNA (1)...(19): siRNA sense strand
guccaucagaggaauauaa

SEQ ID NO: 1752469 - RNA, 19 nt, Homo sapiens
  misc_RNA (1)...(19): siRNA sense strand
aggaacgucucuaucaaga

SEQ ID NO: 1752470 - RNA, 19 nt, Homo sapiens
  misc_RNA (1)...(19): siRNA sense strand
gcgcuggccuucuggacau

SEQ ID NO: 1752471 - RNA, 19 nt, Homo sapiens
  misc_RNA (1)...(19): siRNA sense strand
agaggaauauaaagcuaug

SEQ ID NO: 1752472 - RNA, 19 nt, Homo sapiens
  misc_RNA (1)...(19): siRNA sense strand
cuugaaccauccaugauug

SEQ ID NO: 1752473 - RNA, 19 nt, Homo sapiens
  misc_RNA (1)...(19): siRNA sense strand
aaaguucagugacaucucu

SEQ ID NO: 1752474 - RNA, 19 nt, Homo sapiens
  misc_RNA (1)...(19): siRNA sense strand
acaaagcaaggauguagaa

SEQ ID NO: 1752475 - RNA, 19 nt, Homo sapiens
  misc_RNA (1)...(19): siRNA sense strand
gauauuguccgcacagaac

SEQ ID NO: 1752476 - RNA, 19 nt, Homo sapiens
  misc_RNA (1)...(19): siRNA sense strand
caucaaacucucuggcuau

SEQ ID NO: 1752477 - RNA, 19 nt, Homo sapiens
  misc_RNA (1)...(19): siRNA sense strand
caugaagaaaguacuagaa

SEQ ID NO: 1752478 - RNA, 19 nt, Homo sapiens
  misc_RNA (1)...(19): siRNA sense strand
auaauacaccuguucgaaa

SEQ ID NO: 1752479 - RNA, 19 nt, Homo sapiens
  misc_RNA (1)...(19): siRNA sense strand
cagauggagaagauauaua

SEQ ID NO: 1752480 - RNA, 19 nt, Homo sapiens
  misc_RNA (1)...(19): siRNA sense strand
guacuagaagaauacaaga

SEQ ID NO: 1752481 - RNA, 19 nt, Homo sapiens
  misc_RNA (1)...(19): siRNA sense strand
caucuucugugaucagcau

SEQ ID NO: 1752482 - RNA, 19 nt, Homo sapiens
  misc_RNA (1)...(19): siRNA sense strand
ucacuauugcuaaccauga

SEQ ID NO: 1752483 - RNA, 19 nt, Homo sapiens
  misc_RNA (1)...(19): siRNA sense strand
ggaacgucucuaucaagaa

SEQ ID NO: 1752484 - RNA, 19 nt, Homo sapiens
  misc_RNA (1)...(19): siRNA sense strand
caugcugcuuuguaauuau

SEQ ID NO: 1752485 - RNA, 19 nt, Homo sapiens
  misc_RNA (1)...(19): siRNA sense strand
cacuauugcuaaccaugaa

SEQ ID NO: 1752486 - RNA, 19 nt, Homo sapiens
  misc_RNA (1)...(19): siRNA sense strand
uuaccuccaugaagaaagu

SEQ ID NO: 1752487 - RNA, 19 nt, Homo sapiens
  misc_RNA (1)...(19): siRNA sense strand
ugccugcucucacaucuuc

SEQ ID NO: 1752488 - RNA, 19 nt, Homo sapiens
  misc_RNA (1)...(19): siRNA sense strand
gagcagcagcaaguuucua

SEQ ID NO: 1752489 - RNA, 19 nt, Homo sapiens
  misc_RNA (1)...(19): siRNA sense strand
aacaguacccuuucuggaa

SEQ ID NO: 1752490 - RNA, 19 nt, Homo sapiens
  misc_RNA (1)...(19): siRNA sense strand
gcuacgaaacaucacuauu

SEQ ID NO: 1752491 - RNA, 19 nt, Homo sapiens
  misc_RNA (1)...(19): siRNA sense strand
gcuccaaggccucuaugau

SEQ ID NO: 1752492 - RNA, 19 nt, Homo sapiens
  misc_RNA (1)...(19): siRNA sense strand
gcgcaaucgucaguaucaa

SEQ ID NO: 1752493 - RNA, 19 nt, Homo sapiens
  misc_RNA (1)...(19): siRNA sense strand
gcaccugaacccagcaaca

SEQ ID NO: 1752494 - RNA, 19 nt, Homo sapiens
  misc_RNA (1)...(19): siRNA sense strand
uacgaaacaucacuauugc

SEQ ID NO: 1752495 - RNA, 19 nt, Homo sapiens
  misc_RNA (1)...(19): siRNA sense strand
gcaaucgucaguaucaaaa

SEQ ID NO: 1752496 - RNA, 19 nt, Homo sapiens
  misc_RNA (1)...(19): siRNA sense strand
gaacccagcaacagcuuuu

SEQ ID NO: 1752497 - RNA, 19 nt, Homo sapiens
  misc_RNA (1)...(19): siRNA sense strand
cagaggaauauaaagcuau

SEQ ID NO: 1752498 - RNA, 19 nt, Homo sapiens
  misc_RNA (1)...(19): siRNA sense strand
uuagagcagcagcaaguuu

SEQ ID NO: 1752499 - RNA, 19 nt, Homo sapiens
  misc_RNA (1)...(19): siRNA sense strand
caucagaggaauauaaagc

SEQ ID NO: 1752500 - RNA, 19 nt, Homo sapiens
  misc_RNA (1)...(19): siRNA sense strand
uagagcagcagcaaguuuc

SEQ ID NO: 1752501 - RNA, 19 nt, Homo sapiens
  misc_RNA (1)...(19): siRNA sense strand
ugaauuagagcagcagcaa

SEQ ID NO: 1752502 - RNA, 19 nt, Homo sapiens
  misc_RNA (1)...(19): siRNA sense strand
gcgauggagauggagauuu

SEQ ID NO: 1752503 - RNA, 19 nt, Homo sapiens
  misc_RNA (1)...(19): siRNA sense strand
ugugaagacaugcugcuuu

SEQ ID NO: 1752504 - RNA, 19 nt, Homo sapiens
  misc_RNA (1)...(19): siRNA sense strand
cuucuggacauaucaggua

SEQ ID NO: 1752505 - RNA, 19 nt, Homo sapiens
  misc_RNA (1)...(19): siRNA sense strand
ccuugaaccauccaugauu

SEQ ID NO: 1752506 - RNA, 19 nt, Homo sapiens
  misc_RNA (1)...(19): siRNA sense strand
cucuccaagucgugaauua

SEQ ID NO: 1752507 - RNA, 19 nt, Homo sapiens
  misc_RNA (1)...(19): siRNA sense strand
ggauaauacaccuguucga

SEQ ID NO: 1752508 - RNA, 19 nt, Homo sapiens
  misc_RNA (1)...(19): siRNA sense strand
caucaggaacgucucuauc

SEQ ID NO: 1752509 - RNA, 19 nt, Homo sapiens
  misc_RNA (1)...(19): siRNA sense strand
gcacagucugguguucuug

SEQ ID NO: 1752510 - RNA, 19 nt, Homo sapiens
  misc_RNA (1)...(19): siRNA sense strand
agauggagaagauauauac

SEQ ID NO: 1752511 - RNA, 19 nt, Homo sapiens
  misc_RNA (1)...(19): siRNA sense strand
gcugagggccaucugaaac

SEQ ID NO: 1752512 - RNA, 19 nt, Homo sapiens
  misc_RNA (1)...(19): siRNA sense strand
ucagguacaucaggaacgu

SEQ ID NO: 1752513 - RNA, 19 nt, Homo sapiens
  misc_RNA (1)...(19): siRNA sense strand
agauggagauuuucaguuc

SEQ ID NO: 1752514 - RNA, 19 nt, Homo sapiens
  misc_RNA (1)...(19): siRNA sense strand
aaacuuauggagcgcaauc

SEQ ID NO: 1752515 - RNA, 19 nt, Homo sapiens
  misc_RNA (1)...(19): siRNA sense strand
aaauacaaagcaaggaugu

SEQ ID NO: 1752516 - RNA, 19 nt, Homo sapiens
  misc_RNA (1)...(19): siRNA sense strand
gaacgucucuaucaagaau

SEQ ID NO: 1752517 - RNA, 19 nt, Homo sapiens
  misc_RNA (1)...(19): siRNA sense strand
gaagauauauacucagcaa

SEQ ID NO: 1752518 - RNA, 19 nt, Homo sapiens
  misc_RNA (1)...(19): siRNA sense strand
gaauugaccucuaugaaag

SEQ ID NO: 1752519 - RNA, 19 nt, Homo sapiens
  misc_RNA (1)...(19): siRNA sense strand
gaagaaaguacuagaagaa

SEQ ID NO: 1752520 - RNA, 19 nt, Homo sapiens
  misc_RNA (1)...(19): siRNA sense strand
ggacauaucagguacauca

SEQ ID NO: 1752521 - RNA, 19 nt, Homo sapiens
  misc_RNA (1)...(19): siRNA sense strand
gaagacaugcugcuuugua

SEQ ID NO: 1752522 - RNA, 19 nt, Homo sapiens
  misc_RNA (1)...(19): siRNA sense strand
gaccagagaucguguugga

SEQ ID NO: 1752523 - RNA, 19 nt, Homo sapiens
  misc_RNA (1)...(19): siRNA sense strand
aagcaaggauguagaauug

SEQ ID NO: 1752524 - RNA, 19 nt, Homo sapiens
  misc_RNA (1)...(19): siRNA sense strand
ugaaacagauggagaagau

SEQ ID NO: 1752525 - RNA, 19 nt, Homo sapiens
  misc_RNA (1)...(19): siRNA sense strand
uagcagggccuucaaagua

SEQ ID NO: 1752526 - RNA, 19 nt, Homo sapiens
  misc_RNA (1)...(19): siRNA sense strand
gagaucguguuggacauua

SEQ ID NO: 1752527 - RNA, 19 nt, Homo sapiens
  misc_RNA (1)...(19): siRNA sense strand
gcauggcaguggugaguuu

SEQ ID NO: 1752528 - RNA, 19 nt, Homo sapiens
  misc_RNA (1)...(19): siRNA sense strand
uaauacaccuguucgaaau

SEQ ID NO: 1752529 - RNA, 19 nt, Homo sapiens
  misc_RNA (1)...(19): siRNA sense strand
gugaagacaugcugcuuug

SEQ ID NO: 1752530 - RNA, 19 nt, Homo sapiens
  misc_RNA (1)...(19): siRNA sense strand
ugaagaaaguacuagaaga

SEQ ID NO: 1752531 - RNA, 19 nt, Homo sapiens
  misc_RNA (1)...(19): siRNA sense strand
guucuuggcuucccauuag

SEQ ID NO: 1752532 - RNA, 19 nt, Homo sapiens
  misc_RNA (1)...(19): siRNA sense strand
gaaaguacuagaagaauac

SEQ ID NO: 1752533 - RNA, 19 nt, Homo sapiens
  misc_RNA (1)...(19): siRNA sense strand
cgaaacaucacuauugcua

SEQ ID NO: 1752534 - RNA, 19 nt, Homo sapiens
  misc_RNA (1)...(19): siRNA sense strand
cuacgaaacaucacuauug

SEQ ID NO: 1752535 - RNA, 19 nt, Homo sapiens
  misc_RNA (1)...(19): siRNA sense strand
gaaacaucacuauugcuaa

SEQ ID NO: 1752536 - RNA, 19 nt, Homo sapiens
  misc_RNA (1)...(19): siRNA sense strand
gcagggccuucaaaguaaa

SEQ ID NO: 1752537 - RNA, 19 nt, Homo sapiens
  misc_RNA (1)...(19): siRNA sense strand
ggagcgcaaucgucaguau

SEQ ID NO: 1752538 - RNA, 19 nt, Homo sapiens
  misc_RNA (1)...(19): siRNA sense strand
gauaauacaccuguucgaa

SEQ ID NO: 1752539 - RNA, 19 nt, Homo sapiens
  misc_RNA (1)...(19): siRNA sense strand
gaaagugucgcaucaaacu

SEQ ID NO: 1752540 - RNA, 19 nt, Homo sapiens
  misc_RNA (1)...(19): siRNA sense strand
ucagaggaauauaaagcua

SEQ ID NO: 1752541 - RNA, 19 nt, Homo sapiens
  misc_RNA (1)...(19): siRNA sense strand
ggaauauaaagcuauggua

SEQ ID NO: 1752542 - RNA, 19 nt, Homo sapiens
  misc_RNA (1)...(19): siRNA sense strand
uaucgaaagugucgcauca

SEQ ID NO: 1752543 - RNA, 19 nt, Homo sapiens
  misc_RNA (1)...(19): siRNA sense strand
agaauugaccucuaugaaa

SEQ ID NO: 1752544 - RNA, 19 nt, Homo sapiens
  misc_RNA (1)...(19): siRNA sense strand
aagacaugcugcuuuguaa

SEQ ID NO: 1752545 - RNA, 19 nt, Homo sapiens
  misc_RNA (1)...(19): siRNA sense strand
gacaugcugcuuuguaauu

SEQ ID NO: 1752546 - RNA, 19 nt, Homo sapiens
  misc_RNA (1)...(19): siRNA sense strand
caaacucucuggcuaugca

SEQ ID NO: 1752547 - RNA, 19 nt, Homo sapiens
  misc_RNA (1)...(19): siRNA sense strand
gcaaggauguagaauugac

SEQ ID NO: 1752548 - RNA, 19 nt, Homo sapiens
  misc_RNA (1)...(19): siRNA sense strand
cuggaaagcuagauauugu

SEQ ID NO: 1752549 - RNA, 19 nt, Homo sapiens
  misc_RNA (1)...(19): siRNA sense strand
ucgaaagugucgcaucaaa

SEQ ID NO: 1752550 - RNA, 19 nt, Homo sapiens
  misc_RNA (1)...(19): siRNA sense strand
uggagaagauauauacuca

SEQ ID NO: 1752551 - RNA, 19 nt, Homo sapiens
  misc_RNA (1)...(19): siRNA sense strand
acaugcugcuuuguaauua

SEQ ID NO: 1752552 - RNA, 19 nt, Homo sapiens
  misc_RNA (1)...(19): siRNA sense strand
ucaggaacgucucuaucaa

SEQ ID NO: 1752553 - RNA, 19 nt, Homo sapiens
  misc_RNA (1)...(19): siRNA sense strand
gcaaauacaaagcaaggau

SEQ ID NO: 1752554 - RNA, 19 nt, Homo sapiens
  misc_RNA (1)...(19): siRNA sense strand
aaacaucacuauugcuaac

SEQ ID NO: 1752555 - RNA, 19 nt, Homo sapiens
  misc_RNA (1)...(19): siRNA sense strand
caaguuuccuuuggauaau

SEQ ID NO: 1752556 - RNA, 19 nt, Homo sapiens
  misc_RNA (1)...(19): siRNA sense strand
uuuagucgcucaccagcua

SEQ ID NO: 1752557 - RNA, 19 nt, Homo sapiens
  misc_RNA (1)...(19): siRNA sense strand
aaacagauggagaagauau

SEQ ID NO: 1752558 - RNA, 19 nt, Homo sapiens
  misc_RNA (1)...(19): siRNA sense strand
cuccaaggccucuaugaua

SEQ ID NO: 1752559 - RNA, 19 nt, Homo sapiens
  misc_RNA (1)...(19): siRNA sense strand
gaaacagauggagaagaua

SEQ ID NO: 1752560 - RNA, 19 nt, Homo sapiens
  misc_RNA (1)...(19): siRNA sense strand
cgauggagauggagauuuu

SEQ ID NO: 1752561 - RNA, 19 nt, Homo sapiens
  misc_RNA (1)...(19): siRNA sense strand
uguccugccugcaacagua

SEQ ID NO: 1752562 - RNA, 19 nt, Homo sapiens
  misc_RNA (1)...(19): siRNA sense strand
agcagggccuucaaaguaa

SEQ ID NO: 1752563 - RNA, 19 nt, Homo sapiens
  misc_RNA (1)...(19): siRNA sense strand
aaagcaaggauguagaauu

SEQ ID NO: 1752564 - RNA, 19 nt, Homo sapiens
  misc_RNA (1)...(19): siRNA sense strand
guccaucagaggaauauaa

SEQ ID NO: 1752565 - RNA, 19 nt, Homo sapiens
  misc_RNA (1)...(19): siRNA sense strand
aggaacgucucuaucaaga

SEQ ID NO: 1752566 - RNA, 19 nt, Homo sapiens
  misc_RNA (1)...(19): siRNA sense strand
gcgcuggccuucuggacau

SEQ ID NO: 1752567 - RNA, 19 nt, Homo sapiens
  misc_RNA (1)...(19): siRNA sense strand
agaggaauauaaagcuaug

SEQ ID NO: 1752568 - RNA, 19 nt, Homo sapiens
  misc_RNA (1)...(19): siRNA sense strand
cuugaaccauccaugauug

SEQ ID NO: 1752569 - RNA, 19 nt, Homo sapiens
  misc_RNA (1)...(19): siRNA sense strand
aaaguucagugacaucucu

SEQ ID NO: 1752570 - RNA, 19 nt, Homo sapiens
  misc_RNA (1)...(19): siRNA sense strand
acaaagcaaggauguagaa

SEQ ID NO: 1752571 - RNA, 19 nt, Homo sapiens
  misc_RNA (1)...(19): siRNA sense strand
gauauuguccgcacagaac

SEQ ID NO: 1752572 - RNA, 19 nt, Homo sapiens
  misc_RNA (1)...(19): siRNA sense strand
caucaaacucucuggcuau

SEQ ID NO: 1752573 - RNA, 19 nt, Homo sapiens
  misc_RNA (1)...(19): siRNA sense strand
caugaagaaaguacuagaa

SEQ ID NO: 1752574 - RNA, 19 nt, Homo sapiens
  misc_RNA (1)...(19): siRNA sense strand
auaauacaccuguucgaaa

SEQ ID NO: 1752575 - RNA, 19 nt, Homo sapiens
  misc_RNA (1)...(19): siRNA sense strand
cagauggagaagauauaua

SEQ ID NO: 1752576 - RNA, 19 nt, Homo sapiens
  misc_RNA (1)...(19): siRNA sense strand
guacuagaagaauacaaga

SEQ ID NO: 1752577 - RNA, 19 nt, Homo sapiens
  misc_RNA (1)...(19): siRNA sense strand
caucuucugugaucagcau

SEQ ID NO: 1752578 - RNA, 19 nt, Homo sapiens
  misc_RNA (1)...(19): siRNA sense strand
ucacuauugcuaaccauga

SEQ ID NO: 1752579 - RNA, 19 nt, Homo sapiens
  misc_RNA (1)...(19): siRNA sense strand
ggaacgucucuaucaagaa

SEQ ID NO: 1752580 - RNA, 19 nt, Homo sapiens
  misc_RNA (1)...(19): siRNA sense strand
caugcugcuuuguaauuau

SEQ ID NO: 1752581 - RNA, 19 nt, Homo sapiens
  misc_RNA (1)...(19): siRNA sense strand
cacuauugcuaaccaugaa

SEQ ID NO: 1752582 - RNA, 19 nt, Homo sapiens
  misc_RNA (1)...(19): siRNA sense strand
uuaccuccaugaagaaagu

SEQ ID NO: 1752583 - RNA, 19 nt, Homo sapiens
  misc_RNA (1)...(19): siRNA sense strand
ugccugcucucacaucuuc

SEQ ID NO: 1752584 - RNA, 19 nt, Homo sapiens
  misc_RNA (1)...(19): siRNA sense strand
gagcagcagcaaguuucua

SEQ ID NO: 1752585 - RNA, 19 nt, Homo sapiens
  misc_RNA (1)...(19): siRNA sense strand
aacaguacccuuucuggaa

SEQ ID NO: 1752586 - RNA, 19 nt, Homo sapiens
  misc_RNA (1)...(19): siRNA sense strand
gcuacgaaacaucacuauu

SEQ ID NO: 1752587 - RNA, 19 nt, Homo sapiens
  misc_RNA (1)...(19): siRNA sense strand
gcuccaaggccucuaugau

SEQ ID NO: 1752588 - RNA, 19 nt, Homo sapiens
  misc_RNA (1)...(19): siRNA sense strand
gcgcaaucgucaguaucaa

SEQ ID NO: 1752589 - RNA, 19 nt, Homo sapiens
  misc_RNA (1)...(19): siRNA sense strand
gcaccugaacccagcaaca

SEQ ID NO: 1752590 - RNA, 19 nt, Homo sapiens
  misc_RNA (1)...(19): siRNA sense strand
uacgaaacaucacuauugc

SEQ ID NO: 1752591 - RNA, 19 nt, Homo sapiens
  misc_RNA (1)...(19): siRNA sense strand
gcaaucgucaguaucaaaa

SEQ ID NO: 1752592 - RNA, 19 nt, Homo sapiens
  misc_RNA (1)...(19): siRNA sense strand
gaacccagcaacagcuuuu

SEQ ID NO: 1752593 - RNA, 19 nt, Homo sapiens
  misc_RNA (1)...(19): siRNA sense strand
cagaggaauauaaagcuau

SEQ ID NO: 1752594 - RNA, 19 nt, Homo sapiens
  misc_RNA (1)...(19): siRNA sense strand
uuagagcagcagcaaguuu

SEQ ID NO: 1752595 - RNA, 19 nt, Homo sapiens
  misc_RNA (1)...(19): siRNA sense strand
caucagaggaauauaaagc

SEQ ID NO: 1752596 - RNA, 19 nt, Homo sapiens
  misc_RNA (1)...(19): siRNA sense strand
uagagcagcagcaaguuuc

SEQ ID NO: 1752597 - RNA, 19 nt, Homo sapiens
  misc_RNA (1)...(19): siRNA sense strand
ugaauuagagcagcagcaa

SEQ ID NO: 1752598 - RNA, 19 nt, Homo sapiens
  misc_RNA (1)...(19): siRNA sense strand
gcgauggagauggagauuu

SEQ ID NO: 1752599 - RNA, 19 nt, Homo sapiens
  misc_RNA (1)...(19): siRNA sense strand
ugugaagacaugcugcuuu

SEQ ID NO: 1752600 - RNA, 19 nt, Homo sapiens
  misc_RNA (1)...(19): siRNA sense strand
cuucuggacauaucaggua

SEQ ID NO: 1752601 - RNA, 19 nt, Homo sapiens
  misc_RNA (1)...(19): siRNA sense strand
ccuugaaccauccaugauu

SEQ ID NO: 1752602 - RNA, 19 nt, Homo sapiens
  misc_RNA (1)...(19): siRNA sense strand
cucuccaagucgugaauua

SEQ ID NO: 1752603 - RNA, 19 nt, Homo sapiens
  misc_RNA (1)...(19): siRNA sense strand
ggauaauacaccuguucga

SEQ ID NO: 1752604 - RNA, 19 nt, Homo sapiens
  misc_RNA (1)...(19): siRNA sense strand
caucaggaacgucucuauc

SEQ ID NO: 1752605 - RNA, 19 nt, Homo sapiens
  misc_RNA (1)...(19): siRNA sense strand
gcacagucugguguucuug

SEQ ID NO: 1752606 - RNA, 19 nt, Homo sapiens
  misc_RNA (1)...(19): siRNA sense strand
agauggagaagauauauac

SEQ ID NO: 1752607 - RNA, 19 nt, Homo sapiens
  misc_RNA (1)...(19): siRNA sense strand
gcugagggccaucugaaac

SEQ ID NO: 1752608 - RNA, 19 nt, Homo sapiens
  misc_RNA (1)...(19): siRNA sense strand
ucagguacaucaggaacgu

SEQ ID NO: 1752609 - RNA, 19 nt, Homo sapiens
  misc_RNA (1)...(19): siRNA sense strand
agauggagauuuucaguuc

SEQ ID NO: 1752610 - RNA, 19 nt, Homo sapiens
  misc_RNA (1)...(19): siRNA sense strand
aaacuuauggagcgcaauc

SEQ ID NO: 1752611 - RNA, 19 nt, Homo sapiens
  misc_RNA (1)...(19): siRNA sense strand
aaauacaaagcaaggaugu

SEQ ID NO: 1752612 - RNA, 19 nt, Homo sapiens
  misc_RNA (1)...(19): siRNA sense strand
gaacgucucuaucaagaau

SEQ ID NO: 1752613 - RNA, 19 nt, Homo sapiens
  misc_RNA (1)...(19): siRNA sense strand
gaagauauauacucagcaa

SEQ ID NO: 1752614 - RNA, 19 nt, Homo sapiens
  misc_RNA (1)...(19): siRNA sense strand
gaauugaccucuaugaaag

SEQ ID NO: 1752615 - RNA, 19 nt, Homo sapiens
  misc_RNA (1)...(19): siRNA sense strand
gaagaaaguacuagaagaa

SEQ ID NO: 1752616 - RNA, 19 nt, Homo sapiens
  misc_RNA (1)...(19): siRNA sense strand
ggacauaucagguacauca

SEQ ID NO: 1752617 - RNA, 19 nt, Homo sapiens
  misc_RNA (1)...(19): siRNA sense strand
gaagacaugcugcuuugua

SEQ ID NO: 1752618 - RNA, 19 nt, Homo sapiens
  misc_RNA (1)...(19): siRNA sense strand
gaccagagaucguguugga

SEQ ID NO: 1752619 - RNA, 19 nt, Homo sapiens
  misc_RNA (1)...(19): siRNA sense strand
aagcaaggauguagaauug

SEQ ID NO: 1752620 - RNA, 19 nt, Homo sapiens
  misc_RNA (1)...(19): siRNA sense strand
ugaaacagauggagaagau

SEQ ID NO: 1752621 - RNA, 19 nt, Homo sapiens
  misc_RNA (1)...(19): siRNA sense strand
uagcagggccuucaaagua

SEQ ID NO: 1752622 - RNA, 19 nt, Homo sapiens
  misc_RNA (1)...(19): siRNA sense strand
gagaucguguuggacauua

SEQ ID NO: 1752623 - RNA, 19 nt, Homo sapiens
  misc_RNA (1)...(19): siRNA sense strand
gcauggcaguggugaguuu

SEQ ID NO: 1752624 - RNA, 19 nt, Homo sapiens
  misc_RNA (1)...(19): siRNA sense strand
uaauacaccuguucgaaau

SEQ ID NO: 1752625 - RNA, 19 nt, Homo sapiens
  misc_RNA (1)...(19): siRNA sense strand
gugaagacaugcugcuuug

SEQ ID NO: 1752626 - RNA, 19 nt, Homo sapiens
  misc_RNA (1)...(19): siRNA sense strand
ugaagaaaguacuagaaga

SEQ ID NO: 1752627 - RNA, 19 nt, Homo sapiens
  misc_RNA (1)...(19): siRNA sense strand
guucuuggcuucccauuag

SEQ ID NO: 1752628 - RNA, 19 nt, Homo sapiens
  misc_RNA (1)...(19): siRNA sense strand
gaaaguacuagaagaauac

SEQ ID NO: 1752629 - RNA, 19 nt, Homo sapiens
  misc_RNA (1)...(19): siRNA sense strand
cgaaacaucacuauugcua

SEQ ID NO: 1752630 - RNA, 19 nt, Homo sapiens
  misc_RNA (1)...(19): siRNA sense strand
cuacgaaacaucacuauug

SEQ ID NO: 1752631 - RNA, 19 nt, Homo sapiens
  misc_RNA (1)...(19): siRNA sense strand
gaaacaucacuauugcuaa

SEQ ID NO: 1752632 - RNA, 19 nt, Homo sapiens
  misc_RNA (1)...(19): siRNA sense strand
gcagggccuucaaaguaaa

SEQ ID NO: 1752633 - RNA, 19 nt, Homo sapiens
  misc_RNA (1)...(19): siRNA sense strand
ggagcgcaaucgucaguau

SEQ ID NO: 1752634 - RNA, 19 nt, Homo sapiens
  misc_RNA (1)...(19): siRNA sense strand
gauaauacaccuguucgaa

SEQ ID NO: 1752635 - RNA, 19 nt, Homo sapiens
  misc_RNA (1)...(19): siRNA sense strand
gaaagugucgcaucaaacu

SEQ ID NO: 1752636 - RNA, 19 nt, Homo sapiens
  misc_RNA (1)...(19): siRNA sense strand
ucagaggaauauaaagcua

SEQ ID NO: 1752637 - RNA, 19 nt, Homo sapiens
  misc_RNA (1)...(19): siRNA sense strand
ggaauauaaagcuauggua

SEQ ID NO: 1752638 - RNA, 19 nt, Homo sapiens
  misc_RNA (1)...(19): siRNA sense strand
uaucgaaagugucgcauca

SEQ ID NO: 1752639 - RNA, 19 nt, Homo sapiens
  misc_RNA (1)...(19): siRNA sense strand
agaauugaccucuaugaaa

SEQ ID NO: 1752640 - RNA, 19 nt, Homo sapiens
  misc_RNA (1)...(19): siRNA sense strand
aagacaugcugcuuuguaa

SEQ ID NO: 1752641 - RNA, 19 nt, Homo sapiens
  misc_RNA (1)...(19): siRNA sense strand
gacaugcugcuuuguaauu

SEQ ID NO: 1752642 - RNA, 19 nt, Homo sapiens
  misc_RNA (1)...(19): siRNA sense strand
caaacucucuggcuaugca

SEQ ID NO: 1752643 - RNA, 19 nt, Homo sapiens
  misc_RNA (1)...(19): siRNA sense strand
gcaaggauguagaauugac

SEQ ID NO: 1752644 - RNA, 19 nt, Homo sapiens
  misc_RNA (1)...(19): siRNA sense strand
cuggaaagcuagauauugu

SEQ ID NO: 1752645 - RNA, 19 nt, Homo sapiens
  misc_RNA (1)...(19): siRNA sense strand
ucgaaagugucgcaucaaa

SEQ ID NO: 1752646 - RNA, 19 nt, Homo sapiens
  misc_RNA (1)...(19): siRNA sense strand
uggagaagauauauacuca

SEQ ID NO: 1752647 - RNA, 19 nt, Homo sapiens
  misc_RNA (1)...(19): siRNA sense strand
acaugcugcuuuguaauua

SEQ ID NO: 1752648 - RNA, 19 nt, Homo sapiens
  misc_RNA (1)...(19): siRNA sense strand
ucaggaacgucucuaucaa

SEQ ID NO: 1752649 - RNA, 19 nt, Homo sapiens
  misc_RNA (1)...(19): siRNA sense strand
gcaaauacaaagcaaggau

SEQ ID NO: 1752650 - RNA, 19 nt, Homo sapiens
  misc_RNA (1)...(19): siRNA sense strand
aaacaucacuauugcuaac

SEQ ID NO: 1752651 - RNA, 19 nt, Homo sapiens
  misc_RNA (1)...(19): siRNA sense strand
caaguuuccuuuggauaau

SEQ ID NO: 1752652 - RNA, 19 nt, Homo sapiens
  misc_RNA (1)...(19): siRNA sense strand
uuuagucgcucaccagcua

SEQ ID NO: 1752653 - RNA, 19 nt, Homo sapiens
  misc_RNA (1)...(19): siRNA sense strand
aaacagauggagaagauau

SEQ ID NO: 1752654 - RNA, 19 nt, Homo sapiens
  misc_RNA (1)...(19): siRNA sense strand
cuccaaggccucuaugaua

SEQ ID NO: 1752655 - RNA, 19 nt, Homo sapiens
  misc_RNA (1)...(19): siRNA sense strand
gaaacagauggagaagaua

SEQ ID NO: 1752656 - RNA, 19 nt, Homo sapiens
  misc_RNA (1)...(19): siRNA sense strand
cgauggagauggagauuuu

SEQ ID NO: 1752657 - RNA, 19 nt, Homo sapiens
  misc_RNA (1)...(19): siRNA sense strand
uguccugccugcaacagua

SEQ ID NO: 1752658 - RNA, 19 nt, Homo sapiens
  misc_RNA (1)...(19): siRNA sense strand
agcagggccuucaaaguaa

SEQ ID NO: 1752659 - RNA, 19 nt, Homo sapiens
  misc_RNA (1)...(19): siRNA sense strand
aaagcaaggauguagaauu

SEQ ID NO: 1752660 - RNA, 19 nt, Homo sapiens
  misc_RNA (1)...(19): siRNA sense strand
guccaucagaggaauauaa

SEQ ID NO: 1752661 - RNA, 19 nt, Homo sapiens
  misc_RNA (1)...(19): siRNA sense strand
aggaacgucucuaucaaga

SEQ ID NO: 1752662 - RNA, 19 nt, Homo sapiens
  misc_RNA (1)...(19): siRNA sense strand
gcgcuggccuucuggacau

SEQ ID NO: 1752663 - RNA, 19 nt, Homo sapiens
  misc_RNA (1)...(19): siRNA sense strand
agaggaauauaaagcuaug

SEQ ID NO: 1752664 - RNA, 19 nt, Homo sapiens
  misc_RNA (1)...(19): siRNA sense strand
cuugaaccauccaugauug

SEQ ID NO: 1752665 - RNA, 19 nt, Homo sapiens
  misc_RNA (1)...(19): siRNA sense strand
aaaguucagugacaucucu

SEQ ID NO: 1752666 - RNA, 19 nt, Homo sapiens
  misc_RNA (1)...(19): siRNA sense strand
acaaagcaaggauguagaa

SEQ ID NO: 1752667 - RNA, 19 nt, Homo sapiens
  misc_RNA (1)...(19): siRNA sense strand
gauauuguccgcacagaac

SEQ ID NO: 1752668 - RNA, 19 nt, Homo sapiens
  misc_RNA (1)...(19): siRNA sense strand
caucaaacucucuggcuau

SEQ ID NO: 1752669 - RNA, 19 nt, Homo sapiens
  misc_RNA (1)...(19): siRNA sense strand
caugaagaaaguacuagaa

SEQ ID NO: 1752670 - RNA, 19 nt, Homo sapiens
  misc_RNA (1)...(19): siRNA sense strand
auaauacaccuguucgaaa

SEQ ID NO: 1752671 - RNA, 19 nt, Homo sapiens
  misc_RNA (1)...(19): siRNA sense strand
cagauggagaagauauaua

SEQ ID NO: 1752672 - RNA, 19 nt, Homo sapiens
  misc_RNA (1)...(19): siRNA sense strand
guacuagaagaauacaaga

SEQ ID NO: 1752673 - RNA, 19 nt, Homo sapiens
  misc_RNA (1)...(19): siRNA sense strand
caucuucugugaucagcau

SEQ ID NO: 1752674 - RNA, 19 nt, Homo sapiens
  misc_RNA (1)...(19): siRNA sense strand
ucacuauugcuaaccauga

SEQ ID NO: 1752675 - RNA, 19 nt, Homo sapiens
  misc_RNA (1)...(19): siRNA sense strand
ggaacgucucuaucaagaa

SEQ ID NO: 1752676 - RNA, 19 nt, Homo sapiens
  misc_RNA (1)...(19): siRNA sense strand
caugcugcuuuguaauuau

SEQ ID NO: 1752677 - RNA, 19 nt, Homo sapiens
  misc_RNA (1)...(19): siRNA sense strand
cacuauugcuaaccaugaa

SEQ ID NO: 1752678 - RNA, 19 nt, Homo sapiens
  misc_RNA (1)...(19): siRNA sense strand
uuaccuccaugaagaaagu

SEQ ID NO: 1752679 - RNA, 19 nt, Homo sapiens
  misc_RNA (1)...(19): siRNA sense strand
ugccugcucucacaucuuc

SEQ ID NO: 1752680 - RNA, 19 nt, Homo sapiens
  misc_RNA (1)...(19): siRNA sense strand
gagcagcagcaaguuucua

SEQ ID NO: 1752681 - RNA, 19 nt, Homo sapiens
  misc_RNA (1)...(19): siRNA sense strand
aacaguacccuuucuggaa

SEQ ID NO: 1752682 - RNA, 19 nt, Homo sapiens
  misc_RNA (1)...(19): siRNA sense strand
gcuacgaaacaucacuauu

SEQ ID NO: 1752683 - RNA, 19 nt, Homo sapiens
  misc_RNA (1)...(19): siRNA sense strand
gcuccaaggccucuaugau

SEQ ID NO: 1752684 - RNA, 19 nt, Homo sapiens
  misc_RNA (1)...(19): siRNA sense strand
gcgcaaucgucaguaucaa

SEQ ID NO: 1752685 - RNA, 19 nt, Homo sapiens
  misc_RNA (1)...(19): siRNA sense strand
gcaccugaacccagcaaca

SEQ ID NO: 1752686 - RNA, 19 nt, Homo sapiens
  misc_RNA (1)...(19): siRNA sense strand
uacgaaacaucacuauugc

SEQ ID NO: 1752687 - RNA, 19 nt, Homo sapiens
  misc_RNA (1)...(19): siRNA sense strand
gcaaucgucaguaucaaaa

SEQ ID NO: 1752688 - RNA, 19 nt, Homo sapiens
  misc_RNA (1)...(19): siRNA sense strand
gaacccagcaacagcuuuu

SEQ ID NO: 1752689 - RNA, 19 nt, Homo sapiens
  misc_RNA (1)...(19): siRNA sense strand
cagaggaauauaaagcuau

SEQ ID NO: 1752690 - RNA, 19 nt, Homo sapiens
  misc_RNA (1)...(19): siRNA sense strand
uuagagcagcagcaaguuu

SEQ ID NO: 1752691 - RNA, 19 nt, Homo sapiens
  misc_RNA (1)...(19): siRNA sense strand
caucagaggaauauaaagc

SEQ ID NO: 1752692 - RNA, 19 nt, Homo sapiens
  misc_RNA (1)...(19): siRNA sense strand
uagagcagcagcaaguuuc

SEQ ID NO: 1752693 - RNA, 19 nt, Homo sapiens
  misc_RNA (1)...(19): siRNA sense strand
ugaauuagagcagcagcaa

SEQ ID NO: 1752694 - RNA, 19 nt, Homo sapiens
  misc_RNA (1)...(19): siRNA sense strand
gcgauggagauggagauuu

SEQ ID NO: 1752695 - RNA, 19 nt, Homo sapiens
  misc_RNA (1)...(19): siRNA sense strand
ugugaagacaugcugcuuu

SEQ ID NO: 1752696 - RNA, 19 nt, Homo sapiens
  misc_RNA (1)...(19): siRNA sense strand
cuucuggacauaucaggua

SEQ ID NO: 1752697 - RNA, 19 nt, Homo sapiens
  misc_RNA (1)...(19): siRNA sense strand
ccuugaaccauccaugauu

SEQ ID NO: 1752698 - RNA, 19 nt, Homo sapiens
  misc_RNA (1)...(19): siRNA sense strand
cucuccaagucgugaauua

SEQ ID NO: 1752699 - RNA, 19 nt, Homo sapiens
  misc_RNA (1)...(19): siRNA sense strand
ggauaauacaccuguucga

SEQ ID NO: 1752700 - RNA, 19 nt, Homo sapiens
  misc_RNA (1)...(19): siRNA sense strand
caucaggaacgucucuauc

SEQ ID NO: 1752701 - RNA, 19 nt, Homo sapiens
  misc_RNA (1)...(19): siRNA sense strand
gcacagucugguguucuug

SEQ ID NO: 1752702 - RNA, 19 nt, Homo sapiens
  misc_RNA (1)...(19): siRNA sense strand
agauggagaagauauauac

SEQ ID NO: 1752703 - RNA, 19 nt, Homo sapiens
  misc_RNA (1)...(19): siRNA sense strand
gcugagggccaucugaaac

SEQ ID NO: 1752704 - RNA, 19 nt, Homo sapiens
  misc_RNA (1)...(19): siRNA sense strand
ucagguacaucaggaacgu

SEQ ID NO: 1752705 - RNA, 19 nt, Homo sapiens
  misc_RNA (1)...(19): siRNA sense strand
agauggagauuuucaguuc

SEQ ID NO: 1752706 - RNA, 19 nt, Homo sapiens
  misc_RNA (1)...(19): siRNA sense strand
aaacuuauggagcgcaauc

SEQ ID NO: 1752707 - RNA, 19 nt, Homo sapiens
  misc_RNA (1)...(19): siRNA sense strand
aaauacaaagcaaggaugu

SEQ ID NO: 1752708 - RNA, 19 nt, Homo sapiens
  misc_RNA (1)...(19): siRNA sense strand
gagcaaaguuuccucaaug

SEQ ID NO: 1752709 - RNA, 19 nt, Homo sapiens
  misc_RNA (1)...(19): siRNA sense strand
ggagagguuucguagcuua

SEQ ID NO: 1752710 - RNA, 19 nt, Homo sapiens
  misc_RNA (1)...(19): siRNA sense strand
gaaagaggaggaagccaua

SEQ ID NO: 1752711 - RNA, 19 nt, Homo sapiens
  misc_RNA (1)...(19): siRNA sense strand
ccaguguacuuuaccaaua

SEQ ID NO: 1752712 - RNA, 19 nt, Homo sapiens
  misc_RNA (1)...(19): siRNA sense strand
aaacauaagccaagcaauu

SEQ ID NO: 1752713 - RNA, 19 nt, Homo sapiens
  misc_RNA (1)...(19): siRNA sense strand
ggaagaccaguguacuuua

SEQ ID NO: 1752714 - RNA, 19 nt, Homo sapiens
  misc_RNA (1)...(19): siRNA sense strand
cgacagcguucuucagaga

SEQ ID NO: 1752715 - RNA, 19 nt, Homo sapiens
  misc_RNA (1)...(19): siRNA sense strand
gaagaccaguguacuuuac

SEQ ID NO: 1752716 - RNA, 19 nt, Homo sapiens
  misc_RNA (1)...(19): siRNA sense strand
ugacaaaugagcaaaguuu

SEQ ID NO: 1752717 - RNA, 19 nt, Homo sapiens
  misc_RNA (1)...(19): siRNA sense strand
gaauccaccugcaguuaug

SEQ ID NO: 1752718 - RNA, 19 nt, Homo sapiens
  misc_RNA (1)...(19): siRNA sense strand
gagaauccaccugcaguua

SEQ ID NO: 1752719 - RNA, 19 nt, Homo sapiens
  misc_RNA (1)...(19): siRNA sense strand
caacagugggcauugauuu

SEQ ID NO: 1752720 - RNA, 19 nt, Homo sapiens
  misc_RNA (1)...(19): siRNA sense strand
ccauagcacucgcagagaa

SEQ ID NO: 1752721 - RNA, 19 nt, Homo sapiens
  misc_RNA (1)...(19): siRNA sense strand
gggaagaccaguguacuuu

SEQ ID NO: 1752722 - RNA, 19 nt, Homo sapiens
  misc_RNA (1)...(19): siRNA sense strand
ccaaauuuaucacaacagu

SEQ ID NO: 1752723 - RNA, 19 nt, Homo sapiens
  misc_RNA (1)...(19): siRNA sense strand
ucacaacagugggcauuga

SEQ ID NO: 1752724 - RNA, 19 nt, Homo sapiens
  misc_RNA (1)...(19): siRNA sense strand
ucagagaugcuauggguuu

SEQ ID NO: 1752725 - RNA, 19 nt, Homo sapiens
  misc_RNA (1)...(19): siRNA sense strand
caaaguuuccucaauguca

SEQ ID NO: 1752726 - RNA, 19 nt, Homo sapiens
  misc_RNA (1)...(19): siRNA sense strand
cuacggaucaguuaaguga

SEQ ID NO: 1752727 - RNA, 19 nt, Homo sapiens
  misc_RNA (1)...(19): siRNA sense strand
gauaaugaagcgaauggaa

SEQ ID NO: 1752728 - RNA, 19 nt, Homo sapiens
  misc_RNA (1)...(19): siRNA sense strand
gccaaugggacaaacauaa

SEQ ID NO: 1752729 - RNA, 19 nt, Homo sapiens
  misc_RNA (1)...(19): siRNA sense strand
ugauggagauuaugauuac

SEQ ID NO: 1752730 - RNA, 19 nt, Homo sapiens
  misc_RNA (1)...(19): siRNA sense strand
caguguacuuuaccaauau

SEQ ID NO: 1752731 - RNA, 19 nt, Homo sapiens
  misc_RNA (1)...(19): siRNA sense strand
ggaguggugcgaucaaaug

SEQ ID NO: 1752732 - RNA, 19 nt, Homo sapiens
  misc_RNA (1)...(19): siRNA sense strand
gauauagugcuguguggaa

SEQ ID NO: 1752733 - RNA, 19 nt, Homo sapiens
  misc_RNA (1)...(19): siRNA sense strand
caggagagguuucguagcu

SEQ ID NO: 1752734 - RNA, 19 nt, Homo sapiens
  misc_RNA (1)...(19): siRNA sense strand
gauaagccagcuacagaug

SEQ ID NO: 1752735 - RNA, 19 nt, Homo sapiens
  misc_RNA (1)...(19): siRNA sense strand
ggaauccccuacuuugaaa

SEQ ID NO: 1752736 - RNA, 19 nt, Homo sapiens
  misc_RNA (1)...(19): siRNA sense strand
gcagagaaauauggaaucc

SEQ ID NO: 1752737 - RNA, 19 nt, Homo sapiens
  misc_RNA (1)...(19): siRNA sense strand
ggaccagagaguagugaaa

SEQ ID NO: 1752738 - RNA, 19 nt, Homo sapiens
  misc_RNA (1)...(19): siRNA sense strand
gggcaggagagguuucgua

SEQ ID NO: 1752739 - RNA, 19 nt, Homo sapiens
  misc_RNA (1)...(19): siRNA sense strand
gaaacuagugcugccaaug

SEQ ID NO: 1752740 - RNA, 19 nt, Homo sapiens
  misc_RNA (1)...(19): siRNA sense strand
cagcagggcaggagagguu

SEQ ID NO: 1752741 - RNA, 19 nt, Homo sapiens
  misc_RNA (1)...(19): siRNA sense strand
caaauggucaugccucuac

SEQ ID NO: 1752742 - RNA, 19 nt, Homo sapiens
  misc_RNA (1)...(19): siRNA sense strand
ccaauauacagaugguaaa

SEQ ID NO: 1752743 - RNA, 19 nt, Homo sapiens
  misc_RNA (1)...(19): siRNA sense strand
cuucuggaccugauaauga

SEQ ID NO: 1752744 - RNA, 19 nt, Homo sapiens
  misc_RNA (1)...(19): siRNA sense strand
ggauaagccagcuacagau

SEQ ID NO: 1752745 - RNA, 19 nt, Homo sapiens
  misc_RNA (1)...(19): siRNA sense strand
gaaggaguggugcgaucaa

SEQ ID NO: 1752746 - RNA, 19 nt, Homo sapiens
  misc_RNA (1)...(19): siRNA sense strand
uaagccagcuacagaugca

SEQ ID NO: 1752747 - RNA, 19 nt, Homo sapiens
  misc_RNA (1)...(19): siRNA sense strand
uggauaagccagcuacaga

SEQ ID NO: 1752748 - RNA, 19 nt, Homo sapiens
  misc_RNA (1)...(19): siRNA sense strand
cugauggagauuaugauua

SEQ ID NO: 1752749 - RNA, 19 nt, Homo sapiens
  misc_RNA (1)...(19): siRNA sense strand
gagagguuucguagcuuaa

SEQ ID NO: 1752750 - RNA, 19 nt, Homo sapiens
  misc_RNA (1)...(19): siRNA sense strand
gaucaguuaagugaagaaa

SEQ ID NO: 1752751 - RNA, 19 nt, Homo sapiens
  misc_RNA (1)...(19): siRNA sense strand
ggaacgguguguggacaag

SEQ ID NO: 1752752 - RNA, 19 nt, Homo sapiens
  misc_RNA (1)...(19): siRNA sense strand
aaacuagugcugccaaugg

SEQ ID NO: 1752753 - RNA, 19 nt, Homo sapiens
  misc_RNA (1)...(19): siRNA sense strand
aacauaagccaagcaauug

SEQ ID NO: 1752754 - RNA, 19 nt, Homo sapiens
  misc_RNA (1)...(19): siRNA sense strand
gacaaaugagcaaaguuuc

SEQ ID NO: 1752755 - RNA, 19 nt, Homo sapiens
  misc_RNA (1)...(19): siRNA sense strand
ccaaugggacaaacauaag

SEQ ID NO: 1752756 - RNA, 19 nt, Homo sapiens
  misc_RNA (1)...(19): siRNA sense strand
ugaaacuagugcugccaau

SEQ ID NO: 1752757 - RNA, 19 nt, Homo sapiens
  misc_RNA (1)...(19): siRNA sense strand
gcaaaguuuccucaauguc

SEQ ID NO: 1752758 - RNA, 19 nt, Homo sapiens
  misc_RNA (1)...(19): siRNA sense strand
gaccagagaguagugaaag

SEQ ID NO: 1752759 - RNA, 19 nt, Homo sapiens
  misc_RNA (1)...(19): siRNA sense strand
gaucugacaaaugagcaaa

SEQ ID NO: 1752760 - RNA, 19 nt, Homo sapiens
  misc_RNA (1)...(19): siRNA sense strand
ucaguuaagugaagaaaag

SEQ ID NO: 1752761 - RNA, 19 nt, Homo sapiens
  misc_RNA (1)...(19): siRNA sense strand
caaugucagaaacuggaua

SEQ ID NO: 1752762 - RNA, 19 nt, Homo sapiens
  misc_RNA (1)...(19): siRNA sense strand
cauagcacucgcagagaaa

SEQ ID NO: 1752763 - RNA, 19 nt, Homo sapiens
  misc_RNA (1)...(19): siRNA sense strand
acagcguucuucagagaug

SEQ ID NO: 1752764 - RNA, 19 nt, Homo sapiens
  misc_RNA (1)...(19): siRNA sense strand
agaauccaccugcaguuau

SEQ ID NO: 1752765 - RNA, 19 nt, Homo sapiens
  misc_RNA (1)...(19): siRNA sense strand
agcaaaguuuccucaaugu

SEQ ID NO: 1752766 - RNA, 19 nt, Homo sapiens
  misc_RNA (1)...(19): siRNA sense strand
aaggaguggugcgaucaaa

SEQ ID NO: 1752767 - RNA, 19 nt, Homo sapiens
  misc_RNA (1)...(19): siRNA sense strand
acaaacauaagccaagcaa

SEQ ID NO: 1752768 - RNA, 19 nt, Homo sapiens
  misc_RNA (1)...(19): siRNA sense strand
gcacucgcagagaaauaug

SEQ ID NO: 1752769 - RNA, 19 nt, Homo sapiens
  misc_RNA (1)...(19): siRNA sense strand
auauagugcuguguggaaa

SEQ ID NO: 1752770 - RNA, 19 nt, Homo sapiens
  misc_RNA (1)...(19): siRNA sense strand
guacuuuaccaauauacag

SEQ ID NO: 1752771 - RNA, 19 nt, Homo sapiens
  misc_RNA (1)...(19): siRNA sense strand
uagcacucgcagagaaaua

SEQ ID NO: 1752772 - RNA, 19 nt, Homo sapiens
  misc_RNA (1)...(19): siRNA sense strand
guagggaagaccaguguac

SEQ ID NO: 1752773 - RNA, 19 nt, Homo sapiens
  misc_RNA (1)...(19): siRNA sense strand
ggaggaccagagaguagug

SEQ ID NO: 1752774 - RNA, 19 nt, Homo sapiens
  misc_RNA (1)...(19): siRNA sense strand
gagcaaaguuuccucaaug

SEQ ID NO: 1752775 - RNA, 19 nt, Homo sapiens
  misc_RNA (1)...(19): siRNA sense strand
ggagagguuucguagcuua

SEQ ID NO: 1752776 - RNA, 19 nt, Homo sapiens
  misc_RNA (1)...(19): siRNA sense strand
gaaagaggaggaagccaua

SEQ ID NO: 1752777 - RNA, 19 nt, Homo sapiens
  misc_RNA (1)...(19): siRNA sense strand
ccaguguacuuuaccaaua

SEQ ID NO: 1752778 - RNA, 19 nt, Homo sapiens
  misc_RNA (1)...(19): siRNA sense strand
aaacauaagccaagcaauu

SEQ ID NO: 1752779 - RNA, 19 nt, Homo sapiens
  misc_RNA (1)...(19): siRNA sense strand
ggaagaccaguguacuuua

SEQ ID NO: 1752780 - RNA, 19 nt, Homo sapiens
  misc_RNA (1)...(19): siRNA sense strand
cgacagcguucuucagaga

SEQ ID NO: 1752781 - RNA, 19 nt, Homo sapiens
  misc_RNA (1)...(19): siRNA sense strand
gaagaccaguguacuuuac

SEQ ID NO: 1752782 - RNA, 19 nt, Homo sapiens
  misc_RNA (1)...(19): siRNA sense strand
ugacaaaugagcaaaguuu

SEQ ID NO: 1752783 - RNA, 19 nt, Homo sapiens
  misc_RNA (1)...(19): siRNA sense strand
gaauccaccugcaguuaug

SEQ ID NO: 1752784 - RNA, 19 nt, Homo sapiens
  misc_RNA (1)...(19): siRNA sense strand
gagaauccaccugcaguua

SEQ ID NO: 1752785 - RNA, 19 nt, Homo sapiens
  misc_RNA (1)...(19): siRNA sense strand
caacagugggcauugauuu

SEQ ID NO: 1752786 - RNA, 19 nt, Homo sapiens
  misc_RNA (1)...(19): siRNA sense strand
ccauagcacucgcagagaa

SEQ ID NO: 1752787 - RNA, 19 nt, Homo sapiens
  misc_RNA (1)...(19): siRNA sense strand
gggaagaccaguguacuuu

SEQ ID NO: 1752788 - RNA, 19 nt, Homo sapiens
  misc_RNA (1)...(19): siRNA sense strand
ccaaauuuaucacaacagu

SEQ ID NO: 1752789 - RNA, 19 nt, Homo sapiens
  misc_RNA (1)...(19): siRNA sense strand
ucacaacagugggcauuga

SEQ ID NO: 1752790 - RNA, 19 nt, Homo sapiens
  misc_RNA (1)...(19): siRNA sense strand
ucagagaugcuauggguuu

SEQ ID NO: 1752791 - RNA, 19 nt, Homo sapiens
  misc_RNA (1)...(19): siRNA sense strand
caaaguuuccucaauguca

SEQ ID NO: 1752792 - RNA, 19 nt, Homo sapiens
  misc_RNA (1)...(19): siRNA sense strand
cuacggaucaguuaaguga

SEQ ID NO: 1752793 - RNA, 19 nt, Homo sapiens
  misc_RNA (1)...(19): siRNA sense strand
gauaaugaagcgaauggaa

SEQ ID NO: 1752794 - RNA, 19 nt, Homo sapiens
  misc_RNA (1)...(19): siRNA sense strand
gccaaugggacaaacauaa

SEQ ID NO: 1752795 - RNA, 19 nt, Homo sapiens
  misc_RNA (1)...(19): siRNA sense strand
ugauggagauuaugauuac

SEQ ID NO: 1752796 - RNA, 19 nt, Homo sapiens
  misc_RNA (1)...(19): siRNA sense strand
caguguacuuuaccaauau

SEQ ID NO: 1752797 - RNA, 19 nt, Homo sapiens
  misc_RNA (1)...(19): siRNA sense strand
ggaguggugcgaucaaaug

SEQ ID NO: 1752798 - RNA, 19 nt, Homo sapiens
  misc_RNA (1)...(19): siRNA sense strand
gauauagugcuguguggaa

SEQ ID NO: 1752799 - RNA, 19 nt, Homo sapiens
  misc_RNA (1)...(19): siRNA sense strand
caggagagguuucguagcu

SEQ ID NO: 1752800 - RNA, 19 nt, Homo sapiens
  misc_RNA (1)...(19): siRNA sense strand
gauaagccagcuacagaug

SEQ ID NO: 1752801 - RNA, 19 nt, Homo sapiens
  misc_RNA (1)...(19): siRNA sense strand
ggaauccccuacuuugaaa

SEQ ID NO: 1752802 - RNA, 19 nt, Homo sapiens
  misc_RNA (1)...(19): siRNA sense strand
gcagagaaauauggaaucc

SEQ ID NO: 1752803 - RNA, 19 nt, Homo sapiens
  misc_RNA (1)...(19): siRNA sense strand
ggaccagagaguagugaaa

SEQ ID NO: 1752804 - RNA, 19 nt, Homo sapiens
  misc_RNA (1)...(19): siRNA sense strand
gggcaggagagguuucgua

SEQ ID NO: 1752805 - RNA, 19 nt, Homo sapiens
  misc_RNA (1)...(19): siRNA sense strand
gaaacuagugcugccaaug

SEQ ID NO: 1752806 - RNA, 19 nt, Homo sapiens
  misc_RNA (1)...(19): siRNA sense strand
cagcagggcaggagagguu

SEQ ID NO: 1752807 - RNA, 19 nt, Homo sapiens
  misc_RNA (1)...(19): siRNA sense strand
caaauggucaugccucuac

SEQ ID NO: 1752808 - RNA, 19 nt, Homo sapiens
  misc_RNA (1)...(19): siRNA sense strand
ccaauauacagaugguaaa

SEQ ID NO: 1752809 - RNA, 19 nt, Homo sapiens
  misc_RNA (1)...(19): siRNA sense strand
cuucuggaccugauaauga

SEQ ID NO: 1752810 - RNA, 19 nt, Homo sapiens
  misc_RNA (1)...(19): siRNA sense strand
ggauaagccagcuacagau

SEQ ID NO: 1752811 - RNA, 19 nt, Homo sapiens
  misc_RNA (1)...(19): siRNA sense strand
gaaggaguggugcgaucaa

SEQ ID NO: 1752812 - RNA, 19 nt, Homo sapiens
  misc_RNA (1)...(19): siRNA sense strand
uaagccagcuacagaugca

SEQ ID NO: 1752813 - RNA, 19 nt, Homo sapiens
  misc_RNA (1)...(19): siRNA sense strand
uggauaagccagcuacaga

SEQ ID NO: 1752814 - RNA, 19 nt, Homo sapiens
  misc_RNA (1)...(19): siRNA sense strand
cugauggagauuaugauua

SEQ ID NO: 1752815 - RNA, 19 nt, Homo sapiens
  misc_RNA (1)...(19): siRNA sense strand
gagagguuucguagcuuaa

SEQ ID NO: 1752816 - RNA, 19 nt, Homo sapiens
  misc_RNA (1)...(19): siRNA sense strand
gaucaguuaagugaagaaa

SEQ ID NO: 1752817 - RNA, 19 nt, Homo sapiens
  misc_RNA (1)...(19): siRNA sense strand
ggaacgguguguggacaag

SEQ ID NO: 1752818 - RNA, 19 nt, Homo sapiens
  misc_RNA (1)...(19): siRNA sense strand
aaacuagugcugccaaugg

SEQ ID NO: 1752819 - RNA, 19 nt, Homo sapiens
  misc_RNA (1)...(19): siRNA sense strand
aacauaagccaagcaauug

SEQ ID NO: 1752820 - RNA, 19 nt, Homo sapiens
  misc_RNA (1)...(19): siRNA sense strand
gacaaaugagcaaaguuuc

SEQ ID NO: 1752821 - RNA, 19 nt, Homo sapiens
  misc_RNA (1)...(19): siRNA sense strand
ccaaugggacaaacauaag

SEQ ID NO: 1752822 - RNA, 19 nt, Homo sapiens
  misc_RNA (1)...(19): siRNA sense strand
ugaaacuagugcugccaau

SEQ ID NO: 1752823 - RNA, 19 nt, Homo sapiens
  misc_RNA (1)...(19): siRNA sense strand
gcaaaguuuccucaauguc

SEQ ID NO: 1752824 - RNA, 19 nt, Homo sapiens
  misc_RNA (1)...(19): siRNA sense strand
gaccagagaguagugaaag

SEQ ID NO: 1752825 - RNA, 19 nt, Homo sapiens
  misc_RNA (1)...(19): siRNA sense strand
gaucugacaaaugagcaaa

SEQ ID NO: 1752826 - RNA, 19 nt, Homo sapiens
  misc_RNA (1)...(19): siRNA sense strand
ucaguuaagugaagaaaag

SEQ ID NO: 1752827 - RNA, 19 nt, Homo sapiens
  misc_RNA (1)...(19): siRNA sense strand
caaugucagaaacuggaua

SEQ ID NO: 1752828 - RNA, 19 nt, Homo sapiens
  misc_RNA (1)...(19): siRNA sense strand
cauagcacucgcagagaaa

SEQ ID NO: 1752829 - RNA, 19 nt, Homo sapiens
  misc_RNA (1)...(19): siRNA sense strand
acagcguucuucagagaug

SEQ ID NO: 1752830 - RNA, 19 nt, Homo sapiens
  misc_RNA (1)...(19): siRNA sense strand
agaauccaccugcaguuau

SEQ ID NO: 1752831 - RNA, 19 nt, Homo sapiens
  misc_RNA (1)...(19): siRNA sense strand
agcaaaguuuccucaaugu

SEQ ID NO: 1752832 - RNA, 19 nt, Homo sapiens
  misc_RNA (1)...(19): siRNA sense strand
aaggaguggugcgaucaaa

SEQ ID NO: 1752833 - RNA, 19 nt, Homo sapiens
  misc_RNA (1)...(19): siRNA sense strand
acaaacauaagccaagcaa

SEQ ID NO: 1752834 - RNA, 19 nt, Homo sapiens
  misc_RNA (1)...(19): siRNA sense strand
gcacucgcagagaaauaug

SEQ ID NO: 1752835 - RNA, 19 nt, Homo sapiens
  misc_RNA (1)...(19): siRNA sense strand
auauagugcuguguggaaa

SEQ ID NO: 1752836 - RNA, 19 nt, Homo sapiens
  misc_RNA (1)...(19): siRNA sense strand
guacuuuaccaauauacag

SEQ ID NO: 1752837 - RNA, 19 nt, Homo sapiens
  misc_RNA (1)...(19): siRNA sense strand
uagcacucgcagagaaaua

SEQ ID NO: 1752838 - RNA, 19 nt, Homo sapiens
  misc_RNA (1)...(19): siRNA sense strand
guagggaagaccaguguac

SEQ ID NO: 1752839 - RNA, 19 nt, Homo sapiens
  misc_RNA (1)...(19): siRNA sense strand
ggaggaccagagaguagug

SEQ ID NO: 1752840 - RNA, 19 nt, Homo sapiens
  misc_RNA (1)...(19): siRNA sense strand
gagcaaaguuuccucaaug

SEQ ID NO: 1752841 - RNA, 19 nt, Homo sapiens
  misc_RNA (1)...(19): siRNA sense strand
ggagagguuucguagcuua

SEQ ID NO: 1752842 - RNA, 19 nt, Homo sapiens
  misc_RNA (1)...(19): siRNA sense strand
gaaagaggaggaagccaua

SEQ ID NO: 1752843 - RNA, 19 nt, Homo sapiens
  misc_RNA (1)...(19): siRNA sense strand
ccaguguacuuuaccaaua

SEQ ID NO: 1752844 - RNA, 19 nt, Homo sapiens
  misc_RNA (1)...(19): siRNA sense strand
aaacauaagccaagcaauu

SEQ ID NO: 1752845 - RNA, 19 nt, Homo sapiens
  misc_RNA (1)...(19): siRNA sense strand
ggaagaccaguguacuuua

SEQ ID NO: 1752846 - RNA, 19 nt, Homo sapiens
  misc_RNA (1)...(19): siRNA sense strand
cgacagcguucuucagaga

SEQ ID NO: 1752847 - RNA, 19 nt, Homo sapiens
  misc_RNA (1)...(19): siRNA sense strand
gaagaccaguguacuuuac

SEQ ID NO: 1752848 - RNA, 19 nt, Homo sapiens
  misc_RNA (1)...(19): siRNA sense strand
ugacaaaugagcaaaguuu

SEQ ID NO: 1752849 - RNA, 19 nt, Homo sapiens
  misc_RNA (1)...(19): siRNA sense strand
gaauccaccugcaguuaug

SEQ ID NO: 1752850 - RNA, 19 nt, Homo sapiens
  misc_RNA (1)...(19): siRNA sense strand
gagaauccaccugcaguua

SEQ ID NO: 1752851 - RNA, 19 nt, Homo sapiens
  misc_RNA (1)...(19): siRNA sense strand
caacagugggcauugauuu

SEQ ID NO: 1752852 - RNA, 19 nt, Homo sapiens
  misc_RNA (1)...(19): siRNA sense strand
ccauagcacucgcagagaa

SEQ ID NO: 1752853 - RNA, 19 nt, Homo sapiens
  misc_RNA (1)...(19): siRNA sense strand
gggaagaccaguguacuuu

SEQ ID NO: 1752854 - RNA, 19 nt, Homo sapiens
  misc_RNA (1)...(19): siRNA sense strand
ccaaauuuaucacaacagu

SEQ ID NO: 1752855 - RNA, 19 nt, Homo sapiens
  misc_RNA (1)...(19): siRNA sense strand
ucacaacagugggcauuga

SEQ ID NO: 1752856 - RNA, 19 nt, Homo sapiens
  misc_RNA (1)...(19): siRNA sense strand
ucagagaugcuauggguuu

SEQ ID NO: 1752857 - RNA, 19 nt, Homo sapiens
  misc_RNA (1)...(19): siRNA sense strand
caaaguuuccucaauguca

SEQ ID NO: 1752858 - RNA, 19 nt, Homo sapiens
  misc_RNA (1)...(19): siRNA sense strand
cuacggaucaguuaaguga

SEQ ID NO: 1752859 - RNA, 19 nt, Homo sapiens
  misc_RNA (1)...(19): siRNA sense strand
gauaaugaagcgaauggaa

SEQ ID NO: 1752860 - RNA, 19 nt, Homo sapiens
  misc_RNA (1)...(19): siRNA sense strand
gccaaugggacaaacauaa

SEQ ID NO: 1752861 - RNA, 19 nt, Homo sapiens
  misc_RNA (1)...(19): siRNA sense strand
ugauggagauuaugauuac

SEQ ID NO: 1752862 - RNA, 19 nt, Homo sapiens
  misc_RNA (1)...(19): siRNA sense strand
caguguacuuuaccaauau

SEQ ID NO: 1752863 - RNA, 19 nt, Homo sapiens
  misc_RNA (1)...(19): siRNA sense strand
ggaguggugcgaucaaaug

SEQ ID NO: 1752864 - RNA, 19 nt, Homo sapiens
  misc_RNA (1)...(19): siRNA sense strand
gauauagugcuguguggaa

SEQ ID NO: 1752865 - RNA, 19 nt, Homo sapiens
  misc_RNA (1)...(19): siRNA sense strand
caggagagguuucguagcu

SEQ ID NO: 1752866 - RNA, 19 nt, Homo sapiens
  misc_RNA (1)...(19): siRNA sense strand
gauaagccagcuacagaug

SEQ ID NO: 1752867 - RNA, 19 nt, Homo sapiens
  misc_RNA (1)...(19): siRNA sense strand
ggaauccccuacuuugaaa

SEQ ID NO: 1752868 - RNA, 19 nt, Homo sapiens
  misc_RNA (1)...(19): siRNA sense strand
gcagagaaauauggaaucc

SEQ ID NO: 1752869 - RNA, 19 nt, Homo sapiens
  misc_RNA (1)...(19): siRNA sense strand
ggaccagagaguagugaaa

SEQ ID NO: 1752870 - RNA, 19 nt, Homo sapiens
  misc_RNA (1)...(19): siRNA sense strand
gggcaggagagguuucgua

SEQ ID NO: 1752871 - RNA, 19 nt, Homo sapiens
  misc_RNA (1)...(19): siRNA sense strand
gaaacuagugcugccaaug

SEQ ID NO: 1752872 - RNA, 19 nt, Homo sapiens
  misc_RNA (1)...(19): siRNA sense strand
cagcagggcaggagagguu

SEQ ID NO: 1752873 - RNA, 19 nt, Homo sapiens
  misc_RNA (1)...(19): siRNA sense strand
caaauggucaugccucuac

SEQ ID NO: 1752874 - RNA, 19 nt, Homo sapiens
  misc_RNA (1)...(19): siRNA sense strand
ccaauauacagaugguaaa

SEQ ID NO: 1752875 - RNA, 19 nt, Homo sapiens
  misc_RNA (1)...(19): siRNA sense strand
cuucuggaccugauaauga

SEQ ID NO: 1752876 - RNA, 19 nt, Homo sapiens
  misc_RNA (1)...(19): siRNA sense strand
ggauaagccagcuacagau

SEQ ID NO: 1752877 - RNA, 19 nt, Homo sapiens
  misc_RNA (1)...(19): siRNA sense strand
gaaggaguggugcgaucaa

SEQ ID NO: 1752878 - RNA, 19 nt, Homo sapiens
  misc_RNA (1)...(19): siRNA sense strand
uaagccagcuacagaugca

SEQ ID NO: 1752879 - RNA, 19 nt, Homo sapiens
  misc_RNA (1)...(19): siRNA sense strand
uggauaagccagcuacaga

SEQ ID NO: 1752880 - RNA, 19 nt, Homo sapiens
  misc_RNA (1)...(19): siRNA sense strand
cugauggagauuaugauua

SEQ ID NO: 1752881 - RNA, 19 nt, Homo sapiens
  misc_RNA (1)...(19): siRNA sense strand
gagagguuucguagcuuaa

SEQ ID NO: 1752882 - RNA, 19 nt, Homo sapiens
  misc_RNA (1)...(19): siRNA sense strand
gaucaguuaagugaagaaa

SEQ ID NO: 1752883 - RNA, 19 nt, Homo sapiens
  misc_RNA (1)...(19): siRNA sense strand
ggaacgguguguggacaag

SEQ ID NO: 1752884 - RNA, 19 nt, Homo sapiens
  misc_RNA (1)...(19): siRNA sense strand
aaacuagugcugccaaugg

SEQ ID NO: 1752885 - RNA, 19 nt, Homo sapiens
  misc_RNA (1)...(19): siRNA sense strand
aacauaagccaagcaauug

SEQ ID NO: 1752886 - RNA, 19 nt, Homo sapiens
  misc_RNA (1)...(19): siRNA sense strand
gacaaaugagcaaaguuuc

SEQ ID NO: 1752887 - RNA, 19 nt, Homo sapiens
  misc_RNA (1)...(19): siRNA sense strand
ccaaugggacaaacauaag

SEQ ID NO: 1752888 - RNA, 19 nt, Homo sapiens
  misc_RNA (1)...(19): siRNA sense strand
ugaaacuagugcugccaau

SEQ ID NO: 1752889 - RNA, 19 nt, Homo sapiens
  misc_RNA (1)...(19): siRNA sense strand
gcaaaguuuccucaauguc

SEQ ID NO: 1752890 - RNA, 19 nt, Homo sapiens
  misc_RNA (1)...(19): siRNA sense strand
gaccagagaguagugaaag

SEQ ID NO: 1752891 - RNA, 19 nt, Homo sapiens
  misc_RNA (1)...(19): siRNA sense strand
gaucugacaaaugagcaaa

SEQ ID NO: 1752892 - RNA, 19 nt, Homo sapiens
  misc_RNA (1)...(19): siRNA sense strand
ucaguuaagugaagaaaag

SEQ ID NO: 1752893 - RNA, 19 nt, Homo sapiens
  misc_RNA (1)...(19): siRNA sense strand
caaugucagaaacuggaua

SEQ ID NO: 1752894 - RNA, 19 nt, Homo sapiens
  misc_RNA (1)...(19): siRNA sense strand
cauagcacucgcagagaaa

SEQ ID NO: 1752895 - RNA, 19 nt, Homo sapiens
  misc_RNA (1)...(19): siRNA sense strand
acagcguucuucagagaug

SEQ ID NO: 1752896 - RNA, 19 nt, Homo sapiens
  misc_RNA (1)...(19): siRNA sense strand
agaauccaccugcaguuau

SEQ ID NO: 1752897 - RNA, 19 nt, Homo sapiens
  misc_RNA (1)...(19): siRNA sense strand
agcaaaguuuccucaaugu

SEQ ID NO: 1752898 - RNA, 19 nt, Homo sapiens
  misc_RNA (1)...(19): siRNA sense strand
aaggaguggugcgaucaaa

SEQ ID NO: 1752899 - RNA, 19 nt, Homo sapiens
  misc_RNA (1)...(19): siRNA sense strand
acaaacauaagccaagcaa

SEQ ID NO: 1752900 - RNA, 19 nt, Homo sapiens
  misc_RNA (1)...(19): siRNA sense strand
gcacucgcagagaaauaug

SEQ ID NO: 1752901 - RNA, 19 nt, Homo sapiens
  misc_RNA (1)...(19): siRNA sense strand
auauagugcuguguggaaa

SEQ ID NO: 1752902 - RNA, 19 nt, Homo sapiens
  misc_RNA (1)...(19): siRNA sense strand
guacuuuaccaauauacag

SEQ ID NO: 1752903 - RNA, 19 nt, Homo sapiens
  misc_RNA (1)...(19): siRNA sense strand
uagcacucgcagagaaaua

SEQ ID NO: 1752904 - RNA, 19 nt, Homo sapiens
  misc_RNA (1)...(19): siRNA sense strand
guagggaagaccaguguac

SEQ ID NO: 1752905 - RNA, 19 nt, Homo sapiens
  misc_RNA (1)...(19): siRNA sense strand
ggaggaccagagaguagug

SEQ ID NO: 1752906 - RNA, 19 nt, Homo sapiens
  misc_RNA (1)...(19): siRNA sense strand
gagcaaaguuuccucaaug

SEQ ID NO: 1752907 - RNA, 19 nt, Homo sapiens
  misc_RNA (1)...(19): siRNA sense strand
ggagagguuucguagcuua

SEQ ID NO: 1752908 - RNA, 19 nt, Homo sapiens
  misc_RNA (1)...(19): siRNA sense strand
gaaagaggaggaagccaua

SEQ ID NO: 1752909 - RNA, 19 nt, Homo sapiens
  misc_RNA (1)...(19): siRNA sense strand
ccaguguacuuuaccaaua

SEQ ID NO: 1752910 - RNA, 19 nt, Homo sapiens
  misc_RNA (1)...(19): siRNA sense strand
aaacauaagccaagcaauu

SEQ ID NO: 1752911 - RNA, 19 nt, Homo sapiens
  misc_RNA (1)...(19): siRNA sense strand
ggaagaccaguguacuuua

SEQ ID NO: 1752912 - RNA, 19 nt, Homo sapiens
  misc_RNA (1)...(19): siRNA sense strand
cgacagcguucuucagaga

SEQ ID NO: 1752913 - RNA, 19 nt, Homo sapiens
  misc_RNA (1)...(19): siRNA sense strand
gaagaccaguguacuuuac

SEQ ID NO: 1752914 - RNA, 19 nt, Homo sapiens
  misc_RNA (1)...(19): siRNA sense strand
ugacaaaugagcaaaguuu

SEQ ID NO: 1752915 - RNA, 19 nt, Homo sapiens
  misc_RNA (1)...(19): siRNA sense strand
gaauccaccugcaguuaug

SEQ ID NO: 1752916 - RNA, 19 nt, Homo sapiens
  misc_RNA (1)...(19): siRNA sense strand
gagaauccaccugcaguua

SEQ ID NO: 1752917 - RNA, 19 nt, Homo sapiens
  misc_RNA (1)...(19): siRNA sense strand
caacagugggcauugauuu

SEQ ID NO: 1752918 - RNA, 19 nt, Homo sapiens
  misc_RNA (1)...(19): siRNA sense strand
ccauagcacucgcagagaa

SEQ ID NO: 1752919 - RNA, 19 nt, Homo sapiens
  misc_RNA (1)...(19): siRNA sense strand
gggaagaccaguguacuuu

SEQ ID NO: 1752920 - RNA, 19 nt, Homo sapiens
  misc_RNA (1)...(19): siRNA sense strand
ccaaauuuaucacaacagu

SEQ ID NO: 1752921 - RNA, 19 nt, Homo sapiens
  misc_RNA (1)...(19): siRNA sense strand
ucacaacagugggcauuga

SEQ ID NO: 1752922 - RNA, 19 nt, Homo sapiens
  misc_RNA (1)...(19): siRNA sense strand
ucagagaugcuauggguuu

SEQ ID NO: 1752923 - RNA, 19 nt, Homo sapiens
  misc_RNA (1)...(19): siRNA sense strand
caaaguuuccucaauguca

SEQ ID NO: 1752924 - RNA, 19 nt, Homo sapiens
  misc_RNA (1)...(19): siRNA sense strand
cuacggaucaguuaaguga

SEQ ID NO: 1752925 - RNA, 19 nt, Homo sapiens
  misc_RNA (1)...(19): siRNA sense strand
gauaaugaagcgaauggaa

SEQ ID NO: 1752926 - RNA, 19 nt, Homo sapiens
  misc_RNA (1)...(19): siRNA sense strand
gccaaugggacaaacauaa

SEQ ID NO: 1752927 - RNA, 19 nt, Homo sapiens
  misc_RNA (1)...(19): siRNA sense strand
ugauggagauuaugauuac

SEQ ID NO: 1752928 - RNA, 19 nt, Homo sapiens
  misc_RNA (1)...(19): siRNA sense strand
caguguacuuuaccaauau

SEQ ID NO: 1752929 - RNA, 19 nt, Homo sapiens
  misc_RNA (1)...(19): siRNA sense strand
ggaguggugcgaucaaaug

SEQ ID NO: 1752930 - RNA, 19 nt, Homo sapiens
  misc_RNA (1)...(19): siRNA sense strand
gauauagugcuguguggaa

SEQ ID NO: 1752931 - RNA, 19 nt, Homo sapiens
  misc_RNA (1)...(19): siRNA sense strand
caggagagguuucguagcu

SEQ ID NO: 1752932 - RNA, 19 nt, Homo sapiens
  misc_RNA (1)...(19): siRNA sense strand
gauaagccagcuacagaug

SEQ ID NO: 1752933 - RNA, 19 nt, Homo sapiens
  misc_RNA (1)...(19): siRNA sense strand
ggaauccccuacuuugaaa

SEQ ID NO: 1752934 - RNA, 19 nt, Homo sapiens
  misc_RNA (1)...(19): siRNA sense strand
gcagagaaauauggaaucc

SEQ ID NO: 1752935 - RNA, 19 nt, Homo sapiens
  misc_RNA (1)...(19): siRNA sense strand
ggaccagagaguagugaaa

SEQ ID NO: 1752936 - RNA, 19 nt, Homo sapiens
  misc_RNA (1)...(19): siRNA sense strand
gggcaggagagguuucgua

SEQ ID NO: 1752937 - RNA, 19 nt, Homo sapiens
  misc_RNA (1)...(19): siRNA sense strand
gaaacuagugcugccaaug

SEQ ID NO: 1752938 - RNA, 19 nt, Homo sapiens
  misc_RNA (1)...(19): siRNA sense strand
cagcagggcaggagagguu

SEQ ID NO: 1752939 - RNA, 19 nt, Homo sapiens
  misc_RNA (1)...(19): siRNA sense strand
caaauggucaugccucuac

SEQ ID NO: 1752940 - RNA, 19 nt, Homo sapiens
  misc_RNA (1)...(19): siRNA sense strand
ccaauauacagaugguaaa

SEQ ID NO: 1752941 - RNA, 19 nt, Homo sapiens
  misc_RNA (1)...(19): siRNA sense strand
cuucuggaccugauaauga

SEQ ID NO: 1752942 - RNA, 19 nt, Homo sapiens
  misc_RNA (1)...(19): siRNA sense strand
ggauaagccagcuacagau

SEQ ID NO: 1752943 - RNA, 19 nt, Homo sapiens
  misc_RNA (1)...(19): siRNA sense strand
gaaggaguggugcgaucaa

SEQ ID NO: 1752944 - RNA, 19 nt, Homo sapiens
  misc_RNA (1)...(19): siRNA sense strand
uaagccagcuacagaugca

SEQ ID NO: 1752945 - RNA, 19 nt, Homo sapiens
  misc_RNA (1)...(19): siRNA sense strand
uggauaagccagcuacaga

SEQ ID NO: 1752946 - RNA, 19 nt, Homo sapiens
  misc_RNA (1)...(19): siRNA sense strand
cugauggagauuaugauua

SEQ ID NO: 1752947 - RNA, 19 nt, Homo sapiens
  misc_RNA (1)...(19): siRNA sense strand
gagagguuucguagcuuaa

SEQ ID NO: 1752948 - RNA, 19 nt, Homo sapiens
  misc_RNA (1)...(19): siRNA sense strand
gaucaguuaagugaagaaa

SEQ ID NO: 1752949 - RNA, 19 nt, Homo sapiens
  misc_RNA (1)...(19): siRNA sense strand
ggaacgguguguggacaag

SEQ ID NO: 1752950 - RNA, 19 nt, Homo sapiens
  misc_RNA (1)...(19): siRNA sense strand
aaacuagugcugccaaugg

SEQ ID NO: 1752951 - RNA, 19 nt, Homo sapiens
  misc_RNA (1)...(19): siRNA sense strand
aacauaagccaagcaauug

SEQ ID NO: 1752952 - RNA, 19 nt, Homo sapiens
  misc_RNA (1)...(19): siRNA sense strand
gacaaaugagcaaaguuuc

SEQ ID NO: 1752953 - RNA, 19 nt, Homo sapiens
  misc_RNA (1)...(19): siRNA sense strand
ccaaugggacaaacauaag

SEQ ID NO: 1752954 - RNA, 19 nt, Homo sapiens
  misc_RNA (1)...(19): siRNA sense strand
ugaaacuagugcugccaau

SEQ ID NO: 1752955 - RNA, 19 nt, Homo sapiens
  misc_RNA (1)...(19): siRNA sense strand
gcaaaguuuccucaauguc

SEQ ID NO: 1752956 - RNA, 19 nt, Homo sapiens
  misc_RNA (1)...(19): siRNA sense strand
gaccagagaguagugaaag

SEQ ID NO: 1752957 - RNA, 19 nt, Homo sapiens
  misc_RNA (1)...(19): siRNA sense strand
gaucugacaaaugagcaaa

SEQ ID NO: 1752958 - RNA, 19 nt, Homo sapiens
  misc_RNA (1)...(19): siRNA sense strand
ucaguuaagugaagaaaag

SEQ ID NO: 1752959 - RNA, 19 nt, Homo sapiens
  misc_RNA (1)...(19): siRNA sense strand
caaugucagaaacuggaua

SEQ ID NO: 1752960 - RNA, 19 nt, Homo sapiens
  misc_RNA (1)...(19): siRNA sense strand
cauagcacucgcagagaaa

SEQ ID NO: 1752961 - RNA, 19 nt, Homo sapiens
  misc_RNA (1)...(19): siRNA sense strand
acagcguucuucagagaug

SEQ ID NO: 1752962 - RNA, 19 nt, Homo sapiens
  misc_RNA (1)...(19): siRNA sense strand
agaauccaccugcaguuau

SEQ ID NO: 1752963 - RNA, 19 nt, Homo sapiens
  misc_RNA (1)...(19): siRNA sense strand
agcaaaguuuccucaaugu

SEQ ID NO: 1752964 - RNA, 19 nt, Homo sapiens
  misc_RNA (1)...(19): siRNA sense strand
aaggaguggugcgaucaaa

SEQ ID NO: 1752965 - RNA, 19 nt, Homo sapiens
  misc_RNA (1)...(19): siRNA sense strand
acaaacauaagccaagcaa

SEQ ID NO: 1752966 - RNA, 19 nt, Homo sapiens
  misc_RNA (1)...(19): siRNA sense strand
gcacucgcagagaaauaug

SEQ ID NO: 1752967 - RNA, 19 nt, Homo sapiens
  misc_RNA (1)...(19): siRNA sense strand
auauagugcuguguggaaa

SEQ ID NO: 1752968 - RNA, 19 nt, Homo sapiens
  misc_RNA (1)...(19): siRNA sense strand
guacuuuaccaauauacag

SEQ ID NO: 1752969 - RNA, 19 nt, Homo sapiens
  misc_RNA (1)...(19): siRNA sense strand
uagcacucgcagagaaaua

SEQ ID NO: 1752970 - RNA, 19 nt, Homo sapiens
  misc_RNA (1)...(19): siRNA sense strand
guagggaagaccaguguac

SEQ ID NO: 1752971 - RNA, 19 nt, Homo sapiens
  misc_RNA (1)...(19): siRNA sense strand
ggaggaccagagaguagug

SEQ ID NO: 1752972 - RNA, 19 nt, Homo sapiens
  misc_RNA (1)...(19): siRNA sense strand
gagcaaaguuuccucaaug

SEQ ID NO: 1752973 - RNA, 19 nt, Homo sapiens
  misc_RNA (1)...(19): siRNA sense strand
ggagagguuucguagcuua

SEQ ID NO: 1752974 - RNA, 19 nt, Homo sapiens
  misc_RNA (1)...(19): siRNA sense strand
gaaagaggaggaagccaua

SEQ ID NO: 1752975 - RNA, 19 nt, Homo sapiens
  misc_RNA (1)...(19): siRNA sense strand
ccaguguacuuuaccaaua

SEQ ID NO: 1752976 - RNA, 19 nt, Homo sapiens
  misc_RNA (1)...(19): siRNA sense strand
aaacauaagccaagcaauu

SEQ ID NO: 1752977 - RNA, 19 nt, Homo sapiens
  misc_RNA (1)...(19): siRNA sense strand
ggaagaccaguguacuuua

SEQ ID NO: 1752978 - RNA, 19 nt, Homo sapiens
  misc_RNA (1)...(19): siRNA sense strand
cgacagcguucuucagaga

SEQ ID NO: 1752979 - RNA, 19 nt, Homo sapiens
  misc_RNA (1)...(19): siRNA sense strand
gaagaccaguguacuuuac

SEQ ID NO: 1752980 - RNA, 19 nt, Homo sapiens
  misc_RNA (1)...(19): siRNA sense strand
ugacaaaugagcaaaguuu

SEQ ID NO: 1752981 - RNA, 19 nt, Homo sapiens
  misc_RNA (1)...(19): siRNA sense strand
gaauccaccugcaguuaug

SEQ ID NO: 1752982 - RNA, 19 nt, Homo sapiens
  misc_RNA (1)...(19): siRNA sense strand
gagaauccaccugcaguua

SEQ ID NO: 1752983 - RNA, 19 nt, Homo sapiens
  misc_RNA (1)...(19): siRNA sense strand
caacagugggcauugauuu

SEQ ID NO: 1752984 - RNA, 19 nt, Homo sapiens
  misc_RNA (1)...(19): siRNA sense strand
ccauagcacucgcagagaa

SEQ ID NO: 1752985 - RNA, 19 nt, Homo sapiens
  misc_RNA (1)...(19): siRNA sense strand
gggaagaccaguguacuuu

SEQ ID NO: 1752986 - RNA, 19 nt, Homo sapiens
  misc_RNA (1)...(19): siRNA sense strand
ccaaauuuaucacaacagu

SEQ ID NO: 1752987 - RNA, 19 nt, Homo sapiens
  misc_RNA (1)...(19): siRNA sense strand
ucacaacagugggcauuga

SEQ ID NO: 1752988 - RNA, 19 nt, Homo sapiens
  misc_RNA (1)...(19): siRNA sense strand
ucagagaugcuauggguuu

SEQ ID NO: 1752989 - RNA, 19 nt, Homo sapiens
  misc_RNA (1)...(19): siRNA sense strand
caaaguuuccucaauguca

SEQ ID NO: 1752990 - RNA, 19 nt, Homo sapiens
  misc_RNA (1)...(19): siRNA sense strand
cuacggaucaguuaaguga

SEQ ID NO: 1752991 - RNA, 19 nt, Homo sapiens
  misc_RNA (1)...(19): siRNA sense strand
gauaaugaagcgaauggaa

SEQ ID NO: 1752992 - RNA, 19 nt, Homo sapiens
  misc_RNA (1)...(19): siRNA sense strand
gccaaugggacaaacauaa

SEQ ID NO: 1752993 - RNA, 19 nt, Homo sapiens
  misc_RNA (1)...(19): siRNA sense strand
ugauggagauuaugauuac

SEQ ID NO: 1752994 - RNA, 19 nt, Homo sapiens
  misc_RNA (1)...(19): siRNA sense strand
caguguacuuuaccaauau

SEQ ID NO: 1752995 - RNA, 19 nt, Homo sapiens
  misc_RNA (1)...(19): siRNA sense strand
ggaguggugcgaucaaaug

SEQ ID NO: 1752996 - RNA, 19 nt, Homo sapiens
  misc_RNA (1)...(19): siRNA sense strand
gauauagugcuguguggaa

SEQ ID NO: 1752997 - RNA, 19 nt, Homo sapiens
  misc_RNA (1)...(19): siRNA sense strand
caggagagguuucguagcu

SEQ ID NO: 1752998 - RNA, 19 nt, Homo sapiens
  misc_RNA (1)...(19): siRNA sense strand
gauaagccagcuacagaug

SEQ ID NO: 1752999 - RNA, 19 nt, Homo sapiens
  misc_RNA (1)...(19): siRNA sense strand
ggaauccccuacuuugaaa

SEQ ID NO: 1753000 - RNA, 19 nt, Homo sapiens
  misc_RNA (1)...(19): siRNA sense strand
gcagagaaauauggaaucc

SEQ ID NO: 1753001 - RNA, 19 nt, Homo sapiens
  misc_RNA (1)...(19): siRNA sense strand
ggaccagagaguagugaaa

SEQ ID NO: 1753002 - RNA, 19 nt, Homo sapiens
  misc_RNA (1)...(19): siRNA sense strand
gggcaggagagguuucgua

SEQ ID NO: 1753003 - RNA, 19 nt, Homo sapiens
  misc_RNA (1)...(19): siRNA sense strand
gaaacuagugcugccaaug

SEQ ID NO: 1753004 - RNA, 19 nt, Homo sapiens
  misc_RNA (1)...(19): siRNA sense strand
cagcagggcaggagagguu

SEQ ID NO: 1753005 - RNA, 19 nt, Homo sapiens
  misc_RNA (1)...(19): siRNA sense strand
caaauggucaugccucuac

SEQ ID NO: 1753006 - RNA, 19 nt, Homo sapiens
  misc_RNA (1)...(19): siRNA sense strand
ccaauauacagaugguaaa

SEQ ID NO: 1753007 - RNA, 19 nt, Homo sapiens
  misc_RNA (1)...(19): siRNA sense strand
cuucuggaccugauaauga

SEQ ID NO: 1753008 - RNA, 19 nt, Homo sapiens
  misc_RNA (1)...(19): siRNA sense strand
ggauaagccagcuacagau

SEQ ID NO: 1753009 - RNA, 19 nt, Homo sapiens
  misc_RNA (1)...(19): siRNA sense strand
gaaggaguggugcgaucaa

SEQ ID NO: 1753010 - RNA, 19 nt, Homo sapiens
  misc_RNA (1)...(19): siRNA sense strand
uaagccagcuacagaugca

SEQ ID NO: 1753011 - RNA, 19 nt, Homo sapiens
  misc_RNA (1)...(19): siRNA sense strand
uggauaagccagcuacaga

SEQ ID NO: 1753012 - RNA, 19 nt, Homo sapiens
  misc_RNA (1)...(19): siRNA sense strand
cugauggagauuaugauua

SEQ ID NO: 1753013 - RNA, 19 nt, Homo sapiens
  misc_RNA (1)...(19): siRNA sense strand
gagagguuucguagcuuaa

SEQ ID NO: 1753014 - RNA, 19 nt, Homo sapiens
  misc_RNA (1)...(19): siRNA sense strand
gaucaguuaagugaagaaa

SEQ ID NO: 1753015 - RNA, 19 nt, Homo sapiens
  misc_RNA (1)...(19): siRNA sense strand
ggaacgguguguggacaag

SEQ ID NO: 1753016 - RNA, 19 nt, Homo sapiens
  misc_RNA (1)...(19): siRNA sense strand
aaacuagugcugccaaugg

SEQ ID NO: 1753017 - RNA, 19 nt, Homo sapiens
  misc_RNA (1)...(19): siRNA sense strand
aacauaagccaagcaauug

SEQ ID NO: 1753018 - RNA, 19 nt, Homo sapiens
  misc_RNA (1)...(19): siRNA sense strand
gacaaaugagcaaaguuuc

SEQ ID NO: 1753019 - RNA, 19 nt, Homo sapiens
  misc_RNA (1)...(19): siRNA sense strand
ccaaugggacaaacauaag

SEQ ID NO: 1753020 - RNA, 19 nt, Homo sapiens
  misc_RNA (1)...(19): siRNA sense strand
ugaaacuagugcugccaau

SEQ ID NO: 1753021 - RNA, 19 nt, Homo sapiens
  misc_RNA (1)...(19): siRNA sense strand
gcaaaguuuccucaauguc

SEQ ID NO: 1753022 - RNA, 19 nt, Homo sapiens
  misc_RNA (1)...(19): siRNA sense strand
gaccagagaguagugaaag

SEQ ID NO: 1753023 - RNA, 19 nt, Homo sapiens
  misc_RNA (1)...(19): siRNA sense strand
gaucugacaaaugagcaaa

SEQ ID NO: 1753024 - RNA, 19 nt, Homo sapiens
  misc_RNA (1)...(19): siRNA sense strand
ucaguuaagugaagaaaag

SEQ ID NO: 1753025 - RNA, 19 nt, Homo sapiens
  misc_RNA (1)...(19): siRNA sense strand
caaugucagaaacuggaua

SEQ ID NO: 1753026 - RNA, 19 nt, Homo sapiens
  misc_RNA (1)...(19): siRNA sense strand
cauagcacucgcagagaaa

SEQ ID NO: 1753027 - RNA, 19 nt, Homo sapiens
  misc_RNA (1)...(19): siRNA sense strand
acagcguucuucagagaug

SEQ ID NO: 1753028 - RNA, 19 nt, Homo sapiens
  misc_RNA (1)...(19): siRNA sense strand
agaauccaccugcaguuau

SEQ ID NO: 1753029 - RNA, 19 nt, Homo sapiens
  misc_RNA (1)...(19): siRNA sense strand
agcaaaguuuccucaaugu

SEQ ID NO: 1753030 - RNA, 19 nt, Homo sapiens
  misc_RNA (1)...(19): siRNA sense strand
aaggaguggugcgaucaaa

SEQ ID NO: 1753031 - RNA, 19 nt, Homo sapiens
  misc_RNA (1)...(19): siRNA sense strand
acaaacauaagccaagcaa

SEQ ID NO: 1753032 - RNA, 19 nt, Homo sapiens
  misc_RNA (1)...(19): siRNA sense strand
gcacucgcagagaaauaug

SEQ ID NO: 1753033 - RNA, 19 nt, Homo sapiens
  misc_RNA (1)...(19): siRNA sense strand
auauagugcuguguggaaa

SEQ ID NO: 1753034 - RNA, 19 nt, Homo sapiens
  misc_RNA (1)...(19): siRNA sense strand
guacuuuaccaauauacag

SEQ ID NO: 1753035 - RNA, 19 nt, Homo sapiens
  misc_RNA (1)...(19): siRNA sense strand
uagcacucgcagagaaaua

SEQ ID NO: 1753036 - RNA, 19 nt, Homo sapiens
  misc_RNA (1)...(19): siRNA sense strand
guagggaagaccaguguac

SEQ ID NO: 1753037 - RNA, 19 nt, Homo sapiens
  misc_RNA (1)...(19): siRNA sense strand
ggaggaccagagaguagug

SEQ ID NO: 1753038 - RNA, 19 nt, Homo sapiens
  misc_RNA (1)...(19): siRNA sense strand
gagcaaaguuuccucaaug

SEQ ID NO: 1753039 - RNA, 19 nt, Homo sapiens
  misc_RNA (1)...(19): siRNA sense strand
ggagagguuucguagcuua

SEQ ID NO: 1753040 - RNA, 19 nt, Homo sapiens
  misc_RNA (1)...(19): siRNA sense strand
gaaagaggaggaagccaua

SEQ ID NO: 1753041 - RNA, 19 nt, Homo sapiens
  misc_RNA (1)...(19): siRNA sense strand
ccaguguacuuuaccaaua

SEQ ID NO: 1753042 - RNA, 19 nt, Homo sapiens
  misc_RNA (1)...(19): siRNA sense strand
aaacauaagccaagcaauu

SEQ ID NO: 1753043 - RNA, 19 nt, Homo sapiens
  misc_RNA (1)...(19): siRNA sense strand
ggaagaccaguguacuuua

SEQ ID NO: 1753044 - RNA, 19 nt, Homo sapiens
  misc_RNA (1)...(19): siRNA sense strand
cgacagcguucuucagaga

SEQ ID NO: 1753045 - RNA, 19 nt, Homo sapiens
  misc_RNA (1)...(19): siRNA sense strand
gaagaccaguguacuuuac

SEQ ID NO: 1753046 - RNA, 19 nt, Homo sapiens
  misc_RNA (1)...(19): siRNA sense strand
ugacaaaugagcaaaguuu

SEQ ID NO: 1753047 - RNA, 19 nt, Homo sapiens
  misc_RNA (1)...(19): siRNA sense strand
gaauccaccugcaguuaug

SEQ ID NO: 1753048 - RNA, 19 nt, Homo sapiens
  misc_RNA (1)...(19): siRNA sense strand
gagaauccaccugcaguua

SEQ ID NO: 1753049 - RNA, 19 nt, Homo sapiens
  misc_RNA (1)...(19): siRNA sense strand
caacagugggcauugauuu

SEQ ID NO: 1753050 - RNA, 19 nt, Homo sapiens
  misc_RNA (1)...(19): siRNA sense strand
ccauagcacucgcagagaa

SEQ ID NO: 1753051 - RNA, 19 nt, Homo sapiens
  misc_RNA (1)...(19): siRNA sense strand
gggaagaccaguguacuuu

SEQ ID NO: 1753052 - RNA, 19 nt, Homo sapiens
  misc_RNA (1)...(19): siRNA sense strand
ccaaauuuaucacaacagu

SEQ ID NO: 1753053 - RNA, 19 nt, Homo sapiens
  misc_RNA (1)...(19): siRNA sense strand
ucacaacagugggcauuga

SEQ ID NO: 1753054 - RNA, 19 nt, Homo sapiens
  misc_RNA (1)...(19): siRNA sense strand
ucagagaugcuauggguuu

SEQ ID NO: 1753055 - RNA, 19 nt, Homo sapiens
  misc_RNA (1)...(19): siRNA sense strand
caaaguuuccucaauguca

SEQ ID NO: 1753056 - RNA, 19 nt, Homo sapiens
  misc_RNA (1)...(19): siRNA sense strand
cuacggaucaguuaaguga

SEQ ID NO: 1753057 - RNA, 19 nt, Homo sapiens
  misc_RNA (1)...(19): siRNA sense strand
gauaaugaagcgaauggaa

SEQ ID NO: 1753058 - RNA, 19 nt, Homo sapiens
  misc_RNA (1)...(19): siRNA sense strand
gccaaugggacaaacauaa

SEQ ID NO: 1753059 - RNA, 19 nt, Homo sapiens
  misc_RNA (1)...(19): siRNA sense strand
ugauggagauuaugauuac

SEQ ID NO: 1753060 - RNA, 19 nt, Homo sapiens
  misc_RNA (1)...(19): siRNA sense strand
caguguacuuuaccaauau

SEQ ID NO: 1753061 - RNA, 19 nt, Homo sapiens
  misc_RNA (1)...(19): siRNA sense strand
ggaguggugcgaucaaaug

SEQ ID NO: 1753062 - RNA, 19 nt, Homo sapiens
  misc_RNA (1)...(19): siRNA sense strand
gauauagugcuguguggaa

SEQ ID NO: 1753063 - RNA, 19 nt, Homo sapiens
  misc_RNA (1)...(19): siRNA sense strand
caggagagguuucguagcu

SEQ ID NO: 1753064 - RNA, 19 nt, Homo sapiens
  misc_RNA (1)...(19): siRNA sense strand
gauaagccagcuacagaug

SEQ ID NO: 1753065 - RNA, 19 nt, Homo sapiens
  misc_RNA (1)...(19): siRNA sense strand
ggaauccccuacuuugaaa

SEQ ID NO: 1753066 - RNA, 19 nt, Homo sapiens
  misc_RNA (1)...(19): siRNA sense strand
gcagagaaauauggaaucc

SEQ ID NO: 1753067 - RNA, 19 nt, Homo sapiens
  misc_RNA (1)...(19): siRNA sense strand
ggaccagagaguagugaaa

SEQ ID NO: 1753068 - RNA, 19 nt, Homo sapiens
  misc_RNA (1)...(19): siRNA sense strand
gggcaggagagguuucgua

SEQ ID NO: 1753069 - RNA, 19 nt, Homo sapiens
  misc_RNA (1)...(19): siRNA sense strand
gaaacuagugcugccaaug

SEQ ID NO: 1753070 - RNA, 19 nt, Homo sapiens
  misc_RNA (1)...(19): siRNA sense strand
cagcagggcaggagagguu

SEQ ID NO: 1753071 - RNA, 19 nt, Homo sapiens
  misc_RNA (1)...(19): siRNA sense strand
caaauggucaugccucuac

SEQ ID NO: 1753072 - RNA, 19 nt, Homo sapiens
  misc_RNA (1)...(19): siRNA sense strand
ccaauauacagaugguaaa

SEQ ID NO: 1753073 - RNA, 19 nt, Homo sapiens
  misc_RNA (1)...(19): siRNA sense strand
cuucuggaccugauaauga

SEQ ID NO: 1753074 - RNA, 19 nt, Homo sapiens
  misc_RNA (1)...(19): siRNA sense strand
ggauaagccagcuacagau

SEQ ID NO: 1753075 - RNA, 19 nt, Homo sapiens
  misc_RNA (1)...(19): siRNA sense strand
gaaggaguggugcgaucaa

SEQ ID NO: 1753076 - RNA, 19 nt, Homo sapiens
  misc_RNA (1)...(19): siRNA sense strand
uaagccagcuacagaugca

SEQ ID NO: 1753077 - RNA, 19 nt, Homo sapiens
  misc_RNA (1)...(19): siRNA sense strand
uggauaagccagcuacaga

SEQ ID NO: 1753078 - RNA, 19 nt, Homo sapiens
  misc_RNA (1)...(19): siRNA sense strand
cugauggagauuaugauua

SEQ ID NO: 1753079 - RNA, 19 nt, Homo sapiens
  misc_RNA (1)...(19): siRNA sense strand
gagagguuucguagcuuaa

SEQ ID NO: 1753080 - RNA, 19 nt, Homo sapiens
  misc_RNA (1)...(19): siRNA sense strand
gaucaguuaagugaagaaa

SEQ ID NO: 1753081 - RNA, 19 nt, Homo sapiens
  misc_RNA (1)...(19): siRNA sense strand
ggaacgguguguggacaag

SEQ ID NO: 1753082 - RNA, 19 nt, Homo sapiens
  misc_RNA (1)...(19): siRNA sense strand
aaacuagugcugccaaugg

SEQ ID NO: 1753083 - RNA, 19 nt, Homo sapiens
  misc_RNA (1)...(19): siRNA sense strand
aacauaagccaagcaauug

SEQ ID NO: 1753084 - RNA, 19 nt, Homo sapiens
  misc_RNA (1)...(19): siRNA sense strand
gacaaaugagcaaaguuuc

SEQ ID NO: 1753085 - RNA, 19 nt, Homo sapiens
  misc_RNA (1)...(19): siRNA sense strand
ccaaugggacaaacauaag

SEQ ID NO: 1753086 - RNA, 19 nt, Homo sapiens
  misc_RNA (1)...(19): siRNA sense strand
ugaaacuagugcugccaau

SEQ ID NO: 1753087 - RNA, 19 nt, Homo sapiens
  misc_RNA (1)...(19): siRNA sense strand
gcaaaguuuccucaauguc

SEQ ID NO: 1753088 - RNA, 19 nt, Homo sapiens
  misc_RNA (1)...(19): siRNA sense strand
gaccagagaguagugaaag

SEQ ID NO: 1753089 - RNA, 19 nt, Homo sapiens
  misc_RNA (1)...(19): siRNA sense strand
gaucugacaaaugagcaaa

SEQ ID NO: 1753090 - RNA, 19 nt, Homo sapiens
  misc_RNA (1)...(19): siRNA sense strand
ucaguuaagugaagaaaag

SEQ ID NO: 1753091 - RNA, 19 nt, Homo sapiens
  misc_RNA (1)...(19): siRNA sense strand
caaugucagaaacuggaua

SEQ ID NO: 1753092 - RNA, 19 nt, Homo sapiens
  misc_RNA (1)...(19): siRNA sense strand
cauagcacucgcagagaaa

SEQ ID NO: 1753093 - RNA, 19 nt, Homo sapiens
  misc_RNA (1)...(19): siRNA sense strand
acagcguucuucagagaug

SEQ ID NO: 1753094 - RNA, 19 nt, Homo sapiens
  misc_RNA (1)...(19): siRNA sense strand
agaauccaccugcaguuau

SEQ ID NO: 1753095 - RNA, 19 nt, Homo sapiens
  misc_RNA (1)...(19): siRNA sense strand
agcaaaguuuccucaaugu

SEQ ID NO: 1753096 - RNA, 19 nt, Homo sapiens
  misc_RNA (1)...(19): siRNA sense strand
aaggaguggugcgaucaaa

SEQ ID NO: 1753097 - RNA, 19 nt, Homo sapiens
  misc_RNA (1)...(19): siRNA sense strand
acaaacauaagccaagcaa

SEQ ID NO: 1753098 - RNA, 19 nt, Homo sapiens
  misc_RNA (1)...(19): siRNA sense strand
gcacucgcagagaaauaug

SEQ ID NO: 1753099 - RNA, 19 nt, Homo sapiens
  misc_RNA (1)...(19): siRNA sense strand
auauagugcuguguggaaa

SEQ ID NO: 1753100 - RNA, 19 nt, Homo sapiens
  misc_RNA (1)...(19): siRNA sense strand
guacuuuaccaauauacag

SEQ ID NO: 1753101 - RNA, 19 nt, Homo sapiens
  misc_RNA (1)...(19): siRNA sense strand
uagcacucgcagagaaaua

SEQ ID NO: 1753102 - RNA, 19 nt, Homo sapiens
  misc_RNA (1)...(19): siRNA sense strand
guagggaagaccaguguac

SEQ ID NO: 1753103 - RNA, 19 nt, Homo sapiens
  misc_RNA (1)...(19): siRNA sense strand
ggaggaccagagaguagug

SEQ ID NO: 1753104 - RNA, 19 nt, Homo sapiens
  misc_RNA (1)...(19): siRNA sense strand
gagcaaaguuuccucaaug

SEQ ID NO: 1753105 - RNA, 19 nt, Homo sapiens
  misc_RNA (1)...(19): siRNA sense strand
ggagagguuucguagcuua

SEQ ID NO: 1753106 - RNA, 19 nt, Homo sapiens
  misc_RNA (1)...(19): siRNA sense strand
gaaagaggaggaagccaua

SEQ ID NO: 1753107 - RNA, 19 nt, Homo sapiens
  misc_RNA (1)...(19): siRNA sense strand
ccaguguacuuuaccaaua

SEQ ID NO: 1753108 - RNA, 19 nt, Homo sapiens
  misc_RNA (1)...(19): siRNA sense strand
aaacauaagccaagcaauu

SEQ ID NO: 1753109 - RNA, 19 nt, Homo sapiens
  misc_RNA (1)...(19): siRNA sense strand
ggaagaccaguguacuuua

SEQ ID NO: 1753110 - RNA, 19 nt, Homo sapiens
  misc_RNA (1)...(19): siRNA sense strand
cgacagcguucuucagaga

SEQ ID NO: 1753111 - RNA, 19 nt, Homo sapiens
  misc_RNA (1)...(19): siRNA sense strand
gaagaccaguguacuuuac

SEQ ID NO: 1753112 - RNA, 19 nt, Homo sapiens
  misc_RNA (1)...(19): siRNA sense strand
ugacaaaugagcaaaguuu

SEQ ID NO: 1753113 - RNA, 19 nt, Homo sapiens
  misc_RNA (1)...(19): siRNA sense strand
gaauccaccugcaguuaug

SEQ ID NO: 1753114 - RNA, 19 nt, Homo sapiens
  misc_RNA (1)...(19): siRNA sense strand
gagaauccaccugcaguua

SEQ ID NO: 1753115 - RNA, 19 nt, Homo sapiens
  misc_RNA (1)...(19): siRNA sense strand
caacagugggcauugauuu

SEQ ID NO: 1753116 - RNA, 19 nt, Homo sapiens
  misc_RNA (1)...(19): siRNA sense strand
ccauagcacucgcagagaa

SEQ ID NO: 1753117 - RNA, 19 nt, Homo sapiens
  misc_RNA (1)...(19): siRNA sense strand
gggaagaccaguguacuuu

SEQ ID NO: 1753118 - RNA, 19 nt, Homo sapiens
  misc_RNA (1)...(19): siRNA sense strand
ccaaauuuaucacaacagu

SEQ ID NO: 1753119 - RNA, 19 nt, Homo sapiens
  misc_RNA (1)...(19): siRNA sense strand
ucacaacagugggcauuga

SEQ ID NO: 1753120 - RNA, 19 nt, Homo sapiens
  misc_RNA (1)...(19): siRNA sense strand
ucagagaugcuauggguuu

SEQ ID NO: 1753121 - RNA, 19 nt, Homo sapiens
  misc_RNA (1)...(19): siRNA sense strand
caaaguuuccucaauguca

SEQ ID NO: 1753122 - RNA, 19 nt, Homo sapiens
  misc_RNA (1)...(19): siRNA sense strand
cuacggaucaguuaaguga

SEQ ID NO: 1753123 - RNA, 19 nt, Homo sapiens
  misc_RNA (1)...(19): siRNA sense strand
gauaaugaagcgaauggaa

SEQ ID NO: 1753124 - RNA, 19 nt, Homo sapiens
  misc_RNA (1)...(19): siRNA sense strand
gccaaugggacaaacauaa

SEQ ID NO: 1753125 - RNA, 19 nt, Homo sapiens
  misc_RNA (1)...(19): siRNA sense strand
ugauggagauuaugauuac

SEQ ID NO: 1753126 - RNA, 19 nt, Homo sapiens
  misc_RNA (1)...(19): siRNA sense strand
caguguacuuuaccaauau

SEQ ID NO: 1753127 - RNA, 19 nt, Homo sapiens
  misc_RNA (1)...(19): siRNA sense strand
ggaguggugcgaucaaaug

SEQ ID NO: 1753128 - RNA, 19 nt, Homo sapiens
  misc_RNA (1)...(19): siRNA sense strand
gauauagugcuguguggaa

SEQ ID NO: 1753129 - RNA, 19 nt, Homo sapiens
  misc_RNA (1)...(19): siRNA sense strand
caggagagguuucguagcu

SEQ ID NO: 1753130 - RNA, 19 nt, Homo sapiens
  misc_RNA (1)...(19): siRNA sense strand
gauaagccagcuacagaug

SEQ ID NO: 1753131 - RNA, 19 nt, Homo sapiens
  misc_RNA (1)...(19): siRNA sense strand
ggaauccccuacuuugaaa

SEQ ID NO: 1753132 - RNA, 19 nt, Homo sapiens
  misc_RNA (1)...(19): siRNA sense strand
gcagagaaauauggaaucc

SEQ ID NO: 1753133 - RNA, 19 nt, Homo sapiens
  misc_RNA (1)...(19): siRNA sense strand
ggaccagagaguagugaaa

SEQ ID NO: 1753134 - RNA, 19 nt, Homo sapiens
  misc_RNA (1)...(19): siRNA sense strand
gggcaggagagguuucgua

SEQ ID NO: 1753135 - RNA, 19 nt, Homo sapiens
  misc_RNA (1)...(19): siRNA sense strand
gaaacuagugcugccaaug

SEQ ID NO: 1753136 - RNA, 19 nt, Homo sapiens
  misc_RNA (1)...(19): siRNA sense strand
cagcagggcaggagagguu

SEQ ID NO: 1753137 - RNA, 19 nt, Homo sapiens
  misc_RNA (1)...(19): siRNA sense strand
caaauggucaugccucuac

SEQ ID NO: 1753138 - RNA, 19 nt, Homo sapiens
  misc_RNA (1)...(19): siRNA sense strand
ccaauauacagaugguaaa

SEQ ID NO: 1753139 - RNA, 19 nt, Homo sapiens
  misc_RNA (1)...(19): siRNA sense strand
cuucuggaccugauaauga

SEQ ID NO: 1753140 - RNA, 19 nt, Homo sapiens
  misc_RNA (1)...(19): siRNA sense strand
ggauaagccagcuacagau

SEQ ID NO: 1753141 - RNA, 19 nt, Homo sapiens
  misc_RNA (1)...(19): siRNA sense strand
gaaggaguggugcgaucaa

SEQ ID NO: 1753142 - RNA, 19 nt, Homo sapiens
  misc_RNA (1)...(19): siRNA sense strand
uaagccagcuacagaugca

SEQ ID NO: 1753143 - RNA, 19 nt, Homo sapiens
  misc_RNA (1)...(19): siRNA sense strand
uggauaagccagcuacaga

SEQ ID NO: 1753144 - RNA, 19 nt, Homo sapiens
  misc_RNA (1)...(19): siRNA sense strand
cugauggagauuaugauua

SEQ ID NO: 1753145 - RNA, 19 nt, Homo sapiens
  misc_RNA (1)...(19): siRNA sense strand
gagagguuucguagcuuaa

SEQ ID NO: 1753146 - RNA, 19 nt, Homo sapiens
  misc_RNA (1)...(19): siRNA sense strand
gaucaguuaagugaagaaa

SEQ ID NO: 1753147 - RNA, 19 nt, Homo sapiens
  misc_RNA (1)...(19): siRNA sense strand
ggaacgguguguggacaag

SEQ ID NO: 1753148 - RNA, 19 nt, Homo sapiens
  misc_RNA (1)...(19): siRNA sense strand
aaacuagugcugccaaugg

SEQ ID NO: 1753149 - RNA, 19 nt, Homo sapiens
  misc_RNA (1)...(19): siRNA sense strand
aacauaagccaagcaauug

SEQ ID NO: 1753150 - RNA, 19 nt, Homo sapiens
  misc_RNA (1)...(19): siRNA sense strand
gacaaaugagcaaaguuuc

SEQ ID NO: 1753151 - RNA, 19 nt, Homo sapiens
  misc_RNA (1)...(19): siRNA sense strand
ccaaugggacaaacauaag

SEQ ID NO: 1753152 - RNA, 19 nt, Homo sapiens
  misc_RNA (1)...(19): siRNA sense strand
ugaaacuagugcugccaau

SEQ ID NO: 1753153 - RNA, 19 nt, Homo sapiens
  misc_RNA (1)...(19): siRNA sense strand
gcaaaguuuccucaauguc

SEQ ID NO: 1753154 - RNA, 19 nt, Homo sapiens
  misc_RNA (1)...(19): siRNA sense strand
gaccagagaguagugaaag

SEQ ID NO: 1753155 - RNA, 19 nt, Homo sapiens
  misc_RNA (1)...(19): siRNA sense strand
gaucugacaaaugagcaaa

SEQ ID NO: 1753156 - RNA, 19 nt, Homo sapiens
  misc_RNA (1)...(19): siRNA sense strand
ucaguuaagugaagaaaag

SEQ ID NO: 1753157 - RNA, 19 nt, Homo sapiens
  misc_RNA (1)...(19): siRNA sense strand
caaugucagaaacuggaua

SEQ ID NO: 1753158 - RNA, 19 nt, Homo sapiens
  misc_RNA (1)...(19): siRNA sense strand
cauagcacucgcagagaaa

SEQ ID NO: 1753159 - RNA, 19 nt, Homo sapiens
  misc_RNA (1)...(19): siRNA sense strand
acagcguucuucagagaug

SEQ ID NO: 1753160 - RNA, 19 nt, Homo sapiens
  misc_RNA (1)...(19): siRNA sense strand
agaauccaccugcaguuau

SEQ ID NO: 1753161 - RNA, 19 nt, Homo sapiens
  misc_RNA (1)...(19): siRNA sense strand
agcaaaguuuccucaaugu

SEQ ID NO: 1753162 - RNA, 19 nt, Homo sapiens
  misc_RNA (1)...(19): siRNA sense strand
aaggaguggugcgaucaaa

SEQ ID NO: 1753163 - RNA, 19 nt, Homo sapiens
  misc_RNA (1)...(19): siRNA sense strand
acaaacauaagccaagcaa

SEQ ID NO: 1753164 - RNA, 19 nt, Homo sapiens
  misc_RNA (1)...(19): siRNA sense strand
gcacucgcagagaaauaug

SEQ ID NO: 1753165 - RNA, 19 nt, Homo sapiens
  misc_RNA (1)...(19): siRNA sense strand
auauagugcuguguggaaa

SEQ ID NO: 1753166 - RNA, 19 nt, Homo sapiens
  misc_RNA (1)...(19): siRNA sense strand
guacuuuaccaauauacag

SEQ ID NO: 1753167 - RNA, 19 nt, Homo sapiens
  misc_RNA (1)...(19): siRNA sense strand
uagcacucgcagagaaaua

SEQ ID NO: 1753168 - RNA, 19 nt, Homo sapiens
  misc_RNA (1)...(19): siRNA sense strand
guagggaagaccaguguac

SEQ ID NO: 1753169 - RNA, 19 nt, Homo sapiens
  misc_RNA (1)...(19): siRNA sense strand
ggaggaccagagaguagug

SEQ ID NO: 1753170 - RNA, 19 nt, Homo sapiens
  misc_RNA (1)...(19): siRNA sense strand
gagcaaaguuuccucaaug

SEQ ID NO: 1753171 - RNA, 19 nt, Homo sapiens
  misc_RNA (1)...(19): siRNA sense strand
ggagagguuucguagcuua

SEQ ID NO: 1753172 - RNA, 19 nt, Homo sapiens
  misc_RNA (1)...(19): siRNA sense strand
gaaagaggaggaagccaua

SEQ ID NO: 1753173 - RNA, 19 nt, Homo sapiens
  misc_RNA (1)...(19): siRNA sense strand
ccaguguacuuuaccaaua

SEQ ID NO: 1753174 - RNA, 19 nt, Homo sapiens
  misc_RNA (1)...(19): siRNA sense strand
aaacauaagccaagcaauu

SEQ ID NO: 1753175 - RNA, 19 nt, Homo sapiens
  misc_RNA (1)...(19): siRNA sense strand
ggaagaccaguguacuuua

SEQ ID NO: 1753176 - RNA, 19 nt, Homo sapiens
  misc_RNA (1)...(19): siRNA sense strand
cgacagcguucuucagaga

SEQ ID NO: 1753177 - RNA, 19 nt, Homo sapiens
  misc_RNA (1)...(19): siRNA sense strand
gaagaccaguguacuuuac

SEQ ID NO: 1753178 - RNA, 19 nt, Homo sapiens
  misc_RNA (1)...(19): siRNA sense strand
ugacaaaugagcaaaguuu

SEQ ID NO: 1753179 - RNA, 19 nt, Homo sapiens
  misc_RNA (1)...(19): siRNA sense strand
gaauccaccugcaguuaug

SEQ ID NO: 1753180 - RNA, 19 nt, Homo sapiens
  misc_RNA (1)...(19): siRNA sense strand
gagaauccaccugcaguua

SEQ ID NO: 1753181 - RNA, 19 nt, Homo sapiens
  misc_RNA (1)...(19): siRNA sense strand
caacagugggcauugauuu

SEQ ID NO: 1753182 - RNA, 19 nt, Homo sapiens
  misc_RNA (1)...(19): siRNA sense strand
ccauagcacucgcagagaa

SEQ ID NO: 1753183 - RNA, 19 nt, Homo sapiens
  misc_RNA (1)...(19): siRNA sense strand
gggaagaccaguguacuuu

SEQ ID NO: 1753184 - RNA, 19 nt, Homo sapiens
  misc_RNA (1)...(19): siRNA sense strand
ccaaauuuaucacaacagu

SEQ ID NO: 1753185 - RNA, 19 nt, Homo sapiens
  misc_RNA (1)...(19): siRNA sense strand
ucacaacagugggcauuga

SEQ ID NO: 1753186 - RNA, 19 nt, Homo sapiens
  misc_RNA (1)...(19): siRNA sense strand
ucagagaugcuauggguuu

SEQ ID NO: 1753187 - RNA, 19 nt, Homo sapiens
  misc_RNA (1)...(19): siRNA sense strand
caaaguuuccucaauguca

SEQ ID NO: 1753188 - RNA, 19 nt, Homo sapiens
  misc_RNA (1)...(19): siRNA sense strand
cuacggaucaguuaaguga

SEQ ID NO: 1753189 - RNA, 19 nt, Homo sapiens
  misc_RNA (1)...(19): siRNA sense strand
gauaaugaagcgaauggaa

SEQ ID NO: 1753190 - RNA, 19 nt, Homo sapiens
  misc_RNA (1)...(19): siRNA sense strand
gccaaugggacaaacauaa

SEQ ID NO: 1753191 - RNA, 19 nt, Homo sapiens
  misc_RNA (1)...(19): siRNA sense strand
ugauggagauuaugauuac

SEQ ID NO: 1753192 - RNA, 19 nt, Homo sapiens
  misc_RNA (1)...(19): siRNA sense strand
caguguacuuuaccaauau

SEQ ID NO: 1753193 - RNA, 19 nt, Homo sapiens
  misc_RNA (1)...(19): siRNA sense strand
ggaguggugcgaucaaaug

SEQ ID NO: 1753194 - RNA, 19 nt, Homo sapiens
  misc_RNA (1)...(19): siRNA sense strand
gauauagugcuguguggaa

SEQ ID NO: 1753195 - RNA, 19 nt, Homo sapiens
  misc_RNA (1)...(19): siRNA sense strand
caggagagguuucguagcu

SEQ ID NO: 1753196 - RNA, 19 nt, Homo sapiens
  misc_RNA (1)...(19): siRNA sense strand
gauaagccagcuacagaug

SEQ ID NO: 1753197 - RNA, 19 nt, Homo sapiens
  misc_RNA (1)...(19): siRNA sense strand
ggaauccccuacuuugaaa

SEQ ID NO: 1753198 - RNA, 19 nt, Homo sapiens
  misc_RNA (1)...(19): siRNA sense strand
gcagagaaauauggaaucc

SEQ ID NO: 1753199 - RNA, 19 nt, Homo sapiens
  misc_RNA (1)...(19): siRNA sense strand
ggaccagagaguagugaaa

SEQ ID NO: 1753200 - RNA, 19 nt, Homo sapiens
  misc_RNA (1)...(19): siRNA sense strand
gggcaggagagguuucgua

SEQ ID NO: 1753201 - RNA, 19 nt, Homo sapiens
  misc_RNA (1)...(19): siRNA sense strand
gaaacuagugcugccaaug

SEQ ID NO: 1753202 - RNA, 19 nt, Homo sapiens
  misc_RNA (1)...(19): siRNA sense strand
cagcagggcaggagagguu

SEQ ID NO: 1753203 - RNA, 19 nt, Homo sapiens
  misc_RNA (1)...(19): siRNA sense strand
caaauggucaugccucuac

SEQ ID NO: 1753204 - RNA, 19 nt, Homo sapiens
  misc_RNA (1)...(19): siRNA sense strand
ccaauauacagaugguaaa

SEQ ID NO: 1753205 - RNA, 19 nt, Homo sapiens
  misc_RNA (1)...(19): siRNA sense strand
cuucuggaccugauaauga

SEQ ID NO: 1753206 - RNA, 19 nt, Homo sapiens
  misc_RNA (1)...(19): siRNA sense strand
ggauaagccagcuacagau

SEQ ID NO: 1753207 - RNA, 19 nt, Homo sapiens
  misc_RNA (1)...(19): siRNA sense strand
gaaggaguggugcgaucaa

SEQ ID NO: 1753208 - RNA, 19 nt, Homo sapiens
  misc_RNA (1)...(19): siRNA sense strand
uaagccagcuacagaugca

SEQ ID NO: 1753209 - RNA, 19 nt, Homo sapiens
  misc_RNA (1)...(19): siRNA sense strand
uggauaagccagcuacaga

SEQ ID NO: 1753210 - RNA, 19 nt, Homo sapiens
  misc_RNA (1)...(19): siRNA sense strand
cugauggagauuaugauua

SEQ ID NO: 1753211 - RNA, 19 nt, Homo sapiens
  misc_RNA (1)...(19): siRNA sense strand
gagagguuucguagcuuaa

SEQ ID NO: 1753212 - RNA, 19 nt, Homo sapiens
  misc_RNA (1)...(19): siRNA sense strand
gaucaguuaagugaagaaa

SEQ ID NO: 1753213 - RNA, 19 nt, Homo sapiens
  misc_RNA (1)...(19): siRNA sense strand
ggaacgguguguggacaag

SEQ ID NO: 1753214 - RNA, 19 nt, Homo sapiens
  misc_RNA (1)...(19): siRNA sense strand
aaacuagugcugccaaugg

SEQ ID NO: 1753215 - RNA, 19 nt, Homo sapiens
  misc_RNA (1)...(19): siRNA sense strand
aacauaagccaagcaauug

SEQ ID NO: 1753216 - RNA, 19 nt, Homo sapiens
  misc_RNA (1)...(19): siRNA sense strand
gacaaaugagcaaaguuuc

SEQ ID NO: 1753217 - RNA, 19 nt, Homo sapiens
  misc_RNA (1)...(19): siRNA sense strand
ccaaugggacaaacauaag

SEQ ID NO: 1753218 - RNA, 19 nt, Homo sapiens
  misc_RNA (1)...(19): siRNA sense strand
ugaaacuagugcugccaau

SEQ ID NO: 1753219 - RNA, 19 nt, Homo sapiens
  misc_RNA (1)...(19): siRNA sense strand
gcaaaguuuccucaauguc

SEQ ID NO: 1753220 - RNA, 19 nt, Homo sapiens
  misc_RNA (1)...(19): siRNA sense strand
gaccagagaguagugaaag

SEQ ID NO: 1753221 - RNA, 19 nt, Homo sapiens
  misc_RNA (1)...(19): siRNA sense strand
gaucugacaaaugagcaaa

SEQ ID NO: 1753222 - RNA, 19 nt, Homo sapiens
  misc_RNA (1)...(19): siRNA sense strand
ucaguuaagugaagaaaag

SEQ ID NO: 1753223 - RNA, 19 nt, Homo sapiens
  misc_RNA (1)...(19): siRNA sense strand
caaugucagaaacuggaua

SEQ ID NO: 1753224 - RNA, 19 nt, Homo sapiens
  misc_RNA (1)...(19): siRNA sense strand
cauagcacucgcagagaaa

SEQ ID NO: 1753225 - RNA, 19 nt, Homo sapiens
  misc_RNA (1)...(19): siRNA sense strand
acagcguucuucagagaug

SEQ ID NO: 1753226 - RNA, 19 nt, Homo sapiens
  misc_RNA (1)...(19): siRNA sense strand
agaauccaccugcaguuau

SEQ ID NO: 1753227 - RNA, 19 nt, Homo sapiens
  misc_RNA (1)...(19): siRNA sense strand
agcaaaguuuccucaaugu

SEQ ID NO: 1753228 - RNA, 19 nt, Homo sapiens
  misc_RNA (1)...(19): siRNA sense strand
aaggaguggugcgaucaaa

SEQ ID NO: 1753229 - RNA, 19 nt, Homo sapiens
  misc_RNA (1)...(19): siRNA sense strand
acaaacauaagccaagcaa

SEQ ID NO: 1753230 - RNA, 19 nt, Homo sapiens
  misc_RNA (1)...(19): siRNA sense strand
gcacucgcagagaaauaug

SEQ ID NO: 1753231 - RNA, 19 nt, Homo sapiens
  misc_RNA (1)...(19): siRNA sense strand
auauagugcuguguggaaa

SEQ ID NO: 1753232 - RNA, 19 nt, Homo sapiens
  misc_RNA (1)...(19): siRNA sense strand
guacuuuaccaauauacag

SEQ ID NO: 1753233 - RNA, 19 nt, Homo sapiens
  misc_RNA (1)...(19): siRNA sense strand
uagcacucgcagagaaaua

SEQ ID NO: 1753234 - RNA, 19 nt, Homo sapiens
  misc_RNA (1)...(19): siRNA sense strand
guagggaagaccaguguac

SEQ ID NO: 1753235 - RNA, 19 nt, Homo sapiens
  misc_RNA (1)...(19): siRNA sense strand
ggaggaccagagaguagug

SEQ ID NO: 1753236 - RNA, 19 nt, Homo sapiens
  misc_RNA (1)...(19): siRNA sense strand
ccacuucucugccaaagau

SEQ ID NO: 1753237 - RNA, 19 nt, Homo sapiens
  misc_RNA (1)...(19): siRNA sense strand
ucaccaagauccugcaugu

SEQ ID NO: 1753238 - RNA, 19 nt, Homo sapiens
  misc_RNA (1)...(19): siRNA sense strand
ucauaggccuggaguuuau

SEQ ID NO: 1753239 - RNA, 19 nt, Homo sapiens
  misc_RNA (1)...(19): siRNA sense strand
ccacguggcuggcauugca

SEQ ID NO: 1753240 - RNA, 19 nt, Homo sapiens
  misc_RNA (1)...(19): siRNA sense strand
ggucuggaaugcaaaguca

SEQ ID NO: 1753241 - RNA, 19 nt, Homo sapiens
  misc_RNA (1)...(19): siRNA sense strand
caagggaagggcacgguua

SEQ ID NO: 1753242 - RNA, 19 nt, Homo sapiens
  misc_RNA (1)...(19): siRNA sense strand
ggcagagacugauccacuu

SEQ ID NO: 1753243 - RNA, 19 nt, Homo sapiens
  misc_RNA (1)...(19): siRNA sense strand
ucaccgacuucgagaaugu

SEQ ID NO: 1753244 - RNA, 19 nt, Homo sapiens
  misc_RNA (1)...(19): siRNA sense strand
ccucauaggccuggaguuu

SEQ ID NO: 1753245 - RNA, 19 nt, Homo sapiens
  misc_RNA (1)...(19): siRNA sense strand
ggagcuggccuugaaguug

SEQ ID NO: 1753246 - RNA, 19 nt, Homo sapiens
  misc_RNA (1)...(19): siRNA sense strand
gagggugucuacgccauug

SEQ ID NO: 1753247 - RNA, 19 nt, Homo sapiens
  misc_RNA (1)...(19): siRNA sense strand
ggacgaugccugccucuac

SEQ ID NO: 1753248 - RNA, 19 nt, Homo sapiens
  misc_RNA (1)...(19): siRNA sense strand
ccaaggauccguggagguu

SEQ ID NO: 1753249 - RNA, 19 nt, Homo sapiens
  misc_RNA (1)...(19): siRNA sense strand
gaguugaggcagagacuga

SEQ ID NO: 1753250 - RNA, 19 nt, Homo sapiens
  misc_RNA (1)...(19): siRNA sense strand
ggggauaccucaccaagau

SEQ ID NO: 1753251 - RNA, 19 nt, Homo sapiens
  misc_RNA (1)...(19): siRNA sense strand
ugacagccguugccaucug

SEQ ID NO: 1753252 - RNA, 19 nt, Homo sapiens
  misc_RNA (1)...(19): siRNA sense strand
gcagccugguggaggugua

SEQ ID NO: 1753253 - RNA, 19 nt, Homo sapiens
  misc_RNA (1)...(19): siRNA sense strand
gauccugcaugucuuccau

SEQ ID NO: 1753254 - RNA, 19 nt, Homo sapiens
  misc_RNA (1)...(19): siRNA sense strand
gguuagcggcacccucaua

SEQ ID NO: 1753255 - RNA, 19 nt, Homo sapiens
  misc_RNA (1)...(19): siRNA sense strand
ggucaccgacuucgagaau

SEQ ID NO: 1753256 - RNA, 19 nt, Homo sapiens
  misc_RNA (1)...(19): siRNA sense strand
gcagagacugauccacuuc

SEQ ID NO: 1753257 - RNA, 19 nt, Homo sapiens
  misc_RNA (1)...(19): siRNA sense strand
acaccagcauacagaguga

SEQ ID NO: 1753258 - RNA, 19 nt, Homo sapiens
  misc_RNA (1)...(19): siRNA sense strand
caacugcagcguccacaca

SEQ ID NO: 1753259 - RNA, 19 nt, Homo sapiens
  misc_RNA (1)...(19): siRNA sense strand
gacgaugccugccucuacu

SEQ ID NO: 1753260 - RNA, 19 nt, Homo sapiens
  misc_RNA (1)...(19): siRNA sense strand
cuagacaccagcauacaga

SEQ ID NO: 1753261 - RNA, 19 nt, Homo sapiens
  misc_RNA (1)...(19): siRNA sense strand
ugcuggagcuggccuugaa

SEQ ID NO: 1753262 - RNA, 19 nt, Homo sapiens
  misc_RNA (1)...(19): siRNA sense strand
ggucauggucaccgacuuc

SEQ ID NO: 1753263 - RNA, 19 nt, Homo sapiens
  misc_RNA (1)...(19): siRNA sense strand
gacaggccagcaaguguga

SEQ ID NO: 1753264 - RNA, 19 nt, Homo sapiens
  misc_RNA (1)...(19): siRNA sense strand
ggacccgcuuccacagaca

SEQ ID NO: 1753265 - RNA, 19 nt, Homo sapiens
  misc_RNA (1)...(19): siRNA sense strand
gauccacuucucugccaaa

SEQ ID NO: 1753266 - RNA, 19 nt, Homo sapiens
  misc_RNA (1)...(19): siRNA sense strand
ugucuuccauggccuucuu

SEQ ID NO: 1753267 - RNA, 19 nt, Homo sapiens
  misc_RNA (1)...(19): siRNA sense strand
guacagccgcguccucaac

SEQ ID NO: 1753268 - RNA, 19 nt, Homo sapiens
  misc_RNA (1)...(19): siRNA sense strand
cagagugaccaccgggaaa

SEQ ID NO: 1753269 - RNA, 19 nt, Homo sapiens
  misc_RNA (1)...(19): siRNA sense strand
ucuccuagacaccagcaua

SEQ ID NO: 1753270 - RNA, 19 nt, Homo sapiens
  misc_RNA (1)...(19): siRNA sense strand
gaaccacagccaccuucca

SEQ ID NO: 1753271 - RNA, 19 nt, Homo sapiens
  misc_RNA (1)...(19): siRNA sense strand
cucauaggccuggaguuua

SEQ ID NO: 1753272 - RNA, 19 nt, Homo sapiens
  misc_RNA (1)...(19): siRNA sense strand
cccagagcaucccguggaa

SEQ ID NO: 1753273 - RNA, 19 nt, Homo sapiens
  misc_RNA (1)...(19): siRNA sense strand
gcaaagggcacucagaauc

SEQ ID NO: 1753274 - RNA, 19 nt, Homo sapiens
  misc_RNA (1)...(19): siRNA sense strand
ggaccagucuguguauuuc

SEQ ID NO: 1753275 - RNA, 19 nt, Homo sapiens
  misc_RNA (1)...(19): siRNA sense strand
gccaagcagugacuucuga

SEQ ID NO: 1753276 - RNA, 19 nt, Homo sapiens
  misc_RNA (1)...(19): siRNA sense strand
ggaaggaggaccagucugu

SEQ ID NO: 1753277 - RNA, 19 nt, Homo sapiens
  misc_RNA (1)...(19): siRNA sense strand
caaagggcacucagaauca

SEQ ID NO: 1753278 - RNA, 19 nt, Homo sapiens
  misc_RNA (1)...(19): siRNA sense strand
ggaccaaacucaccaucac

SEQ ID NO: 1753279 - RNA, 19 nt, Homo sapiens
  misc_RNA (1)...(19): siRNA sense strand
ucagaaucauggcaccuaa

SEQ ID NO: 1753280 - RNA, 19 nt, Homo sapiens
  misc_RNA (1)...(19): siRNA sense strand
gaucagggaggcagcaguu

SEQ ID NO: 1753281 - RNA, 19 nt, Homo sapiens
  misc_RNA (1)...(19): siRNA sense strand
ucucaaaccugcggaagga

SEQ ID NO: 1753282 - RNA, 19 nt, Homo sapiens
  misc_RNA (1)...(19): siRNA sense strand
ugaaccggcucuuucugaa

SEQ ID NO: 1753283 - RNA, 19 nt, Homo sapiens
  misc_RNA (1)...(19): siRNA sense strand
ggaggaccagucuguguau

SEQ ID NO: 1753284 - RNA, 19 nt, Homo sapiens
  misc_RNA (1)...(19): siRNA sense strand
gaggaccagucuguguauu

SEQ ID NO: 1753285 - RNA, 19 nt, Homo sapiens
  misc_RNA (1)...(19): siRNA sense strand
gugaaccggcucuuucuga

SEQ ID NO: 1753286 - RNA, 19 nt, Homo sapiens
  misc_RNA (1)...(19): siRNA sense strand
gcaccuaagucuggacacu

SEQ ID NO: 1753287 - RNA, 19 nt, Homo sapiens
  misc_RNA (1)...(19): siRNA sense strand
cagcagcacaaccaccaua

SEQ ID NO: 1753288 - RNA, 19 nt, Homo sapiens
  misc_RNA (1)...(19): siRNA sense strand
aagcaaagggcacucagaa

SEQ ID NO: 1753289 - RNA, 19 nt, Homo sapiens
  misc_RNA (1)...(19): siRNA sense strand
uggaggagaaggaaaggua

SEQ ID NO: 1753290 - RNA, 19 nt, Homo sapiens
  misc_RNA (1)...(19): siRNA sense strand
ggcugucgcugugcucaaa

SEQ ID NO: 1753291 - RNA, 19 nt, Homo sapiens
  misc_RNA (1)...(19): siRNA sense strand
ggccucagggucacagaaa

SEQ ID NO: 1753292 - RNA, 19 nt, Homo sapiens
  misc_RNA (1)...(19): siRNA sense strand
uaugugaaccggcucuuuc

SEQ ID NO: 1753293 - RNA, 19 nt, Homo sapiens
  misc_RNA (1)...(19): siRNA sense strand
gagcuggacacccggagau

SEQ ID NO: 1753294 - RNA, 19 nt, Homo sapiens
  misc_RNA (1)...(19): siRNA sense strand
aaagggcacucagaaucau

SEQ ID NO: 1753295 - RNA, 19 nt, Homo sapiens
  misc_RNA (1)...(19): siRNA sense strand
aaucauggcaccuaagucu

SEQ ID NO: 1753296 - RNA, 19 nt, Homo sapiens
  misc_RNA (1)...(19): siRNA sense strand
gcaguugcaguccaucaag

SEQ ID NO: 1753297 - RNA, 19 nt, Homo sapiens
  misc_RNA (1)...(19): siRNA sense strand
cagggucacagaaagcaaa

SEQ ID NO: 1753298 - RNA, 19 nt, Homo sapiens
  misc_RNA (1)...(19): siRNA sense strand
gaaccggcucuuucugaac

SEQ ID NO: 1753299 - RNA, 19 nt, Homo sapiens
  misc_RNA (1)...(19): siRNA sense strand
ggcagcaguugcaguccau

SEQ ID NO: 1753300 - RNA, 19 nt, Homo sapiens
  misc_RNA (1)...(19): siRNA sense strand
gggaccaaacucaccauca

SEQ ID NO: 1753301 - RNA, 19 nt, Homo sapiens
  misc_RNA (1)...(19): siRNA sense strand
gcaaagggcacucagaauc

SEQ ID NO: 1753302 - RNA, 19 nt, Homo sapiens
  misc_RNA (1)...(19): siRNA sense strand
ggaccagucuguguauuuc

SEQ ID NO: 1753303 - RNA, 19 nt, Homo sapiens
  misc_RNA (1)...(19): siRNA sense strand
ggaaggaggaccagucugu

SEQ ID NO: 1753304 - RNA, 19 nt, Homo sapiens
  misc_RNA (1)...(19): siRNA sense strand
caaagggcacucagaauca

SEQ ID NO: 1753305 - RNA, 19 nt, Homo sapiens
  misc_RNA (1)...(19): siRNA sense strand
ggaccaaacucaccaucac

SEQ ID NO: 1753306 - RNA, 19 nt, Homo sapiens
  misc_RNA (1)...(19): siRNA sense strand
ucagaaucauggcaccuaa

SEQ ID NO: 1753307 - RNA, 19 nt, Homo sapiens
  misc_RNA (1)...(19): siRNA sense strand
gaucagggaggcagcaguu

SEQ ID NO: 1753308 - RNA, 19 nt, Homo sapiens
  misc_RNA (1)...(19): siRNA sense strand
ucucaaaccugcggaagga

SEQ ID NO: 1753309 - RNA, 19 nt, Homo sapiens
  misc_RNA (1)...(19): siRNA sense strand
ugaaccggcucuuucugaa

SEQ ID NO: 1753310 - RNA, 19 nt, Homo sapiens
  misc_RNA (1)...(19): siRNA sense strand
ggaggaccagucuguguau

SEQ ID NO: 1753311 - RNA, 19 nt, Homo sapiens
  misc_RNA (1)...(19): siRNA sense strand
gaggaccagucuguguauu

SEQ ID NO: 1753312 - RNA, 19 nt, Homo sapiens
  misc_RNA (1)...(19): siRNA sense strand
gugaaccggcucuuucuga

SEQ ID NO: 1753313 - RNA, 19 nt, Homo sapiens
  misc_RNA (1)...(19): siRNA sense strand
gcaccuaagucuggacacu

SEQ ID NO: 1753314 - RNA, 19 nt, Homo sapiens
  misc_RNA (1)...(19): siRNA sense strand
cagcagcacaaccaccaua

SEQ ID NO: 1753315 - RNA, 19 nt, Homo sapiens
  misc_RNA (1)...(19): siRNA sense strand
aagcaaagggcacucagaa

SEQ ID NO: 1753316 - RNA, 19 nt, Homo sapiens
  misc_RNA (1)...(19): siRNA sense strand
uggaggagaaggaaaggua

SEQ ID NO: 1753317 - RNA, 19 nt, Homo sapiens
  misc_RNA (1)...(19): siRNA sense strand
ggcugucgcugugcucaaa

SEQ ID NO: 1753318 - RNA, 19 nt, Homo sapiens
  misc_RNA (1)...(19): siRNA sense strand
uaugugaaccggcucuuuc

SEQ ID NO: 1753319 - RNA, 19 nt, Homo sapiens
  misc_RNA (1)...(19): siRNA sense strand
ggccucagggucacagaaa

SEQ ID NO: 1753320 - RNA, 19 nt, Homo sapiens
  misc_RNA (1)...(19): siRNA sense strand
gagcuggacacccggagau

SEQ ID NO: 1753321 - RNA, 19 nt, Homo sapiens
  misc_RNA (1)...(19): siRNA sense strand
aaagggcacucagaaucau

SEQ ID NO: 1753322 - RNA, 19 nt, Homo sapiens
  misc_RNA (1)...(19): siRNA sense strand
aaucauggcaccuaagucu

SEQ ID NO: 1753323 - RNA, 19 nt, Homo sapiens
  misc_RNA (1)...(19): siRNA sense strand
gcaguugcaguccaucaag

SEQ ID NO: 1753324 - RNA, 19 nt, Homo sapiens
  misc_RNA (1)...(19): siRNA sense strand
cagggucacagaaagcaaa

SEQ ID NO: 1753325 - RNA, 19 nt, Homo sapiens
  misc_RNA (1)...(19): siRNA sense strand
gaaccggcucuuucugaac

SEQ ID NO: 1753326 - RNA, 19 nt, Homo sapiens
  misc_RNA (1)...(19): siRNA sense strand
ggcagcaguugcaguccau

SEQ ID NO: 1753327 - RNA, 19 nt, Homo sapiens
  misc_RNA (1)...(19): siRNA sense strand
gggaccaaacucaccauca

SEQ ID NO: 1753328 - RNA, 19 nt, Homo sapiens
  misc_RNA (1)...(19): siRNA sense strand
gcaaagggcacucagaauc

SEQ ID NO: 1753329 - RNA, 19 nt, Homo sapiens
  misc_RNA (1)...(19): siRNA sense strand
ggaccagucuguguauuuc

SEQ ID NO: 1753330 - RNA, 19 nt, Homo sapiens
  misc_RNA (1)...(19): siRNA sense strand
gccaagcagugacuucuga

SEQ ID NO: 1753331 - RNA, 19 nt, Homo sapiens
  misc_RNA (1)...(19): siRNA sense strand
ggaaggaggaccagucugu

SEQ ID NO: 1753332 - RNA, 19 nt, Homo sapiens
  misc_RNA (1)...(19): siRNA sense strand
caaagggcacucagaauca

SEQ ID NO: 1753333 - RNA, 19 nt, Homo sapiens
  misc_RNA (1)...(19): siRNA sense strand
ggaccaaacucaccaucac

SEQ ID NO: 1753334 - RNA, 19 nt, Homo sapiens
  misc_RNA (1)...(19): siRNA sense strand
ucagaaucauggcaccuaa

SEQ ID NO: 1753335 - RNA, 19 nt, Homo sapiens
  misc_RNA (1)...(19): siRNA sense strand
gaucagggaggcagcaguu

SEQ ID NO: 1753336 - RNA, 19 nt, Homo sapiens
  misc_RNA (1)...(19): siRNA sense strand
ucucaaaccugcggaagga

SEQ ID NO: 1753337 - RNA, 19 nt, Homo sapiens
  misc_RNA (1)...(19): siRNA sense strand
ugaaccggcucuuucugaa

SEQ ID NO: 1753338 - RNA, 19 nt, Homo sapiens
  misc_RNA (1)...(19): siRNA sense strand
ggaggaccagucuguguau

SEQ ID NO: 1753339 - RNA, 19 nt, Homo sapiens
  misc_RNA (1)...(19): siRNA sense strand
gaggaccagucuguguauu

SEQ ID NO: 1753340 - RNA, 19 nt, Homo sapiens
  misc_RNA (1)...(19): siRNA sense strand
gugaaccggcucuuucuga

SEQ ID NO: 1753341 - RNA, 19 nt, Homo sapiens
  misc_RNA (1)...(19): siRNA sense strand
gcaccuaagucuggacacu

SEQ ID NO: 1753342 - RNA, 19 nt, Homo sapiens
  misc_RNA (1)...(19): siRNA sense strand
cagcagcacaaccaccaua

SEQ ID NO: 1753343 - RNA, 19 nt, Homo sapiens
  misc_RNA (1)...(19): siRNA sense strand
aagcaaagggcacucagaa

SEQ ID NO: 1753344 - RNA, 19 nt, Homo sapiens
  misc_RNA (1)...(19): siRNA sense strand
uggaggagaaggaaaggua

SEQ ID NO: 1753345 - RNA, 19 nt, Homo sapiens
  misc_RNA (1)...(19): siRNA sense strand
ggcugucgcugugcucaaa

SEQ ID NO: 1753346 - RNA, 19 nt, Homo sapiens
  misc_RNA (1)...(19): siRNA sense strand
ggccucagggucacagaaa

SEQ ID NO: 1753347 - RNA, 19 nt, Homo sapiens
  misc_RNA (1)...(19): siRNA sense strand
uaugugaaccggcucuuuc

SEQ ID NO: 1753348 - RNA, 19 nt, Homo sapiens
  misc_RNA (1)...(19): siRNA sense strand
gagcuggacacccggagau

SEQ ID NO: 1753349 - RNA, 19 nt, Homo sapiens
  misc_RNA (1)...(19): siRNA sense strand
aaagggcacucagaaucau

SEQ ID NO: 1753350 - RNA, 19 nt, Homo sapiens
  misc_RNA (1)...(19): siRNA sense strand
aaucauggcaccuaagucu

SEQ ID NO: 1753351 - RNA, 19 nt, Homo sapiens
  misc_RNA (1)...(19): siRNA sense strand
gcaguugcaguccaucaag

SEQ ID NO: 1753352 - RNA, 19 nt, Homo sapiens
  misc_RNA (1)...(19): siRNA sense strand
cagggucacagaaagcaaa

SEQ ID NO: 1753353 - RNA, 19 nt, Homo sapiens
  misc_RNA (1)...(19): siRNA sense strand
gaaccggcucuuucugaac

SEQ ID NO: 1753354 - RNA, 19 nt, Homo sapiens
  misc_RNA (1)...(19): siRNA sense strand
ggcagcaguugcaguccau

SEQ ID NO: 1753355 - RNA, 19 nt, Homo sapiens
  misc_RNA (1)...(19): siRNA sense strand
gggaccaaacucaccauca

SEQ ID NO: 1753356 - RNA, 19 nt, Homo sapiens
  misc_RNA (1)...(19): siRNA sense strand
gaacgucucuaucaagaau

SEQ ID NO: 1753357 - RNA, 19 nt, Homo sapiens
  misc_RNA (1)...(19): siRNA sense strand
gaagauauauacucagcaa

SEQ ID NO: 1753358 - RNA, 19 nt, Homo sapiens
  misc_RNA (1)...(19): siRNA sense strand
gaauugaccucuaugaaag

SEQ ID NO: 1753359 - RNA, 19 nt, Homo sapiens
  misc_RNA (1)...(19): siRNA sense strand
gaagaaaguacuagaagaa

SEQ ID NO: 1753360 - RNA, 19 nt, Homo sapiens
  misc_RNA (1)...(19): siRNA sense strand
ggacauaucagguacauca

SEQ ID NO: 1753361 - RNA, 19 nt, Homo sapiens
  misc_RNA (1)...(19): siRNA sense strand
gaagacaugcugcuuugua

SEQ ID NO: 1753362 - RNA, 19 nt, Homo sapiens
  misc_RNA (1)...(19): siRNA sense strand
agaccucacuauccuauua

SEQ ID NO: 1753363 - RNA, 19 nt, Homo sapiens
  misc_RNA (1)...(19): siRNA sense strand
gaccagagaucguguugga

SEQ ID NO: 1753364 - RNA, 19 nt, Homo sapiens
  misc_RNA (1)...(19): siRNA sense strand
aagcaaggauguagaauug

SEQ ID NO: 1753365 - RNA, 19 nt, Homo sapiens
  misc_RNA (1)...(19): siRNA sense strand
ugaaacagauggagaagau

SEQ ID NO: 1753366 - RNA, 19 nt, Homo sapiens
  misc_RNA (1)...(19): siRNA sense strand
uagcagggccuucaaagua

SEQ ID NO: 1753367 - RNA, 19 nt, Homo sapiens
  misc_RNA (1)...(19): siRNA sense strand
gagaucguguuggacauua

SEQ ID NO: 1753368 - RNA, 19 nt, Homo sapiens
  misc_RNA (1)...(19): siRNA sense strand
gcauggcaguggugaguuu

SEQ ID NO: 1753369 - RNA, 19 nt, Homo sapiens
  misc_RNA (1)...(19): siRNA sense strand
uaauacaccuguucgaaau

SEQ ID NO: 1753370 - RNA, 19 nt, Homo sapiens
  misc_RNA (1)...(19): siRNA sense strand
gugaagacaugcugcuuug

SEQ ID NO: 1753371 - RNA, 19 nt, Homo sapiens
  misc_RNA (1)...(19): siRNA sense strand
ugaagaaaguacuagaaga

SEQ ID NO: 1753372 - RNA, 19 nt, Homo sapiens
  misc_RNA (1)...(19): siRNA sense strand
guucuuggcuucccauuag

SEQ ID NO: 1753373 - RNA, 19 nt, Homo sapiens
  misc_RNA (1)...(19): siRNA sense strand
gaaaguacuagaagaauac

SEQ ID NO: 1753374 - RNA, 19 nt, Homo sapiens
  misc_RNA (1)...(19): siRNA sense strand
cgaaacaucacuauugcua

SEQ ID NO: 1753375 - RNA, 19 nt, Homo sapiens
  misc_RNA (1)...(19): siRNA sense strand
cuacgaaacaucacuauug

SEQ ID NO: 1753376 - RNA, 19 nt, Homo sapiens
  misc_RNA (1)...(19): siRNA sense strand
gaaacaucacuauugcuaa

SEQ ID NO: 1753377 - RNA, 19 nt, Homo sapiens
  misc_RNA (1)...(19): siRNA sense strand
gcagggccuucaaaguaaa

SEQ ID NO: 1753378 - RNA, 19 nt, Homo sapiens
  misc_RNA (1)...(19): siRNA sense strand
gaaagugucgcaucaaacu

SEQ ID NO: 1753379 - RNA, 19 nt, Homo sapiens
  misc_RNA (1)...(19): siRNA sense strand
gauaauacaccuguucgaa

SEQ ID NO: 1753380 - RNA, 19 nt, Homo sapiens
  misc_RNA (1)...(19): siRNA sense strand
ggagcgcaaucgucaguau

SEQ ID NO: 1753381 - RNA, 19 nt, Homo sapiens
  misc_RNA (1)...(19): siRNA sense strand
ucagaggaauauaaagcua

SEQ ID NO: 1753382 - RNA, 19 nt, Homo sapiens
  misc_RNA (1)...(19): siRNA sense strand
uaucgaaagugucgcauca

SEQ ID NO: 1753383 - RNA, 19 nt, Homo sapiens
  misc_RNA (1)...(19): siRNA sense strand
agaauugaccucuaugaaa

SEQ ID NO: 1753384 - RNA, 19 nt, Homo sapiens
  misc_RNA (1)...(19): siRNA sense strand
ggaauauaaagcuauggua

SEQ ID NO: 1753385 - RNA, 19 nt, Homo sapiens
  misc_RNA (1)...(19): siRNA sense strand
aagacaugcugcuuuguaa

SEQ ID NO: 1753386 - RNA, 19 nt, Homo sapiens
  misc_RNA (1)...(19): siRNA sense strand
gacaugcugcuuuguaauu

SEQ ID NO: 1753387 - RNA, 19 nt, Homo sapiens
  misc_RNA (1)...(19): siRNA sense strand
gcaaggauguagaauugac

SEQ ID NO: 1753388 - RNA, 19 nt, Homo sapiens
  misc_RNA (1)...(19): siRNA sense strand
caaacucucuggcuaugca

SEQ ID NO: 1753389 - RNA, 19 nt, Homo sapiens
  misc_RNA (1)...(19): siRNA sense strand
ucgaaagugucgcaucaaa

SEQ ID NO: 1753390 - RNA, 19 nt, Homo sapiens
  misc_RNA (1)...(19): siRNA sense strand
cuggaaagcuagauauugu

SEQ ID NO: 1753391 - RNA, 19 nt, Homo sapiens
  misc_RNA (1)...(19): siRNA sense strand
uggagaagauauauacuca

SEQ ID NO: 1753392 - RNA, 19 nt, Homo sapiens
  misc_RNA (1)...(19): siRNA sense strand
acaugcugcuuuguaauua

SEQ ID NO: 1753393 - RNA, 19 nt, Homo sapiens
  misc_RNA (1)...(19): siRNA sense strand
ucaggaacgucucuaucaa

SEQ ID NO: 1753394 - RNA, 19 nt, Homo sapiens
  misc_RNA (1)...(19): siRNA sense strand
gcaaauacaaagcaaggau

SEQ ID NO: 1753395 - RNA, 19 nt, Homo sapiens
  misc_RNA (1)...(19): siRNA sense strand
aaacaucacuauugcuaac

SEQ ID NO: 1753396 - RNA, 19 nt, Homo sapiens
  misc_RNA (1)...(19): siRNA sense strand
caaguuuccuuuggauaau

SEQ ID NO: 1753397 - RNA, 19 nt, Homo sapiens
  misc_RNA (1)...(19): siRNA sense strand
uuuagucgcucaccagcua

SEQ ID NO: 1753398 - RNA, 19 nt, Homo sapiens
  misc_RNA (1)...(19): siRNA sense strand
aaacagauggagaagauau

SEQ ID NO: 1753399 - RNA, 19 nt, Homo sapiens
  misc_RNA (1)...(19): siRNA sense strand
cuccaaggccucuaugaua

SEQ ID NO: 1753400 - RNA, 19 nt, Homo sapiens
  misc_RNA (1)...(19): siRNA sense strand
gaaacagauggagaagaua

SEQ ID NO: 1753401 - RNA, 19 nt, Homo sapiens
  misc_RNA (1)...(19): siRNA sense strand
cgauggagauggagauuuu

SEQ ID NO: 1753402 - RNA, 19 nt, Homo sapiens
  misc_RNA (1)...(19): siRNA sense strand
ggagaccucacuauccuau

SEQ ID NO: 1753403 - RNA, 19 nt, Homo sapiens
  misc_RNA (1)...(19): siRNA sense strand
uguccugccugcaacagua

SEQ ID NO: 1753404 - RNA, 19 nt, Homo sapiens
  misc_RNA (1)...(19): siRNA sense strand
agcagggccuucaaaguaa

SEQ ID NO: 1753405 - RNA, 19 nt, Homo sapiens
  misc_RNA (1)...(19): siRNA sense strand
aaagcaaggauguagaauu

SEQ ID NO: 1753406 - RNA, 19 nt, Homo sapiens
  misc_RNA (1)...(19): siRNA sense strand
guccaucagaggaauauaa

SEQ ID NO: 1753407 - RNA, 19 nt, Homo sapiens
  misc_RNA (1)...(19): siRNA sense strand
aggaacgucucuaucaaga

SEQ ID NO: 1753408 - RNA, 19 nt, Homo sapiens
  misc_RNA (1)...(19): siRNA sense strand
gcgcuggccuucuggacau

SEQ ID NO: 1753409 - RNA, 19 nt, Homo sapiens
  misc_RNA (1)...(19): siRNA sense strand
agaggaauauaaagcuaug

SEQ ID NO: 1753410 - RNA, 19 nt, Homo sapiens
  misc_RNA (1)...(19): siRNA sense strand
cuugaaccauccaugauug

SEQ ID NO: 1753411 - RNA, 19 nt, Homo sapiens
  misc_RNA (1)...(19): siRNA sense strand
aaaguucagugacaucucu

SEQ ID NO: 1753412 - RNA, 19 nt, Homo sapiens
  misc_RNA (1)...(19): siRNA sense strand
acaaagcaaggauguagaa

SEQ ID NO: 1753413 - RNA, 19 nt, Homo sapiens
  misc_RNA (1)...(19): siRNA sense strand
gauauuguccgcacagaac

SEQ ID NO: 1753414 - RNA, 19 nt, Homo sapiens
  misc_RNA (1)...(19): siRNA sense strand
caucaaacucucuggcuau

SEQ ID NO: 1753415 - RNA, 19 nt, Homo sapiens
  misc_RNA (1)...(19): siRNA sense strand
ucacuauccuauuaugucu

SEQ ID NO: 1753416 - RNA, 19 nt, Homo sapiens
  misc_RNA (1)...(19): siRNA sense strand
caugaagaaaguacuagaa

SEQ ID NO: 1753417 - RNA, 19 nt, Homo sapiens
  misc_RNA (1)...(19): siRNA sense strand
auaauacaccuguucgaaa

SEQ ID NO: 1753418 - RNA, 19 nt, Homo sapiens
  misc_RNA (1)...(19): siRNA sense strand
cagauggagaagauauaua

SEQ ID NO: 1753419 - RNA, 19 nt, Homo sapiens
  misc_RNA (1)...(19): siRNA sense strand
guacuagaagaauacaaga

SEQ ID NO: 1753420 - RNA, 19 nt, Homo sapiens
  misc_RNA (1)...(19): siRNA sense strand
ucacuauugcuaaccauga

SEQ ID NO: 1753421 - RNA, 19 nt, Homo sapiens
  misc_RNA (1)...(19): siRNA sense strand
caucuucugugaucagcau

SEQ ID NO: 1753422 - RNA, 19 nt, Homo sapiens
  misc_RNA (1)...(19): siRNA sense strand
ggaacgucucuaucaagaa

SEQ ID NO: 1753423 - RNA, 19 nt, Homo sapiens
  misc_RNA (1)...(19): siRNA sense strand
uuaccuccaugaagaaagu

SEQ ID NO: 1753424 - RNA, 19 nt, Homo sapiens
  misc_RNA (1)...(19): siRNA sense strand
caugcugcuuuguaauuau

SEQ ID NO: 1753425 - RNA, 19 nt, Homo sapiens
  misc_RNA (1)...(19): siRNA sense strand
cacuauugcuaaccaugaa

SEQ ID NO: 1753426 - RNA, 19 nt, Homo sapiens
  misc_RNA (1)...(19): siRNA sense strand
aacaguacccuuucuggaa

SEQ ID NO: 1753427 - RNA, 19 nt, Homo sapiens
  misc_RNA (1)...(19): siRNA sense strand
gagcagcagcaaguuucua

SEQ ID NO: 1753428 - RNA, 19 nt, Homo sapiens
  misc_RNA (1)...(19): siRNA sense strand
gcuacgaaacaucacuauu

SEQ ID NO: 1753429 - RNA, 19 nt, Homo sapiens
  misc_RNA (1)...(19): siRNA sense strand
gcuccaaggccucuaugau

SEQ ID NO: 1753430 - RNA, 19 nt, Homo sapiens
  misc_RNA (1)...(19): siRNA sense strand
ugccugcucucacaucuuc

SEQ ID NO: 1753431 - RNA, 19 nt, Homo sapiens
  misc_RNA (1)...(19): siRNA sense strand
gcgcaaucgucaguaucaa

SEQ ID NO: 1753432 - RNA, 19 nt, Homo sapiens
  misc_RNA (1)...(19): siRNA sense strand
gcaccugaacccagcaaca

SEQ ID NO: 1753433 - RNA, 19 nt, Homo sapiens
  misc_RNA (1)...(19): siRNA sense strand
uacgaaacaucacuauugc

SEQ ID NO: 1753434 - RNA, 19 nt, Homo sapiens
  misc_RNA (1)...(19): siRNA sense strand
gcaaucgucaguaucaaaa

SEQ ID NO: 1753435 - RNA, 19 nt, Homo sapiens
  misc_RNA (1)...(19): siRNA sense strand
gaacccagcaacagcuuuu

SEQ ID NO: 1753436 - RNA, 19 nt, Homo sapiens
  misc_RNA (1)...(19): siRNA sense strand
cagaggaauauaaagcuau

SEQ ID NO: 1753437 - RNA, 19 nt, Homo sapiens
  misc_RNA (1)...(19): siRNA sense strand
uuagagcagcagcaaguuu

SEQ ID NO: 1753438 - RNA, 19 nt, Homo sapiens
  misc_RNA (1)...(19): siRNA sense strand
caucagaggaauauaaagc

SEQ ID NO: 1753439 - RNA, 19 nt, Homo sapiens
  misc_RNA (1)...(19): siRNA sense strand
uagagcagcagcaaguuuc

SEQ ID NO: 1753440 - RNA, 19 nt, Homo sapiens
  misc_RNA (1)...(19): siRNA sense strand
ugaauuagagcagcagcaa

SEQ ID NO: 1753441 - RNA, 19 nt, Homo sapiens
  misc_RNA (1)...(19): siRNA sense strand
gcgauggagauggagauuu

SEQ ID NO: 1753442 - RNA, 19 nt, Homo sapiens
  misc_RNA (1)...(19): siRNA sense strand
ugugaagacaugcugcuuu

SEQ ID NO: 1753443 - RNA, 19 nt, Homo sapiens
  misc_RNA (1)...(19): siRNA sense strand
cuucuggacauaucaggua

SEQ ID NO: 1753444 - RNA, 19 nt, Homo sapiens
  misc_RNA (1)...(19): siRNA sense strand
ccuugaaccauccaugauu

SEQ ID NO: 1753445 - RNA, 19 nt, Homo sapiens
  misc_RNA (1)...(19): siRNA sense strand
gaccucacuauccuauuau

SEQ ID NO: 1753446 - RNA, 19 nt, Homo sapiens
  misc_RNA (1)...(19): siRNA sense strand
cucuccaagucgugaauua

SEQ ID NO: 1753447 - RNA, 19 nt, Homo sapiens
  misc_RNA (1)...(19): siRNA sense strand
ggauaauacaccuguucga

SEQ ID NO: 1753448 - RNA, 19 nt, Homo sapiens
  misc_RNA (1)...(19): siRNA sense strand
caucaggaacgucucuauc

SEQ ID NO: 1753449 - RNA, 19 nt, Homo sapiens
  misc_RNA (1)...(19): siRNA sense strand
gcacagucugguguucuug

SEQ ID NO: 1753450 - RNA, 19 nt, Homo sapiens
  misc_RNA (1)...(19): siRNA sense strand
agauggagaagauauauac

SEQ ID NO: 1753451 - RNA, 19 nt, Homo sapiens
  misc_RNA (1)...(19): siRNA sense strand
gcugagggccaucugaaac

SEQ ID NO: 1753452 - RNA, 19 nt, Homo sapiens
  misc_RNA (1)...(19): siRNA sense strand
ucagguacaucaggaacgu

SEQ ID NO: 1753453 - RNA, 19 nt, Homo sapiens
  misc_RNA (1)...(19): siRNA sense strand
agauggagauuuucaguuc

SEQ ID NO: 1753454 - RNA, 19 nt, Homo sapiens
  misc_RNA (1)...(19): siRNA sense strand
aaacuuauggagcgcaauc

SEQ ID NO: 1753455 - RNA, 19 nt, Homo sapiens
  misc_RNA (1)...(19): siRNA sense strand
aaauacaaagcaaggaugu

SEQ ID NO: 1753456 - RNA, 19 nt, Homo sapiens
  misc_RNA (1)...(19): siRNA sense strand
gaacgucucuaucaagaau

SEQ ID NO: 1753457 - RNA, 19 nt, Homo sapiens
  misc_RNA (1)...(19): siRNA sense strand
gaagauauauacucagcaa

SEQ ID NO: 1753458 - RNA, 19 nt, Homo sapiens
  misc_RNA (1)...(19): siRNA sense strand
gaauugaccucuaugaaag

SEQ ID NO: 1753459 - RNA, 19 nt, Homo sapiens
  misc_RNA (1)...(19): siRNA sense strand
gaagaaaguacuagaagaa

SEQ ID NO: 1753460 - RNA, 19 nt, Homo sapiens
  misc_RNA (1)...(19): siRNA sense strand
ggacauaucagguacauca

SEQ ID NO: 1753461 - RNA, 19 nt, Homo sapiens
  misc_RNA (1)...(19): siRNA sense strand
gaagacaugcugcuuugua

SEQ ID NO: 1753462 - RNA, 19 nt, Homo sapiens
  misc_RNA (1)...(19): siRNA sense strand
gaccagagaucguguugga

SEQ ID NO: 1753463 - RNA, 19 nt, Homo sapiens
  misc_RNA (1)...(19): siRNA sense strand
aagcaaggauguagaauug

SEQ ID NO: 1753464 - RNA, 19 nt, Homo sapiens
  misc_RNA (1)...(19): siRNA sense strand
ugaaacagauggagaagau

SEQ ID NO: 1753465 - RNA, 19 nt, Homo sapiens
  misc_RNA (1)...(19): siRNA sense strand
uagcagggccuucaaagua

SEQ ID NO: 1753466 - RNA, 19 nt, Homo sapiens
  misc_RNA (1)...(19): siRNA sense strand
gagaucguguuggacauua

SEQ ID NO: 1753467 - RNA, 19 nt, Homo sapiens
  misc_RNA (1)...(19): siRNA sense strand
gcauggcaguggugaguuu

SEQ ID NO: 1753468 - RNA, 19 nt, Homo sapiens
  misc_RNA (1)...(19): siRNA sense strand
uaauacaccuguucgaaau

SEQ ID NO: 1753469 - RNA, 19 nt, Homo sapiens
  misc_RNA (1)...(19): siRNA sense strand
gugaagacaugcugcuuug

SEQ ID NO: 1753470 - RNA, 19 nt, Homo sapiens
  misc_RNA (1)...(19): siRNA sense strand
ugaagaaaguacuagaaga

SEQ ID NO: 1753471 - RNA, 19 nt, Homo sapiens
  misc_RNA (1)...(19): siRNA sense strand
guucuuggcuucccauuag

SEQ ID NO: 1753472 - RNA, 19 nt, Homo sapiens
  misc_RNA (1)...(19): siRNA sense strand
gaaaguacuagaagaauac

SEQ ID NO: 1753473 - RNA, 19 nt, Homo sapiens
  misc_RNA (1)...(19): siRNA sense strand
cgaaacaucacuauugcua

SEQ ID NO: 1753474 - RNA, 19 nt, Homo sapiens
  misc_RNA (1)...(19): siRNA sense strand
cuacgaaacaucacuauug

SEQ ID NO: 1753475 - RNA, 19 nt, Homo sapiens
  misc_RNA (1)...(19): siRNA sense strand
gaaacaucacuauugcuaa

SEQ ID NO: 1753476 - RNA, 19 nt, Homo sapiens
  misc_RNA (1)...(19): siRNA sense strand
gcagggccuucaaaguaaa

SEQ ID NO: 1753477 - RNA, 19 nt, Homo sapiens
  misc_RNA (1)...(19): siRNA sense strand
ggagcgcaaucgucaguau

SEQ ID NO: 1753478 - RNA, 19 nt, Homo sapiens
  misc_RNA (1)...(19): siRNA sense strand
gauaauacaccuguucgaa

SEQ ID NO: 1753479 - RNA, 19 nt, Homo sapiens
  misc_RNA (1)...(19): siRNA sense strand
gaaagugucgcaucaaacu

SEQ ID NO: 1753480 - RNA, 19 nt, Homo sapiens
  misc_RNA (1)...(19): siRNA sense strand
ucagaggaauauaaagcua

SEQ ID NO: 1753481 - RNA, 19 nt, Homo sapiens
  misc_RNA (1)...(19): siRNA sense strand
ggaauauaaagcuauggua

SEQ ID NO: 1753482 - RNA, 19 nt, Homo sapiens
  misc_RNA (1)...(19): siRNA sense strand
uaucgaaagugucgcauca

SEQ ID NO: 1753483 - RNA, 19 nt, Homo sapiens
  misc_RNA (1)...(19): siRNA sense strand
agaauugaccucuaugaaa

SEQ ID NO: 1753484 - RNA, 19 nt, Homo sapiens
  misc_RNA (1)...(19): siRNA sense strand
aagacaugcugcuuuguaa

SEQ ID NO: 1753485 - RNA, 19 nt, Homo sapiens
  misc_RNA (1)...(19): siRNA sense strand
gacaugcugcuuuguaauu

SEQ ID NO: 1753486 - RNA, 19 nt, Homo sapiens
  misc_RNA (1)...(19): siRNA sense strand
caaacucucuggcuaugca

SEQ ID NO: 1753487 - RNA, 19 nt, Homo sapiens
  misc_RNA (1)...(19): siRNA sense strand
gcaaggauguagaauugac

SEQ ID NO: 1753488 - RNA, 19 nt, Homo sapiens
  misc_RNA (1)...(19): siRNA sense strand
cuggaaagcuagauauugu

SEQ ID NO: 1753489 - RNA, 19 nt, Homo sapiens
  misc_RNA (1)...(19): siRNA sense strand
ucgaaagugucgcaucaaa

SEQ ID NO: 1753490 - RNA, 19 nt, Homo sapiens
  misc_RNA (1)...(19): siRNA sense strand
uggagaagauauauacuca

SEQ ID NO: 1753491 - RNA, 19 nt, Homo sapiens
  misc_RNA (1)...(19): siRNA sense strand
acaugcugcuuuguaauua

SEQ ID NO: 1753492 - RNA, 19 nt, Homo sapiens
  misc_RNA (1)...(19): siRNA sense strand
ucaggaacgucucuaucaa

SEQ ID NO: 1753493 - RNA, 19 nt, Homo sapiens
  misc_RNA (1)...(19): siRNA sense strand
gcaaauacaaagcaaggau

SEQ ID NO: 1753494 - RNA, 19 nt, Homo sapiens
  misc_RNA (1)...(19): siRNA sense strand
aaacaucacuauugcuaac

SEQ ID NO: 1753495 - RNA, 19 nt, Homo sapiens
  misc_RNA (1)...(19): siRNA sense strand
caaguuuccuuuggauaau

SEQ ID NO: 1753496 - RNA, 19 nt, Homo sapiens
  misc_RNA (1)...(19): siRNA sense strand
uuuagucgcucaccagcua

SEQ ID NO: 1753497 - RNA, 19 nt, Homo sapiens
  misc_RNA (1)...(19): siRNA sense strand
aaacagauggagaagauau

SEQ ID NO: 1753498 - RNA, 19 nt, Homo sapiens
  misc_RNA (1)...(19): siRNA sense strand
cuccaaggccucuaugaua

SEQ ID NO: 1753499 - RNA, 19 nt, Homo sapiens
  misc_RNA (1)...(19): siRNA sense strand
gaaacagauggagaagaua

SEQ ID NO: 1753500 - RNA, 19 nt, Homo sapiens
  misc_RNA (1)...(19): siRNA sense strand
cgauggagauggagauuuu

SEQ ID NO: 1753501 - RNA, 19 nt, Homo sapiens
  misc_RNA (1)...(19): siRNA sense strand
uguccugccugcaacagua

SEQ ID NO: 1753502 - RNA, 19 nt, Homo sapiens
  misc_RNA (1)...(19): siRNA sense strand
agcagggccuucaaaguaa

SEQ ID NO: 1753503 - RNA, 19 nt, Homo sapiens
  misc_RNA (1)...(19): siRNA sense strand
aaagcaaggauguagaauu

SEQ ID NO: 1753504 - RNA, 19 nt, Homo sapiens
  misc_RNA (1)...(19): siRNA sense strand
guccaucagaggaauauaa

SEQ ID NO: 1753505 - RNA, 19 nt, Homo sapiens
  misc_RNA (1)...(19): siRNA sense strand
aggaacgucucuaucaaga

SEQ ID NO: 1753506 - RNA, 19 nt, Homo sapiens
  misc_RNA (1)...(19): siRNA sense strand
gcgcuggccuucuggacau

SEQ ID NO: 1753507 - RNA, 19 nt, Homo sapiens
  misc_RNA (1)...(19): siRNA sense strand
agaggaauauaaagcuaug

SEQ ID NO: 1753508 - RNA, 19 nt, Homo sapiens
  misc_RNA (1)...(19): siRNA sense strand
cuugaaccauccaugauug

SEQ ID NO: 1753509 - RNA, 19 nt, Homo sapiens
  misc_RNA (1)...(19): siRNA sense strand
aaaguucagugacaucucu

SEQ ID NO: 1753510 - RNA, 19 nt, Homo sapiens
  misc_RNA (1)...(19): siRNA sense strand
acaaagcaaggauguagaa

SEQ ID NO: 1753511 - RNA, 19 nt, Homo sapiens
  misc_RNA (1)...(19): siRNA sense strand
gauauuguccgcacagaac

SEQ ID NO: 1753512 - RNA, 19 nt, Homo sapiens
  misc_RNA (1)...(19): siRNA sense strand
caucaaacucucuggcuau

SEQ ID NO: 1753513 - RNA, 19 nt, Homo sapiens
  misc_RNA (1)...(19): siRNA sense strand
caugaagaaaguacuagaa

SEQ ID NO: 1753514 - RNA, 19 nt, Homo sapiens
  misc_RNA (1)...(19): siRNA sense strand
auaauacaccuguucgaaa

SEQ ID NO: 1753515 - RNA, 19 nt, Homo sapiens
  misc_RNA (1)...(19): siRNA sense strand
cagauggagaagauauaua

SEQ ID NO: 1753516 - RNA, 19 nt, Homo sapiens
  misc_RNA (1)...(19): siRNA sense strand
guacuagaagaauacaaga

SEQ ID NO: 1753517 - RNA, 19 nt, Homo sapiens
  misc_RNA (1)...(19): siRNA sense strand
caucuucugugaucagcau

SEQ ID NO: 1753518 - RNA, 19 nt, Homo sapiens
  misc_RNA (1)...(19): siRNA sense strand
ucacuauugcuaaccauga

SEQ ID NO: 1753519 - RNA, 19 nt, Homo sapiens
  misc_RNA (1)...(19): siRNA sense strand
ggaacgucucuaucaagaa

SEQ ID NO: 1753520 - RNA, 19 nt, Homo sapiens
  misc_RNA (1)...(19): siRNA sense strand
caugcugcuuuguaauuau

SEQ ID NO: 1753521 - RNA, 19 nt, Homo sapiens
  misc_RNA (1)...(19): siRNA sense strand
cacuauugcuaaccaugaa

SEQ ID NO: 1753522 - RNA, 19 nt, Homo sapiens
  misc_RNA (1)...(19): siRNA sense strand
uuaccuccaugaagaaagu

SEQ ID NO: 1753523 - RNA, 19 nt, Homo sapiens
  misc_RNA (1)...(19): siRNA sense strand
ugccugcucucacaucuuc

SEQ ID NO: 1753524 - RNA, 19 nt, Homo sapiens
  misc_RNA (1)...(19): siRNA sense strand
gagcagcagcaaguuucua

SEQ ID NO: 1753525 - RNA, 19 nt, Homo sapiens
  misc_RNA (1)...(19): siRNA sense strand
aacaguacccuuucuggaa

SEQ ID NO: 1753526 - RNA, 19 nt, Homo sapiens
  misc_RNA (1)...(19): siRNA sense strand
gcuacgaaacaucacuauu

SEQ ID NO: 1753527 - RNA, 19 nt, Homo sapiens
  misc_RNA (1)...(19): siRNA sense strand
gcuccaaggccucuaugau

SEQ ID NO: 1753528 - RNA, 19 nt, Homo sapiens
  misc_RNA (1)...(19): siRNA sense strand
gcgcaaucgucaguaucaa

SEQ ID NO: 1753529 - RNA, 19 nt, Homo sapiens
  misc_RNA (1)...(19): siRNA sense strand
gcaccugaacccagcaaca

SEQ ID NO: 1753530 - RNA, 19 nt, Homo sapiens
  misc_RNA (1)...(19): siRNA sense strand
uacgaaacaucacuauugc

SEQ ID NO: 1753531 - RNA, 19 nt, Homo sapiens
  misc_RNA (1)...(19): siRNA sense strand
gcaaucgucaguaucaaaa

SEQ ID NO: 1753532 - RNA, 19 nt, Homo sapiens
  misc_RNA (1)...(19): siRNA sense strand
gaacccagcaacagcuuuu

SEQ ID NO: 1753533 - RNA, 19 nt, Homo sapiens
  misc_RNA (1)...(19): siRNA sense strand
cagaggaauauaaagcuau

SEQ ID NO: 1753534 - RNA, 19 nt, Homo sapiens
  misc_RNA (1)...(19): siRNA sense strand
uuagagcagcagcaaguuu

SEQ ID NO: 1753535 - RNA, 19 nt, Homo sapiens
  misc_RNA (1)...(19): siRNA sense strand
caucagaggaauauaaagc

SEQ ID NO: 1753536 - RNA, 19 nt, Homo sapiens
  misc_RNA (1)...(19): siRNA sense strand
uagagcagcagcaaguuuc

SEQ ID NO: 1753537 - RNA, 19 nt, Homo sapiens
  misc_RNA (1)...(19): siRNA sense strand
ugaauuagagcagcagcaa

SEQ ID NO: 1753538 - RNA, 19 nt, Homo sapiens
  misc_RNA (1)...(19): siRNA sense strand
gcgauggagauggagauuu

SEQ ID NO: 1753539 - RNA, 19 nt, Homo sapiens
  misc_RNA (1)...(19): siRNA sense strand
ugugaagacaugcugcuuu

SEQ ID NO: 1753540 - RNA, 19 nt, Homo sapiens
  misc_RNA (1)...(19): siRNA sense strand
cuucuggacauaucaggua

SEQ ID NO: 1753541 - RNA, 19 nt, Homo sapiens
  misc_RNA (1)...(19): siRNA sense strand
ccuugaaccauccaugauu

SEQ ID NO: 1753542 - RNA, 19 nt, Homo sapiens
  misc_RNA (1)...(19): siRNA sense strand
cucuccaagucgugaauua

SEQ ID NO: 1753543 - RNA, 19 nt, Homo sapiens
  misc_RNA (1)...(19): siRNA sense strand
ggauaauacaccuguucga

SEQ ID NO: 1753544 - RNA, 19 nt, Homo sapiens
  misc_RNA (1)...(19): siRNA sense strand
caucaggaacgucucuauc

SEQ ID NO: 1753545 - RNA, 19 nt, Homo sapiens
  misc_RNA (1)...(19): siRNA sense strand
gcacagucugguguucuug

SEQ ID NO: 1753546 - RNA, 19 nt, Homo sapiens
  misc_RNA (1)...(19): siRNA sense strand
agauggagaagauauauac

SEQ ID NO: 1753547 - RNA, 19 nt, Homo sapiens
  misc_RNA (1)...(19): siRNA sense strand
gcugagggccaucugaaac

SEQ ID NO: 1753548 - RNA, 19 nt, Homo sapiens
  misc_RNA (1)...(19): siRNA sense strand
ucagguacaucaggaacgu

SEQ ID NO: 1753549 - RNA, 19 nt, Homo sapiens
  misc_RNA (1)...(19): siRNA sense strand
agauggagauuuucaguuc

SEQ ID NO: 1753550 - RNA, 19 nt, Homo sapiens
  misc_RNA (1)...(19): siRNA sense strand
aaacuuauggagcgcaauc

SEQ ID NO: 1753551 - RNA, 19 nt, Homo sapiens
  misc_RNA (1)...(19): siRNA sense strand
aaauacaaagcaaggaugu

SEQ ID NO: 1753552 - RNA, 19 nt, Homo sapiens
  misc_RNA (1)...(19): siRNA sense strand
gaacgucucuaucaagaau

SEQ ID NO: 1753553 - RNA, 19 nt, Homo sapiens
  misc_RNA (1)...(19): siRNA sense strand
gaagauauauacucagcaa

SEQ ID NO: 1753554 - RNA, 19 nt, Homo sapiens
  misc_RNA (1)...(19): siRNA sense strand
gaauugaccucuaugaaag

SEQ ID NO: 1753555 - RNA, 19 nt, Homo sapiens
  misc_RNA (1)...(19): siRNA sense strand
gaagaaaguacuagaagaa

SEQ ID NO: 1753556 - RNA, 19 nt, Homo sapiens
  misc_RNA (1)...(19): siRNA sense strand
ggacauaucagguacauca

SEQ ID NO: 1753557 - RNA, 19 nt, Homo sapiens
  misc_RNA (1)...(19): siRNA sense strand
gaagacaugcugcuuugua

SEQ ID NO: 1753558 - RNA, 19 nt, Homo sapiens
  misc_RNA (1)...(19): siRNA sense strand
gaccagagaucguguugga

SEQ ID NO: 1753559 - RNA, 19 nt, Homo sapiens
  misc_RNA (1)...(19): siRNA sense strand
aagcaaggauguagaauug

SEQ ID NO: 1753560 - RNA, 19 nt, Homo sapiens
  misc_RNA (1)...(19): siRNA sense strand
ugaaacagauggagaagau

SEQ ID NO: 1753561 - RNA, 19 nt, Homo sapiens
  misc_RNA (1)...(19): siRNA sense strand
uagcagggccuucaaagua

SEQ ID NO: 1753562 - RNA, 19 nt, Homo sapiens
  misc_RNA (1)...(19): siRNA sense strand
gagaucguguuggacauua

SEQ ID NO: 1753563 - RNA, 19 nt, Homo sapiens
  misc_RNA (1)...(19): siRNA sense strand
gcauggcaguggugaguuu

SEQ ID NO: 1753564 - RNA, 19 nt, Homo sapiens
  misc_RNA (1)...(19): siRNA sense strand
uaauacaccuguucgaaau

SEQ ID NO: 1753565 - RNA, 19 nt, Homo sapiens
  misc_RNA (1)...(19): siRNA sense strand
gugaagacaugcugcuuug

SEQ ID NO: 1753566 - RNA, 19 nt, Homo sapiens
  misc_RNA (1)...(19): siRNA sense strand
ugaagaaaguacuagaaga

SEQ ID NO: 1753567 - RNA, 19 nt, Homo sapiens
  misc_RNA (1)...(19): siRNA sense strand
guucuuggcuucccauuag

SEQ ID NO: 1753568 - RNA, 19 nt, Homo sapiens
  misc_RNA (1)...(19): siRNA sense strand
gaaaguacuagaagaauac

SEQ ID NO: 1753569 - RNA, 19 nt, Homo sapiens
  misc_RNA (1)...(19): siRNA sense strand
cgaaacaucacuauugcua

SEQ ID NO: 1753570 - RNA, 19 nt, Homo sapiens
  misc_RNA (1)...(19): siRNA sense strand
cuacgaaacaucacuauug

SEQ ID NO: 1753571 - RNA, 19 nt, Homo sapiens
  misc_RNA (1)...(19): siRNA sense strand
gaaacaucacuauugcuaa

SEQ ID NO: 1753572 - RNA, 19 nt, Homo sapiens
  misc_RNA (1)...(19): siRNA sense strand
gcagggccuucaaaguaaa

SEQ ID NO: 1753573 - RNA, 19 nt, Homo sapiens
  misc_RNA (1)...(19): siRNA sense strand
ggagcgcaaucgucaguau

SEQ ID NO: 1753574 - RNA, 19 nt, Homo sapiens
  misc_RNA (1)...(19): siRNA sense strand
gauaauacaccuguucgaa

SEQ ID NO: 1753575 - RNA, 19 nt, Homo sapiens
  misc_RNA (1)...(19): siRNA sense strand
gaaagugucgcaucaaacu

SEQ ID NO: 1753576 - RNA, 19 nt, Homo sapiens
  misc_RNA (1)...(19): siRNA sense strand
ucagaggaauauaaagcua

SEQ ID NO: 1753577 - RNA, 19 nt, Homo sapiens
  misc_RNA (1)...(19): siRNA sense strand
ggaauauaaagcuauggua

SEQ ID NO: 1753578 - RNA, 19 nt, Homo sapiens
  misc_RNA (1)...(19): siRNA sense strand
uaucgaaagugucgcauca

SEQ ID NO: 1753579 - RNA, 19 nt, Homo sapiens
  misc_RNA (1)...(19): siRNA sense strand
agaauugaccucuaugaaa

SEQ ID NO: 1753580 - RNA, 19 nt, Homo sapiens
  misc_RNA (1)...(19): siRNA sense strand
aagacaugcugcuuuguaa

SEQ ID NO: 1753581 - RNA, 19 nt, Homo sapiens
  misc_RNA (1)...(19): siRNA sense strand
gacaugcugcuuuguaauu

SEQ ID NO: 1753582 - RNA, 19 nt, Homo sapiens
  misc_RNA (1)...(19): siRNA sense strand
caaacucucuggcuaugca

SEQ ID NO: 1753583 - RNA, 19 nt, Homo sapiens
  misc_RNA (1)...(19): siRNA sense strand
gcaaggauguagaauugac

SEQ ID NO: 1753584 - RNA, 19 nt, Homo sapiens
  misc_RNA (1)...(19): siRNA sense strand
cuggaaagcuagauauugu

SEQ ID NO: 1753585 - RNA, 19 nt, Homo sapiens
  misc_RNA (1)...(19): siRNA sense strand
ucgaaagugucgcaucaaa

SEQ ID NO: 1753586 - RNA, 19 nt, Homo sapiens
  misc_RNA (1)...(19): siRNA sense strand
uggagaagauauauacuca

SEQ ID NO: 1753587 - RNA, 19 nt, Homo sapiens
  misc_RNA (1)...(19): siRNA sense strand
acaugcugcuuuguaauua

SEQ ID NO: 1753588 - RNA, 19 nt, Homo sapiens
  misc_RNA (1)...(19): siRNA sense strand
ucaggaacgucucuaucaa

SEQ ID NO: 1753589 - RNA, 19 nt, Homo sapiens
  misc_RNA (1)...(19): siRNA sense strand
gcaaauacaaagcaaggau

SEQ ID NO: 1753590 - RNA, 19 nt, Homo sapiens
  misc_RNA (1)...(19): siRNA sense strand
aaacaucacuauugcuaac

SEQ ID NO: 1753591 - RNA, 19 nt, Homo sapiens
  misc_RNA (1)...(19): siRNA sense strand
caaguuuccuuuggauaau

SEQ ID NO: 1753592 - RNA, 19 nt, Homo sapiens
  misc_RNA (1)...(19): siRNA sense strand
uuuagucgcucaccagcua

SEQ ID NO: 1753593 - RNA, 19 nt, Homo sapiens
  misc_RNA (1)...(19): siRNA sense strand
aaacagauggagaagauau

SEQ ID NO: 1753594 - RNA, 19 nt, Homo sapiens
  misc_RNA (1)...(19): siRNA sense strand
cuccaaggccucuaugaua

SEQ ID NO: 1753595 - RNA, 19 nt, Homo sapiens
  misc_RNA (1)...(19): siRNA sense strand
gaaacagauggagaagaua

SEQ ID NO: 1753596 - RNA, 19 nt, Homo sapiens
  misc_RNA (1)...(19): siRNA sense strand
cgauggagauggagauuuu

SEQ ID NO: 1753597 - RNA, 19 nt, Homo sapiens
  misc_RNA (1)...(19): siRNA sense strand
uguccugccugcaacagua

SEQ ID NO: 1753598 - RNA, 19 nt, Homo sapiens
  misc_RNA (1)...(19): siRNA sense strand
agcagggccuucaaaguaa

SEQ ID NO: 1753599 - RNA, 19 nt, Homo sapiens
  misc_RNA (1)...(19): siRNA sense strand
aaagcaaggauguagaauu

SEQ ID NO: 1753600 - RNA, 19 nt, Homo sapiens
  misc_RNA (1)...(19): siRNA sense strand
guccaucagaggaauauaa

SEQ ID NO: 1753601 - RNA, 19 nt, Homo sapiens
  misc_RNA (1)...(19): siRNA sense strand
aggaacgucucuaucaaga

SEQ ID NO: 1753602 - RNA, 19 nt, Homo sapiens
  misc_RNA (1)...(19): siRNA sense strand
gcgcuggccuucuggacau

SEQ ID NO: 1753603 - RNA, 19 nt, Homo sapiens
  misc_RNA (1)...(19): siRNA sense strand
agaggaauauaaagcuaug

SEQ ID NO: 1753604 - RNA, 19 nt, Homo sapiens
  misc_RNA (1)...(19): siRNA sense strand
cuugaaccauccaugauug

SEQ ID NO: 1753605 - RNA, 19 nt, Homo sapiens
  misc_RNA (1)...(19): siRNA sense strand
aaaguucagugacaucucu

SEQ ID NO: 1753606 - RNA, 19 nt, Homo sapiens
  misc_RNA (1)...(19): siRNA sense strand
acaaagcaaggauguagaa

SEQ ID NO: 1753607 - RNA, 19 nt, Homo sapiens
  misc_RNA (1)...(19): siRNA sense strand
gauauuguccgcacagaac

SEQ ID NO: 1753608 - RNA, 19 nt, Homo sapiens
  misc_RNA (1)...(19): siRNA sense strand
caucaaacucucuggcuau

SEQ ID NO: 1753609 - RNA, 19 nt, Homo sapiens
  misc_RNA (1)...(19): siRNA sense strand
caugaagaaaguacuagaa

SEQ ID NO: 1753610 - RNA, 19 nt, Homo sapiens
  misc_RNA (1)...(19): siRNA sense strand
auaauacaccuguucgaaa

SEQ ID NO: 1753611 - RNA, 19 nt, Homo sapiens
  misc_RNA (1)...(19): siRNA sense strand
cagauggagaagauauaua

SEQ ID NO: 1753612 - RNA, 19 nt, Homo sapiens
  misc_RNA (1)...(19): siRNA sense strand
guacuagaagaauacaaga

SEQ ID NO: 1753613 - RNA, 19 nt, Homo sapiens
  misc_RNA (1)...(19): siRNA sense strand
caucuucugugaucagcau

SEQ ID NO: 1753614 - RNA, 19 nt, Homo sapiens
  misc_RNA (1)...(19): siRNA sense strand
ucacuauugcuaaccauga

SEQ ID NO: 1753615 - RNA, 19 nt, Homo sapiens
  misc_RNA (1)...(19): siRNA sense strand
ggaacgucucuaucaagaa

SEQ ID NO: 1753616 - RNA, 19 nt, Homo sapiens
  misc_RNA (1)...(19): siRNA sense strand
caugcugcuuuguaauuau

SEQ ID NO: 1753617 - RNA, 19 nt, Homo sapiens
  misc_RNA (1)...(19): siRNA sense strand
cacuauugcuaaccaugaa

SEQ ID NO: 1753618 - RNA, 19 nt, Homo sapiens
  misc_RNA (1)...(19): siRNA sense strand
uuaccuccaugaagaaagu

SEQ ID NO: 1753619 - RNA, 19 nt, Homo sapiens
  misc_RNA (1)...(19): siRNA sense strand
ugccugcucucacaucuuc

SEQ ID NO: 1753620 - RNA, 19 nt, Homo sapiens
  misc_RNA (1)...(19): siRNA sense strand
gagcagcagcaaguuucua

SEQ ID NO: 1753621 - RNA, 19 nt, Homo sapiens
  misc_RNA (1)...(19): siRNA sense strand
aacaguacccuuucuggaa

SEQ ID NO: 1753622 - RNA, 19 nt, Homo sapiens
  misc_RNA (1)...(19): siRNA sense strand
gcuacgaaacaucacuauu

SEQ ID NO: 1753623 - RNA, 19 nt, Homo sapiens
  misc_RNA (1)...(19): siRNA sense strand
gcuccaaggccucuaugau

SEQ ID NO: 1753624 - RNA, 19 nt, Homo sapiens
  misc_RNA (1)...(19): siRNA sense strand
gcgcaaucgucaguaucaa

SEQ ID NO: 1753625 - RNA, 19 nt, Homo sapiens
  misc_RNA (1)...(19): siRNA sense strand
gcaccugaacccagcaaca

SEQ ID NO: 1753626 - RNA, 19 nt, Homo sapiens
  misc_RNA (1)...(19): siRNA sense strand
uacgaaacaucacuauugc

SEQ ID NO: 1753627 - RNA, 19 nt, Homo sapiens
  misc_RNA (1)...(19): siRNA sense strand
gcaaucgucaguaucaaaa

SEQ ID NO: 1753628 - RNA, 19 nt, Homo sapiens
  misc_RNA (1)...(19): siRNA sense strand
gaacccagcaacagcuuuu

SEQ ID NO: 1753629 - RNA, 19 nt, Homo sapiens
  misc_RNA (1)...(19): siRNA sense strand
cagaggaauauaaagcuau

SEQ ID NO: 1753630 - RNA, 19 nt, Homo sapiens
  misc_RNA (1)...(19): siRNA sense strand
uuagagcagcagcaaguuu

SEQ ID NO: 1753631 - RNA, 19 nt, Homo sapiens
  misc_RNA (1)...(19): siRNA sense strand
caucagaggaauauaaagc

SEQ ID NO: 1753632 - RNA, 19 nt, Homo sapiens
  misc_RNA (1)...(19): siRNA sense strand
uagagcagcagcaaguuuc

SEQ ID NO: 1753633 - RNA, 19 nt, Homo sapiens
  misc_RNA (1)...(19): siRNA sense strand
ugaauuagagcagcagcaa

SEQ ID NO: 1753634 - RNA, 19 nt, Homo sapiens
  misc_RNA (1)...(19): siRNA sense strand
gcgauggagauggagauuu

SEQ ID NO: 1753635 - RNA, 19 nt, Homo sapiens
  misc_RNA (1)...(19): siRNA sense strand
ugugaagacaugcugcuuu

SEQ ID NO: 1753636 - RNA, 19 nt, Homo sapiens
  misc_RNA (1)...(19): siRNA sense strand
cuucuggacauaucaggua

SEQ ID NO: 1753637 - RNA, 19 nt, Homo sapiens
  misc_RNA (1)...(19): siRNA sense strand
ccuugaaccauccaugauu

SEQ ID NO: 1753638 - RNA, 19 nt, Homo sapiens
  misc_RNA (1)...(19): siRNA sense strand
cucuccaagucgugaauua

SEQ ID NO: 1753639 - RNA, 19 nt, Homo sapiens
  misc_RNA (1)...(19): siRNA sense strand
ggauaauacaccuguucga

SEQ ID NO: 1753640 - RNA, 19 nt, Homo sapiens
  misc_RNA (1)...(19): siRNA sense strand
caucaggaacgucucuauc

SEQ ID NO: 1753641 - RNA, 19 nt, Homo sapiens
  misc_RNA (1)...(19): siRNA sense strand
gcacagucugguguucuug

SEQ ID NO: 1753642 - RNA, 19 nt, Homo sapiens
  misc_RNA (1)...(19): siRNA sense strand
agauggagaagauauauac

SEQ ID NO: 1753643 - RNA, 19 nt, Homo sapiens
  misc_RNA (1)...(19): siRNA sense strand
gcugagggccaucugaaac

SEQ ID NO: 1753644 - RNA, 19 nt, Homo sapiens
  misc_RNA (1)...(19): siRNA sense strand
ucagguacaucaggaacgu

SEQ ID NO: 1753645 - RNA, 19 nt, Homo sapiens
  misc_RNA (1)...(19): siRNA sense strand
agauggagauuuucaguuc

SEQ ID NO: 1753646 - RNA, 19 nt, Homo sapiens
  misc_RNA (1)...(19): siRNA sense strand
aaacuuauggagcgcaauc

SEQ ID NO: 1753647 - RNA, 19 nt, Homo sapiens
  misc_RNA (1)...(19): siRNA sense strand
aaauacaaagcaaggaugu

SEQ ID NO: 1753648 - RNA, 19 nt, Homo sapiens
  misc_RNA (1)...(19): siRNA sense strand
gaacgucucuaucaagaau

SEQ ID NO: 1753649 - RNA, 19 nt, Homo sapiens
  misc_RNA (1)...(19): siRNA sense strand
gaagauauauacucagcaa

SEQ ID NO: 1753650 - RNA, 19 nt, Homo sapiens
  misc_RNA (1)...(19): siRNA sense strand
gaauugaccucuaugaaag

SEQ ID NO: 1753651 - RNA, 19 nt, Homo sapiens
  misc_RNA (1)...(19): siRNA sense strand
gaagaaaguacuagaagaa

SEQ ID NO: 1753652 - RNA, 19 nt, Homo sapiens
  misc_RNA (1)...(19): siRNA sense strand
ggacauaucagguacauca

SEQ ID NO: 1753653 - RNA, 19 nt, Homo sapiens
  misc_RNA (1)...(19): siRNA sense strand
gaagacaugcugcuuugua

SEQ ID NO: 1753654 - RNA, 19 nt, Homo sapiens
  misc_RNA (1)...(19): siRNA sense strand
gaccagagaucguguugga

SEQ ID NO: 1753655 - RNA, 19 nt, Homo sapiens
  misc_RNA (1)...(19): siRNA sense strand
aagcaaggauguagaauug

SEQ ID NO: 1753656 - RNA, 19 nt, Homo sapiens
  misc_RNA (1)...(19): siRNA sense strand
ugaaacagauggagaagau

SEQ ID NO: 1753657 - RNA, 19 nt, Homo sapiens
  misc_RNA (1)...(19): siRNA sense strand
uagcagggccuucaaagua

SEQ ID NO: 1753658 - RNA, 19 nt, Homo sapiens
  misc_RNA (1)...(19): siRNA sense strand
gagaucguguuggacauua

SEQ ID NO: 1753659 - RNA, 19 nt, Homo sapiens
  misc_RNA (1)...(19): siRNA sense strand
gcauggcaguggugaguuu

SEQ ID NO: 1753660 - RNA, 19 nt, Homo sapiens
  misc_RNA (1)...(19): siRNA sense strand
uaauacaccuguucgaaau

SEQ ID NO: 1753661 - RNA, 19 nt, Homo sapiens
  misc_RNA (1)...(19): siRNA sense strand
gugaagacaugcugcuuug

SEQ ID NO: 1753662 - RNA, 19 nt, Homo sapiens
  misc_RNA (1)...(19): siRNA sense strand
ugaagaaaguacuagaaga

SEQ ID NO: 1753663 - RNA, 19 nt, Homo sapiens
  misc_RNA (1)...(19): siRNA sense strand
guucuuggcuucccauuag

SEQ ID NO: 1753664 - RNA, 19 nt, Homo sapiens
  misc_RNA (1)...(19): siRNA sense strand
gaaaguacuagaagaauac

SEQ ID NO: 1753665 - RNA, 19 nt, Homo sapiens
  misc_RNA (1)...(19): siRNA sense strand
cgaaacaucacuauugcua

SEQ ID NO: 1753666 - RNA, 19 nt, Homo sapiens
  misc_RNA (1)...(19): siRNA sense strand
cuacgaaacaucacuauug

SEQ ID NO: 1753667 - RNA, 19 nt, Homo sapiens
  misc_RNA (1)...(19): siRNA sense strand
gaaacaucacuauugcuaa

SEQ ID NO: 1753668 - RNA, 19 nt, Homo sapiens
  misc_RNA (1)...(19): siRNA sense strand
gcagggccuucaaaguaaa

SEQ ID NO: 1753669 - RNA, 19 nt, Homo sapiens
  misc_RNA (1)...(19): siRNA sense strand
ggagcgcaaucgucaguau

SEQ ID NO: 1753670 - RNA, 19 nt, Homo sapiens
  misc_RNA (1)...(19): siRNA sense strand
gauaauacaccuguucgaa

SEQ ID NO: 1753671 - RNA, 19 nt, Homo sapiens
  misc_RNA (1)...(19): siRNA sense strand
gaaagugucgcaucaaacu

SEQ ID NO: 1753672 - RNA, 19 nt, Homo sapiens
  misc_RNA (1)...(19): siRNA sense strand
ucagaggaauauaaagcua

SEQ ID NO: 1753673 - RNA, 19 nt, Homo sapiens
  misc_RNA (1)...(19): siRNA sense strand
ggaauauaaagcuauggua

SEQ ID NO: 1753674 - RNA, 19 nt, Homo sapiens
  misc_RNA (1)...(19): siRNA sense strand
uaucgaaagugucgcauca

SEQ ID NO: 1753675 - RNA, 19 nt, Homo sapiens
  misc_RNA (1)...(19): siRNA sense strand
agaauugaccucuaugaaa

SEQ ID NO: 1753676 - RNA, 19 nt, Homo sapiens
  misc_RNA (1)...(19): siRNA sense strand
aagacaugcugcuuuguaa

SEQ ID NO: 1753677 - RNA, 19 nt, Homo sapiens
  misc_RNA (1)...(19): siRNA sense strand
gacaugcugcuuuguaauu

SEQ ID NO: 1753678 - RNA, 19 nt, Homo sapiens
  misc_RNA (1)...(19): siRNA sense strand
caaacucucuggcuaugca

SEQ ID NO: 1753679 - RNA, 19 nt, Homo sapiens
  misc_RNA (1)...(19): siRNA sense strand
gcaaggauguagaauugac

SEQ ID NO: 1753680 - RNA, 19 nt, Homo sapiens
  misc_RNA (1)...(19): siRNA sense strand
cuggaaagcuagauauugu

SEQ ID NO: 1753681 - RNA, 19 nt, Homo sapiens
  misc_RNA (1)...(19): siRNA sense strand
ucgaaagugucgcaucaaa

SEQ ID NO: 1753682 - RNA, 19 nt, Homo sapiens
  misc_RNA (1)...(19): siRNA sense strand
uggagaagauauauacuca

SEQ ID NO: 1753683 - RNA, 19 nt, Homo sapiens
  misc_RNA (1)...(19): siRNA sense strand
acaugcugcuuuguaauua

SEQ ID NO: 1753684 - RNA, 19 nt, Homo sapiens
  misc_RNA (1)...(19): siRNA sense strand
ucaggaacgucucuaucaa

SEQ ID NO: 1753685 - RNA, 19 nt, Homo sapiens
  misc_RNA (1)...(19): siRNA sense strand
gcaaauacaaagcaaggau

SEQ ID NO: 1753686 - RNA, 19 nt, Homo sapiens
  misc_RNA (1)...(19): siRNA sense strand
aaacaucacuauugcuaac

SEQ ID NO: 1753687 - RNA, 19 nt, Homo sapiens
  misc_RNA (1)...(19): siRNA sense strand
caaguuuccuuuggauaau

SEQ ID NO: 1753688 - RNA, 19 nt, Homo sapiens
  misc_RNA (1)...(19): siRNA sense strand
uuuagucgcucaccagcua

SEQ ID NO: 1753689 - RNA, 19 nt, Homo sapiens
  misc_RNA (1)...(19): siRNA sense strand
aaacagauggagaagauau

SEQ ID NO: 1753690 - RNA, 19 nt, Homo sapiens
  misc_RNA (1)...(19): siRNA sense strand
cuccaaggccucuaugaua

SEQ ID NO: 1753691 - RNA, 19 nt, Homo sapiens
  misc_RNA (1)...(19): siRNA sense strand
gaaacagauggagaagaua

SEQ ID NO: 1753692 - RNA, 19 nt, Homo sapiens
  misc_RNA (1)...(19): siRNA sense strand
cgauggagauggagauuuu

SEQ ID NO: 1753693 - RNA, 19 nt, Homo sapiens
  misc_RNA (1)...(19): siRNA sense strand
uguccugccugcaacagua

SEQ ID NO: 1753694 - RNA, 19 nt, Homo sapiens
  misc_RNA (1)...(19): siRNA sense strand
agcagggccuucaaaguaa

SEQ ID NO: 1753695 - RNA, 19 nt, Homo sapiens
  misc_RNA (1)...(19): siRNA sense strand
aaagcaaggauguagaauu

SEQ ID NO: 1753696 - RNA, 19 nt, Homo sapiens
  misc_RNA (1)...(19): siRNA sense strand
guccaucagaggaauauaa

SEQ ID NO: 1753697 - RNA, 19 nt, Homo sapiens
  misc_RNA (1)...(19): siRNA sense strand
aggaacgucucuaucaaga

SEQ ID NO: 1753698 - RNA, 19 nt, Homo sapiens
  misc_RNA (1)...(19): siRNA sense strand
gcgcuggccuucuggacau

SEQ ID NO: 1753699 - RNA, 19 nt, Homo sapiens
  misc_RNA (1)...(19): siRNA sense strand
agaggaauauaaagcuaug

SEQ ID NO: 1753700 - RNA, 19 nt, Homo sapiens
  misc_RNA (1)...(19): siRNA sense strand
cuugaaccauccaugauug

SEQ ID NO: 1753701 - RNA, 19 nt, Homo sapiens
  misc_RNA (1)...(19): siRNA sense strand
aaaguucagugacaucucu

SEQ ID NO: 1753702 - RNA, 19 nt, Homo sapiens
  misc_RNA (1)...(19): siRNA sense strand
acaaagcaaggauguagaa

SEQ ID NO: 1753703 - RNA, 19 nt, Homo sapiens
  misc_RNA (1)...(19): siRNA sense strand
gauauuguccgcacagaac

SEQ ID NO: 1753704 - RNA, 19 nt, Homo sapiens
  misc_RNA (1)...(19): siRNA sense strand
caucaaacucucuggcuau

SEQ ID NO: 1753705 - RNA, 19 nt, Homo sapiens
  misc_RNA (1)...(19): siRNA sense strand
caugaagaaaguacuagaa

SEQ ID NO: 1753706 - RNA, 19 nt, Homo sapiens
  misc_RNA (1)...(19): siRNA sense strand
auaauacaccuguucgaaa

SEQ ID NO: 1753707 - RNA, 19 nt, Homo sapiens
  misc_RNA (1)...(19): siRNA sense strand
cagauggagaagauauaua

SEQ ID NO: 1753708 - RNA, 19 nt, Homo sapiens
  misc_RNA (1)...(19): siRNA sense strand
guacuagaagaauacaaga

SEQ ID NO: 1753709 - RNA, 19 nt, Homo sapiens
  misc_RNA (1)...(19): siRNA sense strand
caucuucugugaucagcau

SEQ ID NO: 1753710 - RNA, 19 nt, Homo sapiens
  misc_RNA (1)...(19): siRNA sense strand
ucacuauugcuaaccauga

SEQ ID NO: 1753711 - RNA, 19 nt, Homo sapiens
  misc_RNA (1)...(19): siRNA sense strand
ggaacgucucuaucaagaa

SEQ ID NO: 1753712 - RNA, 19 nt, Homo sapiens
  misc_RNA (1)...(19): siRNA sense strand
caugcugcuuuguaauuau

SEQ ID NO: 1753713 - RNA, 19 nt, Homo sapiens
  misc_RNA (1)...(19): siRNA sense strand
cacuauugcuaaccaugaa

SEQ ID NO: 1753714 - RNA, 19 nt, Homo sapiens
  misc_RNA (1)...(19): siRNA sense strand
uuaccuccaugaagaaagu

SEQ ID NO: 1753715 - RNA, 19 nt, Homo sapiens
  misc_RNA (1)...(19): siRNA sense strand
ugccugcucucacaucuuc

SEQ ID NO: 1753716 - RNA, 19 nt, Homo sapiens
  misc_RNA (1)...(19): siRNA sense strand
gagcagcagcaaguuucua

SEQ ID NO: 1753717 - RNA, 19 nt, Homo sapiens
  misc_RNA (1)...(19): siRNA sense strand
aacaguacccuuucuggaa

SEQ ID NO: 1753718 - RNA, 19 nt, Homo sapiens
  misc_RNA (1)...(19): siRNA sense strand
gcuacgaaacaucacuauu

SEQ ID NO: 1753719 - RNA, 19 nt, Homo sapiens
  misc_RNA (1)...(19): siRNA sense strand
gcuccaaggccucuaugau

SEQ ID NO: 1753720 - RNA, 19 nt, Homo sapiens
  misc_RNA (1)...(19): siRNA sense strand
gcgcaaucgucaguaucaa

SEQ ID NO: 1753721 - RNA, 19 nt, Homo sapiens
  misc_RNA (1)...(19): siRNA sense strand
gcaccugaacccagcaaca

SEQ ID NO: 1753722 - RNA, 19 nt, Homo sapiens
  misc_RNA (1)...(19): siRNA sense strand
uacgaaacaucacuauugc

SEQ ID NO: 1753723 - RNA, 19 nt, Homo sapiens
  misc_RNA (1)...(19): siRNA sense strand
gcaaucgucaguaucaaaa

SEQ ID NO: 1753724 - RNA, 19 nt, Homo sapiens
  misc_RNA (1)...(19): siRNA sense strand
gaacccagcaacagcuuuu

SEQ ID NO: 1753725 - RNA, 19 nt, Homo sapiens
  misc_RNA (1)...(19): siRNA sense strand
cagaggaauauaaagcuau

SEQ ID NO: 1753726 - RNA, 19 nt, Homo sapiens
  misc_RNA (1)...(19): siRNA sense strand
uuagagcagcagcaaguuu

SEQ ID NO: 1753727 - RNA, 19 nt, Homo sapiens
  misc_RNA (1)...(19): siRNA sense strand
caucagaggaauauaaagc

SEQ ID NO: 1753728 - RNA, 19 nt, Homo sapiens
  misc_RNA (1)...(19): siRNA sense strand
uagagcagcagcaaguuuc

SEQ ID NO: 1753729 - RNA, 19 nt, Homo sapiens
  misc_RNA (1)...(19): siRNA sense strand
ugaauuagagcagcagcaa

SEQ ID NO: 1753730 - RNA, 19 nt, Homo sapiens
  misc_RNA (1)...(19): siRNA sense strand
gcgauggagauggagauuu

SEQ ID NO: 1753731 - RNA, 19 nt, Homo sapiens
  misc_RNA (1)...(19): siRNA sense strand
ugugaagacaugcugcuuu

SEQ ID NO: 1753732 - RNA, 19 nt, Homo sapiens
  misc_RNA (1)...(19): siRNA sense strand
cuucuggacauaucaggua

SEQ ID NO: 1753733 - RNA, 19 nt, Homo sapiens
  misc_RNA (1)...(19): siRNA sense strand
ccuugaaccauccaugauu

SEQ ID NO: 1753734 - RNA, 19 nt, Homo sapiens
  misc_RNA (1)...(19): siRNA sense strand
cucuccaagucgugaauua

SEQ ID NO: 1753735 - RNA, 19 nt, Homo sapiens
  misc_RNA (1)...(19): siRNA sense strand
ggauaauacaccuguucga

SEQ ID NO: 1753736 - RNA, 19 nt, Homo sapiens
  misc_RNA (1)...(19): siRNA sense strand
caucaggaacgucucuauc

SEQ ID NO: 1753737 - RNA, 19 nt, Homo sapiens
  misc_RNA (1)...(19): siRNA sense strand
gcacagucugguguucuug

SEQ ID NO: 1753738 - RNA, 19 nt, Homo sapiens
  misc_RNA (1)...(19): siRNA sense strand
agauggagaagauauauac

SEQ ID NO: 1753739 - RNA, 19 nt, Homo sapiens
  misc_RNA (1)...(19): siRNA sense strand
gcugagggccaucugaaac

SEQ ID NO: 1753740 - RNA, 19 nt, Homo sapiens
  misc_RNA (1)...(19): siRNA sense strand
ucagguacaucaggaacgu

SEQ ID NO: 1753741 - RNA, 19 nt, Homo sapiens
  misc_RNA (1)...(19): siRNA sense strand
agauggagauuuucaguuc

SEQ ID NO: 1753742 - RNA, 19 nt, Homo sapiens
  misc_RNA (1)...(19): siRNA sense strand
aaacuuauggagcgcaauc

SEQ ID NO: 1753743 - RNA, 19 nt, Homo sapiens
  misc_RNA (1)...(19): siRNA sense strand
aaauacaaagcaaggaugu

SEQ ID NO: 1753744 - RNA, 19 nt, Homo sapiens
  misc_RNA (1)...(19): siRNA sense strand
gaacgucucuaucaagaau

SEQ ID NO: 1753745 - RNA, 19 nt, Homo sapiens
  misc_RNA (1)...(19): siRNA sense strand
gaagauauauacucagcaa

SEQ ID NO: 1753746 - RNA, 19 nt, Homo sapiens
  misc_RNA (1)...(19): siRNA sense strand
gaauugaccucuaugaaag

SEQ ID NO: 1753747 - RNA, 19 nt, Homo sapiens
  misc_RNA (1)...(19): siRNA sense strand
gaagaaaguacuagaagaa

SEQ ID NO: 1753748 - RNA, 19 nt, Homo sapiens
  misc_RNA (1)...(19): siRNA sense strand
ggacauaucagguacauca

SEQ ID NO: 1753749 - RNA, 19 nt, Homo sapiens
  misc_RNA (1)...(19): siRNA sense strand
gaagacaugcugcuuugua

SEQ ID NO: 1753750 - RNA, 19 nt, Homo sapiens
  misc_RNA (1)...(19): siRNA sense strand
agaccucacuauccuauua

SEQ ID NO: 1753751 - RNA, 19 nt, Homo sapiens
  misc_RNA (1)...(19): siRNA sense strand
gaccagagaucguguugga

SEQ ID NO: 1753752 - RNA, 19 nt, Homo sapiens
  misc_RNA (1)...(19): siRNA sense strand
aagcaaggauguagaauug

SEQ ID NO: 1753753 - RNA, 19 nt, Homo sapiens
  misc_RNA (1)...(19): siRNA sense strand
ugaaacagauggagaagau

SEQ ID NO: 1753754 - RNA, 19 nt, Homo sapiens
  misc_RNA (1)...(19): siRNA sense strand
uagcagggccuucaaagua

SEQ ID NO: 1753755 - RNA, 19 nt, Homo sapiens
  misc_RNA (1)...(19): siRNA sense strand
gagaucguguuggacauua

SEQ ID NO: 1753756 - RNA, 19 nt, Homo sapiens
  misc_RNA (1)...(19): siRNA sense strand
gcauggcaguggugaguuu

SEQ ID NO: 1753757 - RNA, 19 nt, Homo sapiens
  misc_RNA (1)...(19): siRNA sense strand
uaauacaccuguucgaaau

SEQ ID NO: 1753758 - RNA, 19 nt, Homo sapiens
  misc_RNA (1)...(19): siRNA sense strand
gugaagacaugcugcuuug

SEQ ID NO: 1753759 - RNA, 19 nt, Homo sapiens
  misc_RNA (1)...(19): siRNA sense strand
ugaagaaaguacuagaaga

SEQ ID NO: 1753760 - RNA, 19 nt, Homo sapiens
  misc_RNA (1)...(19): siRNA sense strand
guucuuggcuucccauuag

SEQ ID NO: 1753761 - RNA, 19 nt, Homo sapiens
  misc_RNA (1)...(19): siRNA sense strand
gaaaguacuagaagaauac

SEQ ID NO: 1753762 - RNA, 19 nt, Homo sapiens
  misc_RNA (1)...(19): siRNA sense strand
cgaaacaucacuauugcua

SEQ ID NO: 1753763 - RNA, 19 nt, Homo sapiens
  misc_RNA (1)...(19): siRNA sense strand
cuacgaaacaucacuauug

SEQ ID NO: 1753764 - RNA, 19 nt, Homo sapiens
  misc_RNA (1)...(19): siRNA sense strand
gaaacaucacuauugcuaa

SEQ ID NO: 1753765 - RNA, 19 nt, Homo sapiens
  misc_RNA (1)...(19): siRNA sense strand
gcagggccuucaaaguaaa

SEQ ID NO: 1753766 - RNA, 19 nt, Homo sapiens
  misc_RNA (1)...(19): siRNA sense strand
gaaagugucgcaucaaacu

SEQ ID NO: 1753767 - RNA, 19 nt, Homo sapiens
  misc_RNA (1)...(19): siRNA sense strand
gauaauacaccuguucgaa

SEQ ID NO: 1753768 - RNA, 19 nt, Homo sapiens
  misc_RNA (1)...(19): siRNA sense strand
ggagcgcaaucgucaguau

SEQ ID NO: 1753769 - RNA, 19 nt, Homo sapiens
  misc_RNA (1)...(19): siRNA sense strand
ucagaggaauauaaagcua

SEQ ID NO: 1753770 - RNA, 19 nt, Homo sapiens
  misc_RNA (1)...(19): siRNA sense strand
uaucgaaagugucgcauca

SEQ ID NO: 1753771 - RNA, 19 nt, Homo sapiens
  misc_RNA (1)...(19): siRNA sense strand
agaauugaccucuaugaaa

SEQ ID NO: 1753772 - RNA, 19 nt, Homo sapiens
  misc_RNA (1)...(19): siRNA sense strand
ggaauauaaagcuauggua

SEQ ID NO: 1753773 - RNA, 19 nt, Homo sapiens
  misc_RNA (1)...(19): siRNA sense strand
aagacaugcugcuuuguaa

SEQ ID NO: 1753774 - RNA, 19 nt, Homo sapiens
  misc_RNA (1)...(19): siRNA sense strand
gacaugcugcuuuguaauu

SEQ ID NO: 1753775 - RNA, 19 nt, Homo sapiens
  misc_RNA (1)...(19): siRNA sense strand
gcaaggauguagaauugac

SEQ ID NO: 1753776 - RNA, 19 nt, Homo sapiens
  misc_RNA (1)...(19): siRNA sense strand
caaacucucuggcuaugca

SEQ ID NO: 1753777 - RNA, 19 nt, Homo sapiens
  misc_RNA (1)...(19): siRNA sense strand
ucgaaagugucgcaucaaa

SEQ ID NO: 1753778 - RNA, 19 nt, Homo sapiens
  misc_RNA (1)...(19): siRNA sense strand
cuggaaagcuagauauugu

SEQ ID NO: 1753779 - RNA, 19 nt, Homo sapiens
  misc_RNA (1)...(19): siRNA sense strand
uggagaagauauauacuca

SEQ ID NO: 1753780 - RNA, 19 nt, Homo sapiens
  misc_RNA (1)...(19): siRNA sense strand
acaugcugcuuuguaauua

SEQ ID NO: 1753781 - RNA, 19 nt, Homo sapiens
  misc_RNA (1)...(19): siRNA sense strand
ucaggaacgucucuaucaa

SEQ ID NO: 1753782 - RNA, 19 nt, Homo sapiens
  misc_RNA (1)...(19): siRNA sense strand
gcaaauacaaagcaaggau

SEQ ID NO: 1753783 - RNA, 19 nt, Homo sapiens
  misc_RNA (1)...(19): siRNA sense strand
aaacaucacuauugcuaac

SEQ ID NO: 1753784 - RNA, 19 nt, Homo sapiens
  misc_RNA (1)...(19): siRNA sense strand
caaguuuccuuuggauaau

SEQ ID NO: 1753785 - RNA, 19 nt, Homo sapiens
  misc_RNA (1)...(19): siRNA sense strand
uuuagucgcucaccagcua

SEQ ID NO: 1753786 - RNA, 19 nt, Homo sapiens
  misc_RNA (1)...(19): siRNA sense strand
aaacagauggagaagauau

SEQ ID NO: 1753787 - RNA, 19 nt, Homo sapiens
  misc_RNA (1)...(19): siRNA sense strand
cuccaaggccucuaugaua

SEQ ID NO: 1753788 - RNA, 19 nt, Homo sapiens
  misc_RNA (1)...(19): siRNA sense strand
gaaacagauggagaagaua

SEQ ID NO: 1753789 - RNA, 19 nt, Homo sapiens
  misc_RNA (1)...(19): siRNA sense strand
cgauggagauggagauuuu

SEQ ID NO: 1753790 - RNA, 19 nt, Homo sapiens
  misc_RNA (1)...(19): siRNA sense strand
ggagaccucacuauccuau

SEQ ID NO: 1753791 - RNA, 19 nt, Homo sapiens
  misc_RNA (1)...(19): siRNA sense strand
uguccugccugcaacagua

SEQ ID NO: 1753792 - RNA, 19 nt, Homo sapiens
  misc_RNA (1)...(19): siRNA sense strand
agcagggccuucaaaguaa

SEQ ID NO: 1753793 - RNA, 19 nt, Homo sapiens
  misc_RNA (1)...(19): siRNA sense strand
aaagcaaggauguagaauu

SEQ ID NO: 1753794 - RNA, 19 nt, Homo sapiens
  misc_RNA (1)...(19): siRNA sense strand
guccaucagaggaauauaa

SEQ ID NO: 1753795 - RNA, 19 nt, Homo sapiens
  misc_RNA (1)...(19): siRNA sense strand
aggaacgucucuaucaaga

SEQ ID NO: 1753796 - RNA, 19 nt, Homo sapiens
  misc_RNA (1)...(19): siRNA sense strand
gcgcuggccuucuggacau

SEQ ID NO: 1753797 - RNA, 19 nt, Homo sapiens
  misc_RNA (1)...(19): siRNA sense strand
agaggaauauaaagcuaug

SEQ ID NO: 1753798 - RNA, 19 nt, Homo sapiens
  misc_RNA (1)...(19): siRNA sense strand
cuugaaccauccaugauug

SEQ ID NO: 1753799 - RNA, 19 nt, Homo sapiens
  misc_RNA (1)...(19): siRNA sense strand
aaaguucagugacaucucu

SEQ ID NO: 1753800 - RNA, 19 nt, Homo sapiens
  misc_RNA (1)...(19): siRNA sense strand
acaaagcaaggauguagaa

SEQ ID NO: 1753801 - RNA, 19 nt, Homo sapiens
  misc_RNA (1)...(19): siRNA sense strand
gauauuguccgcacagaac

SEQ ID NO: 1753802 - RNA, 19 nt, Homo sapiens
  misc_RNA (1)...(19): siRNA sense strand
caucaaacucucuggcuau

SEQ ID NO: 1753803 - RNA, 19 nt, Homo sapiens
  misc_RNA (1)...(19): siRNA sense strand
ucacuauccuauuaugucu

SEQ ID NO: 1753804 - RNA, 19 nt, Homo sapiens
  misc_RNA (1)...(19): siRNA sense strand
caugaagaaaguacuagaa

SEQ ID NO: 1753805 - RNA, 19 nt, Homo sapiens
  misc_RNA (1)...(19): siRNA sense strand
auaauacaccuguucgaaa

SEQ ID NO: 1753806 - RNA, 19 nt, Homo sapiens
  misc_RNA (1)...(19): siRNA sense strand
cagauggagaagauauaua

SEQ ID NO: 1753807 - RNA, 19 nt, Homo sapiens
  misc_RNA (1)...(19): siRNA sense strand
guacuagaagaauacaaga

SEQ ID NO: 1753808 - RNA, 19 nt, Homo sapiens
  misc_RNA (1)...(19): siRNA sense strand
ucacuauugcuaaccauga

SEQ ID NO: 1753809 - RNA, 19 nt, Homo sapiens
  misc_RNA (1)...(19): siRNA sense strand
caucuucugugaucagcau

SEQ ID NO: 1753810 - RNA, 19 nt, Homo sapiens
  misc_RNA (1)...(19): siRNA sense strand
ggaacgucucuaucaagaa

SEQ ID NO: 1753811 - RNA, 19 nt, Homo sapiens
  misc_RNA (1)...(19): siRNA sense strand
uuaccuccaugaagaaagu

SEQ ID NO: 1753812 - RNA, 19 nt, Homo sapiens
  misc_RNA (1)...(19): siRNA sense strand
caugcugcuuuguaauuau

SEQ ID NO: 1753813 - RNA, 19 nt, Homo sapiens
  misc_RNA (1)...(19): siRNA sense strand
cacuauugcuaaccaugaa

SEQ ID NO: 1753814 - RNA, 19 nt, Homo sapiens
  misc_RNA (1)...(19): siRNA sense strand
aacaguacccuuucuggaa

SEQ ID NO: 1753815 - RNA, 19 nt, Homo sapiens
  misc_RNA (1)...(19): siRNA sense strand
gagcagcagcaaguuucua

SEQ ID NO: 1753816 - RNA, 19 nt, Homo sapiens
  misc_RNA (1)...(19): siRNA sense strand
gcuacgaaacaucacuauu

SEQ ID NO: 1753817 - RNA, 19 nt, Homo sapiens
  misc_RNA (1)...(19): siRNA sense strand
gcuccaaggccucuaugau

SEQ ID NO: 1753818 - RNA, 19 nt, Homo sapiens
  misc_RNA (1)...(19): siRNA sense strand
ugccugcucucacaucuuc

SEQ ID NO: 1753819 - RNA, 19 nt, Homo sapiens
  misc_RNA (1)...(19): siRNA sense strand
gcgcaaucgucaguaucaa

SEQ ID NO: 1753820 - RNA, 19 nt, Homo sapiens
  misc_RNA (1)...(19): siRNA sense strand
gcaccugaacccagcaaca

SEQ ID NO: 1753821 - RNA, 19 nt, Homo sapiens
  misc_RNA (1)...(19): siRNA sense strand
uacgaaacaucacuauugc

SEQ ID NO: 1753822 - RNA, 19 nt, Homo sapiens
  misc_RNA (1)...(19): siRNA sense strand
gcaaucgucaguaucaaaa

SEQ ID NO: 1753823 - RNA, 19 nt, Homo sapiens
  misc_RNA (1)...(19): siRNA sense strand
gaacccagcaacagcuuuu

SEQ ID NO: 1753824 - RNA, 19 nt, Homo sapiens
  misc_RNA (1)...(19): siRNA sense strand
cagaggaauauaaagcuau

SEQ ID NO: 1753825 - RNA, 19 nt, Homo sapiens
  misc_RNA (1)...(19): siRNA sense strand
uuagagcagcagcaaguuu

SEQ ID NO: 1753826 - RNA, 19 nt, Homo sapiens
  misc_RNA (1)...(19): siRNA sense strand
caucagaggaauauaaagc

SEQ ID NO: 1753827 - RNA, 19 nt, Homo sapiens
  misc_RNA (1)...(19): siRNA sense strand
uagagcagcagcaaguuuc

SEQ ID NO: 1753828 - RNA, 19 nt, Homo sapiens
  misc_RNA (1)...(19): siRNA sense strand
ugaauuagagcagcagcaa

SEQ ID NO: 1753829 - RNA, 19 nt, Homo sapiens
  misc_RNA (1)...(19): siRNA sense strand
gcgauggagauggagauuu

SEQ ID NO: 1753830 - RNA, 19 nt, Homo sapiens
  misc_RNA (1)...(19): siRNA sense strand
ugugaagacaugcugcuuu

SEQ ID NO: 1753831 - RNA, 19 nt, Homo sapiens
  misc_RNA (1)...(19): siRNA sense strand
cuucuggacauaucaggua

SEQ ID NO: 1753832 - RNA, 19 nt, Homo sapiens
  misc_RNA (1)...(19): siRNA sense strand
ccuugaaccauccaugauu

SEQ ID NO: 1753833 - RNA, 19 nt, Homo sapiens
  misc_RNA (1)...(19): siRNA sense strand
gaccucacuauccuauuau

SEQ ID NO: 1753834 - RNA, 19 nt, Homo sapiens
  misc_RNA (1)...(19): siRNA sense strand
cucuccaagucgugaauua

SEQ ID NO: 1753835 - RNA, 19 nt, Homo sapiens
  misc_RNA (1)...(19): siRNA sense strand
ggauaauacaccuguucga

SEQ ID NO: 1753836 - RNA, 19 nt, Homo sapiens
  misc_RNA (1)...(19): siRNA sense strand
caucaggaacgucucuauc

SEQ ID NO: 1753837 - RNA, 19 nt, Homo sapiens
  misc_RNA (1)...(19): siRNA sense strand
gcacagucugguguucuug

SEQ ID NO: 1753838 - RNA, 19 nt, Homo sapiens
  misc_RNA (1)...(19): siRNA sense strand
agauggagaagauauauac

SEQ ID NO: 1753839 - RNA, 19 nt, Homo sapiens
  misc_RNA (1)...(19): siRNA sense strand
gcugagggccaucugaaac

SEQ ID NO: 1753840 - RNA, 19 nt, Homo sapiens
  misc_RNA (1)...(19): siRNA sense strand
ucagguacaucaggaacgu

SEQ ID NO: 1753841 - RNA, 19 nt, Homo sapiens
  misc_RNA (1)...(19): siRNA sense strand
agauggagauuuucaguuc

SEQ ID NO: 1753842 - RNA, 19 nt, Homo sapiens
  misc_RNA (1)...(19): siRNA sense strand
aaacuuauggagcgcaauc

SEQ ID NO: 1753843 - RNA, 19 nt, Homo sapiens
  misc_RNA (1)...(19): siRNA sense strand
aaauacaaagcaaggaugu

SEQ ID NO: 1753844 - RNA, 19 nt, Homo sapiens
  misc_RNA (1)...(19): siRNA sense strand
gaacgucucuaucaagaau

SEQ ID NO: 1753845 - RNA, 19 nt, Homo sapiens
  misc_RNA (1)...(19): siRNA sense strand
gaagauauauacucagcaa

SEQ ID NO: 1753846 - RNA, 19 nt, Homo sapiens
  misc_RNA (1)...(19): siRNA sense strand
gaauugaccucuaugaaag

SEQ ID NO: 1753847 - RNA, 19 nt, Homo sapiens
  misc_RNA (1)...(19): siRNA sense strand
gaagaaaguacuagaagaa

SEQ ID NO: 1753848 - RNA, 19 nt, Homo sapiens
  misc_RNA (1)...(19): siRNA sense strand
ggacauaucagguacauca

SEQ ID NO: 1753849 - RNA, 19 nt, Homo sapiens
  misc_RNA (1)...(19): siRNA sense strand
gaagacaugcugcuuugua

SEQ ID NO: 1753850 - RNA, 19 nt, Homo sapiens
  misc_RNA (1)...(19): siRNA sense strand
gaccagagaucguguugga

SEQ ID NO: 1753851 - RNA, 19 nt, Homo sapiens
  misc_RNA (1)...(19): siRNA sense strand
aagcaaggauguagaauug

SEQ ID NO: 1753852 - RNA, 19 nt, Homo sapiens
  misc_RNA (1)...(19): siRNA sense strand
ugaaacagauggagaagau

SEQ ID NO: 1753853 - RNA, 19 nt, Homo sapiens
  misc_RNA (1)...(19): siRNA sense strand
uagcagggccuucaaagua

SEQ ID NO: 1753854 - RNA, 19 nt, Homo sapiens
  misc_RNA (1)...(19): siRNA sense strand
gagaucguguuggacauua

SEQ ID NO: 1753855 - RNA, 19 nt, Homo sapiens
  misc_RNA (1)...(19): siRNA sense strand
gcauggcaguggugaguuu

SEQ ID NO: 1753856 - RNA, 19 nt, Homo sapiens
  misc_RNA (1)...(19): siRNA sense strand
uaauacaccuguucgaaau

SEQ ID NO: 1753857 - RNA, 19 nt, Homo sapiens
  misc_RNA (1)...(19): siRNA sense strand
gugaagacaugcugcuuug

SEQ ID NO: 1753858 - RNA, 19 nt, Homo sapiens
  misc_RNA (1)...(19): siRNA sense strand
ugaagaaaguacuagaaga

SEQ ID NO: 1753859 - RNA, 19 nt, Homo sapiens
  misc_RNA (1)...(19): siRNA sense strand
guucuuggcuucccauuag

SEQ ID NO: 1753860 - RNA, 19 nt, Homo sapiens
  misc_RNA (1)...(19): siRNA sense strand
gaaaguacuagaagaauac

SEQ ID NO: 1753861 - RNA, 19 nt, Homo sapiens
  misc_RNA (1)...(19): siRNA sense strand
cgaaacaucacuauugcua

SEQ ID NO: 1753862 - RNA, 19 nt, Homo sapiens
  misc_RNA (1)...(19): siRNA sense strand
cuacgaaacaucacuauug

SEQ ID NO: 1753863 - RNA, 19 nt, Homo sapiens
  misc_RNA (1)...(19): siRNA sense strand
gaaacaucacuauugcuaa

SEQ ID NO: 1753864 - RNA, 19 nt, Homo sapiens
  misc_RNA (1)...(19): siRNA sense strand
gcagggccuucaaaguaaa

SEQ ID NO: 1753865 - RNA, 19 nt, Homo sapiens
  misc_RNA (1)...(19): siRNA sense strand
ggagcgcaaucgucaguau

SEQ ID NO: 1753866 - RNA, 19 nt, Homo sapiens
  misc_RNA (1)...(19): siRNA sense strand
gauaauacaccuguucgaa

SEQ ID NO: 1753867 - RNA, 19 nt, Homo sapiens
  misc_RNA (1)...(19): siRNA sense strand
gaaagugucgcaucaaacu

SEQ ID NO: 1753868 - RNA, 19 nt, Homo sapiens
  misc_RNA (1)...(19): siRNA sense strand
ucagaggaauauaaagcua

SEQ ID NO: 1753869 - RNA, 19 nt, Homo sapiens
  misc_RNA (1)...(19): siRNA sense strand
ggaauauaaagcuauggua

SEQ ID NO: 1753870 - RNA, 19 nt, Homo sapiens
  misc_RNA (1)...(19): siRNA sense strand
uaucgaaagugucgcauca

SEQ ID NO: 1753871 - RNA, 19 nt, Homo sapiens
  misc_RNA (1)...(19): siRNA sense strand
agaauugaccucuaugaaa

SEQ ID NO: 1753872 - RNA, 19 nt, Homo sapiens
  misc_RNA (1)...(19): siRNA sense strand
aagacaugcugcuuuguaa

SEQ ID NO: 1753873 - RNA, 19 nt, Homo sapiens
  misc_RNA (1)...(19): siRNA sense strand
gacaugcugcuuuguaauu

SEQ ID NO: 1753874 - RNA, 19 nt, Homo sapiens
  misc_RNA (1)...(19): siRNA sense strand
caaacucucuggcuaugca

SEQ ID NO: 1753875 - RNA, 19 nt, Homo sapiens
  misc_RNA (1)...(19): siRNA sense strand
gcaaggauguagaauugac

SEQ ID NO: 1753876 - RNA, 19 nt, Homo sapiens
  misc_RNA (1)...(19): siRNA sense strand
cuggaaagcuagauauugu

SEQ ID NO: 1753877 - RNA, 19 nt, Homo sapiens
  misc_RNA (1)...(19): siRNA sense strand
ucgaaagugucgcaucaaa

SEQ ID NO: 1753878 - RNA, 19 nt, Homo sapiens
  misc_RNA (1)...(19): siRNA sense strand
uggagaagauauauacuca

SEQ ID NO: 1753879 - RNA, 19 nt, Homo sapiens
  misc_RNA (1)...(19): siRNA sense strand
acaugcugcuuuguaauua

SEQ ID NO: 1753880 - RNA, 19 nt, Homo sapiens
  misc_RNA (1)...(19): siRNA sense strand
ucaggaacgucucuaucaa

SEQ ID NO: 1753881 - RNA, 19 nt, Homo sapiens
  misc_RNA (1)...(19): siRNA sense strand
gcaaauacaaagcaaggau

SEQ ID NO: 1753882 - RNA, 19 nt, Homo sapiens
  misc_RNA (1)...(19): siRNA sense strand
aaacaucacuauugcuaac

SEQ ID NO: 1753883 - RNA, 19 nt, Homo sapiens
  misc_RNA (1)...(19): siRNA sense strand
caaguuuccuuuggauaau

SEQ ID NO: 1753884 - RNA, 19 nt, Homo sapiens
  misc_RNA (1)...(19): siRNA sense strand
uuuagucgcucaccagcua

SEQ ID NO: 1753885 - RNA, 19 nt, Homo sapiens
  misc_RNA (1)...(19): siRNA sense strand
aaacagauggagaagauau

SEQ ID NO: 1753886 - RNA, 19 nt, Homo sapiens
  misc_RNA (1)...(19): siRNA sense strand
cuccaaggccucuaugaua

SEQ ID NO: 1753887 - RNA, 19 nt, Homo sapiens
  misc_RNA (1)...(19): siRNA sense strand
gaaacagauggagaagaua

SEQ ID NO: 1753888 - RNA, 19 nt, Homo sapiens
  misc_RNA (1)...(19): siRNA sense strand
cgauggagauggagauuuu

SEQ ID NO: 1753889 - RNA, 19 nt, Homo sapiens
  misc_RNA (1)...(19): siRNA sense strand
uguccugccugcaacagua

SEQ ID NO: 1753890 - RNA, 19 nt, Homo sapiens
  misc_RNA (1)...(19): siRNA sense strand
agcagggccuucaaaguaa

SEQ ID NO: 1753891 - RNA, 19 nt, Homo sapiens
  misc_RNA (1)...(19): siRNA sense strand
aaagcaaggauguagaauu

SEQ ID NO: 1753892 - RNA, 19 nt, Homo sapiens
  misc_RNA (1)...(19): siRNA sense strand
guccaucagaggaauauaa

SEQ ID NO: 1753893 - RNA, 19 nt, Homo sapiens
  misc_RNA (1)...(19): siRNA sense strand
aggaacgucucuaucaaga

SEQ ID NO: 1753894 - RNA, 19 nt, Homo sapiens
  misc_RNA (1)...(19): siRNA sense strand
gcgcuggccuucuggacau

SEQ ID NO: 1753895 - RNA, 19 nt, Homo sapiens
  misc_RNA (1)...(19): siRNA sense strand
agaggaauauaaagcuaug

SEQ ID NO: 1753896 - RNA, 19 nt, Homo sapiens
  misc_RNA (1)...(19): siRNA sense strand
cuugaaccauccaugauug

SEQ ID NO: 1753897 - RNA, 19 nt, Homo sapiens
  misc_RNA (1)...(19): siRNA sense strand
aaaguucagugacaucucu

SEQ ID NO: 1753898 - RNA, 19 nt, Homo sapiens
  misc_RNA (1)...(19): siRNA sense strand
acaaagcaaggauguagaa

SEQ ID NO: 1753899 - RNA, 19 nt, Homo sapiens
  misc_RNA (1)...(19): siRNA sense strand
gauauuguccgcacagaac

SEQ ID NO: 1753900 - RNA, 19 nt, Homo sapiens
  misc_RNA (1)...(19): siRNA sense strand
caucaaacucucuggcuau

SEQ ID NO: 1753901 - RNA, 19 nt, Homo sapiens
  misc_RNA (1)...(19): siRNA sense strand
caugaagaaaguacuagaa

SEQ ID NO: 1753902 - RNA, 19 nt, Homo sapiens
  misc_RNA (1)...(19): siRNA sense strand
auaauacaccuguucgaaa

SEQ ID NO: 1753903 - RNA, 19 nt, Homo sapiens
  misc_RNA (1)...(19): siRNA sense strand
cagauggagaagauauaua

SEQ ID NO: 1753904 - RNA, 19 nt, Homo sapiens
  misc_RNA (1)...(19): siRNA sense strand
guacuagaagaauacaaga

SEQ ID NO: 1753905 - RNA, 19 nt, Homo sapiens
  misc_RNA (1)...(19): siRNA sense strand
caucuucugugaucagcau

SEQ ID NO: 1753906 - RNA, 19 nt, Homo sapiens
  misc_RNA (1)...(19): siRNA sense strand
ucacuauugcuaaccauga

SEQ ID NO: 1753907 - RNA, 19 nt, Homo sapiens
  misc_RNA (1)...(19): siRNA sense strand
ggaacgucucuaucaagaa

SEQ ID NO: 1753908 - RNA, 19 nt, Homo sapiens
  misc_RNA (1)...(19): siRNA sense strand
caugcugcuuuguaauuau

SEQ ID NO: 1753909 - RNA, 19 nt, Homo sapiens
  misc_RNA (1)...(19): siRNA sense strand
cacuauugcuaaccaugaa

SEQ ID NO: 1753910 - RNA, 19 nt, Homo sapiens
  misc_RNA (1)...(19): siRNA sense strand
uuaccuccaugaagaaagu

SEQ ID NO: 1753911 - RNA, 19 nt, Homo sapiens
  misc_RNA (1)...(19): siRNA sense strand
ugccugcucucacaucuuc

SEQ ID NO: 1753912 - RNA, 19 nt, Homo sapiens
  misc_RNA (1)...(19): siRNA sense strand
gagcagcagcaaguuucua

SEQ ID NO: 1753913 - RNA, 19 nt, Homo sapiens
  misc_RNA (1)...(19): siRNA sense strand
aacaguacccuuucuggaa

SEQ ID NO: 1753914 - RNA, 19 nt, Homo sapiens
  misc_RNA (1)...(19): siRNA sense strand
gcuacgaaacaucacuauu

SEQ ID NO: 1753915 - RNA, 19 nt, Homo sapiens
  misc_RNA (1)...(19): siRNA sense strand
gcuccaaggccucuaugau

SEQ ID NO: 1753916 - RNA, 19 nt, Homo sapiens
  misc_RNA (1)...(19): siRNA sense strand
gcgcaaucgucaguaucaa

SEQ ID NO: 1753917 - RNA, 19 nt, Homo sapiens
  misc_RNA (1)...(19): siRNA sense strand
gcaccugaacccagcaaca

SEQ ID NO: 1753918 - RNA, 19 nt, Homo sapiens
  misc_RNA (1)...(19): siRNA sense strand
uacgaaacaucacuauugc

SEQ ID NO: 1753919 - RNA, 19 nt, Homo sapiens
  misc_RNA (1)...(19): siRNA sense strand
gcaaucgucaguaucaaaa

SEQ ID NO: 1753920 - RNA, 19 nt, Homo sapiens
  misc_RNA (1)...(19): siRNA sense strand
gaacccagcaacagcuuuu

SEQ ID NO: 1753921 - RNA, 19 nt, Homo sapiens
  misc_RNA (1)...(19): siRNA sense strand
cagaggaauauaaagcuau

SEQ ID NO: 1753922 - RNA, 19 nt, Homo sapiens
  misc_RNA (1)...(19): siRNA sense strand
uuagagcagcagcaaguuu

SEQ ID NO: 1753923 - RNA, 19 nt, Homo sapiens
  misc_RNA (1)...(19): siRNA sense strand
caucagaggaauauaaagc

SEQ ID NO: 1753924 - RNA, 19 nt, Homo sapiens
  misc_RNA (1)...(19): siRNA sense strand
uagagcagcagcaaguuuc

SEQ ID NO: 1753925 - RNA, 19 nt, Homo sapiens
  misc_RNA (1)...(19): siRNA sense strand
ugaauuagagcagcagcaa

SEQ ID NO: 1753926 - RNA, 19 nt, Homo sapiens
  misc_RNA (1)...(19): siRNA sense strand
gcgauggagauggagauuu

SEQ ID NO: 1753927 - RNA, 19 nt, Homo sapiens
  misc_RNA (1)...(19): siRNA sense strand
ugugaagacaugcugcuuu

SEQ ID NO: 1753928 - RNA, 19 nt, Homo sapiens
  misc_RNA (1)...(19): siRNA sense strand
cuucuggacauaucaggua

SEQ ID NO: 1753929 - RNA, 19 nt, Homo sapiens
  misc_RNA (1)...(19): siRNA sense strand
ccuugaaccauccaugauu

SEQ ID NO: 1753930 - RNA, 19 nt, Homo sapiens
  misc_RNA (1)...(19): siRNA sense strand
cucuccaagucgugaauua

SEQ ID NO: 1753931 - RNA, 19 nt, Homo sapiens
  misc_RNA (1)...(19): siRNA sense strand
ggauaauacaccuguucga

SEQ ID NO: 1753932 - RNA, 19 nt, Homo sapiens
  misc_RNA (1)...(19): siRNA sense strand
caucaggaacgucucuauc

SEQ ID NO: 1753933 - RNA, 19 nt, Homo sapiens
  misc_RNA (1)...(19): siRNA sense strand
gcacagucugguguucuug

SEQ ID NO: 1753934 - RNA, 19 nt, Homo sapiens
  misc_RNA (1)...(19): siRNA sense strand
agauggagaagauauauac

SEQ ID NO: 1753935 - RNA, 19 nt, Homo sapiens
  misc_RNA (1)...(19): siRNA sense strand
gcugagggccaucugaaac

SEQ ID NO: 1753936 - RNA, 19 nt, Homo sapiens
  misc_RNA (1)...(19): siRNA sense strand
ucagguacaucaggaacgu

SEQ ID NO: 1753937 - RNA, 19 nt, Homo sapiens
  misc_RNA (1)...(19): siRNA sense strand
agauggagauuuucaguuc

SEQ ID NO: 1753938 - RNA, 19 nt, Homo sapiens
  misc_RNA (1)...(19): siRNA sense strand
aaacuuauggagcgcaauc

SEQ ID NO: 1753939 - RNA, 19 nt, Homo sapiens
  misc_RNA (1)...(19): siRNA sense strand
aaauacaaagcaaggaugu

SEQ ID NO: 1753940 - RNA, 19 nt, Homo sapiens
  misc_RNA (1)...(19): siRNA sense strand
gaacgucucuaucaagaau

SEQ ID NO: 1753941 - RNA, 19 nt, Homo sapiens
  misc_RNA (1)...(19): siRNA sense strand
gaagauauauacucagcaa

SEQ ID NO: 1753942 - RNA, 19 nt, Homo sapiens
  misc_RNA (1)...(19): siRNA sense strand
gaauugaccucuaugaaag

SEQ ID NO: 1753943 - RNA, 19 nt, Homo sapiens
  misc_RNA (1)...(19): siRNA sense strand
gaagaaaguacuagaagaa

SEQ ID NO: 1753944 - RNA, 19 nt, Homo sapiens
  misc_RNA (1)...(19): siRNA sense strand
ggacauaucagguacauca

SEQ ID NO: 1753945 - RNA, 19 nt, Homo sapiens
  misc_RNA (1)...(19): siRNA sense strand
gaagacaugcugcuuugua

SEQ ID NO: 1753946 - RNA, 19 nt, Homo sapiens
  misc_RNA (1)...(19): siRNA sense strand
gaccagagaucguguugga

SEQ ID NO: 1753947 - RNA, 19 nt, Homo sapiens
  misc_RNA (1)...(19): siRNA sense strand
aagcaaggauguagaauug

SEQ ID NO: 1753948 - RNA, 19 nt, Homo sapiens
  misc_RNA (1)...(19): siRNA sense strand
ugaaacagauggagaagau

SEQ ID NO: 1753949 - RNA, 19 nt, Homo sapiens
  misc_RNA (1)...(19): siRNA sense strand
uagcagggccuucaaagua

SEQ ID NO: 1753950 - RNA, 19 nt, Homo sapiens
  misc_RNA (1)...(19): siRNA sense strand
gagaucguguuggacauua

SEQ ID NO: 1753951 - RNA, 19 nt, Homo sapiens
  misc_RNA (1)...(19): siRNA sense strand
gcauggcaguggugaguuu

SEQ ID NO: 1753952 - RNA, 19 nt, Homo sapiens
  misc_RNA (1)...(19): siRNA sense strand
uaauacaccuguucgaaau

SEQ ID NO: 1753953 - RNA, 19 nt, Homo sapiens
  misc_RNA (1)...(19): siRNA sense strand
gugaagacaugcugcuuug

SEQ ID NO: 1753954 - RNA, 19 nt, Homo sapiens
  misc_RNA (1)...(19): siRNA sense strand
ugaagaaaguacuagaaga

SEQ ID NO: 1753955 - RNA, 19 nt, Homo sapiens
  misc_RNA (1)...(19): siRNA sense strand
guucuuggcuucccauuag

SEQ ID NO: 1753956 - RNA, 19 nt, Homo sapiens
  misc_RNA (1)...(19): siRNA sense strand
gaaaguacuagaagaauac

SEQ ID NO: 1753957 - RNA, 19 nt, Homo sapiens
  misc_RNA (1)...(19): siRNA sense strand
cgaaacaucacuauugcua

SEQ ID NO: 1753958 - RNA, 19 nt, Homo sapiens
  misc_RNA (1)...(19): siRNA sense strand
cuacgaaacaucacuauug

SEQ ID NO: 1753959 - RNA, 19 nt, Homo sapiens
  misc_RNA (1)...(19): siRNA sense strand
gaaacaucacuauugcuaa

SEQ ID NO: 1753960 - RNA, 19 nt, Homo sapiens
  misc_RNA (1)...(19): siRNA sense strand
gcagggccuucaaaguaaa

SEQ ID NO: 1753961 - RNA, 19 nt, Homo sapiens
  misc_RNA (1)...(19): siRNA sense strand
ggagcgcaaucgucaguau

SEQ ID NO: 1753962 - RNA, 19 nt, Homo sapiens
  misc_RNA (1)...(19): siRNA sense strand
gauaauacaccuguucgaa

SEQ ID NO: 1753963 - RNA, 19 nt, Homo sapiens
  misc_RNA (1)...(19): siRNA sense strand
gaaagugucgcaucaaacu

SEQ ID NO: 1753964 - RNA, 19 nt, Homo sapiens
  misc_RNA (1)...(19): siRNA sense strand
ucagaggaauauaaagcua

SEQ ID NO: 1753965 - RNA, 19 nt, Homo sapiens
  misc_RNA (1)...(19): siRNA sense strand
ggaauauaaagcuauggua

SEQ ID NO: 1753966 - RNA, 19 nt, Homo sapiens
  misc_RNA (1)...(19): siRNA sense strand
uaucgaaagugucgcauca

SEQ ID NO: 1753967 - RNA, 19 nt, Homo sapiens
  misc_RNA (1)...(19): siRNA sense strand
agaauugaccucuaugaaa

SEQ ID NO: 1753968 - RNA, 19 nt, Homo sapiens
  misc_RNA (1)...(19): siRNA sense strand
aagacaugcugcuuuguaa

SEQ ID NO: 1753969 - RNA, 19 nt, Homo sapiens
  misc_RNA (1)...(19): siRNA sense strand
gacaugcugcuuuguaauu

SEQ ID NO: 1753970 - RNA, 19 nt, Homo sapiens
  misc_RNA (1)...(19): siRNA sense strand
caaacucucuggcuaugca

SEQ ID NO: 1753971 - RNA, 19 nt, Homo sapiens
  misc_RNA (1)...(19): siRNA sense strand
gcaaggauguagaauugac

SEQ ID NO: 1753972 - RNA, 19 nt, Homo sapiens
  misc_RNA (1)...(19): siRNA sense strand
cuggaaagcuagauauugu

SEQ ID NO: 1753973 - RNA, 19 nt, Homo sapiens
  misc_RNA (1)...(19): siRNA sense strand
ucgaaagugucgcaucaaa

SEQ ID NO: 1753974 - RNA, 19 nt, Homo sapiens
  misc_RNA (1)...(19): siRNA sense strand
uggagaagauauauacuca

SEQ ID NO: 1753975 - RNA, 19 nt, Homo sapiens
  misc_RNA (1)...(19): siRNA sense strand
acaugcugcuuuguaauua

SEQ ID NO: 1753976 - RNA, 19 nt, Homo sapiens
  misc_RNA (1)...(19): siRNA sense strand
ucaggaacgucucuaucaa

SEQ ID NO: 1753977 - RNA, 19 nt, Homo sapiens
  misc_RNA (1)...(19): siRNA sense strand
gcaaauacaaagcaaggau

SEQ ID NO: 1753978 - RNA, 19 nt, Homo sapiens
  misc_RNA (1)...(19): siRNA sense strand
aaacaucacuauugcuaac

SEQ ID NO: 1753979 - RNA, 19 nt, Homo sapiens
  misc_RNA (1)...(19): siRNA sense strand
caaguuuccuuuggauaau

SEQ ID NO: 1753980 - RNA, 19 nt, Homo sapiens
  misc_RNA (1)...(19): siRNA sense strand
uuuagucgcucaccagcua

SEQ ID NO: 1753981 - RNA, 19 nt, Homo sapiens
  misc_RNA (1)...(19): siRNA sense strand
aaacagauggagaagauau

SEQ ID NO: 1753982 - RNA, 19 nt, Homo sapiens
  misc_RNA (1)...(19): siRNA sense strand
cuccaaggccucuaugaua

SEQ ID NO: 1753983 - RNA, 19 nt, Homo sapiens
  misc_RNA (1)...(19): siRNA sense strand
gaaacagauggagaagaua

SEQ ID NO: 1753984 - RNA, 19 nt, Homo sapiens
  misc_RNA (1)...(19): siRNA sense strand
cgauggagauggagauuuu

SEQ ID NO: 1753985 - RNA, 19 nt, Homo sapiens
  misc_RNA (1)...(19): siRNA sense strand
uguccugccugcaacagua

SEQ ID NO: 1753986 - RNA, 19 nt, Homo sapiens
  misc_RNA (1)...(19): siRNA sense strand
agcagggccuucaaaguaa

SEQ ID NO: 1753987 - RNA, 19 nt, Homo sapiens
  misc_RNA (1)...(19): siRNA sense strand
aaagcaaggauguagaauu

SEQ ID NO: 1753988 - RNA, 19 nt, Homo sapiens
  misc_RNA (1)...(19): siRNA sense strand
guccaucagaggaauauaa

SEQ ID NO: 1753989 - RNA, 19 nt, Homo sapiens
  misc_RNA (1)...(19): siRNA sense strand
aggaacgucucuaucaaga

SEQ ID NO: 1753990 - RNA, 19 nt, Homo sapiens
  misc_RNA (1)...(19): siRNA sense strand
gcgcuggccuucuggacau

SEQ ID NO: 1753991 - RNA, 19 nt, Homo sapiens
  misc_RNA (1)...(19): siRNA sense strand
agaggaauauaaagcuaug

SEQ ID NO: 1753992 - RNA, 19 nt, Homo sapiens
  misc_RNA (1)...(19): siRNA sense strand
cuugaaccauccaugauug

SEQ ID NO: 1753993 - RNA, 19 nt, Homo sapiens
  misc_RNA (1)...(19): siRNA sense strand
aaaguucagugacaucucu

SEQ ID NO: 1753994 - RNA, 19 nt, Homo sapiens
  misc_RNA (1)...(19): siRNA sense strand
acaaagcaaggauguagaa

SEQ ID NO: 1753995 - RNA, 19 nt, Homo sapiens
  misc_RNA (1)...(19): siRNA sense strand
gauauuguccgcacagaac

SEQ ID NO: 1753996 - RNA, 19 nt, Homo sapiens
  misc_RNA (1)...(19): siRNA sense strand
caucaaacucucuggcuau

SEQ ID NO: 1753997 - RNA, 19 nt, Homo sapiens
  misc_RNA (1)...(19): siRNA sense strand
caugaagaaaguacuagaa

SEQ ID NO: 1753998 - RNA, 19 nt, Homo sapiens
  misc_RNA (1)...(19): siRNA sense strand
auaauacaccuguucgaaa

SEQ ID NO: 1753999 - RNA, 19 nt, Homo sapiens
  misc_RNA (1)...(19): siRNA sense strand
cagauggagaagauauaua

SEQ ID NO: 1754000 - RNA, 19 nt, Homo sapiens
  misc_RNA (1)...(19): siRNA sense strand
guacuagaagaauacaaga

SEQ ID NO: 1754001 - RNA, 19 nt, Homo sapiens
  misc_RNA (1)...(19): siRNA sense strand
caucuucugugaucagcau

SEQ ID NO: 1754002 - RNA, 19 nt, Homo sapiens
  misc_RNA (1)...(19): siRNA sense strand
ucacuauugcuaaccauga

SEQ ID NO: 1754003 - RNA, 19 nt, Homo sapiens
  misc_RNA (1)...(19): siRNA sense strand
ggaacgucucuaucaagaa

SEQ ID NO: 1754004 - RNA, 19 nt, Homo sapiens
  misc_RNA (1)...(19): siRNA sense strand
caugcugcuuuguaauuau

SEQ ID NO: 1754005 - RNA, 19 nt, Homo sapiens
  misc_RNA (1)...(19): siRNA sense strand
cacuauugcuaaccaugaa

SEQ ID NO: 1754006 - RNA, 19 nt, Homo sapiens
  misc_RNA (1)...(19): siRNA sense strand
uuaccuccaugaagaaagu

SEQ ID NO: 1754007 - RNA, 19 nt, Homo sapiens
  misc_RNA (1)...(19): siRNA sense strand
ugccugcucucacaucuuc

SEQ ID NO: 1754008 - RNA, 19 nt, Homo sapiens
  misc_RNA (1)...(19): siRNA sense strand
gagcagcagcaaguuucua

SEQ ID NO: 1754009 - RNA, 19 nt, Homo sapiens
  misc_RNA (1)...(19): siRNA sense strand
aacaguacccuuucuggaa

SEQ ID NO: 1754010 - RNA, 19 nt, Homo sapiens
  misc_RNA (1)...(19): siRNA sense strand
gcuacgaaacaucacuauu

SEQ ID NO: 1754011 - RNA, 19 nt, Homo sapiens
  misc_RNA (1)...(19): siRNA sense strand
gcuccaaggccucuaugau

SEQ ID NO: 1754012 - RNA, 19 nt, Homo sapiens
  misc_RNA (1)...(19): siRNA sense strand
gcgcaaucgucaguaucaa

SEQ ID NO: 1754013 - RNA, 19 nt, Homo sapiens
  misc_RNA (1)...(19): siRNA sense strand
gcaccugaacccagcaaca

SEQ ID NO: 1754014 - RNA, 19 nt, Homo sapiens
  misc_RNA (1)...(19): siRNA sense strand
uacgaaacaucacuauugc

SEQ ID NO: 1754015 - RNA, 19 nt, Homo sapiens
  misc_RNA (1)...(19): siRNA sense strand
gcaaucgucaguaucaaaa

SEQ ID NO: 1754016 - RNA, 19 nt, Homo sapiens
  misc_RNA (1)...(19): siRNA sense strand
gaacccagcaacagcuuuu

SEQ ID NO: 1754017 - RNA, 19 nt, Homo sapiens
  misc_RNA (1)...(19): siRNA sense strand
cagaggaauauaaagcuau

SEQ ID NO: 1754018 - RNA, 19 nt, Homo sapiens
  misc_RNA (1)...(19): siRNA sense strand
uuagagcagcagcaaguuu

SEQ ID NO: 1754019 - RNA, 19 nt, Homo sapiens
  misc_RNA (1)...(19): siRNA sense strand
caucagaggaauauaaagc

SEQ ID NO: 1754020 - RNA, 19 nt, Homo sapiens
  misc_RNA (1)...(19): siRNA sense strand
uagagcagcagcaaguuuc

SEQ ID NO: 1754021 - RNA, 19 nt, Homo sapiens
  misc_RNA (1)...(19): siRNA sense strand
ugaauuagagcagcagcaa

SEQ ID NO: 1754022 - RNA, 19 nt, Homo sapiens
  misc_RNA (1)...(19): siRNA sense strand
gcgauggagauggagauuu

SEQ ID NO: 1754023 - RNA, 19 nt, Homo sapiens
  misc_RNA (1)...(19): siRNA sense strand
ugugaagacaugcugcuuu

SEQ ID NO: 1754024 - RNA, 19 nt, Homo sapiens
  misc_RNA (1)...(19): siRNA sense strand
cuucuggacauaucaggua

SEQ ID NO: 1754025 - RNA, 19 nt, Homo sapiens
  misc_RNA (1)...(19): siRNA sense strand
ccuugaaccauccaugauu

SEQ ID NO: 1754026 - RNA, 19 nt, Homo sapiens
  misc_RNA (1)...(19): siRNA sense strand
cucuccaagucgugaauua

SEQ ID NO: 1754027 - RNA, 19 nt, Homo sapiens
  misc_RNA (1)...(19): siRNA sense strand
ggauaauacaccuguucga

SEQ ID NO: 1754028 - RNA, 19 nt, Homo sapiens
  misc_RNA (1)...(19): siRNA sense strand
caucaggaacgucucuauc

SEQ ID NO: 1754029 - RNA, 19 nt, Homo sapiens
  misc_RNA (1)...(19): siRNA sense strand
gcacagucugguguucuug

SEQ ID NO: 1754030 - RNA, 19 nt, Homo sapiens
  misc_RNA (1)...(19): siRNA sense strand
agauggagaagauauauac

SEQ ID NO: 1754031 - RNA, 19 nt, Homo sapiens
  misc_RNA (1)...(19): siRNA sense strand
gcugagggccaucugaaac

SEQ ID NO: 1754032 - RNA, 19 nt, Homo sapiens
  misc_RNA (1)...(19): siRNA sense strand
ucagguacaucaggaacgu

SEQ ID NO: 1754033 - RNA, 19 nt, Homo sapiens
  misc_RNA (1)...(19): siRNA sense strand
agauggagauuuucaguuc

SEQ ID NO: 1754034 - RNA, 19 nt, Homo sapiens
  misc_RNA (1)...(19): siRNA sense strand
aaacuuauggagcgcaauc

SEQ ID NO: 1754035 - RNA, 19 nt, Homo sapiens
  misc_RNA (1)...(19): siRNA sense strand
aaauacaaagcaaggaugu

SEQ ID NO: 1754036 - RNA, 19 nt, Homo sapiens
  misc_RNA (1)...(19): siRNA sense strand
gaacgucucuaucaagaau

SEQ ID NO: 1754037 - RNA, 19 nt, Homo sapiens
  misc_RNA (1)...(19): siRNA sense strand
gaagauauauacucagcaa

SEQ ID NO: 1754038 - RNA, 19 nt, Homo sapiens
  misc_RNA (1)...(19): siRNA sense strand
gaauugaccucuaugaaag

SEQ ID NO: 1754039 - RNA, 19 nt, Homo sapiens
  misc_RNA (1)...(19): siRNA sense strand
gaagaaaguacuagaagaa

SEQ ID NO: 1754040 - RNA, 19 nt, Homo sapiens
  misc_RNA (1)...(19): siRNA sense strand
ggacauaucagguacauca

SEQ ID NO: 1754041 - RNA, 19 nt, Homo sapiens
  misc_RNA (1)...(19): siRNA sense strand
gaagacaugcugcuuugua

SEQ ID NO: 1754042 - RNA, 19 nt, Homo sapiens
  misc_RNA (1)...(19): siRNA sense strand
gaccagagaucguguugga

SEQ ID NO: 1754043 - RNA, 19 nt, Homo sapiens
  misc_RNA (1)...(19): siRNA sense strand
aagcaaggauguagaauug

SEQ ID NO: 1754044 - RNA, 19 nt, Homo sapiens
  misc_RNA (1)...(19): siRNA sense strand
ugaaacagauggagaagau

SEQ ID NO: 1754045 - RNA, 19 nt, Homo sapiens
  misc_RNA (1)...(19): siRNA sense strand
uagcagggccuucaaagua

SEQ ID NO: 1754046 - RNA, 19 nt, Homo sapiens
  misc_RNA (1)...(19): siRNA sense strand
gagaucguguuggacauua

SEQ ID NO: 1754047 - RNA, 19 nt, Homo sapiens
  misc_RNA (1)...(19): siRNA sense strand
gcauggcaguggugaguuu

SEQ ID NO: 1754048 - RNA, 19 nt, Homo sapiens
  misc_RNA (1)...(19): siRNA sense strand
uaauacaccuguucgaaau

SEQ ID NO: 1754049 - RNA, 19 nt, Homo sapiens
  misc_RNA (1)...(19): siRNA sense strand
gugaagacaugcugcuuug

SEQ ID NO: 1754050 - RNA, 19 nt, Homo sapiens
  misc_RNA (1)...(19): siRNA sense strand
ugaagaaaguacuagaaga

SEQ ID NO: 1754051 - RNA, 19 nt, Homo sapiens
  misc_RNA (1)...(19): siRNA sense strand
guucuuggcuucccauuag

SEQ ID NO: 1754052 - RNA, 19 nt, Homo sapiens
  misc_RNA (1)...(19): siRNA sense strand
gaaaguacuagaagaauac

SEQ ID NO: 1754053 - RNA, 19 nt, Homo sapiens
  misc_RNA (1)...(19): siRNA sense strand
cgaaacaucacuauugcua

SEQ ID NO: 1754054 - RNA, 19 nt, Homo sapiens
  misc_RNA (1)...(19): siRNA sense strand
cuacgaaacaucacuauug

SEQ ID NO: 1754055 - RNA, 19 nt, Homo sapiens
  misc_RNA (1)...(19): siRNA sense strand
gaaacaucacuauugcuaa

SEQ ID NO: 1754056 - RNA, 19 nt, Homo sapiens
  misc_RNA (1)...(19): siRNA sense strand
gcagggccuucaaaguaaa

SEQ ID NO: 1754057 - RNA, 19 nt, Homo sapiens
  misc_RNA (1)...(19): siRNA sense strand
ggagcgcaaucgucaguau

SEQ ID NO: 1754058 - RNA, 19 nt, Homo sapiens
  misc_RNA (1)...(19): siRNA sense strand
gauaauacaccuguucgaa

SEQ ID NO: 1754059 - RNA, 19 nt, Homo sapiens
  misc_RNA (1)...(19): siRNA sense strand
gaaagugucgcaucaaacu

SEQ ID NO: 1754060 - RNA, 19 nt, Homo sapiens
  misc_RNA (1)...(19): siRNA sense strand
ucagaggaauauaaagcua

SEQ ID NO: 1754061 - RNA, 19 nt, Homo sapiens
  misc_RNA (1)...(19): siRNA sense strand
ggaauauaaagcuauggua

SEQ ID NO: 1754062 - RNA, 19 nt, Homo sapiens
  misc_RNA (1)...(19): siRNA sense strand
uaucgaaagugucgcauca

SEQ ID NO: 1754063 - RNA, 19 nt, Homo sapiens
  misc_RNA (1)...(19): siRNA sense strand
agaauugaccucuaugaaa

SEQ ID NO: 1754064 - RNA, 19 nt, Homo sapiens
  misc_RNA (1)...(19): siRNA sense strand
aagacaugcugcuuuguaa

SEQ ID NO: 1754065 - RNA, 19 nt, Homo sapiens
  misc_RNA (1)...(19): siRNA sense strand
gacaugcugcuuuguaauu

SEQ ID NO: 1754066 - RNA, 19 nt, Homo sapiens
  misc_RNA (1)...(19): siRNA sense strand
caaacucucuggcuaugca

SEQ ID NO: 1754067 - RNA, 19 nt, Homo sapiens
  misc_RNA (1)...(19): siRNA sense strand
gcaaggauguagaauugac

SEQ ID NO: 1754068 - RNA, 19 nt, Homo sapiens
  misc_RNA (1)...(19): siRNA sense strand
cuggaaagcuagauauugu

SEQ ID NO: 1754069 - RNA, 19 nt, Homo sapiens
  misc_RNA (1)...(19): siRNA sense strand
ucgaaagugucgcaucaaa

SEQ ID NO: 1754070 - RNA, 19 nt, Homo sapiens
  misc_RNA (1)...(19): siRNA sense strand
uggagaagauauauacuca

SEQ ID NO: 1754071 - RNA, 19 nt, Homo sapiens
  misc_RNA (1)...(19): siRNA sense strand
acaugcugcuuuguaauua

SEQ ID NO: 1754072 - RNA, 19 nt, Homo sapiens
  misc_RNA (1)...(19): siRNA sense strand
ucaggaacgucucuaucaa

SEQ ID NO: 1754073 - RNA, 19 nt, Homo sapiens
  misc_RNA (1)...(19): siRNA sense strand
gcaaauacaaagcaaggau

SEQ ID NO: 1754074 - RNA, 19 nt, Homo sapiens
  misc_RNA (1)...(19): siRNA sense strand
aaacaucacuauugcuaac

SEQ ID NO: 1754075 - RNA, 19 nt, Homo sapiens
  misc_RNA (1)...(19): siRNA sense strand
caaguuuccuuuggauaau

SEQ ID NO: 1754076 - RNA, 19 nt, Homo sapiens
  misc_RNA (1)...(19): siRNA sense strand
uuuagucgcucaccagcua

SEQ ID NO: 1754077 - RNA, 19 nt, Homo sapiens
  misc_RNA (1)...(19): siRNA sense strand
aaacagauggagaagauau

SEQ ID NO: 1754078 - RNA, 19 nt, Homo sapiens
  misc_RNA (1)...(19): siRNA sense strand
cuccaaggccucuaugaua

SEQ ID NO: 1754079 - RNA, 19 nt, Homo sapiens
  misc_RNA (1)...(19): siRNA sense strand
gaaacagauggagaagaua

SEQ ID NO: 1754080 - RNA, 19 nt, Homo sapiens
  misc_RNA (1)...(19): siRNA sense strand
cgauggagauggagauuuu

SEQ ID NO: 1754081 - RNA, 19 nt, Homo sapiens
  misc_RNA (1)...(19): siRNA sense strand
uguccugccugcaacagua

SEQ ID NO: 1754082 - RNA, 19 nt, Homo sapiens
  misc_RNA (1)...(19): siRNA sense strand
agcagggccuucaaaguaa

SEQ ID NO: 1754083 - RNA, 19 nt, Homo sapiens
  misc_RNA (1)...(19): siRNA sense strand
aaagcaaggauguagaauu

SEQ ID NO: 1754084 - RNA, 19 nt, Homo sapiens
  misc_RNA (1)...(19): siRNA sense strand
guccaucagaggaauauaa

SEQ ID NO: 1754085 - RNA, 19 nt, Homo sapiens
  misc_RNA (1)...(19): siRNA sense strand
aggaacgucucuaucaaga

SEQ ID NO: 1754086 - RNA, 19 nt, Homo sapiens
  misc_RNA (1)...(19): siRNA sense strand
gcgcuggccuucuggacau

SEQ ID NO: 1754087 - RNA, 19 nt, Homo sapiens
  misc_RNA (1)...(19): siRNA sense strand
agaggaauauaaagcuaug

SEQ ID NO: 1754088 - RNA, 19 nt, Homo sapiens
  misc_RNA (1)...(19): siRNA sense strand
cuugaaccauccaugauug

SEQ ID NO: 1754089 - RNA, 19 nt, Homo sapiens
  misc_RNA (1)...(19): siRNA sense strand
aaaguucagugacaucucu

SEQ ID NO: 1754090 - RNA, 19 nt, Homo sapiens
  misc_RNA (1)...(19): siRNA sense strand
acaaagcaaggauguagaa

SEQ ID NO: 1754091 - RNA, 19 nt, Homo sapiens
  misc_RNA (1)...(19): siRNA sense strand
gauauuguccgcacagaac

SEQ ID NO: 1754092 - RNA, 19 nt, Homo sapiens
  misc_RNA (1)...(19): siRNA sense strand
caucaaacucucuggcuau

SEQ ID NO: 1754093 - RNA, 19 nt, Homo sapiens
  misc_RNA (1)...(19): siRNA sense strand
caugaagaaaguacuagaa

SEQ ID NO: 1754094 - RNA, 19 nt, Homo sapiens
  misc_RNA (1)...(19): siRNA sense strand
auaauacaccuguucgaaa

SEQ ID NO: 1754095 - RNA, 19 nt, Homo sapiens
  misc_RNA (1)...(19): siRNA sense strand
cagauggagaagauauaua

SEQ ID NO: 1754096 - RNA, 19 nt, Homo sapiens
  misc_RNA (1)...(19): siRNA sense strand
guacuagaagaauacaaga

SEQ ID NO: 1754097 - RNA, 19 nt, Homo sapiens
  misc_RNA (1)...(19): siRNA sense strand
caucuucugugaucagcau

SEQ ID NO: 1754098 - RNA, 19 nt, Homo sapiens
  misc_RNA (1)...(19): siRNA sense strand
ucacuauugcuaaccauga

SEQ ID NO: 1754099 - RNA, 19 nt, Homo sapiens
  misc_RNA (1)...(19): siRNA sense strand
ggaacgucucuaucaagaa

SEQ ID NO: 1754100 - RNA, 19 nt, Homo sapiens
  misc_RNA (1)...(19): siRNA sense strand
caugcugcuuuguaauuau

SEQ ID NO: 1754101 - RNA, 19 nt, Homo sapiens
  misc_RNA (1)...(19): siRNA sense strand
cacuauugcuaaccaugaa

SEQ ID NO: 1754102 - RNA, 19 nt, Homo sapiens
  misc_RNA (1)...(19): siRNA sense strand
uuaccuccaugaagaaagu

SEQ ID NO: 1754103 - RNA, 19 nt, Homo sapiens
  misc_RNA (1)...(19): siRNA sense strand
ugccugcucucacaucuuc

SEQ ID NO: 1754104 - RNA, 19 nt, Homo sapiens
  misc_RNA (1)...(19): siRNA sense strand
gagcagcagcaaguuucua

SEQ ID NO: 1754105 - RNA, 19 nt, Homo sapiens
  misc_RNA (1)...(19): siRNA sense strand
aacaguacccuuucuggaa

SEQ ID NO: 1754106 - RNA, 19 nt, Homo sapiens
  misc_RNA (1)...(19): siRNA sense strand
gcuacgaaacaucacuauu

SEQ ID NO: 1754107 - RNA, 19 nt, Homo sapiens
  misc_RNA (1)...(19): siRNA sense strand
gcuccaaggccucuaugau

SEQ ID NO: 1754108 - RNA, 19 nt, Homo sapiens
  misc_RNA (1)...(19): siRNA sense strand
gcgcaaucgucaguaucaa

SEQ ID NO: 1754109 - RNA, 19 nt, Homo sapiens
  misc_RNA (1)...(19): siRNA sense strand
gcaccugaacccagcaaca

SEQ ID NO: 1754110 - RNA, 19 nt, Homo sapiens
  misc_RNA (1)...(19): siRNA sense strand
uacgaaacaucacuauugc

SEQ ID NO: 1754111 - RNA, 19 nt, Homo sapiens
  misc_RNA (1)...(19): siRNA sense strand
gcaaucgucaguaucaaaa

SEQ ID NO: 1754112 - RNA, 19 nt, Homo sapiens
  misc_RNA (1)...(19): siRNA sense strand
gaacccagcaacagcuuuu

SEQ ID NO: 1754113 - RNA, 19 nt, Homo sapiens
  misc_RNA (1)...(19): siRNA sense strand
cagaggaauauaaagcuau

SEQ ID NO: 1754114 - RNA, 19 nt, Homo sapiens
  misc_RNA (1)...(19): siRNA sense strand
uuagagcagcagcaaguuu

SEQ ID NO: 1754115 - RNA, 19 nt, Homo sapiens
  misc_RNA (1)...(19): siRNA sense strand
caucagaggaauauaaagc

SEQ ID NO: 1754116 - RNA, 19 nt, Homo sapiens
  misc_RNA (1)...(19): siRNA sense strand
uagagcagcagcaaguuuc

SEQ ID NO: 1754117 - RNA, 19 nt, Homo sapiens
  misc_RNA (1)...(19): siRNA sense strand
ugaauuagagcagcagcaa

SEQ ID NO: 1754118 - RNA, 19 nt, Homo sapiens
  misc_RNA (1)...(19): siRNA sense strand
gcgauggagauggagauuu

SEQ ID NO: 1754119 - RNA, 19 nt, Homo sapiens
  misc_RNA (1)...(19): siRNA sense strand
ugugaagacaugcugcuuu

SEQ ID NO: 1754120 - RNA, 19 nt, Homo sapiens
  misc_RNA (1)...(19): siRNA sense strand
cuucuggacauaucaggua

SEQ ID NO: 1754121 - RNA, 19 nt, Homo sapiens
  misc_RNA (1)...(19): siRNA sense strand
ccuugaaccauccaugauu

SEQ ID NO: 1754122 - RNA, 19 nt, Homo sapiens
  misc_RNA (1)...(19): siRNA sense strand
cucuccaagucgugaauua

SEQ ID NO: 1754123 - RNA, 19 nt, Homo sapiens
  misc_RNA (1)...(19): siRNA sense strand
ggauaauacaccuguucga

SEQ ID NO: 1754124 - RNA, 19 nt, Homo sapiens
  misc_RNA (1)...(19): siRNA sense strand
caucaggaacgucucuauc

SEQ ID NO: 1754125 - RNA, 19 nt, Homo sapiens
  misc_RNA (1)...(19): siRNA sense strand
gcacagucugguguucuug

SEQ ID NO: 1754126 - RNA, 19 nt, Homo sapiens
  misc_RNA (1)...(19): siRNA sense strand
agauggagaagauauauac

SEQ ID NO: 1754127 - RNA, 19 nt, Homo sapiens
  misc_RNA (1)...(19): siRNA sense strand
gcugagggccaucugaaac

SEQ ID NO: 1754128 - RNA, 19 nt, Homo sapiens
  misc_RNA (1)...(19): siRNA sense strand
ucagguacaucaggaacgu

SEQ ID NO: 1754129 - RNA, 19 nt, Homo sapiens
  misc_RNA (1)...(19): siRNA sense strand
agauggagauuuucaguuc

SEQ ID NO: 1754130 - RNA, 19 nt, Homo sapiens
  misc_RNA (1)...(19): siRNA sense strand
aaacuuauggagcgcaauc

SEQ ID NO: 1754131 - RNA, 19 nt, Homo sapiens
  misc_RNA (1)...(19): siRNA sense strand
aaauacaaagcaaggaugu

SEQ ID NO: 1754132 - RNA, 19 nt, Homo sapiens
  misc_RNA (1)...(19): siRNA sense strand
gcucgaccaucucaauguc

SEQ ID NO: 1754133 - RNA, 19 nt, Homo sapiens
  misc_RNA (1)...(19): siRNA sense strand
ucgaggcggagaaccauua

SEQ ID NO: 1754134 - RNA, 19 nt, Homo sapiens
  misc_RNA (1)...(19): siRNA sense strand
gcgccaagcagaacaugau

SEQ ID NO: 1754135 - RNA, 19 nt, Homo sapiens
  misc_RNA (1)...(19): siRNA sense strand
ucaaugucaccaagaaaug

SEQ ID NO: 1754136 - RNA, 19 nt, Homo sapiens
  misc_RNA (1)...(19): siRNA sense strand
cggaccagcucgaccaucu

SEQ ID NO: 1754137 - RNA, 19 nt, Homo sapiens
  misc_RNA (1)...(19): siRNA sense strand
gaccagcucgaccaucuca

SEQ ID NO: 1754138 - RNA, 19 nt, Homo sapiens
  misc_RNA (1)...(19): siRNA sense strand
ccagcucgaccaucucaau

SEQ ID NO: 1754139 - RNA, 19 nt, Homo sapiens
  misc_RNA (1)...(19): siRNA sense strand
gagcaaaguuuccucaaug

SEQ ID NO: 1754140 - RNA, 19 nt, Homo sapiens
  misc_RNA (1)...(19): siRNA sense strand
ggagagguuucguagcuua

SEQ ID NO: 1754141 - RNA, 19 nt, Homo sapiens
  misc_RNA (1)...(19): siRNA sense strand
gaaagaggaggaagccaua

SEQ ID NO: 1754142 - RNA, 19 nt, Homo sapiens
  misc_RNA (1)...(19): siRNA sense strand
ccaguguacuuuaccaaua

SEQ ID NO: 1754143 - RNA, 19 nt, Homo sapiens
  misc_RNA (1)...(19): siRNA sense strand
aaacauaagccaagcaauu

SEQ ID NO: 1754144 - RNA, 19 nt, Homo sapiens
  misc_RNA (1)...(19): siRNA sense strand
ggaagaccaguguacuuua

SEQ ID NO: 1754145 - RNA, 19 nt, Homo sapiens
  misc_RNA (1)...(19): siRNA sense strand
cgacagcguucuucagaga

SEQ ID NO: 1754146 - RNA, 19 nt, Homo sapiens
  misc_RNA (1)...(19): siRNA sense strand
gaagaccaguguacuuuac

SEQ ID NO: 1754147 - RNA, 19 nt, Homo sapiens
  misc_RNA (1)...(19): siRNA sense strand
ugacaaaugagcaaaguuu

SEQ ID NO: 1754148 - RNA, 19 nt, Homo sapiens
  misc_RNA (1)...(19): siRNA sense strand
gaauccaccugcaguuaug

SEQ ID NO: 1754149 - RNA, 19 nt, Homo sapiens
  misc_RNA (1)...(19): siRNA sense strand
gagaauccaccugcaguua

SEQ ID NO: 1754150 - RNA, 19 nt, Homo sapiens
  misc_RNA (1)...(19): siRNA sense strand
caacagugggcauugauuu

SEQ ID NO: 1754151 - RNA, 19 nt, Homo sapiens
  misc_RNA (1)...(19): siRNA sense strand
ccauagcacucgcagagaa

SEQ ID NO: 1754152 - RNA, 19 nt, Homo sapiens
  misc_RNA (1)...(19): siRNA sense strand
gggaagaccaguguacuuu

SEQ ID NO: 1754153 - RNA, 19 nt, Homo sapiens
  misc_RNA (1)...(19): siRNA sense strand
ccaaauuuaucacaacagu

SEQ ID NO: 1754154 - RNA, 19 nt, Homo sapiens
  misc_RNA (1)...(19): siRNA sense strand
ucacaacagugggcauuga

SEQ ID NO: 1754155 - RNA, 19 nt, Homo sapiens
  misc_RNA (1)...(19): siRNA sense strand
ucagagaugcuauggguuu

SEQ ID NO: 1754156 - RNA, 19 nt, Homo sapiens
  misc_RNA (1)...(19): siRNA sense strand
caaaguuuccucaauguca

SEQ ID NO: 1754157 - RNA, 19 nt, Homo sapiens
  misc_RNA (1)...(19): siRNA sense strand
cuacggaucaguuaaguga

SEQ ID NO: 1754158 - RNA, 19 nt, Homo sapiens
  misc_RNA (1)...(19): siRNA sense strand
gauaaugaagcgaauggaa

SEQ ID NO: 1754159 - RNA, 19 nt, Homo sapiens
  misc_RNA (1)...(19): siRNA sense strand
gccaaugggacaaacauaa

SEQ ID NO: 1754160 - RNA, 19 nt, Homo sapiens
  misc_RNA (1)...(19): siRNA sense strand
ugauggagauuaugauuac

SEQ ID NO: 1754161 - RNA, 19 nt, Homo sapiens
  misc_RNA (1)...(19): siRNA sense strand
caguguacuuuaccaauau

SEQ ID NO: 1754162 - RNA, 19 nt, Homo sapiens
  misc_RNA (1)...(19): siRNA sense strand
ggaguggugcgaucaaaug

SEQ ID NO: 1754163 - RNA, 19 nt, Homo sapiens
  misc_RNA (1)...(19): siRNA sense strand
gauauagugcuguguggaa

SEQ ID NO: 1754164 - RNA, 19 nt, Homo sapiens
  misc_RNA (1)...(19): siRNA sense strand
caggagagguuucguagcu

SEQ ID NO: 1754165 - RNA, 19 nt, Homo sapiens
  misc_RNA (1)...(19): siRNA sense strand
gauaagccagcuacagaug

SEQ ID NO: 1754166 - RNA, 19 nt, Homo sapiens
  misc_RNA (1)...(19): siRNA sense strand
ggaauccccuacuuugaaa

SEQ ID NO: 1754167 - RNA, 19 nt, Homo sapiens
  misc_RNA (1)...(19): siRNA sense strand
gcagagaaauauggaaucc

SEQ ID NO: 1754168 - RNA, 19 nt, Homo sapiens
  misc_RNA (1)...(19): siRNA sense strand
ggaccagagaguagugaaa

SEQ ID NO: 1754169 - RNA, 19 nt, Homo sapiens
  misc_RNA (1)...(19): siRNA sense strand
gggcaggagagguuucgua

SEQ ID NO: 1754170 - RNA, 19 nt, Homo sapiens
  misc_RNA (1)...(19): siRNA sense strand
gaaacuagugcugccaaug

SEQ ID NO: 1754171 - RNA, 19 nt, Homo sapiens
  misc_RNA (1)...(19): siRNA sense strand
cagcagggcaggagagguu

SEQ ID NO: 1754172 - RNA, 19 nt, Homo sapiens
  misc_RNA (1)...(19): siRNA sense strand
caaauggucaugccucuac

SEQ ID NO: 1754173 - RNA, 19 nt, Homo sapiens
  misc_RNA (1)...(19): siRNA sense strand
ccaauauacagaugguaaa

SEQ ID NO: 1754174 - RNA, 19 nt, Homo sapiens
  misc_RNA (1)...(19): siRNA sense strand
cuucuggaccugauaauga

SEQ ID NO: 1754175 - RNA, 19 nt, Homo sapiens
  misc_RNA (1)...(19): siRNA sense strand
ggauaagccagcuacagau

SEQ ID NO: 1754176 - RNA, 19 nt, Homo sapiens
  misc_RNA (1)...(19): siRNA sense strand
gaaggaguggugcgaucaa

SEQ ID NO: 1754177 - RNA, 19 nt, Homo sapiens
  misc_RNA (1)...(19): siRNA sense strand
uaagccagcuacagaugca

SEQ ID NO: 1754178 - RNA, 19 nt, Homo sapiens
  misc_RNA (1)...(19): siRNA sense strand
uggauaagccagcuacaga

SEQ ID NO: 1754179 - RNA, 19 nt, Homo sapiens
  misc_RNA (1)...(19): siRNA sense strand
cugauggagauuaugauua

SEQ ID NO: 1754180 - RNA, 19 nt, Homo sapiens
  misc_RNA (1)...(19): siRNA sense strand
gagagguuucguagcuuaa

SEQ ID NO: 1754181 - RNA, 19 nt, Homo sapiens
  misc_RNA (1)...(19): siRNA sense strand
gaucaguuaagugaagaaa

SEQ ID NO: 1754182 - RNA, 19 nt, Homo sapiens
  misc_RNA (1)...(19): siRNA sense strand
ggaacgguguguggacaag

SEQ ID NO: 1754183 - RNA, 19 nt, Homo sapiens
  misc_RNA (1)...(19): siRNA sense strand
aaacuagugcugccaaugg

SEQ ID NO: 1754184 - RNA, 19 nt, Homo sapiens
  misc_RNA (1)...(19): siRNA sense strand
aacauaagccaagcaauug

SEQ ID NO: 1754185 - RNA, 19 nt, Homo sapiens
  misc_RNA (1)...(19): siRNA sense strand
gacaaaugagcaaaguuuc

SEQ ID NO: 1754186 - RNA, 19 nt, Homo sapiens
  misc_RNA (1)...(19): siRNA sense strand
ccaaugggacaaacauaag

SEQ ID NO: 1754187 - RNA, 19 nt, Homo sapiens
  misc_RNA (1)...(19): siRNA sense strand
ugaaacuagugcugccaau

SEQ ID NO: 1754188 - RNA, 19 nt, Homo sapiens
  misc_RNA (1)...(19): siRNA sense strand
gcaaaguuuccucaauguc

SEQ ID NO: 1754189 - RNA, 19 nt, Homo sapiens
  misc_RNA (1)...(19): siRNA sense strand
gaccagagaguagugaaag

SEQ ID NO: 1754190 - RNA, 19 nt, Homo sapiens
  misc_RNA (1)...(19): siRNA sense strand
gaucugacaaaugagcaaa

SEQ ID NO: 1754191 - RNA, 19 nt, Homo sapiens
  misc_RNA (1)...(19): siRNA sense strand
ucaguuaagugaagaaaag

SEQ ID NO: 1754192 - RNA, 19 nt, Homo sapiens
  misc_RNA (1)...(19): siRNA sense strand
caaugucagaaacuggaua

SEQ ID NO: 1754193 - RNA, 19 nt, Homo sapiens
  misc_RNA (1)...(19): siRNA sense strand
cauagcacucgcagagaaa

SEQ ID NO: 1754194 - RNA, 19 nt, Homo sapiens
  misc_RNA (1)...(19): siRNA sense strand
acagcguucuucagagaug

SEQ ID NO: 1754195 - RNA, 19 nt, Homo sapiens
  misc_RNA (1)...(19): siRNA sense strand
agaauccaccugcaguuau

SEQ ID NO: 1754196 - RNA, 19 nt, Homo sapiens
  misc_RNA (1)...(19): siRNA sense strand
agcaaaguuuccucaaugu

SEQ ID NO: 1754197 - RNA, 19 nt, Homo sapiens
  misc_RNA (1)...(19): siRNA sense strand
aaggaguggugcgaucaaa

SEQ ID NO: 1754198 - RNA, 19 nt, Homo sapiens
  misc_RNA (1)...(19): siRNA sense strand
acaaacauaagccaagcaa

SEQ ID NO: 1754199 - RNA, 19 nt, Homo sapiens
  misc_RNA (1)...(19): siRNA sense strand
gcacucgcagagaaauaug

SEQ ID NO: 1754200 - RNA, 19 nt, Homo sapiens
  misc_RNA (1)...(19): siRNA sense strand
auauagugcuguguggaaa

SEQ ID NO: 1754201 - RNA, 19 nt, Homo sapiens
  misc_RNA (1)...(19): siRNA sense strand
guacuuuaccaauauacag

SEQ ID NO: 1754202 - RNA, 19 nt, Homo sapiens
  misc_RNA (1)...(19): siRNA sense strand
uagcacucgcagagaaaua

SEQ ID NO: 1754203 - RNA, 19 nt, Homo sapiens
  misc_RNA (1)...(19): siRNA sense strand
guagggaagaccaguguac

SEQ ID NO: 1754204 - RNA, 19 nt, Homo sapiens
  misc_RNA (1)...(19): siRNA sense strand
ggaggaccagagaguagug

SEQ ID NO: 1754205 - RNA, 19 nt, Homo sapiens
  misc_RNA (1)...(19): siRNA sense strand
gagcaaaguuuccucaaug

SEQ ID NO: 1754206 - RNA, 19 nt, Homo sapiens
  misc_RNA (1)...(19): siRNA sense strand
ggagagguuucguagcuua

SEQ ID NO: 1754207 - RNA, 19 nt, Homo sapiens
  misc_RNA (1)...(19): siRNA sense strand
gaaagaggaggaagccaua

SEQ ID NO: 1754208 - RNA, 19 nt, Homo sapiens
  misc_RNA (1)...(19): siRNA sense strand
ccaguguacuuuaccaaua

SEQ ID NO: 1754209 - RNA, 19 nt, Homo sapiens
  misc_RNA (1)...(19): siRNA sense strand
aaacauaagccaagcaauu

SEQ ID NO: 1754210 - RNA, 19 nt, Homo sapiens
  misc_RNA (1)...(19): siRNA sense strand
ggaagaccaguguacuuua

SEQ ID NO: 1754211 - RNA, 19 nt, Homo sapiens
  misc_RNA (1)...(19): siRNA sense strand
cgacagcguucuucagaga

SEQ ID NO: 1754212 - RNA, 19 nt, Homo sapiens
  misc_RNA (1)...(19): siRNA sense strand
gaagaccaguguacuuuac

SEQ ID NO: 1754213 - RNA, 19 nt, Homo sapiens
  misc_RNA (1)...(19): siRNA sense strand
ugacaaaugagcaaaguuu

SEQ ID NO: 1754214 - RNA, 19 nt, Homo sapiens
  misc_RNA (1)...(19): siRNA sense strand
gaauccaccugcaguuaug

SEQ ID NO: 1754215 - RNA, 19 nt, Homo sapiens
  misc_RNA (1)...(19): siRNA sense strand
gagaauccaccugcaguua

SEQ ID NO: 1754216 - RNA, 19 nt, Homo sapiens
  misc_RNA (1)...(19): siRNA sense strand
caacagugggcauugauuu

SEQ ID NO: 1754217 - RNA, 19 nt, Homo sapiens
  misc_RNA (1)...(19): siRNA sense strand
ccauagcacucgcagagaa

SEQ ID NO: 1754218 - RNA, 19 nt, Homo sapiens
  misc_RNA (1)...(19): siRNA sense strand
gggaagaccaguguacuuu

SEQ ID NO: 1754219 - RNA, 19 nt, Homo sapiens
  misc_RNA (1)...(19): siRNA sense strand
ccaaauuuaucacaacagu

SEQ ID NO: 1754220 - RNA, 19 nt, Homo sapiens
  misc_RNA (1)...(19): siRNA sense strand
ucacaacagugggcauuga

SEQ ID NO: 1754221 - RNA, 19 nt, Homo sapiens
  misc_RNA (1)...(19): siRNA sense strand
ucagagaugcuauggguuu

SEQ ID NO: 1754222 - RNA, 19 nt, Homo sapiens
  misc_RNA (1)...(19): siRNA sense strand
caaaguuuccucaauguca

SEQ ID NO: 1754223 - RNA, 19 nt, Homo sapiens
  misc_RNA (1)...(19): siRNA sense strand
cuacggaucaguuaaguga

SEQ ID NO: 1754224 - RNA, 19 nt, Homo sapiens
  misc_RNA (1)...(19): siRNA sense strand
gauaaugaagcgaauggaa

SEQ ID NO: 1754225 - RNA, 19 nt, Homo sapiens
  misc_RNA (1)...(19): siRNA sense strand
gccaaugggacaaacauaa

SEQ ID NO: 1754226 - RNA, 19 nt, Homo sapiens
  misc_RNA (1)...(19): siRNA sense strand
ugauggagauuaugauuac

SEQ ID NO: 1754227 - RNA, 19 nt, Homo sapiens
  misc_RNA (1)...(19): siRNA sense strand
caguguacuuuaccaauau

SEQ ID NO: 1754228 - RNA, 19 nt, Homo sapiens
  misc_RNA (1)...(19): siRNA sense strand
ggaguggugcgaucaaaug

SEQ ID NO: 1754229 - RNA, 19 nt, Homo sapiens
  misc_RNA (1)...(19): siRNA sense strand
gauauagugcuguguggaa

SEQ ID NO: 1754230 - RNA, 19 nt, Homo sapiens
  misc_RNA (1)...(19): siRNA sense strand
caggagagguuucguagcu

SEQ ID NO: 1754231 - RNA, 19 nt, Homo sapiens
  misc_RNA (1)...(19): siRNA sense strand
gauaagccagcuacagaug

SEQ ID NO: 1754232 - RNA, 19 nt, Homo sapiens
  misc_RNA (1)...(19): siRNA sense strand
ggaauccccuacuuugaaa

SEQ ID NO: 1754233 - RNA, 19 nt, Homo sapiens
  misc_RNA (1)...(19): siRNA sense strand
gcagagaaauauggaaucc

SEQ ID NO: 1754234 - RNA, 19 nt, Homo sapiens
  misc_RNA (1)...(19): siRNA sense strand
ggaccagagaguagugaaa

SEQ ID NO: 1754235 - RNA, 19 nt, Homo sapiens
  misc_RNA (1)...(19): siRNA sense strand
gggcaggagagguuucgua

SEQ ID NO: 1754236 - RNA, 19 nt, Homo sapiens
  misc_RNA (1)...(19): siRNA sense strand
gaaacuagugcugccaaug

SEQ ID NO: 1754237 - RNA, 19 nt, Homo sapiens
  misc_RNA (1)...(19): siRNA sense strand
cagcagggcaggagagguu

SEQ ID NO: 1754238 - RNA, 19 nt, Homo sapiens
  misc_RNA (1)...(19): siRNA sense strand
caaauggucaugccucuac

SEQ ID NO: 1754239 - RNA, 19 nt, Homo sapiens
  misc_RNA (1)...(19): siRNA sense strand
ccaauauacagaugguaaa

SEQ ID NO: 1754240 - RNA, 19 nt, Homo sapiens
  misc_RNA (1)...(19): siRNA sense strand
cuucuggaccugauaauga

SEQ ID NO: 1754241 - RNA, 19 nt, Homo sapiens
  misc_RNA (1)...(19): siRNA sense strand
ggauaagccagcuacagau

SEQ ID NO: 1754242 - RNA, 19 nt, Homo sapiens
  misc_RNA (1)...(19): siRNA sense strand
gaaggaguggugcgaucaa

SEQ ID NO: 1754243 - RNA, 19 nt, Homo sapiens
  misc_RNA (1)...(19): siRNA sense strand
uaagccagcuacagaugca

SEQ ID NO: 1754244 - RNA, 19 nt, Homo sapiens
  misc_RNA (1)...(19): siRNA sense strand
uggauaagccagcuacaga

SEQ ID NO: 1754245 - RNA, 19 nt, Homo sapiens
  misc_RNA (1)...(19): siRNA sense strand
cugauggagauuaugauua

SEQ ID NO: 1754246 - RNA, 19 nt, Homo sapiens
  misc_RNA (1)...(19): siRNA sense strand
gagagguuucguagcuuaa

SEQ ID NO: 1754247 - RNA, 19 nt, Homo sapiens
  misc_RNA (1)...(19): siRNA sense strand
gaucaguuaagugaagaaa

SEQ ID NO: 1754248 - RNA, 19 nt, Homo sapiens
  misc_RNA (1)...(19): siRNA sense strand
ggaacgguguguggacaag

SEQ ID NO: 1754249 - RNA, 19 nt, Homo sapiens
  misc_RNA (1)...(19): siRNA sense strand
aaacuagugcugccaaugg

SEQ ID NO: 1754250 - RNA, 19 nt, Homo sapiens
  misc_RNA (1)...(19): siRNA sense strand
aacauaagccaagcaauug

SEQ ID NO: 1754251 - RNA, 19 nt, Homo sapiens
  misc_RNA (1)...(19): siRNA sense strand
gacaaaugagcaaaguuuc

SEQ ID NO: 1754252 - RNA, 19 nt, Homo sapiens
  misc_RNA (1)...(19): siRNA sense strand
ccaaugggacaaacauaag

SEQ ID NO: 1754253 - RNA, 19 nt, Homo sapiens
  misc_RNA (1)...(19): siRNA sense strand
ugaaacuagugcugccaau

SEQ ID NO: 1754254 - RNA, 19 nt, Homo sapiens
  misc_RNA (1)...(19): siRNA sense strand
gcaaaguuuccucaauguc

SEQ ID NO: 1754255 - RNA, 19 nt, Homo sapiens
  misc_RNA (1)...(19): siRNA sense strand
gaccagagaguagugaaag

SEQ ID NO: 1754256 - RNA, 19 nt, Homo sapiens
  misc_RNA (1)...(19): siRNA sense strand
gaucugacaaaugagcaaa

SEQ ID NO: 1754257 - RNA, 19 nt, Homo sapiens
  misc_RNA (1)...(19): siRNA sense strand
ucaguuaagugaagaaaag

SEQ ID NO: 1754258 - RNA, 19 nt, Homo sapiens
  misc_RNA (1)...(19): siRNA sense strand
caaugucagaaacuggaua

SEQ ID NO: 1754259 - RNA, 19 nt, Homo sapiens
  misc_RNA (1)...(19): siRNA sense strand
cauagcacucgcagagaaa

SEQ ID NO: 1754260 - RNA, 19 nt, Homo sapiens
  misc_RNA (1)...(19): siRNA sense strand
acagcguucuucagagaug

SEQ ID NO: 1754261 - RNA, 19 nt, Homo sapiens
  misc_RNA (1)...(19): siRNA sense strand
agaauccaccugcaguuau

SEQ ID NO: 1754262 - RNA, 19 nt, Homo sapiens
  misc_RNA (1)...(19): siRNA sense strand
agcaaaguuuccucaaugu

SEQ ID NO: 1754263 - RNA, 19 nt, Homo sapiens
  misc_RNA (1)...(19): siRNA sense strand
aaggaguggugcgaucaaa

SEQ ID NO: 1754264 - RNA, 19 nt, Homo sapiens
  misc_RNA (1)...(19): siRNA sense strand
acaaacauaagccaagcaa

SEQ ID NO: 1754265 - RNA, 19 nt, Homo sapiens
  misc_RNA (1)...(19): siRNA sense strand
gcacucgcagagaaauaug

SEQ ID NO: 1754266 - RNA, 19 nt, Homo sapiens
  misc_RNA (1)...(19): siRNA sense strand
auauagugcuguguggaaa

SEQ ID NO: 1754267 - RNA, 19 nt, Homo sapiens
  misc_RNA (1)...(19): siRNA sense strand
guacuuuaccaauauacag

SEQ ID NO: 1754268 - RNA, 19 nt, Homo sapiens
  misc_RNA (1)...(19): siRNA sense strand
uagcacucgcagagaaaua

SEQ ID NO: 1754269 - RNA, 19 nt, Homo sapiens
  misc_RNA (1)...(19): siRNA sense strand
guagggaagaccaguguac

SEQ ID NO: 1754270 - RNA, 19 nt, Homo sapiens
  misc_RNA (1)...(19): siRNA sense strand
ggaggaccagagaguagug

SEQ ID NO: 1754271 - RNA, 19 nt, Homo sapiens
  misc_RNA (1)...(19): siRNA sense strand
gagcaaaguuuccucaaug

SEQ ID NO: 1754272 - RNA, 19 nt, Homo sapiens
  misc_RNA (1)...(19): siRNA sense strand
ggagagguuucguagcuua

SEQ ID NO: 1754273 - RNA, 19 nt, Homo sapiens
  misc_RNA (1)...(19): siRNA sense strand
gaaagaggaggaagccaua

SEQ ID NO: 1754274 - RNA, 19 nt, Homo sapiens
  misc_RNA (1)...(19): siRNA sense strand
ccaguguacuuuaccaaua

SEQ ID NO: 1754275 - RNA, 19 nt, Homo sapiens
  misc_RNA (1)...(19): siRNA sense strand
aaacauaagccaagcaauu

SEQ ID NO: 1754276 - RNA, 19 nt, Homo sapiens
  misc_RNA (1)...(19): siRNA sense strand
ggaagaccaguguacuuua

SEQ ID NO: 1754277 - RNA, 19 nt, Homo sapiens
  misc_RNA (1)...(19): siRNA sense strand
cgacagcguucuucagaga

SEQ ID NO: 1754278 - RNA, 19 nt, Homo sapiens
  misc_RNA (1)...(19): siRNA sense strand
gaagaccaguguacuuuac

SEQ ID NO: 1754279 - RNA, 19 nt, Homo sapiens
  misc_RNA (1)...(19): siRNA sense strand
ugacaaaugagcaaaguuu

SEQ ID NO: 1754280 - RNA, 19 nt, Homo sapiens
  misc_RNA (1)...(19): siRNA sense strand
gaauccaccugcaguuaug

SEQ ID NO: 1754281 - RNA, 19 nt, Homo sapiens
  misc_RNA (1)...(19): siRNA sense strand
gagaauccaccugcaguua

SEQ ID NO: 1754282 - RNA, 19 nt, Homo sapiens
  misc_RNA (1)...(19): siRNA sense strand
caacagugggcauugauuu

SEQ ID NO: 1754283 - RNA, 19 nt, Homo sapiens
  misc_RNA (1)...(19): siRNA sense strand
ccauagcacucgcagagaa

SEQ ID NO: 1754284 - RNA, 19 nt, Homo sapiens
  misc_RNA (1)...(19): siRNA sense strand
gggaagaccaguguacuuu

SEQ ID NO: 1754285 - RNA, 19 nt, Homo sapiens
  misc_RNA (1)...(19): siRNA sense strand
ccaaauuuaucacaacagu

SEQ ID NO: 1754286 - RNA, 19 nt, Homo sapiens
  misc_RNA (1)...(19): siRNA sense strand
ucacaacagugggcauuga

SEQ ID NO: 1754287 - RNA, 19 nt, Homo sapiens
  misc_RNA (1)...(19): siRNA sense strand
ucagagaugcuauggguuu

SEQ ID NO: 1754288 - RNA, 19 nt, Homo sapiens
  misc_RNA (1)...(19): siRNA sense strand
caaaguuuccucaauguca

SEQ ID NO: 1754289 - RNA, 19 nt, Homo sapiens
  misc_RNA (1)...(19): siRNA sense strand
cuacggaucaguuaaguga

SEQ ID NO: 1754290 - RNA, 19 nt, Homo sapiens
  misc_RNA (1)...(19): siRNA sense strand
gauaaugaagcgaauggaa

SEQ ID NO: 1754291 - RNA, 19 nt, Homo sapiens
  misc_RNA (1)...(19): siRNA sense strand
gccaaugggacaaacauaa

SEQ ID NO: 1754292 - RNA, 19 nt, Homo sapiens
  misc_RNA (1)...(19): siRNA sense strand
ugauggagauuaugauuac

SEQ ID NO: 1754293 - RNA, 19 nt, Homo sapiens
  misc_RNA (1)...(19): siRNA sense strand
caguguacuuuaccaauau

SEQ ID NO: 1754294 - RNA, 19 nt, Homo sapiens
  misc_RNA (1)...(19): siRNA sense strand
ggaguggugcgaucaaaug

SEQ ID NO: 1754295 - RNA, 19 nt, Homo sapiens
  misc_RNA (1)...(19): siRNA sense strand
gauauagugcuguguggaa

SEQ ID NO: 1754296 - RNA, 19 nt, Homo sapiens
  misc_RNA (1)...(19): siRNA sense strand
caggagagguuucguagcu

SEQ ID NO: 1754297 - RNA, 19 nt, Homo sapiens
  misc_RNA (1)...(19): siRNA sense strand
gauaagccagcuacagaug

SEQ ID NO: 1754298 - RNA, 19 nt, Homo sapiens
  misc_RNA (1)...(19): siRNA sense strand
ggaauccccuacuuugaaa

SEQ ID NO: 1754299 - RNA, 19 nt, Homo sapiens
  misc_RNA (1)...(19): siRNA sense strand
gcagagaaauauggaaucc

SEQ ID NO: 1754300 - RNA, 19 nt, Homo sapiens
  misc_RNA (1)...(19): siRNA sense strand
ggaccagagaguagugaaa

SEQ ID NO: 1754301 - RNA, 19 nt, Homo sapiens
  misc_RNA (1)...(19): siRNA sense strand
gggcaggagagguuucgua

SEQ ID NO: 1754302 - RNA, 19 nt, Homo sapiens
  misc_RNA (1)...(19): siRNA sense strand
gaaacuagugcugccaaug

SEQ ID NO: 1754303 - RNA, 19 nt, Homo sapiens
  misc_RNA (1)...(19): siRNA sense strand
cagcagggcaggagagguu

SEQ ID NO: 1754304 - RNA, 19 nt, Homo sapiens
  misc_RNA (1)...(19): siRNA sense strand
caaauggucaugccucuac

SEQ ID NO: 1754305 - RNA, 19 nt, Homo sapiens
  misc_RNA (1)...(19): siRNA sense strand
ccaauauacagaugguaaa

SEQ ID NO: 1754306 - RNA, 19 nt, Homo sapiens
  misc_RNA (1)...(19): siRNA sense strand
cuucuggaccugauaauga

SEQ ID NO: 1754307 - RNA, 19 nt, Homo sapiens
  misc_RNA (1)...(19): siRNA sense strand
ggauaagccagcuacagau

SEQ ID NO: 1754308 - RNA, 19 nt, Homo sapiens
  misc_RNA (1)...(19): siRNA sense strand
gaaggaguggugcgaucaa

SEQ ID NO: 1754309 - RNA, 19 nt, Homo sapiens
  misc_RNA (1)...(19): siRNA sense strand
uaagccagcuacagaugca

SEQ ID NO: 1754310 - RNA, 19 nt, Homo sapiens
  misc_RNA (1)...(19): siRNA sense strand
uggauaagccagcuacaga

SEQ ID NO: 1754311 - RNA, 19 nt, Homo sapiens
  misc_RNA (1)...(19): siRNA sense strand
cugauggagauuaugauua

SEQ ID NO: 1754312 - RNA, 19 nt, Homo sapiens
  misc_RNA (1)...(19): siRNA sense strand
gagagguuucguagcuuaa

SEQ ID NO: 1754313 - RNA, 19 nt, Homo sapiens
  misc_RNA (1)...(19): siRNA sense strand
gaucaguuaagugaagaaa

SEQ ID NO: 1754314 - RNA, 19 nt, Homo sapiens
  misc_RNA (1)...(19): siRNA sense strand
ggaacgguguguggacaag

SEQ ID NO: 1754315 - RNA, 19 nt, Homo sapiens
  misc_RNA (1)...(19): siRNA sense strand
aaacuagugcugccaaugg

SEQ ID NO: 1754316 - RNA, 19 nt, Homo sapiens
  misc_RNA (1)...(19): siRNA sense strand
aacauaagccaagcaauug

SEQ ID NO: 1754317 - RNA, 19 nt, Homo sapiens
  misc_RNA (1)...(19): siRNA sense strand
gacaaaugagcaaaguuuc

SEQ ID NO: 1754318 - RNA, 19 nt, Homo sapiens
  misc_RNA (1)...(19): siRNA sense strand
ccaaugggacaaacauaag

SEQ ID NO: 1754319 - RNA, 19 nt, Homo sapiens
  misc_RNA (1)...(19): siRNA sense strand
ugaaacuagugcugccaau

SEQ ID NO: 1754320 - RNA, 19 nt, Homo sapiens
  misc_RNA (1)...(19): siRNA sense strand
gcaaaguuuccucaauguc

SEQ ID NO: 1754321 - RNA, 19 nt, Homo sapiens
  misc_RNA (1)...(19): siRNA sense strand
gaccagagaguagugaaag

SEQ ID NO: 1754322 - RNA, 19 nt, Homo sapiens
  misc_RNA (1)...(19): siRNA sense strand
gaucugacaaaugagcaaa

SEQ ID NO: 1754323 - RNA, 19 nt, Homo sapiens
  misc_RNA (1)...(19): siRNA sense strand
ucaguuaagugaagaaaag

SEQ ID NO: 1754324 - RNA, 19 nt, Homo sapiens
  misc_RNA (1)...(19): siRNA sense strand
caaugucagaaacuggaua

SEQ ID NO: 1754325 - RNA, 19 nt, Homo sapiens
  misc_RNA (1)...(19): siRNA sense strand
cauagcacucgcagagaaa

SEQ ID NO: 1754326 - RNA, 19 nt, Homo sapiens
  misc_RNA (1)...(19): siRNA sense strand
acagcguucuucagagaug

SEQ ID NO: 1754327 - RNA, 19 nt, Homo sapiens
  misc_RNA (1)...(19): siRNA sense strand
agaauccaccugcaguuau

SEQ ID NO: 1754328 - RNA, 19 nt, Homo sapiens
  misc_RNA (1)...(19): siRNA sense strand
agcaaaguuuccucaaugu

SEQ ID NO: 1754329 - RNA, 19 nt, Homo sapiens
  misc_RNA (1)...(19): siRNA sense strand
aaggaguggugcgaucaaa

SEQ ID NO: 1754330 - RNA, 19 nt, Homo sapiens
  misc_RNA (1)...(19): siRNA sense strand
acaaacauaagccaagcaa

SEQ ID NO: 1754331 - RNA, 19 nt, Homo sapiens
  misc_RNA (1)...(19): siRNA sense strand
gcacucgcagagaaauaug

SEQ ID NO: 1754332 - RNA, 19 nt, Homo sapiens
  misc_RNA (1)...(19): siRNA sense strand
auauagugcuguguggaaa

SEQ ID NO: 1754333 - RNA, 19 nt, Homo sapiens
  misc_RNA (1)...(19): siRNA sense strand
guacuuuaccaauauacag

SEQ ID NO: 1754334 - RNA, 19 nt, Homo sapiens
  misc_RNA (1)...(19): siRNA sense strand
uagcacucgcagagaaaua

SEQ ID NO: 1754335 - RNA, 19 nt, Homo sapiens
  misc_RNA (1)...(19): siRNA sense strand
guagggaagaccaguguac

SEQ ID NO: 1754336 - RNA, 19 nt, Homo sapiens
  misc_RNA (1)...(19): siRNA sense strand
ggaggaccagagaguagug

SEQ ID NO: 1754337 - RNA, 19 nt, Homo sapiens
  misc_RNA (1)...(19): siRNA sense strand
gagcaaaguuuccucaaug

SEQ ID NO: 1754338 - RNA, 19 nt, Homo sapiens
  misc_RNA (1)...(19): siRNA sense strand
ggagagguuucguagcuua

SEQ ID NO: 1754339 - RNA, 19 nt, Homo sapiens
  misc_RNA (1)...(19): siRNA sense strand
gaaagaggaggaagccaua

SEQ ID NO: 1754340 - RNA, 19 nt, Homo sapiens
  misc_RNA (1)...(19): siRNA sense strand
ccaguguacuuuaccaaua

SEQ ID NO: 1754341 - RNA, 19 nt, Homo sapiens
  misc_RNA (1)...(19): siRNA sense strand
aaacauaagccaagcaauu

SEQ ID NO: 1754342 - RNA, 19 nt, Homo sapiens
  misc_RNA (1)...(19): siRNA sense strand
ggaagaccaguguacuuua

SEQ ID NO: 1754343 - RNA, 19 nt, Homo sapiens
  misc_RNA (1)...(19): siRNA sense strand
cgacagcguucuucagaga

SEQ ID NO: 1754344 - RNA, 19 nt, Homo sapiens
  misc_RNA (1)...(19): siRNA sense strand
gaagaccaguguacuuuac

SEQ ID NO: 1754345 - RNA, 19 nt, Homo sapiens
  misc_RNA (1)...(19): siRNA sense strand
ugacaaaugagcaaaguuu

SEQ ID NO: 1754346 - RNA, 19 nt, Homo sapiens
  misc_RNA (1)...(19): siRNA sense strand
gaauccaccugcaguuaug

SEQ ID NO: 1754347 - RNA, 19 nt, Homo sapiens
  misc_RNA (1)...(19): siRNA sense strand
gagaauccaccugcaguua

SEQ ID NO: 1754348 - RNA, 19 nt, Homo sapiens
  misc_RNA (1)...(19): siRNA sense strand
caacagugggcauugauuu

SEQ ID NO: 1754349 - RNA, 19 nt, Homo sapiens
  misc_RNA (1)...(19): siRNA sense strand
ccauagcacucgcagagaa

SEQ ID NO: 1754350 - RNA, 19 nt, Homo sapiens
  misc_RNA (1)...(19): siRNA sense strand
gggaagaccaguguacuuu

SEQ ID NO: 1754351 - RNA, 19 nt, Homo sapiens
  misc_RNA (1)...(19): siRNA sense strand
ccaaauuuaucacaacagu

SEQ ID NO: 1754352 - RNA, 19 nt, Homo sapiens
  misc_RNA (1)...(19): siRNA sense strand
ucacaacagugggcauuga

SEQ ID NO: 1754353 - RNA, 19 nt, Homo sapiens
  misc_RNA (1)...(19): siRNA sense strand
ucagagaugcuauggguuu

SEQ ID NO: 1754354 - RNA, 19 nt, Homo sapiens
  misc_RNA (1)...(19): siRNA sense strand
caaaguuuccucaauguca

SEQ ID NO: 1754355 - RNA, 19 nt, Homo sapiens
  misc_RNA (1)...(19): siRNA sense strand
cuacggaucaguuaaguga

SEQ ID NO: 1754356 - RNA, 19 nt, Homo sapiens
  misc_RNA (1)...(19): siRNA sense strand
gauaaugaagcgaauggaa

SEQ ID NO: 1754357 - RNA, 19 nt, Homo sapiens
  misc_RNA (1)...(19): siRNA sense strand
gccaaugggacaaacauaa

SEQ ID NO: 1754358 - RNA, 19 nt, Homo sapiens
  misc_RNA (1)...(19): siRNA sense strand
ugauggagauuaugauuac

SEQ ID NO: 1754359 - RNA, 19 nt, Homo sapiens
  misc_RNA (1)...(19): siRNA sense strand
caguguacuuuaccaauau

SEQ ID NO: 1754360 - RNA, 19 nt, Homo sapiens
  misc_RNA (1)...(19): siRNA sense strand
ggaguggugcgaucaaaug

SEQ ID NO: 1754361 - RNA, 19 nt, Homo sapiens
  misc_RNA (1)...(19): siRNA sense strand
gauauagugcuguguggaa

SEQ ID NO: 1754362 - RNA, 19 nt, Homo sapiens
  misc_RNA (1)...(19): siRNA sense strand
caggagagguuucguagcu

SEQ ID NO: 1754363 - RNA, 19 nt, Homo sapiens
  misc_RNA (1)...(19): siRNA sense strand
gauaagccagcuacagaug

SEQ ID NO: 1754364 - RNA, 19 nt, Homo sapiens
  misc_RNA (1)...(19): siRNA sense strand
ggaauccccuacuuugaaa

SEQ ID NO: 1754365 - RNA, 19 nt, Homo sapiens
  misc_RNA (1)...(19): siRNA sense strand
gcagagaaauauggaaucc

SEQ ID NO: 1754366 - RNA, 19 nt, Homo sapiens
  misc_RNA (1)...(19): siRNA sense strand
ggaccagagaguagugaaa

SEQ ID NO: 1754367 - RNA, 19 nt, Homo sapiens
  misc_RNA (1)...(19): siRNA sense strand
gggcaggagagguuucgua

SEQ ID NO: 1754368 - RNA, 19 nt, Homo sapiens
  misc_RNA (1)...(19): siRNA sense strand
gaaacuagugcugccaaug

SEQ ID NO: 1754369 - RNA, 19 nt, Homo sapiens
  misc_RNA (1)...(19): siRNA sense strand
cagcagggcaggagagguu

SEQ ID NO: 1754370 - RNA, 19 nt, Homo sapiens
  misc_RNA (1)...(19): siRNA sense strand
caaauggucaugccucuac

SEQ ID NO: 1754371 - RNA, 19 nt, Homo sapiens
  misc_RNA (1)...(19): siRNA sense strand
ccaauauacagaugguaaa

SEQ ID NO: 1754372 - RNA, 19 nt, Homo sapiens
  misc_RNA (1)...(19): siRNA sense strand
cuucuggaccugauaauga

SEQ ID NO: 1754373 - RNA, 19 nt, Homo sapiens
  misc_RNA (1)...(19): siRNA sense strand
ggauaagccagcuacagau

SEQ ID NO: 1754374 - RNA, 19 nt, Homo sapiens
  misc_RNA (1)...(19): siRNA sense strand
gaaggaguggugcgaucaa

SEQ ID NO: 1754375 - RNA, 19 nt, Homo sapiens
  misc_RNA (1)...(19): siRNA sense strand
uaagccagcuacagaugca

SEQ ID NO: 1754376 - RNA, 19 nt, Homo sapiens
  misc_RNA (1)...(19): siRNA sense strand
uggauaagccagcuacaga

SEQ ID NO: 1754377 - RNA, 19 nt, Homo sapiens
  misc_RNA (1)...(19): siRNA sense strand
cugauggagauuaugauua

SEQ ID NO: 1754378 - RNA, 19 nt, Homo sapiens
  misc_RNA (1)...(19): siRNA sense strand
gagagguuucguagcuuaa

SEQ ID NO: 1754379 - RNA, 19 nt, Homo sapiens
  misc_RNA (1)...(19): siRNA sense strand
gaucaguuaagugaagaaa

SEQ ID NO: 1754380 - RNA, 19 nt, Homo sapiens
  misc_RNA (1)...(19): siRNA sense strand
ggaacgguguguggacaag

SEQ ID NO: 1754381 - RNA, 19 nt, Homo sapiens
  misc_RNA (1)...(19): siRNA sense strand
aaacuagugcugccaaugg

SEQ ID NO: 1754382 - RNA, 19 nt, Homo sapiens
  misc_RNA (1)...(19): siRNA sense strand
aacauaagccaagcaauug

SEQ ID NO: 1754383 - RNA, 19 nt, Homo sapiens
  misc_RNA (1)...(19): siRNA sense strand
gacaaaugagcaaaguuuc

SEQ ID NO: 1754384 - RNA, 19 nt, Homo sapiens
  misc_RNA (1)...(19): siRNA sense strand
ccaaugggacaaacauaag

SEQ ID NO: 1754385 - RNA, 19 nt, Homo sapiens
  misc_RNA (1)...(19): siRNA sense strand
ugaaacuagugcugccaau

SEQ ID NO: 1754386 - RNA, 19 nt, Homo sapiens
  misc_RNA (1)...(19): siRNA sense strand
gcaaaguuuccucaauguc

SEQ ID NO: 1754387 - RNA, 19 nt, Homo sapiens
  misc_RNA (1)...(19): siRNA sense strand
gaccagagaguagugaaag

SEQ ID NO: 1754388 - RNA, 19 nt, Homo sapiens
  misc_RNA (1)...(19): siRNA sense strand
gaucugacaaaugagcaaa

SEQ ID NO: 1754389 - RNA, 19 nt, Homo sapiens
  misc_RNA (1)...(19): siRNA sense strand
ucaguuaagugaagaaaag

SEQ ID NO: 1754390 - RNA, 19 nt, Homo sapiens
  misc_RNA (1)...(19): siRNA sense strand
caaugucagaaacuggaua

SEQ ID NO: 1754391 - RNA, 19 nt, Homo sapiens
  misc_RNA (1)...(19): siRNA sense strand
cauagcacucgcagagaaa

SEQ ID NO: 1754392 - RNA, 19 nt, Homo sapiens
  misc_RNA (1)...(19): siRNA sense strand
acagcguucuucagagaug

SEQ ID NO: 1754393 - RNA, 19 nt, Homo sapiens
  misc_RNA (1)...(19): siRNA sense strand
agaauccaccugcaguuau

SEQ ID NO: 1754394 - RNA, 19 nt, Homo sapiens
  misc_RNA (1)...(19): siRNA sense strand
agcaaaguuuccucaaugu

SEQ ID NO: 1754395 - RNA, 19 nt, Homo sapiens
  misc_RNA (1)...(19): siRNA sense strand
aaggaguggugcgaucaaa

SEQ ID NO: 1754396 - RNA, 19 nt, Homo sapiens
  misc_RNA (1)...(19): siRNA sense strand
acaaacauaagccaagcaa

SEQ ID NO: 1754397 - RNA, 19 nt, Homo sapiens
  misc_RNA (1)...(19): siRNA sense strand
gcacucgcagagaaauaug

SEQ ID NO: 1754398 - RNA, 19 nt, Homo sapiens
  misc_RNA (1)...(19): siRNA sense strand
auauagugcuguguggaaa

SEQ ID NO: 1754399 - RNA, 19 nt, Homo sapiens
  misc_RNA (1)...(19): siRNA sense strand
guacuuuaccaauauacag

SEQ ID NO: 1754400 - RNA, 19 nt, Homo sapiens
  misc_RNA (1)...(19): siRNA sense strand
uagcacucgcagagaaaua

SEQ ID NO: 1754401 - RNA, 19 nt, Homo sapiens
  misc_RNA (1)...(19): siRNA sense strand
guagggaagaccaguguac

SEQ ID NO: 1754402 - RNA, 19 nt, Homo sapiens
  misc_RNA (1)...(19): siRNA sense strand
ggaggaccagagaguagug

SEQ ID NO: 1754403 - RNA, 19 nt, Homo sapiens
  misc_RNA (1)...(19): siRNA sense strand
caaaugagaauagcacugu

SEQ ID NO: 1754404 - RNA, 19 nt, Homo sapiens
  misc_RNA (1)...(19): siRNA sense strand
gcaaauacagaccacuucu

SEQ ID NO: 1754405 - RNA, 19 nt, Homo sapiens
  misc_RNA (1)...(19): siRNA sense strand
gggcaaauacagaccacuu

SEQ ID NO: 1754406 - RNA, 19 nt, Homo sapiens
  misc_RNA (1)...(19): siRNA sense strand
gaagccaucacugcuauca

SEQ ID NO: 1754407 - RNA, 19 nt, Homo sapiens
  misc_RNA (1)...(19): siRNA sense strand
gaccacuucugcaaaugag

SEQ ID NO: 1754408 - RNA, 19 nt, Homo sapiens
  misc_RNA (1)...(19): siRNA sense strand
aaugagaauagcacuguuu

SEQ ID NO: 1754409 - RNA, 19 nt, Homo sapiens
  misc_RNA (1)...(19): siRNA sense strand
agccaucacugcuaucauc

SEQ ID NO: 1754410 - RNA, 19 nt, Homo sapiens
  misc_RNA (1)...(19): siRNA sense strand
aaaugagaauagcacuguu

SEQ ID NO: 1754411 - RNA, 19 nt, Homo sapiens
  misc_RNA (1)...(19): siRNA sense strand
ugcggaagcuucgggagaa

SEQ ID NO: 1754412 - RNA, 19 nt, Homo sapiens
  misc_RNA (1)...(19): siRNA sense strand
ggcaaauacagaccacuuc

SEQ ID NO: 1754413 - RNA, 19 nt, Homo sapiens
  misc_RNA (1)...(19): siRNA sense strand
agaccacuucugcaaauga

SEQ ID NO: 1754414 - RNA, 19 nt, Homo sapiens
  misc_RNA (1)...(19): siRNA sense strand
caaaugagaauagcacugu

SEQ ID NO: 1754415 - RNA, 19 nt, Homo sapiens
  misc_RNA (1)...(19): siRNA sense strand
gcaaauacagaccacuucu

SEQ ID NO: 1754416 - RNA, 19 nt, Homo sapiens
  misc_RNA (1)...(19): siRNA sense strand
gggcaaauacagaccacuu

SEQ ID NO: 1754417 - RNA, 19 nt, Homo sapiens
  misc_RNA (1)...(19): siRNA sense strand
gaagccaucacugcuauca

SEQ ID NO: 1754418 - RNA, 19 nt, Homo sapiens
  misc_RNA (1)...(19): siRNA sense strand
gaccacuucugcaaaugag

SEQ ID NO: 1754419 - RNA, 19 nt, Homo sapiens
  misc_RNA (1)...(19): siRNA sense strand
aaugagaauagcacuguuu

SEQ ID NO: 1754420 - RNA, 19 nt, Homo sapiens
  misc_RNA (1)...(19): siRNA sense strand
agccaucacugcuaucauc

SEQ ID NO: 1754421 - RNA, 19 nt, Homo sapiens
  misc_RNA (1)...(19): siRNA sense strand
aaaugagaauagcacuguu

SEQ ID NO: 1754422 - RNA, 19 nt, Homo sapiens
  misc_RNA (1)...(19): siRNA sense strand
ugcggaagcuucgggagaa

SEQ ID NO: 1754423 - RNA, 19 nt, Homo sapiens
  misc_RNA (1)...(19): siRNA sense strand
ggcaaauacagaccacuuc

SEQ ID NO: 1754424 - RNA, 19 nt, Homo sapiens
  misc_RNA (1)...(19): siRNA sense strand
agaccacuucugcaaauga

SEQ ID NO: 1754425 - RNA, 19 nt, Homo sapiens
  misc_RNA (1)...(19): siRNA sense strand
caaaugagaauagcacugu

SEQ ID NO: 1754426 - RNA, 19 nt, Homo sapiens
  misc_RNA (1)...(19): siRNA sense strand
gcaaauacagaccacuucu

SEQ ID NO: 1754427 - RNA, 19 nt, Homo sapiens
  misc_RNA (1)...(19): siRNA sense strand
gggcaaauacagaccacuu

SEQ ID NO: 1754428 - RNA, 19 nt, Homo sapiens
  misc_RNA (1)...(19): siRNA sense strand
gaagccaucacugcuauca

SEQ ID NO: 1754429 - RNA, 19 nt, Homo sapiens
  misc_RNA (1)...(19): siRNA sense strand
gaccacuucugcaaaugag

SEQ ID NO: 1754430 - RNA, 19 nt, Homo sapiens
  misc_RNA (1)...(19): siRNA sense strand
aaugagaauagcacuguuu

SEQ ID NO: 1754431 - RNA, 19 nt, Homo sapiens
  misc_RNA (1)...(19): siRNA sense strand
agccaucacugcuaucauc

SEQ ID NO: 1754432 - RNA, 19 nt, Homo sapiens
  misc_RNA (1)...(19): siRNA sense strand
aaaugagaauagcacuguu

SEQ ID NO: 1754433 - RNA, 19 nt, Homo sapiens
  misc_RNA (1)...(19): siRNA sense strand
ugcggaagcuucgggagaa

SEQ ID NO: 1754434 - RNA, 19 nt, Homo sapiens
  misc_RNA (1)...(19): siRNA sense strand
ggcaaauacagaccacuuc

SEQ ID NO: 1754435 - RNA, 19 nt, Homo sapiens
  misc_RNA (1)...(19): siRNA sense strand
agaccacuucugcaaauga

SEQ ID NO: 1754436 - RNA, 19 nt, Homo sapiens
  misc_RNA (1)...(19): siRNA sense strand
gagaaaggauggcaaagau

SEQ ID NO: 1754437 - RNA, 19 nt, Homo sapiens
  misc_RNA (1)...(19): siRNA sense strand
gcaaagauccaaaucaguu

SEQ ID NO: 1754438 - RNA, 19 nt, Homo sapiens
  misc_RNA (1)...(19): siRNA sense strand
caaacgggcugcagagaug

SEQ ID NO: 1754439 - RNA, 19 nt, Homo sapiens
  misc_RNA (1)...(19): siRNA sense strand
agauggagcuucaggcaaa

SEQ ID NO: 1754440 - RNA, 19 nt, Homo sapiens
  misc_RNA (1)...(19): siRNA sense strand
gacauucccuuggaccuuu

SEQ ID NO: 1754441 - RNA, 19 nt, Homo sapiens
  misc_RNA (1)...(19): siRNA sense strand
gcauggacauucccuugga

SEQ ID NO: 1754442 - RNA, 19 nt, Homo sapiens
  misc_RNA (1)...(19): siRNA sense strand
acagacaccucucucaugu

SEQ ID NO: 1754443 - RNA, 19 nt, Homo sapiens
  misc_RNA (1)...(19): siRNA sense strand
aggcaaaacuuacagcuua

SEQ ID NO: 1754444 - RNA, 19 nt, Homo sapiens
  misc_RNA (1)...(19): siRNA sense strand
ucagugaucugccauacca

SEQ ID NO: 1754445 - RNA, 19 nt, Homo sapiens
  misc_RNA (1)...(19): siRNA sense strand
ggacuucaguggauuucag

SEQ ID NO: 1754446 - RNA, 19 nt, Homo sapiens
  misc_RNA (1)...(19): siRNA sense strand
acacagauauacagcagau

SEQ ID NO: 1754447 - RNA, 19 nt, Homo sapiens
  misc_RNA (1)...(19): siRNA sense strand
ugacugcauugaaagaugu

SEQ ID NO: 1754448 - RNA, 19 nt, Homo sapiens
  misc_RNA (1)...(19): siRNA sense strand
cugcagagauggagcuuca

SEQ ID NO: 1754449 - RNA, 19 nt, Homo sapiens
  misc_RNA (1)...(19): siRNA sense strand
agacaccucucucauguac

SEQ ID NO: 1754450 - RNA, 19 nt, Homo sapiens
  misc_RNA (1)...(19): siRNA sense strand
cacugugacugcauugaaa

SEQ ID NO: 1754451 - RNA, 19 nt, Homo sapiens
  misc_RNA (1)...(19): siRNA sense strand
ucccugacaugcugagaaa

SEQ ID NO: 1754452 - RNA, 19 nt, Homo sapiens
  misc_RNA (1)...(19): siRNA sense strand
gucuguaacugguucauca

SEQ ID NO: 1754453 - RNA, 19 nt, Homo sapiens
  misc_RNA (1)...(19): siRNA sense strand
uggcaaagauccaaaucag

SEQ ID NO: 1754454 - RNA, 19 nt, Homo sapiens
  misc_RNA (1)...(19): siRNA sense strand
gcugagaaaggauggcaaa

SEQ ID NO: 1754455 - RNA, 19 nt, Homo sapiens
  misc_RNA (1)...(19): siRNA sense strand
ugagaaaggauggcaaaga

SEQ ID NO: 1754456 - RNA, 19 nt, Homo sapiens
  misc_RNA (1)...(19): siRNA sense strand
gaggacagcauggacauuc

SEQ ID NO: 1754457 - RNA, 19 nt, Homo sapiens
  misc_RNA (1)...(19): siRNA sense strand
ggacauucccuuggaccuu

SEQ ID NO: 1754458 - RNA, 19 nt, Homo sapiens
  misc_RNA (1)...(19): siRNA sense strand
gugacugcauugaaagaug

SEQ ID NO: 1754459 - RNA, 19 nt, Homo sapiens
  misc_RNA (1)...(19): siRNA sense strand
uaugagcaccguuacaaug

SEQ ID NO: 1754460 - RNA, 19 nt, Homo sapiens
  misc_RNA (1)...(19): siRNA sense strand
ccacugugacugcauugaa

SEQ ID NO: 1754461 - RNA, 19 nt, Homo sapiens
  misc_RNA (1)...(19): siRNA sense strand
ccuuggaccuuucuucauc

SEQ ID NO: 1754462 - RNA, 19 nt, Homo sapiens
  misc_RNA (1)...(19): siRNA sense strand
uuacaaugccuauccuuca

SEQ ID NO: 1754463 - RNA, 19 nt, Homo sapiens
  misc_RNA (1)...(19): siRNA sense strand
gugcagauucuucgggauu

SEQ ID NO: 1754464 - RNA, 19 nt, Homo sapiens
  misc_RNA (1)...(19): siRNA sense strand
aaccaggacuucaguggau

SEQ ID NO: 1754465 - RNA, 19 nt, Homo sapiens
  misc_RNA (1)...(19): siRNA sense strand
cagcaaacacaccugucua

SEQ ID NO: 1754466 - RNA, 19 nt, Homo sapiens
  misc_RNA (1)...(19): siRNA sense strand
caaagauccaaaucaguuc

SEQ ID NO: 1754467 - RNA, 19 nt, Homo sapiens
  misc_RNA (1)...(19): siRNA sense strand
gagcuucaggcaaaacuua

SEQ ID NO: 1754468 - RNA, 19 nt, Homo sapiens
  misc_RNA (1)...(19): siRNA sense strand
ggacaaaacacagauauac

SEQ ID NO: 1754469 - RNA, 19 nt, Homo sapiens
  misc_RNA (1)...(19): siRNA sense strand
acagauauacagcagauag

SEQ ID NO: 1754470 - RNA, 19 nt, Homo sapiens
  misc_RNA (1)...(19): siRNA sense strand
auaccacugugacugcauu

SEQ ID NO: 1754471 - RNA, 19 nt, Homo sapiens
  misc_RNA (1)...(19): siRNA sense strand
ggcaaaacuuacagcuuaa

SEQ ID NO: 1754472 - RNA, 19 nt, Homo sapiens
  misc_RNA (1)...(19): siRNA sense strand
cacagacaccucucucaug

SEQ ID NO: 1754473 - RNA, 19 nt, Homo sapiens
  misc_RNA (1)...(19): siRNA sense strand
ucacagacaccucucucau

SEQ ID NO: 1754474 - RNA, 19 nt, Homo sapiens
  misc_RNA (1)...(19): siRNA sense strand
ucaaacgggcugcagagau

SEQ ID NO: 1754475 - RNA, 19 nt, Homo sapiens
  misc_RNA (1)...(19): siRNA sense strand
guaaaucuggaccaaguac

SEQ ID NO: 1754476 - RNA, 19 nt, Homo sapiens
  misc_RNA (1)...(19): siRNA sense strand
gauccaaaucaguucacaa

SEQ ID NO: 1754477 - RNA, 19 nt, Homo sapiens
  misc_RNA (1)...(19): siRNA sense strand
ccaggacuucaguggauuu

SEQ ID NO: 1754478 - RNA, 19 nt, Homo sapiens
  misc_RNA (1)...(19): siRNA sense strand
gcagauucuucgggauugg

SEQ ID NO: 1754479 - RNA, 19 nt, Homo sapiens
  misc_RNA (1)...(19): siRNA sense strand
gaugucccuuucucucucu

SEQ ID NO: 1754480 - RNA, 19 nt, Homo sapiens
  misc_RNA (1)...(19): siRNA sense strand
ggaccucaaccaggacuuc

SEQ ID NO: 1754481 - RNA, 19 nt, Homo sapiens
  misc_RNA (1)...(19): siRNA sense strand
ggcuguaugagcaccguua

SEQ ID NO: 1754482 - RNA, 19 nt, Homo sapiens
  misc_RNA (1)...(19): siRNA sense strand
guaugagcaccguuacaau

SEQ ID NO: 1754483 - RNA, 19 nt, Homo sapiens
  misc_RNA (1)...(19): siRNA sense strand
caguggauuucagcuucua

SEQ ID NO: 1754484 - RNA, 19 nt, Homo sapiens
  misc_RNA (1)...(19): siRNA sense strand
gagaaaggauggcaaagau

SEQ ID NO: 1754485 - RNA, 19 nt, Homo sapiens
  misc_RNA (1)...(19): siRNA sense strand
gcaaagauccaaaucaguu

SEQ ID NO: 1754486 - RNA, 19 nt, Homo sapiens
  misc_RNA (1)...(19): siRNA sense strand
caaacgggcugcagagaug

SEQ ID NO: 1754487 - RNA, 19 nt, Homo sapiens
  misc_RNA (1)...(19): siRNA sense strand
agauggagcuucaggcaaa

SEQ ID NO: 1754488 - RNA, 19 nt, Homo sapiens
  misc_RNA (1)...(19): siRNA sense strand
gacauucccuuggaccuuu

SEQ ID NO: 1754489 - RNA, 19 nt, Homo sapiens
  misc_RNA (1)...(19): siRNA sense strand
gcauggacauucccuugga

SEQ ID NO: 1754490 - RNA, 19 nt, Homo sapiens
  misc_RNA (1)...(19): siRNA sense strand
acagacaccucucucaugu

SEQ ID NO: 1754491 - RNA, 19 nt, Homo sapiens
  misc_RNA (1)...(19): siRNA sense strand
aggcaaaacuuacagcuua

SEQ ID NO: 1754492 - RNA, 19 nt, Homo sapiens
  misc_RNA (1)...(19): siRNA sense strand
ucagugaucugccauacca

SEQ ID NO: 1754493 - RNA, 19 nt, Homo sapiens
  misc_RNA (1)...(19): siRNA sense strand
ggacuucaguggauuucag

SEQ ID NO: 1754494 - RNA, 19 nt, Homo sapiens
  misc_RNA (1)...(19): siRNA sense strand
acacagauauacagcagau

SEQ ID NO: 1754495 - RNA, 19 nt, Homo sapiens
  misc_RNA (1)...(19): siRNA sense strand
ugacugcauugaaagaugu

SEQ ID NO: 1754496 - RNA, 19 nt, Homo sapiens
  misc_RNA (1)...(19): siRNA sense strand
cugcagagauggagcuuca

SEQ ID NO: 1754497 - RNA, 19 nt, Homo sapiens
  misc_RNA (1)...(19): siRNA sense strand
agacaccucucucauguac

SEQ ID NO: 1754498 - RNA, 19 nt, Homo sapiens
  misc_RNA (1)...(19): siRNA sense strand
cacugugacugcauugaaa

SEQ ID NO: 1754499 - RNA, 19 nt, Homo sapiens
  misc_RNA (1)...(19): siRNA sense strand
ucccugacaugcugagaaa

SEQ ID NO: 1754500 - RNA, 19 nt, Homo sapiens
  misc_RNA (1)...(19): siRNA sense strand
gucuguaacugguucauca

SEQ ID NO: 1754501 - RNA, 19 nt, Homo sapiens
  misc_RNA (1)...(19): siRNA sense strand
uggcaaagauccaaaucag

SEQ ID NO: 1754502 - RNA, 19 nt, Homo sapiens
  misc_RNA (1)...(19): siRNA sense strand
gcugagaaaggauggcaaa

SEQ ID NO: 1754503 - RNA, 19 nt, Homo sapiens
  misc_RNA (1)...(19): siRNA sense strand
ugagaaaggauggcaaaga

SEQ ID NO: 1754504 - RNA, 19 nt, Homo sapiens
  misc_RNA (1)...(19): siRNA sense strand
gaggacagcauggacauuc

SEQ ID NO: 1754505 - RNA, 19 nt, Homo sapiens
  misc_RNA (1)...(19): siRNA sense strand
ggacauucccuuggaccuu

SEQ ID NO: 1754506 - RNA, 19 nt, Homo sapiens
  misc_RNA (1)...(19): siRNA sense strand
gugacugcauugaaagaug

SEQ ID NO: 1754507 - RNA, 19 nt, Homo sapiens
  misc_RNA (1)...(19): siRNA sense strand
uaugagcaccguuacaaug

SEQ ID NO: 1754508 - RNA, 19 nt, Homo sapiens
  misc_RNA (1)...(19): siRNA sense strand
ccacugugacugcauugaa

SEQ ID NO: 1754509 - RNA, 19 nt, Homo sapiens
  misc_RNA (1)...(19): siRNA sense strand
ccuuggaccuuucuucauc

SEQ ID NO: 1754510 - RNA, 19 nt, Homo sapiens
  misc_RNA (1)...(19): siRNA sense strand
uuacaaugccuauccuuca

SEQ ID NO: 1754511 - RNA, 19 nt, Homo sapiens
  misc_RNA (1)...(19): siRNA sense strand
gugcagauucuucgggauu

SEQ ID NO: 1754512 - RNA, 19 nt, Homo sapiens
  misc_RNA (1)...(19): siRNA sense strand
aaccaggacuucaguggau

SEQ ID NO: 1754513 - RNA, 19 nt, Homo sapiens
  misc_RNA (1)...(19): siRNA sense strand
cagcaaacacaccugucua

SEQ ID NO: 1754514 - RNA, 19 nt, Homo sapiens
  misc_RNA (1)...(19): siRNA sense strand
caaagauccaaaucaguuc

SEQ ID NO: 1754515 - RNA, 19 nt, Homo sapiens
  misc_RNA (1)...(19): siRNA sense strand
gagcuucaggcaaaacuua

SEQ ID NO: 1754516 - RNA, 19 nt, Homo sapiens
  misc_RNA (1)...(19): siRNA sense strand
ggacaaaacacagauauac

SEQ ID NO: 1754517 - RNA, 19 nt, Homo sapiens
  misc_RNA (1)...(19): siRNA sense strand
acagauauacagcagauag

SEQ ID NO: 1754518 - RNA, 19 nt, Homo sapiens
  misc_RNA (1)...(19): siRNA sense strand
auaccacugugacugcauu

SEQ ID NO: 1754519 - RNA, 19 nt, Homo sapiens
  misc_RNA (1)...(19): siRNA sense strand
ggcaaaacuuacagcuuaa

SEQ ID NO: 1754520 - RNA, 19 nt, Homo sapiens
  misc_RNA (1)...(19): siRNA sense strand
cacagacaccucucucaug

SEQ ID NO: 1754521 - RNA, 19 nt, Homo sapiens
  misc_RNA (1)...(19): siRNA sense strand
ucacagacaccucucucau

SEQ ID NO: 1754522 - RNA, 19 nt, Homo sapiens
  misc_RNA (1)...(19): siRNA sense strand
ucaaacgggcugcagagau

SEQ ID NO: 1754523 - RNA, 19 nt, Homo sapiens
  misc_RNA (1)...(19): siRNA sense strand
guaaaucuggaccaaguac

SEQ ID NO: 1754524 - RNA, 19 nt, Homo sapiens
  misc_RNA (1)...(19): siRNA sense strand
gauccaaaucaguucacaa

SEQ ID NO: 1754525 - RNA, 19 nt, Homo sapiens
  misc_RNA (1)...(19): siRNA sense strand
ccaggacuucaguggauuu

SEQ ID NO: 1754526 - RNA, 19 nt, Homo sapiens
  misc_RNA (1)...(19): siRNA sense strand
gcagauucuucgggauugg

SEQ ID NO: 1754527 - RNA, 19 nt, Homo sapiens
  misc_RNA (1)...(19): siRNA sense strand
gaugucccuuucucucucu

SEQ ID NO: 1754528 - RNA, 19 nt, Homo sapiens
  misc_RNA (1)...(19): siRNA sense strand
ggaccucaaccaggacuuc

SEQ ID NO: 1754529 - RNA, 19 nt, Homo sapiens
  misc_RNA (1)...(19): siRNA sense strand
ggcuguaugagcaccguua

SEQ ID NO: 1754530 - RNA, 19 nt, Homo sapiens
  misc_RNA (1)...(19): siRNA sense strand
guaugagcaccguuacaau

SEQ ID NO: 1754531 - RNA, 19 nt, Homo sapiens
  misc_RNA (1)...(19): siRNA sense strand
caguggauuucagcuucua

SEQ ID NO: 1754532 - RNA, 19 nt, Homo sapiens
  misc_RNA (1)...(19): siRNA sense strand
gagaaaggauggcaaagau

SEQ ID NO: 1754533 - RNA, 19 nt, Homo sapiens
  misc_RNA (1)...(19): siRNA sense strand
gcaaagauccaaaucaguu

SEQ ID NO: 1754534 - RNA, 19 nt, Homo sapiens
  misc_RNA (1)...(19): siRNA sense strand
caaacgggcugcagagaug

SEQ ID NO: 1754535 - RNA, 19 nt, Homo sapiens
  misc_RNA (1)...(19): siRNA sense strand
agauggagcuucaggcaaa

SEQ ID NO: 1754536 - RNA, 19 nt, Homo sapiens
  misc_RNA (1)...(19): siRNA sense strand
gacauucccuuggaccuuu

SEQ ID NO: 1754537 - RNA, 19 nt, Homo sapiens
  misc_RNA (1)...(19): siRNA sense strand
gcauggacauucccuugga

SEQ ID NO: 1754538 - RNA, 19 nt, Homo sapiens
  misc_RNA (1)...(19): siRNA sense strand
acagacaccucucucaugu

SEQ ID NO: 1754539 - RNA, 19 nt, Homo sapiens
  misc_RNA (1)...(19): siRNA sense strand
aggcaaaacuuacagcuua

SEQ ID NO: 1754540 - RNA, 19 nt, Homo sapiens
  misc_RNA (1)...(19): siRNA sense strand
ucagugaucugccauacca

SEQ ID NO: 1754541 - RNA, 19 nt, Homo sapiens
  misc_RNA (1)...(19): siRNA sense strand
ggacuucaguggauuucag

SEQ ID NO: 1754542 - RNA, 19 nt, Homo sapiens
  misc_RNA (1)...(19): siRNA sense strand
acacagauauacagcagau

SEQ ID NO: 1754543 - RNA, 19 nt, Homo sapiens
  misc_RNA (1)...(19): siRNA sense strand
ugacugcauugaaagaugu

SEQ ID NO: 1754544 - RNA, 19 nt, Homo sapiens
  misc_RNA (1)...(19): siRNA sense strand
cugcagagauggagcuuca

SEQ ID NO: 1754545 - RNA, 19 nt, Homo sapiens
  misc_RNA (1)...(19): siRNA sense strand
agacaccucucucauguac

SEQ ID NO: 1754546 - RNA, 19 nt, Homo sapiens
  misc_RNA (1)...(19): siRNA sense strand
cacugugacugcauugaaa

SEQ ID NO: 1754547 - RNA, 19 nt, Homo sapiens
  misc_RNA (1)...(19): siRNA sense strand
ucccugacaugcugagaaa

SEQ ID NO: 1754548 - RNA, 19 nt, Homo sapiens
  misc_RNA (1)...(19): siRNA sense strand
gucuguaacugguucauca

SEQ ID NO: 1754549 - RNA, 19 nt, Homo sapiens
  misc_RNA (1)...(19): siRNA sense strand
uggcaaagauccaaaucag

SEQ ID NO: 1754550 - RNA, 19 nt, Homo sapiens
  misc_RNA (1)...(19): siRNA sense strand
gcugagaaaggauggcaaa

SEQ ID NO: 1754551 - RNA, 19 nt, Homo sapiens
  misc_RNA (1)...(19): siRNA sense strand
ugagaaaggauggcaaaga

SEQ ID NO: 1754552 - RNA, 19 nt, Homo sapiens
  misc_RNA (1)...(19): siRNA sense strand
gaggacagcauggacauuc

SEQ ID NO: 1754553 - RNA, 19 nt, Homo sapiens
  misc_RNA (1)...(19): siRNA sense strand
ggacauucccuuggaccuu

SEQ ID NO: 1754554 - RNA, 19 nt, Homo sapiens
  misc_RNA (1)...(19): siRNA sense strand
gugacugcauugaaagaug

SEQ ID NO: 1754555 - RNA, 19 nt, Homo sapiens
  misc_RNA (1)...(19): siRNA sense strand
uaugagcaccguuacaaug

SEQ ID NO: 1754556 - RNA, 19 nt, Homo sapiens
  misc_RNA (1)...(19): siRNA sense strand
ccacugugacugcauugaa

SEQ ID NO: 1754557 - RNA, 19 nt, Homo sapiens
  misc_RNA (1)...(19): siRNA sense strand
ccuuggaccuuucuucauc

SEQ ID NO: 1754558 - RNA, 19 nt, Homo sapiens
  misc_RNA (1)...(19): siRNA sense strand
uuacaaugccuauccuuca

SEQ ID NO: 1754559 - RNA, 19 nt, Homo sapiens
  misc_RNA (1)...(19): siRNA sense strand
gugcagauucuucgggauu

SEQ ID NO: 1754560 - RNA, 19 nt, Homo sapiens
  misc_RNA (1)...(19): siRNA sense strand
aaccaggacuucaguggau

SEQ ID NO: 1754561 - RNA, 19 nt, Homo sapiens
  misc_RNA (1)...(19): siRNA sense strand
cagcaaacacaccugucua

SEQ ID NO: 1754562 - RNA, 19 nt, Homo sapiens
  misc_RNA (1)...(19): siRNA sense strand
caaagauccaaaucaguuc

SEQ ID NO: 1754563 - RNA, 19 nt, Homo sapiens
  misc_RNA (1)...(19): siRNA sense strand
gagcuucaggcaaaacuua

SEQ ID NO: 1754564 - RNA, 19 nt, Homo sapiens
  misc_RNA (1)...(19): siRNA sense strand
ggacaaaacacagauauac

SEQ ID NO: 1754565 - RNA, 19 nt, Homo sapiens
  misc_RNA (1)...(19): siRNA sense strand
acagauauacagcagauag

SEQ ID NO: 1754566 - RNA, 19 nt, Homo sapiens
  misc_RNA (1)...(19): siRNA sense strand
auaccacugugacugcauu

SEQ ID NO: 1754567 - RNA, 19 nt, Homo sapiens
  misc_RNA (1)...(19): siRNA sense strand
ggcaaaacuuacagcuuaa

SEQ ID NO: 1754568 - RNA, 19 nt, Homo sapiens
  misc_RNA (1)...(19): siRNA sense strand
cacagacaccucucucaug

SEQ ID NO: 1754569 - RNA, 19 nt, Homo sapiens
  misc_RNA (1)...(19): siRNA sense strand
ucacagacaccucucucau

SEQ ID NO: 1754570 - RNA, 19 nt, Homo sapiens
  misc_RNA (1)...(19): siRNA sense strand
ucaaacgggcugcagagau

SEQ ID NO: 1754571 - RNA, 19 nt, Homo sapiens
  misc_RNA (1)...(19): siRNA sense strand
guaaaucuggaccaaguac

SEQ ID NO: 1754572 - RNA, 19 nt, Homo sapiens
  misc_RNA (1)...(19): siRNA sense strand
gauccaaaucaguucacaa

SEQ ID NO: 1754573 - RNA, 19 nt, Homo sapiens
  misc_RNA (1)...(19): siRNA sense strand
ccaggacuucaguggauuu

SEQ ID NO: 1754574 - RNA, 19 nt, Homo sapiens
  misc_RNA (1)...(19): siRNA sense strand
gcagauucuucgggauugg

SEQ ID NO: 1754575 - RNA, 19 nt, Homo sapiens
  misc_RNA (1)...(19): siRNA sense strand
gaugucccuuucucucucu

SEQ ID NO: 1754576 - RNA, 19 nt, Homo sapiens
  misc_RNA (1)...(19): siRNA sense strand
ggaccucaaccaggacuuc

SEQ ID NO: 1754577 - RNA, 19 nt, Homo sapiens
  misc_RNA (1)...(19): siRNA sense strand
ggcuguaugagcaccguua

SEQ ID NO: 1754578 - RNA, 19 nt, Homo sapiens
  misc_RNA (1)...(19): siRNA sense strand
guaugagcaccguuacaau

SEQ ID NO: 1754579 - RNA, 19 nt, Homo sapiens
  misc_RNA (1)...(19): siRNA sense strand
caguggauuucagcuucua

SEQ ID NO: 1754580 - RNA, 19 nt, Homo sapiens
  misc_RNA (1)...(19): siRNA sense strand
gagaaaggauggcaaagau

SEQ ID NO: 1754581 - RNA, 19 nt, Homo sapiens
  misc_RNA (1)...(19): siRNA sense strand
gcaaagauccaaaucaguu

SEQ ID NO: 1754582 - RNA, 19 nt, Homo sapiens
  misc_RNA (1)...(19): siRNA sense strand
caaacgggcugcagagaug

SEQ ID NO: 1754583 - RNA, 19 nt, Homo sapiens
  misc_RNA (1)...(19): siRNA sense strand
agauggagcuucaggcaaa

SEQ ID NO: 1754584 - RNA, 19 nt, Homo sapiens
  misc_RNA (1)...(19): siRNA sense strand
gacauucccuuggaccuuu

SEQ ID NO: 1754585 - RNA, 19 nt, Homo sapiens
  misc_RNA (1)...(19): siRNA sense strand
gcauggacauucccuugga

SEQ ID NO: 1754586 - RNA, 19 nt, Homo sapiens
  misc_RNA (1)...(19): siRNA sense strand
acagacaccucucucaugu

SEQ ID NO: 1754587 - RNA, 19 nt, Homo sapiens
  misc_RNA (1)...(19): siRNA sense strand
aggcaaaacuuacagcuua

SEQ ID NO: 1754588 - RNA, 19 nt, Homo sapiens
  misc_RNA (1)...(19): siRNA sense strand
ucagugaucugccauacca

SEQ ID NO: 1754589 - RNA, 19 nt, Homo sapiens
  misc_RNA (1)...(19): siRNA sense strand
ggacuucaguggauuucag

SEQ ID NO: 1754590 - RNA, 19 nt, Homo sapiens
  misc_RNA (1)...(19): siRNA sense strand
acacagauauacagcagau

SEQ ID NO: 1754591 - RNA, 19 nt, Homo sapiens
  misc_RNA (1)...(19): siRNA sense strand
ugacugcauugaaagaugu

SEQ ID NO: 1754592 - RNA, 19 nt, Homo sapiens
  misc_RNA (1)...(19): siRNA sense strand
cugcagagauggagcuuca

SEQ ID NO: 1754593 - RNA, 19 nt, Homo sapiens
  misc_RNA (1)...(19): siRNA sense strand
agacaccucucucauguac

SEQ ID NO: 1754594 - RNA, 19 nt, Homo sapiens
  misc_RNA (1)...(19): siRNA sense strand
cacugugacugcauugaaa

SEQ ID NO: 1754595 - RNA, 19 nt, Homo sapiens
  misc_RNA (1)...(19): siRNA sense strand
ucccugacaugcugagaaa

SEQ ID NO: 1754596 - RNA, 19 nt, Homo sapiens
  misc_RNA (1)...(19): siRNA sense strand
gucuguaacugguucauca

SEQ ID NO: 1754597 - RNA, 19 nt, Homo sapiens
  misc_RNA (1)...(19): siRNA sense strand
uggcaaagauccaaaucag

SEQ ID NO: 1754598 - RNA, 19 nt, Homo sapiens
  misc_RNA (1)...(19): siRNA sense strand
gcugagaaaggauggcaaa

SEQ ID NO: 1754599 - RNA, 19 nt, Homo sapiens
  misc_RNA (1)...(19): siRNA sense strand
ugagaaaggauggcaaaga

SEQ ID NO: 1754600 - RNA, 19 nt, Homo sapiens
  misc_RNA (1)...(19): siRNA sense strand
gaggacagcauggacauuc

SEQ ID NO: 1754601 - RNA, 19 nt, Homo sapiens
  misc_RNA (1)...(19): siRNA sense strand
ggacauucccuuggaccuu

SEQ ID NO: 1754602 - RNA, 19 nt, Homo sapiens
  misc_RNA (1)...(19): siRNA sense strand
gugacugcauugaaagaug

SEQ ID NO: 1754603 - RNA, 19 nt, Homo sapiens
  misc_RNA (1)...(19): siRNA sense strand
uaugagcaccguuacaaug

SEQ ID NO: 1754604 - RNA, 19 nt, Homo sapiens
  misc_RNA (1)...(19): siRNA sense strand
ccacugugacugcauugaa

SEQ ID NO: 1754605 - RNA, 19 nt, Homo sapiens
  misc_RNA (1)...(19): siRNA sense strand
ccuuggaccuuucuucauc

SEQ ID NO: 1754606 - RNA, 19 nt, Homo sapiens
  misc_RNA (1)...(19): siRNA sense strand
uuacaaugccuauccuuca

SEQ ID NO: 1754607 - RNA, 19 nt, Homo sapiens
  misc_RNA (1)...(19): siRNA sense strand
gugcagauucuucgggauu

SEQ ID NO: 1754608 - RNA, 19 nt, Homo sapiens
  misc_RNA (1)...(19): siRNA sense strand
aaccaggacuucaguggau

SEQ ID NO: 1754609 - RNA, 19 nt, Homo sapiens
  misc_RNA (1)...(19): siRNA sense strand
cagcaaacacaccugucua

SEQ ID NO: 1754610 - RNA, 19 nt, Homo sapiens
  misc_RNA (1)...(19): siRNA sense strand
caaagauccaaaucaguuc

SEQ ID NO: 1754611 - RNA, 19 nt, Homo sapiens
  misc_RNA (1)...(19): siRNA sense strand
gagcuucaggcaaaacuua

SEQ ID NO: 1754612 - RNA, 19 nt, Homo sapiens
  misc_RNA (1)...(19): siRNA sense strand
ggacaaaacacagauauac

SEQ ID NO: 1754613 - RNA, 19 nt, Homo sapiens
  misc_RNA (1)...(19): siRNA sense strand
acagauauacagcagauag

SEQ ID NO: 1754614 - RNA, 19 nt, Homo sapiens
  misc_RNA (1)...(19): siRNA sense strand
auaccacugugacugcauu

SEQ ID NO: 1754615 - RNA, 19 nt, Homo sapiens
  misc_RNA (1)...(19): siRNA sense strand
ggcaaaacuuacagcuuaa

SEQ ID NO: 1754616 - RNA, 19 nt, Homo sapiens
  misc_RNA (1)...(19): siRNA sense strand
cacagacaccucucucaug

SEQ ID NO: 1754617 - RNA, 19 nt, Homo sapiens
  misc_RNA (1)...(19): siRNA sense strand
ucacagacaccucucucau

SEQ ID NO: 1754618 - RNA, 19 nt, Homo sapiens
  misc_RNA (1)...(19): siRNA sense strand
ucaaacgggcugcagagau

SEQ ID NO: 1754619 - RNA, 19 nt, Homo sapiens
  misc_RNA (1)...(19): siRNA sense strand
guaaaucuggaccaaguac

SEQ ID NO: 1754620 - RNA, 19 nt, Homo sapiens
  misc_RNA (1)...(19): siRNA sense strand
gauccaaaucaguucacaa

SEQ ID NO: 1754621 - RNA, 19 nt, Homo sapiens
  misc_RNA (1)...(19): siRNA sense strand
ccaggacuucaguggauuu

SEQ ID NO: 1754622 - RNA, 19 nt, Homo sapiens
  misc_RNA (1)...(19): siRNA sense strand
gcagauucuucgggauugg

SEQ ID NO: 1754623 - RNA, 19 nt, Homo sapiens
  misc_RNA (1)...(19): siRNA sense strand
gaugucccuuucucucucu

SEQ ID NO: 1754624 - RNA, 19 nt, Homo sapiens
  misc_RNA (1)...(19): siRNA sense strand
ggaccucaaccaggacuuc

SEQ ID NO: 1754625 - RNA, 19 nt, Homo sapiens
  misc_RNA (1)...(19): siRNA sense strand
ggcuguaugagcaccguua

SEQ ID NO: 1754626 - RNA, 19 nt, Homo sapiens
  misc_RNA (1)...(19): siRNA sense strand
guaugagcaccguuacaau

SEQ ID NO: 1754627 - RNA, 19 nt, Homo sapiens
  misc_RNA (1)...(19): siRNA sense strand
caguggauuucagcuucua

SEQ ID NO: 1754628 - RNA, 19 nt, Homo sapiens
  misc_RNA (1)...(19): siRNA sense strand
gagaaaggauggcaaagau

SEQ ID NO: 1754629 - RNA, 19 nt, Homo sapiens
  misc_RNA (1)...(19): siRNA sense strand
gcaaagauccaaaucaguu

SEQ ID NO: 1754630 - RNA, 19 nt, Homo sapiens
  misc_RNA (1)...(19): siRNA sense strand
caaacgggcugcagagaug

SEQ ID NO: 1754631 - RNA, 19 nt, Homo sapiens
  misc_RNA (1)...(19): siRNA sense strand
agauggagcuucaggcaaa

SEQ ID NO: 1754632 - RNA, 19 nt, Homo sapiens
  misc_RNA (1)...(19): siRNA sense strand
gacauucccuuggaccuuu

SEQ ID NO: 1754633 - RNA, 19 nt, Homo sapiens
  misc_RNA (1)...(19): siRNA sense strand
acagacaccucucucaugu

SEQ ID NO: 1754634 - RNA, 19 nt, Homo sapiens
  misc_RNA (1)...(19): siRNA sense strand
aggcaaaacuuacagcuua

SEQ ID NO: 1754635 - RNA, 19 nt, Homo sapiens
  misc_RNA (1)...(19): siRNA sense strand
ucagugaucugccauacca

SEQ ID NO: 1754636 - RNA, 19 nt, Homo sapiens
  misc_RNA (1)...(19): siRNA sense strand
ggacuucaguggauuucag

SEQ ID NO: 1754637 - RNA, 19 nt, Homo sapiens
  misc_RNA (1)...(19): siRNA sense strand
acacagauauacagcagau

SEQ ID NO: 1754638 - RNA, 19 nt, Homo sapiens
  misc_RNA (1)...(19): siRNA sense strand
ugacugcauugaaagaugu

SEQ ID NO: 1754639 - RNA, 19 nt, Homo sapiens
  misc_RNA (1)...(19): siRNA sense strand
cugcagagauggagcuuca

SEQ ID NO: 1754640 - RNA, 19 nt, Homo sapiens
  misc_RNA (1)...(19): siRNA sense strand
agacaccucucucauguac

SEQ ID NO: 1754641 - RNA, 19 nt, Homo sapiens
  misc_RNA (1)...(19): siRNA sense strand
cacugugacugcauugaaa

SEQ ID NO: 1754642 - RNA, 19 nt, Homo sapiens
  misc_RNA (1)...(19): siRNA sense strand
ucccugacaugcugagaaa

SEQ ID NO: 1754643 - RNA, 19 nt, Homo sapiens
  misc_RNA (1)...(19): siRNA sense strand
gucuguaacugguucauca

SEQ ID NO: 1754644 - RNA, 19 nt, Homo sapiens
  misc_RNA (1)...(19): siRNA sense strand
uggcaaagauccaaaucag

SEQ ID NO: 1754645 - RNA, 19 nt, Homo sapiens
  misc_RNA (1)...(19): siRNA sense strand
gcugagaaaggauggcaaa

SEQ ID NO: 1754646 - RNA, 19 nt, Homo sapiens
  misc_RNA (1)...(19): siRNA sense strand
ugagaaaggauggcaaaga

SEQ ID NO: 1754647 - RNA, 19 nt, Homo sapiens
  misc_RNA (1)...(19): siRNA sense strand
ggacauucccuuggaccuu

SEQ ID NO: 1754648 - RNA, 19 nt, Homo sapiens
  misc_RNA (1)...(19): siRNA sense strand
gugacugcauugaaagaug

SEQ ID NO: 1754649 - RNA, 19 nt, Homo sapiens
  misc_RNA (1)...(19): siRNA sense strand
uaugagcaccguuacaaug

SEQ ID NO: 1754650 - RNA, 19 nt, Homo sapiens
  misc_RNA (1)...(19): siRNA sense strand
ccuuggaccuuucuucauc

SEQ ID NO: 1754651 - RNA, 19 nt, Homo sapiens
  misc_RNA (1)...(19): siRNA sense strand
ccacugugacugcauugaa

SEQ ID NO: 1754652 - RNA, 19 nt, Homo sapiens
  misc_RNA (1)...(19): siRNA sense strand
uuacaaugccuauccuuca

SEQ ID NO: 1754653 - RNA, 19 nt, Homo sapiens
  misc_RNA (1)...(19): siRNA sense strand
cagcaaacacaccugucua

SEQ ID NO: 1754654 - RNA, 19 nt, Homo sapiens
  misc_RNA (1)...(19): siRNA sense strand
aaccaggacuucaguggau

SEQ ID NO: 1754655 - RNA, 19 nt, Homo sapiens
  misc_RNA (1)...(19): siRNA sense strand
gugcagauucuucgggauu

SEQ ID NO: 1754656 - RNA, 19 nt, Homo sapiens
  misc_RNA (1)...(19): siRNA sense strand
caaagauccaaaucaguuc

SEQ ID NO: 1754657 - RNA, 19 nt, Homo sapiens
  misc_RNA (1)...(19): siRNA sense strand
gagcuucaggcaaaacuua

SEQ ID NO: 1754658 - RNA, 19 nt, Homo sapiens
  misc_RNA (1)...(19): siRNA sense strand
ggacaaaacacagauauac

SEQ ID NO: 1754659 - RNA, 19 nt, Homo sapiens
  misc_RNA (1)...(19): siRNA sense strand
acagauauacagcagauag

SEQ ID NO: 1754660 - RNA, 19 nt, Homo sapiens
  misc_RNA (1)...(19): siRNA sense strand
auaccacugugacugcauu

SEQ ID NO: 1754661 - RNA, 19 nt, Homo sapiens
  misc_RNA (1)...(19): siRNA sense strand
ggcaaaacuuacagcuuaa

SEQ ID NO: 1754662 - RNA, 19 nt, Homo sapiens
  misc_RNA (1)...(19): siRNA sense strand
cacagacaccucucucaug

SEQ ID NO: 1754663 - RNA, 19 nt, Homo sapiens
  misc_RNA (1)...(19): siRNA sense strand
ucacagacaccucucucau

SEQ ID NO: 1754664 - RNA, 19 nt, Homo sapiens
  misc_RNA (1)...(19): siRNA sense strand
ucaaacgggcugcagagau

SEQ ID NO: 1754665 - RNA, 19 nt, Homo sapiens
  misc_RNA (1)...(19): siRNA sense strand
guaaaucuggaccaaguac

SEQ ID NO: 1754666 - RNA, 19 nt, Homo sapiens
  misc_RNA (1)...(19): siRNA sense strand
gauccaaaucaguucacaa

SEQ ID NO: 1754667 - RNA, 19 nt, Homo sapiens
  misc_RNA (1)...(19): siRNA sense strand
gcagauucuucgggauugg

SEQ ID NO: 1754668 - RNA, 19 nt, Homo sapiens
  misc_RNA (1)...(19): siRNA sense strand
ccaggacuucaguggauuu

SEQ ID NO: 1754669 - RNA, 19 nt, Homo sapiens
  misc_RNA (1)...(19): siRNA sense strand
ggcuguaugagcaccguua

SEQ ID NO: 1754670 - RNA, 19 nt, Homo sapiens
  misc_RNA (1)...(19): siRNA sense strand
ggaccucaaccaggacuuc

SEQ ID NO: 1754671 - RNA, 19 nt, Homo sapiens
  misc_RNA (1)...(19): siRNA sense strand
guaugagcaccguuacaau

SEQ ID NO: 1754672 - RNA, 19 nt, Homo sapiens
  misc_RNA (1)...(19): siRNA sense strand
gaugucccuuucucucucu

SEQ ID NO: 1754673 - RNA, 19 nt, Homo sapiens
  misc_RNA (1)...(19): siRNA sense strand
caguggauuucagcuucua

SEQ ID NO: 1754674 - RNA, 19 nt, Homo sapiens
  misc_RNA (1)...(19): siRNA sense strand
gagaaaggauggcaaagau

SEQ ID NO: 1754675 - RNA, 19 nt, Homo sapiens
  misc_RNA (1)...(19): siRNA sense strand
gcaaagauccaaaucaguu

SEQ ID NO: 1754676 - RNA, 19 nt, Homo sapiens
  misc_RNA (1)...(19): siRNA sense strand
caaacgggcugcagagaug

SEQ ID NO: 1754677 - RNA, 19 nt, Homo sapiens
  misc_RNA (1)...(19): siRNA sense strand
agauggagcuucaggcaaa

SEQ ID NO: 1754678 - RNA, 19 nt, Homo sapiens
  misc_RNA (1)...(19): siRNA sense strand
gacauucccuuggaccuuu

SEQ ID NO: 1754679 - RNA, 19 nt, Homo sapiens
  misc_RNA (1)...(19): siRNA sense strand
acagacaccucucucaugu

SEQ ID NO: 1754680 - RNA, 19 nt, Homo sapiens
  misc_RNA (1)...(19): siRNA sense strand
aggcaaaacuuacagcuua

SEQ ID NO: 1754681 - RNA, 19 nt, Homo sapiens
  misc_RNA (1)...(19): siRNA sense strand
ucagugaucugccauacca

SEQ ID NO: 1754682 - RNA, 19 nt, Homo sapiens
  misc_RNA (1)...(19): siRNA sense strand
ggacuucaguggauuucag

SEQ ID NO: 1754683 - RNA, 19 nt, Homo sapiens
  misc_RNA (1)...(19): siRNA sense strand
acacagauauacagcagau

SEQ ID NO: 1754684 - RNA, 19 nt, Homo sapiens
  misc_RNA (1)...(19): siRNA sense strand
ugacugcauugaaagaugu

SEQ ID NO: 1754685 - RNA, 19 nt, Homo sapiens
  misc_RNA (1)...(19): siRNA sense strand
cugcagagauggagcuuca

SEQ ID NO: 1754686 - RNA, 19 nt, Homo sapiens
  misc_RNA (1)...(19): siRNA sense strand
agacaccucucucauguac

SEQ ID NO: 1754687 - RNA, 19 nt, Homo sapiens
  misc_RNA (1)...(19): siRNA sense strand
cacugugacugcauugaaa

SEQ ID NO: 1754688 - RNA, 19 nt, Homo sapiens
  misc_RNA (1)...(19): siRNA sense strand
ucccugacaugcugagaaa

SEQ ID NO: 1754689 - RNA, 19 nt, Homo sapiens
  misc_RNA (1)...(19): siRNA sense strand
gucuguaacugguucauca

SEQ ID NO: 1754690 - RNA, 19 nt, Homo sapiens
  misc_RNA (1)...(19): siRNA sense strand
uggcaaagauccaaaucag

SEQ ID NO: 1754691 - RNA, 19 nt, Homo sapiens
  misc_RNA (1)...(19): siRNA sense strand
gcugagaaaggauggcaaa

SEQ ID NO: 1754692 - RNA, 19 nt, Homo sapiens
  misc_RNA (1)...(19): siRNA sense strand
ugagaaaggauggcaaaga

SEQ ID NO: 1754693 - RNA, 19 nt, Homo sapiens
  misc_RNA (1)...(19): siRNA sense strand
ggacauucccuuggaccuu

SEQ ID NO: 1754694 - RNA, 19 nt, Homo sapiens
  misc_RNA (1)...(19): siRNA sense strand
gugacugcauugaaagaug

SEQ ID NO: 1754695 - RNA, 19 nt, Homo sapiens
  misc_RNA (1)...(19): siRNA sense strand
uaugagcaccguuacaaug

SEQ ID NO: 1754696 - RNA, 19 nt, Homo sapiens
  misc_RNA (1)...(19): siRNA sense strand
ccuuggaccuuucuucauc

SEQ ID NO: 1754697 - RNA, 19 nt, Homo sapiens
  misc_RNA (1)...(19): siRNA sense strand
ccacugugacugcauugaa

SEQ ID NO: 1754698 - RNA, 19 nt, Homo sapiens
  misc_RNA (1)...(19): siRNA sense strand
uuacaaugccuauccuuca

SEQ ID NO: 1754699 - RNA, 19 nt, Homo sapiens
  misc_RNA (1)...(19): siRNA sense strand
cagcaaacacaccugucua

SEQ ID NO: 1754700 - RNA, 19 nt, Homo sapiens
  misc_RNA (1)...(19): siRNA sense strand
aaccaggacuucaguggau

SEQ ID NO: 1754701 - RNA, 19 nt, Homo sapiens
  misc_RNA (1)...(19): siRNA sense strand
gugcagauucuucgggauu

SEQ ID NO: 1754702 - RNA, 19 nt, Homo sapiens
  misc_RNA (1)...(19): siRNA sense strand
caaagauccaaaucaguuc

SEQ ID NO: 1754703 - RNA, 19 nt, Homo sapiens
  misc_RNA (1)...(19): siRNA sense strand
gagcuucaggcaaaacuua

SEQ ID NO: 1754704 - RNA, 19 nt, Homo sapiens
  misc_RNA (1)...(19): siRNA sense strand
ggacaaaacacagauauac

SEQ ID NO: 1754705 - RNA, 19 nt, Homo sapiens
  misc_RNA (1)...(19): siRNA sense strand
acagauauacagcagauag

SEQ ID NO: 1754706 - RNA, 19 nt, Homo sapiens
  misc_RNA (1)...(19): siRNA sense strand
auaccacugugacugcauu

SEQ ID NO: 1754707 - RNA, 19 nt, Homo sapiens
  misc_RNA (1)...(19): siRNA sense strand
ggcaaaacuuacagcuuaa

SEQ ID NO: 1754708 - RNA, 19 nt, Homo sapiens
  misc_RNA (1)...(19): siRNA sense strand
cacagacaccucucucaug

SEQ ID NO: 1754709 - RNA, 19 nt, Homo sapiens
  misc_RNA (1)...(19): siRNA sense strand
ucacagacaccucucucau

SEQ ID NO: 1754710 - RNA, 19 nt, Homo sapiens
  misc_RNA (1)...(19): siRNA sense strand
ucaaacgggcugcagagau

SEQ ID NO: 1754711 - RNA, 19 nt, Homo sapiens
  misc_RNA (1)...(19): siRNA sense strand
guaaaucuggaccaaguac

SEQ ID NO: 1754712 - RNA, 19 nt, Homo sapiens
  misc_RNA (1)...(19): siRNA sense strand
gauccaaaucaguucacaa

SEQ ID NO: 1754713 - RNA, 19 nt, Homo sapiens
  misc_RNA (1)...(19): siRNA sense strand
gcagauucuucgggauugg

SEQ ID NO: 1754714 - RNA, 19 nt, Homo sapiens
  misc_RNA (1)...(19): siRNA sense strand
ccaggacuucaguggauuu

SEQ ID NO: 1754715 - RNA, 19 nt, Homo sapiens
  misc_RNA (1)...(19): siRNA sense strand
ggcuguaugagcaccguua

SEQ ID NO: 1754716 - RNA, 19 nt, Homo sapiens
  misc_RNA (1)...(19): siRNA sense strand
ggaccucaaccaggacuuc

SEQ ID NO: 1754717 - RNA, 19 nt, Homo sapiens
  misc_RNA (1)...(19): siRNA sense strand
guaugagcaccguuacaau

SEQ ID NO: 1754718 - RNA, 19 nt, Homo sapiens
  misc_RNA (1)...(19): siRNA sense strand
gaugucccuuucucucucu

SEQ ID NO: 1754719 - RNA, 19 nt, Homo sapiens
  misc_RNA (1)...(19): siRNA sense strand
caguggauuucagcuucua

SEQ ID NO: 1754720 - RNA, 19 nt, Homo sapiens
  misc_RNA (1)...(19): siRNA sense strand
gagaaaggauggcaaagau

SEQ ID NO: 1754721 - RNA, 19 nt, Homo sapiens
  misc_RNA (1)...(19): siRNA sense strand
gcaaagauccaaaucaguu

SEQ ID NO: 1754722 - RNA, 19 nt, Homo sapiens
  misc_RNA (1)...(19): siRNA sense strand
caaacgggcugcagagaug

SEQ ID NO: 1754723 - RNA, 19 nt, Homo sapiens
  misc_RNA (1)...(19): siRNA sense strand
agauggagcuucaggcaaa

SEQ ID NO: 1754724 - RNA, 19 nt, Homo sapiens
  misc_RNA (1)...(19): siRNA sense strand
gacauucccuuggaccuuu

SEQ ID NO: 1754725 - RNA, 19 nt, Homo sapiens
  misc_RNA (1)...(19): siRNA sense strand
acagacaccucucucaugu

SEQ ID NO: 1754726 - RNA, 19 nt, Homo sapiens
  misc_RNA (1)...(19): siRNA sense strand
aggcaaaacuuacagcuua

SEQ ID NO: 1754727 - RNA, 19 nt, Homo sapiens
  misc_RNA (1)...(19): siRNA sense strand
ucagugaucugccauacca

SEQ ID NO: 1754728 - RNA, 19 nt, Homo sapiens
  misc_RNA (1)...(19): siRNA sense strand
ggacuucaguggauuucag

SEQ ID NO: 1754729 - RNA, 19 nt, Homo sapiens
  misc_RNA (1)...(19): siRNA sense strand
acacagauauacagcagau

SEQ ID NO: 1754730 - RNA, 19 nt, Homo sapiens
  misc_RNA (1)...(19): siRNA sense strand
ugacugcauugaaagaugu

SEQ ID NO: 1754731 - RNA, 19 nt, Homo sapiens
  misc_RNA (1)...(19): siRNA sense strand
cugcagagauggagcuuca

SEQ ID NO: 1754732 - RNA, 19 nt, Homo sapiens
  misc_RNA (1)...(19): siRNA sense strand
agacaccucucucauguac

SEQ ID NO: 1754733 - RNA, 19 nt, Homo sapiens
  misc_RNA (1)...(19): siRNA sense strand
cacugugacugcauugaaa

SEQ ID NO: 1754734 - RNA, 19 nt, Homo sapiens
  misc_RNA (1)...(19): siRNA sense strand
ucccugacaugcugagaaa

SEQ ID NO: 1754735 - RNA, 19 nt, Homo sapiens
  misc_RNA (1)...(19): siRNA sense strand
gucuguaacugguucauca

SEQ ID NO: 1754736 - RNA, 19 nt, Homo sapiens
  misc_RNA (1)...(19): siRNA sense strand
uggcaaagauccaaaucag

SEQ ID NO: 1754737 - RNA, 19 nt, Homo sapiens
  misc_RNA (1)...(19): siRNA sense strand
gcugagaaaggauggcaaa

SEQ ID NO: 1754738 - RNA, 19 nt, Homo sapiens
  misc_RNA (1)...(19): siRNA sense strand
ugagaaaggauggcaaaga

SEQ ID NO: 1754739 - RNA, 19 nt, Homo sapiens
  misc_RNA (1)...(19): siRNA sense strand
ggacauucccuuggaccuu

SEQ ID NO: 1754740 - RNA, 19 nt, Homo sapiens
  misc_RNA (1)...(19): siRNA sense strand
gugacugcauugaaagaug

SEQ ID NO: 1754741 - RNA, 19 nt, Homo sapiens
  misc_RNA (1)...(19): siRNA sense strand
uaugagcaccguuacaaug

SEQ ID NO: 1754742 - RNA, 19 nt, Homo sapiens
  misc_RNA (1)...(19): siRNA sense strand
ccuuggaccuuucuucauc

SEQ ID NO: 1754743 - RNA, 19 nt, Homo sapiens
  misc_RNA (1)...(19): siRNA sense strand
ccacugugacugcauugaa

SEQ ID NO: 1754744 - RNA, 19 nt, Homo sapiens
  misc_RNA (1)...(19): siRNA sense strand
uuacaaugccuauccuuca

SEQ ID NO: 1754745 - RNA, 19 nt, Homo sapiens
  misc_RNA (1)...(19): siRNA sense strand
cagcaaacacaccugucua

SEQ ID NO: 1754746 - RNA, 19 nt, Homo sapiens
  misc_RNA (1)...(19): siRNA sense strand
aaccaggacuucaguggau

SEQ ID NO: 1754747 - RNA, 19 nt, Homo sapiens
  misc_RNA (1)...(19): siRNA sense strand
gugcagauucuucgggauu

SEQ ID NO: 1754748 - RNA, 19 nt, Homo sapiens
  misc_RNA (1)...(19): siRNA sense strand
caaagauccaaaucaguuc

SEQ ID NO: 1754749 - RNA, 19 nt, Homo sapiens
  misc_RNA (1)...(19): siRNA sense strand
gagcuucaggcaaaacuua

SEQ ID NO: 1754750 - RNA, 19 nt, Homo sapiens
  misc_RNA (1)...(19): siRNA sense strand
ggacaaaacacagauauac

SEQ ID NO: 1754751 - RNA, 19 nt, Homo sapiens
  misc_RNA (1)...(19): siRNA sense strand
acagauauacagcagauag

SEQ ID NO: 1754752 - RNA, 19 nt, Homo sapiens
  misc_RNA (1)...(19): siRNA sense strand
auaccacugugacugcauu

SEQ ID NO: 1754753 - RNA, 19 nt, Homo sapiens
  misc_RNA (1)...(19): siRNA sense strand
ggcaaaacuuacagcuuaa

SEQ ID NO: 1754754 - RNA, 19 nt, Homo sapiens
  misc_RNA (1)...(19): siRNA sense strand
cacagacaccucucucaug

SEQ ID NO: 1754755 - RNA, 19 nt, Homo sapiens
  misc_RNA (1)...(19): siRNA sense strand
ucacagacaccucucucau

SEQ ID NO: 1754756 - RNA, 19 nt, Homo sapiens
  misc_RNA (1)...(19): siRNA sense strand
ucaaacgggcugcagagau

SEQ ID NO: 1754757 - RNA, 19 nt, Homo sapiens
  misc_RNA (1)...(19): siRNA sense strand
guaaaucuggaccaaguac

SEQ ID NO: 1754758 - RNA, 19 nt, Homo sapiens
  misc_RNA (1)...(19): siRNA sense strand
gauccaaaucaguucacaa

SEQ ID NO: 1754759 - RNA, 19 nt, Homo sapiens
  misc_RNA (1)...(19): siRNA sense strand
gcagauucuucgggauugg

SEQ ID NO: 1754760 - RNA, 19 nt, Homo sapiens
  misc_RNA (1)...(19): siRNA sense strand
ccaggacuucaguggauuu

SEQ ID NO: 1754761 - RNA, 19 nt, Homo sapiens
  misc_RNA (1)...(19): siRNA sense strand
ggcuguaugagcaccguua

SEQ ID NO: 1754762 - RNA, 19 nt, Homo sapiens
  misc_RNA (1)...(19): siRNA sense strand
ggaccucaaccaggacuuc

SEQ ID NO: 1754763 - RNA, 19 nt, Homo sapiens
  misc_RNA (1)...(19): siRNA sense strand
guaugagcaccguuacaau

SEQ ID NO: 1754764 - RNA, 19 nt, Homo sapiens
  misc_RNA (1)...(19): siRNA sense strand
gaugucccuuucucucucu

SEQ ID NO: 1754765 - RNA, 19 nt, Homo sapiens
  misc_RNA (1)...(19): siRNA sense strand
caguggauuucagcuucua

SEQ ID NO: 1754766 - RNA, 19 nt, Homo sapiens
  misc_RNA (1)...(19): siRNA sense strand
gagaaaggauggcaaagau

SEQ ID NO: 1754767 - RNA, 19 nt, Homo sapiens
  misc_RNA (1)...(19): siRNA sense strand
gcaaagauccaaaucaguu

SEQ ID NO: 1754768 - RNA, 19 nt, Homo sapiens
  misc_RNA (1)...(19): siRNA sense strand
caaacgggcugcagagaug

SEQ ID NO: 1754769 - RNA, 19 nt, Homo sapiens
  misc_RNA (1)...(19): siRNA sense strand
agauggagcuucaggcaaa

SEQ ID NO: 1754770 - RNA, 19 nt, Homo sapiens
  misc_RNA (1)...(19): siRNA sense strand
gacauucccuuggaccuuu

SEQ ID NO: 1754771 - RNA, 19 nt, Homo sapiens
  misc_RNA (1)...(19): siRNA sense strand
acagacaccucucucaugu

SEQ ID NO: 1754772 - RNA, 19 nt, Homo sapiens
  misc_RNA (1)...(19): siRNA sense strand
aggcaaaacuuacagcuua

SEQ ID NO: 1754773 - RNA, 19 nt, Homo sapiens
  misc_RNA (1)...(19): siRNA sense strand
ucagugaucugccauacca

SEQ ID NO: 1754774 - RNA, 19 nt, Homo sapiens
  misc_RNA (1)...(19): siRNA sense strand
ggacuucaguggauuucag

SEQ ID NO: 1754775 - RNA, 19 nt, Homo sapiens
  misc_RNA (1)...(19): siRNA sense strand
acacagauauacagcagau

SEQ ID NO: 1754776 - RNA, 19 nt, Homo sapiens
  misc_RNA (1)...(19): siRNA sense strand
ugacugcauugaaagaugu

SEQ ID NO: 1754777 - RNA, 19 nt, Homo sapiens
  misc_RNA (1)...(19): siRNA sense strand
cugcagagauggagcuuca

SEQ ID NO: 1754778 - RNA, 19 nt, Homo sapiens
  misc_RNA (1)...(19): siRNA sense strand
agacaccucucucauguac

SEQ ID NO: 1754779 - RNA, 19 nt, Homo sapiens
  misc_RNA (1)...(19): siRNA sense strand
cacugugacugcauugaaa

SEQ ID NO: 1754780 - RNA, 19 nt, Homo sapiens
  misc_RNA (1)...(19): siRNA sense strand
ucccugacaugcugagaaa

SEQ ID NO: 1754781 - RNA, 19 nt, Homo sapiens
  misc_RNA (1)...(19): siRNA sense strand
gucuguaacugguucauca

SEQ ID NO: 1754782 - RNA, 19 nt, Homo sapiens
  misc_RNA (1)...(19): siRNA sense strand
uggcaaagauccaaaucag

SEQ ID NO: 1754783 - RNA, 19 nt, Homo sapiens
  misc_RNA (1)...(19): siRNA sense strand
gcugagaaaggauggcaaa

SEQ ID NO: 1754784 - RNA, 19 nt, Homo sapiens
  misc_RNA (1)...(19): siRNA sense strand
ugagaaaggauggcaaaga

SEQ ID NO: 1754785 - RNA, 19 nt, Homo sapiens
  misc_RNA (1)...(19): siRNA sense strand
ggacauucccuuggaccuu

SEQ ID NO: 1754786 - RNA, 19 nt, Homo sapiens
  misc_RNA (1)...(19): siRNA sense strand
gugacugcauugaaagaug

SEQ ID NO: 1754787 - RNA, 19 nt, Homo sapiens
  misc_RNA (1)...(19): siRNA sense strand
uaugagcaccguuacaaug

SEQ ID NO: 1754788 - RNA, 19 nt, Homo sapiens
  misc_RNA (1)...(19): siRNA sense strand
ccuuggaccuuucuucauc

SEQ ID NO: 1754789 - RNA, 19 nt, Homo sapiens
  misc_RNA (1)...(19): siRNA sense strand
ccacugugacugcauugaa

SEQ ID NO: 1754790 - RNA, 19 nt, Homo sapiens
  misc_RNA (1)...(19): siRNA sense strand
uuacaaugccuauccuuca

SEQ ID NO: 1754791 - RNA, 19 nt, Homo sapiens
  misc_RNA (1)...(19): siRNA sense strand
cagcaaacacaccugucua

SEQ ID NO: 1754792 - RNA, 19 nt, Homo sapiens
  misc_RNA (1)...(19): siRNA sense strand
aaccaggacuucaguggau

SEQ ID NO: 1754793 - RNA, 19 nt, Homo sapiens
  misc_RNA (1)...(19): siRNA sense strand
gugcagauucuucgggauu

SEQ ID NO: 1754794 - RNA, 19 nt, Homo sapiens
  misc_RNA (1)...(19): siRNA sense strand
caaagauccaaaucaguuc

SEQ ID NO: 1754795 - RNA, 19 nt, Homo sapiens
  misc_RNA (1)...(19): siRNA sense strand
gagcuucaggcaaaacuua

SEQ ID NO: 1754796 - RNA, 19 nt, Homo sapiens
  misc_RNA (1)...(19): siRNA sense strand
ggacaaaacacagauauac

SEQ ID NO: 1754797 - RNA, 19 nt, Homo sapiens
  misc_RNA (1)...(19): siRNA sense strand
acagauauacagcagauag

SEQ ID NO: 1754798 - RNA, 19 nt, Homo sapiens
  misc_RNA (1)...(19): siRNA sense strand
auaccacugugacugcauu

SEQ ID NO: 1754799 - RNA, 19 nt, Homo sapiens
  misc_RNA (1)...(19): siRNA sense strand
ggcaaaacuuacagcuuaa

SEQ ID NO: 1754800 - RNA, 19 nt, Homo sapiens
  misc_RNA (1)...(19): siRNA sense strand
cacagacaccucucucaug

SEQ ID NO: 1754801 - RNA, 19 nt, Homo sapiens
  misc_RNA (1)...(19): siRNA sense strand
ucacagacaccucucucau

SEQ ID NO: 1754802 - RNA, 19 nt, Homo sapiens
  misc_RNA (1)...(19): siRNA sense strand
ucaaacgggcugcagagau

SEQ ID NO: 1754803 - RNA, 19 nt, Homo sapiens
  misc_RNA (1)...(19): siRNA sense strand
guaaaucuggaccaaguac

SEQ ID NO: 1754804 - RNA, 19 nt, Homo sapiens
  misc_RNA (1)...(19): siRNA sense strand
gauccaaaucaguucacaa

SEQ ID NO: 1754805 - RNA, 19 nt, Homo sapiens
  misc_RNA (1)...(19): siRNA sense strand
gcagauucuucgggauugg

SEQ ID NO: 1754806 - RNA, 19 nt, Homo sapiens
  misc_RNA (1)...(19): siRNA sense strand
ccaggacuucaguggauuu

SEQ ID NO: 1754807 - RNA, 19 nt, Homo sapiens
  misc_RNA (1)...(19): siRNA sense strand
ggcuguaugagcaccguua

SEQ ID NO: 1754808 - RNA, 19 nt, Homo sapiens
  misc_RNA (1)...(19): siRNA sense strand
ggaccucaaccaggacuuc

SEQ ID NO: 1754809 - RNA, 19 nt, Homo sapiens
  misc_RNA (1)...(19): siRNA sense strand
guaugagcaccguuacaau

SEQ ID NO: 1754810 - RNA, 19 nt, Homo sapiens
  misc_RNA (1)...(19): siRNA sense strand
gaugucccuuucucucucu

SEQ ID NO: 1754811 - RNA, 19 nt, Homo sapiens
  misc_RNA (1)...(19): siRNA sense strand
caguggauuucagcuucua

SEQ ID NO: 1754812 - RNA, 19 nt, Homo sapiens
  misc_RNA (1)...(19): siRNA sense strand
gaaacuacccaaagucgua

SEQ ID NO: 1754813 - RNA, 19 nt, Homo sapiens
  misc_RNA (1)...(19): siRNA sense strand
gagaccaaguguagcaaug

SEQ ID NO: 1754814 - RNA, 19 nt, Homo sapiens
  misc_RNA (1)...(19): siRNA sense strand
ggcagaaacuacccaaagu

SEQ ID NO: 1754815 - RNA, 19 nt, Homo sapiens
  misc_RNA (1)...(19): siRNA sense strand
ggacgugacaggccagugu

SEQ ID NO: 1754816 - RNA, 19 nt, Homo sapiens
  misc_RNA (1)...(19): siRNA sense strand
gcgacgggcaugccuguaa

SEQ ID NO: 1754817 - RNA, 19 nt, Homo sapiens
  misc_RNA (1)...(19): siRNA sense strand
ugaaggcccuguguacugu

SEQ ID NO: 1754818 - RNA, 19 nt, Homo sapiens
  misc_RNA (1)...(19): siRNA sense strand
gagcagcccucaccauccu

SEQ ID NO: 1754819 - RNA, 19 nt, Homo sapiens
  misc_RNA (1)...(19): siRNA sense strand
gcagaaacuacccaaaguc

SEQ ID NO: 1754820 - RNA, 19 nt, Homo sapiens
  misc_RNA (1)...(19): siRNA sense strand
ugacaggccaguguacuug

SEQ ID NO: 1754821 - RNA, 19 nt, Homo sapiens
  misc_RNA (1)...(19): siRNA sense strand
gcagugcgaggacgugaca

SEQ ID NO: 1754822 - RNA, 19 nt, Homo sapiens
  misc_RNA (1)...(19): siRNA sense strand
cagcggacacugcgacuuc

SEQ ID NO: 1754823 - RNA, 19 nt, Homo sapiens
  misc_RNA (1)...(19): siRNA sense strand
gcaaguguacgcgcugcaa

SEQ ID NO: 1754824 - RNA, 19 nt, Homo sapiens
  misc_RNA (1)...(19): siRNA sense strand
ggugcgagaccaaguguag

SEQ ID NO: 1754825 - RNA, 19 nt, Homo sapiens
  misc_RNA (1)...(19): siRNA sense strand
gggccuccuucuccucguu

SEQ ID NO: 1754826 - RNA, 19 nt, Homo sapiens
  misc_RNA (1)...(19): siRNA sense strand
gacgugacaggccagugua

SEQ ID NO: 1754827 - RNA, 19 nt, Homo sapiens
  misc_RNA (1)...(19): siRNA sense strand
ggacgcccagcgacaaauc

SEQ ID NO: 1754828 - RNA, 19 nt, Homo sapiens
  misc_RNA (1)...(19): siRNA sense strand
gcaacuccacgugcucaga

SEQ ID NO: 1754829 - RNA, 19 nt, Homo sapiens
  misc_RNA (1)...(19): siRNA sense strand
caugucaccggcaagugua

SEQ ID NO: 1754830 - RNA, 19 nt, Homo sapiens
  misc_RNA (1)...(19): siRNA sense strand
cgacgggcaugccuguaac

SEQ ID NO: 1754831 - RNA, 19 nt, Homo sapiens
  misc_RNA (1)...(19): siRNA sense strand
ccaugucaccggcaagugu

SEQ ID NO: 1754832 - RNA, 19 nt, Homo sapiens
  misc_RNA (1)...(19): siRNA sense strand
agccuaagguguccuggau

SEQ ID NO: 1754833 - RNA, 19 nt, Homo sapiens
  misc_RNA (1)...(19): siRNA sense strand
gaaacuacccaaagucgua

SEQ ID NO: 1754834 - RNA, 19 nt, Homo sapiens
  misc_RNA (1)...(19): siRNA sense strand
gagaccaaguguagcaaug

SEQ ID NO: 1754835 - RNA, 19 nt, Homo sapiens
  misc_RNA (1)...(19): siRNA sense strand
ggcagaaacuacccaaagu

SEQ ID NO: 1754836 - RNA, 19 nt, Homo sapiens
  misc_RNA (1)...(19): siRNA sense strand
ggacgugacaggccagugu

SEQ ID NO: 1754837 - RNA, 19 nt, Homo sapiens
  misc_RNA (1)...(19): siRNA sense strand
gcgacgggcaugccuguaa

SEQ ID NO: 1754838 - RNA, 19 nt, Homo sapiens
  misc_RNA (1)...(19): siRNA sense strand
ugaaggcccuguguacugu

SEQ ID NO: 1754839 - RNA, 19 nt, Homo sapiens
  misc_RNA (1)...(19): siRNA sense strand
gagcagcccucaccauccu

SEQ ID NO: 1754840 - RNA, 19 nt, Homo sapiens
  misc_RNA (1)...(19): siRNA sense strand
gcagaaacuacccaaaguc

SEQ ID NO: 1754841 - RNA, 19 nt, Homo sapiens
  misc_RNA (1)...(19): siRNA sense strand
ugacaggccaguguacuug

SEQ ID NO: 1754842 - RNA, 19 nt, Homo sapiens
  misc_RNA (1)...(19): siRNA sense strand
gcagugcgaggacgugaca

SEQ ID NO: 1754843 - RNA, 19 nt, Homo sapiens
  misc_RNA (1)...(19): siRNA sense strand
cagcggacacugcgacuuc

SEQ ID NO: 1754844 - RNA, 19 nt, Homo sapiens
  misc_RNA (1)...(19): siRNA sense strand
gcaaguguacgcgcugcaa

SEQ ID NO: 1754845 - RNA, 19 nt, Homo sapiens
  misc_RNA (1)...(19): siRNA sense strand
ggugcgagaccaaguguag

SEQ ID NO: 1754846 - RNA, 19 nt, Homo sapiens
  misc_RNA (1)...(19): siRNA sense strand
gggccuccuucuccucguu

SEQ ID NO: 1754847 - RNA, 19 nt, Homo sapiens
  misc_RNA (1)...(19): siRNA sense strand
gacgugacaggccagugua

SEQ ID NO: 1754848 - RNA, 19 nt, Homo sapiens
  misc_RNA (1)...(19): siRNA sense strand
ggacgcccagcgacaaauc

SEQ ID NO: 1754849 - RNA, 19 nt, Homo sapiens
  misc_RNA (1)...(19): siRNA sense strand
gcaacuccacgugcucaga

SEQ ID NO: 1754850 - RNA, 19 nt, Homo sapiens
  misc_RNA (1)...(19): siRNA sense strand
caugucaccggcaagugua

SEQ ID NO: 1754851 - RNA, 19 nt, Homo sapiens
  misc_RNA (1)...(19): siRNA sense strand
cgacgggcaugccuguaac

SEQ ID NO: 1754852 - RNA, 19 nt, Homo sapiens
  misc_RNA (1)...(19): siRNA sense strand
ccaugucaccggcaagugu

SEQ ID NO: 1754853 - RNA, 19 nt, Homo sapiens
  misc_RNA (1)...(19): siRNA sense strand
agccuaagguguccuggau

SEQ ID NO: 1754854 - RNA, 19 nt, Homo sapiens
  misc_RNA (1)...(19): siRNA sense strand
gaacauauuugguggcuuu

SEQ ID NO: 1754855 - RNA, 19 nt, Homo sapiens
  misc_RNA (1)...(19): siRNA sense strand
gaagcaaacuuuaggagua

SEQ ID NO: 1754856 - RNA, 19 nt, Homo sapiens
  misc_RNA (1)...(19): siRNA sense strand
gcaguacucuggaauauau

SEQ ID NO: 1754857 - RNA, 19 nt, Homo sapiens
  misc_RNA (1)...(19): siRNA sense strand
gcauagaucuugcugugua

SEQ ID NO: 1754858 - RNA, 19 nt, Homo sapiens
  misc_RNA (1)...(19): siRNA sense strand
gaauaugguuggccucuuu

SEQ ID NO: 1754859 - RNA, 19 nt, Homo sapiens
  misc_RNA (1)...(19): siRNA sense strand
ccuauuggcuggauaauuu

SEQ ID NO: 1754860 - RNA, 19 nt, Homo sapiens
  misc_RNA (1)...(19): siRNA sense strand
ugagacagcuguuaaauuc

SEQ ID NO: 1754861 - RNA, 19 nt, Homo sapiens
  misc_RNA (1)...(19): siRNA sense strand
ucaguuaugugguuuauga

SEQ ID NO: 1754862 - RNA, 19 nt, Homo sapiens
  misc_RNA (1)...(19): siRNA sense strand
caugcaggcucaaguguua

SEQ ID NO: 1754863 - RNA, 19 nt, Homo sapiens
  misc_RNA (1)...(19): siRNA sense strand
gagagacuacuucuuauuu

SEQ ID NO: 1754864 - RNA, 19 nt, Homo sapiens
  misc_RNA (1)...(19): siRNA sense strand
ggagguauccgcucgcuuu

SEQ ID NO: 1754865 - RNA, 19 nt, Homo sapiens
  misc_RNA (1)...(19): siRNA sense strand
gaaggaauaccaggacuuu

SEQ ID NO: 1754866 - RNA, 19 nt, Homo sapiens
  misc_RNA (1)...(19): siRNA sense strand
uuacagacauugaggaaau

SEQ ID NO: 1754867 - RNA, 19 nt, Homo sapiens
  misc_RNA (1)...(19): siRNA sense strand
uaaagaccaugagaagaaa

SEQ ID NO: 1754868 - RNA, 19 nt, Homo sapiens
  misc_RNA (1)...(19): siRNA sense strand
guacaaacgucaucaaaau

SEQ ID NO: 1754869 - RNA, 19 nt, Homo sapiens
  misc_RNA (1)...(19): siRNA sense strand
gcuuaacuauuccagauga

SEQ ID NO: 1754870 - RNA, 19 nt, Homo sapiens
  misc_RNA (1)...(19): siRNA sense strand
uguaugagcucuugaaguc

SEQ ID NO: 1754871 - RNA, 19 nt, Homo sapiens
  misc_RNA (1)...(19): siRNA sense strand
caaaggcuauguucccaau

SEQ ID NO: 1754872 - RNA, 19 nt, Homo sapiens
  misc_RNA (1)...(19): siRNA sense strand
cgaauuauuuccaaagaag

SEQ ID NO: 1754873 - RNA, 19 nt, Homo sapiens
  misc_RNA (1)...(19): siRNA sense strand
uuaaagaccaugagaagaa

SEQ ID NO: 1754874 - RNA, 19 nt, Homo sapiens
  misc_RNA (1)...(19): siRNA sense strand
gacgaauuauuuccaaaga

SEQ ID NO: 1754875 - RNA, 19 nt, Homo sapiens
  misc_RNA (1)...(19): siRNA sense strand
gggcaguacucuggaauau

SEQ ID NO: 1754876 - RNA, 19 nt, Homo sapiens
  misc_RNA (1)...(19): siRNA sense strand
cauaugaacaguacaagaa

SEQ ID NO: 1754877 - RNA, 19 nt, Homo sapiens
  misc_RNA (1)...(19): siRNA sense strand
ggagagacuacuucuuauu

SEQ ID NO: 1754878 - RNA, 19 nt, Homo sapiens
  misc_RNA (1)...(19): siRNA sense strand
gaagcuggauuuugaagaa

SEQ ID NO: 1754879 - RNA, 19 nt, Homo sapiens
  misc_RNA (1)...(19): siRNA sense strand
gagcaacugcacagacuuu

SEQ ID NO: 1754880 - RNA, 19 nt, Homo sapiens
  misc_RNA (1)...(19): siRNA sense strand
ccaagaagauuuugaaaca

SEQ ID NO: 1754881 - RNA, 19 nt, Homo sapiens
  misc_RNA (1)...(19): siRNA sense strand
cagaugaauucacggaaga

SEQ ID NO: 1754882 - RNA, 19 nt, Homo sapiens
  misc_RNA (1)...(19): siRNA sense strand
aagcaaacuuuaggaguaa

SEQ ID NO: 1754883 - RNA, 19 nt, Homo sapiens
  misc_RNA (1)...(19): siRNA sense strand
gcacagacuuuuauauauc

SEQ ID NO: 1754884 - RNA, 19 nt, Homo sapiens
  misc_RNA (1)...(19): siRNA sense strand
gguauccgcucgcuuugga

SEQ ID NO: 1754885 - RNA, 19 nt, Homo sapiens
  misc_RNA (1)...(19): siRNA sense strand
aaggcuauguucccaauuu

SEQ ID NO: 1754886 - RNA, 19 nt, Homo sapiens
  misc_RNA (1)...(19): siRNA sense strand
gcucaaguguuagaagguu

SEQ ID NO: 1754887 - RNA, 19 nt, Homo sapiens
  misc_RNA (1)...(19): siRNA sense strand
uguaaacccuggagucaug

SEQ ID NO: 1754888 - RNA, 19 nt, Homo sapiens
  misc_RNA (1)...(19): siRNA sense strand
gacuauuucugaacaacaa

SEQ ID NO: 1754889 - RNA, 19 nt, Homo sapiens
  misc_RNA (1)...(19): siRNA sense strand
uagcuuaacuauuccagau

SEQ ID NO: 1754890 - RNA, 19 nt, Homo sapiens
  misc_RNA (1)...(19): siRNA sense strand
aagcagaguugauucuuca

SEQ ID NO: 1754891 - RNA, 19 nt, Homo sapiens
  misc_RNA (1)...(19): siRNA sense strand
caagcagaguugauucuuc

SEQ ID NO: 1754892 - RNA, 19 nt, Homo sapiens
  misc_RNA (1)...(19): siRNA sense strand
cuggagaugucaacaaaga

SEQ ID NO: 1754893 - RNA, 19 nt, Homo sapiens
  misc_RNA (1)...(19): siRNA sense strand
gcuauguucccaauuuauu

SEQ ID NO: 1754894 - RNA, 19 nt, Homo sapiens
  misc_RNA (1)...(19): siRNA sense strand
ggagaugucaacaaagaug

SEQ ID NO: 1754895 - RNA, 19 nt, Homo sapiens
  misc_RNA (1)...(19): siRNA sense strand
acacugggucugacuauuu

SEQ ID NO: 1754896 - RNA, 19 nt, Homo sapiens
  misc_RNA (1)...(19): siRNA sense strand
uugaggaaauuauccguuu

SEQ ID NO: 1754897 - RNA, 19 nt, Homo sapiens
  misc_RNA (1)...(19): siRNA sense strand
caaaauugcuccugagaca

SEQ ID NO: 1754898 - RNA, 19 nt, Homo sapiens
  misc_RNA (1)...(19): siRNA sense strand
gcugggaugcggugccuua

SEQ ID NO: 1754899 - RNA, 19 nt, Homo sapiens
  misc_RNA (1)...(19): siRNA sense strand
uaggaacauuugagagauu

SEQ ID NO: 1754900 - RNA, 19 nt, Homo sapiens
  misc_RNA (1)...(19): siRNA sense strand
auggagagacuacuucuua

SEQ ID NO: 1754901 - RNA, 19 nt, Homo sapiens
  misc_RNA (1)...(19): siRNA sense strand
ggugcugucucucgaacaa

SEQ ID NO: 1754902 - RNA, 19 nt, Homo sapiens
  misc_RNA (1)...(19): siRNA sense strand
guucccaauuuauuaggua

SEQ ID NO: 1754903 - RNA, 19 nt, Homo sapiens
  misc_RNA (1)...(19): siRNA sense strand
caggcuggcuguaggcaaa

SEQ ID NO: 1754904 - RNA, 19 nt, Homo sapiens
  misc_RNA (1)...(19): siRNA sense strand
uacuggagaugucaacaaa

SEQ ID NO: 1754905 - RNA, 19 nt, Homo sapiens
  misc_RNA (1)...(19): siRNA sense strand
agacagcuguuaaauucug

SEQ ID NO: 1754906 - RNA, 19 nt, Homo sapiens
  misc_RNA (1)...(19): siRNA sense strand
gaacaagcacugccccuuu

SEQ ID NO: 1754907 - RNA, 19 nt, Homo sapiens
  misc_RNA (1)...(19): siRNA sense strand
aggcuauguucccaauuua

SEQ ID NO: 1754908 - RNA, 19 nt, Homo sapiens
  misc_RNA (1)...(19): siRNA sense strand
caugaaggcuugggagcuu

SEQ ID NO: 1754909 - RNA, 19 nt, Homo sapiens
  misc_RNA (1)...(19): siRNA sense strand
gaaguaccuuaaagaccau

SEQ ID NO: 1754910 - RNA, 19 nt, Homo sapiens
  misc_RNA (1)...(19): siRNA sense strand
gaaggugcucccugcugua

SEQ ID NO: 1754911 - RNA, 19 nt, Homo sapiens
  misc_RNA (1)...(19): siRNA sense strand
ugacauaggggauagcuua

SEQ ID NO: 1754912 - RNA, 19 nt, Homo sapiens
  misc_RNA (1)...(19): siRNA sense strand
guuaaauucugggcauaug

SEQ ID NO: 1754913 - RNA, 19 nt, Homo sapiens
  misc_RNA (1)...(19): siRNA sense strand
cuacaggaauugacauagg

SEQ ID NO: 1754914 - RNA, 19 nt, Homo sapiens
  misc_RNA (1)...(19): siRNA sense strand
caucaguuaugugguuuau

SEQ ID NO: 1754915 - RNA, 19 nt, Homo sapiens
  misc_RNA (1)...(19): siRNA sense strand
gcauaugaacaguacaaga

SEQ ID NO: 1754916 - RNA, 19 nt, Homo sapiens
  misc_RNA (1)...(19): siRNA sense strand
uaaauucugggcauaugaa

SEQ ID NO: 1754917 - RNA, 19 nt, Homo sapiens
  misc_RNA (1)...(19): siRNA sense strand
ggaaugaauggagagacua

SEQ ID NO: 1754918 - RNA, 19 nt, Homo sapiens
  misc_RNA (1)...(19): siRNA sense strand
ggaauaccaggacuuuaca

SEQ ID NO: 1754919 - RNA, 19 nt, Homo sapiens
  misc_RNA (1)...(19): siRNA sense strand
guuacuuacugaagaagga

SEQ ID NO: 1754920 - RNA, 19 nt, Homo sapiens
  misc_RNA (1)...(19): siRNA sense strand
aaauugaggcuucagaaau

SEQ ID NO: 1754921 - RNA, 19 nt, Homo sapiens
  misc_RNA (1)...(19): siRNA sense strand
uggaaacauucuacaggaa

SEQ ID NO: 1754922 - RNA, 19 nt, Homo sapiens
  misc_RNA (1)...(19): siRNA sense strand
gaaguccuauuggcuggau

SEQ ID NO: 1754923 - RNA, 19 nt, Homo sapiens
  misc_RNA (1)...(19): siRNA sense strand
gaacaguacaagaaguuac

SEQ ID NO: 1754924 - RNA, 19 nt, Homo sapiens
  misc_RNA (1)...(19): siRNA sense strand
ugaauucacggaagacgaa

SEQ ID NO: 1754925 - RNA, 19 nt, Homo sapiens
  misc_RNA (1)...(19): siRNA sense strand
gggcauaugaacaguacaa

SEQ ID NO: 1754926 - RNA, 19 nt, Homo sapiens
  misc_RNA (1)...(19): siRNA sense strand
aggcaucaguuaugugguu

SEQ ID NO: 1754927 - RNA, 19 nt, Homo sapiens
  misc_RNA (1)...(19): siRNA sense strand
gcuguaggcaucaguuaug

SEQ ID NO: 1754928 - RNA, 19 nt, Homo sapiens
  misc_RNA (1)...(19): siRNA sense strand
aauaggaacauuugagaga

SEQ ID NO: 1754929 - RNA, 19 nt, Homo sapiens
  misc_RNA (1)...(19): siRNA sense strand
gcauuuaagaguuuagaca

SEQ ID NO: 1754930 - RNA, 19 nt, Homo sapiens
  misc_RNA (1)...(19): siRNA sense strand
gacacugggucugacuauu

SEQ ID NO: 1754931 - RNA, 19 nt, Homo sapiens
  misc_RNA (1)...(19): siRNA sense strand
gauugugccaagaagauuu

SEQ ID NO: 1754932 - RNA, 19 nt, Homo sapiens
  misc_RNA (1)...(19): siRNA sense strand
ggaacauuugagagauuua

SEQ ID NO: 1754933 - RNA, 19 nt, Homo sapiens
  misc_RNA (1)...(19): siRNA sense strand
gauguugaugggacaauga

SEQ ID NO: 1754934 - RNA, 19 nt, Homo sapiens
  misc_RNA (1)...(19): siRNA sense strand
ccagcuacccauuggcuuu

SEQ ID NO: 1754935 - RNA, 19 nt, Homo sapiens
  misc_RNA (1)...(19): siRNA sense strand
cauagaucuugcuguguau

SEQ ID NO: 1754936 - RNA, 19 nt, Homo sapiens
  misc_RNA (1)...(19): siRNA sense strand
uggagagacuacuucuuau

SEQ ID NO: 1754937 - RNA, 19 nt, Homo sapiens
  misc_RNA (1)...(19): siRNA sense strand
ccaggacgccgaggagaaa

SEQ ID NO: 1754938 - RNA, 19 nt, Homo sapiens
  misc_RNA (1)...(19): siRNA sense strand
gcaugcaggcucaaguguu

SEQ ID NO: 1754939 - RNA, 19 nt, Homo sapiens
  misc_RNA (1)...(19): siRNA sense strand
cagaaauuguccagucucu

SEQ ID NO: 1754940 - RNA, 19 nt, Homo sapiens
  misc_RNA (1)...(19): siRNA sense strand
uuugguggcuuucgacaga

SEQ ID NO: 1754941 - RNA, 19 nt, Homo sapiens
  misc_RNA (1)...(19): siRNA sense strand
cauauuugguggcuuucga

SEQ ID NO: 1754942 - RNA, 19 nt, Homo sapiens
  misc_RNA (1)...(19): siRNA sense strand
gaugcagguucacgguuca

SEQ ID NO: 1754943 - RNA, 19 nt, Homo sapiens
  misc_RNA (1)...(19): siRNA sense strand
cccauuggcuuuggugaga

SEQ ID NO: 1754944 - RNA, 19 nt, Homo sapiens
  misc_RNA (1)...(19): siRNA sense strand
aggaacauuugagagauuu

SEQ ID NO: 1754945 - RNA, 19 nt, Homo sapiens
  misc_RNA (1)...(19): siRNA sense strand
gaaaugguacaaacgucau

SEQ ID NO: 1754946 - RNA, 19 nt, Homo sapiens
  misc_RNA (1)...(19): siRNA sense strand
acucuggaauauaugauug

SEQ ID NO: 1754947 - RNA, 19 nt, Homo sapiens
  misc_RNA (1)...(19): siRNA sense strand
aagaugggaagcuggauuu

SEQ ID NO: 1754948 - RNA, 19 nt, Homo sapiens
  misc_RNA (1)...(19): siRNA sense strand
aggaguaacccagaaauga

SEQ ID NO: 1754949 - RNA, 19 nt, Homo sapiens
  misc_RNA (1)...(19): siRNA sense strand
ggcaguacucuggaauaua

SEQ ID NO: 1754950 - RNA, 19 nt, Homo sapiens
  misc_RNA (1)...(19): siRNA sense strand
caauggagguuaugaaaac

SEQ ID NO: 1754951 - RNA, 19 nt, Homo sapiens
  misc_RNA (1)...(19): siRNA sense strand
uauaugauugugccaagaa

SEQ ID NO: 1754952 - RNA, 19 nt, Homo sapiens
  misc_RNA (1)...(19): siRNA sense strand
gcaucaguuaugugguuua

SEQ ID NO: 1754953 - RNA, 19 nt, Homo sapiens
  misc_RNA (1)...(19): siRNA sense strand
ggcaucaguuaugugguuu

SEQ ID NO: 1754954 - RNA, 19 nt, Homo sapiens
  misc_RNA (1)...(19): siRNA sense strand
ggaaugaagguuuauauug

SEQ ID NO: 1754955 - RNA, 19 nt, Homo sapiens
  misc_RNA (1)...(19): siRNA sense strand
ggugugaucuccaauguga

SEQ ID NO: 1754956 - RNA, 19 nt, Homo sapiens
  misc_RNA (1)...(19): siRNA sense strand
gggaugaccuccuguacaa

SEQ ID NO: 1754957 - RNA, 19 nt, Homo sapiens
  misc_RNA (1)...(19): siRNA sense strand
cagaagaccugcuccguau

SEQ ID NO: 1754958 - RNA, 19 nt, Homo sapiens
  misc_RNA (1)...(19): siRNA sense strand
gagaugaaguacuuugaga

SEQ ID NO: 1754959 - RNA, 19 nt, Homo sapiens
  misc_RNA (1)...(19): siRNA sense strand
gaucggagcuggggaauuu

SEQ ID NO: 1754960 - RNA, 19 nt, Homo sapiens
  misc_RNA (1)...(19): siRNA sense strand
gauccuaccuacaccaguu

SEQ ID NO: 1754961 - RNA, 19 nt, Homo sapiens
  misc_RNA (1)...(19): siRNA sense strand
ugaaguaccuguccgagau

SEQ ID NO: 1754962 - RNA, 19 nt, Homo sapiens
  misc_RNA (1)...(19): siRNA sense strand
gaagaccugcuccguauug

SEQ ID NO: 1754963 - RNA, 19 nt, Homo sapiens
  misc_RNA (1)...(19): siRNA sense strand
gaaugaaaccucacugauc

SEQ ID NO: 1754964 - RNA, 19 nt, Homo sapiens
  misc_RNA (1)...(19): siRNA sense strand
aagaagauccugagcagua

SEQ ID NO: 1754965 - RNA, 19 nt, Homo sapiens
  misc_RNA (1)...(19): siRNA sense strand
caaaauggguaacaucuga

SEQ ID NO: 1754966 - RNA, 19 nt, Homo sapiens
  misc_RNA (1)...(19): siRNA sense strand
gaggugugaucuccaaugu

SEQ ID NO: 1754967 - RNA, 19 nt, Homo sapiens
  misc_RNA (1)...(19): siRNA sense strand
ggacaucucauccagaaag

SEQ ID NO: 1754968 - RNA, 19 nt, Homo sapiens
  misc_RNA (1)...(19): siRNA sense strand
gcucaacgaugggcaguuc

SEQ ID NO: 1754969 - RNA, 19 nt, Homo sapiens
  misc_RNA (1)...(19): siRNA sense strand
ugaaguacuuugagaagag

SEQ ID NO: 1754970 - RNA, 19 nt, Homo sapiens
  misc_RNA (1)...(19): siRNA sense strand
uguccgagaugaacuaugu

SEQ ID NO: 1754971 - RNA, 19 nt, Homo sapiens
  misc_RNA (1)...(19): siRNA sense strand
gaaccucaggcccaaauuc

SEQ ID NO: 1754972 - RNA, 19 nt, Homo sapiens
  misc_RNA (1)...(19): siRNA sense strand
ccuucaaccucuucuacua

SEQ ID NO: 1754973 - RNA, 19 nt, Homo sapiens
  misc_RNA (1)...(19): siRNA sense strand
gaaaguggacaccauugca

SEQ ID NO: 1754974 - RNA, 19 nt, Homo sapiens
  misc_RNA (1)...(19): siRNA sense strand
gcaccugccacaauaacuu

SEQ ID NO: 1754975 - RNA, 19 nt, Homo sapiens
  misc_RNA (1)...(19): siRNA sense strand
gacaugcggcugcagauga

SEQ ID NO: 1754976 - RNA, 19 nt, Homo sapiens
  misc_RNA (1)...(19): siRNA sense strand
ugugggaggucaugagcua

SEQ ID NO: 1754977 - RNA, 19 nt, Homo sapiens
  misc_RNA (1)...(19): siRNA sense strand
gcaacauccuugucaacag

SEQ ID NO: 1754978 - RNA, 19 nt, Homo sapiens
  misc_RNA (1)...(19): siRNA sense strand
ggcaucgccuccacaguga

SEQ ID NO: 1754979 - RNA, 19 nt, Homo sapiens
  misc_RNA (1)...(19): siRNA sense strand
gaugaccuccuguacaaug

SEQ ID NO: 1754980 - RNA, 19 nt, Homo sapiens
  misc_RNA (1)...(19): siRNA sense strand
gaucuccaaugugaaugaa

SEQ ID NO: 1754981 - RNA, 19 nt, Homo sapiens
  misc_RNA (1)...(19): siRNA sense strand
ugaaucccauccgcacaua

SEQ ID NO: 1754982 - RNA, 19 nt, Homo sapiens
  misc_RNA (1)...(19): siRNA sense strand
cccaaauucucccagauug

SEQ ID NO: 1754983 - RNA, 19 nt, Homo sapiens
  misc_RNA (1)...(19): siRNA sense strand
ucacugaguucauggaaaa

SEQ ID NO: 1754984 - RNA, 19 nt, Homo sapiens
  misc_RNA (1)...(19): siRNA sense strand
gcagcagccucacccuauc

SEQ ID NO: 1754985 - RNA, 19 nt, Homo sapiens
  misc_RNA (1)...(19): siRNA sense strand
ucaauacccuggacaagcu

SEQ ID NO: 1754986 - RNA, 19 nt, Homo sapiens
  misc_RNA (1)...(19): siRNA sense strand
ccaccucgcuggucauugc

SEQ ID NO: 1754987 - RNA, 19 nt, Homo sapiens
  misc_RNA (1)...(19): siRNA sense strand
acuacgagaugaaguacuu

SEQ ID NO: 1754988 - RNA, 19 nt, Homo sapiens
  misc_RNA (1)...(19): siRNA sense strand
gacaagcucauccgcaaug

SEQ ID NO: 1754989 - RNA, 19 nt, Homo sapiens
  misc_RNA (1)...(19): siRNA sense strand
gcccaaauucucccagauu

SEQ ID NO: 1754990 - RNA, 19 nt, Homo sapiens
  misc_RNA (1)...(19): siRNA sense strand
gaugaaguacuuugagaag

SEQ ID NO: 1754991 - RNA, 19 nt, Homo sapiens
  misc_RNA (1)...(19): siRNA sense strand
cauaccagguguguaaugu

SEQ ID NO: 1754992 - RNA, 19 nt, Homo sapiens
  misc_RNA (1)...(19): siRNA sense strand
ggacaugagcaaccaggau

SEQ ID NO: 1754993 - RNA, 19 nt, Homo sapiens
  misc_RNA (1)...(19): siRNA sense strand
cuagugaugucuggagcua

SEQ ID NO: 1754994 - RNA, 19 nt, Homo sapiens
  misc_RNA (1)...(19): siRNA sense strand
acagcaaccuggucugcaa

SEQ ID NO: 1754995 - RNA, 19 nt, Homo sapiens
  misc_RNA (1)...(19): siRNA sense strand
cuccuggaaugaagguuua

SEQ ID NO: 1754996 - RNA, 19 nt, Homo sapiens
  misc_RNA (1)...(19): siRNA sense strand
ggagaaccccuacgugaaa

SEQ ID NO: 1754997 - RNA, 19 nt, Homo sapiens
  misc_RNA (1)...(19): siRNA sense strand
ccacacgcgcuacaccuuu

SEQ ID NO: 1754998 - RNA, 19 nt, Homo sapiens
  misc_RNA (1)...(19): siRNA sense strand
gcuacggaauugucaugug

SEQ ID NO: 1754999 - RNA, 19 nt, Homo sapiens
  misc_RNA (1)...(19): siRNA sense strand
cagcugggcuugucuucgu

SEQ ID NO: 1755000 - RNA, 19 nt, Homo sapiens
  misc_RNA (1)...(19): siRNA sense strand
agaagauccugagcaguau

SEQ ID NO: 1755001 - RNA, 19 nt, Homo sapiens
  misc_RNA (1)...(19): siRNA sense strand
acagugaccagccagauga

SEQ ID NO: 1755002 - RNA, 19 nt, Homo sapiens
  misc_RNA (1)...(19): siRNA sense strand
agguuuauauugacccuuu

SEQ ID NO: 1755003 - RNA, 19 nt, Homo sapiens
  misc_RNA (1)...(19): siRNA sense strand
cacucaagcucuacugcaa

SEQ ID NO: 1755004 - RNA, 19 nt, Homo sapiens
  misc_RNA (1)...(19): siRNA sense strand
acaugcggcugcagaugaa

SEQ ID NO: 1755005 - RNA, 19 nt, Homo sapiens
  misc_RNA (1)...(19): siRNA sense strand
acacaaccuucacgacagu

SEQ ID NO: 1755006 - RNA, 19 nt, Homo sapiens
  misc_RNA (1)...(19): siRNA sense strand
gagcuacggaauugucaug

SEQ ID NO: 1755007 - RNA, 19 nt, Homo sapiens
  misc_RNA (1)...(19): siRNA sense strand
gcucgcaacauccuuguca

SEQ ID NO: 1755008 - RNA, 19 nt, Homo sapiens
  misc_RNA (1)...(19): siRNA sense strand
gaaguaccuguccgagaug

SEQ ID NO: 1755009 - RNA, 19 nt, Homo sapiens
  misc_RNA (1)...(19): siRNA sense strand
ggcagcagccucacccuau

SEQ ID NO: 1755010 - RNA, 19 nt, Homo sapiens
  misc_RNA (1)...(19): siRNA sense strand
aaugucaucugcaagaagu

SEQ ID NO: 1755011 - RNA, 19 nt, Homo sapiens
  misc_RNA (1)...(19): siRNA sense strand
caucugcaccugccacaau

SEQ ID NO: 1755012 - RNA, 19 nt, Homo sapiens
  misc_RNA (1)...(19): siRNA sense strand
caaauucucccagauuguc

SEQ ID NO: 1755013 - RNA, 19 nt, Homo sapiens
  misc_RNA (1)...(19): siRNA sense strand
gcuccuggaaugaagguuu

SEQ ID NO: 1755014 - RNA, 19 nt, Homo sapiens
  misc_RNA (1)...(19): siRNA sense strand
gaugacaacguggaguuug

SEQ ID NO: 1755015 - RNA, 19 nt, Homo sapiens
  misc_RNA (1)...(19): siRNA sense strand
uguacaaugucaucugcaa

SEQ ID NO: 1755016 - RNA, 19 nt, Homo sapiens
  misc_RNA (1)...(19): siRNA sense strand
uggaagagacccucaugga

SEQ ID NO: 1755017 - RNA, 19 nt, Homo sapiens
  misc_RNA (1)...(19): siRNA sense strand
gucuggagcuacggaauug

SEQ ID NO: 1755018 - RNA, 19 nt, Homo sapiens
  misc_RNA (1)...(19): siRNA sense strand
gugccguggucgacugaaa

SEQ ID NO: 1755019 - RNA, 19 nt, Homo sapiens
  misc_RNA (1)...(19): siRNA sense strand
ccuacgaggacccuaauga

SEQ ID NO: 1755020 - RNA, 19 nt, Homo sapiens
  misc_RNA (1)...(19): siRNA sense strand
cagcgacacggcucugauu

SEQ ID NO: 1755021 - RNA, 19 nt, Homo sapiens
  misc_RNA (1)...(19): siRNA sense strand
cacacgcgcuacaccuuug

SEQ ID NO: 1755022 - RNA, 19 nt, Homo sapiens
  misc_RNA (1)...(19): siRNA sense strand
acaaugucaucugcaagaa

SEQ ID NO: 1755023 - RNA, 19 nt, Homo sapiens
  misc_RNA (1)...(19): siRNA sense strand
gaccuccuguacaauguca

SEQ ID NO: 1755024 - RNA, 19 nt, Homo sapiens
  misc_RNA (1)...(19): siRNA sense strand
ugaaugaaaccucacugau

SEQ ID NO: 1755025 - RNA, 19 nt, Homo sapiens
  misc_RNA (1)...(19): siRNA sense strand
ggacaugcggcugcagaug

SEQ ID NO: 1755026 - RNA, 19 nt, Homo sapiens
  misc_RNA (1)...(19): siRNA sense strand
gacaucucauccagaaagu

SEQ ID NO: 1755027 - RNA, 19 nt, Homo sapiens
  misc_RNA (1)...(19): siRNA sense strand
ggacaagcucauccgcaau

SEQ ID NO: 1755028 - RNA, 19 nt, Homo sapiens
  misc_RNA (1)...(19): siRNA sense strand
guaaugugcgcgagucaag

SEQ ID NO: 1755029 - RNA, 19 nt, Homo sapiens
  misc_RNA (1)...(19): siRNA sense strand
aagcgaggccuccaucaug

SEQ ID NO: 1755030 - RNA, 19 nt, Homo sapiens
  misc_RNA (1)...(19): siRNA sense strand
uacaaugucaucugcaaga

SEQ ID NO: 1755031 - RNA, 19 nt, Homo sapiens
  misc_RNA (1)...(19): siRNA sense strand
gcaaccuggucugcaaagu

SEQ ID NO: 1755032 - RNA, 19 nt, Homo sapiens
  misc_RNA (1)...(19): siRNA sense strand
uuccaaggcuggcuucuac

SEQ ID NO: 1755033 - RNA, 19 nt, Homo sapiens
  misc_RNA (1)...(19): siRNA sense strand
caaccuggucugcaaaguc

SEQ ID NO: 1755034 - RNA, 19 nt, Homo sapiens
  misc_RNA (1)...(19): siRNA sense strand
gugaugacaacguggaguu

SEQ ID NO: 1755035 - RNA, 19 nt, Homo sapiens
  misc_RNA (1)...(19): siRNA sense strand
caaggagagcuucgucagu

SEQ ID NO: 1755036 - RNA, 19 nt, Homo sapiens
  misc_RNA (1)...(19): siRNA sense strand
cuacguggagcucaaguuc

SEQ ID NO: 1755037 - RNA, 19 nt, Homo sapiens
  misc_RNA (1)...(19): siRNA sense strand
uggacuacgagaugaagua

SEQ ID NO: 1755038 - RNA, 19 nt, Homo sapiens
  misc_RNA (1)...(19): siRNA sense strand
cacgacaguuggugauugg

SEQ ID NO: 1755039 - RNA, 19 nt, Homo sapiens
  misc_RNA (1)...(19): siRNA sense strand
gcgagucaagccagaacaa

SEQ ID NO: 1755040 - RNA, 19 nt, Homo sapiens
  misc_RNA (1)...(19): siRNA sense strand
ccaaauucucccagauugu

SEQ ID NO: 1755041 - RNA, 19 nt, Homo sapiens
  misc_RNA (1)...(19): siRNA sense strand
cgacccuacugggacauga

SEQ ID NO: 1755042 - RNA, 19 nt, Homo sapiens
  misc_RNA (1)...(19): siRNA sense strand
gcgcagcuuugggccacuu

SEQ ID NO: 1755043 - RNA, 19 nt, Homo sapiens
  misc_RNA (1)...(19): siRNA sense strand
ccagauuacacaaccuuca

SEQ ID NO: 1755044 - RNA, 19 nt, Homo sapiens
  misc_RNA (1)...(19): siRNA sense strand
aaccuggucugcaaagucu

SEQ ID NO: 1755045 - RNA, 19 nt, Homo sapiens
  misc_RNA (1)...(19): siRNA sense strand
gcuacgaugaggccaugaa

SEQ ID NO: 1755046 - RNA, 19 nt, Homo sapiens
  misc_RNA (1)...(19): siRNA sense strand
agaggugaguggcuacgau

SEQ ID NO: 1755047 - RNA, 19 nt, Homo sapiens
  misc_RNA (1)...(19): siRNA sense strand
gaccuucaaccucuucuac

SEQ ID NO: 1755048 - RNA, 19 nt, Homo sapiens
  misc_RNA (1)...(19): siRNA sense strand
cgugaaaguggacaccauu

SEQ ID NO: 1755049 - RNA, 19 nt, Homo sapiens
  misc_RNA (1)...(19): siRNA sense strand
ggcccaaauucucccagau

SEQ ID NO: 1755050 - RNA, 19 nt, Homo sapiens
  misc_RNA (1)...(19): siRNA sense strand
ggaaccucaggcccaaauu

SEQ ID NO: 1755051 - RNA, 19 nt, Homo sapiens
  misc_RNA (1)...(19): siRNA sense strand
gcuggaagagacccucaug

SEQ ID NO: 1755052 - RNA, 19 nt, Homo sapiens
  misc_RNA (1)...(19): siRNA sense strand
ggagcuacaaggcgaagca

SEQ ID NO: 1755053 - RNA, 19 nt, Homo sapiens
  misc_RNA (1)...(19): siRNA sense strand
ggagaccuucaaccucuuc

SEQ ID NO: 1755054 - RNA, 19 nt, Homo sapiens
  misc_RNA (1)...(19): siRNA sense strand
ucacagagcucgcacacaa

SEQ ID NO: 1755055 - RNA, 19 nt, Homo sapiens
  misc_RNA (1)...(19): siRNA sense strand
cuacagccauaagaaauuu

SEQ ID NO: 1755056 - RNA, 19 nt, Homo sapiens
  misc_RNA (1)...(19): siRNA sense strand
gcacagacggguaccugaa

SEQ ID NO: 1755057 - RNA, 19 nt, Homo sapiens
  misc_RNA (1)...(19): siRNA sense strand
ggcgcugugugcccuauua

SEQ ID NO: 1755058 - RNA, 19 nt, Homo sapiens
  misc_RNA (1)...(19): siRNA sense strand
ucaccauccucaucaagaa

SEQ ID NO: 1755059 - RNA, 19 nt, Homo sapiens
  misc_RNA (1)...(19): siRNA sense strand
gauccgcauugacgucauu

SEQ ID NO: 1755060 - RNA, 19 nt, Homo sapiens
  misc_RNA (1)...(19): siRNA sense strand
cugauucccaccauuauua

SEQ ID NO: 1755061 - RNA, 19 nt, Homo sapiens
  misc_RNA (1)...(19): siRNA sense strand
aacaaggucuacagccaua

SEQ ID NO: 1755062 - RNA, 19 nt, Homo sapiens
  misc_RNA (1)...(19): siRNA sense strand
gacuggaucuugcuaacau

SEQ ID NO: 1755063 - RNA, 19 nt, Homo sapiens
  misc_RNA (1)...(19): siRNA sense strand
gccaaauacuacaagauca

SEQ ID NO: 1755064 - RNA, 19 nt, Homo sapiens
  misc_RNA (1)...(19): siRNA sense strand
ggcuacaacuucagguuug

SEQ ID NO: 1755065 - RNA, 19 nt, Homo sapiens
  misc_RNA (1)...(19): siRNA sense strand
ggucuacagccauaagaaa

SEQ ID NO: 1755066 - RNA, 19 nt, Homo sapiens
  misc_RNA (1)...(19): siRNA sense strand
ccacagaccccaaagguuu

SEQ ID NO: 1755067 - RNA, 19 nt, Homo sapiens
  misc_RNA (1)...(19): siRNA sense strand
ucaagaacagcauccacua

SEQ ID NO: 1755068 - RNA, 19 nt, Homo sapiens
  misc_RNA (1)...(19): siRNA sense strand
ccaaauacuacaagaucaa

SEQ ID NO: 1755069 - RNA, 19 nt, Homo sapiens
  misc_RNA (1)...(19): siRNA sense strand
agguuuggcucaacucuga

SEQ ID NO: 1755070 - RNA, 19 nt, Homo sapiens
  misc_RNA (1)...(19): siRNA sense strand
ccaaauuccacuucuccaa

SEQ ID NO: 1755071 - RNA, 19 nt, Homo sapiens
  misc_RNA (1)...(19): siRNA sense strand
uugcuaacauucaugaaca

SEQ ID NO: 1755072 - RNA, 19 nt, Homo sapiens
  misc_RNA (1)...(19): siRNA sense strand
gggccucugucagccaauu

SEQ ID NO: 1755073 - RNA, 19 nt, Homo sapiens
  misc_RNA (1)...(19): siRNA sense strand
ggaucuugcuaacauucau

SEQ ID NO: 1755074 - RNA, 19 nt, Homo sapiens
  misc_RNA (1)...(19): siRNA sense strand
guacgauggccccaaauuu

SEQ ID NO: 1755075 - RNA, 19 nt, Homo sapiens
  misc_RNA (1)...(19): siRNA sense strand
gccauaagaaauuugacaa

SEQ ID NO: 1755076 - RNA, 19 nt, Homo sapiens
  misc_RNA (1)...(19): siRNA sense strand
gccaauuucuggguacgau

SEQ ID NO: 1755077 - RNA, 19 nt, Homo sapiens
  misc_RNA (1)...(19): siRNA sense strand
caagaacagcauccacuac

SEQ ID NO: 1755078 - RNA, 19 nt, Homo sapiens
  misc_RNA (1)...(19): siRNA sense strand
ucuacagccauaagaaauu

SEQ ID NO: 1755079 - RNA, 19 nt, Homo sapiens
  misc_RNA (1)...(19): siRNA sense strand
gcuaacauucaugaacaaa

SEQ ID NO: 1755080 - RNA, 19 nt, Homo sapiens
  misc_RNA (1)...(19): siRNA sense strand
gcgacuggaucuugcuaac

SEQ ID NO: 1755081 - RNA, 19 nt, Homo sapiens
  misc_RNA (1)...(19): siRNA sense strand
ccuacgggauccgcauuga

SEQ ID NO: 1755082 - RNA, 19 nt, Homo sapiens
  misc_RNA (1)...(19): siRNA sense strand
gaagauggggccucuguca

SEQ ID NO: 1755083 - RNA, 19 nt, Homo sapiens
  misc_RNA (1)...(19): siRNA sense strand
ugauucccaccauuauuaa

SEQ ID NO: 1755084 - RNA, 19 nt, Homo sapiens
  misc_RNA (1)...(19): siRNA sense strand
cagccugauucccaccauu

SEQ ID NO: 1755085 - RNA, 19 nt, Homo sapiens
  misc_RNA (1)...(19): siRNA sense strand
agccugauucccaccauua

SEQ ID NO: 1755086 - RNA, 19 nt, Homo sapiens
  misc_RNA (1)...(19): siRNA sense strand
ugacgucauugugcaugga

SEQ ID NO: 1755087 - RNA, 19 nt, Homo sapiens
  misc_RNA (1)...(19): siRNA sense strand
gaucuugcuaacauucaug

SEQ ID NO: 1755088 - RNA, 19 nt, Homo sapiens
  misc_RNA (1)...(19): siRNA sense strand
ucacagagcucgcacacaa

SEQ ID NO: 1755089 - RNA, 19 nt, Homo sapiens
  misc_RNA (1)...(19): siRNA sense strand
cuacagccauaagaaauuu

SEQ ID NO: 1755090 - RNA, 19 nt, Homo sapiens
  misc_RNA (1)...(19): siRNA sense strand
gcacagacggguaccugaa

SEQ ID NO: 1755091 - RNA, 19 nt, Homo sapiens
  misc_RNA (1)...(19): siRNA sense strand
ggcgcugugugcccuauua

SEQ ID NO: 1755092 - RNA, 19 nt, Homo sapiens
  misc_RNA (1)...(19): siRNA sense strand
ucaccauccucaucaagaa

SEQ ID NO: 1755093 - RNA, 19 nt, Homo sapiens
  misc_RNA (1)...(19): siRNA sense strand
gauccgcauugacgucauu

SEQ ID NO: 1755094 - RNA, 19 nt, Homo sapiens
  misc_RNA (1)...(19): siRNA sense strand
cugauucccaccauuauua

SEQ ID NO: 1755095 - RNA, 19 nt, Homo sapiens
  misc_RNA (1)...(19): siRNA sense strand
aacaaggucuacagccaua

SEQ ID NO: 1755096 - RNA, 19 nt, Homo sapiens
  misc_RNA (1)...(19): siRNA sense strand
gacuggaucuugcuaacau

SEQ ID NO: 1755097 - RNA, 19 nt, Homo sapiens
  misc_RNA (1)...(19): siRNA sense strand
gccaaauacuacaagauca

SEQ ID NO: 1755098 - RNA, 19 nt, Homo sapiens
  misc_RNA (1)...(19): siRNA sense strand
ggcuacaacuucagguuug

SEQ ID NO: 1755099 - RNA, 19 nt, Homo sapiens
  misc_RNA (1)...(19): siRNA sense strand
ggucuacagccauaagaaa

SEQ ID NO: 1755100 - RNA, 19 nt, Homo sapiens
  misc_RNA (1)...(19): siRNA sense strand
ccacagaccccaaagguuu

SEQ ID NO: 1755101 - RNA, 19 nt, Homo sapiens
  misc_RNA (1)...(19): siRNA sense strand
ucaagaacagcauccacua

SEQ ID NO: 1755102 - RNA, 19 nt, Homo sapiens
  misc_RNA (1)...(19): siRNA sense strand
ccaaauacuacaagaucaa

SEQ ID NO: 1755103 - RNA, 19 nt, Homo sapiens
  misc_RNA (1)...(19): siRNA sense strand
agguuuggcucaacucuga

SEQ ID NO: 1755104 - RNA, 19 nt, Homo sapiens
  misc_RNA (1)...(19): siRNA sense strand
ccaaauuccacuucuccaa

SEQ ID NO: 1755105 - RNA, 19 nt, Homo sapiens
  misc_RNA (1)...(19): siRNA sense strand
uugcuaacauucaugaaca

SEQ ID NO: 1755106 - RNA, 19 nt, Homo sapiens
  misc_RNA (1)...(19): siRNA sense strand
gggccucugucagccaauu

SEQ ID NO: 1755107 - RNA, 19 nt, Homo sapiens
  misc_RNA (1)...(19): siRNA sense strand
ggaucuugcuaacauucau

SEQ ID NO: 1755108 - RNA, 19 nt, Homo sapiens
  misc_RNA (1)...(19): siRNA sense strand
guacgauggccccaaauuu

SEQ ID NO: 1755109 - RNA, 19 nt, Homo sapiens
  misc_RNA (1)...(19): siRNA sense strand
gccauaagaaauuugacaa

SEQ ID NO: 1755110 - RNA, 19 nt, Homo sapiens
  misc_RNA (1)...(19): siRNA sense strand
gccaauuucuggguacgau

SEQ ID NO: 1755111 - RNA, 19 nt, Homo sapiens
  misc_RNA (1)...(19): siRNA sense strand
caagaacagcauccacuac

SEQ ID NO: 1755112 - RNA, 19 nt, Homo sapiens
  misc_RNA (1)...(19): siRNA sense strand
ucuacagccauaagaaauu

SEQ ID NO: 1755113 - RNA, 19 nt, Homo sapiens
  misc_RNA (1)...(19): siRNA sense strand
gcuaacauucaugaacaaa

SEQ ID NO: 1755114 - RNA, 19 nt, Homo sapiens
  misc_RNA (1)...(19): siRNA sense strand
gcgacuggaucuugcuaac

SEQ ID NO: 1755115 - RNA, 19 nt, Homo sapiens
  misc_RNA (1)...(19): siRNA sense strand
ccuacgggauccgcauuga

SEQ ID NO: 1755116 - RNA, 19 nt, Homo sapiens
  misc_RNA (1)...(19): siRNA sense strand
gaagauggggccucuguca

SEQ ID NO: 1755117 - RNA, 19 nt, Homo sapiens
  misc_RNA (1)...(19): siRNA sense strand
ugauucccaccauuauuaa

SEQ ID NO: 1755118 - RNA, 19 nt, Homo sapiens
  misc_RNA (1)...(19): siRNA sense strand
cagccugauucccaccauu

SEQ ID NO: 1755119 - RNA, 19 nt, Homo sapiens
  misc_RNA (1)...(19): siRNA sense strand
agccugauucccaccauua

SEQ ID NO: 1755120 - RNA, 19 nt, Homo sapiens
  misc_RNA (1)...(19): siRNA sense strand
ugacgucauugugcaugga

SEQ ID NO: 1755121 - RNA, 19 nt, Homo sapiens
  misc_RNA (1)...(19): siRNA sense strand
gaucuugcuaacauucaug

SEQ ID NO: 1755122 - RNA, 19 nt, Homo sapiens
  misc_RNA (1)...(19): siRNA sense strand
ucacagagcucgcacacaa

SEQ ID NO: 1755123 - RNA, 19 nt, Homo sapiens
  misc_RNA (1)...(19): siRNA sense strand
cuacagccauaagaaauuu

SEQ ID NO: 1755124 - RNA, 19 nt, Homo sapiens
  misc_RNA (1)...(19): siRNA sense strand
gcacagacggguaccugaa

SEQ ID NO: 1755125 - RNA, 19 nt, Homo sapiens
  misc_RNA (1)...(19): siRNA sense strand
ggcgcugugugcccuauua

SEQ ID NO: 1755126 - RNA, 19 nt, Homo sapiens
  misc_RNA (1)...(19): siRNA sense strand
ucaccauccucaucaagaa

SEQ ID NO: 1755127 - RNA, 19 nt, Homo sapiens
  misc_RNA (1)...(19): siRNA sense strand
gauccgcauugacgucauu

SEQ ID NO: 1755128 - RNA, 19 nt, Homo sapiens
  misc_RNA (1)...(19): siRNA sense strand
cugauucccaccauuauua

SEQ ID NO: 1755129 - RNA, 19 nt, Homo sapiens
  misc_RNA (1)...(19): siRNA sense strand
aacaaggucuacagccaua

SEQ ID NO: 1755130 - RNA, 19 nt, Homo sapiens
  misc_RNA (1)...(19): siRNA sense strand
gacuggaucuugcuaacau

SEQ ID NO: 1755131 - RNA, 19 nt, Homo sapiens
  misc_RNA (1)...(19): siRNA sense strand
gccaaauacuacaagauca

SEQ ID NO: 1755132 - RNA, 19 nt, Homo sapiens
  misc_RNA (1)...(19): siRNA sense strand
ggcuacaacuucagguuug

SEQ ID NO: 1755133 - RNA, 19 nt, Homo sapiens
  misc_RNA (1)...(19): siRNA sense strand
ggucuacagccauaagaaa

SEQ ID NO: 1755134 - RNA, 19 nt, Homo sapiens
  misc_RNA (1)...(19): siRNA sense strand
ccacagaccccaaagguuu

SEQ ID NO: 1755135 - RNA, 19 nt, Homo sapiens
  misc_RNA (1)...(19): siRNA sense strand
ucaagaacagcauccacua

SEQ ID NO: 1755136 - RNA, 19 nt, Homo sapiens
  misc_RNA (1)...(19): siRNA sense strand
ccaaauacuacaagaucaa

SEQ ID NO: 1755137 - RNA, 19 nt, Homo sapiens
  misc_RNA (1)...(19): siRNA sense strand
agguuuggcucaacucuga

SEQ ID NO: 1755138 - RNA, 19 nt, Homo sapiens
  misc_RNA (1)...(19): siRNA sense strand
ccaaauuccacuucuccaa

SEQ ID NO: 1755139 - RNA, 19 nt, Homo sapiens
  misc_RNA (1)...(19): siRNA sense strand
uugcuaacauucaugaaca

SEQ ID NO: 1755140 - RNA, 19 nt, Homo sapiens
  misc_RNA (1)...(19): siRNA sense strand
gggccucugucagccaauu

SEQ ID NO: 1755141 - RNA, 19 nt, Homo sapiens
  misc_RNA (1)...(19): siRNA sense strand
ggaucuugcuaacauucau

SEQ ID NO: 1755142 - RNA, 19 nt, Homo sapiens
  misc_RNA (1)...(19): siRNA sense strand
guacgauggccccaaauuu

SEQ ID NO: 1755143 - RNA, 19 nt, Homo sapiens
  misc_RNA (1)...(19): siRNA sense strand
gccauaagaaauuugacaa

SEQ ID NO: 1755144 - RNA, 19 nt, Homo sapiens
  misc_RNA (1)...(19): siRNA sense strand
gccaauuucuggguacgau

SEQ ID NO: 1755145 - RNA, 19 nt, Homo sapiens
  misc_RNA (1)...(19): siRNA sense strand
caagaacagcauccacuac

SEQ ID NO: 1755146 - RNA, 19 nt, Homo sapiens
  misc_RNA (1)...(19): siRNA sense strand
ucuacagccauaagaaauu

SEQ ID NO: 1755147 - RNA, 19 nt, Homo sapiens
  misc_RNA (1)...(19): siRNA sense strand
gcuaacauucaugaacaaa

SEQ ID NO: 1755148 - RNA, 19 nt, Homo sapiens
  misc_RNA (1)...(19): siRNA sense strand
gcgacuggaucuugcuaac

SEQ ID NO: 1755149 - RNA, 19 nt, Homo sapiens
  misc_RNA (1)...(19): siRNA sense strand
ccuacgggauccgcauuga

SEQ ID NO: 1755150 - RNA, 19 nt, Homo sapiens
  misc_RNA (1)...(19): siRNA sense strand
gaagauggggccucuguca

SEQ ID NO: 1755151 - RNA, 19 nt, Homo sapiens
  misc_RNA (1)...(19): siRNA sense strand
ugauucccaccauuauuaa

SEQ ID NO: 1755152 - RNA, 19 nt, Homo sapiens
  misc_RNA (1)...(19): siRNA sense strand
cagccugauucccaccauu

SEQ ID NO: 1755153 - RNA, 19 nt, Homo sapiens
  misc_RNA (1)...(19): siRNA sense strand
agccugauucccaccauua

SEQ ID NO: 1755154 - RNA, 19 nt, Homo sapiens
  misc_RNA (1)...(19): siRNA sense strand
ugacgucauugugcaugga

SEQ ID NO: 1755155 - RNA, 19 nt, Homo sapiens
  misc_RNA (1)...(19): siRNA sense strand
gaucuugcuaacauucaug

SEQ ID NO: 1755156 - RNA, 19 nt, Homo sapiens
  misc_RNA (1)...(19): siRNA sense strand
ucacagagcucgcacacaa

SEQ ID NO: 1755157 - RNA, 19 nt, Homo sapiens
  misc_RNA (1)...(19): siRNA sense strand
cuacagccauaagaaauuu

SEQ ID NO: 1755158 - RNA, 19 nt, Homo sapiens
  misc_RNA (1)...(19): siRNA sense strand
gcacagacggguaccugaa

SEQ ID NO: 1755159 - RNA, 19 nt, Homo sapiens
  misc_RNA (1)...(19): siRNA sense strand
ggcgcugugugcccuauua

SEQ ID NO: 1755160 - RNA, 19 nt, Homo sapiens
  misc_RNA (1)...(19): siRNA sense strand
ucaccauccucaucaagaa

SEQ ID NO: 1755161 - RNA, 19 nt, Homo sapiens
  misc_RNA (1)...(19): siRNA sense strand
gauccgcauugacgucauu

SEQ ID NO: 1755162 - RNA, 19 nt, Homo sapiens
  misc_RNA (1)...(19): siRNA sense strand
cugauucccaccauuauua

SEQ ID NO: 1755163 - RNA, 19 nt, Homo sapiens
  misc_RNA (1)...(19): siRNA sense strand
aacaaggucuacagccaua

SEQ ID NO: 1755164 - RNA, 19 nt, Homo sapiens
  misc_RNA (1)...(19): siRNA sense strand
gacuggaucuugcuaacau

SEQ ID NO: 1755165 - RNA, 19 nt, Homo sapiens
  misc_RNA (1)...(19): siRNA sense strand
gccaaauacuacaagauca

SEQ ID NO: 1755166 - RNA, 19 nt, Homo sapiens
  misc_RNA (1)...(19): siRNA sense strand
ggcuacaacuucagguuug

SEQ ID NO: 1755167 - RNA, 19 nt, Homo sapiens
  misc_RNA (1)...(19): siRNA sense strand
ggucuacagccauaagaaa

SEQ ID NO: 1755168 - RNA, 19 nt, Homo sapiens
  misc_RNA (1)...(19): siRNA sense strand
ccacagaccccaaagguuu

SEQ ID NO: 1755169 - RNA, 19 nt, Homo sapiens
  misc_RNA (1)...(19): siRNA sense strand
ucaagaacagcauccacua

SEQ ID NO: 1755170 - RNA, 19 nt, Homo sapiens
  misc_RNA (1)...(19): siRNA sense strand
ccaaauacuacaagaucaa

SEQ ID NO: 1755171 - RNA, 19 nt, Homo sapiens
  misc_RNA (1)...(19): siRNA sense strand
agguuuggcucaacucuga

SEQ ID NO: 1755172 - RNA, 19 nt, Homo sapiens
  misc_RNA (1)...(19): siRNA sense strand
ccaaauuccacuucuccaa

SEQ ID NO: 1755173 - RNA, 19 nt, Homo sapiens
  misc_RNA (1)...(19): siRNA sense strand
uugcuaacauucaugaaca

SEQ ID NO: 1755174 - RNA, 19 nt, Homo sapiens
  misc_RNA (1)...(19): siRNA sense strand
gggccucugucagccaauu

SEQ ID NO: 1755175 - RNA, 19 nt, Homo sapiens
  misc_RNA (1)...(19): siRNA sense strand
ggaucuugcuaacauucau

SEQ ID NO: 1755176 - RNA, 19 nt, Homo sapiens
  misc_RNA (1)...(19): siRNA sense strand
guacgauggccccaaauuu

SEQ ID NO: 1755177 - RNA, 19 nt, Homo sapiens
  misc_RNA (1)...(19): siRNA sense strand
gccauaagaaauuugacaa

SEQ ID NO: 1755178 - RNA, 19 nt, Homo sapiens
  misc_RNA (1)...(19): siRNA sense strand
gccaauuucuggguacgau

SEQ ID NO: 1755179 - RNA, 19 nt, Homo sapiens
  misc_RNA (1)...(19): siRNA sense strand
caagaacagcauccacuac

SEQ ID NO: 1755180 - RNA, 19 nt, Homo sapiens
  misc_RNA (1)...(19): siRNA sense strand
ucuacagccauaagaaauu

SEQ ID NO: 1755181 - RNA, 19 nt, Homo sapiens
  misc_RNA (1)...(19): siRNA sense strand
gcuaacauucaugaacaaa

SEQ ID NO: 1755182 - RNA, 19 nt, Homo sapiens
  misc_RNA (1)...(19): siRNA sense strand
gcgacuggaucuugcuaac

SEQ ID NO: 1755183 - RNA, 19 nt, Homo sapiens
  misc_RNA (1)...(19): siRNA sense strand
ccuacgggauccgcauuga

SEQ ID NO: 1755184 - RNA, 19 nt, Homo sapiens
  misc_RNA (1)...(19): siRNA sense strand
gaagauggggccucuguca

SEQ ID NO: 1755185 - RNA, 19 nt, Homo sapiens
  misc_RNA (1)...(19): siRNA sense strand
ugauucccaccauuauuaa

SEQ ID NO: 1755186 - RNA, 19 nt, Homo sapiens
  misc_RNA (1)...(19): siRNA sense strand
cagccugauucccaccauu

SEQ ID NO: 1755187 - RNA, 19 nt, Homo sapiens
  misc_RNA (1)...(19): siRNA sense strand
agccugauucccaccauua

SEQ ID NO: 1755188 - RNA, 19 nt, Homo sapiens
  misc_RNA (1)...(19): siRNA sense strand
ugacgucauugugcaugga

SEQ ID NO: 1755189 - RNA, 19 nt, Homo sapiens
  misc_RNA (1)...(19): siRNA sense strand
gaucuugcuaacauucaug

SEQ ID NO: 1755190 - RNA, 19 nt, Homo sapiens
  misc_RNA (1)...(19): siRNA sense strand
ucacagagcucgcacacaa

SEQ ID NO: 1755191 - RNA, 19 nt, Homo sapiens
  misc_RNA (1)...(19): siRNA sense strand
cuacagccauaagaaauuu

SEQ ID NO: 1755192 - RNA, 19 nt, Homo sapiens
  misc_RNA (1)...(19): siRNA sense strand
gcacagacggguaccugaa

SEQ ID NO: 1755193 - RNA, 19 nt, Homo sapiens
  misc_RNA (1)...(19): siRNA sense strand
ggcgcugugugcccuauua

SEQ ID NO: 1755194 - RNA, 19 nt, Homo sapiens
  misc_RNA (1)...(19): siRNA sense strand
ucaccauccucaucaagaa

SEQ ID NO: 1755195 - RNA, 19 nt, Homo sapiens
  misc_RNA (1)...(19): siRNA sense strand
gauccgcauugacgucauu

SEQ ID NO: 1755196 - RNA, 19 nt, Homo sapiens
  misc_RNA (1)...(19): siRNA sense strand
cugauucccaccauuauua

SEQ ID NO: 1755197 - RNA, 19 nt, Homo sapiens
  misc_RNA (1)...(19): siRNA sense strand
aacaaggucuacagccaua

SEQ ID NO: 1755198 - RNA, 19 nt, Homo sapiens
  misc_RNA (1)...(19): siRNA sense strand
gacuggaucuugcuaacau

SEQ ID NO: 1755199 - RNA, 19 nt, Homo sapiens
  misc_RNA (1)...(19): siRNA sense strand
gccaaauacuacaagauca

SEQ ID NO: 1755200 - RNA, 19 nt, Homo sapiens
  misc_RNA (1)...(19): siRNA sense strand
ggcuacaacuucagguuug

SEQ ID NO: 1755201 - RNA, 19 nt, Homo sapiens
  misc_RNA (1)...(19): siRNA sense strand
ggucuacagccauaagaaa

SEQ ID NO: 1755202 - RNA, 19 nt, Homo sapiens
  misc_RNA (1)...(19): siRNA sense strand
ccacagaccccaaagguuu

SEQ ID NO: 1755203 - RNA, 19 nt, Homo sapiens
  misc_RNA (1)...(19): siRNA sense strand
ucaagaacagcauccacua

SEQ ID NO: 1755204 - RNA, 19 nt, Homo sapiens
  misc_RNA (1)...(19): siRNA sense strand
ccaaauacuacaagaucaa

SEQ ID NO: 1755205 - RNA, 19 nt, Homo sapiens
  misc_RNA (1)...(19): siRNA sense strand
agguuuggcucaacucuga

SEQ ID NO: 1755206 - RNA, 19 nt, Homo sapiens
  misc_RNA (1)...(19): siRNA sense strand
ccaaauuccacuucuccaa

SEQ ID NO: 1755207 - RNA, 19 nt, Homo sapiens
  misc_RNA (1)...(19): siRNA sense strand
uugcuaacauucaugaaca

SEQ ID NO: 1755208 - RNA, 19 nt, Homo sapiens
  misc_RNA (1)...(19): siRNA sense strand
gggccucugucagccaauu

SEQ ID NO: 1755209 - RNA, 19 nt, Homo sapiens
  misc_RNA (1)...(19): siRNA sense strand
ggaucuugcuaacauucau

SEQ ID NO: 1755210 - RNA, 19 nt, Homo sapiens
  misc_RNA (1)...(19): siRNA sense strand
guacgauggccccaaauuu

SEQ ID NO: 1755211 - RNA, 19 nt, Homo sapiens
  misc_RNA (1)...(19): siRNA sense strand
gccauaagaaauuugacaa

SEQ ID NO: 1755212 - RNA, 19 nt, Homo sapiens
  misc_RNA (1)...(19): siRNA sense strand
gccaauuucuggguacgau

SEQ ID NO: 1755213 - RNA, 19 nt, Homo sapiens
  misc_RNA (1)...(19): siRNA sense strand
caagaacagcauccacuac

SEQ ID NO: 1755214 - RNA, 19 nt, Homo sapiens
  misc_RNA (1)...(19): siRNA sense strand
ucuacagccauaagaaauu

SEQ ID NO: 1755215 - RNA, 19 nt, Homo sapiens
  misc_RNA (1)...(19): siRNA sense strand
gcuaacauucaugaacaaa

SEQ ID NO: 1755216 - RNA, 19 nt, Homo sapiens
  misc_RNA (1)...(19): siRNA sense strand
gcgacuggaucuugcuaac

SEQ ID NO: 1755217 - RNA, 19 nt, Homo sapiens
  misc_RNA (1)...(19): siRNA sense strand
ccuacgggauccgcauuga

SEQ ID NO: 1755218 - RNA, 19 nt, Homo sapiens
  misc_RNA (1)...(19): siRNA sense strand
gaagauggggccucuguca

SEQ ID NO: 1755219 - RNA, 19 nt, Homo sapiens
  misc_RNA (1)...(19): siRNA sense strand
ugauucccaccauuauuaa

SEQ ID NO: 1755220 - RNA, 19 nt, Homo sapiens
  misc_RNA (1)...(19): siRNA sense strand
cagccugauucccaccauu

SEQ ID NO: 1755221 - RNA, 19 nt, Homo sapiens
  misc_RNA (1)...(19): siRNA sense strand
agccugauucccaccauua

SEQ ID NO: 1755222 - RNA, 19 nt, Homo sapiens
  misc_RNA (1)...(19): siRNA sense strand
ugacgucauugugcaugga

SEQ ID NO: 1755223 - RNA, 19 nt, Homo sapiens
  misc_RNA (1)...(19): siRNA sense strand
gaucuugcuaacauucaug

SEQ ID NO: 1755224 - RNA, 19 nt, Homo sapiens
  misc_RNA (1)...(19): siRNA sense strand
ucacagagcucgcacacaa

SEQ ID NO: 1755225 - RNA, 19 nt, Homo sapiens
  misc_RNA (1)...(19): siRNA sense strand
cuacagccauaagaaauuu

SEQ ID NO: 1755226 - RNA, 19 nt, Homo sapiens
  misc_RNA (1)...(19): siRNA sense strand
gcacagacggguaccugaa

SEQ ID NO: 1755227 - RNA, 19 nt, Homo sapiens
  misc_RNA (1)...(19): siRNA sense strand
ggcgcugugugcccuauua

SEQ ID NO: 1755228 - RNA, 19 nt, Homo sapiens
  misc_RNA (1)...(19): siRNA sense strand
ucaccauccucaucaagaa

SEQ ID NO: 1755229 - RNA, 19 nt, Homo sapiens
  misc_RNA (1)...(19): siRNA sense strand
gauccgcauugacgucauu

SEQ ID NO: 1755230 - RNA, 19 nt, Homo sapiens
  misc_RNA (1)...(19): siRNA sense strand
cugauucccaccauuauua

SEQ ID NO: 1755231 - RNA, 19 nt, Homo sapiens
  misc_RNA (1)...(19): siRNA sense strand
aacaaggucuacagccaua

SEQ ID NO: 1755232 - RNA, 19 nt, Homo sapiens
  misc_RNA (1)...(19): siRNA sense strand
gacuggaucuugcuaacau

SEQ ID NO: 1755233 - RNA, 19 nt, Homo sapiens
  misc_RNA (1)...(19): siRNA sense strand
gccaaauacuacaagauca

SEQ ID NO: 1755234 - RNA, 19 nt, Homo sapiens
  misc_RNA (1)...(19): siRNA sense strand
ggcuacaacuucagguuug

SEQ ID NO: 1755235 - RNA, 19 nt, Homo sapiens
  misc_RNA (1)...(19): siRNA sense strand
ggucuacagccauaagaaa

SEQ ID NO: 1755236 - RNA, 19 nt, Homo sapiens
  misc_RNA (1)...(19): siRNA sense strand
ccacagaccccaaagguuu

SEQ ID NO: 1755237 - RNA, 19 nt, Homo sapiens
  misc_RNA (1)...(19): siRNA sense strand
ucaagaacagcauccacua

SEQ ID NO: 1755238 - RNA, 19 nt, Homo sapiens
  misc_RNA (1)...(19): siRNA sense strand
ccaaauacuacaagaucaa

SEQ ID NO: 1755239 - RNA, 19 nt, Homo sapiens
  misc_RNA (1)...(19): siRNA sense strand
agguuuggcucaacucuga

SEQ ID NO: 1755240 - RNA, 19 nt, Homo sapiens
  misc_RNA (1)...(19): siRNA sense strand
ccaaauuccacuucuccaa

SEQ ID NO: 1755241 - RNA, 19 nt, Homo sapiens
  misc_RNA (1)...(19): siRNA sense strand
uugcuaacauucaugaaca

SEQ ID NO: 1755242 - RNA, 19 nt, Homo sapiens
  misc_RNA (1)...(19): siRNA sense strand
gggccucugucagccaauu

SEQ ID NO: 1755243 - RNA, 19 nt, Homo sapiens
  misc_RNA (1)...(19): siRNA sense strand
ggaucuugcuaacauucau

SEQ ID NO: 1755244 - RNA, 19 nt, Homo sapiens
  misc_RNA (1)...(19): siRNA sense strand
guacgauggccccaaauuu

SEQ ID NO: 1755245 - RNA, 19 nt, Homo sapiens
  misc_RNA (1)...(19): siRNA sense strand
gccauaagaaauuugacaa

SEQ ID NO: 1755246 - RNA, 19 nt, Homo sapiens
  misc_RNA (1)...(19): siRNA sense strand
gccaauuucuggguacgau

SEQ ID NO: 1755247 - RNA, 19 nt, Homo sapiens
  misc_RNA (1)...(19): siRNA sense strand
caagaacagcauccacuac

SEQ ID NO: 1755248 - RNA, 19 nt, Homo sapiens
  misc_RNA (1)...(19): siRNA sense strand
ucuacagccauaagaaauu

SEQ ID NO: 1755249 - RNA, 19 nt, Homo sapiens
  misc_RNA (1)...(19): siRNA sense strand
gcuaacauucaugaacaaa

SEQ ID NO: 1755250 - RNA, 19 nt, Homo sapiens
  misc_RNA (1)...(19): siRNA sense strand
gcgacuggaucuugcuaac

SEQ ID NO: 1755251 - RNA, 19 nt, Homo sapiens
  misc_RNA (1)...(19): siRNA sense strand
ccuacgggauccgcauuga

SEQ ID NO: 1755252 - RNA, 19 nt, Homo sapiens
  misc_RNA (1)...(19): siRNA sense strand
gaagauggggccucuguca

SEQ ID NO: 1755253 - RNA, 19 nt, Homo sapiens
  misc_RNA (1)...(19): siRNA sense strand
ugauucccaccauuauuaa

SEQ ID NO: 1755254 - RNA, 19 nt, Homo sapiens
  misc_RNA (1)...(19): siRNA sense strand
cagccugauucccaccauu

SEQ ID NO: 1755255 - RNA, 19 nt, Homo sapiens
  misc_RNA (1)...(19): siRNA sense strand
agccugauucccaccauua

SEQ ID NO: 1755256 - RNA, 19 nt, Homo sapiens
  misc_RNA (1)...(19): siRNA sense strand
ugacgucauugugcaugga

SEQ ID NO: 1755257 - RNA, 19 nt, Homo sapiens
  misc_RNA (1)...(19): siRNA sense strand
gaucuugcuaacauucaug

SEQ ID NO: 1755258 - RNA, 19 nt, Homo sapiens
  misc_RNA (1)...(19): siRNA sense strand
caaaugagaauagcacugu

SEQ ID NO: 1755259 - RNA, 19 nt, Homo sapiens
  misc_RNA (1)...(19): siRNA sense strand
gcaaauacagaccacuucu

SEQ ID NO: 1755260 - RNA, 19 nt, Homo sapiens
  misc_RNA (1)...(19): siRNA sense strand
gggcaaauacagaccacuu

SEQ ID NO: 1755261 - RNA, 19 nt, Homo sapiens
  misc_RNA (1)...(19): siRNA sense strand
gaagccaucacugcuauca

SEQ ID NO: 1755262 - RNA, 19 nt, Homo sapiens
  misc_RNA (1)...(19): siRNA sense strand
gaccacuucugcaaaugag

SEQ ID NO: 1755263 - RNA, 19 nt, Homo sapiens
  misc_RNA (1)...(19): siRNA sense strand
aaugagaauagcacuguuu

SEQ ID NO: 1755264 - RNA, 19 nt, Homo sapiens
  misc_RNA (1)...(19): siRNA sense strand
agccaucacugcuaucauc

SEQ ID NO: 1755265 - RNA, 19 nt, Homo sapiens
  misc_RNA (1)...(19): siRNA sense strand
aaaugagaauagcacuguu

SEQ ID NO: 1755266 - RNA, 19 nt, Homo sapiens
  misc_RNA (1)...(19): siRNA sense strand
ugcggaagcuucgggagaa

SEQ ID NO: 1755267 - RNA, 19 nt, Homo sapiens
  misc_RNA (1)...(19): siRNA sense strand
ggcaaauacagaccacuuc

SEQ ID NO: 1755268 - RNA, 19 nt, Homo sapiens
  misc_RNA (1)...(19): siRNA sense strand
agaccacuucugcaaauga

SEQ ID NO: 1755269 - RNA, 19 nt, Homo sapiens
  misc_RNA (1)...(19): siRNA sense strand
caaaugagaauagcacugu

SEQ ID NO: 1755270 - RNA, 19 nt, Homo sapiens
  misc_RNA (1)...(19): siRNA sense strand
gcaaauacagaccacuucu

SEQ ID NO: 1755271 - RNA, 19 nt, Homo sapiens
  misc_RNA (1)...(19): siRNA sense strand
gggcaaauacagaccacuu

SEQ ID NO: 1755272 - RNA, 19 nt, Homo sapiens
  misc_RNA (1)...(19): siRNA sense strand
gaagccaucacugcuauca

SEQ ID NO: 1755273 - RNA, 19 nt, Homo sapiens
  misc_RNA (1)...(19): siRNA sense strand
gaccacuucugcaaaugag

SEQ ID NO: 1755274 - RNA, 19 nt, Homo sapiens
  misc_RNA (1)...(19): siRNA sense strand
aaugagaauagcacuguuu

SEQ ID NO: 1755275 - RNA, 19 nt, Homo sapiens
  misc_RNA (1)...(19): siRNA sense strand
agccaucacugcuaucauc

SEQ ID NO: 1755276 - RNA, 19 nt, Homo sapiens
  misc_RNA (1)...(19): siRNA sense strand
aaaugagaauagcacuguu

SEQ ID NO: 1755277 - RNA, 19 nt, Homo sapiens
  misc_RNA (1)...(19): siRNA sense strand
ugcggaagcuucgggagaa

SEQ ID NO: 1755278 - RNA, 19 nt, Homo sapiens
  misc_RNA (1)...(19): siRNA sense strand
ggcaaauacagaccacuuc

SEQ ID NO: 1755279 - RNA, 19 nt, Homo sapiens
  misc_RNA (1)...(19): siRNA sense strand
agaccacuucugcaaauga

SEQ ID NO: 1755280 - RNA, 19 nt, Homo sapiens
  misc_RNA (1)...(19): siRNA sense strand
caaaugagaauagcacugu

SEQ ID NO: 1755281 - RNA, 19 nt, Homo sapiens
  misc_RNA (1)...(19): siRNA sense strand
gcaaauacagaccacuucu

SEQ ID NO: 1755282 - RNA, 19 nt, Homo sapiens
  misc_RNA (1)...(19): siRNA sense strand
gggcaaauacagaccacuu

SEQ ID NO: 1755283 - RNA, 19 nt, Homo sapiens
  misc_RNA (1)...(19): siRNA sense strand
gaagccaucacugcuauca

SEQ ID NO: 1755284 - RNA, 19 nt, Homo sapiens
  misc_RNA (1)...(19): siRNA sense strand
gaccacuucugcaaaugag

SEQ ID NO: 1755285 - RNA, 19 nt, Homo sapiens
  misc_RNA (1)...(19): siRNA sense strand
aaugagaauagcacuguuu

SEQ ID NO: 1755286 - RNA, 19 nt, Homo sapiens
  misc_RNA (1)...(19): siRNA sense strand
agccaucacugcuaucauc

SEQ ID NO: 1755287 - RNA, 19 nt, Homo sapiens
  misc_RNA (1)...(19): siRNA sense strand
aaaugagaauagcacuguu

SEQ ID NO: 1755288 - RNA, 19 nt, Homo sapiens
  misc_RNA (1)...(19): siRNA sense strand
ugcggaagcuucgggagaa

SEQ ID NO: 1755289 - RNA, 19 nt, Homo sapiens
  misc_RNA (1)...(19): siRNA sense strand
ggcaaauacagaccacuuc

SEQ ID NO: 1755290 - RNA, 19 nt, Homo sapiens
  misc_RNA (1)...(19): siRNA sense strand
agaccacuucugcaaauga

SEQ ID NO: 1755291 - RNA, 19 nt, Homo sapiens
  misc_RNA (1)...(19): siRNA sense strand
ggaaucagcuaaugguaaa

SEQ ID NO: 1755292 - RNA, 19 nt, Homo sapiens
  misc_RNA (1)...(19): siRNA sense strand
agaaggagcuuuaggagaa

SEQ ID NO: 1755293 - RNA, 19 nt, Homo sapiens
  misc_RNA (1)...(19): siRNA sense strand
gguagaaccacuuaauaua

SEQ ID NO: 1755294 - RNA, 19 nt, Homo sapiens
  misc_RNA (1)...(19): siRNA sense strand
gaaugucuaucucuggaaa

SEQ ID NO: 1755295 - RNA, 19 nt, Homo sapiens
  misc_RNA (1)...(19): siRNA sense strand
gaacaagagaaacaagaaa

SEQ ID NO: 1755296 - RNA, 19 nt, Homo sapiens
  misc_RNA (1)...(19): siRNA sense strand
aggagaagcugaugucauu

SEQ ID NO: 1755297 - RNA, 19 nt, Homo sapiens
  misc_RNA (1)...(19): siRNA sense strand
gaaagaaaauugacaaguc

SEQ ID NO: 1755298 - RNA, 19 nt, Homo sapiens
  misc_RNA (1)...(19): siRNA sense strand
gcugccaccugaaacauaa

SEQ ID NO: 1755299 - RNA, 19 nt, Homo sapiens
  misc_RNA (1)...(19): siRNA sense strand
ggagcaggcugaacucgau

SEQ ID NO: 1755300 - RNA, 19 nt, Homo sapiens
  misc_RNA (1)...(19): siRNA sense strand
uaacagugaugcucaugau

SEQ ID NO: 1755301 - RNA, 19 nt, Homo sapiens
  misc_RNA (1)...(19): siRNA sense strand
acacagcaguuaaagaaug

SEQ ID NO: 1755302 - RNA, 19 nt, Homo sapiens
  misc_RNA (1)...(19): siRNA sense strand
gcagcgugcucuugaggaa

SEQ ID NO: 1755303 - RNA, 19 nt, Homo sapiens
  misc_RNA (1)...(19): siRNA sense strand
ggaacaagagaaacaagaa

SEQ ID NO: 1755304 - RNA, 19 nt, Homo sapiens
  misc_RNA (1)...(19): siRNA sense strand
gccaauagcaucuguaauc

SEQ ID NO: 1755305 - RNA, 19 nt, Homo sapiens
  misc_RNA (1)...(19): siRNA sense strand
ccaauagcaucuguaauca

SEQ ID NO: 1755306 - RNA, 19 nt, Homo sapiens
  misc_RNA (1)...(19): siRNA sense strand
guagaaccacuuaauauag

SEQ ID NO: 1755307 - RNA, 19 nt, Homo sapiens
  misc_RNA (1)...(19): siRNA sense strand
gaauuuggacuaguagaaa

SEQ ID NO: 1755308 - RNA, 19 nt, Homo sapiens
  misc_RNA (1)...(19): siRNA sense strand
uagcaucuguaaucauuga

SEQ ID NO: 1755309 - RNA, 19 nt, Homo sapiens
  misc_RNA (1)...(19): siRNA sense strand
agacuuugaugccuuaaau

SEQ ID NO: 1755310 - RNA, 19 nt, Homo sapiens
  misc_RNA (1)...(19): siRNA sense strand
gagaagcugaugucauuga

SEQ ID NO: 1755311 - RNA, 19 nt, Homo sapiens
  misc_RNA (1)...(19): siRNA sense strand
gaaacaagaaagagcugaa

SEQ ID NO: 1755312 - RNA, 19 nt, Homo sapiens
  misc_RNA (1)...(19): siRNA sense strand
ggguagaaccacuuaauau

SEQ ID NO: 1755313 - RNA, 19 nt, Homo sapiens
  misc_RNA (1)...(19): siRNA sense strand
aagagacuuugaugccuua

SEQ ID NO: 1755314 - RNA, 19 nt, Homo sapiens
  misc_RNA (1)...(19): siRNA sense strand
agacagaccggccaucauu

SEQ ID NO: 1755315 - RNA, 19 nt, Homo sapiens
  misc_RNA (1)...(19): siRNA sense strand
cacagcaguuaaagaauga

SEQ ID NO: 1755316 - RNA, 19 nt, Homo sapiens
  misc_RNA (1)...(19): siRNA sense strand
ggugaaacacaucauaaug

SEQ ID NO: 1755317 - RNA, 19 nt, Homo sapiens
  misc_RNA (1)...(19): siRNA sense strand
caucuguaaucauugagaa

SEQ ID NO: 1755318 - RNA, 19 nt, Homo sapiens
  misc_RNA (1)...(19): siRNA sense strand
ugacugugcuccugagagu

SEQ ID NO: 1755319 - RNA, 19 nt, Homo sapiens
  misc_RNA (1)...(19): siRNA sense strand
gagcaugagcaaauagaga

SEQ ID NO: 1755320 - RNA, 19 nt, Homo sapiens
  misc_RNA (1)...(19): siRNA sense strand
uuuauuggcugcuacaugu

SEQ ID NO: 1755321 - RNA, 19 nt, Homo sapiens
  misc_RNA (1)...(19): siRNA sense strand
gagcugaacgagugcgaaa

SEQ ID NO: 1755322 - RNA, 19 nt, Homo sapiens
  misc_RNA (1)...(19): siRNA sense strand
guuaaagaaugaagaugag

SEQ ID NO: 1755323 - RNA, 19 nt, Homo sapiens
  misc_RNA (1)...(19): siRNA sense strand
gcaguuaaagaaugaagau

SEQ ID NO: 1755324 - RNA, 19 nt, Homo sapiens
  misc_RNA (1)...(19): siRNA sense strand
aauggagcaugagcaaaua

SEQ ID NO: 1755325 - RNA, 19 nt, Homo sapiens
  misc_RNA (1)...(19): siRNA sense strand
gagacacaaggccagguua

SEQ ID NO: 1755326 - RNA, 19 nt, Homo sapiens
  misc_RNA (1)...(19): siRNA sense strand
gaaggagcuuuaggagaag

SEQ ID NO: 1755327 - RNA, 19 nt, Homo sapiens
  misc_RNA (1)...(19): siRNA sense strand
gaccggccaucauuggaau

SEQ ID NO: 1755328 - RNA, 19 nt, Homo sapiens
  misc_RNA (1)...(19): siRNA sense strand
caagugccugugucagaua

SEQ ID NO: 1755329 - RNA, 19 nt, Homo sapiens
  misc_RNA (1)...(19): siRNA sense strand
cggguagaaccacuuaaua

SEQ ID NO: 1755330 - RNA, 19 nt, Homo sapiens
  misc_RNA (1)...(19): siRNA sense strand
aaauggagcaugagcaaau

SEQ ID NO: 1755331 - RNA, 19 nt, Homo sapiens
  misc_RNA (1)...(19): siRNA sense strand
uaaaugaacgcauccaaaa

SEQ ID NO: 1755332 - RNA, 19 nt, Homo sapiens
  misc_RNA (1)...(19): siRNA sense strand
uuaaaugaacgcauccaaa

SEQ ID NO: 1755333 - RNA, 19 nt, Homo sapiens
  misc_RNA (1)...(19): siRNA sense strand
cagccaauagcaucuguaa

SEQ ID NO: 1755334 - RNA, 19 nt, Homo sapiens
  misc_RNA (1)...(19): siRNA sense strand
agaagcugaugucauugaa

SEQ ID NO: 1755335 - RNA, 19 nt, Homo sapiens
  misc_RNA (1)...(19): siRNA sense strand
cagaaccaacgaauccuuu

SEQ ID NO: 1755336 - RNA, 19 nt, Homo sapiens
  misc_RNA (1)...(19): siRNA sense strand
gagcaaauagagacacaag

SEQ ID NO: 1755337 - RNA, 19 nt, Homo sapiens
  misc_RNA (1)...(19): siRNA sense strand
aaggaaaacuugaaagaga

SEQ ID NO: 1755338 - RNA, 19 nt, Homo sapiens
  misc_RNA (1)...(19): siRNA sense strand
uggaaucagcuaaugguaa

SEQ ID NO: 1755339 - RNA, 19 nt, Homo sapiens
  misc_RNA (1)...(19): siRNA sense strand
ugaauuuggacuaguagaa

SEQ ID NO: 1755340 - RNA, 19 nt, Homo sapiens
  misc_RNA (1)...(19): siRNA sense strand
gcugcuacauguuauugca

SEQ ID NO: 1755341 - RNA, 19 nt, Homo sapiens
  misc_RNA (1)...(19): siRNA sense strand
uauuggcugcuacauguua

SEQ ID NO: 1755342 - RNA, 19 nt, Homo sapiens
  misc_RNA (1)...(19): siRNA sense strand
agaaugaagaugagacaga

SEQ ID NO: 1755343 - RNA, 19 nt, Homo sapiens
  misc_RNA (1)...(19): siRNA sense strand
cacaaggccagguuaauca

SEQ ID NO: 1755344 - RNA, 19 nt, Homo sapiens
  misc_RNA (1)...(19): siRNA sense strand
acaagagaaacaagaaaga

SEQ ID NO: 1755345 - RNA, 19 nt, Homo sapiens
  misc_RNA (1)...(19): siRNA sense strand
gaaccacuuaauauagaug

SEQ ID NO: 1755346 - RNA, 19 nt, Homo sapiens
  misc_RNA (1)...(19): siRNA sense strand
agacacaaggccagguuaa

SEQ ID NO: 1755347 - RNA, 19 nt, Homo sapiens
  misc_RNA (1)...(19): siRNA sense strand
acaagugccugugucagau

SEQ ID NO: 1755348 - RNA, 19 nt, Homo sapiens
  misc_RNA (1)...(19): siRNA sense strand
guuggcaaauaaacaagau

SEQ ID NO: 1755349 - RNA, 19 nt, Homo sapiens
  misc_RNA (1)...(19): siRNA sense strand
cagugaugcucaugaugug

SEQ ID NO: 1755350 - RNA, 19 nt, Homo sapiens
  misc_RNA (1)...(19): siRNA sense strand
ggacccagaaccaacgaau

SEQ ID NO: 1755351 - RNA, 19 nt, Homo sapiens
  misc_RNA (1)...(19): siRNA sense strand
gcuacauguuauugcaaga

SEQ ID NO: 1755352 - RNA, 19 nt, Homo sapiens
  misc_RNA (1)...(19): siRNA sense strand
aaauggagaaagacaguga

SEQ ID NO: 1755353 - RNA, 19 nt, Homo sapiens
  misc_RNA (1)...(19): siRNA sense strand
ugaacgagugcgaaaauua

SEQ ID NO: 1755354 - RNA, 19 nt, Homo sapiens
  misc_RNA (1)...(19): siRNA sense strand
uacauguuauugcaagaga

SEQ ID NO: 1755355 - RNA, 19 nt, Homo sapiens
  misc_RNA (1)...(19): siRNA sense strand
caucauuggaaucagcuaa

SEQ ID NO: 1755356 - RNA, 19 nt, Homo sapiens
  misc_RNA (1)...(19): siRNA sense strand
acacaaggccagguuaauc

SEQ ID NO: 1755357 - RNA, 19 nt, Homo sapiens
  misc_RNA (1)...(19): siRNA sense strand
gaagcugaugucauugaau

SEQ ID NO: 1755358 - RNA, 19 nt, Homo sapiens
  misc_RNA (1)...(19): siRNA sense strand
cgaauccuuuccagccaau

SEQ ID NO: 1755359 - RNA, 19 nt, Homo sapiens
  misc_RNA (1)...(19): siRNA sense strand
caagagaaacaagaaagag

SEQ ID NO: 1755360 - RNA, 19 nt, Homo sapiens
  misc_RNA (1)...(19): siRNA sense strand
acagugaugcucaugaugu

SEQ ID NO: 1755361 - RNA, 19 nt, Homo sapiens
  misc_RNA (1)...(19): siRNA sense strand
gagaaugaaggaaaacuug

SEQ ID NO: 1755362 - RNA, 19 nt, Homo sapiens
  misc_RNA (1)...(19): siRNA sense strand
gugccugugucagauagaa

SEQ ID NO: 1755363 - RNA, 19 nt, Homo sapiens
  misc_RNA (1)...(19): siRNA sense strand
gacagaccggccaucauug

SEQ ID NO: 1755364 - RNA, 19 nt, Homo sapiens
  misc_RNA (1)...(19): siRNA sense strand
gagacuuugaugccuuaaa

SEQ ID NO: 1755365 - RNA, 19 nt, Homo sapiens
  misc_RNA (1)...(19): siRNA sense strand
cacagcgaccuaacaguga

SEQ ID NO: 1755366 - RNA, 19 nt, Homo sapiens
  misc_RNA (1)...(19): siRNA sense strand
ucacuagacuuccaaaacu

SEQ ID NO: 1755367 - RNA, 19 nt, Homo sapiens
  misc_RNA (1)...(19): siRNA sense strand
uuugaugccuuaaaugaac

SEQ ID NO: 1755368 - RNA, 19 nt, Homo sapiens
  misc_RNA (1)...(19): siRNA sense strand
caagauaaagaaggagcuu

SEQ ID NO: 1755369 - RNA, 19 nt, Homo sapiens
  misc_RNA (1)...(19): siRNA sense strand
gacacaaggccagguuaau

SEQ ID NO: 1755370 - RNA, 19 nt, Homo sapiens
  misc_RNA (1)...(19): siRNA sense strand
gcaucuguaaucauugaga

SEQ ID NO: 1755371 - RNA, 19 nt, Homo sapiens
  misc_RNA (1)...(19): siRNA sense strand
gaacgagugcgaaaauuac

SEQ ID NO: 1755372 - RNA, 19 nt, Homo sapiens
  misc_RNA (1)...(19): siRNA sense strand
acaagaaagagcugaacga

SEQ ID NO: 1755373 - RNA, 19 nt, Homo sapiens
  misc_RNA (1)...(19): siRNA sense strand
gaacaggagcaggcugaac

SEQ ID NO: 1755374 - RNA, 19 nt, Homo sapiens
  misc_RNA (1)...(19): siRNA sense strand
gaaccaccggguagaacca

SEQ ID NO: 1755375 - RNA, 19 nt, Homo sapiens
  misc_RNA (1)...(19): siRNA sense strand
acuuugaugccuuaaauga

SEQ ID NO: 1755376 - RNA, 19 nt, Homo sapiens
  misc_RNA (1)...(19): siRNA sense strand
aaagaaugaagaugagaca

SEQ ID NO: 1755377 - RNA, 19 nt, Homo sapiens
  misc_RNA (1)...(19): siRNA sense strand
aaggccagguuaaucacaa

SEQ ID NO: 1755378 - RNA, 19 nt, Homo sapiens
  misc_RNA (1)...(19): siRNA sense strand
ggcugccaccugaaacaua

SEQ ID NO: 1755379 - RNA, 19 nt, Homo sapiens
  misc_RNA (1)...(19): siRNA sense strand
gaaugaaggaaaacuugaa

SEQ ID NO: 1755380 - RNA, 19 nt, Homo sapiens
  misc_RNA (1)...(19): siRNA sense strand
ccagaaccaacgaauccuu

SEQ ID NO: 1755381 - RNA, 19 nt, Homo sapiens
  misc_RNA (1)...(19): siRNA sense strand
aacauaaaauggagcauga

SEQ ID NO: 1755382 - RNA, 19 nt, Homo sapiens
  misc_RNA (1)...(19): siRNA sense strand
gaaaauugacaaguccauu

SEQ ID NO: 1755383 - RNA, 19 nt, Homo sapiens
  misc_RNA (1)...(19): siRNA sense strand
caccggguagaaccacuua

SEQ ID NO: 1755384 - RNA, 19 nt, Homo sapiens
  misc_RNA (1)...(19): siRNA sense strand
auaaggaggcauuaacaca

SEQ ID NO: 1755385 - RNA, 19 nt, Homo sapiens
  misc_RNA (1)...(19): siRNA sense strand
ggaaucagcuaaugguaaa

SEQ ID NO: 1755386 - RNA, 19 nt, Homo sapiens
  misc_RNA (1)...(19): siRNA sense strand
agaaggagcuuuaggagaa

SEQ ID NO: 1755387 - RNA, 19 nt, Homo sapiens
  misc_RNA (1)...(19): siRNA sense strand
gguagaaccacuuaauaua

SEQ ID NO: 1755388 - RNA, 19 nt, Homo sapiens
  misc_RNA (1)...(19): siRNA sense strand
gaaugucuaucucuggaaa

SEQ ID NO: 1755389 - RNA, 19 nt, Homo sapiens
  misc_RNA (1)...(19): siRNA sense strand
gaacaagagaaacaagaaa

SEQ ID NO: 1755390 - RNA, 19 nt, Homo sapiens
  misc_RNA (1)...(19): siRNA sense strand
aggagaagcugaugucauu

SEQ ID NO: 1755391 - RNA, 19 nt, Homo sapiens
  misc_RNA (1)...(19): siRNA sense strand
gaaagaaaauugacaaguc

SEQ ID NO: 1755392 - RNA, 19 nt, Homo sapiens
  misc_RNA (1)...(19): siRNA sense strand
gcugccaccugaaacauaa

SEQ ID NO: 1755393 - RNA, 19 nt, Homo sapiens
  misc_RNA (1)...(19): siRNA sense strand
ggagcaggcugaacucgau

SEQ ID NO: 1755394 - RNA, 19 nt, Homo sapiens
  misc_RNA (1)...(19): siRNA sense strand
uaacagugaugcucaugau

SEQ ID NO: 1755395 - RNA, 19 nt, Homo sapiens
  misc_RNA (1)...(19): siRNA sense strand
acacagcaguuaaagaaug

SEQ ID NO: 1755396 - RNA, 19 nt, Homo sapiens
  misc_RNA (1)...(19): siRNA sense strand
gcagcgugcucuugaggaa

SEQ ID NO: 1755397 - RNA, 19 nt, Homo sapiens
  misc_RNA (1)...(19): siRNA sense strand
ggaacaagagaaacaagaa

SEQ ID NO: 1755398 - RNA, 19 nt, Homo sapiens
  misc_RNA (1)...(19): siRNA sense strand
gccaauagcaucuguaauc

SEQ ID NO: 1755399 - RNA, 19 nt, Homo sapiens
  misc_RNA (1)...(19): siRNA sense strand
ccaauagcaucuguaauca

SEQ ID NO: 1755400 - RNA, 19 nt, Homo sapiens
  misc_RNA (1)...(19): siRNA sense strand
guagaaccacuuaauauag

SEQ ID NO: 1755401 - RNA, 19 nt, Homo sapiens
  misc_RNA (1)...(19): siRNA sense strand
gaauuuggacuaguagaaa

SEQ ID NO: 1755402 - RNA, 19 nt, Homo sapiens
  misc_RNA (1)...(19): siRNA sense strand
uagcaucuguaaucauuga

SEQ ID NO: 1755403 - RNA, 19 nt, Homo sapiens
  misc_RNA (1)...(19): siRNA sense strand
agacuuugaugccuuaaau

SEQ ID NO: 1755404 - RNA, 19 nt, Homo sapiens
  misc_RNA (1)...(19): siRNA sense strand
gagaagcugaugucauuga

SEQ ID NO: 1755405 - RNA, 19 nt, Homo sapiens
  misc_RNA (1)...(19): siRNA sense strand
gaaacaagaaagagcugaa

SEQ ID NO: 1755406 - RNA, 19 nt, Homo sapiens
  misc_RNA (1)...(19): siRNA sense strand
ggguagaaccacuuaauau

SEQ ID NO: 1755407 - RNA, 19 nt, Homo sapiens
  misc_RNA (1)...(19): siRNA sense strand
aagagacuuugaugccuua

SEQ ID NO: 1755408 - RNA, 19 nt, Homo sapiens
  misc_RNA (1)...(19): siRNA sense strand
agacagaccggccaucauu

SEQ ID NO: 1755409 - RNA, 19 nt, Homo sapiens
  misc_RNA (1)...(19): siRNA sense strand
cacagcaguuaaagaauga

SEQ ID NO: 1755410 - RNA, 19 nt, Homo sapiens
  misc_RNA (1)...(19): siRNA sense strand
ggugaaacacaucauaaug

SEQ ID NO: 1755411 - RNA, 19 nt, Homo sapiens
  misc_RNA (1)...(19): siRNA sense strand
caucuguaaucauugagaa

SEQ ID NO: 1755412 - RNA, 19 nt, Homo sapiens
  misc_RNA (1)...(19): siRNA sense strand
ugacugugcuccugagagu

SEQ ID NO: 1755413 - RNA, 19 nt, Homo sapiens
  misc_RNA (1)...(19): siRNA sense strand
gagcaugagcaaauagaga

SEQ ID NO: 1755414 - RNA, 19 nt, Homo sapiens
  misc_RNA (1)...(19): siRNA sense strand
uuuauuggcugcuacaugu

SEQ ID NO: 1755415 - RNA, 19 nt, Homo sapiens
  misc_RNA (1)...(19): siRNA sense strand
gagcugaacgagugcgaaa

SEQ ID NO: 1755416 - RNA, 19 nt, Homo sapiens
  misc_RNA (1)...(19): siRNA sense strand
guuaaagaaugaagaugag

SEQ ID NO: 1755417 - RNA, 19 nt, Homo sapiens
  misc_RNA (1)...(19): siRNA sense strand
gcaguuaaagaaugaagau

SEQ ID NO: 1755418 - RNA, 19 nt, Homo sapiens
  misc_RNA (1)...(19): siRNA sense strand
aauggagcaugagcaaaua

SEQ ID NO: 1755419 - RNA, 19 nt, Homo sapiens
  misc_RNA (1)...(19): siRNA sense strand
gagacacaaggccagguua

SEQ ID NO: 1755420 - RNA, 19 nt, Homo sapiens
  misc_RNA (1)...(19): siRNA sense strand
gaaggagcuuuaggagaag

SEQ ID NO: 1755421 - RNA, 19 nt, Homo sapiens
  misc_RNA (1)...(19): siRNA sense strand
gaccggccaucauuggaau

SEQ ID NO: 1755422 - RNA, 19 nt, Homo sapiens
  misc_RNA (1)...(19): siRNA sense strand
caagugccugugucagaua

SEQ ID NO: 1755423 - RNA, 19 nt, Homo sapiens
  misc_RNA (1)...(19): siRNA sense strand
cggguagaaccacuuaaua

SEQ ID NO: 1755424 - RNA, 19 nt, Homo sapiens
  misc_RNA (1)...(19): siRNA sense strand
aaauggagcaugagcaaau

SEQ ID NO: 1755425 - RNA, 19 nt, Homo sapiens
  misc_RNA (1)...(19): siRNA sense strand
uaaaugaacgcauccaaaa

SEQ ID NO: 1755426 - RNA, 19 nt, Homo sapiens
  misc_RNA (1)...(19): siRNA sense strand
uuaaaugaacgcauccaaa

SEQ ID NO: 1755427 - RNA, 19 nt, Homo sapiens
  misc_RNA (1)...(19): siRNA sense strand
cagccaauagcaucuguaa

SEQ ID NO: 1755428 - RNA, 19 nt, Homo sapiens
  misc_RNA (1)...(19): siRNA sense strand
agaagcugaugucauugaa

SEQ ID NO: 1755429 - RNA, 19 nt, Homo sapiens
  misc_RNA (1)...(19): siRNA sense strand
cagaaccaacgaauccuuu

SEQ ID NO: 1755430 - RNA, 19 nt, Homo sapiens
  misc_RNA (1)...(19): siRNA sense strand
gagcaaauagagacacaag

SEQ ID NO: 1755431 - RNA, 19 nt, Homo sapiens
  misc_RNA (1)...(19): siRNA sense strand
aaggaaaacuugaaagaga

SEQ ID NO: 1755432 - RNA, 19 nt, Homo sapiens
  misc_RNA (1)...(19): siRNA sense strand
uggaaucagcuaaugguaa

SEQ ID NO: 1755433 - RNA, 19 nt, Homo sapiens
  misc_RNA (1)...(19): siRNA sense strand
ugaauuuggacuaguagaa

SEQ ID NO: 1755434 - RNA, 19 nt, Homo sapiens
  misc_RNA (1)...(19): siRNA sense strand
gcugcuacauguuauugca

SEQ ID NO: 1755435 - RNA, 19 nt, Homo sapiens
  misc_RNA (1)...(19): siRNA sense strand
uauuggcugcuacauguua

SEQ ID NO: 1755436 - RNA, 19 nt, Homo sapiens
  misc_RNA (1)...(19): siRNA sense strand
agaaugaagaugagacaga

SEQ ID NO: 1755437 - RNA, 19 nt, Homo sapiens
  misc_RNA (1)...(19): siRNA sense strand
cacaaggccagguuaauca

SEQ ID NO: 1755438 - RNA, 19 nt, Homo sapiens
  misc_RNA (1)...(19): siRNA sense strand
acaagagaaacaagaaaga

SEQ ID NO: 1755439 - RNA, 19 nt, Homo sapiens
  misc_RNA (1)...(19): siRNA sense strand
gaaccacuuaauauagaug

SEQ ID NO: 1755440 - RNA, 19 nt, Homo sapiens
  misc_RNA (1)...(19): siRNA sense strand
agacacaaggccagguuaa

SEQ ID NO: 1755441 - RNA, 19 nt, Homo sapiens
  misc_RNA (1)...(19): siRNA sense strand
acaagugccugugucagau

SEQ ID NO: 1755442 - RNA, 19 nt, Homo sapiens
  misc_RNA (1)...(19): siRNA sense strand
guuggcaaauaaacaagau

SEQ ID NO: 1755443 - RNA, 19 nt, Homo sapiens
  misc_RNA (1)...(19): siRNA sense strand
cagugaugcucaugaugug

SEQ ID NO: 1755444 - RNA, 19 nt, Homo sapiens
  misc_RNA (1)...(19): siRNA sense strand
ggacccagaaccaacgaau

SEQ ID NO: 1755445 - RNA, 19 nt, Homo sapiens
  misc_RNA (1)...(19): siRNA sense strand
gcuacauguuauugcaaga

SEQ ID NO: 1755446 - RNA, 19 nt, Homo sapiens
  misc_RNA (1)...(19): siRNA sense strand
aaauggagaaagacaguga

SEQ ID NO: 1755447 - RNA, 19 nt, Homo sapiens
  misc_RNA (1)...(19): siRNA sense strand
ugaacgagugcgaaaauua

SEQ ID NO: 1755448 - RNA, 19 nt, Homo sapiens
  misc_RNA (1)...(19): siRNA sense strand
uacauguuauugcaagaga

SEQ ID NO: 1755449 - RNA, 19 nt, Homo sapiens
  misc_RNA (1)...(19): siRNA sense strand
caucauuggaaucagcuaa

SEQ ID NO: 1755450 - RNA, 19 nt, Homo sapiens
  misc_RNA (1)...(19): siRNA sense strand
acacaaggccagguuaauc

SEQ ID NO: 1755451 - RNA, 19 nt, Homo sapiens
  misc_RNA (1)...(19): siRNA sense strand
gaagcugaugucauugaau

SEQ ID NO: 1755452 - RNA, 19 nt, Homo sapiens
  misc_RNA (1)...(19): siRNA sense strand
cgaauccuuuccagccaau

SEQ ID NO: 1755453 - RNA, 19 nt, Homo sapiens
  misc_RNA (1)...(19): siRNA sense strand
caagagaaacaagaaagag

SEQ ID NO: 1755454 - RNA, 19 nt, Homo sapiens
  misc_RNA (1)...(19): siRNA sense strand
acagugaugcucaugaugu

SEQ ID NO: 1755455 - RNA, 19 nt, Homo sapiens
  misc_RNA (1)...(19): siRNA sense strand
gagaaugaaggaaaacuug

SEQ ID NO: 1755456 - RNA, 19 nt, Homo sapiens
  misc_RNA (1)...(19): siRNA sense strand
gugccugugucagauagaa

SEQ ID NO: 1755457 - RNA, 19 nt, Homo sapiens
  misc_RNA (1)...(19): siRNA sense strand
gacagaccggccaucauug

SEQ ID NO: 1755458 - RNA, 19 nt, Homo sapiens
  misc_RNA (1)...(19): siRNA sense strand
gagacuuugaugccuuaaa

SEQ ID NO: 1755459 - RNA, 19 nt, Homo sapiens
  misc_RNA (1)...(19): siRNA sense strand
cacagcgaccuaacaguga

SEQ ID NO: 1755460 - RNA, 19 nt, Homo sapiens
  misc_RNA (1)...(19): siRNA sense strand
ucacuagacuuccaaaacu

SEQ ID NO: 1755461 - RNA, 19 nt, Homo sapiens
  misc_RNA (1)...(19): siRNA sense strand
uuugaugccuuaaaugaac

SEQ ID NO: 1755462 - RNA, 19 nt, Homo sapiens
  misc_RNA (1)...(19): siRNA sense strand
caagauaaagaaggagcuu

SEQ ID NO: 1755463 - RNA, 19 nt, Homo sapiens
  misc_RNA (1)...(19): siRNA sense strand
gacacaaggccagguuaau

SEQ ID NO: 1755464 - RNA, 19 nt, Homo sapiens
  misc_RNA (1)...(19): siRNA sense strand
gcaucuguaaucauugaga

SEQ ID NO: 1755465 - RNA, 19 nt, Homo sapiens
  misc_RNA (1)...(19): siRNA sense strand
gaacgagugcgaaaauuac

SEQ ID NO: 1755466 - RNA, 19 nt, Homo sapiens
  misc_RNA (1)...(19): siRNA sense strand
acaagaaagagcugaacga

SEQ ID NO: 1755467 - RNA, 19 nt, Homo sapiens
  misc_RNA (1)...(19): siRNA sense strand
gaacaggagcaggcugaac

SEQ ID NO: 1755468 - RNA, 19 nt, Homo sapiens
  misc_RNA (1)...(19): siRNA sense strand
gaaccaccggguagaacca

SEQ ID NO: 1755469 - RNA, 19 nt, Homo sapiens
  misc_RNA (1)...(19): siRNA sense strand
acuuugaugccuuaaauga

SEQ ID NO: 1755470 - RNA, 19 nt, Homo sapiens
  misc_RNA (1)...(19): siRNA sense strand
aaagaaugaagaugagaca

SEQ ID NO: 1755471 - RNA, 19 nt, Homo sapiens
  misc_RNA (1)...(19): siRNA sense strand
aaggccagguuaaucacaa

SEQ ID NO: 1755472 - RNA, 19 nt, Homo sapiens
  misc_RNA (1)...(19): siRNA sense strand
ggcugccaccugaaacaua

SEQ ID NO: 1755473 - RNA, 19 nt, Homo sapiens
  misc_RNA (1)...(19): siRNA sense strand
gaaugaaggaaaacuugaa

SEQ ID NO: 1755474 - RNA, 19 nt, Homo sapiens
  misc_RNA (1)...(19): siRNA sense strand
ccagaaccaacgaauccuu

SEQ ID NO: 1755475 - RNA, 19 nt, Homo sapiens
  misc_RNA (1)...(19): siRNA sense strand
aacauaaaauggagcauga

SEQ ID NO: 1755476 - RNA, 19 nt, Homo sapiens
  misc_RNA (1)...(19): siRNA sense strand
gaaaauugacaaguccauu

SEQ ID NO: 1755477 - RNA, 19 nt, Homo sapiens
  misc_RNA (1)...(19): siRNA sense strand
caccggguagaaccacuua

SEQ ID NO: 1755478 - RNA, 19 nt, Homo sapiens
  misc_RNA (1)...(19): siRNA sense strand
auaaggaggcauuaacaca

SEQ ID NO: 1755479 - RNA, 19 nt, Homo sapiens
  misc_RNA (1)...(19): siRNA sense strand
gaagagugcccacguauaa

SEQ ID NO: 1755480 - RNA, 19 nt, Homo sapiens
  misc_RNA (1)...(19): siRNA sense strand
gcccaggccuuuggugaaa

SEQ ID NO: 1755481 - RNA, 19 nt, Homo sapiens
  misc_RNA (1)...(19): siRNA sense strand
cgaagagugcccacguaua

SEQ ID NO: 1755482 - RNA, 19 nt, Homo sapiens
  misc_RNA (1)...(19): siRNA sense strand
gugaccaccuccaccaaug

SEQ ID NO: 1755483 - RNA, 19 nt, Homo sapiens
  misc_RNA (1)...(19): siRNA sense strand
gcgaagagugcccacguau

SEQ ID NO: 1755484 - RNA, 19 nt, Homo sapiens
  misc_RNA (1)...(19): siRNA sense strand
ugacuguucuucccugcau

SEQ ID NO: 1755485 - RNA, 19 nt, Homo sapiens
  misc_RNA (1)...(19): siRNA sense strand
ggagaugcccaggccuuug

SEQ ID NO: 1755486 - RNA, 19 nt, Homo sapiens
  misc_RNA (1)...(19): siRNA sense strand
ugcgaagagugcccacgua

SEQ ID NO: 1755487 - RNA, 19 nt, Homo sapiens
  misc_RNA (1)...(19): siRNA sense strand
gagaugcccaggccuuugg

SEQ ID NO: 1755488 - RNA, 19 nt, Homo sapiens
  misc_RNA (1)...(19): siRNA sense strand
agaccaccaucgugagcuu

SEQ ID NO: 1755489 - RNA, 19 nt, Homo sapiens
  misc_RNA (1)...(19): siRNA sense strand
gcucucugcgcccuuguug

SEQ ID NO: 1755490 - RNA, 19 nt, Homo sapiens
  misc_RNA (1)...(19): siRNA sense strand
ugaccaccuccaccaauga

SEQ ID NO: 1755491 - RNA, 19 nt, Homo sapiens
  misc_RNA (1)...(19): siRNA sense strand
ucacagagcucgcacacaa

SEQ ID NO: 1755492 - RNA, 19 nt, Homo sapiens
  misc_RNA (1)...(19): siRNA sense strand
cuacagccauaagaaauuu

SEQ ID NO: 1755493 - RNA, 19 nt, Homo sapiens
  misc_RNA (1)...(19): siRNA sense strand
gcacagacggguaccugaa

SEQ ID NO: 1755494 - RNA, 19 nt, Homo sapiens
  misc_RNA (1)...(19): siRNA sense strand
ggcgcugugugcccuauua

SEQ ID NO: 1755495 - RNA, 19 nt, Homo sapiens
  misc_RNA (1)...(19): siRNA sense strand
ucaccauccucaucaagaa

SEQ ID NO: 1755496 - RNA, 19 nt, Homo sapiens
  misc_RNA (1)...(19): siRNA sense strand
gauccgcauugacgucauu

SEQ ID NO: 1755497 - RNA, 19 nt, Homo sapiens
  misc_RNA (1)...(19): siRNA sense strand
cugauucccaccauuauua

SEQ ID NO: 1755498 - RNA, 19 nt, Homo sapiens
  misc_RNA (1)...(19): siRNA sense strand
aacaaggucuacagccaua

SEQ ID NO: 1755499 - RNA, 19 nt, Homo sapiens
  misc_RNA (1)...(19): siRNA sense strand
gacuggaucuugcuaacau

SEQ ID NO: 1755500 - RNA, 19 nt, Homo sapiens
  misc_RNA (1)...(19): siRNA sense strand
gccaaauacuacaagauca

SEQ ID NO: 1755501 - RNA, 19 nt, Homo sapiens
  misc_RNA (1)...(19): siRNA sense strand
ggcuacaacuucagguuug

SEQ ID NO: 1755502 - RNA, 19 nt, Homo sapiens
  misc_RNA (1)...(19): siRNA sense strand
ggucuacagccauaagaaa

SEQ ID NO: 1755503 - RNA, 19 nt, Homo sapiens
  misc_RNA (1)...(19): siRNA sense strand
ccacagaccccaaagguuu

SEQ ID NO: 1755504 - RNA, 19 nt, Homo sapiens
  misc_RNA (1)...(19): siRNA sense strand
ucaagaacagcauccacua

SEQ ID NO: 1755505 - RNA, 19 nt, Homo sapiens
  misc_RNA (1)...(19): siRNA sense strand
ccaaauacuacaagaucaa

SEQ ID NO: 1755506 - RNA, 19 nt, Homo sapiens
  misc_RNA (1)...(19): siRNA sense strand
agguuuggcucaacucuga

SEQ ID NO: 1755507 - RNA, 19 nt, Homo sapiens
  misc_RNA (1)...(19): siRNA sense strand
ccaaauuccacuucuccaa

SEQ ID NO: 1755508 - RNA, 19 nt, Homo sapiens
  misc_RNA (1)...(19): siRNA sense strand
uugcuaacauucaugaaca

SEQ ID NO: 1755509 - RNA, 19 nt, Homo sapiens
  misc_RNA (1)...(19): siRNA sense strand
gggccucugucagccaauu

SEQ ID NO: 1755510 - RNA, 19 nt, Homo sapiens
  misc_RNA (1)...(19): siRNA sense strand
ggaucuugcuaacauucau

SEQ ID NO: 1755511 - RNA, 19 nt, Homo sapiens
  misc_RNA (1)...(19): siRNA sense strand
guacgauggccccaaauuu

SEQ ID NO: 1755512 - RNA, 19 nt, Homo sapiens
  misc_RNA (1)...(19): siRNA sense strand
gccauaagaaauuugacaa

SEQ ID NO: 1755513 - RNA, 19 nt, Homo sapiens
  misc_RNA (1)...(19): siRNA sense strand
gccaauuucuggguacgau

SEQ ID NO: 1755514 - RNA, 19 nt, Homo sapiens
  misc_RNA (1)...(19): siRNA sense strand
caagaacagcauccacuac

SEQ ID NO: 1755515 - RNA, 19 nt, Homo sapiens
  misc_RNA (1)...(19): siRNA sense strand
ucuacagccauaagaaauu

SEQ ID NO: 1755516 - RNA, 19 nt, Homo sapiens
  misc_RNA (1)...(19): siRNA sense strand
gcuaacauucaugaacaaa

SEQ ID NO: 1755517 - RNA, 19 nt, Homo sapiens
  misc_RNA (1)...(19): siRNA sense strand
gcgacuggaucuugcuaac

SEQ ID NO: 1755518 - RNA, 19 nt, Homo sapiens
  misc_RNA (1)...(19): siRNA sense strand
ccuacgggauccgcauuga

SEQ ID NO: 1755519 - RNA, 19 nt, Homo sapiens
  misc_RNA (1)...(19): siRNA sense strand
gaagauggggccucuguca

SEQ ID NO: 1755520 - RNA, 19 nt, Homo sapiens
  misc_RNA (1)...(19): siRNA sense strand
ugauucccaccauuauuaa

SEQ ID NO: 1755521 - RNA, 19 nt, Homo sapiens
  misc_RNA (1)...(19): siRNA sense strand
cagccugauucccaccauu

SEQ ID NO: 1755522 - RNA, 19 nt, Homo sapiens
  misc_RNA (1)...(19): siRNA sense strand
agccugauucccaccauua

SEQ ID NO: 1755523 - RNA, 19 nt, Homo sapiens
  misc_RNA (1)...(19): siRNA sense strand
ugacgucauugugcaugga

SEQ ID NO: 1755524 - RNA, 19 nt, Homo sapiens
  misc_RNA (1)...(19): siRNA sense strand
gaucuugcuaacauucaug

SEQ ID NO: 1755525 - RNA, 19 nt, Homo sapiens
  misc_RNA (1)...(19): siRNA sense strand
ucacagagcucgcacacaa

SEQ ID NO: 1755526 - RNA, 19 nt, Homo sapiens
  misc_RNA (1)...(19): siRNA sense strand
cuacagccauaagaaauuu

SEQ ID NO: 1755527 - RNA, 19 nt, Homo sapiens
  misc_RNA (1)...(19): siRNA sense strand
gcacagacggguaccugaa

SEQ ID NO: 1755528 - RNA, 19 nt, Homo sapiens
  misc_RNA (1)...(19): siRNA sense strand
ggcgcugugugcccuauua

SEQ ID NO: 1755529 - RNA, 19 nt, Homo sapiens
  misc_RNA (1)...(19): siRNA sense strand
ucaccauccucaucaagaa

SEQ ID NO: 1755530 - RNA, 19 nt, Homo sapiens
  misc_RNA (1)...(19): siRNA sense strand
gauccgcauugacgucauu

SEQ ID NO: 1755531 - RNA, 19 nt, Homo sapiens
  misc_RNA (1)...(19): siRNA sense strand
cugauucccaccauuauua

SEQ ID NO: 1755532 - RNA, 19 nt, Homo sapiens
  misc_RNA (1)...(19): siRNA sense strand
aacaaggucuacagccaua

SEQ ID NO: 1755533 - RNA, 19 nt, Homo sapiens
  misc_RNA (1)...(19): siRNA sense strand
gacuggaucuugcuaacau

SEQ ID NO: 1755534 - RNA, 19 nt, Homo sapiens
  misc_RNA (1)...(19): siRNA sense strand
gccaaauacuacaagauca

SEQ ID NO: 1755535 - RNA, 19 nt, Homo sapiens
  misc_RNA (1)...(19): siRNA sense strand
ggcuacaacuucagguuug

SEQ ID NO: 1755536 - RNA, 19 nt, Homo sapiens
  misc_RNA (1)...(19): siRNA sense strand
ggucuacagccauaagaaa

SEQ ID NO: 1755537 - RNA, 19 nt, Homo sapiens
  misc_RNA (1)...(19): siRNA sense strand
ccacagaccccaaagguuu

SEQ ID NO: 1755538 - RNA, 19 nt, Homo sapiens
  misc_RNA (1)...(19): siRNA sense strand
ucaagaacagcauccacua

SEQ ID NO: 1755539 - RNA, 19 nt, Homo sapiens
  misc_RNA (1)...(19): siRNA sense strand
ccaaauacuacaagaucaa

SEQ ID NO: 1755540 - RNA, 19 nt, Homo sapiens
  misc_RNA (1)...(19): siRNA sense strand
agguuuggcucaacucuga

SEQ ID NO: 1755541 - RNA, 19 nt, Homo sapiens
  misc_RNA (1)...(19): siRNA sense strand
ccaaauuccacuucuccaa

SEQ ID NO: 1755542 - RNA, 19 nt, Homo sapiens
  misc_RNA (1)...(19): siRNA sense strand
uugcuaacauucaugaaca

SEQ ID NO: 1755543 - RNA, 19 nt, Homo sapiens
  misc_RNA (1)...(19): siRNA sense strand
gggccucugucagccaauu

SEQ ID NO: 1755544 - RNA, 19 nt, Homo sapiens
  misc_RNA (1)...(19): siRNA sense strand
ggaucuugcuaacauucau

SEQ ID NO: 1755545 - RNA, 19 nt, Homo sapiens
  misc_RNA (1)...(19): siRNA sense strand
guacgauggccccaaauuu

SEQ ID NO: 1755546 - RNA, 19 nt, Homo sapiens
  misc_RNA (1)...(19): siRNA sense strand
gccauaagaaauuugacaa

SEQ ID NO: 1755547 - RNA, 19 nt, Homo sapiens
  misc_RNA (1)...(19): siRNA sense strand
gccaauuucuggguacgau

SEQ ID NO: 1755548 - RNA, 19 nt, Homo sapiens
  misc_RNA (1)...(19): siRNA sense strand
caagaacagcauccacuac

SEQ ID NO: 1755549 - RNA, 19 nt, Homo sapiens
  misc_RNA (1)...(19): siRNA sense strand
ucuacagccauaagaaauu

SEQ ID NO: 1755550 - RNA, 19 nt, Homo sapiens
  misc_RNA (1)...(19): siRNA sense strand
gcuaacauucaugaacaaa

SEQ ID NO: 1755551 - RNA, 19 nt, Homo sapiens
  misc_RNA (1)...(19): siRNA sense strand
gcgacuggaucuugcuaac

SEQ ID NO: 1755552 - RNA, 19 nt, Homo sapiens
  misc_RNA (1)...(19): siRNA sense strand
ccuacgggauccgcauuga

SEQ ID NO: 1755553 - RNA, 19 nt, Homo sapiens
  misc_RNA (1)...(19): siRNA sense strand
gaagauggggccucuguca

SEQ ID NO: 1755554 - RNA, 19 nt, Homo sapiens
  misc_RNA (1)...(19): siRNA sense strand
ugauucccaccauuauuaa

SEQ ID NO: 1755555 - RNA, 19 nt, Homo sapiens
  misc_RNA (1)...(19): siRNA sense strand
cagccugauucccaccauu

SEQ ID NO: 1755556 - RNA, 19 nt, Homo sapiens
  misc_RNA (1)...(19): siRNA sense strand
agccugauucccaccauua

SEQ ID NO: 1755557 - RNA, 19 nt, Homo sapiens
  misc_RNA (1)...(19): siRNA sense strand
ugacgucauugugcaugga

SEQ ID NO: 1755558 - RNA, 19 nt, Homo sapiens
  misc_RNA (1)...(19): siRNA sense strand
gaucuugcuaacauucaug

SEQ ID NO: 1755559 - RNA, 19 nt, Homo sapiens
  misc_RNA (1)...(19): siRNA sense strand
ucacagagcucgcacacaa

SEQ ID NO: 1755560 - RNA, 19 nt, Homo sapiens
  misc_RNA (1)...(19): siRNA sense strand
cuacagccauaagaaauuu

SEQ ID NO: 1755561 - RNA, 19 nt, Homo sapiens
  misc_RNA (1)...(19): siRNA sense strand
gcacagacggguaccugaa

SEQ ID NO: 1755562 - RNA, 19 nt, Homo sapiens
  misc_RNA (1)...(19): siRNA sense strand
ggcgcugugugcccuauua

SEQ ID NO: 1755563 - RNA, 19 nt, Homo sapiens
  misc_RNA (1)...(19): siRNA sense strand
ucaccauccucaucaagaa

SEQ ID NO: 1755564 - RNA, 19 nt, Homo sapiens
  misc_RNA (1)...(19): siRNA sense strand
gauccgcauugacgucauu

SEQ ID NO: 1755565 - RNA, 19 nt, Homo sapiens
  misc_RNA (1)...(19): siRNA sense strand
cugauucccaccauuauua

SEQ ID NO: 1755566 - RNA, 19 nt, Homo sapiens
  misc_RNA (1)...(19): siRNA sense strand
aacaaggucuacagccaua

SEQ ID NO: 1755567 - RNA, 19 nt, Homo sapiens
  misc_RNA (1)...(19): siRNA sense strand
gacuggaucuugcuaacau

SEQ ID NO: 1755568 - RNA, 19 nt, Homo sapiens
  misc_RNA (1)...(19): siRNA sense strand
gccaaauacuacaagauca

SEQ ID NO: 1755569 - RNA, 19 nt, Homo sapiens
  misc_RNA (1)...(19): siRNA sense strand
ggcuacaacuucagguuug

SEQ ID NO: 1755570 - RNA, 19 nt, Homo sapiens
  misc_RNA (1)...(19): siRNA sense strand
ggucuacagccauaagaaa

SEQ ID NO: 1755571 - RNA, 19 nt, Homo sapiens
  misc_RNA (1)...(19): siRNA sense strand
ccacagaccccaaagguuu

SEQ ID NO: 1755572 - RNA, 19 nt, Homo sapiens
  misc_RNA (1)...(19): siRNA sense strand
ucaagaacagcauccacua

SEQ ID NO: 1755573 - RNA, 19 nt, Homo sapiens
  misc_RNA (1)...(19): siRNA sense strand
ccaaauacuacaagaucaa

SEQ ID NO: 1755574 - RNA, 19 nt, Homo sapiens
  misc_RNA (1)...(19): siRNA sense strand
agguuuggcucaacucuga

SEQ ID NO: 1755575 - RNA, 19 nt, Homo sapiens
  misc_RNA (1)...(19): siRNA sense strand
ccaaauuccacuucuccaa

SEQ ID NO: 1755576 - RNA, 19 nt, Homo sapiens
  misc_RNA (1)...(19): siRNA sense strand
uugcuaacauucaugaaca

SEQ ID NO: 1755577 - RNA, 19 nt, Homo sapiens
  misc_RNA (1)...(19): siRNA sense strand
gggccucugucagccaauu

SEQ ID NO: 1755578 - RNA, 19 nt, Homo sapiens
  misc_RNA (1)...(19): siRNA sense strand
ggaucuugcuaacauucau

SEQ ID NO: 1755579 - RNA, 19 nt, Homo sapiens
  misc_RNA (1)...(19): siRNA sense strand
guacgauggccccaaauuu

SEQ ID NO: 1755580 - RNA, 19 nt, Homo sapiens
  misc_RNA (1)...(19): siRNA sense strand
gccauaagaaauuugacaa

SEQ ID NO: 1755581 - RNA, 19 nt, Homo sapiens
  misc_RNA (1)...(19): siRNA sense strand
gccaauuucuggguacgau

SEQ ID NO: 1755582 - RNA, 19 nt, Homo sapiens
  misc_RNA (1)...(19): siRNA sense strand
caagaacagcauccacuac

SEQ ID NO: 1755583 - RNA, 19 nt, Homo sapiens
  misc_RNA (1)...(19): siRNA sense strand
ucuacagccauaagaaauu

SEQ ID NO: 1755584 - RNA, 19 nt, Homo sapiens
  misc_RNA (1)...(19): siRNA sense strand
gcuaacauucaugaacaaa

SEQ ID NO: 1755585 - RNA, 19 nt, Homo sapiens
  misc_RNA (1)...(19): siRNA sense strand
gcgacuggaucuugcuaac

SEQ ID NO: 1755586 - RNA, 19 nt, Homo sapiens
  misc_RNA (1)...(19): siRNA sense strand
ccuacgggauccgcauuga

SEQ ID NO: 1755587 - RNA, 19 nt, Homo sapiens
  misc_RNA (1)...(19): siRNA sense strand
gaagauggggccucuguca

SEQ ID NO: 1755588 - RNA, 19 nt, Homo sapiens
  misc_RNA (1)...(19): siRNA sense strand
ugauucccaccauuauuaa

SEQ ID NO: 1755589 - RNA, 19 nt, Homo sapiens
  misc_RNA (1)...(19): siRNA sense strand
cagccugauucccaccauu

SEQ ID NO: 1755590 - RNA, 19 nt, Homo sapiens
  misc_RNA (1)...(19): siRNA sense strand
agccugauucccaccauua

SEQ ID NO: 1755591 - RNA, 19 nt, Homo sapiens
  misc_RNA (1)...(19): siRNA sense strand
ugacgucauugugcaugga

SEQ ID NO: 1755592 - RNA, 19 nt, Homo sapiens
  misc_RNA (1)...(19): siRNA sense strand
gaucuugcuaacauucaug

SEQ ID NO: 1755593 - RNA, 19 nt, Homo sapiens
  misc_RNA (1)...(19): siRNA sense strand
ucacagagcucgcacacaa

SEQ ID NO: 1755594 - RNA, 19 nt, Homo sapiens
  misc_RNA (1)...(19): siRNA sense strand
cuacagccauaagaaauuu

SEQ ID NO: 1755595 - RNA, 19 nt, Homo sapiens
  misc_RNA (1)...(19): siRNA sense strand
gcacagacggguaccugaa

SEQ ID NO: 1755596 - RNA, 19 nt, Homo sapiens
  misc_RNA (1)...(19): siRNA sense strand
ggcgcugugugcccuauua

SEQ ID NO: 1755597 - RNA, 19 nt, Homo sapiens
  misc_RNA (1)...(19): siRNA sense strand
ucaccauccucaucaagaa

SEQ ID NO: 1755598 - RNA, 19 nt, Homo sapiens
  misc_RNA (1)...(19): siRNA sense strand
gauccgcauugacgucauu

SEQ ID NO: 1755599 - RNA, 19 nt, Homo sapiens
  misc_RNA (1)...(19): siRNA sense strand
cugauucccaccauuauua

SEQ ID NO: 1755600 - RNA, 19 nt, Homo sapiens
  misc_RNA (1)...(19): siRNA sense strand
aacaaggucuacagccaua

SEQ ID NO: 1755601 - RNA, 19 nt, Homo sapiens
  misc_RNA (1)...(19): siRNA sense strand
gacuggaucuugcuaacau

SEQ ID NO: 1755602 - RNA, 19 nt, Homo sapiens
  misc_RNA (1)...(19): siRNA sense strand
gccaaauacuacaagauca

SEQ ID NO: 1755603 - RNA, 19 nt, Homo sapiens
  misc_RNA (1)...(19): siRNA sense strand
ggcuacaacuucagguuug

SEQ ID NO: 1755604 - RNA, 19 nt, Homo sapiens
  misc_RNA (1)...(19): siRNA sense strand
ggucuacagccauaagaaa

SEQ ID NO: 1755605 - RNA, 19 nt, Homo sapiens
  misc_RNA (1)...(19): siRNA sense strand
ccacagaccccaaagguuu

SEQ ID NO: 1755606 - RNA, 19 nt, Homo sapiens
  misc_RNA (1)...(19): siRNA sense strand
ucaagaacagcauccacua

SEQ ID NO: 1755607 - RNA, 19 nt, Homo sapiens
  misc_RNA (1)...(19): siRNA sense strand
ccaaauacuacaagaucaa

SEQ ID NO: 1755608 - RNA, 19 nt, Homo sapiens
  misc_RNA (1)...(19): siRNA sense strand
agguuuggcucaacucuga

SEQ ID NO: 1755609 - RNA, 19 nt, Homo sapiens
  misc_RNA (1)...(19): siRNA sense strand
ccaaauuccacuucuccaa

SEQ ID NO: 1755610 - RNA, 19 nt, Homo sapiens
  misc_RNA (1)...(19): siRNA sense strand
uugcuaacauucaugaaca

SEQ ID NO: 1755611 - RNA, 19 nt, Homo sapiens
  misc_RNA (1)...(19): siRNA sense strand
gggccucugucagccaauu

SEQ ID NO: 1755612 - RNA, 19 nt, Homo sapiens
  misc_RNA (1)...(19): siRNA sense strand
ggaucuugcuaacauucau

SEQ ID NO: 1755613 - RNA, 19 nt, Homo sapiens
  misc_RNA (1)...(19): siRNA sense strand
guacgauggccccaaauuu

SEQ ID NO: 1755614 - RNA, 19 nt, Homo sapiens
  misc_RNA (1)...(19): siRNA sense strand
gccauaagaaauuugacaa

SEQ ID NO: 1755615 - RNA, 19 nt, Homo sapiens
  misc_RNA (1)...(19): siRNA sense strand
gccaauuucuggguacgau

SEQ ID NO: 1755616 - RNA, 19 nt, Homo sapiens
  misc_RNA (1)...(19): siRNA sense strand
caagaacagcauccacuac

SEQ ID NO: 1755617 - RNA, 19 nt, Homo sapiens
  misc_RNA (1)...(19): siRNA sense strand
ucuacagccauaagaaauu

SEQ ID NO: 1755618 - RNA, 19 nt, Homo sapiens
  misc_RNA (1)...(19): siRNA sense strand
gcuaacauucaugaacaaa

SEQ ID NO: 1755619 - RNA, 19 nt, Homo sapiens
  misc_RNA (1)...(19): siRNA sense strand
gcgacuggaucuugcuaac

SEQ ID NO: 1755620 - RNA, 19 nt, Homo sapiens
  misc_RNA (1)...(19): siRNA sense strand
ccuacgggauccgcauuga

SEQ ID NO: 1755621 - RNA, 19 nt, Homo sapiens
  misc_RNA (1)...(19): siRNA sense strand
gaagauggggccucuguca

SEQ ID NO: 1755622 - RNA, 19 nt, Homo sapiens
  misc_RNA (1)...(19): siRNA sense strand
ugauucccaccauuauuaa

SEQ ID NO: 1755623 - RNA, 19 nt, Homo sapiens
  misc_RNA (1)...(19): siRNA sense strand
cagccugauucccaccauu

SEQ ID NO: 1755624 - RNA, 19 nt, Homo sapiens
  misc_RNA (1)...(19): siRNA sense strand
agccugauucccaccauua

SEQ ID NO: 1755625 - RNA, 19 nt, Homo sapiens
  misc_RNA (1)...(19): siRNA sense strand
ugacgucauugugcaugga

SEQ ID NO: 1755626 - RNA, 19 nt, Homo sapiens
  misc_RNA (1)...(19): siRNA sense strand
gaucuugcuaacauucaug

SEQ ID NO: 1755627 - RNA, 19 nt, Homo sapiens
  misc_RNA (1)...(19): siRNA sense strand
ucacagagcucgcacacaa

SEQ ID NO: 1755628 - RNA, 19 nt, Homo sapiens
  misc_RNA (1)...(19): siRNA sense strand
cuacagccauaagaaauuu

SEQ ID NO: 1755629 - RNA, 19 nt, Homo sapiens
  misc_RNA (1)...(19): siRNA sense strand
gcacagacggguaccugaa

SEQ ID NO: 1755630 - RNA, 19 nt, Homo sapiens
  misc_RNA (1)...(19): siRNA sense strand
ggcgcugugugcccuauua

SEQ ID NO: 1755631 - RNA, 19 nt, Homo sapiens
  misc_RNA (1)...(19): siRNA sense strand
ucaccauccucaucaagaa

SEQ ID NO: 1755632 - RNA, 19 nt, Homo sapiens
  misc_RNA (1)...(19): siRNA sense strand
gauccgcauugacgucauu

SEQ ID NO: 1755633 - RNA, 19 nt, Homo sapiens
  misc_RNA (1)...(19): siRNA sense strand
cugauucccaccauuauua

SEQ ID NO: 1755634 - RNA, 19 nt, Homo sapiens
  misc_RNA (1)...(19): siRNA sense strand
aacaaggucuacagccaua

SEQ ID NO: 1755635 - RNA, 19 nt, Homo sapiens
  misc_RNA (1)...(19): siRNA sense strand
gacuggaucuugcuaacau

SEQ ID NO: 1755636 - RNA, 19 nt, Homo sapiens
  misc_RNA (1)...(19): siRNA sense strand
gccaaauacuacaagauca

SEQ ID NO: 1755637 - RNA, 19 nt, Homo sapiens
  misc_RNA (1)...(19): siRNA sense strand
ggcuacaacuucagguuug

SEQ ID NO: 1755638 - RNA, 19 nt, Homo sapiens
  misc_RNA (1)...(19): siRNA sense strand
ggucuacagccauaagaaa

SEQ ID NO: 1755639 - RNA, 19 nt, Homo sapiens
  misc_RNA (1)...(19): siRNA sense strand
ccacagaccccaaagguuu

SEQ ID NO: 1755640 - RNA, 19 nt, Homo sapiens
  misc_RNA (1)...(19): siRNA sense strand
ucaagaacagcauccacua

SEQ ID NO: 1755641 - RNA, 19 nt, Homo sapiens
  misc_RNA (1)...(19): siRNA sense strand
ccaaauacuacaagaucaa

SEQ ID NO: 1755642 - RNA, 19 nt, Homo sapiens
  misc_RNA (1)...(19): siRNA sense strand
agguuuggcucaacucuga

SEQ ID NO: 1755643 - RNA, 19 nt, Homo sapiens
  misc_RNA (1)...(19): siRNA sense strand
ccaaauuccacuucuccaa

SEQ ID NO: 1755644 - RNA, 19 nt, Homo sapiens
  misc_RNA (1)...(19): siRNA sense strand
uugcuaacauucaugaaca

SEQ ID NO: 1755645 - RNA, 19 nt, Homo sapiens
  misc_RNA (1)...(19): siRNA sense strand
gggccucugucagccaauu

SEQ ID NO: 1755646 - RNA, 19 nt, Homo sapiens
  misc_RNA (1)...(19): siRNA sense strand
ggaucuugcuaacauucau

SEQ ID NO: 1755647 - RNA, 19 nt, Homo sapiens
  misc_RNA (1)...(19): siRNA sense strand
guacgauggccccaaauuu

SEQ ID NO: 1755648 - RNA, 19 nt, Homo sapiens
  misc_RNA (1)...(19): siRNA sense strand
gccauaagaaauuugacaa
